United States Patent Application Publication US 2025/0084491 A1 - sequence listing, part 41

SEQ ID NO: 785071 - DNA, 75 bp, synthetic construct
  source 1..75: mol_type = other DNA
atagagatgatgaactcattagaagattcgcagcaagaaaaacatatgacgaaaatagtattagacgatcatttg

SEQ ID NO: 785072 - DNA, 75 bp, synthetic construct
  source 1..75: mol_type = other DNA
ggagatcatttaaaaataggattgattatatattaaaagatgatcacagttttatttgtagcaatatgtcagcag

SEQ ID NO: 785073 - DNA, 75 bp, synthetic construct
  source 1..75: mol_type = other DNA
ggttggcatcgggttacagtctggactttggtctgacgggcggcgtagtgaaaaccggcacctttaaccagttta

SEQ ID NO: 785074 - DNA, 75 bp, synthetic construct
  source 1..75: mol_type = other DNA
gcgcatcagtaaacgctatcaacacctggtgcgtaacaattccgtcttctggttggcatcgggttacagtctgga

SEQ ID NO: 785075 - DNA, 75 bp, synthetic construct
  source 1..75: mol_type = other DNA
gaccagcaacagtgtgttctgggcggaaggtggcgcaaaagttcagcttaacggcagcggcctgaccgtacaggc

SEQ ID NO: 785076 - DNA, 75 bp, synthetic construct
  source 1..75: mol_type = other DNA
aggcaggatcggtagtgctgtaccgtaaatttgaagttggtgaagttattaccgtgcgtccgcgagctaacgcgt

SEQ ID NO: 785077 - DNA, 75 bp, synthetic construct
  source 1..75: mol_type = other DNA
tacaagaggctaccattactgattcacgttacctggatggcttaagcattattgttgaagcgccagaggccggat

SEQ ID NO: 785078 - DNA, 75 bp, synthetic construct
  source 1..75: mol_type = other DNA
ggggctattagcttcgataacctcagcggtgccagcgccagccaacgtaaaggtgacaagcgaattctgtatgct

SEQ ID NO: 785079 - DNA, 75 bp, synthetic construct
  source 1..75: mol_type = other DNA
aacgtccagaatcaaaagtacgcgcggttgagtgctgaagataaaactaaagccgcgtctggaaacggctcaaaa

SEQ ID NO: 785080 - DNA, 75 bp, synthetic construct
  source 1..75: mol_type = other DNA
ttgtggcttatccctggcgtggtgaatacattgcctgttacacaaaaccggatggtgagaaggatgtgtttgtct

SEQ ID NO: 785081 - DNA, 75 bp, synthetic construct
  source 1..75: mol_type = other DNA
ttgtggcttattcctggcgtggtgactatatcggttgttacacaaaaccggatggtaagcaggatgtgtttgtat

SEQ ID NO: 785082 - DNA, 75 bp, synthetic construct
  source 1..75: mol_type = other DNA
actccggggactgcggtacaactgacgctggctccggtgccattgcagaatgccaatattaaacgtcgccggatt

SEQ ID NO: 785083 - DNA, 75 bp, synthetic construct
  source 1..75: mol_type = other DNA
cggtaattgaggatggtaaaggtaatattcttaagccgaatgatagtaatagcttattagaaatgaatcccggct

SEQ ID NO: 785084 - DNA, 75 bp, synthetic construct
  source 1..75: mol_type = other DNA
tcactggtggtggcgacaaagggtgagccttatttgttcagtggggtctcaccgtccacaatttctggttccaga

SEQ ID NO: 785085 - DNA, 75 bp, synthetic construct
  source 1..75: mol_type = other DNA
atgcaggcatgcctgagccgaagaagtatggtggcgatggagggattcgtactctatgctgggacaaacggtctg

SEQ ID NO: 785086 - DNA, 75 bp, synthetic construct
  source 1..75: mol_type = other DNA
atggtactcagtcgtcaggaattactccggcttatgcgtctgactgaagacgtaccagatgtgagacaggaactg

SEQ ID NO: 785087 - DNA, 75 bp, synthetic construct
  source 1..75: mol_type = other DNA
gaacacttatcgtcagctgggatagtaatggagaaaattcagcgataacaccgatcccacctacgatgaaagccg

SEQ ID NO: 785088 - DNA, 75 bp, synthetic construct
  source 1..75: mol_type = other DNA
ccgtcgacgatgacggtatcggatttcatcatgggtccaccggctggtggttccataaaaatgctcaagtgttcg

SEQ ID NO: 785089 - DNA, 75 bp, synthetic construct
  source 1..75: mol_type = other DNA
agggcggtgatgtttctgacgataacccgaatgatgacgaaacccggttttatactgaaacctttgtctcagatt

SEQ ID NO: 785090 - DNA, 75 bp, synthetic construct
  source 1..75: mol_type = other DNA
aacctcgttttcctgtctcagggtgaagtctccgacgccagagcgggtgggcattacagtgctggctgatgatgt

SEQ ID NO: 785091 - DNA, 75 bp, synthetic construct
  source 1..75: mol_type = other DNA
cttaaccgtttgttgtccggtaaaaaactgactggtcgggatgaacaggatatccggcgtctctggcaggaaacg

SEQ ID NO: 785092 - DNA, 75 bp, synthetic construct
  source 1..75: mol_type = other DNA
gatgtgcaggcgggatcggtagtgctgtaccgcaaatttgaggttggtgaagttattaccgtacgtcctcgggcc

SEQ ID NO: 785093 - DNA, 75 bp, synthetic construct
  source 1..75: mol_type = other DNA
ttacgccgcagcaccggtccggctgggaggcgcaaaagtgccgcacctgatgccgggggactcactgaacctgca

SEQ ID NO: 785094 - DNA, 75 bp, synthetic construct
  source 1..75: mol_type = other DNA
ggttttaccggaaaagttattgatcgttatgatgttgctgtggagttacaaaaggctgtaaaaacggacaactgg

SEQ ID NO: 785095 - DNA, 75 bp, synthetic construct
  source 1..75: mol_type = other DNA
aatagatgaaagtgcggtagaactgttaaagcatttggacctaaagataaaaaaatctggtcagtctgtgcttca

SEQ ID NO: 785096 - DNA, 75 bp, synthetic construct
  source 1..75: mol_type = other DNA
acattatcatgcctatctttataaattgcacggttctcttacttggtatcaggatgattgtttaacagttagtga

SEQ ID NO: 785097 - DNA, 75 bp, synthetic construct
  source 1..75: mol_type = other DNA
cttattggttgacaaaactgaatctgaacaagatatagttaatgttgagcttctaattgatgaagtaactaaatt

SEQ ID NO: 785098 - DNA, 75 bp, synthetic construct
  source 1..75: mol_type = other DNA
attaaaccatgatccgcgccacacttttctcataaaactgctcattaatcatcaggagttgatcaaaaaaggggt

SEQ ID NO: 785099 - DNA, 75 bp, synthetic construct
  source 1..75: mol_type = other DNA
atgacccgtaatcgtgctgaacgtcgccatccgatgattcgattaaaaaaactcaccgtcgcgctgatgattgac

SEQ ID NO: 785100 - DNA, 75 bp, synthetic construct
  source 1..75: mol_type = other DNA
tgggctgagcacctatgagaaggaatgcgccaaacggggggaagattatcaggaaatctttgcccagcaggttcg

SEQ ID NO: 785101 - DNA, 75 bp, synthetic construct
  source 1..75: mol_type = other DNA
atgaataatttaattaaatataaccctgataaaatgtctattcatgaacataaaatcgtcagttcgattgaaaac

SEQ ID NO: 785102 - DNA, 75 bp, synthetic construct
  source 1..75: mol_type = other DNA
tcgatactggccatggaaaagttgaactgtccatttttgaagaaggacaacttccccactggcggctacgcactc

SEQ ID NO: 785103 - DNA, 75 bp, synthetic construct
  source 1..75: mol_type = other DNA
caggccgtgatgctgggtgtcgcggcaacattgtcgcacactgcagtcgtatggctgattgcttttggagggatg

SEQ ID NO: 785104 - DNA, 75 bp, synthetic construct
  source 1..75: mol_type = other DNA
taaatttacctctaattgcgacgaatatgagtattttaacactaaaaaaagtattgatgaagttcgaaaagatat

SEQ ID NO: 785105 - DNA, 75 bp, synthetic construct
  source 1..75: mol_type = other DNA
ggtagagactgtgaagagatgctttcagctacggttagagggcaaatctatctgggagattgtcaggactcttaa

SEQ ID NO: 785106 - DNA, 75 bp, synthetic construct
  source 1..75: mol_type = other DNA
aaagacccgttagctctgattaaaagcattttgataatgcagcggtcgcatgaggagagtttgcgtaaatctgaa

SEQ ID NO: 785107 - DNA, 75 bp, synthetic construct
  source 1..75: mol_type = other DNA
tggcttaagcttaatgatgaccgtaaaagcttctctgtgatacctgagaaggtagaaactgtgaggagatgcttt

SEQ ID NO: 785108 - DNA, 75 bp, synthetic construct
  source 1..75: mol_type = other DNA
acccggcgatggcgagccacgcaaagagttcgttgttgtgccaggcgaaaaagcactgctgcatgaacctgatgt

SEQ ID NO: 785109 - DNA, 75 bp, synthetic construct
  source 1..75: mol_type = other DNA
ccggttggctgatttgggacagttatcaggaccggggtaataccgtcaccatcgactttatgtcggcggatggta

SEQ ID NO: 785110 - DNA, 75 bp, synthetic construct
  source 1..75: mol_type = other DNA
acacctaaaggctgtgaagagatttcaggttattaccctgcaattatagatgaaacaatattctacaaagtccag

SEQ ID NO: 785111 - DNA, 75 bp, synthetic construct
  source 1..75: mol_type = other DNA
cagttaaaaggtgagctatcacaggttgatgcggatatcgagaaggagacacaacgccttaaatctattgatgtg

SEQ ID NO: 785112 - DNA, 75 bp, synthetic construct
  source 1..75: mol_type = other DNA
gcagttctattggtaggatacttgatcatgcagaaacagcaaacgcagccacaaataaatttagactcaaaggcc

SEQ ID NO: 785113 - DNA, 75 bp, synthetic construct
  source 1..75: mol_type = other DNA
tatttccatcatctttacttttaaacgctatgtttggaattttttcaagggcaccatttcctgcatatggtttat

SEQ ID NO: 785114 - DNA, 75 bp, synthetic construct
  source 1..75: mol_type = other DNA
ggccgtagaccgagcaagtgagctattacgaaacattcttcgctctggtgtagatgtagtcaccttgtccgatgg

SEQ ID NO: 785115 - DNA, 75 bp, synthetic construct
  source 1..75: mol_type = other DNA
tcaagcaatattgaaaagctggtacagctatcacttgaaattgaagatttgtcagctattaccagcaaactaaaa

SEQ ID NO: 785116 - DNA, 75 bp, synthetic construct
  source 1..75: mol_type = other DNA
tggcttaagcttaatgatgaccgtaaaagcttctctgtgatacctgagaaggtagaaactgtgaagaggtgcttt

SEQ ID NO: 785117 - DNA, 75 bp, synthetic construct
  source 1..75: mol_type = other DNA
actgcatcccaccagcgaagtttaccgcccacaacgaaccctgagtaaaccccacactaaaggcccgcagagcgc

SEQ ID NO: 785118 - DNA, 75 bp, synthetic construct
  source 1..75: mol_type = other DNA
tcgttacggtaagaatgacgaaaacagctcctgctgggtccgtgtcagttatccgtgggcgggtaaaggattcgg

SEQ ID NO: 785119 - DNA, 75 bp, synthetic construct
  source 1..75: mol_type = other DNA
gaatgccgtccgtgatgtcgcagtcaatggtacgcgtctgcaaacgctcaatgaagaacgagaaatgcaggcaga

SEQ ID NO: 785120 - DNA, 75 bp, synthetic construct
  source 1..75: mol_type = other DNA
gaacagcgtagccccggtagtcgggtacagggcagcggcaatattcgtaccctgatgacaggttttaccttcacc

SEQ ID NO: 785121 - DNA, 75 bp, synthetic construct
  source 1..75: mol_type = other DNA
atacttccgcctggaacatcggaaaaaacagcccttcaattggcgatagacgtcgccttcatgactaaaaaataa

SEQ ID NO: 785122 - DNA, 75 bp, synthetic construct
  source 1..75: mol_type = other DNA
cccacactaaaggcccgcagagcgccatcgtcaccggcccggcagggcaggaaatctggacagataaatatggcc

SEQ ID NO: 785123 - DNA, 75 bp, synthetic construct
  source 1..75: mol_type = other DNA
atgcgcagtacagcggccaggaccagcattttacctatgtcaccacgttcgaactgcaccctaccagtgaagtct

SEQ ID NO: 785124 - DNA, 75 bp, synthetic construct
  source 1..75: mol_type = other DNA
ccatcagcgtgggagaagatcgcaatgccaccatcacaaaaaatgatggtctttccgtcaaactagctcaaacca

SEQ ID NO: 785125 - DNA, 75 bp, synthetic construct
  source 1..75: mol_type = other DNA
gaagggcttgggaatctgttttcttacacagtacagcttaaaacgctggacgccctgaacctggggtacgtttcc

SEQ ID NO: 785126 - DNA, 75 bp, synthetic construct
  source 1..75: mol_type = other DNA
ttgaatttatggatgttaatgttcatggaagagttaatgatggagattatacccataccatttatcttggaaata

SEQ ID NO: 785127 - DNA, 75 bp, synthetic construct
  source 1..75: mol_type = other DNA
gagaaacttggcagcctgtttacctacatcgtacagcttaaaacgcccgacaccctgaatctgggctatgtctcc

SEQ ID NO: 785128 - DNA, 75 bp, synthetic construct
  source 1..75: mol_type = other DNA
acacagtacagcttaaaacgccggacatcctgaacctgggttacgtttctcccgctgccaacctgccgcttcagc

SEQ ID NO: 785129 - DNA, 75 bp, synthetic construct
  source 1..75: mol_type = other DNA
tgaatgaccgagcggcagatatacctccacttggaacatcggagaaaacagcccttcagttggcgatagacgtca

SEQ ID NO: 785130 - DNA, 75 bp, synthetic construct
  source 1..75: mol_type = other DNA
ggtttagattgtgaagatcctatcattatttgtaatcagaaacataaatatatagtaaaagagcagttattatcc

SEQ ID NO: 785131 - DNA, 75 bp, synthetic construct
  source 1..75: mol_type = other DNA
ctgttattatggctggggggagcggttccagattatggccattatcgcgtaacgattatcccaagcagtttttgc

SEQ ID NO: 785132 - DNA, 75 bp, synthetic construct
  source 1..75: mol_type = other DNA
gtgaaattaatgcatgatgagggcattaaccatcgtctgataattgattgtagccatggtaatagcggtaaagtg

SEQ ID NO: 785133 - DNA, 75 bp, synthetic construct
  source 1..75: mol_type = other DNA
ggggctttccgatctcagtctgaaagattcctggggagctgccgggcaggtgggggttgattatctgattaaccg

SEQ ID NO: 785134 - DNA, 75 bp, synthetic construct
  source 1..75: mol_type = other DNA
aactgggcctgacgtttacttatatggcgaccgacaacattggtgtggaattactggcagcgacgccgttccgcc

SEQ ID NO: 785135 - DNA, 75 bp, synthetic construct
  source 1..75: mol_type = other DNA
agcgccagcaattggactggcagccttcgaagccatgggacaaaaaggcgatgtgcttctcttggtattatctgc

SEQ ID NO: 785136 - DNA, 75 bp, synthetic construct
  source 1..75: mol_type = other DNA
tccggtgaaatgctggcggtaaatcctgaacagatagatgcattgatagaatttctgaaagggatcagggactga

SEQ ID NO: 785137 - DNA, 75 bp, synthetic construct
  source 1..75: mol_type = other DNA
atccgtgggcgggtaaaggattcggtggcattcagatcccgcgcattggtcaggaagtactggtggatttcaaaa

SEQ ID NO: 785138 - DNA, 75 bp, synthetic construct
  source 1..75: mol_type = other DNA
taacagttcagacagatgatatctctctcgccggaggggataaaacaattcaggcagtgcagaatttacgccttg

SEQ ID NO: 785139 - DNA, 75 bp, synthetic construct
  source 1..75: mol_type = other DNA
atgcagtcagctagtaaattaatctaccgcgggaagttgcttggcagtttacccactgtgggcgagattcataaa

SEQ ID NO: 785140 - DNA, 75 bp, synthetic construct
  source 1..75: mol_type = other DNA
tcatggttttgttcgttgcgcgctatccggtgaaatgctggcggtaaatcctgaacagacagatgcattgataga

SEQ ID NO: 785141 - DNA, 75 bp, synthetic construct
  source 1..75: mol_type = other DNA
tccggtgaaatgctggcggtaaatcctgaacagatagatgcattgatagaatttctgaaagggatcaggactgag

SEQ ID NO: 785142 - DNA, 75 bp, synthetic construct
  source 1..75: mol_type = other DNA
ggcacatggggcaggtcatatccgcactctcatgacgggttacacctttacgctgatgaatcatccaacggcaga

SEQ ID NO: 785143 - DNA, 75 bp, synthetic construct
  source 1..75: mol_type = other DNA
ttttttctgactatctaccatcaattttatgtctgctcttgcttgtgaaaatggattatgcaattttctctaatt

SEQ ID NO: 785144 - DNA, 75 bp, synthetic construct
  source 1..75: mol_type = other DNA
atggattatgcaattttctctaattggccgatagatcaatctgtggatagcagaataaaattaatgttgttattc

SEQ ID NO: 785145 - DNA, 75 bp, synthetic construct
  source 1..75: mol_type = other DNA
agaaaaagccgctctcgtgcatgagcaggtcaataatgccggtgcggaagcacatcagacgcaggcaagaaagct

SEQ ID NO: 785146 - DNA, 75 bp, synthetic construct
  source 1..75: mol_type = other DNA
ttgacttcaaacaaactatcagtactaatctatccataggagaaactaaatttacaggtggcatcactgcacata

SEQ ID NO: 785147 - DNA, 75 bp, synthetic construct
  source 1..75: mol_type = other DNA
acaaaataggccccggtactctgaatgttcaaaaaaaacagggggcaaatataaagataggtgaaggaaatgtta

SEQ ID NO: 785148 - DNA, 75 bp, synthetic construct
  source 1..75: mol_type = other DNA
actcgatggccttgacctcttcaccggggtgaccatgacctataccgacagccatgcaggcagtgatgccttcag

SEQ ID NO: 785149 - DNA, 75 bp, synthetic construct
  source 1..75: mol_type = other DNA
attcgctaatccctttgctatgcagaaaggcaggtatacctgagcaggatgccagaggtaaaatcaccagccatc

SEQ ID NO: 785150 - DNA, 75 bp, synthetic construct
  source 1..75: mol_type = other DNA
ccgcatggtttcagttctcattgatcaagacgcgatagctgaagggctggtagcatccgggaagccatggcgtta

SEQ ID NO: 785151 - DNA, 75 bp, synthetic construct
  source 1..75: mol_type = other DNA
ccgacggataatgttaccgggcagacctaccctgatttttaccaatgggcactgggtgataaatattctggtgtt

SEQ ID NO: 785152 - DNA, 75 bp, synthetic construct
  source 1..75: mol_type = other DNA
tcaacaatatctacatggccagtggtaatggtaccgttaagctgaatgctgataaggcattgggaagcggtgatt

SEQ ID NO: 785153 - DNA, 75 bp, synthetic construct
  source 1..75: mol_type = other DNA
gctttacaacgccagggaaccacttgatatttttgagctacagaatggttggggcattcttcacctgaatctacc

SEQ ID NO: 785154 - DNA, 75 bp, synthetic construct
  source 1..75: mol_type = other DNA
cgtaacccccaccccctccaggaagattctaaaacaggtgaaagcgtccgttttttgttcatgcacagggggaaa

SEQ ID NO: 785155 - DNA, 75 bp, synthetic construct
  source 1..75: mol_type = other DNA
ataaccacgacggcgttacccgcataggcgatacgcaaaaccgcctgcgcgcgtggtttgcccagcacaacgccg

SEQ ID NO: 785156 - DNA, 75 bp, synthetic construct
  source 1..75: mol_type = other DNA
cccgtatataaccgacatcggcagaacctatcagccaggagaaactgtatcgggttcacgccttaagcgatgcgc

SEQ ID NO: 785157 - DNA, 75 bp, synthetic construct
  source 1..75: mol_type = other DNA
gttccgggctcatggatggtgtgtaatgaaattacgtcgacaaatgacaatgaaggcatcgggctgttccagcgc

SEQ ID NO: 785158 - DNA, 75 bp, synthetic construct
  source 1..75: mol_type = other DNA
agcaaggccttaagtggcgaaaagatgaaaaagaaagatcgcgatgctgatttgcgctggattcatggcgttata

SEQ ID NO: 785159 - DNA, 75 bp, synthetic construct
  source 1..75: mol_type = other DNA
ggcgtcgcttgcagccggtggtccgggggcgcataacgtcacagtaagtggtagtgcggtgccgccgcagctgct

SEQ ID NO: 785160 - DNA, 75 bp, synthetic construct
  source 1..75: mol_type = other DNA
aaccagttggaaacggtggacccgtcatcaccacaccaccaatagctggcgaaagtggcggtatgagcacaggtt

SEQ ID NO: 785161 - DNA, 75 bp, synthetic construct
  source 1..75: mol_type = other DNA
cggctggtgcagctggtcccaaaggtgatgcaggcccggcaggccccgcaggaaaggatggtaccgccggagcgg

SEQ ID NO: 785162 - DNA, 75 bp, synthetic construct
  source 1..75: mol_type = other DNA
cgtggtattgccaacagcgatgcacaagttgtgattaaacaaaacggctatgttatttaccaaacgtgggtatcg

SEQ ID NO: 785163 - DNA, 75 bp, synthetic construct
  source 1..75: mol_type = other DNA
ataactatgataaaaatagtcgacaatggaattatagcgcacaaggtgcggtggttgcgcatactcatggagtaa

SEQ ID NO: 785164 - DNA, 75 bp, synthetic construct
  source 1..75: mol_type = other DNA
agaaacattacgttcattctttcttcagacaaaaaaaaacttatccctcgttttacaaaggcagatctcggtgag

SEQ ID NO: 785165 - DNA, 75 bp, synthetic construct
  source 1..75: mol_type = other DNA
tgttcaaacagatgttgaagtggtgtttgaacatgatgtcaacacaaaggcaactaataaagatactgaaccgcc

SEQ ID NO: 785166 - DNA, 75 bp, synthetic construct
  source 1..75: mol_type = other DNA
ttcaattactggcaaacaggaaagccaatacccaaaaacaggctggcaaaaattgcccgtctgactaacgagcga

SEQ ID NO: 785167 - DNA, 75 bp, synthetic construct
  source 1..75: mol_type = other DNA
atgcccaattttataatatgatgctgaatgatattacgggcatagaggtagtagaatctaggcaaagccactcac

SEQ ID NO: 785168 - DNA, 75 bp, synthetic construct
  source 1..75: mol_type = other DNA
gttttttcatcaaaagcacataaccggcatgtgactggtataacaataaataatgaagagacactttcactcggg

SEQ ID NO: 785169 - DNA, 75 bp, synthetic construct
  source 1..75: mol_type = other DNA
atattgtatggaagagcctaattctgtagttagtgcccaagtgtgttattatgcaaaaaaaaacaggataaaagt

SEQ ID NO: 785170 - DNA, 75 bp, synthetic construct
  source 1..75: mol_type = other DNA
cgcatcatgtgcctaagcctgttctggcacttcctggatgtggtttggatctgtgtgttcactgttgtttatctg

SEQ ID NO: 785171 - DNA, 75 bp, synthetic construct
  source 1..75: mol_type = other DNA
cggccttaccggctgggcaggcaccttcgctgcgctggatatcgccgcgattggttgtatttgcctgatggcgat

SEQ ID NO: 785172 - DNA, 75 bp, synthetic construct
  source 1..75: mol_type = other DNA
gctctctgacctggcgaacggtcgccgtggcctggtggcctgcatcgcgctggcgctgattatcgccacgctcgg

SEQ ID NO: 785173 - DNA, 75 bp, synthetic construct
  source 1..75: mol_type = other DNA
atgtctgttattcgtggattagctgcggttttacgtcaaagtgactccgatatcagcgcctttcttgtaaccgcc

SEQ ID NO: 785174 - DNA, 75 bp, synthetic construct
  source 1..75: mol_type = other DNA
caaccaccgggtaaccatacgcacacacaagggatttaaaatccctggtgtgattggttccgtcgcgcctcatgc

SEQ ID NO: 785175 - DNA, 75 bp, synthetic construct
  source 1..75: mol_type = other DNA
atgaacattgagttactgcaacagttgtgcgaagccagcgccgtcagcggcgatgaacaggaagttcgcgacatc

SEQ ID NO: 785176 - DNA, 75 bp, synthetic construct
  source 1..75: mol_type = other DNA
aatcgtattatcgccgtaggccaccagcatcatctgaacgttgtaggctggaacccgggaccggcgctttcagtt

SEQ ID NO: 785177 - DNA, 75 bp, synthetic construct
  source 1..75: mol_type = other DNA
atgttccaggcattgataacattaaatatccgctgaaactgggcaacgggccggggctgatgctgtttgacaagc

SEQ ID NO: 785178 - DNA, 75 bp, synthetic construct
  source 1..75: mol_type = other DNA
gggcagctttgttgcccgtaaggggaataaagggccaaaagttgccgttgtcgggcatatggatgaagtcggctt

SEQ ID NO: 785179 - DNA, 75 bp, synthetic construct
  source 1..75: mol_type = other DNA
cgttttaccaccattggcggctggtggaatcagtcgatgctcaaccaccgggtaaccatacgcacacacaaggga

SEQ ID NO: 785180 - DNA, 75 bp, synthetic construct
  source 1..75: mol_type = other DNA
aaaaagtggatgaattaactattcaattaagagagatcattcaccctaaaaagccagtccaactcaaaggcttta

SEQ ID NO: 785181 - DNA, 75 bp, synthetic construct
  source 1..75: mol_type = other DNA
atatgggttcggtactcgtcaggctctctgtgatcatttaggtgtttctaagagcaccatggcaacgcgctatat

SEQ ID NO: 785182 - DNA, 75 bp, synthetic construct
  source 1..75: mol_type = other DNA
acggttacaagacacgtcaagccttagctgatcaccttggtatttcaaaaagcacgttagccacacgatatatgc

SEQ ID NO: 785183 - DNA, 75 bp, synthetic construct
  source 1..75: mol_type = other DNA
tgaaaaacaaaccgaagatggactttgcgacaaagttcactcttcccccactctgttcgataatgaaatccacat

SEQ ID NO: 785184 - DNA, 75 bp, synthetic construct
  source 1..75: mol_type = other DNA
ggcgtaacgctggcatcgggcgacccgagcatcatcgcaccgaacaaaaccatcaccaaaaccggtgagaagatg

SEQ ID NO: 785185 - DNA, 75 bp, synthetic construct
  source 1..75: mol_type = other DNA
tagcaccgaaaaaaaaacatacctatgtaatcaatcattcgatgaaattacagatggtaaatggattgttgaaat

SEQ ID NO: 785186 - DNA, 75 bp, synthetic construct
  source 1..75: mol_type = other DNA
attaaaagacgcaaatttgatcgcggtgccgggttgttatcccacagcggcacagttggcgctgaaaccgttgat

SEQ ID NO: 785187 - DNA, 75 bp, synthetic construct
  source 1..75: mol_type = other DNA
tggcgcaagaatctgtaggcctgataagcgtagcgcatcaggcatttgtcaccattgccggatgcggcgtgaacg

SEQ ID NO: 785188 - DNA, 75 bp, synthetic construct
  source 1..75: mol_type = other DNA
cgttgtcatacaaaatcgcggtggtcagaaagtaatcgagcggatactcatggcttatggcttcaagtcacgcca

SEQ ID NO: 785189 - DNA, 75 bp, synthetic construct
  source 1..75: mol_type = other DNA
atgtcaactaataaaatcacatttcgccatattgaagatcatctgaaagccatggtcatgcagaatcgaggaggg

SEQ ID NO: 785190 - DNA, 75 bp, synthetic construct
  source 1..75: mol_type = other DNA
aagcattctgtaaccaccttggtatttcacaaagtacaatggctaacagatatgcacgcgataccttccctgctg

SEQ ID NO: 785191 - DNA, 75 bp, synthetic construct
  source 1..75: mol_type = other DNA
tcacaagaagaaaacactgtaattttaaataagttcaatttggtcaatggcgtgcttgtcgagtcaggtttttta

SEQ ID NO: 785192 - DNA, 75 bp, synthetic construct
  source 1..75: mol_type = other DNA
agaatctgtaggcctgataagcgtagcgcatcaggcatttgccaccactgccggatgcggcgtgaacgccttatc

SEQ ID NO: 785193 - DNA, 75 bp, synthetic construct
  source 1..75: mol_type = other DNA
tgcaatgggcgaaggacggggcgttaacccagcaagaagtgcagcaagtcatggacttgctgcaaaaattgctta

SEQ ID NO: 785194 - DNA, 75 bp, synthetic construct
  source 1..75: mol_type = other DNA
agaaagaacaatacaacctgaacaaattacaaaaacgcctgcgccgcaatgtgggcgaagccattgctgacttca

SEQ ID NO: 785195 - DNA, 75 bp, synthetic construct
  source 1..75: mol_type = other DNA
cgtgacgatatcctgcaaacgttgttcttaaatatgttctacggcggcaagatgaaaggtatgcctccgaaactg

SEQ ID NO: 785196 - DNA, 75 bp, synthetic construct
  source 1..75: mol_type = other DNA
atgagcgatgatggcaagcacatcgttattcgcccgttggcctactgccgcgaaaaagatattcaacgctttgcc

SEQ ID NO: 785197 - DNA, 75 bp, synthetic construct
  source 1..75: mol_type = other DNA
gacagggccgacttttcggcctttatggaaagtattggctattatgatgacgagtcgatgcaggatgatattctt

SEQ ID NO: 785198 - DNA, 75 bp, synthetic construct
  source 1..75: mol_type = other DNA
gacgagtcgatgcaggatgatattcttattgacgtgataggtaatgtgtacaaagaaaccggagaactgactgaa

SEQ ID NO: 785199 - DNA, 75 bp, synthetic construct
  source 1..75: mol_type = other DNA
aggcaaaaccacctgctcactctgctctcgtctgcgtcgcggtattctttaccgcacggcaacagaactgggcgc

SEQ ID NO: 785200 - DNA, 75 bp, synthetic construct
  source 1..75: mol_type = other DNA
atgaaagatttaacactcaaatttgcagacaggaccgacttttcggcctttatggatagcactggctattatgac

SEQ ID NO: 785201 - DNA, 75 bp, synthetic construct
  source 1..75: mol_type = other DNA
cagtggatcgcccacggtgaagatagcaagtacatcgtgcgtcgcgttaaaggcgggctaaatgccgaacaacag

SEQ ID NO: 785202 - DNA, 75 bp, synthetic construct
  source 1..75: mol_type = other DNA
gcctgctggtttctgtgcctgcccttgcctggcaaccgcaaaccggcgacatcatctttcaaatttctcgctcat

SEQ ID NO: 785203 - DNA, 75 bp, synthetic construct
  source 1..75: mol_type = other DNA
taacctgcaacgtcaggtgattgccgatatgctgcgtgactgggataagcgttatccggggcgaattgagacgat

SEQ ID NO: 785204 - DNA, 75 bp, synthetic construct
  source 1..75: mol_type = other DNA
gcgcttctgatgcaggggaaattgttaatcagaacagagcgcgctgttttaatgaaagttgaggacaaagaatga

SEQ ID NO: 785205 - DNA, 75 bp, synthetic construct
  source 1..75: mol_type = other DNA
atgcagagcgataaagtgctcaatttacccgcaggttactttggtattgtgttggggacgatagggatgggattc

SEQ ID NO: 785206 - DNA, 75 bp, synthetic construct
  source 1..75: mol_type = other DNA
gacagggccgacttttcggcctttatggataggattggctattatgatgacgagtcgatgcaggatgatattctt

SEQ ID NO: 785207 - DNA, 75 bp, synthetic construct
  source 1..75: mol_type = other DNA
tgcaatgggccaaagacggggcgctcactcaggaagaggtgcagcaagtgatggacctgctgcaaaagttgctca

SEQ ID NO: 785208 - DNA, 75 bp, synthetic construct
  source 1..75: mol_type = other DNA
aaatctgctgcaggagcgtctgcagcagatggaacgggatatagtccgtgacctgcagaaagagaaaaccctggg

SEQ ID NO: 785209 - DNA, 75 bp, synthetic construct
  source 1..75: mol_type = other DNA
ctgcgtgaaccacaacgggagcgggaagctgtccgggaagttgtccgggaaaatctgctgcaggagcgtctgcag

SEQ ID NO: 785210 - DNA, 75 bp, synthetic construct
  source 1..75: mol_type = other DNA
gcagtgctggataaagacggtcgcgtgcaatgggcgaaggacggggcgttaacccagcaagaagtgcagcaagtc

SEQ ID NO: 785211 - DNA, 75 bp, synthetic construct
  source 1..75: mol_type = other DNA
tgcaatgggcaaaagatggagcgctcactcaggaagaggtgcagcaagtgatggacttgctgcataagttgctta

SEQ ID NO: 785212 - DNA, 75 bp, synthetic construct
  source 1..75: mol_type = other DNA
taacctgcctgttgctgccgatgatggcctcagcacacaaatttgaaaccggtcagcgagtgccgccaattggca

SEQ ID NO: 785213 - DNA, 75 bp, synthetic construct
  source 1..75: mol_type = other DNA
cgttcttcatcccgggtactctgggtgttgccctggccgtttgcttcggcttcctgctgggcagtgtgatgctgt

SEQ ID NO: 785214 - DNA, 75 bp, synthetic construct
  source 1..75: mol_type = other DNA
gacagggccgacttttcggcctttatggagagaactggctattatgatgacgagtcgatgcaggatgatattctt

SEQ ID NO: 785215 - DNA, 75 bp, synthetic construct
  source 1..75: mol_type = other DNA
gacagggccgacttttcggcctttatggacagaagtggctattatgatgacgagtcgatgcaggatgatattctt

SEQ ID NO: 785216 - DNA, 75 bp, synthetic construct
  source 1..75: mol_type = other DNA
gccgactggcagaaacgttatccgaacaatccgggcgcgaaaatgctgccaacgcagttggttaacgtaaaagcg

SEQ ID NO: 785217 - DNA, 75 bp, synthetic construct
  source 1..75: mol_type = other DNA
ctgtggcgtccggcgcatggtcgacagcgccgcgctgctggtgatcgacgagctgcacaacgtgctggccggcaa

SEQ ID NO: 785218 - DNA, 75 bp, synthetic construct
  source 1..75: mol_type = other DNA
atggaaggtcatggcatcagctacctccatctgctctccgtggtcatcccgtccaccctgctggcggttctggtg

SEQ ID NO: 785219 - DNA, 75 bp, synthetic construct
  source 1..75: mol_type = other DNA
ttctcattctgggaggcccgttccgggtggtgccgtgccgagtggattggtgccgggcgtatggcgattgatggc

SEQ ID NO: 785220 - DNA, 75 bp, synthetic construct
  source 1..75: mol_type = other DNA
tgcgccaaacgcggtgatgattatcaggagatttttgcccagcaggtccgggaaaccatggagcgtcgtgctgcg

SEQ ID NO: 785221 - DNA, 75 bp, synthetic construct
  source 1..75: mol_type = other DNA
atgctggccttccttaatcaagtgcgcaagccgacactggaccttcctgtcgaagtgcggcgcaaaatgtggttc

SEQ ID NO: 785222 - DNA, 75 bp, synthetic construct
  source 1..75: mol_type = other DNA
gttcttgatgagcttaccgcagaaaccaacggtgtgattctctatcaggagcagacgatgaacgcgacccgattg

SEQ ID NO: 785223 - DNA, 75 bp, synthetic construct
  source 1..75: mol_type = other DNA
cgcaagctgcttaaagatctaggcggtggcattgagccaatgagctttaaaaccgttgtcgcaactaccgccctc

SEQ ID NO: 785224 - DNA, 75 bp, synthetic construct
  source 1..75: mol_type = other DNA
ttatccgtgaaggtgtgggcgttcatgcctttaacggcgaaatctttgtgcagccggtctgggatacggagagca

SEQ ID NO: 785225 - DNA, 75 bp, synthetic construct
  source 1..75: mol_type = other DNA
cggatttaacccgaatattttgtactttcgcccagaggaaggcgaaaagctggaagcaattctggcagaggtagc

SEQ ID NO: 785226 - DNA, 75 bp, synthetic construct
  source 1..75: mol_type = other DNA
tgggcgatctctacgtcacaggcgtgtgcaaaaaggggaaggacaaagagaaggactacaccaaagacgagatcg

SEQ ID NO: 785227 - DNA, 75 bp, synthetic construct
  source 1..75: mol_type = other DNA
acattttccgccagcaggtcagggaatctgctgagcggcaaaaagccggactctcacgtccggtgtggatagcgc

SEQ ID NO: 785228 - DNA, 75 bp, synthetic construct
  source 1..75: mol_type = other DNA
gtcatggaacggctgaagatgctcgattccctgcaggcaacacagcttcagtcggccattgttaaagccatgtat

SEQ ID NO: 785229 - DNA, 75 bp, synthetic construct
  source 1..75: mol_type = other DNA
cgtctggggaatgcccgtgcagatgatctggtgcgcaataacggaatagcggccaatgcggtggccctgcataag

SEQ ID NO: 785230 - DNA, 75 bp, synthetic construct
  source 1..75: mol_type = other DNA
acggtaaaaatatctctcaggtatcacagtcctgcggctacaacagtacgtcgtactttatttctgtctttaaag

SEQ ID NO: 785231 - DNA, 75 bp, synthetic construct
  source 1..75: mol_type = other DNA
acgcctggacacggtatggggaaccgtttcctgcgggccggggtggaagtcgatcggcatggacgggctgttgcg

SEQ ID NO: 785232 - DNA, 75 bp, synthetic construct
  source 1..75: mol_type = other DNA
ggctaatgcggtggccctgcataaggatcatattgtcgggcatatgtttctgatcagctaccgtccgaactggcg

SEQ ID NO: 785233 - DNA, 75 bp, synthetic construct
  source 1..75: mol_type = other DNA
cggtttctacctgaccggcgcgaaagagctgcgcgaaggggtacataagttcagccacggcaccaccggttcccc

SEQ ID NO: 785234 - DNA, 75 bp, synthetic construct
  source 1..75: mol_type = other DNA
acctgacgctgaacgatagcgtgcttaactaccggaaaacgctgcaaccgcaagccgacgcctctttcggtgatg

SEQ ID NO: 785235 - DNA, 75 bp, synthetic construct
  source 1..75: mol_type = other DNA
ttcgtctcgatagcggaaaagccgcagggaaggacatcagcctgaacttcaatctggataaaggcgatagcctca

SEQ ID NO: 785236 - DNA, 75 bp, synthetic construct
  source 1..75: mol_type = other DNA
actaccgcgcggatgattacaaatttgatattaatgccgctgcgccggaaaccgtaaaccccagcctgtggcgtc

SEQ ID NO: 785237 - DNA, 75 bp, synthetic construct
  source 1..75: mol_type = other DNA
gttatctacacccacagccacaccgaccactatggcggtgtgaaaggcattatctctgaagctgatgttaaatcg

SEQ ID NO: 785238 - DNA, 75 bp, synthetic construct
  source 1..75: mol_type = other DNA
ccaacatcacctttatcgaaggtgataccgggattattgtcatcgacccgctggtgacgccacctgccgcaaaag

SEQ ID NO: 785239 - DNA, 75 bp, synthetic construct
  source 1..75: mol_type = other DNA
caggctttatggacgaagccatcagcgaaaacgtgctggcgggtaacatcatgagccgccgtgcgctctactctt

SEQ ID NO: 785240 - DNA, 75 bp, synthetic construct
  source 1..75: mol_type = other DNA
tgcacctggcgaaccagggttacaccatgaatgaaatcggcaacatgattcatctgccggaaacgctggataaaa

SEQ ID NO: 785241 - DNA, 75 bp, synthetic construct
  source 1..75: mol_type = other DNA
ctgtttatgccgcacacctggccggtctggggcaataagcatatcaatgattatattggtaaatatcgcgatact

SEQ ID NO: 785242 - DNA, 75 bp, synthetic construct
  source 1..75: mol_type = other DNA
taatttctacaccctgcgcggcgcgaaaactcgtgacaccagcaagtggaccgagtatttgaacgaaacgctgga

SEQ ID NO: 785243 - DNA, 75 bp, synthetic construct
  source 1..75: mol_type = other DNA
ttaccgtttagcgatcgtcaggattttgacgatgcccagcgtggatttatcgctccgctgctggatgaaggtatt

SEQ ID NO: 785244 - DNA, 75 bp, synthetic construct
  source 1..75: mol_type = other DNA
ccggctctgaaagccctgtgtaccgccgagaacgccacgcataccctgcacaacttctacactctgcgcggcgcg

SEQ ID NO: 785245 - DNA, 75 bp, synthetic construct
  source 1..75: mol_type = other DNA
gacctttccggcgcgtttcgtgttaacgacgtcaccttctatgaaaaatattacggctttacccatcaatacccg

SEQ ID NO: 785246 - DNA, 75 bp, synthetic construct
  source 1..75: mol_type = other DNA
gtaggcggtcgcacagggctgactgctgtggttgttggcgttatgttcctgctggttatgttcttctcgccgctg

SEQ ID NO: 785247 - DNA, 75 bp, synthetic construct
  source 1..75: mol_type = other DNA
atagtaacggtaaattccccaatatgaataaggcgctgtatgttgatagcatcagttcggttgccggggcgttta

SEQ ID NO: 785248 - DNA, 75 bp, synthetic construct
  source 1..75: mol_type = other DNA
acatcgtttttgtgaacccgcaaatcctcggcgcggcacaaatggacccgaaagtggtgtttgttaccacctgtt

SEQ ID NO: 785249 - DNA, 75 bp, synthetic construct
  source 1..75: mol_type = other DNA
ggttgttgaccagaaatacacggtggcagatgccgccaaagctatggatgttggcctttctacaatgacaagatg

SEQ ID NO: 785250 - DNA, 75 bp, synthetic construct
  source 1..75: mol_type = other DNA
tcaacgcaacagttatgtgaaaacatggggttgcggaggttttttgaatgagacgaacatttacagcagaggaaa

SEQ ID NO: 785251 - DNA, 75 bp, synthetic construct
  source 1..75: mol_type = other DNA
acttctcacttggggagtcggctttaaaagcagaaaacgcggtgaagattgccagagaagctggctacaccgctg

SEQ ID NO: 785252 - DNA, 75 bp, synthetic construct
  source 1..75: mol_type = other DNA
gctggccgaagcccaaagcacaatcagcctgtggcagactgagctgcagctcggcatcatcagcgacgatgacaa

SEQ ID NO: 785253 - DNA, 75 bp, synthetic construct
  source 1..75: mol_type = other DNA
gcacaaaaaggcggtcaggttgcggcagcgcaacagaaaaaagcctcgctactggccgaagcgcaaagcaccatt

SEQ ID NO: 785254 - DNA, 75 bp, synthetic construct
  source 1..75: mol_type = other DNA
cagaacctctcacttttactcttcctgatggctctctgaagcacgtcagaaaaggggcaactttgcagaacgttg

SEQ ID NO: 785255 - DNA, 75 bp, synthetic construct
  source 1..75: mol_type = other DNA
atagtaacggtaaattccccaatatgaataaggcgctgtatgttgatagcgtcagttcggtggcgggtgcgttta

SEQ ID NO: 785256 - DNA, 75 bp, synthetic construct
  source 1..75: mol_type = other DNA
tccaccattgcaccggacaggcgatcatgtgggtgcagtccacgttctgttcacgcggaaaaacccggtgtgcat

SEQ ID NO: 785257 - DNA, 75 bp, synthetic construct
  source 1..75: mol_type = other DNA
acatgattgccactaaagctggcgatattacggtttttaactttgatggtgataccggagaatatttatccgcga

SEQ ID NO: 785258 - DNA, 75 bp, synthetic construct
  source 1..75: mol_type = other DNA
ggtgggtagcttttttgatttcccgctaaagatatcgacatttttcggcgatgcagatgctattttcacggtcgt

SEQ ID NO: 785259 - DNA, 75 bp, synthetic construct
  source 1..75: mol_type = other DNA
gtcggtaagcttcgctatccgtttttaaatctcacctgggctgtttcaacgctttgccttctgaattacaaccag

SEQ ID NO: 785260 - DNA, 75 bp, synthetic construct
  source 1..75: mol_type = other DNA
tttagcgtttgcctgctctatatggtgcgcatttattgtcgtagcgagtggcttaaccgtcgttggcatttacag

SEQ ID NO: 785261 - DNA, 75 bp, synthetic construct
  source 1..75: mol_type = other DNA
tgtcatttattgacgccctgagccaggctgcgaattttgatgtttacgtcaacgataaaaaagtcggcaccttca

SEQ ID NO: 785262 - DNA, 75 bp, synthetic construct
  source 1..75: mol_type = other DNA
tggacgagtggttttgggatgggtgtgaccgaatatatcattaccagcccggataaggtggtgtttaatctgaac

SEQ ID NO: 785263 - DNA, 75 bp, synthetic construct
  source 1..75: mol_type = other DNA
aatcgagaggaaatagcgtccgggcagaccaccaaacaggtactgttgctgaacaccattcgtaaggcgttagat

SEQ ID NO: 785264 - DNA, 75 bp, synthetic construct
  source 1..75: mol_type = other DNA
tgcgcatttatcatcgcagtgaatggcttaatcgccgctggcatttgcaggcgctgacagatccgttaacgctcc

SEQ ID NO: 785265 - DNA, 75 bp, synthetic construct
  source 1..75: mol_type = other DNA
aagctggctggcagcgttaagcgtgctgctacttctgctgtgcacaccttatgaaaacgactttattgccggtta

SEQ ID NO: 785266 - DNA, 75 bp, synthetic construct
  source 1..75: mol_type = other DNA
catcagtgccgcgtttgccggttttgccggaacgctgtttgctgcgcgtcagggctttgtcagcccggaatcctt

SEQ ID NO: 785267 - DNA, 75 bp, synthetic construct
  source 1..75: mol_type = other DNA
gttatccgtttttaaatctcacctgggcggtttcgacgctttgtcttctgaattacaaccagaactttttacaag

SEQ ID NO: 785268 - DNA, 75 bp, synthetic construct
  source 1..75: mol_type = other DNA
gaaagatattgtcacgaacacgctggatgcgatgattgtgagatcaattaccgatctggcgaaagcgaagtcatt

SEQ ID NO: 785269 - DNA, 75 bp, synthetic construct
  source 1..75: mol_type = other DNA
tgctgcaaaagaatattgccgggcggattattcgtctgtttaagcgttatcacatctccccgcaggcggtcattc

SEQ ID NO: 785270 - DNA, 75 bp, synthetic construct
  source 1..75: mol_type = other DNA
taacggtcgtcatgaataacagtcagttcccattaccttcatccctcggctggaggaatggcgataacgcctggg

SEQ ID NO: 785271 - DNA, 75 bp, synthetic construct
  source 1..75: mol_type = other DNA
agaagataactgggaaaacccgacattgggtgcctggggtctgggctgggaagtgtggctgaacggcatggaagt

SEQ ID NO: 785272 - DNA, 75 bp, synthetic construct
  source 1..75: mol_type = other DNA
tacgagaaagaagcgcagcaactgctggcgctggaaaatccgctgccgctgccagcctacgagcgtattctgaaa

SEQ ID NO: 785273 - DNA, 75 bp, synthetic construct
  source 1..75: mol_type = other DNA
ttattacaaaaaaggcccagggaaggctggctcaccacagatgcatttctttactgggcgcagcaggatttctcc

SEQ ID NO: 785274 - DNA, 75 bp, synthetic construct
  source 1..75: mol_type = other DNA
ggttacaacgcattggacgtgccggacatcaggttggcggtgtatctaaagggcttttttcccccgaacccggcg

SEQ ID NO: 785275 - DNA, 75 bp, synthetic construct
  source 1..75: mol_type = other DNA
ggcgtagacagtgtttacgacctggtttggagcgacggcccgctgggtaaaaccacctacggcgacgtgttccat

SEQ ID NO: 785276 - DNA, 75 bp, synthetic construct
  source 1..75: mol_type = other DNA
aagtgtggctgaacggcatggaagtgacccaattcacgtacttccagcaagttggcggtctggagtgtaaacccg

SEQ ID NO: 785277 - DNA, 75 bp, synthetic construct
  source 1..75: mol_type = other DNA
gatgtggtttctatcctgcaaaaagggcgtcaggatgtggtcgattgtgaagtaaaattgacctctgaacgccgc

SEQ ID NO: 785278 - DNA, 75 bp, synthetic construct
  source 1..75: mol_type = other DNA
agtccaagagctggtttcgtatggtcgtaatccctggctgtcactctgggggcgtctctccgctgaagacaatgc

SEQ ID NO: 785279 - DNA, 75 bp, synthetic construct
  source 1..75: mol_type = other DNA
acattaaagagaacacaggtgaagatatcaatcttgatgccatttctcttgaagatcgcaaggtgctggatggtt

SEQ ID NO: 785280 - DNA, 75 bp, synthetic construct
  source 1..75: mol_type = other DNA
aactcagtcatcttttcaatcaaggagtcaattcaatagaattgttgattttggaaagcaggagcaaagaaaaac

SEQ ID NO: 785281 - DNA, 75 bp, synthetic construct
  source 1..75: mol_type = other DNA
gtctgcgagatgaattcagaataaagtcagcccccggagctgagccggttaagtggtataaaaatacttatggtg

SEQ ID NO: 785282 - DNA, 75 bp, synthetic construct
  source 1..75: mol_type = other DNA
gttgcgcgtgcggttgatctctctgccgagaaatattgctcagtagcgttaatgctggaaaaagcggtaaatatt

SEQ ID NO: 785283 - DNA, 75 bp, synthetic construct
  source 1..75: mol_type = other DNA
tttctggtttgctggtgctcggttacggcggcttttacgccatcggcgcttacacctttgcgctgctcaatcact

SEQ ID NO: 785284 - DNA, 75 bp, synthetic construct
  source 1..75: mol_type = other DNA
ggtggtggacaagcatcaggtcaatattctctataccgcgcccacggcgattcgcgcgctgatggcggaaggcga

SEQ ID NO: 785285 - DNA, 75 bp, synthetic construct
  source 1..75: mol_type = other DNA
gaagaaagcattattactgacgatgaactcccttttgtggcacatcgaccgtcagcggtgcagagggaagtaaga

SEQ ID NO: 785286 - DNA, 75 bp, synthetic construct
  source 1..75: mol_type = other DNA
attttatcaggccatcgataaactgattgatacaaatgttattatttgtactgagtttaaataccagtatcgttt

SEQ ID NO: 785287 - DNA, 75 bp, synthetic construct
  source 1..75: mol_type = other DNA
atgatgcaatctgcgggtattgtcgttaatggcgttactgtcacctggcgaaacgggcagaaagcactgcgcgat

SEQ ID NO: 785288 - DNA, 75 bp, synthetic construct
  source 1..75: mol_type = other DNA
gaagatgggggcatgtgtgttgacgggttcggtgagtatgttggtcactcgctgcctgatggaacgcaccagcta

SEQ ID NO: 785289 - DNA, 75 bp, synthetic construct
  source 1..75: mol_type = other DNA
atcgattccaactcacggttggtgatcacttctgacgaaggtgtgcgcgctgggcgcagtattccgctgaagaaa

SEQ ID NO: 785290 - DNA, 75 bp, synthetic construct
  source 1..75: mol_type = other DNA
ggcacaggtgctgttaagcgcggcgttgctggcgggattattgatgctgacggatttcgcctggcaggcggcggt

SEQ ID NO: 785291 - DNA, 75 bp, synthetic construct
  source 1..75: mol_type = other DNA
gaaaccctgcgtctggatgtcatcccacctgcgtttgagcaactccgtcggaaaagaaaccgccgtaaacccgtg

SEQ ID NO: 785292 - DNA, 75 bp, synthetic construct
  source 1..75: mol_type = other DNA
ttgaaaatttgaaccagacagggggggagctgcccgatattaaaaccatgaatgagcaggaactgcaggattacc

SEQ ID NO: 785293 - DNA, 75 bp, synthetic construct
  source 1..75: mol_type = other DNA
ttgagtgaagcgctggcaagccagccggaatcgccctccgtgcccattcataaccaaatccgcggtgatgatccg

SEQ ID NO: 785294 - DNA, 75 bp, synthetic construct
  source 1..75: mol_type = other DNA
ttccggtctggtggcgcagaattttgcctggaagctgatgaagattggttttaatgctgccgctgagcgtgatat

SEQ ID NO: 785295 - DNA, 75 bp, synthetic construct
  source 1..75: mol_type = other DNA
aacaggcgacgaatagtgcgtcgatctccgcttgtcacgctcagggaatgcttacagatttgctgttcattgcgc

SEQ ID NO: 785296 - DNA, 75 bp, synthetic construct
  source 1..75: mol_type = other DNA
cttaaaggctcggaagaaagcattattactgacgatgaacgcccctttgtggcttatcgaccatcagcggtgcag

SEQ ID NO: 785297 - DNA, 75 bp, synthetic construct
  source 1..75: mol_type = other DNA
cgctgctctctgccgcgatgttctttgtcctcgctggcgtctttatgggcgtgcaactggagctggatggcacca

SEQ ID NO: 785298 - DNA, 75 bp, synthetic construct
  source 1..75: mol_type = other DNA
aatcatattgataccagcgacttttatggtccgcacgtcaccatcagattatccgcgaagcgctttatccgtact

SEQ ID NO: 785299 - DNA, 75 bp, synthetic construct
  source 1..75: mol_type = other DNA
ttgattaagcacatcatcatagctgagagagcacaccaagaatctcttgttaagcaaaagcgtatagctcaggtc

SEQ ID NO: 785300 - DNA, 75 bp, synthetic construct
  source 1..75: mol_type = other DNA
gctggtggtatcgcgcgaattgatgcgtgatttcaacgaatacagcatgttaatgctcggtggtttgatggtgct

SEQ ID NO: 785301 - DNA, 75 bp, synthetic construct
  source 1..75: mol_type = other DNA
gcggcggcgggcttcctgctcggctttccggtgctgcgtctgcgcggtgactatctggcgatcgttaccctcggt

SEQ ID NO: 785302 - DNA, 75 bp, synthetic construct
  source 1..75: mol_type = other DNA
gtggcgtggccgtttatggtgtcacgtgggacggtggatatcgccactctgaccatgatctacattatcctcggt

SEQ ID NO: 785303 - DNA, 75 bp, synthetic construct
  source 1..75: mol_type = other DNA
gattacgccggtggtatgcgtgacggtctgaaattcaaagcctggcagccaggcggcgcgggcaccgacttcctg

SEQ ID NO: 785304 - DNA, 75 bp, synthetic construct
  source 1..75: mol_type = other DNA
cgggtctgtgggaactgccgttcggcaccaccgcacgcgagatcctcgaagattacgccggtggtatgcgtgacg

SEQ ID NO: 785305 - DNA, 75 bp, synthetic construct
  source 1..75: mol_type = other DNA
ggacaccatggaaccactggagtggttgcagtgggtgctgatcccgcgaatgcacgatttgttagataacaacca

SEQ ID NO: 785306 - DNA, 75 bp, synthetic construct
  source 1..75: mol_type = other DNA
tccagttgcaggcgcttgaagcgttactgcgtgaacatcagcactggcgaaacgatgaaccccagccgcatcaat

SEQ ID NO: 785307 - DNA, 75 bp, synthetic construct
  source 1..75: mol_type = other DNA
gggaatacaaaagcagtttgatacttctgtttttgcagaaggtattacttatgccctggaccggataaggtcaga

SEQ ID NO: 785308 - DNA, 75 bp, synthetic construct
  source 1..75: mol_type = other DNA
ctgggggcttccggtaaccgtcagggcgcgttgtatccgttattgagcaaacatgacgaagcattaaatcgcttt

SEQ ID NO: 785309 - DNA, 75 bp, synthetic construct
  source 1..75: mol_type = other DNA
tggtgccagttatcatcgcggcagcgaagagacggcgtacagtgaagacgatcagcagcagaatcgccagcggtt

SEQ ID NO: 785310 - DNA, 75 bp, synthetic construct
  source 1..75: mol_type = other DNA
acaacgcttacatttcattagttttgagaaatttcccctcgcccgtactgatttagccttagcgcatcaacactg

SEQ ID NO: 785311 - DNA, 75 bp, synthetic construct
  source 1..75: mol_type = other DNA
acgcaggaggccgcagaagccattacccggggactactgagcttagcctcgtccggggagctgaaaagccgtcag

SEQ ID NO: 785312 - DNA, 75 bp, synthetic construct
  source 1..75: mol_type = other DNA
ttacgggctgcgtgacccgaacgcaccggagaacagacggacgcttgtcacaccgaataatctgccaaaagcgaa

SEQ ID NO: 785313 - DNA, 75 bp, synthetic construct
  source 1..75: mol_type = other DNA
gaaaaggcggtggcagtggtccggttgattacctgctggggcgggagcgtaaccgcgaaggcgcaacggtgctcc

SEQ ID NO: 785314 - DNA, 75 bp, synthetic construct
  source 1..75: mol_type = other DNA
agcgcgttgttgtcgctggcgctattgcgtcgcggctggcaggtaacactttattgcgcggatgaggcccccgca

SEQ ID NO: 785315 - DNA, 75 bp, synthetic construct
  source 1..75: mol_type = other DNA
agtgatggagcaagcattacccctcccctgcgccacgccgtggtttaaccgtacgggcagtagcaaacgggaagc

SEQ ID NO: 785316 - DNA, 75 bp, synthetic construct
  source 1..75: mol_type = other DNA
tacacctgtttcccgagattttgacgatgtctatttttccaacgataacggactggaagagacgcgttatgtttt

SEQ ID NO: 785317 - DNA, 75 bp, synthetic construct
  source 1..75: mol_type = other DNA
ccctcctccacgccgtggtttaaccgtacaggcagcagcaaacgggaagccgcagttatcggcggcggtatcgcc

SEQ ID NO: 785318 - DNA, 75 bp, synthetic construct
  source 1..75: mol_type = other DNA
aactgaccagccaactggacgattcgctgaatcaaaaagtggatgcctggtttctggacggctttgcgcccgcga

SEQ ID NO: 785319 - DNA, 75 bp, synthetic construct
  source 1..75: mol_type = other DNA
acacgatgaggcgctaaaccgctttttctctaatgcgtttacttttgctcgtcggctttacgatttattgcccgt

SEQ ID NO: 785320 - DNA, 75 bp, synthetic construct
  source 1..75: mol_type = other DNA
cagctgcgccgcttgtccgggaactgaatgccatcgagctccggcagagggagaatgagtatcagaaaagcctgg

SEQ ID NO: 785321 - DNA, 75 bp, synthetic construct
  source 1..75: mol_type = other DNA
tcactgtcaccgtgtccggtcctgtgggcagcggtaaaagttacgtactggcgcggatagaggaagtggtgaaac

SEQ ID NO: 785322 - DNA, 75 bp, synthetic construct
  source 1..75: mol_type = other DNA
tcacgacaaacaacagtatggcgaagggctggcacgttcggtgcaggacgggctgaaagcggctaacgccaacgt

SEQ ID NO: 785323 - DNA, 75 bp, synthetic construct
  source 1..75: mol_type = other DNA
tctgatgatctcgccgggagcaaccaacccggagctgacccaacgcggttatcaacacattatgcgtactgccgg

SEQ ID NO: 785324 - DNA, 75 bp, synthetic construct
  source 1..75: mol_type = other DNA
cgggtaaaggcgctgcaacgaatgctgacccgttcgctggcggctaaggcgttagcggtcaggcgagtcacggaa

SEQ ID NO: 785325 - DNA, 75 bp, synthetic construct
  source 1..75: mol_type = other DNA
tacaaagcccagatttttataaaaaaaacaaaagagtaatatacgacggttataaatgtaattgtataaaagact

SEQ ID NO: 785326 - DNA, 75 bp, synthetic construct
  source 1..75: mol_type = other DNA
cctctctgaatatgacatcaacttggtgatcatggatatcaatctgccgggtaagaacggtcttctgttagcgcg

SEQ ID NO: 785327 - DNA, 75 bp, synthetic construct
  source 1..75: mol_type = other DNA
ctggatgatcgcgcaacaacataaaagcctgctgcgttttctgacctgtggcagcgtcgatgacggcaaaagtac

SEQ ID NO: 785328 - DNA, 75 bp, synthetic construct
  source 1..75: mol_type = other DNA
cattagccgtggcgatctgctgctggcggcagacgaagcgttaccggctgtgcagagcgcgtcggtggatgtggt

SEQ ID NO: 785329 - DNA, 75 bp, synthetic construct
  source 1..75: mol_type = other DNA
cgacgaaatggagcgccgcgacctgaacaccgccgtcatcactctgtgcgccgccgccggtatggctacggccac

SEQ ID NO: 785330 - DNA, 75 bp, synthetic construct
  source 1..75: mol_type = other DNA
tttctattggtgctgctgctgttaccgtttatcttgcgatgatcggagtcagggctgtctggcgtcaaattaaat

SEQ ID NO: 785331 - DNA, 75 bp, synthetic construct
  source 1..75: mol_type = other DNA
aatgagtatcaatggatgcaggatatggatccttcaatgacaacgttgcctcagggaaatgggaacagagaaata

SEQ ID NO: 785332 - DNA, 75 bp, synthetic construct
  source 1..75: mol_type = other DNA
ttattattgccgacaccccagggcacgagcagtacacccgcaatatggcgaccggcgcgtcgacgtgtgatctgg

SEQ ID NO: 785333 - DNA, 75 bp, synthetic construct
  source 1..75: mol_type = other DNA
ccgcaaggtggctggctgtgtccggcagaactgacccgtaatgtgctggaactggcgcaacagcagggtttgcag

SEQ ID NO: 785334 - DNA, 75 bp, synthetic construct
  source 1..75: mol_type = other DNA
atggcagttccatatgaaccagcagagttcaagaaagaagcttttaactgtccatactgtcaggcgtatgccaaa

SEQ ID NO: 785335 - DNA, 75 bp, synthetic construct
  source 1..75: mol_type = other DNA
cacagcatcatggcgtgccaacaagattgttagattggactcgaatcccttacatagcgatttactttgcagtta

SEQ ID NO: 785336 - DNA, 75 bp, synthetic construct
  source 1..75: mol_type = other DNA
atcccatcagcacttcgtaatccaccgcaatatttaacaagaagaacatcacctacgtcggatgacattgttgca

SEQ ID NO: 785337 - DNA, 75 bp, synthetic construct
  source 1..75: mol_type = other DNA
ccttccgacgccgatattctggtgcctggcgataccatttcgctgattggcaccacctctttacgtattgattac

SEQ ID NO: 785338 - DNA, 75 bp, synthetic construct
  source 1..75: mol_type = other DNA
agattcaacaagcgttggatatctgtcgtgttgtgggtaataacgcggtgcatcctggtgaaataaacattgatg

SEQ ID NO: 785339 - DNA, 75 bp, synthetic construct
  source 1..75: mol_type = other DNA
agtttgataaagaggcttttaactgtccgtattgtcaggcttatgctaagcaaacatgggggcgattatatccgt

SEQ ID NO: 785340 - DNA, 75 bp, synthetic construct
  source 1..75: mol_type = other DNA
caacaagagatgaaactggatcccacgccgattgctcatcgtacccatggccttaaccctaataatctcaataaa

SEQ ID NO: 785341 - DNA, 75 bp, synthetic construct
  source 1..75: mol_type = other DNA
gggtatctatctggtgttcccggacacgaccgttatcactcaactccggaacctgattgaggcgctgaaccatga

SEQ ID NO: 785342 - DNA, 75 bp, synthetic construct
  source 1..75: mol_type = other DNA
tcaggaaaaagccgctgaatggttctgggatgcaataaccgaaagagttaaggctgaatatgccttcgcaatatt

SEQ ID NO: 785343 - DNA, 75 bp, synthetic construct
  source 1..75: mol_type = other DNA
tttcactacgcgaatttaacaatgcagctgaactttgggatgctctatcaccgacacaaaagatagacccaaact

SEQ ID NO: 785344 - DNA, 75 bp, synthetic construct
  source 1..75: mol_type = other DNA
tacctgtacgcatccagcaggcagcagacatctgccgtattgtcggcaatcaggcagtccaccccggagaaatta

SEQ ID NO: 785345 - DNA, 75 bp, synthetic construct
  source 1..75: mol_type = other DNA
gctggtcttctactccatcgtgttgccggaaattcgcgccatcatcttgcaaagtgaaggtttttgccaggatat

SEQ ID NO: 785346 - DNA, 75 bp, synthetic construct
  source 1..75: mol_type = other DNA
gtttatcactctcccggaagacgacctctcctttcaggcgactttcatccgcgcctgcgaagaggcaggaattag

SEQ ID NO: 785347 - DNA, 75 bp, synthetic construct
  source 1..75: mol_type = other DNA
gtacgggcagcagcaaacgggaagtagcgattatcggcggtggtattgccagcgcgttgttgtcgctggcgttat

SEQ ID NO: 785348 - DNA, 75 bp, synthetic construct
  source 1..75: mol_type = other DNA
cgagaggaacagcggtgtgcagctctcgacctgcggagagcagagacgccgctgcgtgagggtgaacccggaagc

SEQ ID NO: 785349 - DNA, 75 bp, synthetic construct
  source 1..75: mol_type = other DNA
attaccgtgtcgtatttaaaaccggggactatttcaagaaacaaaatcttgaaagtttcttccctgagatccccg

SEQ ID NO: 785350 - DNA, 75 bp, synthetic construct
  source 1..75: mol_type = other DNA
tggcgaacgggcatcaaatcagcggtttcagccaaacgtcgtctctgccgatgtattccgttgccggtcaagtca

SEQ ID NO: 785351 - DNA, 75 bp, synthetic construct
  source 1..75: mol_type = other DNA
acgctacactcgtggaatatgcgtcgctggcggagcagaaagatgaggcggtaagcgcaccggtttatgacgatc

SEQ ID NO: 785352 - DNA, 75 bp, synthetic construct
  source 1..75: mol_type = other DNA
ataaagaggcgcgctgcggtgtgcgttgtgccacccgcgatcatctgccaatggtaggcaatgttcccgattatg

SEQ ID NO: 785353 - DNA, 75 bp, synthetic construct
  source 1..75: mol_type = other DNA
caccacctcattacgcattgattatgatgagatcgacgataaccgggtgacggcagaagaagtcgatattctgct

SEQ ID NO: 785354 - DNA, 75 bp, synthetic construct
  source 1..75: mol_type = other DNA
cgcagaagccatcgatccgcagcaagcgcgcattatcgaaccttccgttaacccggcattgataggtgcagtgaa

SEQ ID NO: 785355 - DNA, 75 bp, synthetic construct
  source 1..75: mol_type = other DNA
tatccttactgctcatgaagtcacgggactgattcgtgaaggcgcaacggtgtgcggcgttcatgtacgcaacca

SEQ ID NO: 785356 - DNA, 75 bp, synthetic construct
  source 1..75: mol_type = other DNA
atcgaaaaacatcccctttaatcttattgtaagctctgcagataaaaagtcctggacgccagaacaagagcgtat

SEQ ID NO: 785357 - DNA, 75 bp, synthetic construct
  source 1..75: mol_type = other DNA
tcatgctacacaagaacagttgaacagggttagatggcacttataccccgatgtcagaatagaaagggaaaagag

SEQ ID NO: 785358 - DNA, 75 bp, synthetic construct
  source 1..75: mol_type = other DNA
aaggattacgcttattggtatgaatcgaccatgattattcctgcatcagcgagtgtcgagatgcctagcccagac

SEQ ID NO: 785359 - DNA, 75 bp, synthetic construct
  source 1..75: mol_type = other DNA
aatctgctgcccgcgcacgaatttccgaccgataaagcggcgattgaactgttccgcagccagtggcgcgatacc

SEQ ID NO: 785360 - DNA, 75 bp, synthetic construct
  source 1..75: mol_type = other DNA
tcgctgttgccggatgacttcatccctgacgtgaatacgcgtctgtcgttctataaacgtattgccagtgccaaa

SEQ ID NO: 785361 - DNA, 75 bp, synthetic construct
  source 1..75: mol_type = other DNA
tgatgctcacctatgccaacgacgccaaactgtatgttccggtgtcgtcactgcatctgattagccgttacgcag

SEQ ID NO: 785362 - DNA, 75 bp, synthetic construct
  source 1..75: mol_type = other DNA
atgagcaagaagaagttttctgttgagaatgaagatctctctactgttcgtacatcacttcttaattccaacctt

SEQ ID NO: 785363 - DNA, 75 bp, synthetic construct
  source 1..75: mol_type = other DNA
atatttaccagcaagtgagtaaaggcacgctgcctgccgggatcgaatactggcagccgctgttcttcagcgaac

SEQ ID NO: 785364 - DNA, 75 bp, synthetic construct
  source 1..75: mol_type = other DNA
tgccctgcgtttgcatgatgaaatcagccagttcaccgatcagatggtgatgaatctggcggactgggaaaccct

SEQ ID NO: 785365 - DNA, 75 bp, synthetic construct
  source 1..75: mol_type = other DNA
ccctgccaataccttgctggtgaatactggcgatctggaaaacagtgccgaacgtttccaggctgacacgctggc

SEQ ID NO: 785366 - DNA, 75 bp, synthetic construct
  source 1..75: mol_type = other DNA
cgcaaatccttgcggaagtggcggaagggaaaatcgatattctgatcggtacgcacaaactgctgcaaagtgacg

SEQ ID NO: 785367 - DNA, 75 bp, synthetic construct
  source 1..75: mol_type = other DNA
gggtgtttgacgtcgacagccagcgcacgctggaggaagtagaagcgatcaatctgctgcccgcgcacgaatttc

SEQ ID NO: 785368 - DNA, 75 bp, synthetic construct
  source 1..75: mol_type = other DNA
gctcttctcagagctgaaaaactggccccgtgtgcagctaaaaactgaacatttaccgacaaaagcagcgaatgc

SEQ ID NO: 785369 - DNA, 75 bp, synthetic construct
  source 1..75: mol_type = other DNA
gtgcggcgatgttggctttggtaaaacagaagtggcgatgcgcgccgctttcctggcggtagataaccacaagca

SEQ ID NO: 785370 - DNA, 75 bp, synthetic construct
  source 1..75: mol_type = other DNA
tgatttgcgaaagcgatctgctcggtgaacgcgttgcccgccgtcgtcaggattctcgccgcaccatcaaccccg

SEQ ID NO: 785371 - DNA, 75 bp, synthetic construct
  source 1..75: mol_type = other DNA
atcgtaaaagaaaaggttttttattccatgcggtgcaatttttaatctacaccataattatcagtgctgttggta

SEQ ID NO: 785372 - DNA, 75 bp, synthetic construct
  source 1..75: mol_type = other DNA
cattcgtgaggaccgcgaggagctgggaaacaataccggcccgcgctttaagtctgagctaatcaatccgcgtaa

SEQ ID NO: 785373 - DNA, 75 bp, synthetic construct
  source 1..75: mol_type = other DNA
acctgatataacgaccatggatgaccaaacactgcaggaatacctgcatggaatggggaaaaaggaactgcgtga

SEQ ID NO: 785374 - DNA, 75 bp, synthetic construct
  source 1..75: mol_type = other DNA
gccgttgacgttgacctgcaggaggcgtcagccgaccagggcgctagcgccccttggactcgtggcaataactgt

SEQ ID NO: 785375 - DNA, 75 bp, synthetic construct
  source 1..75: mol_type = other DNA
caagcgcgagcagcgccgcaaatcgctggagttcttccgctcacatgagctggtcaacgaagacggtgacacgct

SEQ ID NO: 785376 - DNA, 75 bp, synthetic construct
  source 1..75: mol_type = other DNA
gcgctttcaaacctcatcactctgtacgctgcggataacgagcgggagcatctgcgccgtgaggcgctgagtgat

SEQ ID NO: 785377 - DNA, 75 bp, synthetic construct
  source 1..75: mol_type = other DNA
ccgctggccgctgatgcgcaacgtgcggactgaaaatgtgtccgaacacagtttgcaggtagcgatggtcgccca

SEQ ID NO: 785378 - DNA, 75 bp, synthetic construct
  source 1..75: mol_type = other DNA
cgaaggtacggtggcagaaattggctggcgtatcactaaaataaacacctttgatcaccgtcctctgtacgtgcc

SEQ ID NO: 785379 - DNA, 75 bp, synthetic construct
  source 1..75: mol_type = other DNA
gtttatttcaaccagtttgccgactcgtcattgaatattatggtttattgctttaccaaaaccacggtatgggct

SEQ ID NO: 785380 - DNA, 75 bp, synthetic construct
  source 1..75: mol_type = other DNA
accataattatcagtgctgtcggcagcatcactaattatgttattgagaattataagctcaaatttatcacccca

SEQ ID NO: 785381 - DNA, 75 bp, synthetic construct
  source 1..75: mol_type = other DNA
cacgcttccacgccacgctcaacaatggcagaccaaacccgaaatggaccagcgctacagtgcgacagagcagtg

SEQ ID NO: 785382 - DNA, 75 bp, synthetic construct
  source 1..75: mol_type = other DNA
ccacgccaaaatggcccgcgagcagcagcgagtcaatcccgatctggtggttctggcagacgtaagcgccgagcc

SEQ ID NO: 785383 - DNA, 75 bp, synthetic construct
  source 1..75: mol_type = other DNA
cgccaggcttaccgtgagctgcgactgctggcgggccaggctaaacgcgaccttccgccattaaaacccgtaccg

SEQ ID NO: 785384 - DNA, 75 bp, synthetic construct
  source 1..75: mol_type = other DNA
gatgctacaaatcgcccacgctcatgcgacagaagtcacccgcgctcaggacagactaaaagaaatgaatcaacg

SEQ ID NO: 785385 - DNA, 75 bp, synthetic construct
  source 1..75: mol_type = other DNA
tgatttatctcgtggcatcggtgttcttccggctgatacgtacggcctgccgtcagcatcttgaggggtgggaac

SEQ ID NO: 785386 - DNA, 75 bp, synthetic construct
  source 1..75: mol_type = other DNA
ggcgtcgctgtttttccggctgatacgtacggcctgccgtcagcgtattgaggggcgggaaccatgtcaaagctg

SEQ ID NO: 785387 - DNA, 75 bp, synthetic construct
  source 1..75: mol_type = other DNA
agttcccgaggcatcgggtcactgtacagtgaatggggagatatggggcattacacgactgacgctggttttcaa

SEQ ID NO: 785388 - DNA, 75 bp, synthetic construct
  source 1..75: mol_type = other DNA
ggcgtcggtgttcttccggctgatacgtaaagcctgtcgtcagcgtcttgaggggcgggaattatgtcaaagctg

SEQ ID NO: 785389 - DNA, 75 bp, synthetic construct
  source 1..75: mol_type = other DNA
atcgctggccgtgaagattgtcacgtcgctgtttttgcagccggtgccgtggcgcagacgggcggcggctctggt

SEQ ID NO: 785390 - DNA, 75 bp, synthetic construct
  source 1..75: mol_type = other DNA
tggaacgctacgggcgggagctgccaccggaatcgctggccgtgaagattgtcacgtcgctgtttttgcagccgg

SEQ ID NO: 785391 - DNA, 75 bp, synthetic construct
  source 1..75: mol_type = other DNA
tgctgaacgtgttgctggcgctgatgctggcactgtccctgatttacccgcagagcgtggccgtcaattttgtcg

SEQ ID NO: 785392 - DNA, 75 bp, synthetic construct
  source 1..75: mol_type = other DNA
aataatgacaactttgcccctggaaaaacggcggctgattatgagttttcaagctctgcctcctgggtcgatgtt

SEQ ID NO: 785393 - DNA, 75 bp, synthetic construct
  source 1..75: mol_type = other DNA
aatgaggcggtgacattcacgctaccggcagatgtgagcgcaagctttactctcggacaaggcggttccgccatt

SEQ ID NO: 785394 - DNA, 75 bp, synthetic construct
  source 1..75: mol_type = other DNA
acttcaggcaacagtgactgatggaaacggcaacccgttagccaatgaggcggtgacattcacgctaccggcaga

SEQ ID NO: 785395 - DNA, 75 bp, synthetic construct
  source 1..75: mol_type = other DNA
tcgccacagctacgctgaccagtttgaaaaatggtgattatagggttacggcctctgtgagctctggttcccagg

SEQ ID NO: 785396 - DNA, 75 bp, synthetic construct
  source 1..75: mol_type = other DNA
cgtcacgctaagcagcaccagcgttgaaacggatgatcggggtttcgctgaaattcttgtgacaagcaccgaggt

SEQ ID NO: 785397 - DNA, 75 bp, synthetic construct
  source 1..75: mol_type = other DNA
ttaccgcgatgccatcgacgcgctgtttgatgccaaccgctttggtcagaagaacggcctcggtttctggcgtta

SEQ ID NO: 785398 - DNA, 75 bp, synthetic construct
  source 1..75: mol_type = other DNA
gccgggtggtaaaatataacgaaccgcgaatgccgtggccggaggtggttgctttgctgcaaaaatatacccgtc

SEQ ID NO: 785399 - DNA, 75 bp, synthetic construct
  source 1..75: mol_type = other DNA
gttggatattccagtgattgctaacggtgaaatctgggactggcagagcgcgcaacaatgcatggcgatcagcgg

SEQ ID NO: 785400 - DNA, 75 bp, synthetic construct
  source 1..75: mol_type = other DNA
gcaactgctgggacagtttccgcaatggctggcagagaacgccgctcgtgcggtggagttgggttcctggggcgt

SEQ ID NO: 785401 - DNA, 75 bp, synthetic construct
  source 1..75: mol_type = other DNA
atggcccacagtaacgagatggcacgtgcacaggatcgtattaacgaaatcaaccagcgagttatttcaggtagt

SEQ ID NO: 785402 - DNA, 75 bp, synthetic construct
  source 1..75: mol_type = other DNA
gggcatccagttactgcagatcgccatggcccacagtaacgagatggcacgtgcacaggatcgtattaacgaaat

SEQ ID NO: 785403 - DNA, 75 bp, synthetic construct
  source 1..75: mol_type = other DNA
gttgcgtatagcaatgagatgagccgggcacaggatcgcataaacgaaattaaccaacgggtattagctggtagt

SEQ ID NO: 785404 - DNA, 75 bp, synthetic construct
  source 1..75: mol_type = other DNA
gaatgcgtgctggcgaccgattatcgtctggcgacgccggatctgcgcatcggtctgccggaaaccaaactgggc

SEQ ID NO: 785405 - DNA, 75 bp, synthetic construct
  source 1..75: mol_type = other DNA
acgaagctcgcgcactggtcggcattttccttaacgatcaatatgtaaaaggcaaagcgaagaaactcaccaaag

SEQ ID NO: 785406 - DNA, 75 bp, synthetic construct
  source 1..75: mol_type = other DNA
gtttcagccagctgctgcgcgacggcgcggatttccgcaagatcgacaaagtgatggaaaaacagttcggctggc

SEQ ID NO: 785407 - DNA, 75 bp, synthetic construct
  source 1..75: mol_type = other DNA
tacatttttatcgttgtggttaaacgtgaatttttacttcttcacaaatcttatagcgaaggtgttgaaatgaga

SEQ ID NO: 785408 - DNA, 75 bp, synthetic construct
  source 1..75: mol_type = other DNA
atctcgctggtcgctgccgggtggatttttaccgcgctgatttatctcgtggcatcggtgttcttccggctgata

SEQ ID NO: 785409 - DNA, 75 bp, synthetic construct
  source 1..75: mol_type = other DNA
tgggcaagacgccgattgtggtgaacgactgccccggcttcttcgttaaccgcgtactgttcccctacttcgctg

SEQ ID NO: 785410 - DNA, 75 bp, synthetic construct
  source 1..75: mol_type = other DNA
cagcgttttaatccggatatggtcattctggcggacgtcaacgcccagccttcccatatcagcaagcccctgatg

SEQ ID NO: 785411 - DNA, 75 bp, synthetic construct
  source 1..75: mol_type = other DNA
tcgctttatggcaagccatgaagggctggacggcctgctgatcctgcctgaaatgagtcaggatcaggtgaaacg

SEQ ID NO: 785412 - DNA, 75 bp, synthetic construct
  source 1..75: mol_type = other DNA
acatgggaaaaggtggcagcggaaaccctgcgtctggatgttattccgcctgcgtttgagcaactccgtcggaaa

SEQ ID NO: 785413 - DNA, 75 bp, synthetic construct
  source 1..75: mol_type = other DNA
cctgtccacccttgttgctgcgtatatgagcatgtgccttgatgcagcttgtggcgatttgtatgccaccgatga

SEQ ID NO: 785414 - DNA, 75 bp, synthetic construct
  source 1..75: mol_type = other DNA
tgctgtctgcctggtcagcaaaaaagcatccccctatgtcagctatgaagcagtgatgcataaacgtgagcagcg

SEQ ID NO: 785415 - DNA, 75 bp, synthetic construct
  source 1..75: mol_type = other DNA
gttctcatgaactggtgaacgaagagggcgacacgctggatatggaagatgtggtaaacgccagcagcagcaacc

SEQ ID NO: 785416 - DNA, 75 bp, synthetic construct
  source 1..75: mol_type = other DNA
tgcaagatataattcatcccgtcgattaaaggtcagagagatcttttcaactattagtctcgctttaattggcct

SEQ ID NO: 785417 - DNA, 75 bp, synthetic construct
  source 1..75: mol_type = other DNA
atttattcagtatcaatactgcgacactgggctataaaacaccgctacctgccattattaatgcctgcgccgcac

SEQ ID NO: 785418 - DNA, 75 bp, synthetic construct
  source 1..75: mol_type = other DNA
ctgctcggcggcctgatgtatccgctcagctgcaaaccggacgatatttttgaaaccctgcagcagaaccgtagc

SEQ ID NO: 785419 - DNA, 75 bp, synthetic construct
  source 1..75: mol_type = other DNA
ttactgcattgttgcgtaagtttgctatccgtgaagaccgtgaggagctgggcaataacacggggccgcgcttta

SEQ ID NO: 785420 - DNA, 75 bp, synthetic construct
  source 1..75: mol_type = other DNA
ggcagcgttctggcaaaagcctgcgctgactgcgttatcggtcacaacaacacagatgctattgcggattttctt

SEQ ID NO: 785421 - DNA, 75 bp, synthetic construct
  source 1..75: mol_type = other DNA
ttgcgccagacagaggaatttgcccgacaagaattatcgctggcctgtagctggtcctggcatcatcaactggat

SEQ ID NO: 785422 - DNA, 75 bp, synthetic construct
  source 1..75: mol_type = other DNA
gcagcggctttaacgaggtcgccgcagcattctcatggaacagcccgaaaaaggccattaacccttatctggacc

SEQ ID NO: 785423 - DNA, 75 bp, synthetic construct
  source 1..75: mol_type = other DNA
acagggtgacaaaaaagcaggtgcgccggtactggatgatccgcgtcttgatgccatcctggctgctgctgatgc

SEQ ID NO: 785424 - DNA, 75 bp, synthetic construct
  source 1..75: mol_type = other DNA
gccggaaaagaaaccgccgcaaacctgtgccttatgaactcatcccgggttcgctggcgcgtatgctgtgcgccg

SEQ ID NO: 785425 - DNA, 75 bp, synthetic construct
  source 1..75: mol_type = other DNA
ctgaaaatttgaaccaacaggagaaaaacaaatcagctgatggagataccagaacggatatcacccgcatggatg

SEQ ID NO: 785426 - DNA, 75 bp, synthetic construct
  source 1..75: mol_type = other DNA
gctttcaaacctgatcactctgtacgctgtcgataacgagcaggaacaactgcgtcgcgaggcactgagtgatca

SEQ ID NO: 785427 - DNA, 75 bp, synthetic construct
  source 1..75: mol_type = other DNA
tgcgtttgagcaactctgtcggaaaagaaaccgccgtaaacccgtgccttatgaactcattccgggttcgctggc

SEQ ID NO: 785428 - DNA, 75 bp, synthetic construct
  source 1..75: mol_type = other DNA
tcgggcaaagctggcgcatgagcagcagtgttttaacccggacatggtcattctggcggacgtcagcgcccagcc

SEQ ID NO: 785429 - DNA, 75 bp, synthetic construct
  source 1..75: mol_type = other DNA
tggctgagcctcatcatgacggcaccgttcactggcacctattgtgtttcatgcgcaaaaaagaccgccgcgcca

SEQ ID NO: 785430 - DNA, 75 bp, synthetic construct
  source 1..75: mol_type = other DNA
aggatttgatggcagcgagaaagaggtcgatttactccttcgcggaggcagtattccgtcaggagcaggcctgcg

SEQ ID NO: 785431 - DNA, 75 bp, synthetic construct
  source 1..75: mol_type = other DNA
gctttcaaacctgatcactctatacgctgccgataacgagcaggaacaactgcgccgcgaggcactgagtgatca

SEQ ID NO: 785432 - DNA, 75 bp, synthetic construct
  source 1..75: mol_type = other DNA
acatcatgaagcagggcggcgtgctggttccccgcaaatatcaccttatcagaacagcttatgaaattaacgaag

SEQ ID NO: 785433 - DNA, 75 bp, synthetic construct
  source 1..75: mol_type = other DNA
gacggcgcggctgagattggtaaaacctaagcggcagaaagggtacaaacagcagattagcaatcatcagcgcca

SEQ ID NO: 785434 - DNA, 75 bp, synthetic construct
  source 1..75: mol_type = other DNA
agaaaccgccgtaaacccgtgccctatgaactcattccgggttcgttggcgcgtatgttgtgcgccgactggtgg

SEQ ID NO: 785435 - DNA, 75 bp, synthetic construct
  source 1..75: mol_type = other DNA
ccagcgaagggttaaggctagtctctccaagtgaggctgccgacatccgagctggcgcagtttcaaagctgcgtt

SEQ ID NO: 785436 - DNA, 75 bp, synthetic construct
  source 1..75: mol_type = other DNA
ccgttttatggcaagccatcaagggctggagggtctgctgatcctgcctgaaatgagccaggatcaggtgaaacg

SEQ ID NO: 785437 - DNA, 75 bp, synthetic construct
  source 1..75: mol_type = other DNA
tactgttgcagcaactttgggggcagacctatttaaaaagaatgaagttgcaactgctgtaggaatggctggagc

SEQ ID NO: 785438 - DNA, 75 bp, synthetic construct
  source 1..75: mol_type = other DNA
aatagtttcgttgcagatttccgggtaagccatgacggacttattccattcaattatctaattgatggtcttcaa

SEQ ID NO: 785439 - DNA, 75 bp, synthetic construct
  source 1..75: mol_type = other DNA
acattgcgaaatatatcagtaagaatattgacgggcgtggtttggctggcgagatcagtaaggaaacgggtaaat

SEQ ID NO: 785440 - DNA, 75 bp, synthetic construct
  source 1..75: mol_type = other DNA
acgagggcactgcctgttcccgggaactccgggggcaggtatgagcataaccaaacaaccgatgtaccggttttt

SEQ ID NO: 785441 - DNA, 75 bp, synthetic construct
  source 1..75: mol_type = other DNA
cgccctgactggctcctggatgggactggcattcatgcgtggtatcatgggcgttagtgaagcttcagctattcc

SEQ ID NO: 785442 - DNA, 75 bp, synthetic construct
  source 1..75: mol_type = other DNA
cggcagaccaaatccgaagtggaccagcgccacagtccgccagagcagtgattacctggttgatacgttcgccgc

SEQ ID NO: 785443 - DNA, 75 bp, synthetic construct
  source 1..75: mol_type = other DNA
ccgcaaacatcaccttgtccgcactgcttatgagcttaacgacgaaccgagcgcctacggcgatcacggtatccg

SEQ ID NO: 785444 - DNA, 75 bp, synthetic construct
  source 1..75: mol_type = other DNA
gtgacagcgccgagcatgtcagcacctgggcgtcactgcaccgtgtccagcaatttcgtttctttggtattccgg

SEQ ID NO: 785445 - DNA, 75 bp, synthetic construct
  source 1..75: mol_type = other DNA
actcgtggcaataactgtccccctgttgaaaatttgaaccaaacagggggggaagtaacgggtatcacgtccatg

SEQ ID NO: 785446 - DNA, 75 bp, synthetic construct
  source 1..75: mol_type = other DNA
aagcagggtggcgtactggttccccgcaaatatcacctcatcagaactgcttatgaaatcaacgaagagccgacc

SEQ ID NO: 785447 - DNA, 75 bp, synthetic construct
  source 1..75: mol_type = other DNA
cagttacgccgcaaaaagcgtcgacgcaagccggtgccctatgaactgatcccaccgtcgctggcgcggatgctg

SEQ ID NO: 785448 - DNA, 75 bp, synthetic construct
  source 1..75: mol_type = other DNA
agcattttcatggaacggcccgaaaaaggccattaacccttatctggacccggcggaagttgctccggagtctgc

SEQ ID NO: 785449 - DNA, 75 bp, synthetic construct
  source 1..75: mol_type = other DNA
ttgcggatttactctgccgaacgccccactaactccgcgtcaggatattaaagcctttgttgaactgcatattga

SEQ ID NO: 785450 - DNA, 75 bp, synthetic construct
  source 1..75: mol_type = other DNA
ggatcagccataacccggcggaacgcaccaatattaccgaccttgccgaaggggtcaaaacgttggcactcatgc

SEQ ID NO: 785451 - DNA, 75 bp, synthetic construct
  source 1..75: mol_type = other DNA
cggcggaatttgcgccggagtctgcactttcaaacctgatcactctgtatgctgccgataacgagcaggaacaac

SEQ ID NO: 785452 - DNA, 75 bp, synthetic construct
  source 1..75: mol_type = other DNA
gcgtgattagcgaaaccagttcaacctatcagctactcaacattattgccgacgcggccttcttcttcctaccag

SEQ ID NO: 785453 - DNA, 75 bp, synthetic construct
  source 1..75: mol_type = other DNA
gtaatcagcgtggtggagaagggcggtcagttccagatagttattggcaatgaggtgcagcaggtttatcgcttg

SEQ ID NO: 785454 - DNA, 75 bp, synthetic construct
  source 1..75: mol_type = other DNA
cggtaacctcgacgggcaattcggcgcgctggcggcgtggctggcaattgactggctgaaaacgcaatacggcgc

SEQ ID NO: 785455 - DNA, 75 bp, synthetic construct
  source 1..75: mol_type = other DNA
gaatcccgtgatcctgtccaacgcgaaatggagcaggataagctcattagccgggcaaagatggcgcatgagcag

SEQ ID NO: 785456 - DNA, 75 bp, synthetic construct
  source 1..75: mol_type = other DNA
atttcgtaaggcgatgcacaaagccggattacgctggtatggcgtgcgggtggctgagccgcatcatgacggtac

SEQ ID NO: 785457 - DNA, 75 bp, synthetic construct
  source 1..75: mol_type = other DNA
aatgagtctgagcaagagcttatcgttaccattaacaaatatgccagtcagattgcagcaaagccgccgcaggag

SEQ ID NO: 785458 - DNA, 75 bp, synthetic construct
  source 1..75: mol_type = other DNA
gataacgccgaatacgtgaatgcctgggcgtctctacatcgtgttcagcagttccgcttctttggtattccgggg

SEQ ID NO: 785459 - DNA, 75 bp, synthetic construct
  source 1..75: mol_type = other DNA
gcgtggtggcagcattccgtcaggtgccgggctacggattttttaccgcaaccatcgactgcaggaagatgacaa

SEQ ID NO: 785460 - DNA, 75 bp, synthetic construct
  source 1..75: mol_type = other DNA
ctatttacgtgagacgattaagccatgcctggaacgactggagcatgtacgcgacagtcagctatctgcatcttt

SEQ ID NO: 785461 - DNA, 75 bp, synthetic construct
  source 1..75: mol_type = other DNA
taagggattgcgtaatcatcttcagaaaatccggcaaatagtgaagcgtaatgcggcatcaaaacagggtgattt

SEQ ID NO: 785462 - DNA, 75 bp, synthetic construct
  source 1..75: mol_type = other DNA
acgttgccgcgtgccattccgcttgccagagaaaaaggataattcgggtatcgtgatggtggtaatgctgccaac

SEQ ID NO: 785463 - DNA, 75 bp, synthetic construct
  source 1..75: mol_type = other DNA
tcggccagcaaatccccggtaaataccgggtttcggtgtttgtaaacgaagaaaaaatggcttcccggacgctgg

SEQ ID NO: 785464 - DNA, 75 bp, synthetic construct
  source 1..75: mol_type = other DNA
gtaccgccggtgaaatcggcgctctgctccttgaagcgcgattaatcaaagaacaacagccgctgtttaataaac

SEQ ID NO: 785465 - DNA, 75 bp, synthetic construct
  source 1..75: mol_type = other DNA
tggcaacgcagtaccgtttggtgcaaccgcagcgttaattgatgagagcaaacctgccagcagcattgtgggtga

SEQ ID NO: 785466 - DNA, 75 bp, synthetic construct
  source 1..75: mol_type = other DNA
tacagcgtggcctatacctggacgagaagtccggaatgggaagaagacgatcgcttgtggtcattcagtgtttcc

SEQ ID NO: 785467 - DNA, 75 bp, synthetic construct
  source 1..75: mol_type = other DNA
ccaccagaagcctgcgtagcgtttgatgaaatcattccccaggccaccagccgctttgattttaatactcagacg

SEQ ID NO: 785468 - DNA, 75 bp, synthetic construct
  source 1..75: mol_type = other DNA
gtggaagcccgcatgctggaatttaaagaggccacagaaacacagcgtaaagcgatggggcagtctctgattcct

SEQ ID NO: 785469 - DNA, 75 bp, synthetic construct
  source 1..75: mol_type = other DNA
gtagggccatcatccctttcaaagcgcaattaacaatgggggatacggcgaccgcgggggatatttttgacagcg

SEQ ID NO: 785470 - DNA, 75 bp, synthetic construct
  source 1..75: mol_type = other DNA
gtgatcgttcacagcgaaggcgtgacgctttcccagccgctaggcgaaaccatgacgctcatctccgtacccggc

SEQ ID NO: 785471 - DNA, 75 bp, synthetic construct
  source 1..75: mol_type = other DNA
ggacacccgccgggtttgatcacgacggttataaaattctttgtaagccgctgctttccggtaactatgaaatta

SEQ ID NO: 785472 - DNA, 75 bp, synthetic construct
  source 1..75: mol_type = other DNA
ggtacattaggtacactatgggtagcctaccaagcatacctaaaagcacctgaatggttgtcgcaaaaacattat

SEQ ID NO: 785473 - DNA, 75 bp, synthetic construct
  source 1..75: mol_type = other DNA
taatactactaagtaccgtactattactgctgctaattgctatattagttggtgtaaaaatattattttctggtt

SEQ ID NO: 785474 - DNA, 75 bp, synthetic construct
  source 1..75: mol_type = other DNA
tgagctgggggaacgagcaggcgcaacgttgccgtgtgccattccgcttgccagagaacaaggacaatgcggcta

SEQ ID NO: 785475 - DNA, 75 bp, synthetic construct
  source 1..75: mol_type = other DNA
ccagggaatgttatgcccgctcagggagagattgatgtaatgaaatatggaaaatatcgtcctgacatgtatact

SEQ ID NO: 785476 - DNA, 75 bp, synthetic construct
  source 1..75: mol_type = other DNA
gatgtaaaagtagacaagaatcaaaaaatagttgatgtcagttggcgagtagaatttgaagatgatggtgtgagt

SEQ ID NO: 785477 - DNA, 75 bp, synthetic construct
  source 1..75: mol_type = other DNA
atcctcgtcggaatgtccatttttatgctggcaacgctggtcgcggtcacgacctccagtttgacggtattgatt

SEQ ID NO: 785478 - DNA, 75 bp, synthetic construct
  source 1..75: mol_type = other DNA
ctggtttggcgtgatgaatgtctggacgctgctcattcccgccgcgctgttctttttcggtgccgggatgctgtt

SEQ ID NO: 785479 - DNA, 75 bp, synthetic construct
  source 1..75: mol_type = other DNA
tgggcgcggtgttagggttgagcagtatgacggtcagtattttgtttattctgccgattccggcagcgttttttg

SEQ ID NO: 785480 - DNA, 75 bp, synthetic construct
  source 1..75: mol_type = other DNA
ctaagctaaaaagcaaatcactactcgtaagactgattgctttatgtggtgatatgatgataaaagttgattatc

SEQ ID NO: 785481 - DNA, 75 bp, synthetic construct
  source 1..75: mol_type = other DNA
ctactcgtaagactgattgctttatgtggtgatatgatgataaaagttgattatccacttcataattcaccagag

SEQ ID NO: 785482 - DNA, 75 bp, synthetic construct
  source 1..75: mol_type = other DNA
gataattgtaaaaatgccaacgaagcactctatgatctaaaacgaaaagaaatcatgagtcaaatgcttggacgc

SEQ ID NO: 785483 - DNA, 75 bp, synthetic construct
  source 1..75: mol_type = other DNA
gatttgtcagtttacgactctcctgtcggccagcaaatacccggtaaatatcgggtatttgtgtttgtaaacgaa

SEQ ID NO: 785484 - DNA, 75 bp, synthetic construct
  source 1..75: mol_type = other DNA
tggcgcgcgatctcaacgtccgtgaaggggcggtgcagagcgtaatgggcgcttatctgctgacttacggtgtct

SEQ ID NO: 785485 - DNA, 75 bp, synthetic construct
  source 1..75: mol_type = other DNA
gcggaaaccctcaaggccggaaaactgtatatcgactacgactatacaccggtgcctcctcttgaaaacctgacc

SEQ ID NO: 785486 - DNA, 75 bp, synthetic construct
  source 1..75: mol_type = other DNA
agaattaaattatcaggtaataagatactgacgccactgaatatacctgattataaagaaatgataagcggtggt

SEQ ID NO: 785487 - DNA, 75 bp, synthetic construct
  source 1..75: mol_type = other DNA
tgcgtggcgccttataaattatccctggaattaaaacagggcggaattattcctgtttcagccaattgccagtaa

SEQ ID NO: 785488 - DNA, 75 bp, synthetic construct
  source 1..75: mol_type = other DNA
tcaggtcgttgattaccgcgttgtgaagatgcccgttaccaaaggtggaaagctggagctgaccatcactgaact

SEQ ID NO: 785489 - DNA, 75 bp, synthetic construct
  source 1..75: mol_type = other DNA
tcaggtcgttgattatcgcgttgtgaagatgcccgttaccaaaggtgggaagctggagctgaccatcaccgaact

SEQ ID NO: 785490 - DNA, 75 bp, synthetic construct
  source 1..75: mol_type = other DNA
tactgacatctatagccatcagttccgcattgtgctggctgagaaaggtgtaagtttcgagatcgaacacgtgga

SEQ ID NO: 785491 - DNA, 75 bp, synthetic construct
  source 1..75: mol_type = other DNA
gagctgtcgtacgggcgcatttcgatacccgtgtgggttatcgagttcttatgacattaattcggcaaaatgaag

SEQ ID NO: 785492 - DNA, 75 bp, synthetic construct
  source 1..75: mol_type = other DNA
ttatcgtttcctttactcaaaaagttttgccagtggtactgatttccgtctgttaggttataaatattcaacaaa

SEQ ID NO: 785493 - DNA, 75 bp, synthetic construct
  source 1..75: mol_type = other DNA
ttttatatcctatagccgatcgtattggcttgcttgtggtcgacgaggcgcactgcatctctgattggggccacg

SEQ ID NO: 785494 - DNA, 75 bp, synthetic construct
  source 1..75: mol_type = other DNA
gtgaatacttacaacatcacaataccctggcccccgagcaataaccgctagtaccgccataatcgcgggcgcacg

SEQ ID NO: 785495 - DNA, 75 bp, synthetic construct
  source 1..75: mol_type = other DNA
atatcggcttggctatgccagtgaaaatccgtattgagtgccacatgccggatcgccgtcgccgtgacctggata

SEQ ID NO: 785496 - DNA, 75 bp, synthetic construct
  source 1..75: mol_type = other DNA
gtgaatacttactgcatcacactaccctggccgccgagcaataaccgctattaccgccataatcgcgggcgcaca

SEQ ID NO: 785497 - DNA, 75 bp, synthetic construct
  source 1..75: mol_type = other DNA
cggtaatgacgctgttttccggtcctactgacatctatagccatcagttccgcattgtgctggctgagaaaggtg

SEQ ID NO: 785498 - DNA, 75 bp, synthetic construct
  source 1..75: mol_type = other DNA
gtgaatacttacgacatcacaatgccctggcccccgagcaataaccgctagtaccgccataatcgcgggcgcacc

SEQ ID NO: 785499 - DNA, 75 bp, synthetic construct
  source 1..75: mol_type = other DNA
gtgaatacttactacatcacaatcccctggcccccgagcaataaccgctagtaccgccataatcgcgggcgcact

SEQ ID NO: 785500 - DNA, 75 bp, synthetic construct
  source 1..75: mol_type = other DNA
gccgtccggcgaaaacttcctgccactgacgatgttcgtgtccttcatcctgcgcgatcagcttgcctgggactt

SEQ ID NO: 785501 - DNA, 75 bp, synthetic construct
  source 1..75: mol_type = other DNA
tggggtaatgatgcgtcgcagcaatgcgtggctccatataaattatccctggaattaaaacagggcggaattgtt

SEQ ID NO: 785502 - DNA, 75 bp, synthetic construct
  source 1..75: mol_type = other DNA
catcgcccttccggtgtttgtctttgccagagtgccgagcgatacgcatcaaaatgtagctatttcacggcgaaa

SEQ ID NO: 785503 - DNA, 75 bp, synthetic construct
  source 1..75: mol_type = other DNA
tgtttaccctcggttcactgttttgcgcgctttccggcacgctgaacgaactgttgctggcacgcgcgttacagg

SEQ ID NO: 785504 - DNA, 75 bp, synthetic construct
  source 1..75: mol_type = other DNA
aacggcaacgctaatcaccgataaacaaaacgaggtgagcagtatcgttggtgaagaaggacagctctatattag

SEQ ID NO: 785505 - DNA, 75 bp, synthetic construct
  source 1..75: mol_type = other DNA
gagcgacagctactacctcaacttacgcagcggcctgaaccttggcgcgtggcggttacgtaattacagtacctg

SEQ ID NO: 785506 - DNA, 75 bp, synthetic construct
  source 1..75: mol_type = other DNA
ttttgatacccgcgttggttaccgcgtattaatgacgctgcttcgttccgcgggcagcccggtgccctttggagc

SEQ ID NO: 785507 - DNA, 75 bp, synthetic construct
  source 1..75: mol_type = other DNA
gtcccactgctttgatttgtcagaagtgacgctgcaaaactggcaacgtcgcaaggtggatattgaaccggatca

SEQ ID NO: 785508 - DNA, 75 bp, synthetic construct
  source 1..75: mol_type = other DNA
atcacctggcctggaaagcggtacatgaacaaagtccggtaggtgattttctggatatgttcagccaccgcctga

SEQ ID NO: 785509 - DNA, 75 bp, synthetic construct
  source 1..75: mol_type = other DNA
atatcagttcactgaaacgggatatgtcaggcgtattcaggatgaccaccacatttatgggattacagggcagcc

SEQ ID NO: 785510 - DNA, 75 bp, synthetic construct
  source 1..75: mol_type = other DNA
tgcagacgcggcgcttcgatctctccggctttttattgctggcggttggcatggcggtattaaccctggcgctgg

SEQ ID NO: 785511 - DNA, 75 bp, synthetic construct
  source 1..75: mol_type = other DNA
taccgtcgggtactggtggcgaccacgctgggcctgtcgctggtcaccctgctgtttatgactaccgctctgctg

SEQ ID NO: 785512 - DNA, 75 bp, synthetic construct
  source 1..75: mol_type = other DNA
ttatacttaatcaatcaattgatggtctcggcctgatgctgcaaaattttgtagcgatgagtttaagtaccgatg

SEQ ID NO: 785513 - DNA, 75 bp, synthetic construct
  source 1..75: mol_type = other DNA
gagagggattagtgattttggcgacagcacaaaagacgacgctttccattcaattgcttcagtagcggctgctat

SEQ ID NO: 785514 - DNA, 75 bp, synthetic construct
  source 1..75: mol_type = other DNA
gttgcagggtaacgtcaataatctgttcgataaaacctatgacactaacgtggaaggttctgtcgtctacggcgc

SEQ ID NO: 785515 - DNA, 75 bp, synthetic construct
  source 1..75: mol_type = other DNA
acaaatgaagttttgattaattttcctatcccatttccgacagccgtcatttctattaatgaacatgaccaggct

SEQ ID NO: 785516 - DNA, 75 bp, synthetic construct
  source 1..75: mol_type = other DNA
atgaaaaggcaaagaaacgtcaatttgttattgatgttggtattactcgtggccgtcggtcagatggcgcaaacc

SEQ ID NO: 785517 - DNA, 75 bp, synthetic construct
  source 1..75: mol_type = other DNA
gtcatcaaatgccgtactgtgaccgaagttaatggtggtggtatcttccagcgcgaggagcagcggatgtgcctc

SEQ ID NO: 785518 - DNA, 75 bp, synthetic construct
  source 1..75: mol_type = other DNA
ctaaaactggcgtatcagaattttatgatggcgacattccttggttgagaactcaagaagtaaacttttgtgata

SEQ ID NO: 785519 - DNA, 75 bp, synthetic construct
  source 1..75: mol_type = other DNA
tggtcagaggctgctgagcgatatcacaccagcgagcattctgcgccttcagcagacgttaagtacttccctgtc

SEQ ID NO: 785520 - DNA, 75 bp, synthetic construct
  source 1..75: mol_type = other DNA
cgatatcccgatggtgcagttgagtatcgacagtagcaaacctgccgcctggcatttcgaaatggggcgcaaact

SEQ ID NO: 785521 - DNA, 75 bp, synthetic construct
  source 1..75: mol_type = other DNA
atggagacgccgcccacgattcatgactttggtggcttcccgcaggcgctgtacgatacgcattatcctgctccg

SEQ ID NO: 785522 - DNA, 75 bp, synthetic construct
  source 1..75: mol_type = other DNA
ttactaatcagctcattaaatcactgccccctaacacatcagatgcacgcagcaccgatgccgaatacagcgaca

SEQ ID NO: 785523 - DNA, 75 bp, synthetic construct
  source 1..75: mol_type = other DNA
caccgaggacgaaattcgtcgtatttttctctctgccgataacgataccagccccgtcgcggcccgctatgtgaa

SEQ ID NO: 785524 - DNA, 75 bp, synthetic construct
  source 1..75: mol_type = other DNA
agcgttattttaccgaggacgaaattcgtcgtatttttctctccgccgataacgataccagccctgtagctgccc

SEQ ID NO: 785525 - DNA, 75 bp, synthetic construct
  source 1..75: mol_type = other DNA
atttatattccagctattgccgatatggcgcgcgatctcaacgtccgtgaaggggcggtgcagagcgtaatgggc

SEQ ID NO: 785526 - DNA, 75 bp, synthetic construct
  source 1..75: mol_type = other DNA
gccagcaggcgtcgctctctttctccgcgctggtgcaggtgcgcaataaaatcgccaccgggtttaacgacctga

SEQ ID NO: 785527 - DNA, 75 bp, synthetic construct
  source 1..75: mol_type = other DNA
tctttctccgcgctggtgcaggtgcgcaacaaaatcgccaccggatttaacgatctgatgagtatgtcgatctaa

SEQ ID NO: 785528 - DNA, 75 bp, synthetic construct
  source 1..75: mol_type = other DNA
ttcgtttaaccgcattatgtccggcgcgctcggtcacgttgaccagttccagcaggtggcggagcagcagcaaac

SEQ ID NO: 785529 - DNA, 75 bp, synthetic construct
  source 1..75: mol_type = other DNA
tggcggcttcagcattacaggccgcaggcggaatggattatctggtacgcgtcgccggtaattttatgcgtcgta

SEQ ID NO: 785530 - DNA, 75 bp, synthetic construct
  source 1..75: mol_type = other DNA
atcggtaaaccgatggaaacacgcgatatcattattatctgtatgctctctgccgcctgcctgatggtggtgctg

SEQ ID NO: 785531 - DNA, 75 bp, synthetic construct
  source 1..75: mol_type = other DNA
gacctggcaggcgcgatgatcgccagccagcaggcgtcgctctctttctccgcgctggttcaggtgcgcaacaaa

SEQ ID NO: 785532 - DNA, 75 bp, synthetic construct
  source 1..75: mol_type = other DNA
ggcacaacggtagctgctggtacgtagacgacacaatgctggtaagcgatgaagacgcggcccatcttgagcgca

SEQ ID NO: 785533 - DNA, 75 bp, synthetic construct
  source 1..75: mol_type = other DNA
gctgatgaccttgatgggattattaattgtgctgtgctggctgccgctggcgacgcggatatctcaccaggggca

SEQ ID NO: 785534 - DNA, 75 bp, synthetic construct
  source 1..75: mol_type = other DNA
tgctggctacgctaattgcagtcaccacctccagcctgacggtgttgattgccgccagcgcgatgcaggggatgg

SEQ ID NO: 785535 - DNA, 75 bp, synthetic construct
  source 1..75: mol_type = other DNA
gtacttttgacaaagcctgcctgaccagcgtgcaagacttacaacctgttgagataaaagcactgcgggaaaaat

SEQ ID NO: 785536 - DNA, 75 bp, synthetic construct
  source 1..75: mol_type = other DNA
agagcggcgagtatagcgactatcaggaatacgcgaagctggttaatgagcgtccggcaaccacgctacgcgatc

SEQ ID NO: 785537 - DNA, 75 bp, synthetic construct
  source 1..75: mol_type = other DNA
ccagcactgtctatgacgtgtttccgctttttatggtcaaagtcgatggccttaacgacgaagaaactgacgcgc

SEQ ID NO: 785538 - DNA, 75 bp, synthetic construct
  source 1..75: mol_type = other DNA
atgaccgtcactccttatagcgtcggtgaagcctatgcggtcggcgcaaactggttaggcggcgcgaatattatc

SEQ ID NO: 785539 - DNA, 75 bp, synthetic construct
  source 1..75: mol_type = other DNA
gctcgctacgccgcaactgttactgacggcgctcacctgttcggagtgcaacgtctgcgccagcgtcgcctgtcc

SEQ ID NO: 785540 - DNA, 75 bp, synthetic construct
  source 1..75: mol_type = other DNA
cccctcagagagcactggacacgggagttcaccgaccagtgcatggaaaaggtcaaggcgattttcccgcatctt

SEQ ID NO: 785541 - DNA, 75 bp, synthetic construct
  source 1..75: mol_type = other DNA
aatgctcagcgctggctggccatccgggaccgccggtgggagaaaaaacaggccgctctggccgggacgacggac

SEQ ID NO: 785542 - DNA, 75 bp, synthetic construct
  source 1..75: mol_type = other DNA
acagtcagacgatccgtgagcgagttcaggcagccggggttgtgggtgctggcggcgcaggctttccaacacata

SEQ ID NO: 785543 - DNA, 75 bp, synthetic construct
  source 1..75: mol_type = other DNA
cgatctctgcccacgtcatttaatcggtcacgaactggcaccccatttattagtacgtgcggttaactaccaaca

SEQ ID NO: 785544 - DNA, 75 bp, synthetic construct
  source 1..75: mol_type = other DNA
gatcacatcgctcgacacaccagtcagcaaaaccactggcggcttgctggttttacccaactctcattcactgat

SEQ ID NO: 785545 - DNA, 75 bp, synthetic construct
  source 1..75: mol_type = other DNA
tcgccgctgtgcgagaaaacgacgctattcgccagatagcggtcaccaccaatggttaccgtctggaacgcgatg

SEQ ID NO: 785546 - DNA, 75 bp, synthetic construct
  source 1..75: mol_type = other DNA
cttgcaaccgcctgcgcgtttcctccattggtaaactccatctctgcctgtttggtgaaggcggcgttaacctgc

SEQ ID NO: 785547 - DNA, 75 bp, synthetic construct
  source 1..75: mol_type = other DNA
tactggcatcaacgtcagcgtcgacagtctggacgcccgccagtttcatgccattaccggccaggataaattcaa

SEQ ID NO: 785548 - DNA, 75 bp, synthetic construct
  source 1..75: mol_type = other DNA
cctcctttgatgccaggtccggcgttgctggttgacgatatcgtggattctgcatggacgctgacagttctgaca

SEQ ID NO: 785549 - DNA, 75 bp, synthetic construct
  source 1..75: mol_type = other DNA
gaaggcgcggaagattctaatactgccagggaatatctggagcaggcgttgctggcaaataaaattaaagtgctg

SEQ ID NO: 785550 - DNA, 75 bp, synthetic construct
  source 1..75: mol_type = other DNA
tggcaaactggcgcgatgccgggctgacagggattaacgtcagtgttgatagtctcgacgctcgccagtttcatg

SEQ ID NO: 785551 - DNA, 75 bp, synthetic construct
  source 1..75: mol_type = other DNA
gaaccaatgttgaaagtggaccagcagttaatggcacaacaagccagccgcctgctgcgcggtgttcactatgcg

SEQ ID NO: 785552 - DNA, 75 bp, synthetic construct
  source 1..75: mol_type = other DNA
cgttgcatgggatatctgcaggtagctgctgagattgaagcgctggccagtggtgctgataaggatgcagttgtg

SEQ ID NO: 785553 - DNA, 75 bp, synthetic construct
  source 1..75: mol_type = other DNA
cgcattgtcagaaaagtactccattacagttaaaagtgccggagaggaaggcaataaacgttattttattgcgtc

SEQ ID NO: 785554 - DNA, 75 bp, synthetic construct
  source 1..75: mol_type = other DNA
atgaaagaagctattcctgatcgcgcggcgaatctaagctgcgcttcatggttgaaagagcatcttcagcagcct

SEQ ID NO: 785555 - DNA, 75 bp, synthetic construct
  source 1..75: mol_type = other DNA
attatcatgaacccggtgatgtttatcccgtttgttctggtgcaaccgattctggcggcaattactctggcggcg

SEQ ID NO: 785556 - DNA, 75 bp, synthetic construct
  source 1..75: mol_type = other DNA
ctttatcgcttctcgccgtgctgattatcgtcaggtggcaaaactggcgctgccgtcgggcatcttccagattaa

SEQ ID NO: 785557 - DNA, 75 bp, synthetic construct
  source 1..75: mol_type = other DNA
gatgtggccattacgtcagccaatgaccttccctcgcaggaactgattaatgccgtgctggcacatattgaggaa

SEQ ID NO: 785558 - DNA, 75 bp, synthetic construct
  source 1..75: mol_type = other DNA
atgagcagaaatctcgcagagtgtttcagtattcataatgataatttcagtgacccggaatgggagtgtaaccgg

SEQ ID NO: 785559 - DNA, 75 bp, synthetic construct
  source 1..75: mol_type = other DNA
ctgggccgcctgtgcgcggatgctggaaaccgacgtcgccaacctgcataggctggcgaaacgtctggggctgaa

SEQ ID NO: 785560 - DNA, 75 bp, synthetic construct
  source 1..75: mol_type = other DNA
cctgcttcgcggtgttcactatgcgatgaaagccaccggagccagtagcggaatcatcgcgctgaaagagaaata

SEQ ID NO: 785561 - DNA, 75 bp, synthetic construct
  source 1..75: mol_type = other DNA
cgggaagaattactggttctctgaagacgccaccgacggcattgcggtcagaaaaagatgatattgaatcacgta

SEQ ID NO: 785562 - DNA, 75 bp, synthetic construct
  source 1..75: mol_type = other DNA
gataatccgccctttaaaaaagtgccggcttactggtttcatccaggactgacttatcttaaaggacgtatataa

SEQ ID NO: 785563 - DNA, 75 bp, synthetic construct
  source 1..75: mol_type = other DNA
gatatctgcagatagctgctgagattgaagcgctggccagtggtgcggacaaggatgcagttgtgcgggaggctc

SEQ ID NO: 785564 - DNA, 75 bp, synthetic construct
  source 1..75: mol_type = other DNA
gcaaaactgacagacttacaaatcagagcatggataaaatcgggtgagcattttgctggtcgctctgatgggggt

SEQ ID NO: 785565 - DNA, 75 bp, synthetic construct
  source 1..75: mol_type = other DNA
atgtacatagacgtgtacatactggcatttatgacacgcagtttatgtacacagcaacgagacaagataagcatg

SEQ ID NO: 785566 - DNA, 75 bp, synthetic construct
  source 1..75: mol_type = other DNA
aacggcctttatatttgctaccccaaaaactacacagtccctttctggcgctttcgctataaattcgcaggtaag

SEQ ID NO: 785567 - DNA, 75 bp, synthetic construct
  source 1..75: mol_type = other DNA
acctgctggcaatcaatcccgataagcgtcacaatcgcgtgatcacgccgcatcctggcgaggccgcacggttgt

SEQ ID NO: 785568 - DNA, 75 bp, synthetic construct
  source 1..75: mol_type = other DNA
gaccacgttgtctgatgagatcgaacgcaaaatcattcgcctgtttgcgctgggaatgagctacccggatatcag

SEQ ID NO: 785569 - DNA, 75 bp, synthetic construct
  source 1..75: mol_type = other DNA
cttggagctgtgggcaaacttgcttgtttccttagaaagagaggaggcctattacgtgacgccactgaggaagca

SEQ ID NO: 785570 - DNA, 75 bp, synthetic construct
  source 1..75: mol_type = other DNA
aaaccacgacacattgacgagatgctaaaggcaattgttgaccgtggagcgccaaccattgcaacggacgttctg

SEQ ID NO: 785571 - DNA, 75 bp, synthetic construct
  source 1..75: mol_type = other DNA
gtcagcaatgattggtctgtcgctcaacactgccgcctatgctgccgaaacgctgcgcgccgccatttcttctat

SEQ ID NO: 785572 - DNA, 75 bp, synthetic construct
  source 1..75: mol_type = other DNA
aagttttcaccatgtatctggcggcttcgctcatctactggattatggcgacagtgttatcgacgctacagaacc

SEQ ID NO: 785573 - DNA, 75 bp, synthetic construct
  source 1..75: mol_type = other DNA
tccgcgcatggataaaggccggagatagatttgaaggaagggccgatggcaacggcctttatatttgctacccca

SEQ ID NO: 785574 - DNA, 75 bp, synthetic construct
  source 1..75: mol_type = other DNA
tcatgcaacagcgcatgggtactgccagccagaaagatgcaaaaccgcatgatcccacatattcaggaaagcact

SEQ ID NO: 785575 - DNA, 75 bp, synthetic construct
  source 1..75: mol_type = other DNA
cgcactggcgaagtggaccactctgttagtgtcgctggaacgcggagaacactacaacgtgacaccaatcagaag

SEQ ID NO: 785576 - DNA, 75 bp, synthetic construct
  source 1..75: mol_type = other DNA
cgacctcggcatgatcaccccttatgacgtgctgatcctcatctccgccagcggggaaaccgacgaagtactgaa

SEQ ID NO: 785577 - DNA, 75 bp, synthetic construct
  source 1..75: mol_type = other DNA
gcgaatggcattcaccttaagcgcctataacggcggtttaggctgggtgaaccgcgataaaaagctggcggcgca

SEQ ID NO: 785578 - DNA, 75 bp, synthetic construct
  source 1..75: mol_type = other DNA
tccaggacaaccgtcgtctgtatgactgggtactggacaacatcaccattcctgttcatccgcgccagtacgaat

SEQ ID NO: 785579 - DNA, 75 bp, synthetic construct
  source 1..75: mol_type = other DNA
aaggccagtgcaacctgcgtttcgacgacactaacccggtaaaagaagatatcgagtacgtcgagtcgattaaaa

SEQ ID NO: 785580 - DNA, 75 bp, synthetic construct
  source 1..75: mol_type = other DNA
gcaggccatggaagagaaccggcgctggatgttctttggtgatgttcaggcgcgtggccagtatcccggctatat

SEQ ID NO: 785581 - DNA, 75 bp, synthetic construct
  source 1..75: mol_type = other DNA
tcacctgccagccacaggatatgttgcaggccatggaagagaaccggcgctggatgttctttggtgatgttcagg

SEQ ID NO: 785582 - DNA, 75 bp, synthetic construct
  source 1..75: mol_type = other DNA
atcaccattgagatgactgaaagtgacgcagaagatttaaggaaggtgcgaataagcggggaaattcttctcggc

SEQ ID NO: 785583 - DNA, 75 bp, synthetic construct
  source 1..75: mol_type = other DNA
gaaggcgggctggcgggcattatcaccgacggtgacctgcgtcgctttatggaaaaagaggattctctgacatcc

SEQ ID NO: 785584 - DNA, 75 bp, synthetic construct
  source 1..75: mol_type = other DNA
ctggatgcgtcatttaaaaccgtgattcaacgtatcaccagcggatgccagggaatggtgatggtagaagacgca

SEQ ID NO: 785585 - DNA, 75 bp, synthetic construct
  source 1..75: mol_type = other DNA
tttggtttggttttctattaattggtgtggcgtttttgggttttatggctgatgattttacagataatatctata

SEQ ID NO: 785586 - DNA, 75 bp, synthetic construct
  source 1..75: mol_type = other DNA
aggaactcaggactttttacagagagagtacggattaacagcgcatgatattgtagcggcagccagagagttatt

SEQ ID NO: 785587 - DNA, 75 bp, synthetic construct
  source 1..75: mol_type = other DNA
attgcggcattatggaagccaatgttatcggcacagctgcagggctggccttaaccgggcgcaagccattcgtgc

SEQ ID NO: 785588 - DNA, 75 bp, synthetic construct
  source 1..75: mol_type = other DNA
aaaaagacagcattgaaatgcgcaaagtttatgcagattttatcgcacaacagagtaaaaacgtcagttctgtca

SEQ ID NO: 785589 - DNA, 75 bp, synthetic construct
  source 1..75: mol_type = other DNA
gatgcgcctgtcacccatatggcccgtacgctggctggcgcgtttttacatctccatttttcgcggtacgccgct

SEQ ID NO: 785590 - DNA, 75 bp, synthetic construct
  source 1..75: mol_type = other DNA
tgtcaccttactctacaccaaccgcaacattttgctctccagtattgtgcgaattatcaatacattgtcactgtt

SEQ ID NO: 785591 - DNA, 75 bp, synthetic construct
  source 1..75: mol_type = other DNA
tgggcggtgaagagttgattctgacgcccaaagaatatgctctgctgtcacggttaatgctcaaagcaggcagtc

SEQ ID NO: 785592 - DNA, 75 bp, synthetic construct
  source 1..75: mol_type = other DNA
gaatatcaagttaaatttcgtgaaaaacgtgatgaacagctaattagcagtcagaaaaaagagaaggactatacg

SEQ ID NO: 785593 - DNA, 75 bp, synthetic construct
  source 1..75: mol_type = other DNA
tataaccgccatcagtattttgatgagcgtaaagcagcactggcacagtgggctgatctgctggtggcactggaa

SEQ ID NO: 785594 - DNA, 75 bp, synthetic construct
  source 1..75: mol_type = other DNA
gattgagcttgaagctctgcaccgggttttcgcaccggcatgtgcgccgcacagcattcaattgggtgcggtaaa

SEQ ID NO: 785595 - DNA, 75 bp, synthetic construct
  source 1..75: mol_type = other DNA
ctacgtccgagtggctacaggtgtgggcggtcttcttcttcacgacaatttttaccaacattttctggggcgtac

SEQ ID NO: 785596 - DNA, 75 bp, synthetic construct
  source 1..75: mol_type = other DNA
cattcctctcgcactatattaaggcgctgggctttacgcctgcacaagcctcatttgcttttacgctgtatggcc

SEQ ID NO: 785597 - DNA, 75 bp, synthetic construct
  source 1..75: mol_type = other DNA
gtcgggagcgagaactgggtattccagagtattgatgcggataacggcctgagaaggctagtgtcctgcaaagat

SEQ ID NO: 785598 - DNA, 75 bp, synthetic construct
  source 1..75: mol_type = other DNA
gtatgcgatcgatcagcttaaacggacaggttataagccgtctccgttaaggcgagtttacattcctaaaagtaa

SEQ ID NO: 785599 - DNA, 75 bp, synthetic construct
  source 1..75: mol_type = other DNA
cgttttcccggcactggaaccgaaacataaaggagcagctatttcggtttataacctttcagccgggttgtccaa

SEQ ID NO: 785600 - DNA, 75 bp, synthetic construct
  source 1..75: mol_type = other DNA
ggaatggcgctttcaagcctggcgttctactacatgccgcaacatttcggtcataactttgctatggcgctgata

SEQ ID NO: 785601 - DNA, 75 bp, synthetic construct
  source 1..75: mol_type = other DNA
ggtgactttgctttataccaaccgcaatattttgctttccagtattgttcgcattatcaacaccttatctttatt

SEQ ID NO: 785602 - DNA, 75 bp, synthetic construct
  source 1..75: mol_type = other DNA
tttcccgcgaccgttggctaactcgcgatgagcttatcaggctattcgaagctatgcgcaccgcaaaaggattca

SEQ ID NO: 785603 - DNA, 75 bp, synthetic construct
  source 1..75: mol_type = other DNA
tggaccaatctgttagtgtcgctggaacgcggggaacgctacaacgtgacaccaatcagaagggccaaagcatga

SEQ ID NO: 785604 - DNA, 75 bp, synthetic construct
  source 1..75: mol_type = other DNA
ggagagcaccctacccgttgcactgcaaaaagttcgcgcagagatgtcggaggttccagatttcactattcacga

SEQ ID NO: 785605 - DNA, 75 bp, synthetic construct
  source 1..75: mol_type = other DNA
aatttacctaccagcgtgtgggcgatctcagcactgaaatgatcgaacacttcttccgctcactctcttacacca

SEQ ID NO: 785606 - DNA, 75 bp, synthetic construct
  source 1..75: mol_type = other DNA
agcaaaaacggagaccctattgatatacctctaccttccccagccgttgaatggttgagagagctacacaccttt

SEQ ID NO: 785607 - DNA, 75 bp, synthetic construct
  source 1..75: mol_type = other DNA
gccatgcgaatggcaaaaggctttagtcgtgagaacgagttaactctaaagctgctgctggtcacttgcgtgaga

SEQ ID NO: 785608 - DNA, 75 bp, synthetic construct
  source 1..75: mol_type = other DNA
aagatggagttatgcgccgcgcgatgggaagagtttgatttagatggtgcggtatggcatttgccggaagaacgc

SEQ ID NO: 785609 - DNA, 75 bp, synthetic construct
  source 1..75: mol_type = other DNA
atgagccagaagtatctttttattgaccgtgatggaaccctgatttccgaaccgccaagtgactttcaggtcgat

SEQ ID NO: 785610 - DNA, 75 bp, synthetic construct
  source 1..75: mol_type = other DNA
cgcccgcacctggaatataaagccgagtttacctaccagcgcgtgggcgatctcagcaccgagatgatcgagcac

SEQ ID NO: 785611 - DNA, 75 bp, synthetic construct
  source 1..75: mol_type = other DNA
caagattaacaccggcgttggcttctttgatcacatgctggatcagatcgctacccacggcggtttccgtatgga

SEQ ID NO: 785612 - DNA, 75 bp, synthetic construct
  source 1..75: mol_type = other DNA
gtgagcagctcacccgccgcgaccgctacgcgcacgttgagcggaaaaccaaagaaacgcagattgacgtcaaag

SEQ ID NO: 785613 - DNA, 75 bp, synthetic construct
  source 1..75: mol_type = other DNA
gtagagagcctgttcaaagcttttggtcgcaccctgcgccaggccatccgcgtggaaggcgacaccctgccctcg

SEQ ID NO: 785614 - DNA, 75 bp, synthetic construct
  source 1..75: mol_type = other DNA
tatgtgattggcgatcgcgcgaccgatattcaactggcggaaaacatgggcattactggtttacgctacgaccgc

SEQ ID NO: 785615 - DNA, 75 bp, synthetic construct
  source 1..75: mol_type = other DNA
tcaacctgtccccgcagcaaccgctaccggacaaagcaccagagatgggcggaggtccaacgggcgacagtgatg

SEQ ID NO: 785616 - DNA, 75 bp, synthetic construct
  source 1..75: mol_type = other DNA
accaccggcgatgcacagcgcctaaacatgggcatgaccagtatcgcttccctgaacaaacaaaacgctgaattc

SEQ ID NO: 785617 - DNA, 75 bp, synthetic construct
  source 1..75: mol_type = other DNA
ggctgcatcgggcagtgattgtcctgttctgtctcgccttgttagtggcgctgatgcagggggcgtcatggttta

SEQ ID NO: 785618 - DNA, 75 bp, synthetic construct
  source 1..75: mol_type = other DNA
gaaatagtcgtcacgcgatctcctgagcaggtattccatcccgccacgcttgcctcattcgaaggaatgagtatc

SEQ ID NO: 785619 - DNA, 75 bp, synthetic construct
  source 1..75: mol_type = other DNA
ccgattatgtggtggagcgcggtagcgacaaacatattgcgtatgctgcaagcaaagcggcactggataatatga

SEQ ID NO: 785620 - DNA, 75 bp, synthetic construct
  source 1..75: mol_type = other DNA
cctgaggccattcaggcagtggagaacggcgacgaagaggtgagctgcggttatgacgctgactaccgacaaatc

SEQ ID NO: 785621 - DNA, 75 bp, synthetic construct
  source 1..75: mol_type = other DNA
ccggtgctaacggcggtaccggtcaaaaagagcggtgtcgatttgcctgaggcgaactttgaagcctgggccacg

SEQ ID NO: 785622 - DNA, 75 bp, synthetic construct
  source 1..75: mol_type = other DNA
tctacaaaacacgcagcattatcgtccccactctactcagcgcgctggcctatgggctcgcctggaaagtgctga

SEQ ID NO: 785623 - DNA, 75 bp, synthetic construct
  source 1..75: mol_type = other DNA
acttaactaagcaaattaacgaattcgcacaaagaatatatgataataaagttcgttcattgaaagaggaacaaa

SEQ ID NO: 785624 - DNA, 75 bp, synthetic construct
  source 1..75: mol_type = other DNA
acgttgcaccgctgatgcgtaccgactcaccggatgaaaaacgtattcaggcgatcctcgatcagttaacggatg

SEQ ID NO: 785625 - DNA, 75 bp, synthetic construct
  source 1..75: mol_type = other DNA
ttattgtcgatttttggttgttgatgacatctggatcccattgggagaatcgctggttatctctcgctttaaacc

SEQ ID NO: 785626 - DNA, 75 bp, synthetic construct
  source 1..75: mol_type = other DNA
cgataacgcggctattgagacaaacgtcaccgggctggggattgagctgcaacaaaatggccagccgttcacgtt

SEQ ID NO: 785627 - DNA, 75 bp, synthetic construct
  source 1..75: mol_type = other DNA
acgggaatgtgcggctggtaaatcccgagaactggaaagagcttgctgtcgggcaccttcagaatgtccggcgcg

SEQ ID NO: 785628 - DNA, 75 bp, synthetic construct
  source 1..75: mol_type = other DNA
aggccttatcgcccttattatttttgtggtttttgcatttcccagagtaatgattggcgcacactggtttactga

SEQ ID NO: 785629 - DNA, 75 bp, synthetic construct
  source 1..75: mol_type = other DNA
tcgatttggtgatttgcggtaatcacaatcacagtttcttttcgcgagcatcctgctcggcgaaaagagtgattg

SEQ ID NO: 785630 - DNA, 75 bp, synthetic construct
  source 1..75: mol_type = other DNA
acatattctggcagtgtgccgtaagcataaattcgatttggtgatttgcggcaatcataaccacagtttcttttc

SEQ ID NO: 785631 - DNA, 75 bp, synthetic construct
  source 1..75: mol_type = other DNA
gctggaagatctcattggtcagttcctttacggtagtaaaggcgatgacaataagaatagtggcgatgcgccagc

SEQ ID NO: 785632 - DNA, 75 bp, synthetic construct
  source 1..75: mol_type = other DNA
aaaaaagaattttgttgcacacattgatcacatgaatagtttcagtgaaattgcgcataaaagcggcaaagaggc

SEQ ID NO: 785633 - DNA, 75 bp, synthetic construct
  source 1..75: mol_type = other DNA
agtcgcaggtcttatcggcattattatttttgtggtttttgcatttcccagagtaatgattggcgcgcactggtt

SEQ ID NO: 785634 - DNA, 75 bp, synthetic construct
  source 1..75: mol_type = other DNA
gtgacgcattatcgcggtctggcgaccgtagaaatgccggtagcgaccggacgttacccgaccacgcgctacggc

SEQ ID NO: 785635 - DNA, 75 bp, synthetic construct
  source 1..75: mol_type = other DNA
atgaaatattttttcaatacccggctgggggaaacccgctatcagctggctgacggctcgctgctgtgcaaagac

SEQ ID NO: 785636 - DNA, 75 bp, synthetic construct
  source 1..75: mol_type = other DNA
gaaatagtcgtcacgcgttctcctgagcaggtattccatccgaccacgcttgcctcattcgaagggatgagcatc

SEQ ID NO: 785637 - DNA, 75 bp, synthetic construct
  source 1..75: mol_type = other DNA
aattttaccctcggcgcacgggtgccggatcgcagcggaaaattcctgttgcagattggcggcctgtcgcgggag

SEQ ID NO: 785638 - DNA, 75 bp, synthetic construct
  source 1..75: mol_type = other DNA
aatttctatgtgctgatggaggcgctgtaccgtcggtatggcgcgccgggccaggacatttccctgcgtaccgag

SEQ ID NO: 785639 - DNA, 75 bp, synthetic construct
  source 1..75: mol_type = other DNA
ctgatatagagggaacgggaatactcccggatgtgcgcgggataaatttttatgtgctgatggaatcactgtacc

SEQ ID NO: 785640 - DNA, 75 bp, synthetic construct
  source 1..75: mol_type = other DNA
actgtttagataatgcagcaatggaaagcttttttagtactttaaaatcagaatgttactatctaaataaataca

SEQ ID NO: 785641 - DNA, 75 bp, synthetic construct
  source 1..75: mol_type = other DNA
attctgatggcgacgtggcgctccatgcgcttaccgatgcattgcttggtgcagcggcgctgggggatatcggca

SEQ ID NO: 785642 - DNA, 75 bp, synthetic construct
  source 1..75: mol_type = other DNA
ttcaggcgaaaggttataccctgggcaacgtcgatgtcactatcatcgctcaggcaccgaagatgttgccgcaca

SEQ ID NO: 785643 - DNA, 75 bp, synthetic construct
  source 1..75: mol_type = other DNA
atgcgaattggacacggttttgacgtacatgcctttggcggtgaaggcccaattatcattggtggcgtacgcatt

SEQ ID NO: 785644 - DNA, 75 bp, synthetic construct
  source 1..75: mol_type = other DNA
ttgcgcttacagcattgtttaaaattttaagtaataaactcaggcaaatgattgaaagtcatatgttgatagtcg

SEQ ID NO: 785645 - DNA, 75 bp, synthetic construct
  source 1..75: mol_type = other DNA
cgctgaaagggcaaatgccggaagatgaaatcgctttgttgcccgaagaatatcaggtcgaatcagtggttaaac

SEQ ID NO: 785646 - DNA, 75 bp, synthetic construct
  source 1..75: mol_type = other DNA
caaaagactcaacgccaactattccaggggaaacgtccacctctcttgctgcactattacaaccgataaaaaaac

SEQ ID NO: 785647 - DNA, 75 bp, synthetic construct
  source 1..75: mol_type = other DNA
gtgattggcggagcgttagtgcatccattaattctgactgccttcgagaacgggcaaaaagtggatgcgctgggg

SEQ ID NO: 785648 - DNA, 75 bp, synthetic construct
  source 1..75: mol_type = other DNA
gctaccaacataaagtagcgttatggctgacgtttaatgaaatcaacatgtcattacacgcgccattcacgggcg

SEQ ID NO: 785649 - DNA, 75 bp, synthetic construct
  source 1..75: mol_type = other DNA
atcaccattgagatgactgaaagtgacgcagaagatttaaaacataccgtcgatttcatctcttttagttattac

SEQ ID NO: 785650 - DNA, 75 bp, synthetic construct
  source 1..75: mol_type = other DNA
gtatgacgaacaaggcgatcttatcgcccgttcaggcgaaagcgtcgaagtgcgcgaccggctggcgctcgacgg

SEQ ID NO: 785651 - DNA, 75 bp, synthetic construct
  source 1..75: mol_type = other DNA
gcccgttctggcgaaagcgtcgacgtgcgcgaccggctggcgctcgacggcaaaaaagcgggcggctattttaac

SEQ ID NO: 785652 - DNA, 75 bp, synthetic construct
  source 1..75: mol_type = other DNA
tttggggtggtgcaacagctgccaatcagatggaaggcgcctggcaggaagatggcaaagggatcacgacctcag

SEQ ID NO: 785653 - DNA, 75 bp, synthetic construct
  source 1..75: mol_type = other DNA
gaaaagcattcttagctcaaggtaagcaatggaacaataacgtagaagcaaaagtgaaatatacagttgcaaatt

SEQ ID NO: 785654 - DNA, 75 bp, synthetic construct
  source 1..75: mol_type = other DNA
ccaataccattatgacctgcagcctacggttcaggttattgaacttgccgttaatcctacttttagtacccactg

SEQ ID NO: 785655 - DNA, 75 bp, synthetic construct
  source 1..75: mol_type = other DNA
acgtcacggcacccagggcgaaaagctggatctggctctgctggtggacggcctgcaagctgagcgcgaacaggg

SEQ ID NO: 785656 - DNA, 75 bp, synthetic construct
  source 1..75: mol_type = other DNA
tgctgcgccatctgaattcagtgcattcgaactggaattgaatgccctggttcgccgccactttccacactgggg

SEQ ID NO: 785657 - DNA, 75 bp, synthetic construct
  source 1..75: mol_type = other DNA
ttatgaagcggtatacccatctaccgcaagtggtgctgggcgcggcgtttggctggtcgattccaatggcttttg

SEQ ID NO: 785658 - DNA, 75 bp, synthetic construct
  source 1..75: mol_type = other DNA
acacgcagtatgcgatggttgaccgcgatgatgatgtgaagattggcattaaatccaccgcaatcctgttcggcc

SEQ ID NO: 785659 - DNA, 75 bp, synthetic construct
  source 1..75: mol_type = other DNA
agttagtcgaagagtttatcgctgcgggtcgcccctcatcgcgtcaacaaagtattgcgcagcgcagggagggct

SEQ ID NO: 785660 - DNA, 75 bp, synthetic construct
  source 1..75: mol_type = other DNA
gcgtggcgtcgaacatcgcgcggatcgtcacgtttgatggcgatcgtgaagaagcttttgccggagaagcgatca

SEQ ID NO: 785661 - DNA, 75 bp, synthetic construct
  source 1..75: mol_type = other DNA
ttcccatatcctttctctttatgatcacctgcttgtttgcaataaggatgtgccgctcttcaatcgctattactg

SEQ ID NO: 785662 - DNA, 75 bp, synthetic construct
  source 1..75: mol_type = other DNA
ctgttcagcgtgccgaaccctggtgctgcggatgatttcctgtcggtgattaacccggagtcgctggtgatcaaa

SEQ ID NO: 785663 - DNA, 75 bp, synthetic construct
  source 1..75: mol_type = other DNA
ttgccggtaagaagacgcgtgcccgtgttgatggtattcgctatcaggttgatatcaataaccttacccaacgcg

SEQ ID NO: 785664 - DNA, 75 bp, synthetic construct
  source 1..75: mol_type = other DNA
tgctcagccaatgcgcttcccggtgcagtacgttaaccgcccgaatctcgattttcgtggctacgccggaacgct

SEQ ID NO: 785665 - DNA, 75 bp, synthetic construct
  source 1..75: mol_type = other DNA
gattggcctggtggcgctcacttttgatgagccactggtgttagatcgttatcagcaaaacccggttactggtgg

SEQ ID NO: 785666 - DNA, 75 bp, synthetic construct
  source 1..75: mol_type = other DNA
cagtgcctttgcgcatgaagcaggcgaattttttatgcgtgcaggttctgcaactgtacgtccaacagaaggtgc

SEQ ID NO: 785667 - DNA, 75 bp, synthetic construct
  source 1..75: mol_type = other DNA
gccaacaataggagtatataatagtgaacagaaacaatgggctgataaaggaggctatttatccttaacgcttac

SEQ ID NO: 785668 - DNA, 75 bp, synthetic construct
  source 1..75: mol_type = other DNA
agtacgtctgtatacagatatgatgctgtttctgaatatgttccttattactattataaaggaagaactaaaaga

SEQ ID NO: 785669 - DNA, 75 bp, synthetic construct
  source 1..75: mol_type = other DNA
aaataaatgtaaaaaaagaaaaggaaaagaaattgagtgttttgttcactaattctttttcaagaaatggcaata

SEQ ID NO: 785670 - DNA, 75 bp, synthetic construct
  source 1..75: mol_type = other DNA
ctgatatttatggggctcgcatcggaactactcagtcatatataaaaaatatggataaatcagttgcatcacctg

SEQ ID NO: 785671 - DNA, 75 bp, synthetic construct
  source 1..75: mol_type = other DNA
ccggagactccgtctggtggcactgcgacgtcatccattccgttgcccccgttgaaaatcaacagggttggggca

SEQ ID NO: 785672 - DNA, 75 bp, synthetic construct
  source 1..75: mol_type = other DNA
ggagcgcataccgactccggggcgctggaacgctggctgcttccagcgtatcagcacgttttcgctaacgtcttt

SEQ ID NO: 785673 - DNA, 75 bp, synthetic construct
  source 1..75: mol_type = other DNA
gcccaacgggggcaaagagggggtgcaaattttgccgttccagcagatcaccgcaaaggatgagttcatgaatgt

SEQ ID NO: 785674 - DNA, 75 bp, synthetic construct
  source 1..75: mol_type = other DNA
atcatctacatcggtgcagcgcaggtaaaccgcgaaagcatggactccctgaaagaaacgctacagggtgcacgt

SEQ ID NO: 785675 - DNA, 75 bp, synthetic construct
  source 1..75: mol_type = other DNA
actcatccatgcgcccaacgggggcaaagaaggtgtgcaaattttgccgttccagcactcactgcaaaggatgag

SEQ ID NO: 785676 - DNA, 75 bp, synthetic construct
  source 1..75: mol_type = other DNA
ctctcactggtggttataattcctcatttgctcttacaagtgatggattttactggggaggaagtgcatctggtt

SEQ ID NO: 785677 - DNA, 75 bp, synthetic construct
  source 1..75: mol_type = other DNA
aagtcatcgattaatactgggctacgtttaccaattacgaaaaatatctctgttcaacagggagtatctgttata

SEQ ID NO: 785678 - DNA, 75 bp, synthetic construct
  source 1..75: mol_type = other DNA
gaaagcattttagataaaataaatttaaaaaaagaaaaggaaaaggaattgagtgttctttttactaattctttt

SEQ ID NO: 785679 - DNA, 75 bp, synthetic construct
  source 1..75: mol_type = other DNA
caattattgagcgtctggtatttagactctggtataaatcagttggacactaatcggttaccagatggaaactat

SEQ ID NO: 785680 - DNA, 75 bp, synthetic construct
  source 1..75: mol_type = other DNA
tgtcgctgacagccagccggacgtgcggatctcggcgattagtgcggcttcggtatcattgcttaaaggtttagg

SEQ ID NO: 785681 - DNA, 75 bp, synthetic construct
  source 1..75: mol_type = other DNA
ggcgtcggatgtcgcgccagtgcacgcattatgggcgttggcctcaacacggttttacgtcacttaaaaaactca

SEQ ID NO: 785682 - DNA, 75 bp, synthetic construct
  source 1..75: mol_type = other DNA
agatggtcgagagataaaagttgataagatacctcataataataatgaacggtcaggttatataaaagccagtaa

SEQ ID NO: 785683 - DNA, 75 bp, synthetic construct
  source 1..75: mol_type = other DNA
atctgccaccgctgcgttttgtgcgtaatcttggtttgatggcggcggagcgtgctggcgtgttgaaacgtcagg

SEQ ID NO: 785684 - DNA, 75 bp, synthetic construct
  source 1..75: mol_type = other DNA
taatgatcttcaggagctggaactgaagggcggtgaaacgatccgcgcgaagctggtgattggtgccgacggcgc

SEQ ID NO: 785685 - DNA, 75 bp, synthetic construct
  source 1..75: mol_type = other DNA
ggtcaactatgaactgccaaacgtaccggaagattatgtccaccgtatcgggcgtaccggtcgtgcggctgctac

SEQ ID NO: 785686 - DNA, 75 bp, synthetic construct
  source 1..75: mol_type = other DNA
ggacatcagcgctatctctgctctccttgccgtaaaacatggcaactacagttcacttacaccgcctctcagccc

SEQ ID NO: 785687 - DNA, 75 bp, synthetic construct
  source 1..75: mol_type = other DNA
ggcagcaggcacgtcagccagaacagaaaagccggctccccgctggttccgcctcagcaacggcaggcaggttaa

SEQ ID NO: 785688 - DNA, 75 bp, synthetic construct
  source 1..75: mol_type = other DNA
agacaatccggaaaatacgagtatattaccgagttattagtcaagggtgttgataaatggacggtaaaaggtgtt

SEQ ID NO: 785689 - DNA, 75 bp, synthetic construct
  source 1..75: mol_type = other DNA
aaaagttatattgactattatgaagagggaaagcggctggaaagaaggccaaaagagttccagcaacaaatcttt

SEQ ID NO: 785690 - DNA, 75 bp, synthetic construct
  source 1..75: mol_type = other DNA
aggatgactaccggaacagtccagaatggaaggatttttcatcacgcattggtaatgcactatgcgggggccgga

SEQ ID NO: 785691 - DNA, 75 bp, synthetic construct
  source 1..75: mol_type = other DNA
actcagccagcaggctttttcacgttttgtgcaggactatcttgtatttggtaacgcctacctggagaaacgcac

SEQ ID NO: 785692 - DNA, 75 bp, synthetic construct
  source 1..75: mol_type = other DNA
gctgacgctgctggagatcgttcttgggatcgataatattattttcctttctctggtggtcgcaaagttgcccac

SEQ ID NO: 785693 - DNA, 75 bp, synthetic construct
  source 1..75: mol_type = other DNA
taccgaaaggttacatctacttcgcgatgttcttctctattgcggttgaaagcctcaacctgattcgcaacaaaa

SEQ ID NO: 785694 - DNA, 75 bp, synthetic construct
  source 1..75: mol_type = other DNA
ttatgccgttcagccaggtggcggcgaaggatgagtttaccggcatcaaagacgccacccgcgacgacctgttag

SEQ ID NO: 785695 - DNA, 75 bp, synthetic construct
  source 1..75: mol_type = other DNA
aaatactgccattcagccagatatcggctaaggatgagtttgtgggggtgaagtcttccacccgcgatgacatgc

SEQ ID NO: 785696 - DNA, 75 bp, synthetic construct
  source 1..75: mol_type = other DNA
atgaagcatgttaacgactggctgggtgaggaggtgattcgcttcaacccttacgcattgcttgaacccacgaag

SEQ ID NO: 785697 - DNA, 75 bp, synthetic construct
  source 1..75: mol_type = other DNA
tcagaccatccaggagaatatgctgaaaggcggaatttccggccgcagtgcaaaaggaaaacgtatccacacccg

SEQ ID NO: 785698 - DNA, 75 bp, synthetic construct
  source 1..75: mol_type = other DNA
cctatgaagtcagccgcatggatctcctggataacatgtcatgtgcagataacgggcgctactttgataccccca

SEQ ID NO: 785699 - DNA, 75 bp, synthetic construct
  source 1..75: mol_type = other DNA
cgctccgccattccccggcgaaatacacccggcgtggcattgacctggatacatactggtttatcaggcagtgga

SEQ ID NO: 785700 - DNA, 75 bp, synthetic construct
  source 1..75: mol_type = other DNA
gcgaatatcatctccgggattattattggcctggtggtggcagaaatgtttacctttattgtccgccgcaattag

SEQ ID NO: 785701 - DNA, 75 bp, synthetic construct
  source 1..75: mol_type = other DNA
gtaacgcctacctggagaaacgctcgaaccgcttcggtgaagtgatcgcccttgaacctgccctggcgaaataca

SEQ ID NO: 785702 - DNA, 75 bp, synthetic construct
  source 1..75: mol_type = other DNA
aatacatgcgacgcggaagcgatcttgaatcatggtggtatgtgcaggatggcaaggacgagttccagtttcgtc

SEQ ID NO: 785703 - DNA, 75 bp, synthetic construct
  source 1..75: mol_type = other DNA
accgccattcagcagcaccgtggttgggtgaaagccgacgatagcccgctgggcggtttacggctggtgatttgg

SEQ ID NO: 785704 - DNA, 75 bp, synthetic construct
  source 1..75: mol_type = other DNA
atgataggcagcttaaccgcgcgcatcttcgccatcttctggctgacgctggtgttgatgttggttttgatgtta

SEQ ID NO: 785705 - DNA, 75 bp, synthetic construct
  source 1..75: mol_type = other DNA
tccgcagaagaaaaagtatggccgcgtggaactggtcggtccgttctccgtgcgtgatggcgaagataattacca

SEQ ID NO: 785706 - DNA, 75 bp, synthetic construct
  source 1..75: mol_type = other DNA
ctgacattgccatgaacctgatcggaggaggattcccaatggatgacaccacatctttggatggaagtgttggaa

SEQ ID NO: 785707 - DNA, 75 bp, synthetic construct
  source 1..75: mol_type = other DNA
ggtaaaccgcgaaagcatggactccctgaaggaaacgctacagggtgcacgtggtggtggtgcatttaaaaacgt

SEQ ID NO: 785708 - DNA, 75 bp, synthetic construct
  source 1..75: mol_type = other DNA
tgtcatggaggccatgaagcacatcaatgactggcttggcgaggaggtgatccgttttaattcttatgctcttct

SEQ ID NO: 785709 - DNA, 75 bp, synthetic construct
  source 1..75: mol_type = other DNA
cgttccagcagatcaccgcccgggatgagtttatgaacgtcaaggcggcctcccgcgatgatgtgctggctgctc

SEQ ID NO: 785710 - DNA, 75 bp, synthetic construct
  source 1..75: mol_type = other DNA
gtactcgcctaacggcaaaaaagatggcattcagattatcccgttgtcggaagtcgcggcgaaggatgaatttct

SEQ ID NO: 785711 - DNA, 75 bp, synthetic construct
  source 1..75: mol_type = other DNA
aaaacccgttgcggaggctttcagctttggtgatcccattcctgtactggaccgccgcgaactgctggactatgt

SEQ ID NO: 785712 - DNA, 75 bp, synthetic construct
  source 1..75: mol_type = other DNA
ggcaaacgctgaaagcgtggaggcggtaaagaaaaccctcacggaatcccgtggcaagggggcgttccgcaatat

SEQ ID NO: 785713 - DNA, 75 bp, synthetic construct
  source 1..75: mol_type = other DNA
aatggccgctactatgacacccccatggactggaacgccattgctcgcgcctcccgtcgtgcgtcatggcaccag

SEQ ID NO: 785714 - DNA, 75 bp, synthetic construct
  source 1..75: mol_type = other DNA
gaaagcgggggcaggattcgctacacgatgcactgaaatcaacgcctgcactcagcgcattcacctttgatgggc

SEQ ID NO: 785715 - DNA, 75 bp, synthetic construct
  source 1..75: mol_type = other DNA
gctggcagatgtgctggcaacgttgcgcgcggcaggtgttccagcgttaaccgatgacaactatgcggtgatgaa

SEQ ID NO: 785716 - DNA, 75 bp, synthetic construct
  source 1..75: mol_type = other DNA
aagtattgcgtggtctggtgtttgcgccagtgatgcacgcggtgcaggcgggggtatctgaacggttgctggcct

SEQ ID NO: 785717 - DNA, 75 bp, synthetic construct
  source 1..75: mol_type = other DNA
tgacgcttaatgaagcgcagcaaaagcagtttgcgttggtggacaccatctgccgccatttccccggcagcgagt

SEQ ID NO: 785718 - DNA, 75 bp, synthetic construct
  source 1..75: mol_type = other DNA
aatgcggcgcgaatgtctcgacattctcctgcttcaagttgtttgggccagagggtgttggcgcggtggtaggcg

SEQ ID NO: 785719 - DNA, 75 bp, synthetic construct
  source 1..75: mol_type = other DNA
ggagtatccgaacggttgctggctttgcttaacagcggcgcggtggcggaagtgaaaagcgccgtcattgccaat

SEQ ID NO: 785720 - DNA, 75 bp, synthetic construct
  source 1..75: mol_type = other DNA
cggagtcgaaatatgaaattccgccacttttttatcgactttccggaacgtttcgccaggcgaatccgcaactcg

SEQ ID NO: 785721 - DNA, 75 bp, synthetic construct
  source 1..75: mol_type = other DNA
tacgcgccaacagccgcaggacagctatgtgctggcagatgtgctggcaacattgcgttcggctggcgttcctgc

SEQ ID NO: 785722 - DNA, 75 bp, synthetic construct
  source 1..75: mol_type = other DNA
tgacgcttattgaggcgcagcaaaagcagtttgcgctggtggacacgatttgccgtcactttcccggcgcggagt

SEQ ID NO: 785723 - DNA, 75 bp, synthetic construct
  source 1..75: mol_type = other DNA
aacattgcgcgattcgcattaacccaaatcgcagcggtgaagagacggtgctgcggattttgcgtgagagtattg

SEQ ID NO: 785724 - DNA, 75 bp, synthetic construct
  source 1..75: mol_type = other DNA
aatgcggggcgaatgtgtcgacattctcctgcttcaagctgtttgggccagagggcgttggtgtggtggtaggcg

SEQ ID NO: 785725 - DNA, 75 bp, synthetic construct
  source 1..75: mol_type = other DNA
attacccagcgtgtggaacaggtgctggctgacgcgtttcatgcacccgcggcggcgctggtacagggcgcgggt

SEQ ID NO: 785726 - DNA, 75 bp, synthetic construct
  source 1..75: mol_type = other DNA
cagatccagggcgctcatgcgttggaagtgttgcgtgggctggtgttcgcgccagtgatgcacgcggtgcaggcg

SEQ ID NO: 785727 - DNA, 75 bp, synthetic construct
  source 1..75: mol_type = other DNA
atgtgttgcgaggtctggtgttcgcgccagtgatgcacgcggtgcaggcgggggtatctgaacggttactggctt

SEQ ID NO: 785728 - DNA, 75 bp, synthetic construct
  source 1..75: mol_type = other DNA
tcaccgatagcgtccattgccacggttctgcgaccctcatcgcccaggaaatccgccagacgattttcaacgagc

SEQ ID NO: 785729 - DNA, 75 bp, synthetic construct
  source 1..75: mol_type = other DNA
attaaggttttatctgattcacaggaaactcaatatattaaagttgatatcaaaaaaattgagaacccaggcatg

SEQ ID NO: 785730 - DNA, 75 bp, synthetic construct
  source 1..75: mol_type = other DNA
ctgcaaagcgccttaatatcgaaggaggaagaaaaggaaacacattactcatagaatcccgaaaaattaattcag

SEQ ID NO: 785731 - DNA, 75 bp, synthetic construct
  source 1..75: mol_type = other DNA
ttcgccaggacatgcagcagcgcattgatgcggcgcgccggatgtttgccgaaaaagtggccatgtttaccggtc

SEQ ID NO: 785732 - DNA, 75 bp, synthetic construct
  source 1..75: mol_type = other DNA
acgagtcacgacagataaagatacagataaagatacagataaagatacagatcaagaagatcaaaacactatggt

SEQ ID NO: 785733 - DNA, 75 bp, synthetic construct
  source 1..75: mol_type = other DNA
ggggcaaacccgaagaaatccgctttcagtgcctggaaggccagattacgcgagggggtgccaccagaggccatg

SEQ ID NO: 785734 - DNA, 75 bp, synthetic construct
  source 1..75: mol_type = other DNA
atggctactgggggcacccgcagtacaaactgccgccagaagctaacctgatgggctttgcccactatctcgaag

SEQ ID NO: 785735 - DNA, 75 bp, synthetic construct
  source 1..75: mol_type = other DNA
cggcacggggctttctgataaatgcgtcctcagctacggcgcattcccggatattgccaatgactttagcgagaa

SEQ ID NO: 785736 - DNA, 75 bp, synthetic construct
  source 1..75: mol_type = other DNA
aagtgaatattaacgatcagaatgtgatcaccaatgccgtctcctgcggcaccatgtttcgcgggctggagatca

SEQ ID NO: 785737 - DNA, 75 bp, synthetic construct
  source 1..75: mol_type = other DNA
atatcgctaacgactttggcgagaaaagtctgctgatgcctggcggtgcggtgatcaatggcgatttcaaaaacg

SEQ ID NO: 785738 - DNA, 75 bp, synthetic construct
  source 1..75: mol_type = other DNA
acagcaggtgcaggagtttgtcgatcacgcctggtatcgttatcccgacgatcgggtcgggcgtcatccgttcga

SEQ ID NO: 785739 - DNA, 75 bp, synthetic construct
  source 1..75: mol_type = other DNA
agatgccatcggtattaaagtgccggacaacgccaatatcatccgcaacattatgctggcaacgctctggtgcca

SEQ ID NO: 785740 - DNA, 75 bp, synthetic construct
  source 1..75: mol_type = other DNA
tgatgtcggcgctgaacctgccgctttctggcatccagtcgacgttaggccgcattctgtgccgcgcccatgaag

SEQ ID NO: 785741 - DNA, 75 bp, synthetic construct
  source 1..75: mol_type = other DNA
gatgatattgaccacgagattgccgatttgcaggcgaaacgtacccgcctggtgcagcaacatccgcgaattgat

SEQ ID NO: 785742 - DNA, 75 bp, synthetic construct
  source 1..75: mol_type = other DNA
aagcgaaggaaattctcgtcgagcattacgataatatcgagcagaaaatcgatgatattgaccacgagattgccg

SEQ ID NO: 785743 - DNA, 75 bp, synthetic construct
  source 1..75: mol_type = other DNA
gtcagccagcaggcacgacaccggaagccgattcagcgtatgcgctgaaagccgattcgggcgctgtgcagcagg

SEQ ID NO: 785744 - DNA, 75 bp, synthetic construct
  source 1..75: mol_type = other DNA
attatccggatgtgttcgaacaggtctggcgggagtacccgttgcgtgccggggcaaacccgaagaaatccgctt

SEQ ID NO: 785745 - DNA, 75 bp, synthetic construct
  source 1..75: mol_type = other DNA
gaagccgatcgggtagtcccggaaaacaccgggcagtctgtgggacgagtggattatccggatgtgttcgaacag

SEQ ID NO: 785746 - DNA, 75 bp, synthetic construct
  source 1..75: mol_type = other DNA
gcaggatggcccgaaaatctcgtttaaagagattgccacgaagcactggcgcagcctgttgacgtgtattggtct

SEQ ID NO: 785747 - DNA, 75 bp, synthetic construct
  source 1..75: mol_type = other DNA
ggtgcgtaacggcaaaagcactgcccgacatcagcgctatcgctgctctcattgccgtaaaacatggcaactgca

SEQ ID NO: 785748 - DNA, 75 bp, synthetic construct
  source 1..75: mol_type = other DNA
gacaacgctaatatcatccgcaacattatgctggcgacgctctggtgccatgaccatctggtgcacttttatcag

SEQ ID NO: 785749 - DNA, 75 bp, synthetic construct
  source 1..75: mol_type = other DNA
atgcaaacaccactccaatatttttgtgtattcaacgccaacacaggggaagtcatcgcggcttcatttgagtaa

SEQ ID NO: 785750 - DNA, 75 bp, synthetic construct
  source 1..75: mol_type = other DNA
ctatgatagtgggagccgtgctcagttgggccagttacagcatggtcgcgcacgttacatcaaaacggcagatca

SEQ ID NO: 785751 - DNA, 75 bp, synthetic construct
  source 1..75: mol_type = other DNA
tagaaaacactgtcctgcaacaggcattgtggcaggcgctggaagcgcatccgaaagtaacgttacgtgtgccaa

SEQ ID NO: 785752 - DNA, 75 bp, synthetic construct
  source 1..75: mol_type = other DNA
cattcatccgctggcggggcagggggtgaatcttggttatcgcgatgttgatgcgctgattgacgttctggtgaa

SEQ ID NO: 785753 - DNA, 75 bp, synthetic construct
  source 1..75: mol_type = other DNA
gtgtggtatgactctccggtacgtattcgccagttgcagaatatgaatatggcgcaactccaggcggaaatcgcg

SEQ ID NO: 785754 - DNA, 75 bp, synthetic construct
  source 1..75: mol_type = other DNA
gcactggataaattccaggccgacaccggtatcgacatcgacatgcacatcgacgctgccagcggtggcttcctg

SEQ ID NO: 785755 - DNA, 75 bp, synthetic construct
  source 1..75: mol_type = other DNA
caagcgtatggaagctgcaggcaaaccaacggataaaccaaacctggtgtgcggtccggtgcaaatctgctggca

SEQ ID NO: 785756 - DNA, 75 bp, synthetic construct
  source 1..75: mol_type = other DNA
tggcgttggcgcaagcgtatggaagctgcaggcaaaccaacggataaaccaaacctggtgtgcggtccggtacaa

SEQ ID NO: 785757 - DNA, 75 bp, synthetic construct
  source 1..75: mol_type = other DNA
cgggggcaggaccccatcgacgggcaactggcgcaggtcattaatggcttcagggatacctatggtctgagtgtt

SEQ ID NO: 785758 - DNA, 75 bp, synthetic construct
  source 1..75: mol_type = other DNA
gccttaacccggctaacatccgcgcgctgatgacagcaggcaccctctgtttcgtcatcggtctggtcggtttta

SEQ ID NO: 785759 - DNA, 75 bp, synthetic construct
  source 1..75: mol_type = other DNA
aaacaaaaagacgatttcgataatgtcatgatgcaatggatgttacctgatcctaatactggacgttggttaggt

SEQ ID NO: 785760 - DNA, 75 bp, synthetic construct
  source 1..75: mol_type = other DNA
ctgatgaatgtgccatttatcccggtgatgattggtctgtttgctgcttcagaagcgttccgttctatggaacaa

SEQ ID NO: 785761 - DNA, 75 bp, synthetic construct
  source 1..75: mol_type = other DNA
ctgatgaatgtgccatttatcccggtgatgattggtttatttgctgcttcagaagcattccgctctatggagcaa

SEQ ID NO: 785762 - DNA, 75 bp, synthetic construct
  source 1..75: mol_type = other DNA
ttacaacggcacggtacggaaccagctggcagcagaccaggcgcagcagcgacaggccattgcgaaactggctga

SEQ ID NO: 785763 - DNA, 75 bp, synthetic construct
  source 1..75: mol_type = other DNA
gttttccgctgcatgaaatgcgagaagatgtcgcattccaaattatcaatgatgaattatatctggatggtaatg

SEQ ID NO: 785764 - DNA, 75 bp, synthetic construct
  source 1..75: mol_type = other DNA
tccgctcagaactactcgattcacgttttggtgccaagactatttcgactatcgctgactcaaaacgatttccgc

SEQ ID NO: 785765 - DNA, 75 bp, synthetic construct
  source 1..75: mol_type = other DNA
ggtccgaactactcgattcacgttttggtgccaaggccatttcgactatcgcagaatcaaaacgctttccgctgc

SEQ ID NO: 785766 - DNA, 75 bp, synthetic construct
  source 1..75: mol_type = other DNA
gctcagaactactcgattcacgttttggtgcaaaggccatttcgactatcgcagaatcaaaacgctttccgctgc

SEQ ID NO: 785767 - DNA, 75 bp, synthetic construct
  source 1..75: mol_type = other DNA
atggataagaagcaagtaacggatttaaggtcggaactactcgattcacgttttggcgcaaagtcaatttccact

SEQ ID NO: 785768 - DNA, 75 bp, synthetic construct
  source 1..75: mol_type = other DNA
tccgctcagaactactcgattcacgttttggtgccaaggctatttcaactatcgctgactcaaaacgatttccgc

SEQ ID NO: 785769 - DNA, 75 bp, synthetic construct
  source 1..75: mol_type = other DNA
tccgctcagaactactcgattcacgttttggtgccaagtctatttctactatcgctgactcaaaacgatttccgc

SEQ ID NO: 785770 - DNA, 75 bp, synthetic construct
  source 1..75: mol_type = other DNA
acctggccactttctgccagacctgggacgacgagaacgtccataaattgatggatttatcgattaaaaaaaact

SEQ ID NO: 785771 - DNA, 75 bp, synthetic construct
  source 1..75: mol_type = other DNA
acctggccactttctgccagacctgggacgacgagaatgtccataaattgatggatttctcgatgaaaaaaaact

SEQ ID NO: 785772 - DNA, 75 bp, synthetic construct
  source 1..75: mol_type = other DNA
acctggccactttctgccagacctgggacgacgagaaagtccataaattgatggatttctcgattaaaaaaaact

SEQ ID NO: 785773 - DNA, 75 bp, synthetic construct
  source 1..75: mol_type = other DNA
gttcggaactactcgattcacgttttggtgctaaggccatttcgactatcgcagaatcaaaacgctttccgctgc

SEQ ID NO: 785774 - DNA, 75 bp, synthetic construct
  source 1..75: mol_type = other DNA
gatctgaactactcgattcacgttttggtgctaaggccatttcgactatcgcagaatcaaaacgctttccgctgc

SEQ ID NO: 785775 - DNA, 75 bp, synthetic construct
  source 1..75: mol_type = other DNA
acctggccactttctgccagacctgggacgacgagaaggtccataaattgatggatttttcgatcaaaaaaaact

SEQ ID NO: 785776 - DNA, 75 bp, synthetic construct
  source 1..75: mol_type = other DNA
cgggcctgttcacgctgtgtgaaggggagtggataagcggcaagaaaagggtgtttgtcgcggcaaatatgttgt

SEQ ID NO: 785777 - DNA, 75 bp, synthetic construct
  source 1..75: mol_type = other DNA
ggaagtgaccttagtaaggcttatcttgaacacatagatttcacatcagtcattctatatgaaacatctgcaaca

SEQ ID NO: 785778 - DNA, 75 bp, synthetic construct
  source 1..75: mol_type = other DNA
aaaatgccacattagaaaataatgattttcgtaaagttcgccacttgacttatgtaaatttcaaaaacgcaaatc

SEQ ID NO: 785779 - DNA, 75 bp, synthetic construct
  source 1..75: mol_type = other DNA
aagaaatggtttacatgagtttgaagttggcgatctaaaaataatatttaatcgacaagatgataatgaaagcgt

SEQ ID NO: 785780 - DNA, 75 bp, synthetic construct
  source 1..75: mol_type = other DNA
tgaagagaatgagcgtttgcagacggagattgatcagctcaatcgaacaggtgggcgcgataccattgctccagt

SEQ ID NO: 785781 - DNA, 75 bp, synthetic construct
  source 1..75: mol_type = other DNA
tgacagtatcgagaaacaagccagtgacagtaccgataaacaagccagtgacagtatcgagaaacaagccaatga

SEQ ID NO: 785782 - DNA, 75 bp, synthetic construct
  source 1..75: mol_type = other DNA
ctgcaacatctgcaacatctgcaacatctgcaacatctgatactcctaaaatacctgaaatacctgaaatacctg

SEQ ID NO: 785783 - DNA, 75 bp, synthetic construct
  source 1..75: mol_type = other DNA
aggctgatgagataggtggagctcaaattcacgtgcgtgatttgtctatacaattagctaaagataataacgagg

SEQ ID NO: 785784 - DNA, 75 bp, synthetic construct
  source 1..75: mol_type = other DNA
tacggcgactactcctccgcgcaaattgcggaaggtttgaactatacctacggcggctgggcagatggcaacagc

SEQ ID NO: 785785 - DNA, 75 bp, synthetic construct
  source 1..75: mol_type = other DNA
aataccctggtcgcgcggctgatgaactgctgcggcggctatctgaaccattacggcgactactcctccgcgtaa

SEQ ID NO: 785786 - DNA, 75 bp, synthetic construct
  source 1..75: mol_type = other DNA
gttctaatattctatttaaccatgcatggttgttcaatacgatatttatagatacgatttttaaaaatgcctgtt

SEQ ID NO: 785787 - DNA, 75 bp, synthetic construct
  source 1..75: mol_type = other DNA
ccgagcaactgcagcagtttattaaaataatggaacaaaaagcgcaactaccaatctatattgacaagaacaatt

SEQ ID NO: 785788 - DNA, 75 bp, synthetic construct
  source 1..75: mol_type = other DNA
catttgaatgatggttttattaagcgtgtactgaatgtttttattcaccttatctctaatcccgacaatctcgaa

SEQ ID NO: 785789 - DNA, 75 bp, synthetic construct
  source 1..75: mol_type = other DNA
ctttctcaaatcccagatgaatcacctctatttatcgtttgcaagtcaattcgagaagcatgccgttattatatg

SEQ ID NO: 785790 - DNA, 75 bp, synthetic construct
  source 1..75: mol_type = other DNA
ttacctaaatcatataaaatatcagaatgggacaggaagtggttagataataataatataaaaatagtctttgtt

SEQ ID NO: 785791 - DNA, 75 bp, synthetic construct
  source 1..75: mol_type = other DNA
aagatatcttcattcacgccaccagcccaaatgaaacactgaaaacagcagttacagcggaatggtttgaacgaa

SEQ ID NO: 785792 - DNA, 75 bp, synthetic construct
  source 1..75: mol_type = other DNA
ctgtttttacaatgtcagagcgaaaaatgtctatcttgagggagcatatctgaacaatgataatatcgtgaaaca

SEQ ID NO: 785793 - DNA, 75 bp, synthetic construct
  source 1..75: mol_type = other DNA
aagcaacggcaaacaatggtttgatcccgatgtcagcgtgatctatccagacaggatccgccgccgcccaccggg

SEQ ID NO: 785794 - DNA, 75 bp, synthetic construct
  source 1..75: mol_type = other DNA
gatcgcgcaatgctcaactaccttgatgccaatcactttgatgatgtgtataaaggccccggtgacagctttttc

SEQ ID NO: 785795 - DNA, 75 bp, synthetic construct
  source 1..75: mol_type = other DNA
tatgatttagctaaacttagtcattcaatattgggaatgtatgattggatagtggcaggctattgtgatgcgaac

SEQ ID NO: 785796 - DNA, 75 bp, synthetic construct
  source 1..75: mol_type = other DNA
aactttctgaagactgcgttcgccgttttttacattctgtagttgctgtagatgacaatatgtcttttggagctg

SEQ ID NO: 785797 - DNA, 75 bp, synthetic construct
  source 1..75: mol_type = other DNA
ggggatgactggtgggcactctcgcgcgctgacggatcgccttgccagtatcaaaaatcgtatgcatatggacgg

SEQ ID NO: 785798 - DNA, 75 bp, synthetic construct
  source 1..75: mol_type = other DNA
ttgcatcggaagcggattctctttatgaagagaatgagcgtttgcagggggagattgatcggctcaatcgcactg

SEQ ID NO: 785799 - DNA, 75 bp, synthetic construct
  source 1..75: mol_type = other DNA
taattattggagcagtatttgataattccaatctatcagagaaaaatctttcagacaaagatcttactaatatta

SEQ ID NO: 785800 - DNA, 75 bp, synthetic construct
  source 1..75: mol_type = other DNA
tacgctgatgttttccctgacgtgaaaataccttcaggacgcagtttggcgggaggtatcaacaaaaccgagcta

SEQ ID NO: 785801 - DNA, 75 bp, synthetic construct
  source 1..75: mol_type = other DNA
aaaagcttctaatattatttcattttcatttggagtcgaaaatggaaacggtgtcatcatagggaaaaagaacaa

SEQ ID NO: 785802 - DNA, 75 bp, synthetic construct
  source 1..75: mol_type = other DNA
aaggcaatttctttatcgtcgggaagaactccaggggggggttcgcttttttgtcctgtcgcaggaacgcccggc

SEQ ID NO: 785803 - DNA, 75 bp, synthetic construct
  source 1..75: mol_type = other DNA
tgaagtccggaactcaaggtgatttgattgagctgattggtaaatcgatcacactgacggataagtatggcagta

SEQ ID NO: 785804 - DNA, 75 bp, synthetic construct
  source 1..75: mol_type = other DNA
cggacagggtatcccggaaatacgatttcaggaaaattcatgcagtaatgggaaaggactctcattgctgttcac

SEQ ID NO: 785805 - DNA, 75 bp, synthetic construct
  source 1..75: mol_type = other DNA
cgacagcgtggtctgtcatatcaacggttaccagggtattcaggcggcgctcgagaaaaagctgaacatcaaacc

SEQ ID NO: 785806 - DNA, 75 bp, synthetic construct
  source 1..75: mol_type = other DNA
agggcaaacgacatttgatggccgctttacgctgctgccaacttgctgcctggggaactgtgataaagggccaaa

SEQ ID NO: 785807 - DNA, 75 bp, synthetic construct
  source 1..75: mol_type = other DNA
catttatgcctcaggtttttgaatccgttaaagaagaatatttcacagtcaaacttgctgcattaaaaaaacata

SEQ ID NO: 785808 - DNA, 75 bp, synthetic construct
  source 1..75: mol_type = other DNA
atgaataatcgcgtcatcgaatgcgcctccagagcggggcgagacttctctgagttcatgaaaggcgagaagggc

SEQ ID NO: 785809 - DNA, 75 bp, synthetic construct
  source 1..75: mol_type = other DNA
cttaagttagcgcttatgggagaaatccccgctaaggattcttatatgggatattgggtaagtagtgaaattaat

SEQ ID NO: 785810 - DNA, 75 bp, synthetic construct
  source 1..75: mol_type = other DNA
aaaatgattctgtactgcgtaaacaatctgccgtttggatacagcaatcccctaagtgttatgttcaaccagtga

SEQ ID NO: 785811 - DNA, 75 bp, synthetic construct
  source 1..75: mol_type = other DNA
gaaaaaggcgtggatgtggtttcttctttcgcttcgtcatctactctggcccgtcagattgaagcgggagcgcct

SEQ ID NO: 785812 - DNA, 75 bp, synthetic construct
  source 1..75: mol_type = other DNA
ttaattaccggtggtctgacagagctggcgttcgccggattaacccctgccggtggtgttcaaccgcccaaccct

SEQ ID NO: 785813 - DNA, 75 bp, synthetic construct
  source 1..75: mol_type = other DNA
ggctatccctggcggcattagttttcgttctggggattgatttttggctggaagccttgtttttattccgtccga

SEQ ID NO: 785814 - DNA, 75 bp, synthetic construct
  source 1..75: mol_type = other DNA
taggccgccatgtgatccgttattgcgacagcgtggtctgtcacatcaacggttaccagggtattcaggcggcgc

SEQ ID NO: 785815 - DNA, 75 bp, synthetic construct
  source 1..75: mol_type = other DNA
tactcagtcacatctgaattcaatgtcgtaaagaaaagcgtagagttaattgaggcacccaaaaaaaattccagt

SEQ ID NO: 785816 - DNA, 75 bp, synthetic construct
  source 1..75: mol_type = other DNA
cgataaccgctttagatactgccctgattgcgttgctcttcagctaaataggtatggggaagccttttggcaacg

SEQ ID NO: 785817 - DNA, 75 bp, synthetic construct
  source 1..75: mol_type = other DNA
tctccggcgctttatatcaaagcgctgcctgaagtgacgtcagatcgccgcgccatggatgattcccagcttcag

SEQ ID NO: 785818 - DNA, 75 bp, synthetic construct
  source 1..75: mol_type = other DNA
gatgccgggcgaaaaaagtgcgtttggtgatgtggagaaggctgcgcgggtttacgcaattaacgagctgatgcc

SEQ ID NO: 785819 - DNA, 75 bp, synthetic construct
  source 1..75: mol_type = other DNA
agataaatgaaaaaataaacacattgattagaattgttaatgaatctgaacagatgtttgaagctaaggtaagaa

SEQ ID NO: 785820 - DNA, 75 bp, synthetic construct
  source 1..75: mol_type = other DNA
gagcaaaggagatttatgaagaattaatcattgctgtgccgagtagagaggatgaatttaggaaactttcctttg

SEQ ID NO: 785821 - DNA, 75 bp, synthetic construct
  source 1..75: mol_type = other DNA
ctgaagtactgcatcttgtcctgcagcgtggcctggaactgcttacggacgacgatctgctgcagctgggcaagt

SEQ ID NO: 785822 - DNA, 75 bp, synthetic construct
  source 1..75: mol_type = other DNA
aatttaatcctatggggttggaacaaaaagcacccaaacagaaaaggtgaaaatgatgctctcaaaaaaccacta

SEQ ID NO: 785823 - DNA, 75 bp, synthetic construct
  source 1..75: mol_type = other DNA
aaacgtaaggtgtactaccgggacaccgatggacgctttgatgagctcaaggttaatgccggtgcttttgccgga

SEQ ID NO: 785824 - DNA, 75 bp, synthetic construct
  source 1..75: mol_type = other DNA
aaataacgcagacaatgaaacggaatgatgttgattctgtggatagtcgcttttttgagtcagcgcaaaacatga

SEQ ID NO: 785825 - DNA, 75 bp, synthetic construct
  source 1..75: mol_type = other DNA
aactggcagtagcggaaatgcttcacgatgccgaaatgtggagcgccgcgaataaagccttatacatagtgttaa

SEQ ID NO: 785826 - DNA, 75 bp, synthetic construct
  source 1..75: mol_type = other DNA
cacgatcaaagtaacgtcactttacttgcactcatcaccggcgcgttaccacgaagctgttaaccgggcgatgaa

SEQ ID NO: 785827 - DNA, 75 bp, synthetic construct
  source 1..75: mol_type = other DNA
atgattctgtaccgcgtaaacaacctgccgtttggatacagcaatcccctgagtgttatgttcaaccagttactg

SEQ ID NO: 785828 - DNA, 75 bp, synthetic construct
  source 1..75: mol_type = other DNA
cagaacatgctaaagatgttcatgatggttatttctctattgataaaaaaggcggatgggctgagacaagtgaaa

SEQ ID NO: 785829 - DNA, 75 bp, synthetic construct
  source 1..75: mol_type = other DNA
tcctgactgggctttggttattgaagacaatggtgaagaccatatttactttgttgttgagacaaaaagtaaaca

SEQ ID NO: 785830 - DNA, 75 bp, synthetic construct
  source 1..75: mol_type = other DNA
ttgttgatggtattaaatattatccactaaaaggagaggtgtatgcgcaaagtctctttatggataaggagctaa

SEQ ID NO: 785831 - DNA, 75 bp, synthetic construct
  source 1..75: mol_type = other DNA
cgggatatgcccgtaatctttttgaaacttcggctaagtcagtttatgaatacgttccaaaagattctgaagtcg

SEQ ID NO: 785832 - DNA, 75 bp, synthetic construct
  source 1..75: mol_type = other DNA
gaaaagctggttgaggcgtgtgctaagtctattgaagaaatgccggctgttgataaagccacattaagtttcagc

SEQ ID NO: 785833 - DNA, 75 bp, synthetic construct
  source 1..75: mol_type = other DNA
tctgtagccttcgagagatgggaagtgaacgagaacgccgccagactttaggccgtggtcttcgcctgtgcgtta

SEQ ID NO: 785834 - DNA, 75 bp, synthetic construct
  source 1..75: mol_type = other DNA
atggataagaagcaagtaacggatttaaggtcggaactactcgattcacgttttggcgccaagtcgatttcgact

SEQ ID NO: 785835 - DNA, 75 bp, synthetic construct
  source 1..75: mol_type = other DNA
atggataagaagcaagtaacggatttaaggtcggaactactcgattcacgttttggcgccaagtccatttccact

SEQ ID NO: 785836 - DNA, 75 bp, synthetic construct
  source 1..75: mol_type = other DNA
atggataagaagcaagtaacggatttaaggtcggaactactcgattcacgttttggcgccaagtcaatttcaact

SEQ ID NO: 785837 - DNA, 75 bp, synthetic construct
  source 1..75: mol_type = other DNA
cgatagtatgatcaagtcattagaagatattatttttaaacatattccggaatatatagaaataattcgtgcata

SEQ ID NO: 785838 - DNA, 75 bp, synthetic construct
  source 1..75: mol_type = other DNA
cctgccggaatattcgaacgtcatcttgataaaggaacgcgcccgggggtttaccccataagcgctaacttaagg

SEQ ID NO: 785839 - DNA, 75 bp, synthetic construct
  source 1..75: mol_type = other DNA
atggataagaagcaagtaacggatttaaggtcggaactactcgattcacgttttggcgcgaagtcgatttccact

SEQ ID NO: 785840 - DNA, 75 bp, synthetic construct
  source 1..75: mol_type = other DNA
ggcgctgattgaagcggttacggctgatggtggtggttcaaacatctattacaaggatgttgacctgctggtctc

SEQ ID NO: 785841 - DNA, 75 bp, synthetic construct
  source 1..75: mol_type = other DNA
aagcggaactgacaaaagcatcaggcacggaacatcacggtggcgtttgcttcctgatcaaaaagcgtaacggca

SEQ ID NO: 785842 - DNA, 75 bp, synthetic construct
  source 1..75: mol_type = other DNA
cacgccgcgcggctgattgcgggcaacaactgaaattcattgccgaagccttgaatcttcgtcaaatcgatttgg

SEQ ID NO: 785843 - DNA, 75 bp, synthetic construct
  source 1..75: mol_type = other DNA
cagaagatgattcctgcccgatgcgtacatgcgcacatgcttttacttgaactggcgcaccgccgagttacatca

SEQ ID NO: 785844 - DNA, 75 bp, synthetic construct
  source 1..75: mol_type = other DNA
gcaaagcggggaaagcggagtcgatcgttactttgaacaacaggtttcgttggcggcatttaccgatgcaacgcc

SEQ ID NO: 785845 - DNA, 75 bp, synthetic construct
  source 1..75: mol_type = other DNA
catctcattcgcaatgggcatcagcggatcgcctggctgggagggcaaagttcctcattaacccgggcagaacgg

SEQ ID NO: 785846 - DNA, 75 bp, synthetic construct
  source 1..75: mol_type = other DNA
catgatgcaaaaaattggtcacgaagagaatcactcacgaaacctgattattccagcacggctcattacgatgaa

SEQ ID NO: 785847 - DNA, 75 bp, synthetic construct
  source 1..75: mol_type = other DNA
atcatctggcagacgcgacgcgcctttaaatttgaagccctggacgatctgaacagcgagcacaccttcaagaac

SEQ ID NO: 785848 - DNA, 75 bp, synthetic construct
  source 1..75: mol_type = other DNA
aatgggtcggtgagcgtcagctggcaacgctggacggttatggttacaccatcaccaacaaactctgggaaagtt

SEQ ID NO: 785849 - DNA, 75 bp, synthetic construct
  source 1..75: mol_type = other DNA
agaacttctttgatgaagaccacccgctgggcgacggcacctgcagcaacgttgtcggcaccccggcatcagacc

SEQ ID NO: 785850 - DNA, 75 bp, synthetic construct
  source 1..75: mol_type = other DNA
attatgcagaaactggccgtgctgcagacggcaacaaagcgggcgctgtacgaagccattctgtatcccggcgtg

SEQ ID NO: 785851 - DNA, 75 bp, synthetic construct
  source 1..75: mol_type = other DNA
acctgcagtacagccattacaacggcacggtacggaaccagctggcagcagaccaggcgcagcagcgacaggcca

SEQ ID NO: 785852 - DNA, 75 bp, synthetic construct
  source 1..75: mol_type = other DNA
cagggtggacaatgacggtaaggccatacgcctttactttaaaaaaggagaataccgcacaggaacacatgccgg

SEQ ID NO: 785853 - DNA, 75 bp, synthetic construct
  source 1..75: mol_type = other DNA
agatcatggcactggatgaggcaaaaggggctgaggcgcaggctgaacagctggctgcctgcccgggaatgacag

SEQ ID NO: 785854 - DNA, 75 bp, synthetic construct
  source 1..75: mol_type = other DNA
gaattttccacagtgctggcggatttacagcgcacatttgaggagaaaatagccgcgcaggcacaaacgtttgaa

SEQ ID NO: 785855 - DNA, 75 bp, synthetic construct
  source 1..75: mol_type = other DNA
tgaccggtgataaacccggagaagctcattcatcagcctggaccctggctgcaaaacgtgggcgggatgcaggag

SEQ ID NO: 785856 - DNA, 75 bp, synthetic construct
  source 1..75: mol_type = other DNA
gcaacggggcaaaatacagccccacgacgttttcaccggtggatgcgcagacggtggaacaactgaagatgaccg

SEQ ID NO: 785857 - DNA, 75 bp, synthetic construct
  source 1..75: mol_type = other DNA
atgaccatatcggagttgctacaatattgcatggcaaaacctggcgctgaacagagcgttcacagcgactggaaa

SEQ ID NO: 785858 - DNA, 75 bp, synthetic construct
  source 1..75: mol_type = other DNA
cacatgggtactggcagtgataagtcggatgcgctcggcgtgccctattataatcaacacgctggtaatgctgcc

SEQ ID NO: 785859 - DNA, 75 bp, synthetic construct
  source 1..75: mol_type = other DNA
ggaacaaccccctttcgatttaaatcacatggggacaggcagtgataagtcggatgcgctgggcgtgccttatta

SEQ ID NO: 785860 - DNA, 75 bp, synthetic construct
  source 1..75: mol_type = other DNA
atgagtgttaccgttatcaatgaaatgcttgggtgcaaattcgataaggtgtttacgaatcaaaacaacgaactt

SEQ ID NO: 785861 - DNA, 75 bp, synthetic construct
  source 1..75: mol_type = other DNA
tttccactttcaggaatgttgtgaaaacgtctggattgaagacattgttggcgacctgacagacctggaaggagc

SEQ ID NO: 785862 - DNA, 75 bp, synthetic construct
  source 1..75: mol_type = other DNA
gttcggcacatcaaaaggctgtgtagtcgtcagatggtgcggtgagagcgagggcttttattctgagtgcgtttc

SEQ ID NO: 785863 - DNA, 75 bp, synthetic construct
  source 1..75: mol_type = other DNA
tattgctgaagaacttgaactgccgccggtgaaaattcactgttctattctggcagaagacgcgatcaaagccgc

SEQ ID NO: 785864 - DNA, 75 bp, synthetic construct
  source 1..75: mol_type = other DNA
caaaggactgaaccggggaacactgacgcagatcggcggggaaaccatccgtgaaaaggcgcggatacagaaacc

SEQ ID NO: 785865 - DNA, 75 bp, synthetic construct
  source 1..75: mol_type = other DNA
aagcaaagaaatccaatctaatatttctgtgttgaataaatatgactggaaaattgttggtgaaactttcaatag

SEQ ID NO: 785866 - DNA, 75 bp, synthetic construct
  source 1..75: mol_type = other DNA
caatgaccgttatcgccatattgttgatattcataatctggcggagctgcggggaattacgctggcggaagatgg

SEQ ID NO: 785867 - DNA, 75 bp, synthetic construct
  source 1..75: mol_type = other DNA
ccgcgtattgaaggattctccagccgcgacggcaatgtcgaatttgcctggacaccgaatcaaaatcacgatttt

SEQ ID NO: 785868 - DNA, 75 bp, synthetic construct
  source 1..75: mol_type = other DNA
tctcaactcgacaggtgagcgtggaagatctcgtcagaaccggtgcttttctggtggcgatgtccctgtggcata

SEQ ID NO: 785869 - DNA, 75 bp, synthetic construct
  source 1..75: mol_type = other DNA
aacccgaatgctatttcaatgatttacgcgataagtggtccgctcattgccatgattctgtttatcatgccaaca

SEQ ID NO: 785870 - DNA, 75 bp, synthetic construct
  source 1..75: mol_type = other DNA
gctgggattacggcaccagcgaactgaaatactacggcgagaaagtcgaaaacaaaaaccctggcaacagcagcc

SEQ ID NO: 785871 - DNA, 75 bp, synthetic construct
  source 1..75: mol_type = other DNA
caaaactttgttggttttacagcgaacggtgtgccggtatttagctactacaacgttaacaaagcacgtattcag

SEQ ID NO: 785872 - DNA, 75 bp, synthetic construct
  source 1..75: mol_type = other DNA
cgacggcaaatacacgttgccgctgacggcgattaatcagtttctcacggttggcggtgaatgcgtcacgacaaa

SEQ ID NO: 785873 - DNA, 75 bp, synthetic construct
  source 1..75: mol_type = other DNA
ccagttgcaccacctgctgcgtatgctgcaaagaaattccgctcgatgccgccttcaccccggaaggcgcggaat

SEQ ID NO: 785874 - DNA, 75 bp, synthetic construct
  source 1..75: mol_type = other DNA
cttcatggcgggccagtaaagagtttcgtctgcatctcatccagacgatgaccaaaaaagtgattagcgaagccg

SEQ ID NO: 785875 - DNA, 75 bp, synthetic construct
  source 1..75: mol_type = other DNA
gtggtcctgtttattactgctctggtcgcctggcctttaacatattggccacataaagccttatgccagttcatc

SEQ ID NO: 785876 - DNA, 75 bp, synthetic construct
  source 1..75: mol_type = other DNA
aaactctctggagcttcgcgctctacggcactgccgttggcgcaggaacgctctttctccctattcagttaggtt

SEQ ID NO: 785877 - DNA, 75 bp, synthetic construct
  source 1..75: mol_type = other DNA
atgaaaaaaacaacctccaccgcattactggcactgaccctgggcagcgtactggcagcggccagtgccccggca

SEQ ID NO: 785878 - DNA, 75 bp, synthetic construct
  source 1..75: mol_type = other DNA
tgtgcgtccgatgcttgaacagatggtgaaggaggcggtaagccatattcctgttccgcgtgatggtcgtgacta

SEQ ID NO: 785879 - DNA, 75 bp, synthetic construct
  source 1..75: mol_type = other DNA
gttctggacgcaaagtgacaaccctgctctggttgcgaaccaaaacgccaccggtagcaatagccgcccgtggaa

SEQ ID NO: 785880 - DNA, 75 bp, synthetic construct
  source 1..75: mol_type = other DNA
agccgttaggtaaggctcagagctatagcaacgaagagctgaataatgcgccgcagtttaatccagaaacgcttt

SEQ ID NO: 785881 - DNA, 75 bp, synthetic construct
  source 1..75: mol_type = other DNA
cattaacctgtctccggaattccacggtctgactaaagaacaagctccgaagtacgcattcagtgcgatcttcgc

SEQ ID NO: 785882 - DNA, 75 bp, synthetic construct
  source 1..75: mol_type = other DNA
tgacgttaccgctgcttgctgcgaacgttgcacgcgcggacgactccgatgttaaaggcctggattactacatgg

SEQ ID NO: 785883 - DNA, 75 bp, synthetic construct
  source 1..75: mol_type = other DNA
ccagcaaagcgtacagcgcgaacagcatcgtagattataacgatgcacattataaaacctctgtcgatcaagacg

SEQ ID NO: 785884 - DNA, 75 bp, synthetic construct
  source 1..75: mol_type = other DNA
tcagtacagcaaaattaaagctctgcgtgaagcaggcggcgatgtgatgctgtctatcggtggtgctaataacgc

SEQ ID NO: 785885 - DNA, 75 bp, synthetic construct
  source 1..75: mol_type = other DNA
ctggacgcgtccggactacgtgatcacccggatgcgatacttttcccgccagtacaccggagcaacaaagcgcgg

SEQ ID NO: 785886 - DNA, 75 bp, synthetic construct
  source 1..75: mol_type = other DNA
ccgacactggcaccgccgttactgcgtcagctggccgccatcggaaataacctgaatcagacagcccgtaaggtg

SEQ ID NO: 785887 - DNA, 75 bp, synthetic construct
  source 1..75: mol_type = other DNA
ttgtcgctggcgaaaattcccggcgtcggaaaagtctcggcagcaaaactggaagcgatgggattacggacctgt

SEQ ID NO: 785888 - DNA, 75 bp, synthetic construct
  source 1..75: mol_type = other DNA
atggcgtctcgtgcgtacagctaccgctgcggaaatagtcagtacggtaacccgactacctgtgaaattgataat

SEQ ID NO: 785889 - DNA, 75 bp, synthetic construct
  source 1..75: mol_type = other DNA
tgaattaattatggaaaccggggccagaattatcgattatatgcggcgtaatgatgatgatatgtcggcaaacga

SEQ ID NO: 785890 - DNA, 75 bp, synthetic construct
  source 1..75: mol_type = other DNA
tactgcccgatggtgaaccgttccctgggcgctatttgctggtgtttctcgctaccggggtgatcctcttttcgt

SEQ ID NO: 785891 - DNA, 75 bp, synthetic construct
  source 1..75: mol_type = other DNA
ccagtaatagaagaaggaatgcagaaaacagtattgaaaaattatatgcagatattggatggtgatccttttctt

SEQ ID NO: 785892 - DNA, 75 bp, synthetic construct
  source 1..75: mol_type = other DNA
gaggtggtaagccatatccctgttccgcgagatggtcgtgactatgatcccgatgtactgcagaaggcggtgaat

SEQ ID NO: 785893 - DNA, 75 bp, synthetic construct
  source 1..75: mol_type = other DNA
actgcaacagtatgaccgttgataaacccggagaagctcattcatcagtctggaccctggctgcaaaacgtggtc

SEQ ID NO: 785894 - DNA, 75 bp, synthetic construct
  source 1..75: mol_type = other DNA
aggcggtgaatgatgcagtcgcaaatattccgcagccggcagacggtaaaagtatcaccccggatgatgtgcgtc

SEQ ID NO: 785895 - DNA, 75 bp, synthetic construct
  source 1..75: mol_type = other DNA
catatccctgttccgcgtgatggtcgtgattacgatccggaagtactgcagaaggcggtgaatgatgcggtcgca

SEQ ID NO: 785896 - DNA, 75 bp, synthetic construct
  source 1..75: mol_type = other DNA
gggcagatcaaagaactgcgtattctggactggagccgggttgaacctctggtggcggatgacggcgaggtgttc

SEQ ID NO: 785897 - DNA, 75 bp, synthetic construct
  source 1..75: mol_type = other DNA
aggcggtaagccatattcatgttccgcgtgatggtcgtgactacgatccggatgttctgcagaaggcggttctgg

SEQ ID NO: 785898 - DNA, 75 bp, synthetic construct
  source 1..75: mol_type = other DNA
gttttgctgccagcgacagccaggttggactggaagaggtggttgtgatcgcgcaaagcgtcggcgcagtgctgg

SEQ ID NO: 785899 - DNA, 75 bp, synthetic construct
  source 1..75: mol_type = other DNA
tgttatttacatttgcaatagattagaaaaaagacagtatataaatcagttgattaagcttcagaattatataga

SEQ ID NO: 785900 - DNA, 75 bp, synthetic construct
  source 1..75: mol_type = other DNA
ggaaatggccattttctctttgattatgcgggttgccttgaatgtggtacttgccgggtattatgcggagagtcg

SEQ ID NO: 785901 - DNA, 75 bp, synthetic construct
  source 1..75: mol_type = other DNA
atgcactgtatcttcagcagcagaactacagtctggaggcgctgtcccgtcgtgatgcccgtgaggatccgttcg

SEQ ID NO: 785902 - DNA, 75 bp, synthetic construct
  source 1..75: mol_type = other DNA
gatatccctattgctattggcggcagccgcgaacgtcggggggtgatcagcaccgccaattatcccgcgcgtaaa

SEQ ID NO: 785903 - DNA, 75 bp, synthetic construct
  source 1..75: mol_type = other DNA
aaggcggttctggatgcggtgagtgccctgccggctccgcaggacgggcgtgatgccacggctctggaaatactc

SEQ ID NO: 785904 - DNA, 75 bp, synthetic construct
  source 1..75: mol_type = other DNA
aatgattccatcgatttgggattggaagcgcaatcgatactcaaagtgatggtcgagctagaagcacaactgaat

SEQ ID NO: 785905 - DNA, 75 bp, synthetic construct
  source 1..75: mol_type = other DNA
caaagagcgcgatctgcgttacgtcctcgtcaaagcggtggcatccggtctgacgcatgaagagcgcaagatgta

SEQ ID NO: 785906 - DNA, 75 bp, synthetic construct
  source 1..75: mol_type = other DNA
cggtgatgggagcgattgtcgcgggactggcattattgctggtgtttatgtcagccagaaaacaacctggaaacg

SEQ ID NO: 785907 - DNA, 75 bp, synthetic construct
  source 1..75: mol_type = other DNA
gcaacccgtctctgcgtcaccgtacctggcagatcgcgatggatggcagccagaagttgccgcagcgtctgctgg

SEQ ID NO: 785908 - DNA, 75 bp, synthetic construct
  source 1..75: mol_type = other DNA
aacgcaatgttgtgaacgtgagtcgttttactattcctcgccaagtcgaagacgatcgtttttctatcttggtgc

SEQ ID NO: 785909 - DNA, 75 bp, synthetic construct
  source 1..75: mol_type = other DNA
aagtgaaccaacaaatttatgtgcaacttttgaacaaagtacaagaactctcgattgttaaagcgggcaccgtgg

SEQ ID NO: 785910 - DNA, 75 bp, synthetic construct
  source 1..75: mol_type = other DNA
acatggaataacagggtattgccaaaagaatatggctatcccataaagatacgtatccctactaagctgggatat

SEQ ID NO: 785911 - DNA, 75 bp, synthetic construct
  source 1..75: mol_type = other DNA
atcccggaatatacgttgaactcaacgctgagctggcaggcacgggaagatttgtcgatgcaaacgaccttcacc

SEQ ID NO: 785912 - DNA, 75 bp, synthetic construct
  source 1..75: mol_type = other DNA
tctgtaccagactaacccaaactacattctctacagtaaagtcagggctgctatgccagcgcgggcggctgctat

SEQ ID NO: 785913 - DNA, 75 bp, synthetic construct
  source 1..75: mol_type = other DNA
gctggcggatgtcatttctggcaacggcggggctgggagtgatttcaatggtaagtctgttcttctcattaccta

SEQ ID NO: 785914 - DNA, 75 bp, synthetic construct
  source 1..75: mol_type = other DNA
ccgcaggtgttatcggctttactgacgacggtgctgggggctggcgcaatgtttacgctctacacttatatttct

SEQ ID NO: 785915 - DNA, 75 bp, synthetic construct
  source 1..75: mol_type = other DNA
gtatgtcatttctggcaacggcggggctgggtgtgatttcaatggtgagcctgttcttctctttacctaaaggtg

SEQ ID NO: 785916 - DNA, 75 bp, synthetic construct
  source 1..75: mol_type = other DNA
atgactactattgttgacagcaatctgccggttgcccgcccgtcatgggtgcattctcgtctggaatcacgcatt

SEQ ID NO: 785917 - DNA, 75 bp, synthetic construct
  source 1..75: mol_type = other DNA
tacgtaaagtggagttaccgttggcagcgccagtgattctggccggcgtgcggacttcagtaattatcaacattg

SEQ ID NO: 785918 - DNA, 75 bp, synthetic construct
  source 1..75: mol_type = other DNA
ttgccggactgggcgcgattgatgatagcgtgacggatgttgctaaaggcatgggaatgagccgtggtcagcgac

SEQ ID NO: 785919 - DNA, 75 bp, synthetic construct
  source 1..75: mol_type = other DNA
aggcgaacaaggtaagcgagacagtattgtcgttgttgcccagttgtcgccggaattcaccgctcgtcttgttga

SEQ ID NO: 785920 - DNA, 75 bp, synthetic construct
  source 1..75: mol_type = other DNA
cgggaaatacaccattagcgttagccaactggcgcaggcacaaacgctgaccacaaaaattagtcaaaaagacag

SEQ ID NO: 785921 - DNA, 75 bp, synthetic construct
  source 1..75: mol_type = other DNA
gtttgttgtcccgctgttatgtgtgctgattggacgtcgatggttcagggctgggctgattcgctgctggctgtt

SEQ ID NO: 785922 - DNA, 75 bp, synthetic construct
  source 1..75: mol_type = other DNA
gctcatccagtcgcgtctggtattagggaaaacggtagacgatcttaacctcgatatcgccgttaccaaagatac

SEQ ID NO: 785923 - DNA, 75 bp, synthetic construct
  source 1..75: mol_type = other DNA
ctgaccagttggctctcttccaccgggataatccaggcagcaaaagatggcgtcagcaaaacgctgaataatttg

SEQ ID NO: 785924 - DNA, 75 bp, synthetic construct
  source 1..75: mol_type = other DNA
gcagccagtgaacgtatcgataccttaatgacgcgctataaagcccagttcacccaattagatgtgttaatgaac

SEQ ID NO: 785925 - DNA, 75 bp, synthetic construct
  source 1..75: mol_type = other DNA
gatgccagtaccggaaagctggaaatagcgaccgacaaactgcaaacagcgctgaaaaaagatgctgctggcgtc

SEQ ID NO: 785926 - DNA, 75 bp, synthetic construct
  source 1..75: mol_type = other DNA
gggagtgaaaccgatgtcagttacgtcatatttaccgaactgctttacaacctgcaaccagtggagcggccccgg

SEQ ID NO: 785927 - DNA, 75 bp, synthetic construct
  source 1..75: mol_type = other DNA
gctttcaatctttctggtggtaaggccggttctgaatctgttgaaaatgctgcgcgtttcctgtacctgaatcgc

SEQ ID NO: 785928 - DNA, 75 bp, synthetic construct
  source 1..75: mol_type = other DNA
ttaatctgtataagacgatggcttatcacactgatgcattgctcattgagctggaggctttattttctgccggtt

SEQ ID NO: 785929 - DNA, 75 bp, synthetic construct
  source 1..75: mol_type = other DNA
tcctgtatctcaatcgacatggttaccgtgggttatgtcgctataacaagagcgggcatttcaacattccctacg

SEQ ID NO: 785930 - DNA, 75 bp, synthetic construct
  source 1..75: mol_type = other DNA
atacatgatgcgccgcttcgcaaaaatgatgcgcgacatcaaaaaaccaaaagagaaaaagataccagccccaat

SEQ ID NO: 785931 - DNA, 75 bp, synthetic construct
  source 1..75: mol_type = other DNA
gcagggtgacacaattcacggcgtgtggtttgacgaagagccaccatacagcatttatggcgaaggtcttacccg

SEQ ID NO: 785932 - DNA, 75 bp, synthetic construct
  source 1..75: mol_type = other DNA
tgtactggacgatattcttacgccactgcgaatttatgatgcaagtgcgctggagtgcattttaaaccgttataa

SEQ ID NO: 785933 - DNA, 75 bp, synthetic construct
  source 1..75: mol_type = other DNA
gccagtacgcgctgtttgtggaagatgaatggcggatcttcgagccgctggcgctgacgaccggcgtacgtatgg

SEQ ID NO: 785934 - DNA, 75 bp, synthetic construct
  source 1..75: mol_type = other DNA
taacttccgaaagcaatacggtcgacggcaaatacacgttgccgctgacggcgattaatcagtttctcacggttg

SEQ ID NO: 785935 - DNA, 75 bp, synthetic construct
  source 1..75: mol_type = other DNA
cgatctggaatacaggcgcagcgtggcaggtgacgaaagatatcaaactgcgtgctggcgtgttgaacctgaccg

SEQ ID NO: 785936 - DNA, 75 bp, synthetic construct
  source 1..75: mol_type = other DNA
aaggggataaccgtaagggcgttagtattcgtggtctggacagcagctacaccctgattcttgtcgacggtaaac

SEQ ID NO: 785937 - DNA, 75 bp, synthetic construct
  source 1..75: mol_type = other DNA
aaagcaccttctctgttgcaacttagccctgactggacgagcaattcctgccgtggcgcatgtaagattgtgggt

SEQ ID NO: 785938 - DNA, 75 bp, synthetic construct
  source 1..75: mol_type = other DNA
gcaggtgaccaaagacgtcaaactgcgtgcgggtgtgctgaaccttggcgacaaggatctcagtcgtgacgacta

SEQ ID NO: 785939 - DNA, 75 bp, synthetic construct
  source 1..75: mol_type = other DNA
taattatatcgaatgtgattacaatcggtggcggcggcacagttggtgtggcggcctcagtccggaacaatttga

SEQ ID NO: 785940 - DNA, 75 bp, synthetic construct
  source 1..75: mol_type = other DNA
tgtgacccgaaacaggccgtcgcagtggcgaacaaagtcgttaacgacggcattaaatatgtcattggtcacctc

SEQ ID NO: 785941 - DNA, 75 bp, synthetic construct
  source 1..75: mol_type = other DNA
tcaacgcagcctgcgtctgacatctacgaagacgaaggcattttaatgatcaccccagcggcaaccgcgccggag

SEQ ID NO: 785942 - DNA, 75 bp, synthetic construct
  source 1..75: mol_type = other DNA
attgttggtatggttggcgctgtggatgtatggcggtgggagtggtggcaggctggccttctcttctttggtggg

SEQ ID NO: 785943 - DNA, 75 bp, synthetic construct
  source 1..75: mol_type = other DNA
ataaggcgttagccaccatttaccccgtaacctatgacgattggaataattcgaaggtatacgggcaaccttacc

SEQ ID NO: 785944 - DNA, 75 bp, synthetic construct
  source 1..75: mol_type = other DNA
acaccactactattgctgacccgctggcggctggggccaactttataaccggagtcgttgaatgggacatgagca

SEQ ID NO: 785945 - DNA, 75 bp, synthetic construct
  source 1..75: mol_type = other DNA
tgctcttcatcaacacaacctgcgtcagatatttatgaagacgaaggcattttaatgattaccccagcggcaact

SEQ ID NO: 785946 - DNA, 75 bp, synthetic construct
  source 1..75: mol_type = other DNA
gagctggcaaaggtctatgccttgcttgatgacgagatgaaggcggtaacggctattggtgcatacagcggtatg

SEQ ID NO: 785947 - DNA, 75 bp, synthetic construct
  source 1..75: mol_type = other DNA
tcgtattgccctgctcgtcggtcatgagcgcgggagtacagagagcttcaaaacttactcgaaaaatgcagcttc

SEQ ID NO: 785948 - DNA, 75 bp, synthetic construct
  source 1..75: mol_type = other DNA
aggccccggaacgttatcgttcacacggaccgtggaggccagtactgttcagcagattatcaggcgcaactgaag

SEQ ID NO: 785949 - DNA, 75 bp, synthetic construct
  source 1..75: mol_type = other DNA
cgctttgttaggcattcattcaaacggtgcaagccgacgcatcagagagtacaggaacggtgagaaacctattcc

SEQ ID NO: 785950 - DNA, 75 bp, synthetic construct
  source 1..75: mol_type = other DNA
ctggatgaacgttattttttgacagtagaacaaggctggatagtaccaccacacaaactggttaatgcgtggttt

SEQ ID NO: 785951 - DNA, 75 bp, synthetic construct
  source 1..75: mol_type = other DNA
ctggatgaacggtattttttgacggtagaacaaggctggattgcaccgccacattctctcgttaatgcgtggttt

SEQ ID NO: 785952 - DNA, 75 bp, synthetic construct
  source 1..75: mol_type = other DNA
tgccagaaggcacggaatatcgttgtgtgcataccgaatcagtgagcacgacaaatatttgtgtcgtgaacttta

SEQ ID NO: 785953 - DNA, 75 bp, synthetic construct
  source 1..75: mol_type = other DNA
tatggggggccggaatgacgacctcgttcttcgccaaccgcgcgcttgttcaggaaaccggtatccagacggcac

SEQ ID NO: 785954 - DNA, 75 bp, synthetic construct
  source 1..75: mol_type = other DNA
attatgaccctcatttttgtacgggcatcctggtatttctctcgattgtatcgcctacgaaaggaacaacatcac

SEQ ID NO: 785955 - DNA, 75 bp, synthetic construct
  source 1..75: mol_type = other DNA
aaaaactgaaagtcgccacaaccgccctccgggcacatgccagaaggcacggaatatcattgtgtgtataccgaa

SEQ ID NO: 785956 - DNA, 75 bp, synthetic construct
  source 1..75: mol_type = other DNA
atgataatccctcgcaaaagatggtcacgcgaagaccgggagtttatcgaagccaatgtcggaaaaatgaccgtc

SEQ ID NO: 785957 - DNA, 75 bp, synthetic construct
  source 1..75: mol_type = other DNA
taaagaagggctggctattcatgtgatagcccagaagatggaattaagcaatcgtgctgtatccagcattgtata

SEQ ID NO: 785958 - DNA, 75 bp, synthetic construct
  source 1..75: mol_type = other DNA
gctgacggaacagggcatgtcgcagctgctggccgataaccgccatgatttcctgctgcgtctggcccataccct

SEQ ID NO: 785959 - DNA, 75 bp, synthetic construct
  source 1..75: mol_type = other DNA
ccgcctgcgcgacgtggccgataccgcctttgccagcggcgatgcgggaatacatttcgaactgcgggcaaaacc

SEQ ID NO: 785960 - DNA, 75 bp, synthetic construct
  source 1..75: mol_type = other DNA
tacattttgaactgcgggcaaaaccggcccgagacgtgatgaagacacatctggtgattgacgggcaggaactgg

SEQ ID NO: 785961 - DNA, 75 bp, synthetic construct
  source 1..75: mol_type = other DNA
cgggccgctggataaaaccttcgcgccgctgctgcggttgctgggcgataagtccggaagcggtggtggcgatac

SEQ ID NO: 785962 - DNA, 75 bp, synthetic construct
  source 1..75: mol_type = other DNA
gagtctgcagacctacctcacccgcgttacccgtgtgcgtctcaaactgcaacaggtgaccaacgcccccgaccc

SEQ ID NO: 785963 - DNA, 75 bp, synthetic construct
  source 1..75: mol_type = other DNA
gcgcttgatacccgcctgccgctggcagaacaactggtggcgctgcataccctgcagggcgaactggagcgcctg

SEQ ID NO: 785964 - DNA, 75 bp, synthetic construct
  source 1..75: mol_type = other DNA
aaaggaactgatagagtacctggaaagatcgatagccacgctgtccaatacttctaatccctttattaaaaacag

SEQ ID NO: 785965 - DNA, 75 bp, synthetic construct
  source 1..75: mol_type = other DNA
agagcattactggacgaagctggatttgatgggggaactttgtggaagagaatgattcatattttctatacttca

SEQ ID NO: 785966 - DNA, 75 bp, synthetic construct
  source 1..75: mol_type = other DNA
ataaactcagagactaaacaatctgatattgctaataaagctattgacgagctttatcattttaatgaaaaaaac

SEQ ID NO: 785967 - DNA, 75 bp, synthetic construct
  source 1..75: mol_type = other DNA
tcctcacggctcacccaaccgaaattacccgtcgtacactgatccacaaaatggtggaagtgaacgcctgtttaa

SEQ ID NO: 785968 - DNA, 75 bp, synthetic construct
  source 1..75: mol_type = other DNA
cagtcctcggtattctggaagtgttgaggcgctttgatggtgttaacgtatggcagcgttatacaactgccggaa

SEQ ID NO: 785969 - DNA, 75 bp, synthetic construct
  source 1..75: mol_type = other DNA
gggttgaaagcgtttacggtgatgtcctgcgataacgtgcgtgaaaacggtcatgtggcgaaggtcgcggtactg

SEQ ID NO: 785970 - DNA, 75 bp, synthetic construct
  source 1..75: mol_type = other DNA
gcggcctttgccctgatgatgcaggaacaagcgccaacgctgtctatgccggagggtacggacctgaaggcctat

SEQ ID NO: 785971 - DNA, 75 bp, synthetic construct
  source 1..75: mol_type = other DNA
ctgatgcacactcaggataaacctgattatctggataagaataaatcagtctttattttcaaaaatggtttcaag

SEQ ID NO: 785972 - DNA, 75 bp, synthetic construct
  source 1..75: mol_type = other DNA
gaaagaggtgatcaattatctccttgccaatcgaactgcgctgattaacaaccggatagagaccatccataaacg

SEQ ID NO: 785973 - DNA, 75 bp, synthetic construct
  source 1..75: mol_type = other DNA
tgctgaataagaccggtggagggtatcagattgataatccgacaccgtatttcgtgacggtgattggccttggcg

SEQ ID NO: 785974 - DNA, 75 bp, synthetic construct
  source 1..75: mol_type = other DNA
ccggattgaaaacccgacgccatattacgtgacggtgattggccttggcggcagtgaaaaacaggcgaaggaagg

SEQ ID NO: 785975 - DNA, 75 bp, synthetic construct
  source 1..75: mol_type = other DNA
ccaggcgctgcaggctttactggctcaaccgtcattgctgaatttgaatcgctggaagcggcgcaagcctgggca

SEQ ID NO: 785976 - DNA, 75 bp, synthetic construct
  source 1..75: mol_type = other DNA
gccgcctttcccggctatgcgcaggcggcaaaccggctggtgcgcgacgtggccgttgaccatctgcaacagcaa

SEQ ID NO: 785977 - DNA, 75 bp, synthetic construct
  source 1..75: mol_type = other DNA
gcagatgatgaagctgcgcggtggcgttgatgtgctggtggcaacgccgggacgtttgctggacctggaacatca

SEQ ID NO: 785978 - DNA, 75 bp, synthetic construct
  source 1..75: mol_type = other DNA
tttacatctgcaatgagtgcgttgatttgtgcaatgaatttatcaggagagaagtgacagaccatgaagaaaaaa

SEQ ID NO: 785979 - DNA, 75 bp, synthetic construct
  source 1..75: mol_type = other DNA
accctgatgggggcattaggtatacttggcacctttaccggaattattattggattgcttaattttgataccgaa

SEQ ID NO: 785980 - DNA, 75 bp, synthetic construct
  source 1..75: mol_type = other DNA
ccgaaccgatccagaatggtcgccagcaacgcagtggcggcggtcgtgggcagggtggtggtcgcgctcaacagc

SEQ ID NO: 785981 - DNA, 75 bp, synthetic construct
  source 1..75: mol_type = other DNA
tgctgtcgcacatgattgggaaagggaactggcagcaggtgctggtgtttacccgtaccaaacatggcgctaacc

SEQ ID NO: 785982 - DNA, 75 bp, synthetic construct
  source 1..75: mol_type = other DNA
gaacgcggtgaaactggatcagatagagatcctcgtccttgatgaagctgaccgtatgctcgatatgggctttat

SEQ ID NO: 785983 - DNA, 75 bp, synthetic construct
  source 1..75: mol_type = other DNA
gtttggatggtccagagcggattggttatttcgaaatgttcttgcaaagaaatatcagtagatacctgaatattt

SEQ ID NO: 785984 - DNA, 75 bp, synthetic construct
  source 1..75: mol_type = other DNA
tgaacaatttgcagatctaatggcaaaaggtgctacagaacaaattattgatgctttgcgacaagtcattattga

SEQ ID NO: 785985 - DNA, 75 bp, synthetic construct
  source 1..75: mol_type = other DNA
tatttatcttttctgtattcatttttaattataacgaatctcaaattaccgataccgccgtcaatttatttatcc

SEQ ID NO: 785986 - DNA, 75 bp, synthetic construct
  source 1..75: mol_type = other DNA
cacgccgtgcggaaagtggtgcgaagtctggtaacgcgaagcccgcagaaaaaccgtctcgtcgtctcggcgatg

SEQ ID NO: 785987 - DNA, 75 bp, synthetic construct
  source 1..75: mol_type = other DNA
atggctcttctgtttccctttttttcagggctgatattatctatatttggtgttcaatacagtaatgctagcgaa

SEQ ID NO: 785988 - DNA, 75 bp, synthetic construct
  source 1..75: mol_type = other DNA
cagcagacggtctatggtccgctgatggaatatattgcggataaccgcattcatgctgtgtcgatcaaagcgtat

SEQ ID NO: 785989 - DNA, 75 bp, synthetic construct
  source 1..75: mol_type = other DNA
tggaatatattgcggataaccgcattcatgctgtgtcgatcaaagcgtatacccctgcggagtgggcgcgcgatc

SEQ ID NO: 785990 - DNA, 75 bp, synthetic construct
  source 1..75: mol_type = other DNA
tttggcagggatttgcgctctgttaattattattaatcaggatgttctgataaagagcggagtgtctgctcgtct

SEQ ID NO: 785991 - DNA, 75 bp, synthetic construct
  source 1..75: mol_type = other DNA
actcggttttcaggctccactctatttgtggcaggtctgtgacaacggtgattatcagaccggacgccccctgca

SEQ ID NO: 785992 - DNA, 75 bp, synthetic construct
  source 1..75: mol_type = other DNA
tgtatatgtttttttaaatatgagtgatcggcaaggttttataagtaaattgcatatatatatgcttataccgtc

SEQ ID NO: 785993 - DNA, 75 bp, synthetic construct
  source 1..75: mol_type = other DNA
aaacgaaaaacgcttgagattttgctctgtggtgctctgacgctgacttttgcatccgctcttgagtatgtcgga

SEQ ID NO: 785994 - DNA, 75 bp, synthetic construct
  source 1..75: mol_type = other DNA
tgcagagcttgagactaatctcgcggcgctggtggcggagaatgcgctggctcgtaaagcagttcaggcattttg

SEQ ID NO: 785995 - DNA, 75 bp, synthetic construct
  source 1..75: mol_type = other DNA
cggtgctggaaggccgcgacctgatggctagcgcccagaccggcactggcaaaacagcgggctttacgctgccgc

SEQ ID NO: 785996 - DNA, 75 bp, synthetic construct
  source 1..75: mol_type = other DNA
ttttgttcgacatcgaacgcgttttcttaaagttgttcgcacgatgcatgtttaaagctctccggaggaaatatg

SEQ ID NO: 785997 - DNA, 75 bp, synthetic construct
  source 1..75: mol_type = other DNA
aaacgaaaaagccgctatccaagtccagcatgaagtagttctgaaccggattagagaaatgcaaaacgataacag

SEQ ID NO: 785998 - DNA, 75 bp, synthetic construct
  source 1..75: mol_type = other DNA
gctacgggaagtatcagtacatcagaccggactcataaacaggacgaaacaattctgtcggatgcagaaaaaagg

SEQ ID NO: 785999 - DNA, 75 bp, synthetic construct
  source 1..75: mol_type = other DNA
cggtttcttccgtcttgatccgcgcctgatcaccatgatctcctcaccaaacggtgagcaacgtctgtttgtgcc

SEQ ID NO: 786000 - DNA, 75 bp, synthetic construct
  source 1..75: mol_type = other DNA
acgtaacctggtactgcgtctgttgcaacagcagcagattattgatcaagaactctacgacatgttgagcgcacg

SEQ ID NO: 786001 - DNA, 75 bp, synthetic construct
  source 1..75: mol_type = other DNA
ctgttcctctccagcgagcgttcttactggcgtaaagcgaacgaagcttacatggcgctgatcatggacgcgcgt

SEQ ID NO: 786002 - DNA, 75 bp, synthetic construct
  source 1..75: mol_type = other DNA
taactttgtttgcagcggtggtatgagaaccttgccagtatggaccagcgatccggattcgttgtgccagcaaag

SEQ ID NO: 786003 - DNA, 75 bp, synthetic construct
  source 1..75: mol_type = other DNA
ccagccgaaaatctatcgtctgaacacgtggattgccgacgcccccatcgcgctgcgccagccgaacggtcaggt

SEQ ID NO: 786004 - DNA, 75 bp, synthetic construct
  source 1..75: mol_type = other DNA
aatccgtttgatcagtcttctcagccgcagcagcagcaacctgctcaacaagagcagaaagacagcgacggcgtg

SEQ ID NO: 786005 - DNA, 75 bp, synthetic construct
  source 1..75: mol_type = other DNA
cagccgcgcggtggggtgatctctcctcagccagcctttatgcagctggtgcgtcaggagttgcaggcaaaactg

SEQ ID NO: 786006 - DNA, 75 bp, synthetic construct
  source 1..75: mol_type = other DNA
agattattgatcaagaactctatgacatgttgagtgcacgtccgctgggggttcagccgcgcggtggggtaatct

SEQ ID NO: 786007 - DNA, 75 bp, synthetic construct
  source 1..75: mol_type = other DNA
gtcggtatggtgaaaggggcgtccatctacaacccgtggcgtaacccgaaactggcgctggagcgacgtaatctg

SEQ ID NO: 786008 - DNA, 75 bp, synthetic construct
  source 1..75: mol_type = other DNA
ctgtatcagagcttcccgcaggcggaacgcgctgttccggcgcaggcggcgtatctgacactatggaccatgcag

SEQ ID NO: 786009 - DNA, 75 bp, synthetic construct
  source 1..75: mol_type = other DNA
caacctgctcagcaagagcagaaagacagcgacggtgtagccggttggatcaaggatatgtttggtagtaattaa

SEQ ID NO: 786010 - DNA, 75 bp, synthetic construct
  source 1..75: mol_type = other DNA
tctgacagcattaagccagccgaaaatttatcgcctgaatacgtggattgctgatgcaccgattgcactgcgtct

SEQ ID NO: 786011 - DNA, 75 bp, synthetic construct
  source 1..75: mol_type = other DNA
acgtggattgccgatgcgcccatcgcgctgcgtcagccgaacggtcaggtctggtcaccgcagaacgatgatcgt

SEQ ID NO: 786012 - DNA, 75 bp, synthetic construct
  source 1..75: mol_type = other DNA
gccggagaaaaaagcatcccctggtgctactggaacgagcgctgtatgcgcccgcttatcgccatggctgaatca

SEQ ID NO: 786013 - DNA, 75 bp, synthetic construct
  source 1..75: mol_type = other DNA
tgggaaaacagtttgagcgattcattgacccggtggattcagagcgcaacggtggaaccgtcaatgcagcaaccg

SEQ ID NO: 786014 - DNA, 75 bp, synthetic construct
  source 1..75: mol_type = other DNA
aaaagaataaacgaatacgacaatgtacttgaactatctaagaatgtatcagctcagaattctggcaatgagttt

SEQ ID NO: 786015 - DNA, 75 bp, synthetic construct
  source 1..75: mol_type = other DNA
atgggggtaatgataccgatgaaacgcgagaggatgctcacgatacgggtgactgatgatgagcatgcccgttta

SEQ ID NO: 786016 - DNA, 75 bp, synthetic construct
  source 1..75: mol_type = other DNA
cattaaatatgtcattggtcacctctgttcttcatcaacacagccagcgtctgacatttatgaagacgaaggcat

SEQ ID NO: 786017 - DNA, 75 bp, synthetic construct
  source 1..75: mol_type = other DNA
atcttccctcgcggcggaggttgcacgctgacttttcctgttaaggctggtgatgaatgccttgttatctttgca

SEQ ID NO: 786018 - DNA, 75 bp, synthetic construct
  source 1..75: mol_type = other DNA
ctacctacggtggaaatatttgcaacggtgccaccagcgcagactccgccacaccaacgctgatttatgacgcga

SEQ ID NO: 786019 - DNA, 75 bp, synthetic construct
  source 1..75: mol_type = other DNA
aagaagccctgccggaaaagctcagccgcttccttgattatcttaaccgttcatctgatgatggcgtaacgcaac

SEQ ID NO: 786020 - DNA, 75 bp, synthetic construct
  source 1..75: mol_type = other DNA
tattgagttgttcaactgggggggggttcatggattacatcaggcagcaatccatcaggaaggtaccgccgttat

SEQ ID NO: 786021 - DNA, 75 bp, synthetic construct
  source 1..75: mol_type = other DNA
tggggccgcttagctgggatgagaaaggcgatctgaaaggctttgagttcggtgtgtttgactggcacgccaacg

SEQ ID NO: 786022 - DNA, 75 bp, synthetic construct
  source 1..75: mol_type = other DNA
tcgcaaagtggtgcgtaaagacaccaaggggttgattgctcgctggaagtatttctggatgtcggttattgcgct

SEQ ID NO: 786023 - DNA, 75 bp, synthetic construct
  source 1..75: mol_type = other DNA
aacgcgctctcaaatctttgcgcaaaatggataaacagaacgcgcggcgaattgttgattttattgaattgcgaa

SEQ ID NO: 786024 - DNA, 75 bp, synthetic construct
  source 1..75: mol_type = other DNA
gttatcttgacagctggctgcgggtactgaaagcggacaaaaaagcgttgttccgggcagccgggcaggcccgtc

SEQ ID NO: 786025 - DNA, 75 bp, synthetic construct
  source 1..75: mol_type = other DNA
aaaagagctggcggtattaatgcgtccgcaggtgctgtctgcattgctgacgacggtactgggcgctggtgctga

SEQ ID NO: 786026 - DNA, 75 bp, synthetic construct
  source 1..75: mol_type = other DNA
taattacggtcagggtattactgccagtgaattacggtgggtttatcgcaataagaataatgatcagataatgaa

SEQ ID NO: 786027 - DNA, 75 bp, synthetic construct
  source 1..75: mol_type = other DNA
gaccgcatcgttccggcggcgacgccagaaaccttacaggaaattgctgaccagctgggtgtttacgacccgtgc

SEQ ID NO: 786028 - DNA, 75 bp, synthetic construct
  source 1..75: mol_type = other DNA
atgcaaaacgtgacaatgatggaagaaacactgcgtaaaatgagaaaacatggtagccagactatcgaagtaaca

SEQ ID NO: 786029 - DNA, 75 bp, synthetic construct
  source 1..75: mol_type = other DNA
gtacgaccattgaccttaactctctcggtggcgcagaacatttaggtctatggagaaacagcagttcagcaatag

SEQ ID NO: 786030 - DNA, 75 bp, synthetic construct
  source 1..75: mol_type = other DNA
ctggcaagaagtggtcgacttacagctcggttgggatatcaccgattttggtcgtggtgatttcaaccaaacggg

SEQ ID NO: 786031 - DNA, 75 bp, synthetic construct
  source 1..75: mol_type = other DNA
ggcgcgaaacagacattcagtgctggcctttctggcgaactgtccggcaatgcggcgacagcaacaaagctgaaa

SEQ ID NO: 786032 - DNA, 75 bp, synthetic construct
  source 1..75: mol_type = other DNA
ccatcacggtaaatgctacgggtaataccgaaaacaccgtcaaaaacatcgcatttaactatattgtgaggcttg

SEQ ID NO: 786033 - DNA, 75 bp, synthetic construct
  source 1..75: mol_type = other DNA
agaaaaatttcccggaagataatgctgtcggtgtgcttgaggtttttgctgccggcaattttgcaggtacgcaac

SEQ ID NO: 786034 - DNA, 75 bp, synthetic construct
  source 1..75: mol_type = other DNA
atggacgcacacagcgttatacaacccgtaacgggactatgtatattcgcggcctgacagccaaatgggatgcag

SEQ ID NO: 786035 - DNA, 75 bp, synthetic construct
  source 1..75: mol_type = other DNA
atgaagattctgtatctgacacccgctgcactggctttattgctgagtggttgtgcaggaatgaagagtgaattt

SEQ ID NO: 786036 - DNA, 75 bp, synthetic construct
  source 1..75: mol_type = other DNA
agctttttcatcattttgcagatggatcattatggaagatgctgaattaggtccaattcttgaaccatttatgga

SEQ ID NO: 786037 - DNA, 75 bp, synthetic construct
  source 1..75: mol_type = other DNA
ccaatataaacggtggatttccccttaagctgttacgtagcgttcgcaacgcacgtccaaattacggtgaagtgt

SEQ ID NO: 786038 - DNA, 75 bp, synthetic construct
  source 1..75: mol_type = other DNA
taaaggtactgttacacagtggattctttttccagatcacaacatggatgattatttaagaaaatatcgagacgt

SEQ ID NO: 786039 - DNA, 75 bp, synthetic construct
  source 1..75: mol_type = other DNA
ccggtggttttgcgctggtggcgtgggcgaccggcaacatgaactttgccagctatttacacataccgtatctac

SEQ ID NO: 786040 - DNA, 75 bp, synthetic construct
  source 1..75: mol_type = other DNA
gccggcaaagacacgcccgcaacgcagctggtggttccgttctttaaagatgtgatgccgcaactggggctgttc

SEQ ID NO: 786041 - DNA, 75 bp, synthetic construct
  source 1..75: mol_type = other DNA
gcgcatgattgctcatttgcaaaaactttcctttggtcaggtggtgcgtaacgacggtcctgaatcacacttcag

SEQ ID NO: 786042 - DNA, 75 bp, synthetic construct
  source 1..75: mol_type = other DNA
gaatacgttaacaaacgcagtatgggaccccagaacacctcgcaaatataaagcaagatccacttatcaaaagag

SEQ ID NO: 786043 - DNA, 75 bp, synthetic construct
  source 1..75: mol_type = other DNA
gagtaccggattcagtggcgtcaccggtatcatcccgggcatcaggaaacacagcgacggggagtcgcattgttc

SEQ ID NO: 786044 - DNA, 75 bp, synthetic construct
  source 1..75: mol_type = other DNA
ttgtgcgggaatgaagagtgaatttgactgcaatgccacagccagtaacagctgtatgacaatggatgaggcgaa

SEQ ID NO: 786045 - DNA, 75 bp, synthetic construct
  source 1..75: mol_type = other DNA
ttcgcgagtgttgtgatggcgcttcaggaaaatacgcctaaaccacaaaacgcatcagcttatcgacgtaaaaga

SEQ ID NO: 786046 - DNA, 75 bp, synthetic construct
  source 1..75: mol_type = other DNA
gtgattgatgacgatggctaccgcccaaacgtaggtatcgtgatttgtaatcgccaggggcaggtaatgtgggcc

SEQ ID NO: 786047 - DNA, 75 bp, synthetic construct
  source 1..75: mol_type = other DNA
aactcattgctaataagtcagatggttatggtcagagtattactgccagcgaattacgatggatttatcgcaaca

SEQ ID NO: 786048 - DNA, 75 bp, synthetic construct
  source 1..75: mol_type = other DNA
caccatcatctgcacatcgttggctaaggtgtgcgggtagtctggcgctggaggccacacaaccggataaagaaa

SEQ ID NO: 786049 - DNA, 75 bp, synthetic construct
  source 1..75: mol_type = other DNA
gaggccacacaaccggataaagaaacaacttttgcaatcgagggcactgcagcgcacgcgcttgctgaaaaagtt

SEQ ID NO: 786050 - DNA, 75 bp, synthetic construct
  source 1..75: mol_type = other DNA
aaaagttcggaattcagtatcagtctaatccactccgcgccgccatgattgtctttctcatgatgcaggacgcca

SEQ ID NO: 786051 - DNA, 75 bp, synthetic construct
  source 1..75: mol_type = other DNA
cggccaaagaccagtggttcagttccttcctgctgcaggtggaaaaccattcctcctggcaccgtctgtttgtgg

SEQ ID NO: 786052 - DNA, 75 bp, synthetic construct
  source 1..75: mol_type = other DNA
tgctgaacccggaaatgtccatttcctgcccgttcatcctgacgctgacactggtggtggaagatcaggtgaaaa

SEQ ID NO: 786053 - DNA, 75 bp, synthetic construct
  source 1..75: mol_type = other DNA
ggattacctgacgctggggctgcgtgagaacggcaggaacagcacagcccgtatcctgaatttccatctggcccg

SEQ ID NO: 786054 - DNA, 75 bp, synthetic construct
  source 1..75: mol_type = other DNA
tatcactgatggacggattaattttatcgaaccatcgacagggctggagaagaaggtaaaggctccatgctgctg

SEQ ID NO: 786055 - DNA, 75 bp, synthetic construct
  source 1..75: mol_type = other DNA
gaaatggacatggcgatccgcaaggcgcgcgatgcaggacggcatatcagctacttcggccccgaagctaacgac

SEQ ID NO: 786056 - DNA, 75 bp, synthetic construct
  source 1..75: mol_type = other DNA
ttgaatacggtcagagcggcaaagggaaatctcgcaaatatctgcatacctacgacgaagccgtaccctggaatc

SEQ ID NO: 786057 - DNA, 75 bp, synthetic construct
  source 1..75: mol_type = other DNA
gcgtaatcatcgcgggcaacgaactgcagatccacgacctgaaatacggtaagggtgtgcgcgttgatgctgagc

SEQ ID NO: 786058 - DNA, 75 bp, synthetic construct
  source 1..75: mol_type = other DNA
gacggcagacctgcagtgctcgaagagggtgattttcccgctgttgccgtctacctgacagatgcggaatacaca

SEQ ID NO: 786059 - DNA, 75 bp, synthetic construct
  source 1..75: mol_type = other DNA
tcagtcggatggttcagcaaggctctggatagcgttgacgaagttcgcatcatcactgatgggcggattaatttt

SEQ ID NO: 786060 - DNA, 75 bp, synthetic construct
  source 1..75: mol_type = other DNA
aactcataagctagggaaccggaaatattattctgttactccttattattccggttatggcctcgttaccgaaga

SEQ ID NO: 786061 - DNA, 75 bp, synthetic construct
  source 1..75: mol_type = other DNA
tgctgtttgcctggtggaaaccggtaaatgtcgacccgatgctctactccggttttctctacttgtgcattctcc

SEQ ID NO: 786062 - DNA, 75 bp, synthetic construct
  source 1..75: mol_type = other DNA
gcccgccggctgggtttcaataaagcggatgaaattactatcgtcttttgtggttcgaaaaagagcctggcgaat

SEQ ID NO: 786063 - DNA, 75 bp, synthetic construct
  source 1..75: mol_type = other DNA
tcaacagcaacgagccgtcactgactgatgatgcccgctttatcgtcctggagctgggcggcctgcaggacaagc

SEQ ID NO: 786064 - DNA, 75 bp, synthetic construct
  source 1..75: mol_type = other DNA
tcctcaacggggaaggaataaccccgccatacttaccgccgcgccatttcgcggagtgccacaaccggaagcgca

SEQ ID NO: 786065 - DNA, 75 bp, synthetic construct
  source 1..75: mol_type = other DNA
gcggggaagaaataaccccgccatacttaccgccgcgccatttcgcggattgccacaaccggaagcgcacggtcg

SEQ ID NO: 786066 - DNA, 75 bp, synthetic construct
  source 1..75: mol_type = other DNA
gtcgcggctgcagtttgctctgcgtcagcatccagtctgctggggattttcctttcgccgttgctggttggtgtg

SEQ ID NO: 786067 - DNA, 75 bp, synthetic construct
  source 1..75: mol_type = other DNA
attaacggggaaaggccaacagtggttgacgcgtaaactgctcgatgctggcttgttaaaaccggtggcggctga

SEQ ID NO: 786068 - DNA, 75 bp, synthetic construct
  source 1..75: mol_type = other DNA
caaagcctttgacagcaaccacaccagcaacggccatggatgctatccccaacaccggagacacaatcgacagcc

SEQ ID NO: 786069 - DNA, 75 bp, synthetic construct
  source 1..75: mol_type = other DNA
tgcaatataattgcatgtaagatcatcgatattctcgctggtactgacctatataattctctttataaaaaatat

SEQ ID NO: 786070 - DNA, 75 bp, synthetic construct
  source 1..75: mol_type = other DNA
tcctgggggatttacggcgaatatttcaacagcaacgagccgtcactgactgatgatgcccgctttatcgtcctg

SEQ ID NO: 786071 - DNA, 75 bp, synthetic construct
  source 1..75: mol_type = other DNA
caatgagtccggggaacgtatccgtgaccagctggctgtgctggcaagccctaacggtacgctggatgaagtcca

SEQ ID NO: 786072 - DNA, 75 bp, synthetic construct
  source 1..75: mol_type = other DNA
gccggatggtgcatctgagatgacgcgcaatctggccagcctggattttccgcagctgaccagcgtcctgccgta

SEQ ID NO: 786073 - DNA, 75 bp, synthetic construct
  source 1..75: mol_type = other DNA
gaccaccaccaccagcctcgagtttcgtaaaatattcgcgcagttaaatctgcatgcagccgaggtggaaggcga

SEQ ID NO: 786074 - DNA, 75 bp, synthetic construct
  source 1..75: mol_type = other DNA
atgaaaagagttattaccctgtttgctgtactgctgatgggctggtcggtaaatgcctggtcattcgcctgtaaa

SEQ ID NO: 786075 - DNA, 75 bp, synthetic construct
  source 1..75: mol_type = other DNA
agtcctcgacggatgtttactactgtatccaaagcggcattgatggcaatcgggcatggcgtcaggagggcggca

SEQ ID NO: 786076 - DNA, 75 bp, synthetic construct
  source 1..75: mol_type = other DNA
agaagggaaacagcaaaggctccatgctgctgatttggcgaccgttcatcagtcctcgacggatgtttactactg

SEQ ID NO: 786077 - DNA, 75 bp, synthetic construct
  source 1..75: mol_type = other DNA
gcagggaatttcatgatgtgcgaaaaatcatcagccagcaggtttcttattacgacaccttaagatcgcttgatc

SEQ ID NO: 786078 - DNA, 75 bp, synthetic construct
  source 1..75: mol_type = other DNA
gtaaaactgttgctgccgaatcgccagcgatgcagtgtcgaactggcaagagcagagcaacgacgcggagcgacg

SEQ ID NO: 786079 - DNA, 75 bp, synthetic construct
  source 1..75: mol_type = other DNA
gaatatttacgccaataatgatgtggtggtgcctactggcggctgtgatgtttctgctcgtgatgtcaccgtgac

SEQ ID NO: 786080 - DNA, 75 bp, synthetic construct
  source 1..75: mol_type = other DNA
ttatttttagtaatttcttagatagtaggaaaattaatatagttgagagaattgagcttaaaaagtatctcagcg

SEQ ID NO: 786081 - DNA, 75 bp, synthetic construct
  source 1..75: mol_type = other DNA
gttggagaacctttatctgtttcagcatatgaaaagataatttcgactattaaaaaatcaagcccggaattaaag

SEQ ID NO: 786082 - DNA, 75 bp, synthetic construct
  source 1..75: mol_type = other DNA
tgaaggcaagacgctgaaaagtgcggtatcagtgaactcttttcgccataactggaaagtcgagggcttaggcag

SEQ ID NO: 786083 - DNA, 75 bp, synthetic construct
  source 1..75: mol_type = other DNA
gggataagcacgacgacatggtggcggatgatatggagaaccgccggtcatatgatgcaccggtggcgctggata

SEQ ID NO: 786084 - DNA, 75 bp, synthetic construct
  source 1..75: mol_type = other DNA
tataaatatatatcgcaacaagagaaggatgtcgtcctaaaggtctataaatcagtaagtaaaataattagtgga

SEQ ID NO: 786085 - DNA, 75 bp, synthetic construct
  source 1..75: mol_type = other DNA
ttagaatatagtagaaggaaagatttaaggaattatctaatgggttggtcaaaggagtcaatcatgtgtaataga

SEQ ID NO: 786086 - DNA, 75 bp, synthetic construct
  source 1..75: mol_type = other DNA
agtcctcgacggatgtttactaccgtatccaaagcgacattgatgacgatcgggcggggcgtcaggagagcggca

SEQ ID NO: 786087 - DNA, 75 bp, synthetic construct
  source 1..75: mol_type = other DNA
taaaacgctacttcctcgaaatgcgcttcaagccgatgccgcaatattacggcggtgcgctggtacgtgagggcg

SEQ ID NO: 786088 - DNA, 75 bp, synthetic construct
  source 1..75: mol_type = other DNA
ggaaactggcgttggttatccaggggaaagcccgcgatgcgctgctcgatacctatcaacaagaacgtcgcgatc

SEQ ID NO: 786089 - DNA, 75 bp, synthetic construct
  source 1..75: mol_type = other DNA
ttccgtctggtggatgctgaaggtttgatcaaccgtatgggctttaataacctcggcgttgataacctcgttgag

SEQ ID NO: 786090 - DNA, 75 bp, synthetic construct
  source 1..75: mol_type = other DNA
agaagggaaacagtaaaggctccatgctgctgatttggcgaccgttcatcagtcctcgacggatgtttactaccg

SEQ ID NO: 786091 - DNA, 75 bp, synthetic construct
  source 1..75: mol_type = other DNA
ggcgtgattgccagcgcccgcgagcgtattgcggcattctcccctgaactggtggtgctgtttgcgccagatcac

SEQ ID NO: 786092 - DNA, 75 bp, synthetic construct
  source 1..75: mol_type = other DNA
gtctggcagggtcagggatacaacagcggcatgcgcgatgctttcaacctagcatggaaactggcgctggtgatt

SEQ ID NO: 786093 - DNA, 75 bp, synthetic construct
  source 1..75: mol_type = other DNA
aacgtaaaaaaagcccattatgatggcgtcctgggtattaacatcggcaaaaataaagatacgccggtggagcag

SEQ ID NO: 786094 - DNA, 75 bp, synthetic construct
  source 1..75: mol_type = other DNA
ccctttttcagctcgatccagagcgcgctcatgagtttacttttcagcagttgcgtcgtattaccggaacgccgc

SEQ ID NO: 786095 - DNA, 75 bp, synthetic construct
  source 1..75: mol_type = other DNA
ctggtgagttatttattacgccatagccagttagaaagcgtgaacggctttatcgcttatcgccagaagcaaatg

SEQ ID NO: 786096 - DNA, 75 bp, synthetic construct
  source 1..75: mol_type = other DNA
ctgcgggtgcaacgctggtgcaaatttattcgggatttattttcaaaggaccgcctttgattaaagaaatcgtta

SEQ ID NO: 786097 - DNA, 75 bp, synthetic construct
  source 1..75: mol_type = other DNA
aggaattaaacggtcgcttaccgatcatcggtgttggaggcatcgattcggttatcgctgcgcgtgaaaagattg

SEQ ID NO: 786098 - DNA, 75 bp, synthetic construct
  source 1..75: mol_type = other DNA
cttattaatcgcgatcaaaaataaacaaaacgatctgcaaaaaatccatcaaaaatatgtgccgatcgcagtgaa

SEQ ID NO: 786099 - DNA, 75 bp, synthetic construct
  source 1..75: mol_type = other DNA
atcaacggtggggtggatgagaagctgaagattcaggttggtccgaaaacggctccgctgatggacgatgtgctg

SEQ ID NO: 786100 - DNA, 75 bp, synthetic construct
  source 1..75: mol_type = other DNA
tcattccatgcttatggccgtgaaatggacagtgagtttgaatacctgtttaccgatttgcgtaagacccataat

SEQ ID NO: 786101 - DNA, 75 bp, synthetic construct
  source 1..75: mol_type = other DNA
cacttcatggactggctggcggtacagtacatcagcgcgctgaatatcattcactacatgcacgacaagtacagc

SEQ ID NO: 786102 - DNA, 75 bp, synthetic construct
  source 1..75: mol_type = other DNA
ccatcggcgtggtgccgactttcggcgtgacctacactggtaactatgagttcccacaaccgctgcacgatgcgc

SEQ ID NO: 786103 - DNA, 75 bp, synthetic construct
  source 1..75: mol_type = other DNA
ctgcgttgcgtaaacatggttgccgatctgtggcatgcgcctgcgccgaaaaatggtcaggccgttggcaccaac

SEQ ID NO: 786104 - DNA, 75 bp, synthetic construct
  source 1..75: mol_type = other DNA
ccggcgggtcaggtaattgcacagtactatgaattcctgcgcctcggtcgtgaaggctataccaaagtacagaac

SEQ ID NO: 786105 - DNA, 75 bp, synthetic construct
  source 1..75: mol_type = other DNA
tcgatcatttcatggactggctggcagtgcagtacatcagcgcgctgaatatcatccactacatgcacgacaagt

SEQ ID NO: 786106 - DNA, 75 bp, synthetic construct
  source 1..75: mol_type = other DNA
atatccgcagtacggcaacaacgacgagcgcgtagacagcattgcctgcgacctggttgaacgctttatgaagaa

SEQ ID NO: 786107 - DNA, 75 bp, synthetic construct
  source 1..75: mol_type = other DNA
ccaccattaccgctcatgatgcgggatatattgatcagccgctggaaaaaatagtgggtctgcaaacggatgcgc

SEQ ID NO: 786108 - DNA, 75 bp, synthetic construct
  source 1..75: mol_type = other DNA
atatccacagtatggcaacaacgacgagcgcgtagacagcatcgcttgtgacctggttgaacgctttatgaagaa

SEQ ID NO: 786109 - DNA, 75 bp, synthetic construct
  source 1..75: mol_type = other DNA
tggcatcagttatctggtgcgtgaacgcgaactgcaatttgccgatctccagtctcgtctggaaaaaggcgagga

SEQ ID NO: 786110 - DNA, 75 bp, synthetic construct
  source 1..75: mol_type = other DNA
ccgatccgtgacgaaaacggcctggcggtggatttcgaaatcgacggcgaatatccgcagtatggcaacaacgac

SEQ ID NO: 786111 - DNA, 75 bp, synthetic construct
  source 1..75: mol_type = other DNA
gccggggaatggcctgccgcactttcaggcgggcagaaacagcgagtggcgctggcaagagcgttgattcatcga

SEQ ID NO: 786112 - DNA, 75 bp, synthetic construct
  source 1..75: mol_type = other DNA
tttgcgccatcaacctgatgagcgtgaaagtgttcggcgagctggagttctggttctcattctttaaagttgcca

SEQ ID NO: 786113 - DNA, 75 bp, synthetic construct
  source 1..75: mol_type = other DNA
cgtatctcgctgtacgttggtttcgcgtggattgttctgctgttgattggttggatgtttaaacgccgccacgat

SEQ ID NO: 786114 - DNA, 75 bp, synthetic construct
  source 1..75: mol_type = other DNA
gttgattggttatcacccggatacgcgtatctcgctgtatgttggtttcgcgtggattgttgtgctgttgattgg

SEQ ID NO: 786115 - DNA, 75 bp, synthetic construct
  source 1..75: mol_type = other DNA
acctggccactttctgccagacctgggacgacgagaaagtccataaattgatggatttttcaataaagaaaaact

SEQ ID NO: 786116 - DNA, 75 bp, synthetic construct
  source 1..75: mol_type = other DNA
taaggtcggaactactcgattcacgttttggtgctaagtctatttccactatcgcagaatcaaaacgttttccgc

SEQ ID NO: 786117 - DNA, 75 bp, synthetic construct
  source 1..75: mol_type = other DNA
tgatgatctggccgatgcaagcgtgatcaccgtctcccgacgcaatcaaactacggggtcataccatgacgcata

SEQ ID NO: 786118 - DNA, 75 bp, synthetic construct
  source 1..75: mol_type = other DNA
gctgaaattcaggaagacacgcgaatgatgtttcaggatgcgcgtctgctgccgtggaaatcggtgattgataac

SEQ ID NO: 786119 - DNA, 75 bp, synthetic construct
  source 1..75: mol_type = other DNA
ggctgcggtaggactggagaatcgcgcgggggaatggcctgccgcactttctggcgggcagaaacagcgtgtggc

SEQ ID NO: 786120 - DNA, 75 bp, synthetic construct
  source 1..75: mol_type = other DNA
gccgtggaagtcggtaattgataacgttgggttaggtctgaaaggccagtggcgcaatgccgcgcgtcaggcgct

SEQ ID NO: 786121 - DNA, 75 bp, synthetic construct
  source 1..75: mol_type = other DNA
tttgcgccgtaaacctgatgagcgtgaaggtattcggtgagctggaattctggttctcgttctttaaagtcgcca

SEQ ID NO: 786122 - DNA, 75 bp, synthetic construct
  source 1..75: mol_type = other DNA
gctggcaagagcgttgattcatcgtccgggtttattgttgctcgatgaaccgctgggcgcactggacgccttaac

SEQ ID NO: 786123 - DNA, 75 bp, synthetic construct
  source 1..75: mol_type = other DNA
gggtcggtaagattagcggagatggaagcggaagtattgcagcgagtgatgcagcgtgggcattctgaacaacca

SEQ ID NO: 786124 - DNA, 75 bp, synthetic construct
  source 1..75: mol_type = other DNA
aacgaaattaatgtccgcgattttattcaacacaactatacaccttatgaaggggatgaatctttccttgccgaa

SEQ ID NO: 786125 - DNA, 75 bp, synthetic construct
  source 1..75: mol_type = other DNA
ttgctgaactgttactggaagactacaaagcctccctgaaatacctcagcgatcacccgaaactgcagggtatag

SEQ ID NO: 786126 - DNA, 75 bp, synthetic construct
  source 1..75: mol_type = other DNA
caaagcctccctgaaatatctcagcgatcacccgaaactgcagggtattgcccaacagaacagctttaaacatac

SEQ ID NO: 786127 - DNA, 75 bp, synthetic construct
  source 1..75: mol_type = other DNA
tgcgcctgtttgctccgtggagcggcatacccagattgttgcatgccttatttgcggggcgaaaggggatgcctg

SEQ ID NO: 786128 - DNA, 75 bp, synthetic construct
  source 1..75: mol_type = other DNA
ggtcaggtgattgcacagtactatgaattcctgcgcctcggtcgtgaaggctataccaaagtacagaacgcttcc

SEQ ID NO: 786129 - DNA, 75 bp, synthetic construct
  source 1..75: mol_type = other DNA
ctgccgcaggaactggtgttcaacgttgactacctcggcggtcagattggtactttcgccatcaacttctcccgc

SEQ ID NO: 786130 - DNA, 75 bp, synthetic construct
  source 1..75: mol_type = other DNA
caaagcctccctgaaatacctcagcgatcacccgaaactgcagggtatagcccagcagaacagctttaaacatac

SEQ ID NO: 786131 - DNA, 75 bp, synthetic construct
  source 1..75: mol_type = other DNA
atgaaaagagttatcaccttgcttgccgcagtactgatggggtggtctgtaaatgcctggtcattcgcctgtaaa

SEQ ID NO: 786132 - DNA, 75 bp, synthetic construct
  source 1..75: mol_type = other DNA
atggatcgcctaattagagaaatgtcgtatctctttaccaagcagcgttttatggagcttcaggaaacggcaaaa

SEQ ID NO: 786133 - DNA, 75 bp, synthetic construct
  source 1..75: mol_type = other DNA
gtgcgctttcgcgttatggtctgacttttcagggaaatatcctttcagtaaactgtcagtgccggatgctcaccc

SEQ ID NO: 786134 - DNA, 75 bp, synthetic construct
  source 1..75: mol_type = other DNA
ctgtcgcatcgatttacaccggtatgcaaactgatcaattccgtcaggttcgcgatgttcttgctggaattttat

SEQ ID NO: 786135 - DNA, 75 bp, synthetic construct
  source 1..75: mol_type = other DNA
aattatgctcgtaccggaggacaggtaactgcagggaatgtgcagtcgattattggtgtgacttttgtttatcaa

SEQ ID NO: 786136 - DNA, 75 bp, synthetic construct
  source 1..75: mol_type = other DNA
tacgcacgtactggagggcaggtgactgcaggtaatgtgcagtcgattattggtgtgacttttgtttatcaataa

SEQ ID NO: 786137 - DNA, 75 bp, synthetic construct
  source 1..75: mol_type = other DNA
atgcttcagtcaggaaactttcgggaaaacaaggattcgtcaaccaataattttcgggaaatttcggaaacgtca

SEQ ID NO: 786138 - DNA, 75 bp, synthetic construct
  source 1..75: mol_type = other DNA
cgtcaaccaataattttcgggaaatcgcggaaacgtcaaccaactctccggtaattcctgatgaggtgttgtccg

SEQ ID NO: 786139 - DNA, 75 bp, synthetic construct
  source 1..75: mol_type = other DNA
taacaccactttatgcatcatcgccagcgctggtagtgcctgataagttgccgcgtgaatacataagaggttggc

SEQ ID NO: 786140 - DNA, 75 bp, synthetic construct
  source 1..75: mol_type = other DNA
aaacaccatcggcgtggtgccgactttcggcgtgacctacaccggtaactatgagttcccacaaccgctgcacga

SEQ ID NO: 786141 - DNA, 75 bp, synthetic construct
  source 1..75: mol_type = other DNA
gatctcgtacaccttctcaattgtcccggcggcgctgggcaaagaagatccagtacgtaaaaccaaccttgtcgg

SEQ ID NO: 786142 - DNA, 75 bp, synthetic construct
  source 1..75: mol_type = other DNA
gttcgcgccgatttcgatgattttgacggtgacaggcgaggtatcagtgattgtcttgatgaggctgagcaagag

SEQ ID NO: 786143 - DNA, 75 bp, synthetic construct
  source 1..75: mol_type = other DNA
gacctctctgaacgtctgcgtctgcgcggctggcaggttccggccttcactctcggcggtgaagccaccgacatc

SEQ ID NO: 786144 - DNA, 75 bp, synthetic construct
  source 1..75: mol_type = other DNA
tcaccacagataacgaactgacgcgcgataagttgcaacagtatgcccgcgagcacggcgtgccggagcttgctg

SEQ ID NO: 786145 - DNA, 75 bp, synthetic construct
  source 1..75: mol_type = other DNA
cggcgccgggaaaaagtgtgttgaagatgtcaactttaccccagatacctatcgcaaattgctcactaaaacatt

SEQ ID NO: 786146 - DNA, 75 bp, synthetic construct
  source 1..75: mol_type = other DNA
aggttaaacagcagccggaagaagaggcgctgatcctctttacctccggttctgaaggccatccgaaaggcgtcg

SEQ ID NO: 786147 - DNA, 75 bp, synthetic construct
  source 1..75: mol_type = other DNA
cagtgcggcagtgatttttggggccatcgcccgtcgccgcattcccgcaatgatgaactacaccgctggggtaaa

SEQ ID NO: 786148 - DNA, 75 bp, synthetic construct
  source 1..75: mol_type = other DNA
aacgcaggtggagatgccggatgcgccgcgtgcccgtgaccgtcgcaaaatcgctggcgaaatgctgcatcaaat

SEQ ID NO: 786149 - DNA, 75 bp, synthetic construct
  source 1..75: mol_type = other DNA
tccatagccataaaagtattctggcgaacgttgagcagattaaaaccatcgccgatttcaccactcatgaccgct

SEQ ID NO: 786150 - DNA, 75 bp, synthetic construct
  source 1..75: mol_type = other DNA
ggctgcattatgggctgctgtgcatggtctccctgaccattgtggcgacgctgaaagcggtaggtatcattctct

SEQ ID NO: 786151 - DNA, 75 bp, synthetic construct
  source 1..75: mol_type = other DNA
tgaagtcgaaaattgtgagcttttagaattaacgatgaatgacatttgtcttctgaaagctcatttgatgcacat

SEQ ID NO: 786152 - DNA, 75 bp, synthetic construct
  source 1..75: mol_type = other DNA
ctcgcctatcaacgctacttcgatcgcaacgtggccctggtcaccgggcgcctgaaagatcttcctgcgtcacag

SEQ ID NO: 786153 - DNA, 75 bp, synthetic construct
  source 1..75: mol_type = other DNA
gataaagaaacggaaagtgttcccgacagatgaatcggtgaaaaaagtggtgaggctggctatccagtcagcctc

SEQ ID NO: 786154 - DNA, 75 bp, synthetic construct
  source 1..75: mol_type = other DNA
gatgggtgacgcgatgagtcatgcggtttttcctggcatcgtgcttgcctggattctgaggttacctctggctac

SEQ ID NO: 786155 - DNA, 75 bp, synthetic construct
  source 1..75: mol_type = other DNA
agaggcgctgcaaatatcccgttttctggcggcaattaacggtctgatgggggacaagcatgatgagatggtggc

SEQ ID NO: 786156 - DNA, 75 bp, synthetic construct
  source 1..75: mol_type = other DNA
gcctaagcccatcaaactgggtgagaaaagcactgcattcgatgcggtagaggttaatcgctggctggaagaacg

SEQ ID NO: 786157 - DNA, 75 bp, synthetic construct
  source 1..75: mol_type = other DNA
tggctgatctgctggccctgattcaacttctgcaggcgcaactggggattatctctcgtccccggaaaccagcga

SEQ ID NO: 786158 - DNA, 75 bp, synthetic construct
  source 1..75: mol_type = other DNA
tgtggatgcaaaccatgatgttttcgattatgtgatgctcagaaaggagtttacagaggataagcaaggtaaccc

SEQ ID NO: 786159 - DNA, 75 bp, synthetic construct
  source 1..75: mol_type = other DNA
tctcttaccggatctccattacatttatgctttcgataacgtcgctttcccgtatggcgaaaaaagcgaagcgtt

SEQ ID NO: 786160 - DNA, 75 bp, synthetic construct
  source 1..75: mol_type = other DNA
cactgggtatggacgggccgtactatacggaagccacagtaggtttgtttgccggactggatcttgatttgtggg

SEQ ID NO: 786161 - DNA, 75 bp, synthetic construct
  source 1..75: mol_type = other DNA
atgatatggaaacgtaaaatcacccttgaggcgctgaatgtcatgggtgaaggaaacatggtggggttactggat

SEQ ID NO: 786162 - DNA, 75 bp, synthetic construct
  source 1..75: mol_type = other DNA
tcatcatgacgtttaccgttatcagcttcaacgcacgcacaaagggaaacgctcatagacaggatctgttatccc

SEQ ID NO: 786163 - DNA, 75 bp, synthetic construct
  source 1..75: mol_type = other DNA
acaacatacctctatattatgatgacgatcatctaagtgaacacggaaataaaatattaataccgatgttcgaaa

SEQ ID NO: 786164 - DNA, 75 bp, synthetic construct
  source 1..75: mol_type = other DNA
tgaatataattatcgtcatcaagttgttctagaagcacaagatgcagcatcaaaaaaatgcggtgtaaatatatt

SEQ ID NO: 786165 - DNA, 75 bp, synthetic construct
  source 1..75: mol_type = other DNA
gacgccgcgatggacacacgtgtcagggcggtggcgagcagcgtgatgtatgacatgagccgtgcaatggggcat

SEQ ID NO: 786166 - DNA, 75 bp, synthetic construct
  source 1..75: mol_type = other DNA
ttttcttttatgtcttgctgtattattttcgcagcgagcattatgtttgttggagtgaaatattcacatggtacg

SEQ ID NO: 786167 - DNA, 75 bp, synthetic construct
  source 1..75: mol_type = other DNA
aagttcgggactggcccagaaaaaatagtagttgtaggtgacagtcacgctaacgccattgttacagctttaccg

SEQ ID NO: 786168 - DNA, 75 bp, synthetic construct
  source 1..75: mol_type = other DNA
acccaataataaatagacggctaacaccgcagatcaacgaaatatcaaatgcttctaaagactttaatgcgctac

SEQ ID NO: 786169 - DNA, 75 bp, synthetic construct
  source 1..75: mol_type = other DNA
atgagtcgttcagctgcaggtctgatggacgtatcgctacccacggaagaactcaaaaaaatcgagtcactgctg

SEQ ID NO: 786170 - DNA, 75 bp, synthetic construct
  source 1..75: mol_type = other DNA
ttattctactgaataagatcacccgctacggttggaagattgagcaatataaaacgtgtttcgaattatacgaaa

SEQ ID NO: 786171 - DNA, 75 bp, synthetic construct
  source 1..75: mol_type = other DNA
aatacctagatgagaataccgtgattattctactgaataagatcacccgctacggttggaagattgagcaatata

SEQ ID NO: 786172 - DNA, 75 bp, synthetic construct
  source 1..75: mol_type = other DNA
acgcgttaagcaccgagatcccggcgcaggttcgcccgctgtatcaactctggcgcgacgatcaggcgttacaat

SEQ ID NO: 786173 - DNA, 75 bp, synthetic construct
  source 1..75: mol_type = other DNA
cgccgccagttagttgcgcgcattgacgcgttaagtaccgagatcccggcgcaggttcgcccgctgtatcagctc

SEQ ID NO: 786174 - DNA, 75 bp, synthetic construct
  source 1..75: mol_type = other DNA
atcaccttgaagccggaacagattgctgaactggaaacgccgtataaaccgcatccggtagtaggatttaagtaa

SEQ ID NO: 786175 - DNA, 75 bp, synthetic construct
  source 1..75: mol_type = other DNA
atggcaattattgatgatgtgatcggcgtgttttccccccgggtgaaagcagccagactgcgttcaagggcgtta

SEQ ID NO: 786176 - DNA, 75 bp, synthetic construct
  source 1..75: mol_type = other DNA
tactcgtgctcagaagactcgttctgaagtaactggttccggtaaaaaaccgtggcgccagaaaggcaccggccg

SEQ ID NO: 786177 - DNA, 75 bp, synthetic construct
  source 1..75: mol_type = other DNA
gggaaggggttcactggcttgacagtgaaaaaccagaacaggcgcgtgacgaagtattacaggttgttggtgcta

SEQ ID NO: 786178 - DNA, 75 bp, synthetic construct
  source 1..75: mol_type = other DNA
atttaaccatattgatgaaatcatccgccgcattgcgctggcgcgtttcgacgtcactatcaatctgtcgcataa

SEQ ID NO: 786179 - DNA, 75 bp, synthetic construct
  source 1..75: mol_type = other DNA
aactattgtaggccctacagtatcacaatcttttccggcctctccgactctggttccagtggaacttatcgaccc

SEQ ID NO: 786180 - DNA, 75 bp, synthetic construct
  source 1..75: mol_type = other DNA
gctgatcctgctccggaggcattatcagttgcttgtgcggcttcctgctatgtggaattccattacggtaaaatg

SEQ ID NO: 786181 - DNA, 75 bp, synthetic construct
  source 1..75: mol_type = other DNA
tttcgaccccccacgctgtgctacagctgatcctgctccggaggcattatcagttgcttgtgcggcttcctgcta

SEQ ID NO: 786182 - DNA, 75 bp, synthetic construct
  source 1..75: mol_type = other DNA
tcagtccaccagctacgattaaaagacggtgaccccggtaatctgaaggccaccaatatcatcacaaaacgttag

SEQ ID NO: 786183 - DNA, 75 bp, synthetic construct
  source 1..75: mol_type = other DNA
atgaaagaatatcacggtgaaaaacgatataaggattatctattaaagcgttacagcatttctcgtgagggtcac

SEQ ID NO: 786184 - DNA, 75 bp, synthetic construct
  source 1..75: mol_type = other DNA
ttatgatatctgggattcagtccaccagctacgattaaaagacggtgaccccaataacttaaaggccaccaatat

SEQ ID NO: 786185 - DNA, 75 bp, synthetic construct
  source 1..75: mol_type = other DNA
cttgcggcgaacagtcagagttttggtcgggtactgactatcgtccattccgactgtgcgttgctggagcgcgac

SEQ ID NO: 786186 - DNA, 75 bp, synthetic construct
  source 1..75: mol_type = other DNA
tttaccggattagaccgaagaaagaagggagggattatttcttttacgatggtgtgacagatttaaagattgacg

SEQ ID NO: 786187 - DNA, 75 bp, synthetic construct
  source 1..75: mol_type = other DNA
atgaaaacttataatggtgagagaaaataccgtgactatttactcagacgttacagcatttctcgtgaaggttac

SEQ ID NO: 786188 - DNA, 75 bp, synthetic construct
  source 1..75: mol_type = other DNA
gccgggcaggagccgctttcaaaccttttggcggcaaaacgcccatggaacaccgctttgccgccgcccgctggc

SEQ ID NO: 786189 - DNA, 75 bp, synthetic construct
  source 1..75: mol_type = other DNA
ccagcacggattccgccggttattgccacaaaagccgtagaaggcgtcaaactcatcaccaccagcttattacag

SEQ ID NO: 786190 - DNA, 75 bp, synthetic construct
  source 1..75: mol_type = other DNA
gtcactgaacagaaagcatgggctatcagcccaaccgtggttcaaatcacggaaggattcaactcccgtgagatg

SEQ ID NO: 786191 - DNA, 75 bp, synthetic construct
  source 1..75: mol_type = other DNA
atgaaagtccagattttaaacaatagtggtgaagtcgtttggtcatacgacatagccgctcctgtagatcagagc

SEQ ID NO: 786192 - DNA, 75 bp, synthetic construct
  source 1..75: mol_type = other DNA
cagagcagatggccagagggattgctaatataccgtttgatgtaatggacgcaggcgtgggggtagtcaatgcgg

SEQ ID NO: 786193 - DNA, 75 bp, synthetic construct
  source 1..75: mol_type = other DNA
atgacagtgttccacctggtgaagacgatgagtgatttctctgagcttatttccttcaaaaaagacagagaagaa

SEQ ID NO: 786194 - DNA, 75 bp, synthetic construct
  source 1..75: mol_type = other DNA
atgagtgatttctctgagcttatttccttcaaaaaagacagagaagaaatgcggactgaatctgtctattacgtt

SEQ ID NO: 786195 - DNA, 75 bp, synthetic construct
  source 1..75: mol_type = other DNA
caacggtctgggggagcagatacagcatgtgctggatgataaccccttctccggtcacctgtttatcttccgtgg

SEQ ID NO: 786196 - DNA, 75 bp, synthetic construct
  source 1..75: mol_type = other DNA
ctggcttcgaaaccaaatgccaatgttgcacaactggcccgggaacatggcgttgataacaacctgatttttaaa

SEQ ID NO: 786197 - DNA, 75 bp, synthetic construct
  source 1..75: mol_type = other DNA
ttcgcgatgcgatgtcctgtatgggcgcggcggtcaatatcatcaccacggacggtccagccgggcgcgccgggt

SEQ ID NO: 786198 - DNA, 75 bp, synthetic construct
  source 1..75: mol_type = other DNA
taaactgggaaaaaaaccgcctaatcggtctcggctattcaaaactagctgaggaaatagatgatcgccgtaatc

SEQ ID NO: 786199 - DNA, 75 bp, synthetic construct
  source 1..75: mol_type = other DNA
cgatacatcgaagtaaaatcaattggccgagatggaaaagagggagcattccgttttttcctctcaggaaatgaa

SEQ ID NO: 786200 - DNA, 75 bp, synthetic construct
  source 1..75: mol_type = other DNA
atattcttcgtctttttgaaaaagattacgatacagccaaagaagataatgccttaagtgcacgcggacaatttc

SEQ ID NO: 786201 - DNA, 75 bp, synthetic construct
  source 1..75: mol_type = other DNA
gaataagaaataatttagaaaattcagataaaacaaataaaactttctcgatggttaggctatcgatgctatttt

SEQ ID NO: 786202 - DNA, 75 bp, synthetic construct
  source 1..75: mol_type = other DNA
tcatccgcaaatgtggctggagtcacgcattcctgactggttaacaacgtatctggaggcgaaatcatgtggatt

SEQ ID NO: 786203 - DNA, 75 bp, synthetic construct
  source 1..75: mol_type = other DNA
ttcgcggatgcagcggtgaaccaaaccgtatgcaccgcatttaccattcgggcgaaaccgaagacgccagttggt

SEQ ID NO: 786204 - DNA, 75 bp, synthetic construct
  source 1..75: mol_type = other DNA
gtggtgcccactggcggctgcgatgtttctgctcgtgatgtcaccgttactctgccggactaccctggttcagtg

SEQ ID NO: 786205 - DNA, 75 bp, synthetic construct
  source 1..75: mol_type = other DNA
gcagcaacggcatttgtcgcatatttgctcaaccaacgttacgggagcggcgatgcctggatgtatgaaaccgag

SEQ ID NO: 786206 - DNA, 75 bp, synthetic construct
  source 1..75: mol_type = other DNA
tttgttagttctggtcgtcatgacgacaatttgcgtatggatatttaaacgcatcagaaataatttagaaaaatc

SEQ ID NO: 786207 - DNA, 75 bp, synthetic construct
  source 1..75: mol_type = other DNA
atttttctcccagtcaggctggtatgggggattccgtgtcgtatctttccgtgacaacgggccagctgcgttaat

SEQ ID NO: 786208 - DNA, 75 bp, synthetic construct
  source 1..75: mol_type = other DNA
gcaggtaataaagcggggggactgaccactgttctggagaaatcgctgggagggatagcaaaagctggtacaacc

SEQ ID NO: 786209 - DNA, 75 bp, synthetic construct
  source 1..75: mol_type = other DNA
ccggccggcagtgccgttaaacgctatggacagataatcggttttgcgacccgtgacatccgacagggcgaacat

SEQ ID NO: 786210 - DNA, 75 bp, synthetic construct
  source 1..75: mol_type = other DNA
gtatggcaatcttctttatcttctcaatgctgctgggcgctgatgaatcccctaatgattttggtaaaaatcatt

SEQ ID NO: 786211 - DNA, 75 bp, synthetic construct
  source 1..75: mol_type = other DNA
ctggacaaccctgctgggcctcgatgcattcgcgctgtttaaaaacaagcgtatggcaatcttcttcatcttctc

SEQ ID NO: 786212 - DNA, 75 bp, synthetic construct
  source 1..75: mol_type = other DNA
acggttgcgcattcgacttcttcaacatctctggttcggtgtttgtcgaaaaagaagttagcccggcaattcgcg

SEQ ID NO: 786213 - DNA, 75 bp, synthetic construct
  source 1..75: mol_type = other DNA
tcttgggcattttcaggatggttttcgtaacggtaagaaaaatattgtgtcgttttacggtaacctgttacgtgt

SEQ ID NO: 786214 - DNA, 75 bp, synthetic construct
  source 1..75: mol_type = other DNA
gcgagaacaaaaccgactggatccgctgggcagtgccgcgcgccggtgaagccgtgacgtggtgggcgccgacag

SEQ ID NO: 786215 - DNA, 75 bp, synthetic construct
  source 1..75: mol_type = other DNA
atgaatttaaacgaactatatcgccttatctgcaatctcgcccgcattggcaccgtgctggaagtggacacggaa

SEQ ID NO: 786216 - DNA, 75 bp, synthetic construct
  source 1..75: mol_type = other DNA
gcgtacaaagcggcgggatccagactacatggctgaactggctgaccacccgcgccggtcgttcgcggacgtggt

SEQ ID NO: 786217 - DNA, 75 bp, synthetic construct
  source 1..75: mol_type = other DNA
gcggaattaaaacggccagcgtgacggcttctgattctgttactgccacggtgccggtggtcatggtgaaagcgt

SEQ ID NO: 786218 - DNA, 75 bp, synthetic construct
  source 1..75: mol_type = other DNA
acgggaaattcacttctaacggcgttcaggtggatgaccacggtcacggtggtgttaagtcaggagacaactgga

SEQ ID NO: 786219 - DNA, 75 bp, synthetic construct
  source 1..75: mol_type = other DNA
gcgggtcactgtcatctaatggcaaggtgctccacacccataaacaccccggcgacagcggcgggacaacgggtg

SEQ ID NO: 786220 - DNA, 75 bp, synthetic construct
  source 1..75: mol_type = other DNA
gcccacgatgcggtgcataacgcggtagtgatggaagaagtggcgaaaatggcgtggattgcgcgcagtattaac

SEQ ID NO: 786221 - DNA, 75 bp, synthetic construct
  source 1..75: mol_type = other DNA
cctgggggaaagatgcccacgacgcggtgcataacgcggtagtgatggaagaagtggcgaaaatggcgtggattg

SEQ ID NO: 786222 - DNA, 75 bp, synthetic construct
  source 1..75: mol_type = other DNA
gttatccatctctcggtggaatcgtgcatacccactcaacccatgccaccgcatgggcgcaggcggggatggcga

SEQ ID NO: 786223 - DNA, 75 bp, synthetic construct
  source 1..75: mol_type = other DNA
atgaatactttaaattccattcaggatatcgcccgcgcgatccgtaaccttatccgcaccggcattgtgactgca

SEQ ID NO: 786224 - DNA, 75 bp, synthetic construct
  source 1..75: mol_type = other DNA
cgcgccggtcgctcacgggtgtggtgggctccttccgttggcgagcaggtgctcattcttgccattgggggcgaa

SEQ ID NO: 786225 - DNA, 75 bp, synthetic construct
  source 1..75: mol_type = other DNA
aagtgcagggcgagtatgaactgaacaccggcaaagtgattatcgaaacgctgggcgatgccgagccgctgcata

SEQ ID NO: 786226 - DNA, 75 bp, synthetic construct
  source 1..75: mol_type = other DNA
cagatccccgcaaacatcggcccgggcgtctttatcaatcgcgtgtacagcatggacagccagtcactgagtgcc

SEQ ID NO: 786227 - DNA, 75 bp, synthetic construct
  source 1..75: mol_type = other DNA
gtggaagcaagccagcctggaagagttggaggatattcgcattcatctgcgtgggatcatgcacctgatggaaaa

SEQ ID NO: 786228 - DNA, 75 bp, synthetic construct
  source 1..75: mol_type = other DNA
gctgggtaaaacgcgtcctgtttctttgcgaccgtaaagagctgcgtaaacaggcggcgaatgccttcaatcagt

SEQ ID NO: 786229 - DNA, 75 bp, synthetic construct
  source 1..75: mol_type = other DNA
gaagagcttaacaacaccgatcaggttacgcaggaacatccagttaaagaacaacctaccgcaaccggcgacggt

SEQ ID NO: 786230 - DNA, 75 bp, synthetic construct
  source 1..75: mol_type = other DNA
acgcgcggattaagcgaagaagaggtgcagggtgagtacgaactgaataccggcaaagtgattatcgaaacgctg

SEQ ID NO: 786231 - DNA, 75 bp, synthetic construct
  source 1..75: mol_type = other DNA
atgggccaaatcatactttggcctatgaaaaaagaaaccgatatccgacgcggaaggcattgtgttttcctgaag

SEQ ID NO: 786232 - DNA, 75 bp, synthetic construct
  source 1..75: mol_type = other DNA
ttatttaagctctccggtctggtcgttggtgaactattcattacgccatagccagttagaaagcgtaagcggttt

SEQ ID NO: 786233 - DNA, 75 bp, synthetic construct
  source 1..75: mol_type = other DNA
ggatattctggcggcgcaaactgcccgttataccaacccggaagagctggatgtgctctggccggtcatcgtcga

SEQ ID NO: 786234 - DNA, 75 bp, synthetic construct
  source 1..75: mol_type = other DNA
atggggccgctgcccaataggaaatacgcggttgttacccgctcaaactggacagcggctaatgaaaacgtagtg

SEQ ID NO: 786235 - DNA, 75 bp, synthetic construct
  source 1..75: mol_type = other DNA
atgacgatcatctaagcgaatacggtaataaactattaataccgttgtttgaaaaggtattttcaaacaaagaat

SEQ ID NO: 786236 - DNA, 75 bp, synthetic construct
  source 1..75: mol_type = other DNA
atcttcaggtcgagcagatgataaacgtctggaagatgcaatcagggctcaagatgaaagccgtgagcgagaact

SEQ ID NO: 786237 - DNA, 75 bp, synthetic construct
  source 1..75: mol_type = other DNA
ggtgctgatccagaaccccaacgttgatatccgggcactgaaagagttctatccgcaggcaactgccagcctgga

SEQ ID NO: 786238 - DNA, 75 bp, synthetic construct
  source 1..75: mol_type = other DNA
aaaatccgcaacggtgagccagtcacgcaaaacgagctggatgagctggcgaagctggtgctgatccagaacccc

SEQ ID NO: 786239 - DNA, 75 bp, synthetic construct
  source 1..75: mol_type = other DNA
atcgagtaggttactgcgacgagatcgaccagatattgcagtcaggtattactacaaaggcgttttgtggagtcc

SEQ ID NO: 786240 - DNA, 75 bp, synthetic construct
  source 1..75: mol_type = other DNA
agcctggagattatctacaccagcatggacatcattgtactatgccccgtacatgccccatcacatcctcaacat

SEQ ID NO: 786241 - DNA, 75 bp, synthetic construct
  source 1..75: mol_type = other DNA
tagagccttgcaaaccattatgcgtctcagtttgtctcatctatcttacgcaaaaaaaatagaactaatatcaag

SEQ ID NO: 786242 - DNA, 75 bp, synthetic construct
  source 1..75: mol_type = other DNA
ttatataaggaagtgccgttacttcaggggaggcagtgtacgcaggatctctgcagcatcccgcccgtcacctgt

SEQ ID NO: 786243 - DNA, 75 bp, synthetic construct
  source 1..75: mol_type = other DNA
cgaagcatctccagagagcaggttattgtcatggtagctgcactggtgaggggctggtcattgtcgggcagggtg

SEQ ID NO: 786244 - DNA, 75 bp, synthetic construct
  source 1..75: mol_type = other DNA
gacgagatcgaccagatattgcagtcaggtattactacaaaggcgttttgtggagtcctggctattttgccagta

SEQ ID NO: 786245 - DNA, 75 bp, synthetic construct
  source 1..75: mol_type = other DNA
ctacaaaggcgttttgtggagtcctggctattttgccagtagctgcggaggtgcgccaatatccgtcatccgcca

SEQ ID NO: 786246 - DNA, 75 bp, synthetic construct
  source 1..75: mol_type = other DNA
agggtgataatgctattcaggccgtttctgaccaaccctgggatgccagcgtaaaatcgctggtggcttttccgc

SEQ ID NO: 786247 - DNA, 75 bp, synthetic construct
  source 1..75: mol_type = other DNA
gatgtccaccaggggccaaaaggcaatcatgccagtgttattgtgcccgtcgaagtagaagcggcagtcgcatag

SEQ ID NO: 786248 - DNA, 75 bp, synthetic construct
  source 1..75: mol_type = other DNA
aatacattgaacaacagcaaacacctggtcaggtggaaaaccgcgccttatatccccgccctgaaggatggggtt

SEQ ID NO: 786249 - DNA, 75 bp, synthetic construct
  source 1..75: mol_type = other DNA
aaccgcgccttatatccccgccctgaagaacggggttttacggcgcaccggataaaacacggcttactcactaca

SEQ ID NO: 786250 - DNA, 75 bp, synthetic construct
  source 1..75: mol_type = other DNA
gagcagcgccaggtgtttaaggaaaaagtacagcagcgcccactgaaccaacagcaacgtgataacgcccgccag

SEQ ID NO: 786251 - DNA, 75 bp, synthetic construct
  source 1..75: mol_type = other DNA
atcatgatcaggatatggcaaagcggtttcatcaaaccgatgtcaacggcggaatgagcgccacgcagctacctg

SEQ ID NO: 786252 - DNA, 75 bp, synthetic construct
  source 1..75: mol_type = other DNA
acctggccactttctgccagacctgggacgacgagaatgtccataaattgatggatttctcgataaagaaaaact

SEQ ID NO: 786253 - DNA, 75 bp, synthetic construct
  source 1..75: mol_type = other DNA
tccgcgcgggccagttctttcaaccaattaccgagactaacgccctcacgttctgcggcatcattaagctgctgc

SEQ ID NO: 786254 - DNA, 75 bp, synthetic construct
  source 1..75: mol_type = other DNA
gccgcaacagcaacctgctcaacaggagcagaaagacagcgacggcgtggctggctggatcaaggagatgtttgg

SEQ ID NO: 786255 - DNA, 75 bp, synthetic construct
  source 1..75: mol_type = other DNA
tgtatatgaacgaggtgtatctcggtcagagcggcgacaacgaaatccgcggcttcccgctggcgagcttgtatt

SEQ ID NO: 786256 - DNA, 75 bp, synthetic construct
  source 1..75: mol_type = other DNA
tgacactggctgactgggggaagcgcgtagataaagatgggaaagtcgataagattatcgagcttctcagtcaaa

SEQ ID NO: 786257 - DNA, 75 bp, synthetic construct
  source 1..75: mol_type = other DNA
tgtgcaatagataaagcaatggcacagcaatctctcttagaggttaagactattttttctcagtgggaaaaaatg

SEQ ID NO: 786258 - DNA, 75 bp, synthetic construct
  source 1..75: mol_type = other DNA
gacgaaaaacgtagagagctgcgaagataaccaaccctctttaagagggccagttaaaggcattacagggagtaa

SEQ ID NO: 786259 - DNA, 75 bp, synthetic construct
  source 1..75: mol_type = other DNA
ctgaaagagttggttgaacgcacgccaggttatcatggatggcagcaggaattctggctcgcgcattgtggcgat

SEQ ID NO: 786260 - DNA, 75 bp, synthetic construct
  source 1..75: mol_type = other DNA
gctcataccagcccggtgacgtggaatttctgctaaagccggttgtcattgagatgacgccggttgatcaaaaag

SEQ ID NO: 786261 - DNA, 75 bp, synthetic construct
  source 1..75: mol_type = other DNA
gttcctataaacctgacgatgttcactttttgctgaaacccattgtcatggagatgacaccggttgacctgaagg

SEQ ID NO: 786262 - DNA, 75 bp, synthetic construct
  source 1..75: mol_type = other DNA
ctcgtggcaaacgcggctggctatggctgctgctaaaactggctatcgtttttgccgtgctgatcgccatttacg

SEQ ID NO: 786263 - DNA, 75 bp, synthetic construct
  source 1..75: mol_type = other DNA
cgataacacttctatctggctggttgtgtggggtgaaaacaccgttcacggcatcttccctaaaggacagaaagc

SEQ ID NO: 786264 - DNA, 75 bp, synthetic construct
  source 1..75: mol_type = other DNA
gctcagacactgttctatggtgataccagcgttaacccccagcagttcatgggcctgtcttcgcgttactcaagc

SEQ ID NO: 786265 - DNA, 75 bp, synthetic construct
  source 1..75: mol_type = other DNA
ttcgcattgcaaacattgatgtcagcaatctttcagaaccttcctctgccgcaaatattgcgaagttgatggtta

SEQ ID NO: 786266 - DNA, 75 bp, synthetic construct
  source 1..75: mol_type = other DNA
ctggaggttgtcgaaacgggattagcgcagggcaccagcagcggctatgacgctgaagcacgggcgtttggcgaa

SEQ ID NO: 786267 - DNA, 75 bp, synthetic construct
  source 1..75: mol_type = other DNA
ctggcgaaaaaacagggaaaaacgccaattgttgtgcgtgacaaagccgggttttatgtcaatcgcattttagcg

SEQ ID NO: 786268 - DNA, 75 bp, synthetic construct
  source 1..75: mol_type = other DNA
gtgcggtatcgaaggaggcggcagaaacagcgctggacgagctggaggcgaaatggggtcagcagtatccggtgg

SEQ ID NO: 786269 - DNA, 75 bp, synthetic construct
  source 1..75: mol_type = other DNA
agtttgcctcgcaggtgcgcgccattattaagcaactccgtgaaaacaaagagttgcgcggcgtggtgtttgtct

SEQ ID NO: 786270 - DNA, 75 bp, synthetic construct
  source 1..75: mol_type = other DNA
cattttactggaagccgctgttgagctggcaaagcaggatcgtccatcttcacgccctctacctgtacgcgagcg

SEQ ID NO: 786271 - DNA, 75 bp, synthetic construct
  source 1..75: mol_type = other DNA
gcgtgacggggatattggcgcggtatttggaataggttttccgccgtttcttggtggcccattccgctatatcga

SEQ ID NO: 786272 - DNA, 75 bp, synthetic construct
  source 1..75: mol_type = other DNA
atgggtattaacacgaagacggtgaatacctttctgtatacgggaatggcgaaaaacgggctgtatggtgtgagc

SEQ ID NO: 786273 - DNA, 75 bp, synthetic construct
  source 1..75: mol_type = other DNA
atgaaccgcactgtaggccaggctcttgatctgcaatctctggagaaaacatctctggcgatcagcgtaaaagag

SEQ ID NO: 786274 - DNA, 75 bp, synthetic construct
  source 1..75: mol_type = other DNA
ccagcgttaaccctcagcagtttatgggactgtcctcccgctattccagtctgtctgcgggtaatgctcagaaca

SEQ ID NO: 786275 - DNA, 75 bp, synthetic construct
  source 1..75: mol_type = other DNA
gcgctggatgagctggaagcgaaacgggggcagcaatatccggtggtgctccagtcctggcgccgcaagagggaa

SEQ ID NO: 786276 - DNA, 75 bp, synthetic construct
  source 1..75: mol_type = other DNA
ggtggtgcttcagtcctggcggcgaaaatgggaaaatctgtcgcattacttccgttatccggcaggtatccgtaa

SEQ ID NO: 786277 - DNA, 75 bp, synthetic construct
  source 1..75: mol_type = other DNA
tatgtggcatcaaaacaccacagagcgttcatggccgacctgaaaccggtatacagggcggtatcaaaagaggcg

SEQ ID NO: 786278 - DNA, 75 bp, synthetic construct
  source 1..75: mol_type = other DNA
gcgagattggactgggagcaaaaattggaaaagggctaacaattccccatcacgctggaattgttgttcattttg

SEQ ID NO: 786279 - DNA, 75 bp, synthetic construct
  source 1..75: mol_type = other DNA
tccgagccagcctgctctgcgatggacgctcgcttcccctgttaatctggatagtcccgtcagaaaaacagcaga

SEQ ID NO: 786280 - DNA, 75 bp, synthetic construct
  source 1..75: mol_type = other DNA
cgatcagttttatgtctatgaaacatggttctcgctaattaaatgccctgtagaaatgaaaagtctttcaaagcg

SEQ ID NO: 786281 - DNA, 75 bp, synthetic construct
  source 1..75: mol_type = other DNA
ctggagatcacatctggcgtcattgtcgcgcaacggcatattcatatgtctccgctggatgccctgatttatggc

SEQ ID NO: 786282 - DNA, 75 bp, synthetic construct
  source 1..75: mol_type = other DNA
caggagaatattggtctggaagtggctggtaagcttatcaaatactctgataatggctctacgctctctgcagtg

SEQ ID NO: 786283 - DNA, 75 bp, synthetic construct
  source 1..75: mol_type = other DNA
ggatgatgaacaattaaaagaatccatccgcgatgcccacttcatcggcctgcgatcccgtacccatctgactga

SEQ ID NO: 786284 - DNA, 75 bp, synthetic construct
  source 1..75: mol_type = other DNA
atggcaaaggtatcgctggagaaagacaagattaagtttctgctggtagaaggcgtgcaccaaaaggcgctggaa

SEQ ID NO: 786285 - DNA, 75 bp, synthetic construct
  source 1..75: mol_type = other DNA
catttctcgcaccattgcccagctcgaaaaaggggagagggtctgcgggcaagtcgaccgcgcacgcggctacta

SEQ ID NO: 786286 - DNA, 75 bp, synthetic construct
  source 1..75: mol_type = other DNA
atcaatacacatcgagctatgaagagcgtatgcctccagggacgctggcacatcatgtccaacgcaaagagttac

SEQ ID NO: 786287 - DNA, 75 bp, synthetic construct
  source 1..75: mol_type = other DNA
tgcttttcgcgtcaagtataatggtagcaataactctctttatgctcttgttaccgcagaagaacaaagcggcag

SEQ ID NO: 786288 - DNA, 75 bp, synthetic construct
  source 1..75: mol_type = other DNA
tgataccttgctggaacaccacgtcgcgggcattgtcctctgtccagtgaacagtacctcagaagccgatttaca

SEQ ID NO: 786289 - DNA, 75 bp, synthetic construct
  source 1..75: mol_type = other DNA
caattaggctatgtctataaccgttttgctgccaatctgcgttcgcaaaaatcgctaactatcggcgtagtcatt

SEQ ID NO: 786290 - DNA, 75 bp, synthetic construct
  source 1..75: mol_type = other DNA
atgaacaccaaccgtattttgcgcaaaaaagaggttcttcatctgacggggatctcgtcagcgacattgtaccgg

SEQ ID NO: 786291 - DNA, 75 bp, synthetic construct
  source 1..75: mol_type = other DNA
gtgctcgacgccctcagcgaacaggatctgctcacccagggcgtggcgctgcgggagatgaagctggtctccggc

SEQ ID NO: 786292 - DNA, 75 bp, synthetic construct
  source 1..75: mol_type = other DNA
atgatcctgatattcgtaaaagcatactggaaacagttgcttatcgtggcgatgcttgctgttcttgccacatca

SEQ ID NO: 786293 - DNA, 75 bp, synthetic construct
  source 1..75: mol_type = other DNA
tgtgcaggcgaaggaagagcgcaaagccgaagatgagaaagttcgtcagcactacgaacaggagaaagcgatcaa

SEQ ID NO: 786294 - DNA, 75 bp, synthetic construct
  source 1..75: mol_type = other DNA
gctatcttcaaatctttcttcggtcactatctggggacgctggaaggcttgaatggtctgattctgaagttcggt

SEQ ID NO: 786295 - DNA, 75 bp, synthetic construct
  source 1..75: mol_type = other DNA
gtggaaagaaaatcacaatccgcgcctgcccggttaattacccgttaccggaaacagcttccgtatattaatttt

SEQ ID NO: 786296 - DNA, 75 bp, synthetic construct
  source 1..75: mol_type = other DNA
cgcggcgtagtgctctccggttcatgctctcaaatgaccaaccgccaggtagcacattaccgtcaaattgcacca

SEQ ID NO: 786297 - DNA, 75 bp, synthetic construct
  source 1..75: mol_type = other DNA
tgtatattaatggtaataaattacataagaaagcagccaaaaagttaaacagtaaaataattaacaagtttggtt

SEQ ID NO: 786298 - DNA, 75 bp, synthetic construct
  source 1..75: mol_type = other DNA
gcgggtaaaaatgtctccctcacaagcggacatgataccaccctgtcgggggctcaggtcagtggtgagaaagtc

SEQ ID NO: 786299 - DNA, 75 bp, synthetic construct
  source 1..75: mol_type = other DNA
tatggtggtcgtaccgatagcctgagtgaacaggaacgtcagcaaatcagcatgctggccaccattgcctcgggt

SEQ ID NO: 786300 - DNA, 75 bp, synthetic construct
  source 1..75: mol_type = other DNA
gctgcatgcgccaggaaaggtacatcaatcactgacgtggtgaaccagcttgtagataactggctcaaagagaac

SEQ ID NO: 786301 - DNA, 75 bp, synthetic construct
  source 1..75: mol_type = other DNA
cggaagccaaagcgcagaatattccagtgctttcttatctggctaaccactttgcgtccatgaccggtaccaaaa

SEQ ID NO: 786302 - DNA, 75 bp, synthetic construct
  source 1..75: mol_type = other DNA
tggttgacccggggcatgaccgtcgtactgtggacgaaaaatttgagcagaagaaaagcggactgacggttgccc

SEQ ID NO: 786303 - DNA, 75 bp, synthetic construct
  source 1..75: mol_type = other DNA
gaggggggattcaaatattacctaatatgcaagaacgagtgaatgtggaatggctattaaagaatggatatattc

SEQ ID NO: 786304 - DNA, 75 bp, synthetic construct
  source 1..75: mol_type = other DNA
atggataagaagcaagtaacggatttaaggtcggaactactcgattcacgttttggggctaagtctatttcgact

SEQ ID NO: 786305 - DNA, 75 bp, synthetic construct
  source 1..75: mol_type = other DNA
atggataagaagcaagtaacggatttaaggtcggaactactcgattcacgttttggtgctaagtcaatttcgact

SEQ ID NO: 786306 - DNA, 75 bp, synthetic construct
  source 1..75: mol_type = other DNA
atggataagaagcaagtaacggatttaaggtcggaactactcgattcacgttttggagctaagtccatttctact

SEQ ID NO: 786307 - DNA, 75 bp, synthetic construct
  source 1..75: mol_type = other DNA
gccgcggttacgcttcctgcaacggtttccgcacctcccgtaacacccgccgtcgtcaaatccgcattcagcact

SEQ ID NO: 786308 - DNA, 75 bp, synthetic construct
  source 1..75: mol_type = other DNA
atggcggtcatcgtgacggtaatggctggcaacacaacggcgacaacatcaatatcgacgtcaacaatttcaacc

SEQ ID NO: 786309 - DNA, 75 bp, synthetic construct
  source 1..75: mol_type = other DNA
actttcggcgtgacctacaccggtaactatgagttcccacaaccgctgcacgatgcgctggataaattccaggcc

SEQ ID NO: 786310 - DNA, 75 bp, synthetic construct
  source 1..75: mol_type = other DNA
cttcgaaatggactttgctgaactgttgctggaagactacaaagcctccctgaaatatctcagcgatcacccgaa

SEQ ID NO: 786311 - DNA, 75 bp, synthetic construct
  source 1..75: mol_type = other DNA
attgtcaagacaagtctggtaaggctcttctgcgtaaaaaatttacccgtactaaactgatgcagtttctggcga

SEQ ID NO: 786312 - DNA, 75 bp, synthetic construct
  source 1..75: mol_type = other DNA
cccagccaagaacagaaacccagcaggcaatgcgggctctgcatcgtgttcgagaatcgttcatcagagataagg

SEQ ID NO: 786313 - DNA, 75 bp, synthetic construct
  source 1..75: mol_type = other DNA
ctctcgccctgccggtcaggtaattgcgcaatactatgaattcctgcgccttggtcgcgaaggctacaccaaagt

SEQ ID NO: 786314 - DNA, 75 bp, synthetic construct
  source 1..75: mol_type = other DNA
tcaaaacgatttccgctgcacgaaatgcgcgatgatgtcgcattccagattatcaatgacgaattatatcttgat

SEQ ID NO: 786315 - DNA, 75 bp, synthetic construct
  source 1..75: mol_type = other DNA
gcgggccggtgcaaatctgctggcataaatttgcccgctactgggatgtggaactgcgcgagatccctatgcgcc

SEQ ID NO: 786316 - DNA, 75 bp, synthetic construct
  source 1..75: mol_type = other DNA
gcagcgcgtgagcgtattcagtcagcctcgcctgagcagcgccaggtgtttaaggaaaaagtacagcagcgccca

SEQ ID NO: 786317 - DNA, 75 bp, synthetic construct
  source 1..75: mol_type = other DNA
caccaaagacaagatctacgacttctttatgaactacggcaaaacgccggaagaaaaagcggtgctggaacgcct

SEQ ID NO: 786318 - DNA, 75 bp, synthetic construct
  source 1..75: mol_type = other DNA
ccgctgatcccaggcgatccgatcgtctggcgtaaaaacctttccgaaaccaccaaagacaagatctacgacttc

SEQ ID NO: 786319 - DNA, 75 bp, synthetic construct
  source 1..75: mol_type = other DNA
ccgctgatccctggcgatccgatcgtctggcgcaaaaatctttccgaaaccactaaagacaagatctacgacttc

SEQ ID NO: 786320 - DNA, 75 bp, synthetic construct
  source 1..75: mol_type = other DNA
caagcaggtggatgttgccaccaacaacaccgaaaacctcgacaagctgaaaacctccgcgccggagaagctcaa

SEQ ID NO: 786321 - DNA, 75 bp, synthetic construct
  source 1..75: mol_type = other DNA
agaccgtcgcggcggacggatcgccgggttactggagcgtgttgatcgtcaacaaagacagtccgatcaacaacc

SEQ ID NO: 786322 - DNA, 75 bp, synthetic construct
  source 1..75: mol_type = other DNA
cctaactccacctctggcttcctcgtccccggctactacgtcttcgccaaaaacaatatctccgccagcgacttc

SEQ ID NO: 786323 - DNA, 75 bp, synthetic construct
  source 1..75: mol_type = other DNA
cgagttcagccgtcgccaaccactgacccagcagcaaaaggatgccgctcgtcagcgttatcagtcggcctcacc

SEQ ID NO: 786324 - DNA, 75 bp, synthetic construct
  source 1..75: mol_type = other DNA
ccgatgttaaaggcggaatgagcgccacgccgctacctgctccaacacgcgacagccagcgtcaggcggcagcaa

SEQ ID NO: 786325 - DNA, 75 bp, synthetic construct
  source 1..75: mol_type = other DNA
gctcaaatagatcaatgggttgcacctgtcgcgctataccccgacgccctactttcgcaggtgctgatggcatca

SEQ ID NO: 786326 - DNA, 75 bp, synthetic construct
  source 1..75: mol_type = other DNA
agaagctgggcgtgaaggtgaacgccttctttgccccagactacgcaggcattatccagggaatgcgcttcaata

SEQ ID NO: 786327 - DNA, 75 bp, synthetic construct
  source 1..75: mol_type = other DNA
cagtcacagcagcacagactattacctcacatggtgaaaaaagactcctgacaggttcagcaaagcgggggcata

SEQ ID NO: 786328 - DNA, 75 bp, synthetic construct
  source 1..75: mol_type = other DNA
agccggaggagaagtgctttactccggcgatgccaacctgactgatgaacagattgctaaattaccttttgcctt

SEQ ID NO: 786329 - DNA, 75 bp, synthetic construct
  source 1..75: mol_type = other DNA
ctggttcagtgtgcccgctcattcatgatgcggcttgaacgccagcatggaaaacttgccgaatgggttcgggag

SEQ ID NO: 786330 - DNA, 75 bp, synthetic construct
  source 1..75: mol_type = other DNA
ttgacccggataatgagagcgttgaaatctggggagtggttacgcattcccttatcgagcatccggtatgtttgc

SEQ ID NO: 786331 - DNA, 75 bp, synthetic construct
  source 1..75: mol_type = other DNA
tcgttacctatctgttagggctatggaatgcagagatgcagttaaatgaaaaaggatattattttgccgtactgg

SEQ ID NO: 786332 - DNA, 75 bp, synthetic construct
  source 1..75: mol_type = other DNA
gacctgcctgactgtctttattatctctgttgcgttactgatggtaggtctgtggaatgcgacgttattactcag

SEQ ID NO: 786333 - DNA, 75 bp, synthetic construct
  source 1..75: mol_type = other DNA
gcacgctggcgtattcgcgggaggatggaagctgcgccgtttgatacgccggacgttgaagagctgctaagggaa

SEQ ID NO: 786334 - DNA, 75 bp, synthetic construct
  source 1..75: mol_type = other DNA
ctatctcaatcaacatgccgatgcgcatattctgacgctggaagatcctgtggaatatctctataccagtcagcg

SEQ ID NO: 786335 - DNA, 75 bp, synthetic construct
  source 1..75: mol_type = other DNA
tattgctggagaatggtcagctggattttgccgtgtcgctggcggaaaaccagcgattgcgtggcagtgcgttcg

SEQ ID NO: 786336 - DNA, 75 bp, synthetic construct
  source 1..75: mol_type = other DNA
tcaatgtgcgtcaggacaatgttgccgtcatctctattgacgttcccggcgagaaaatgaataccctgaaggcag

SEQ ID NO: 786337 - DNA, 75 bp, synthetic construct
  source 1..75: mol_type = other DNA
tgtgatggcggggccattaggtcgtgcgctgttattcaaaatggtaagcaaaaaaacagaacagaaaacccaggg

SEQ ID NO: 786338 - DNA, 75 bp, synthetic construct
  source 1..75: mol_type = other DNA
tttggttttccggtaggcccaattcaacttttggatgaggtaggaatcgacaccgggactaaaattattcctgta

SEQ ID NO: 786339 - DNA, 75 bp, synthetic construct
  source 1..75: mol_type = other DNA
taaaggctggcgtaaatattagtggtgaaagcggaattacttattcatcatgtagaatagatactcataatgttg

SEQ ID NO: 786340 - DNA, 75 bp, synthetic construct
  source 1..75: mol_type = other DNA
attgacttttattgtaccaattagtgaggatgaaaataactttgactcggaaattattggtttctcttttgcatt

SEQ ID NO: 786341 - DNA, 75 bp, synthetic construct
  source 1..75: mol_type = other DNA
gacaccagagcaacaacgctcatttcttgagattgggcgattctatactcagccaaaaccaggaaaaatcgcagg

SEQ ID NO: 786342 - DNA, 75 bp, synthetic construct
  source 1..75: mol_type = other DNA
ccacagctcgaacagcttggtgcgccaccggtattgccggaattactcaagagcgagaatggcctgattctggtg

SEQ ID NO: 786343 - DNA, 75 bp, synthetic construct
  source 1..75: mol_type = other DNA
cgtttggccgctataaaaagccctatttcccggaagccgagttgtatcacttcgccgaaaaagcgcagaatgctt

SEQ ID NO: 786344 - DNA, 75 bp, synthetic construct
  source 1..75: mol_type = other DNA
tcagttccgtgaagagttcaacaaaagccaggatcccttccgccgggcggtgttgtttttatatctgaatcgcta

SEQ ID NO: 786345 - DNA, 75 bp, synthetic construct
  source 1..75: mol_type = other DNA
gcactccggtgatctgatggtggtcgataaagctgaaaaaccactgcagggggacatcgttattgctgaaattga

SEQ ID NO: 786346 - DNA, 75 bp, synthetic construct
  source 1..75: mol_type = other DNA
attttatggcccggcgtatcagcgacatcggtcatgaagcaaaacttatctctccgcaattcgtgcgtccgtttg

SEQ ID NO: 786347 - DNA, 75 bp, synthetic construct
  source 1..75: mol_type = other DNA
cgccagcggtgaatcgatgaaccaggctggcgtgcagaatggtgatctgctggtagtggacagggccgaaaaacc

SEQ ID NO: 786348 - DNA, 75 bp, synthetic construct
  source 1..75: mol_type = other DNA
tggtaccacaattgcgtttcccagagtttagaaatgcagcagaatgggctacctataatttaggccaactatcaa

SEQ ID NO: 786349 - DNA, 75 bp, synthetic construct
  source 1..75: mol_type = other DNA
cttcgtgctgatgctgccgctggtattcaccatcgctgctgctgcaaatatcccgctgctgtatgttggtgtacc

SEQ ID NO: 786350 - DNA, 75 bp, synthetic construct
  source 1..75: mol_type = other DNA
cgaccgtgattctcgccggtccggtttacgctcgcgtgttgaaaggtatcgataagccaattccggaaggtctct

SEQ ID NO: 786351 - DNA, 75 bp, synthetic construct
  source 1..75: mol_type = other DNA
gcaacgttcttcgtcagggctatcggggattcgatgaaagagatgggcctgcattccggcgacctgatggtggtc

SEQ ID NO: 786352 - DNA, 75 bp, synthetic construct
  source 1..75: mol_type = other DNA
tgccgatgaatccagcctacccccccctctatccggaagatctgcagattttcggggtagtgacggcattcatac

SEQ ID NO: 786353 - DNA, 75 bp, synthetic construct
  source 1..75: mol_type = other DNA
atccaggtgaactggcattggcggttacgctggagtcggtaacattgccagccgatctggttggctggctggacg

SEQ ID NO: 786354 - DNA, 75 bp, synthetic construct
  source 1..75: mol_type = other DNA
gccggctttcccagcccggcagcaggctatgaggccaatgagcttaacctgcatgattactgtgtgcggcgtccg

SEQ ID NO: 786355 - DNA, 75 bp, synthetic construct
  source 1..75: mol_type = other DNA
caacaatattaaagaaatttattccaatgatgacttaaactgttttctgaataatatttcggcacaaaaaaattt

SEQ ID NO: 786356 - DNA, 75 bp, synthetic construct
  source 1..75: mol_type = other DNA
tatacgatttcctgacactggaagcctgtcgccatttttctcaggcggcaaaagagcgtaatctttcgcaacccg

SEQ ID NO: 786357 - DNA, 75 bp, synthetic construct
  source 1..75: mol_type = other DNA
cgaagcgtgaagagtacggcgatatggcagaacagaaatgctcgaagatccttgcattcgcacacatcatgatgg

SEQ ID NO: 786358 - DNA, 75 bp, synthetic construct
  source 1..75: mol_type = other DNA
acccctgggtggctagttaaaggcgatgtatcgatttatacaaacgagccttcaggtggtttctcttatttttac

SEQ ID NO: 786359 - DNA, 75 bp, synthetic construct
  source 1..75: mol_type = other DNA
agaatgcgcggcggactggggggcgcaaatattctggtcagcaccatgatgggcggcgtcagcgcctctaatctg

SEQ ID NO: 786360 - DNA, 75 bp, synthetic construct
  source 1..75: mol_type = other DNA
atgacagcattgagtgaattactggcgggaagctggctggataactggctgatgatcattccgcttatgttcgtc

SEQ ID NO: 786361 - DNA, 75 bp, synthetic construct
  source 1..75: mol_type = other DNA
atttatccattaacaaaaactggatcgacaaagaagaatatccgcaatctgcagcaatcgatctgcgttgcgtaa

SEQ ID NO: 786362 - DNA, 75 bp, synthetic construct
  source 1..75: mol_type = other DNA
aaattgatggatttatccattaacaaaaactggatcgacaaagaagaatatccgcaatccgcagccatcgaccta

SEQ ID NO: 786363 - DNA, 75 bp, synthetic construct
  source 1..75: mol_type = other DNA
cttatctggcggatgaaatcgccaaactggggccgtatgagttcatctgtaccggtcgcccggacgaaggcatcc

SEQ ID NO: 786364 - DNA, 75 bp, synthetic construct
  source 1..75: mol_type = other DNA
cttgaacttggctatcgcgcaattgataccgcacaaatctatgataacgaagctgcagtaggtcaggcgattgca

SEQ ID NO: 786365 - DNA, 75 bp, synthetic construct
  source 1..75: mol_type = other DNA
tgcaaaaccgtaaagtggtcgcctgggctaaacagcacggcatccatattacttcctatatgacgctggcgtatg

SEQ ID NO: 786366 - DNA, 75 bp, synthetic construct
  source 1..75: mol_type = other DNA
cacaatgcgactccggctcaagtgattctggcgtgggctatgggggaaggttactcagtaattccttcttctact

SEQ ID NO: 786367 - DNA, 75 bp, synthetic construct
  source 1..75: mol_type = other DNA
ttcaggggcgagcgaaacgctttgccaaaattgccggggagatggtgtcgctggaaatggttgagcaactggcta

SEQ ID NO: 786368 - DNA, 75 bp, synthetic construct
  source 1..75: mol_type = other DNA
ccgcactactcgaaagccagggccgccacctcgaagcaatggccaagatcgcagatgctgaagcgcgaatcgctt

SEQ ID NO: 786369 - DNA, 75 bp, synthetic construct
  source 1..75: mol_type = other DNA
tcaggaaggtttacgccttggtgagcttttcggctattacggtcacggtcgccgacagctgaccggcaaactgga

SEQ ID NO: 786370 - DNA, 75 bp, synthetic construct
  source 1..75: mol_type = other DNA
ctttatacctgtgccgactgtggaggcatccagataaacgtgttcccatctattcagactgttgcttcctactca

SEQ ID NO: 786371 - DNA, 75 bp, synthetic construct
  source 1..75: mol_type = other DNA
gtgctgatttctctttcgctgatcccttactggaactctgcagttatcgaccaggttgacctcggttcgctgtcg

SEQ ID NO: 786372 - DNA, 75 bp, synthetic construct
  source 1..75: mol_type = other DNA
ggtgctttcttacctggctaaccactttgcatccatgaccggcaccaaaacgacgttcgctattattctggaata

SEQ ID NO: 786373 - DNA, 75 bp, synthetic construct
  source 1..75: mol_type = other DNA
caacttgcctgtcaccaggaaaattaaggaggttccgcaagcggctaacgtccaggcaccgcgtgagacaagcat

SEQ ID NO: 786374 - DNA, 75 bp, synthetic construct
  source 1..75: mol_type = other DNA
atgctttttagcttttttcgaaatttgtgccgtgttttgtatcgcgttcgcgttcgcgttacgggtgacccccag

SEQ ID NO: 786375 - DNA, 75 bp, synthetic construct
  source 1..75: mol_type = other DNA
ctggaagtgcccaccgccgagaatgttcgcggcgaaatggagcgcggctggtatgacactggcgatatcgtgcgt

SEQ ID NO: 786376 - DNA, 75 bp, synthetic construct
  source 1..75: mol_type = other DNA
gtaggtgcttacattctttttgcgccgtttgtcgggcaggtggcggatagcttcgccaaaggccgggtgatgatg

SEQ ID NO: 786377 - DNA, 75 bp, synthetic construct
  source 1..75: mol_type = other DNA
cgacaaccggttcgttgatgaaaatctacgatggtgcggggtttgtcgcggcgaagtcaggcgcgacggttgttc

SEQ ID NO: 786378 - DNA, 75 bp, synthetic construct
  source 1..75: mol_type = other DNA
gcactaccgcattgtgccggaactggtgtacgaccgcagttgtaccgtgctttttggcacctcgaccttcctcgg

SEQ ID NO: 786379 - DNA, 75 bp, synthetic construct
  source 1..75: mol_type = other DNA
gccgacttcaccaccaatgaccgctttatgtcggcattgccactgttccactcttttggtctgactgttggcctg

SEQ ID NO: 786380 - DNA, 75 bp, synthetic construct
  source 1..75: mol_type = other DNA
caggtaattgcacagtactatgaattcctgcgcctcggtcgtgaaggctataccaaagtacagaacgcctcttac

SEQ ID NO: 786381 - DNA, 75 bp, synthetic construct
  source 1..75: mol_type = other DNA
catcgtggtgatgcgcattatgtgtcgtcgcggcttcgaaatggactttgctgaactgttgctggaagactacaa

SEQ ID NO: 786382 - DNA, 75 bp, synthetic construct
  source 1..75: mol_type = other DNA
ggtccgaactactcgattcacgttttggcgctaagccgatttcgactatcgcagaatcaaaacgctttccgctgc

SEQ ID NO: 786383 - DNA, 75 bp, synthetic construct
  source 1..75: mol_type = other DNA
gctccgaactactcgattcacgttttggcgcgaagccgatttcgactatcgcagaatcaaaacgttttccgctgc

SEQ ID NO: 786384 - DNA, 75 bp, synthetic construct
  source 1..75: mol_type = other DNA
tgcggctgggttatctggcgtgatgaagaagcgctgccgcaggaactggtgttcaacgttgactacctcggcggt

SEQ ID NO: 786385 - DNA, 75 bp, synthetic construct
  source 1..75: mol_type = other DNA
gcccgctactgggatgtggagttgcgtgagatccctatgcgccccggtcagttgtttatggacccgaaacgcatg

SEQ ID NO: 786386 - DNA, 75 bp, synthetic construct
  source 1..75: mol_type = other DNA
gaactgttgctggaagactataaagcctccctgaaatatctcagcgatcacccgaaactgcagggtattgcccag

SEQ ID NO: 786387 - DNA, 75 bp, synthetic construct
  source 1..75: mol_type = other DNA
acctggccactttctgccagacctgggacgacgagaaggtccataaattgatggatttctctataaagaaaaact

SEQ ID NO: 786388 - DNA, 75 bp, synthetic construct
  source 1..75: mol_type = other DNA
acctggccactttctgccagacctgggacgacgagaacgtccataaattgatggatttgtctataaagaaaaact

SEQ ID NO: 786389 - DNA, 75 bp, synthetic construct
  source 1..75: mol_type = other DNA
acctggccactttctgccagacctgggacgacgagaatgtccataaattgatggatttgtccataaagaaaaact

SEQ ID NO: 786390 - DNA, 75 bp, synthetic construct
  source 1..75: mol_type = other DNA
gcacagtactatgaattcctgcgcctcggtcgtgaaggctatacaaaagtacagaacgcgtcctaacgcacgttc

SEQ ID NO: 786391 - DNA, 75 bp, synthetic construct
  source 1..75: mol_type = other DNA
gcacagtactatgaattcctgcgcctcggtcgtgaaggctatacaaaagtacagaacgcctcccatcgcacgttc

SEQ ID NO: 786392 - DNA, 75 bp, synthetic construct
  source 1..75: mol_type = other DNA
gcacagtactatgaattcctgcgcctcggtcgtgaaggctatacaaaagtacagaacgcttccgaacgcacgttc

SEQ ID NO: 786393 - DNA, 75 bp, synthetic construct
  source 1..75: mol_type = other DNA
attaacaaaaactggatcgacaaagaagaatatccgcaatccgcagccatcgacctgcgttgcgtaaatatggtt

SEQ ID NO: 786394 - DNA, 75 bp, synthetic construct
  source 1..75: mol_type = other DNA
gtgatgaagaagcgctgccgcaggaactggtgttcaacgttgactacctcggcggtcagattggtactttcgcca

SEQ ID NO: 786395 - DNA, 75 bp, synthetic construct
  source 1..75: mol_type = other DNA
ggtggagcctcgttagctaagtcactttttcctctggtgggcgcaccgggtgtcactgcgctgcgtctggcatta

SEQ ID NO: 786396 - DNA, 75 bp, synthetic construct
  source 1..75: mol_type = other DNA
atggatttttttagcacacagaacattctggttcatataccgatcggcgctggtggttacgatctttcatggatc

SEQ ID NO: 786397 - DNA, 75 bp, synthetic construct
  source 1..75: mol_type = other DNA
cgctgggctgcggctgggttatctggcgtgacgaagaagcgctgccgcaggaactggtgttcaacgttgactacc

SEQ ID NO: 786398 - DNA, 75 bp, synthetic construct
  source 1..75: mol_type = other DNA
gctgcaggtaagccgactaacaaaccaaacctggtgtgcggtccggtacaaatctgctggcataaattcgcccgc

SEQ ID NO: 786399 - DNA, 75 bp, synthetic construct
  source 1..75: mol_type = other DNA
ttatgtgtcgtcgcggcttcgaaatggactttgctgaactgttgctggaagactacaaagcctccctgaaatatc

SEQ ID NO: 786400 - DNA, 75 bp, synthetic construct
  source 1..75: mol_type = other DNA
ccggtgtatgtcacccacttcaagtgcgataagcaccgtatcagcgattaccttaacttgtacggcttcctgcgc

SEQ ID NO: 786401 - DNA, 75 bp, synthetic construct
  source 1..75: mol_type = other DNA
tgacgaacttaacggctggatttatgacaccgttaacaacggcgtgtataaagctggttttgccaccagccagca

SEQ ID NO: 786402 - DNA, 75 bp, synthetic construct
  source 1..75: mol_type = other DNA
gctggatttatgacaccgttaacaatggcgtgtataaagccggttttgccaccagccagcaagcctacgacgagg

SEQ ID NO: 786403 - DNA, 75 bp, synthetic construct
  source 1..75: mol_type = other DNA
atgcgcctgcgccgaaaatggtcaggccgttggcaccaacaccattggttcttccgaggcctgtatgctcggcgg

SEQ ID NO: 786404 - DNA, 75 bp, synthetic construct
  source 1..75: mol_type = other DNA
ggcaccaacaccattggttcttccgaggcctgtatgctcggcgggatggcgatgaaatggcgttggcgcaagcgt

SEQ ID NO: 786405 - DNA, 75 bp, synthetic construct
  source 1..75: mol_type = other DNA
cggacgaaggcatcccggcggtttgcttcaaactgaaagatggtgaagatccgggatacaccctgtatgacctct

SEQ ID NO: 786406 - DNA, 75 bp, synthetic construct
  source 1..75: mol_type = other DNA
caccggacgaaaccacctttaactatgtcaaaggccgtctgcatgcgccgaaaggcaaagatttcgacgacgccg

SEQ ID NO: 786407 - DNA, 75 bp, synthetic construct
  source 1..75: mol_type = other DNA
cggaaatcgccaaaggccggaaagtcgcgccaggcgtacaggcgctggtggttcccggctccggtccggtaaaag

SEQ ID NO: 786408 - DNA, 75 bp, synthetic construct
  source 1..75: mol_type = other DNA
cattatcagtatgcatcaagttatgaagagcgtttgtctccaggtacactggcgcatcacgtacaacgcaaggag

SEQ ID NO: 786409 - DNA, 75 bp, synthetic construct
  source 1..75: mol_type = other DNA
ggtaaaagcccaggcggaagcggaaggtctggataaaatctttattgaagccggttttgaatggcgcttgcctgg

SEQ ID NO: 786410 - DNA, 75 bp, synthetic construct
  source 1..75: mol_type = other DNA
acgtaatggggccggaacagggcgtcaccttaccaggaatgaccattgtctgcggcgactcacataccgccaccc

SEQ ID NO: 786411 - DNA, 75 bp, synthetic construct
  source 1..75: mol_type = other DNA
cgacgccgttgcctactggaaaaccctgcaaaccgacgaaggcgcaactttcgataccgttgtcactctgcaagc

SEQ ID NO: 786412 - DNA, 75 bp, synthetic construct
  source 1..75: mol_type = other DNA
tgctcgcgcaaggggccgtgtagggggaagaaaaccgtcactttcggaagatgatattaagcaaatgaaaattct

SEQ ID NO: 786413 - DNA, 75 bp, synthetic construct
  source 1..75: mol_type = other DNA
atcaggaaaaagtcgccactactgatgaagagccgatccttggtcagacctacctgccacgtaagttcaaaacca

SEQ ID NO: 786414 - DNA, 75 bp, synthetic construct
  source 1..75: mol_type = other DNA
cccggttatcccgttcgacattccgctctcgttttcgtcttggtgtgaaggagcgtcagtattgtctggagaagg

SEQ ID NO: 786415 - DNA, 75 bp, synthetic construct
  source 1..75: mol_type = other DNA
ggcgatggcggaagcggagcgtttcctgccgtcttttatcgacaacatcgataatttaatggcgaaacatggtgt

SEQ ID NO: 786416 - DNA, 75 bp, synthetic construct
  source 1..75: mol_type = other DNA
cgctgtttatcgaaaatggtcgtattctcgattatccggggcgtccgctgaaaaccggtctgctggagatcgcaa

SEQ ID NO: 786417 - DNA, 75 bp, synthetic construct
  source 1..75: mol_type = other DNA
ctgccatcgtttatcgataacatcgataattttatggcgaaacatggcgtcagcgatgagcatatcgtgatgcgt

SEQ ID NO: 786418 - DNA, 75 bp, synthetic construct
  source 1..75: mol_type = other DNA
tgtgtctggcgatgaacaacgatcgcctgaatccgggcgagcgttgtgcctccaccagcaaccgtaactttgaag

SEQ ID NO: 786419 - DNA, 75 bp, synthetic construct
  source 1..75: mol_type = other DNA
cacagaatgcggttctggacgtcacctttgaattccctcgcggacgagcgacaaaagatcgactctatttttgtg

SEQ ID NO: 786420 - DNA, 75 bp, synthetic construct
  source 1..75: mol_type = other DNA
tgcaggtgatgcgttcccgtgctgccctacaagagaaagctctcggtggtgaatatccattcacgatagcaacct

SEQ ID NO: 786421 - DNA, 75 bp, synthetic construct
  source 1..75: mol_type = other DNA
cgggcgtgaaacagtcagacctcagtgaagagctgaagcagacgataagtacgctggcaaccgtgtcagcagggc

SEQ ID NO: 786422 - DNA, 75 bp, synthetic construct
  source 1..75: mol_type = other DNA
agcgcagacctgcgcaaagaactgatcgaactggcgaaagaggggctggtatccaaatgcccccacgagagccgc

SEQ ID NO: 786423 - DNA, 75 bp, synthetic construct
  source 1..75: mol_type = other DNA
ggccagtattatcgctattcatcattggccgtgggtacggtgggcttggcgcgataacaacagggaaagatagtc

SEQ ID NO: 786424 - DNA, 75 bp, synthetic construct
  source 1..75: mol_type = other DNA
gttgctggccccgtttttcttcttcacatatggatttcttaatcagttcaccgcgactcaggatcttaacaacca

SEQ ID NO: 786425 - DNA, 75 bp, synthetic construct
  source 1..75: mol_type = other DNA
gcctggagccggtgagcaaaattactgctggtgtttatttaggggcgtttccacgacatattccggcacagaatg

SEQ ID NO: 786426 - DNA, 75 bp, synthetic construct
  source 1..75: mol_type = other DNA
gcttggcgcgataacaacagggaaagatagtcaggggaaactaccgcccgccgtttactggctgacattgccctg

SEQ ID NO: 786427 - DNA, 75 bp, synthetic construct
  source 1..75: mol_type = other DNA
atggggttgaaaccgggtattccactgacagaagtggctatcgacaaagtgtttatcggctcctgcaccaactcg

SEQ ID NO: 786428 - DNA, 75 bp, synthetic construct
  source 1..75: mol_type = other DNA
agttgatgaagcgattagctttattcgagccagacgctcgcatattgtgcttaaggaagagcacaaagcgatgtt

SEQ ID NO: 786429 - DNA, 75 bp, synthetic construct
  source 1..75: mol_type = other DNA
atgaagcgattagctatattcgagccagacgcccgcatattgtgcttaaggaagagcacaaagcgatgctgagat

SEQ ID NO: 786430 - DNA, 75 bp, synthetic construct
  source 1..75: mol_type = other DNA
gtgagaatgttgcggcgcaggcgaccggggcgatgacaggggaagcaatagggatactggcggagtctgtttatc

SEQ ID NO: 786431 - DNA, 75 bp, synthetic construct
  source 1..75: mol_type = other DNA
gagcgtcagtattgtctggagaagggcgcgccggttattgaacaacatgcggcagattttgtcgctaagcgtctt

SEQ ID NO: 786432 - DNA, 75 bp, synthetic construct
  source 1..75: mol_type = other DNA
gcgcgatatcgtcgggaaccacgttgctctcgtaacagagggaagagccggatccgacgttgttgtcggggattc

SEQ ID NO: 786433 - DNA, 75 bp, synthetic construct
  source 1..75: mol_type = other DNA
cgatgatgagaataaagcagctatggatgccgcattaattcgaaaagctgaagagaatgtgatggggcgtatccg

SEQ ID NO: 786434 - DNA, 75 bp, synthetic construct
  source 1..75: mol_type = other DNA
actggcaatggggatatcacggattggcattcgacaaggcaacggtgcgctcctttgataaggatgggcgtttgc

SEQ ID NO: 786435 - DNA, 75 bp, synthetic construct
  source 1..75: mol_type = other DNA
gcatcgtccgatcctcgcggcggtgatgacggtgatgatgctgtctctggccggtattccgatgacgctgggctt

SEQ ID NO: 786436 - DNA, 75 bp, synthetic construct
  source 1..75: mol_type = other DNA
tctgcactgttggtactggtgctgggtgtatggccacaaccgctgattagcattgtgcggttagcaatgccgctg

SEQ ID NO: 786437 - DNA, 75 bp, synthetic construct
  source 1..75: mol_type = other DNA
acgctgcgctgccgttccttggtattcagattggcacgtttatggcatctgccgtttacttcatcctgctccaca

SEQ ID NO: 786438 - DNA, 75 bp, synthetic construct
  source 1..75: mol_type = other DNA
ataatcgagcaaaaatacttgcaattacacttgcttgtctttgtaaccaaaagaccatatacgactatgaagtta

SEQ ID NO: 786439 - DNA, 75 bp, synthetic construct
  source 1..75: mol_type = other DNA
tccagcggatgtcgttgaatttaattcgcaggttatcaacgttgatcggcagcgtcatcctgagtggttccgtta

SEQ ID NO: 786440 - DNA, 75 bp, synthetic construct
  source 1..75: mol_type = other DNA
aaaaaaaatgtctaacaaaaacggtatctcacaaacggaagaatctgaattcgcatttcttttaacaaactatat

SEQ ID NO: 786441 - DNA, 75 bp, synthetic construct
  source 1..75: mol_type = other DNA
tgcatggtgggcgtcgtctgatgcacatccacgaaaaccgtcctggcgtgctgactgcgctgaacaaaatctttg

SEQ ID NO: 786442 - DNA, 75 bp, synthetic construct
  source 1..75: mol_type = other DNA
atggtcatattggtacgcaattgggcattctggctgaatcgctgggaatgtatgtttacttttatgatattgaaa

SEQ ID NO: 786443 - DNA, 75 bp, synthetic construct
  source 1..75: mol_type = other DNA
gcgggaaaaattgaacgaagcaaatcagttgattggcggttagagcattttgagaaaacagataacttaaggcac

SEQ ID NO: 786444 - DNA, 75 bp, synthetic construct
  source 1..75: mol_type = other DNA
acagcaggtggtatcgtggtgctgatctctgccctgctggttctggtgctgggtgtatggccgcaaccgctgatt

SEQ ID NO: 786445 - DNA, 75 bp, synthetic construct
  source 1..75: mol_type = other DNA
actggcaccgggaactgggcggaatgacccgtaatcagcatctgctgggaaaaatcaacagcggacaggttgatc

SEQ ID NO: 786446 - DNA, 75 bp, synthetic construct
  source 1..75: mol_type = other DNA
ccggtgccattcagactgccgtcatggattccgcacagggctgggtggactccattaaatcagcactgcgtcttg

SEQ ID NO: 786447 - DNA, 75 bp, synthetic construct
  source 1..75: mol_type = other DNA
accgatgaagaaccgatcctcggtcagacctacctgccgcgtaaattcaaaaccacggtagtgatcccaccgcag

SEQ ID NO: 786448 - DNA, 75 bp, synthetic construct
  source 1..75: mol_type = other DNA
atgcagtctctcgatccactcttcgcgcgtttatcccgttcaaaatttcgatctcgctttcgtttgggcatgaaa

SEQ ID NO: 786449 - DNA, 75 bp, synthetic construct
  source 1..75: mol_type = other DNA
gggtgtttcgttaagcgagcaacaacaacgttatatcgtggcggtaatctatcactggttggttatacagatgaa

SEQ ID NO: 786450 - DNA, 75 bp, synthetic construct
  source 1..75: mol_type = other DNA
tatccgggaaaaatcagcaaattcgattttaccactcttgacgttatcgcaaccctgaacagcaataatacggaa

SEQ ID NO: 786451 - DNA, 75 bp, synthetic construct
  source 1..75: mol_type = other DNA
aggggcgtattgaggccagaacatactggcaccgggaactgggcggaatgacccgtaatcagcatctgctgggaa

SEQ ID NO: 786452 - DNA, 75 bp, synthetic construct
  source 1..75: mol_type = other DNA
agaaccgcctctgcggcataccttgaacagtacggcttcaacaataccggcggtattcttctgccccgtcgcagg

SEQ ID NO: 786453 - DNA, 75 bp, synthetic construct
  source 1..75: mol_type = other DNA
cggcaataaaagccgccatgaccgggcatctgatgctgaccaccatccatgcgaacgacccgattaacatcctcg

SEQ ID NO: 786454 - DNA, 75 bp, synthetic construct
  source 1..75: mol_type = other DNA
ggtctgtttggtgcacgctactcccactacccctgtgtgggcggcctctatgctgtgctccgtctgatcaaggat

SEQ ID NO: 786455 - DNA, 75 bp, synthetic construct
  source 1..75: mol_type = other DNA
catcaggggcgagtgggagactttgagttcaccaccctggatgtgatagcccgcctcagacaggacaccacaacc

SEQ ID NO: 786456 - DNA, 75 bp, synthetic construct
  source 1..75: mol_type = other DNA
cagaactcggagcatcagatcttcacatgactcccggacgcgataatacagaatttacctatattgaggcccgcg

SEQ ID NO: 786457 - DNA, 75 bp, synthetic construct
  source 1..75: mol_type = other DNA
ttaagtacaagtacaatgttaaatccggtttgtcgtacaaggatacgatagggctacggttacagatcaaccgtg

SEQ ID NO: 786458 - DNA, 75 bp, synthetic construct
  source 1..75: mol_type = other DNA
atgacaaccgtttcgcataattccaccacaccttctgtttccgtgactgctgcaccagagaataaccagcctcag

SEQ ID NO: 786459 - DNA, 75 bp, synthetic construct
  source 1..75: mol_type = other DNA
ggcccatgcccggagaaaaatccacgatgtgcatgcaagagcgcctaccgatatcaccacggaagtcctgcagcg

SEQ ID NO: 786460 - DNA, 75 bp, synthetic construct
  source 1..75: mol_type = other DNA
ttatcggcacttgccttctgaacgacattgatccggaagcgtatctgcgccatatgctgagcatactgccggaat

SEQ ID NO: 786461 - DNA, 75 bp, synthetic construct
  source 1..75: mol_type = other DNA
agactggcctgcaacaactggttgccaccatagtccctgatgaacagcgcatcagtttctggccgcagcattttg

SEQ ID NO: 786462 - DNA, 75 bp, synthetic construct
  source 1..75: mol_type = other DNA
gatgacgtacagtcatcacgcctgtcgtacggagtgttatgccatgacggtccattattaccggctgcgggatta

SEQ ID NO: 786463 - DNA, 75 bp, synthetic construct
  source 1..75: mol_type = other DNA
ttatggcccccgaaccggatgatgatgatgacgaaacatggatactgttcagtgccatgaacggtaaccgcgctg

SEQ ID NO: 786464 - DNA, 75 bp, synthetic construct
  source 1..75: mol_type = other DNA
tggatgcatgctgccggctgctgtctccgctggaagaggcgcttcatggctatgtcatgactgacggcaaactcc

SEQ ID NO: 786465 - DNA, 75 bp, synthetic construct
  source 1..75: mol_type = other DNA
cccgtccgatagagcgtggtatcgcgggcccggggttacttgcccgcatgttaacgggaaaatactgcgaacacc

SEQ ID NO: 786466 - DNA, 75 bp, synthetic construct
  source 1..75: mol_type = other DNA
aaaaaaagcctgtacaaaatgtgactgcatcattgaagcaccggcaccatcccgtccgatagagcgtggtatcgc

SEQ ID NO: 786467 - DNA, 75 bp, synthetic construct
  source 1..75: mol_type = other DNA
agaaaacaaagaccgggcggttatggacctgcgttcgtgacgaccgtaacgccgggtcaacgctggcgccggcgg

SEQ ID NO: 786468 - DNA, 75 bp, synthetic construct
  source 1..75: mol_type = other DNA
ggtaaccgcgctgaaatgagcccggaagccgccggtattgccgcctgtctgatgacgtacagtcatcacgcctgc

SEQ ID NO: 786469 - DNA, 75 bp, synthetic construct
  source 1..75: mol_type = other DNA
tgcctgctgggctcatgcccgccgaaagatccacgatgtgcacgtccgcatcccgtcagcactgacggaagaagc

SEQ ID NO: 786470 - DNA, 75 bp, synthetic construct
  source 1..75: mol_type = other DNA
atatcattcatccctgatattaccgggtcatcacggtcagtgatgaacgtgatgttgccaggtcccgacctttac

SEQ ID NO: 786471 - DNA, 75 bp, synthetic construct
  source 1..75: mol_type = other DNA
ttggttgccactcccgtccctgatgaacatcgtatcagcttctggccgcagcattttggcctcattccacagtgg

SEQ ID NO: 786472 - DNA, 75 bp, synthetic construct
  source 1..75: mol_type = other DNA
ttggttgccactcccgtccctgatgaacaacgaatcagcttctggccgcagcattttggcctcattccacagtgg

SEQ ID NO: 786473 - DNA, 75 bp, synthetic construct
  source 1..75: mol_type = other DNA
ttatggcgcccgaaccggatgaagatgatggagaaacctggatactgttcaatgccatgaacggtaactgcgctg

SEQ ID NO: 786474 - DNA, 75 bp, synthetic construct
  source 1..75: mol_type = other DNA
atgaaaatcgcttctcagaacacaactgctctttcttcagccacagcaccagggaatgaccagtcccgacttgtt

SEQ ID NO: 786475 - DNA, 75 bp, synthetic construct
  source 1..75: mol_type = other DNA
ttggttgccactcccgtccctgatgaacagcggatcagcttctggccgcagcattttggcctcattccacagtgg

SEQ ID NO: 786476 - DNA, 75 bp, synthetic construct
  source 1..75: mol_type = other DNA
ttggttgccactcccgtccctgatgaacaccgcatcagcttctggccgcagcattttggcctcattccacagtgg

SEQ ID NO: 786477 - DNA, 75 bp, synthetic construct
  source 1..75: mol_type = other DNA
aaaatcacctggccggttacagcggtgtgcttcaggccgatgcttacggtgttaccgggcgttatacgaatccgg

SEQ ID NO: 786478 - DNA, 75 bp, synthetic construct
  source 1..75: mol_type = other DNA
ggcagaataacggaagccgcgtgtatggctcatgcccggagaaaaatccacgatgtgcatgcaagagcgcccacc

SEQ ID NO: 786479 - DNA, 75 bp, synthetic construct
  source 1..75: mol_type = other DNA
ttcgtgcagtctgtctcggaaagaaaaactcttatgacctttgtcaaatattaagcccaaaaagaccttacgcag

SEQ ID NO: 786480 - DNA, 75 bp, synthetic construct
  source 1..75: mol_type = other DNA
caattgggcggcgggaccaatatcgccagtgccgtggaatatggtcggcaacttattgaacaaccagcgaaaagc

SEQ ID NO: 786481 - DNA, 75 bp, synthetic construct
  source 1..75: mol_type = other DNA
tcctgtttacctctttctcaggaagtttagtctccaggattcccggggcggttcaggttgaagagacggaagcct

SEQ ID NO: 786482 - DNA, 75 bp, synthetic construct
  source 1..75: mol_type = other DNA
cctcttcggcctgtgcaccggagactgatctgcaacaactggttgccaccctcgtccctgatgaacagcgcatca

SEQ ID NO: 786483 - DNA, 75 bp, synthetic construct
  source 1..75: mol_type = other DNA
ttccggtatatcaggaagcactgggttgcgttgtgcaacttctgtgataacggtctggcggaagtggataataat

SEQ ID NO: 786484 - DNA, 75 bp, synthetic construct
  source 1..75: mol_type = other DNA
tggaccgtctgtgcgaagactactgcggaggaatctggaatctgtacaccctgaacaacgggggagcatttatgg

SEQ ID NO: 786485 - DNA, 75 bp, synthetic construct
  source 1..75: mol_type = other DNA
accggcaaataccgctggcacggcagcactgaagcgtataccggtcgtgaagtacaggatattcccggtgtgctg

SEQ ID NO: 786486 - DNA, 75 bp, synthetic construct
  source 1..75: mol_type = other DNA
ttgctgcctgtctgatgacgtacagtcatcatgcctgtcgtacggagtgttatgccatgacggtccattattacc

SEQ ID NO: 786487 - DNA, 75 bp, synthetic construct
  source 1..75: mol_type = other DNA
gcatcagcttctggccgcagcaatttggcctcattccacagtgggtgaccctggacccccgtgtcttcggctgga

SEQ ID NO: 786488 - DNA, 75 bp, synthetic construct
  source 1..75: mol_type = other DNA
tggaccgtctgtgcgaagactactgcggagggatctggaatctgtacaccctgaacaacggcggggcatttatgg

SEQ ID NO: 786489 - DNA, 75 bp, synthetic construct
  source 1..75: mol_type = other DNA
tggaccgtctgtgcgaagactactgcggaggtatctggaatctgtacaccctgaacaacggtggcgcatttatgg

SEQ ID NO: 786490 - DNA, 75 bp, synthetic construct
  source 1..75: mol_type = other DNA
tacacgcttttctgaccaggacgaagctaaacgcctgctatatgagcagcagaaatcagaagaagccctagtgat

SEQ ID NO: 786491 - DNA, 75 bp, synthetic construct
  source 1..75: mol_type = other DNA
agggcggtggtgctggcaaccaataacaatccgatgatattcaccgaacgggccggaggtgtggcacgtcgtcgg

SEQ ID NO: 786492 - DNA, 75 bp, synthetic construct
  source 1..75: mol_type = other DNA
tttattgctgatttaatcagttggggcgcgattggcgcacgtactaccgaaagtcagatccaccgtgaaatggct

SEQ ID NO: 786493 - DNA, 75 bp, synthetic construct
  source 1..75: mol_type = other DNA
ggttgttgaagaaattatggcgcgactggcaaaggaagttcgtcaggctttttctggtgtccgcgatcgccgtcg

SEQ ID NO: 786494 - DNA, 75 bp, synthetic construct
  source 1..75: mol_type = other DNA
ttgatctcacggcagacgttgccgatccggtagagttattaatgaaagtacaactgggcggcgggaccaatatcg

SEQ ID NO: 786495 - DNA, 75 bp, synthetic construct
  source 1..75: mol_type = other DNA
acttattgaacaaccagcgaaaagcgtcattatcctcgtgagcgatttttacgaagggggtcatcatcattgctg

SEQ ID NO: 786496 - DNA, 75 bp, synthetic construct
  source 1..75: mol_type = other DNA
gcatcagcttctggccgcagcactttggcctcattccacagtgggtcaccctggaaccccgtgtcttcggctgga

SEQ ID NO: 786497 - DNA, 75 bp, synthetic construct
  source 1..75: mol_type = other DNA
tgatgacggtctggcggaggcggacaataacacagcggaaagagcgcttcgtgcagtctgtctcggaaagaaaaa

SEQ ID NO: 786498 - DNA, 75 bp, synthetic construct
  source 1..75: mol_type = other DNA
caggcactggttaatgtcggtgcacaaatagccgccatgacgccgggcgaactggcatcatggctggcggagaat

SEQ ID NO: 786499 - DNA, 75 bp, synthetic construct
  source 1..75: mol_type = other DNA
aatgataaacgaattattgtaattaaaaatgaggaaaacattcaatgcgaatcctacaataacagaactgaaaaa

SEQ ID NO: 786500 - DNA, 75 bp, synthetic construct
  source 1..75: mol_type = other DNA
acggtctggcggaggcggacaataacacagcggaaagagcgcttcgtgcagtctgtctcggaaagaaaaattctt

SEQ ID NO: 786501 - DNA, 75 bp, synthetic construct
  source 1..75: mol_type = other DNA
ccacatcttctgtttccgtaactactgcatcagggaataacccacctcagctggttgccactcccgtccctgatg

SEQ ID NO: 786502 - DNA, 75 bp, synthetic construct
  source 1..75: mol_type = other DNA
gcagttacccggcattcgtacccatctggtggcgtttgacaccagcgtcgttgatctcacggcagacgttgctga

SEQ ID NO: 786503 - DNA, 75 bp, synthetic construct
  source 1..75: mol_type = other DNA
cacgcctgtcgtacggagtgttacgccatgacggtccactattaccggctgcgggattacgccctgcaacatccg

SEQ ID NO: 786504 - DNA, 75 bp, synthetic construct
  source 1..75: mol_type = other DNA
ttatagcacctgaaccggatgaagatgatggagaaacctggatactgttcaatgccataaacggtaaccgcgctg

SEQ ID NO: 786505 - DNA, 75 bp, synthetic construct
  source 1..75: mol_type = other DNA
gcatcagcttctggccgcagcagtttggcctcattccacagtgggtaaccctggacccccgtgtcttcggctgga

SEQ ID NO: 786506 - DNA, 75 bp, synthetic construct
  source 1..75: mol_type = other DNA
ttatcgaaaaaatgccgtctgagagatgcgttccggtatatcaggaagcactgggttgcgttgtgcaacttctgt

SEQ ID NO: 786507 - DNA, 75 bp, synthetic construct
  source 1..75: mol_type = other DNA
aaaataatactataacgcagaggtcatattttgattacgttaccccttcgcaaaatttatggagaacagtaatta

SEQ ID NO: 786508 - DNA, 75 bp, synthetic construct
  source 1..75: mol_type = other DNA
gatcggctgttcagtgccgaacgtgaaggcggcgcgttgacggaagcaggatgctgggctcatgcgcggcgcaaa

SEQ ID NO: 786509 - DNA, 75 bp, synthetic construct
  source 1..75: mol_type = other DNA
gcactgaagcgtataccggtcgtgaggtgcaggatattcccggtgtgctggccgtgtttgctgaacgccgtaagg

SEQ ID NO: 786510 - DNA, 75 bp, synthetic construct
  source 1..75: mol_type = other DNA
acgtacagtcatcacgcctgccgtacggagtgttatgccatgacggttcattattaccgtctgcgggattacgcc

SEQ ID NO: 786511 - DNA, 75 bp, synthetic construct
  source 1..75: mol_type = other DNA
gatgccatgactgagcactattaccgcctgcgggattacgccctgcagcaccctgaatccagcgccattttgcgc

SEQ ID NO: 786512 - DNA, 75 bp, synthetic construct
  source 1..75: mol_type = other DNA
taagcgtgaattgcagttgctgtttgccccctctgtcgggagcgtgttaagcgattacagtaaaacacgtgacta

SEQ ID NO: 786513 - DNA, 75 bp, synthetic construct
  source 1..75: mol_type = other DNA
ccacaccttctgtttccgtaaccactgcatcagggaataaccagcctcagctggttgccagcctcgtccctgatg

SEQ ID NO: 786514 - DNA, 75 bp, synthetic construct
  source 1..75: mol_type = other DNA
gacgataatgacgaaacatgggtactgttcaatgccatgaacggtaaccgcgctgaaatgagtccggaagctgcc

SEQ ID NO: 786515 - DNA, 75 bp, synthetic construct
  source 1..75: mol_type = other DNA
acggagaattatgccatgacggtccattattaccggttgcgggattacgccctgcagcatccggaatacgacgcc

SEQ ID NO: 786516 - DNA, 75 bp, synthetic construct
  source 1..75: mol_type = other DNA
tggttcgcctactcaccggaccatcagggtaaacatccggagcaacaccttcgtcccttccggggtatcctgcag

SEQ ID NO: 786517 - DNA, 75 bp, synthetic construct
  source 1..75: mol_type = other DNA
ccggagttacttgcccgcgtgttaacgggaaaatactgcgaacatctgccactgtatcgtcagagtgaaatcttt

SEQ ID NO: 786518 - DNA, 75 bp, synthetic construct
  source 1..75: mol_type = other DNA
gtcgtgaagtgcaggatattcccggtgtgctggccgtgtttgcagaacgccgtaaggacagttttggcccgtatg

SEQ ID NO: 786519 - DNA, 75 bp, synthetic construct
  source 1..75: mol_type = other DNA
ccgctggcacggcagtgctgaagcgtataccggtcgtgaagtgcaggatattcccggtgtgctggccgtgtttgc

SEQ ID NO: 786520 - DNA, 75 bp, synthetic construct
  source 1..75: mol_type = other DNA
tgcatcccgtctttttccgttctgtaccggtaagtaccgctggcacggcagcactgaagcgtataccggtcgtga

SEQ ID NO: 786521 - DNA, 75 bp, synthetic construct
  source 1..75: mol_type = other DNA
gtgggtgaccctggagccccgtatcttcggctggatggaccgtctgtgcgaaaactactgcggtggtatctggaa

SEQ ID NO: 786522 - DNA, 75 bp, synthetic construct
  source 1..75: mol_type = other DNA
ttgaacaggctgagtcccaactgaaacaacgagaacaggacagcgatcgttacagtgggcgagaggatgacccgc

SEQ ID NO: 786523 - DNA, 75 bp, synthetic construct
  source 1..75: mol_type = other DNA
gcccgacagggtgccaaactgagccgtgcattactctccaactgggttgacgcgtgctgccagttaatgactccg

SEQ ID NO: 786524 - DNA, 75 bp, synthetic construct
  source 1..75: mol_type = other DNA
cgtacggagtgttatgccatgacggttcattattaccgtctgcgggattacgccctgcagcatctggaatgcagc

SEQ ID NO: 786525 - DNA, 75 bp, synthetic construct
  source 1..75: mol_type = other DNA
tctgagcgtactgccggaatggccttccaaccgagttgacgacctcctgccatggaaggtggtgctaccatcagg

SEQ ID NO: 786526 - DNA, 75 bp, synthetic construct
  source 1..75: mol_type = other DNA
gcgagcgtggagcactgttgtacgggatgatcggcacctgccgtctgaacggtatcgatccggaagcgtatctgc

SEQ ID NO: 786527 - DNA, 75 bp, synthetic construct
  source 1..75: mol_type = other DNA
agtgatccgcacagaacgggtaaaaaaaacctgtacaaaatgtgactgtattgttgaagcaccggcgccgtcccg

SEQ ID NO: 786528 - DNA, 75 bp, synthetic construct
  source 1..75: mol_type = other DNA
aggaaaagatcgaagaggaggagcgggaaatagaacatctgagggcccagatagaaaaactgcgccggatgttgt

SEQ ID NO: 786529 - DNA, 75 bp, synthetic construct
  source 1..75: mol_type = other DNA
caccaaagttaaaggcattggccctaaaacggccacggccgttgttgctgctattggcaaaggaactgaatttaa

SEQ ID NO: 786530 - DNA, 75 bp, synthetic construct
  source 1..75: mol_type = other DNA
gcctggttccacgacagcactctagtggcaacaagcaggtactaatgaatatgacgaaaaaaggcgacaagcatt

SEQ ID NO: 786531 - DNA, 75 bp, synthetic construct
  source 1..75: mol_type = other DNA
gtggacgccctctgttattacagtgatgacggtctggcggaggtggacaataacacagcggaaagagcgcttcgt

SEQ ID NO: 786532 - DNA, 75 bp, synthetic construct
  source 1..75: mol_type = other DNA
tgcagtctgtctcggaaagaaaattacgtgttcttcggtagcgatcacggcggcgagcgtggagcactgctgtac

SEQ ID NO: 786533 - DNA, 75 bp, synthetic construct
  source 1..75: mol_type = other DNA
gcatcaggtgaaaaagtgtgtccagagcggcatcaaagtgctgggactggcagcgctcgatagcaccgcaacacc

SEQ ID NO: 786534 - DNA, 75 bp, synthetic construct
  source 1..75: mol_type = other DNA
ctggacgtatgtccgggatgaccggaatgcgggctcatcagagccaccggcggtctggttcgcctactcaccaga

SEQ ID NO: 786535 - DNA, 75 bp, synthetic construct
  source 1..75: mol_type = other DNA
acggcggggcatttatggcacccgaaccggatgacgatgatgacgaaacatgggtactgttcaatgccatgaacg

SEQ ID NO: 786536 - DNA, 75 bp, synthetic construct
  source 1..75: mol_type = other DNA
atgaaaaccgtttctcataatgccactacaccttctgtttccgtgaccactgcatcagggaataatccgcctcag

SEQ ID NO: 786537 - DNA, 75 bp, synthetic construct
  source 1..75: mol_type = other DNA
gtatctggaatctgtacacgctgaacaacggcggggcatttatggctcccgaaccggatgacgatgatgtcgaaa

SEQ ID NO: 786538 - DNA, 75 bp, synthetic construct
  source 1..75: mol_type = other DNA
aacggtaagtaccgctggcacggcagtgctgagacgtataccggtcgtgaagtacaggatattcccggtgtgctg

SEQ ID NO: 786539 - DNA, 75 bp, synthetic construct
  source 1..75: mol_type = other DNA
catctgccccgcgaaataaactgtcacgaacggtgcaatagtgatccacacccaacgcctgaaatcagatccagg

SEQ ID NO: 786540 - DNA, 75 bp, synthetic construct
  source 1..75: mol_type = other DNA
acgccatcgtcgtccgttaccggagcatctgccccgcgaaataaactgtcacgaacggtgcaatagtgatccaca

SEQ ID NO: 786541 - DNA, 75 bp, synthetic construct
  source 1..75: mol_type = other DNA
atgttcttcggcaacgatcacggtggagagcgtggtgcgctactgtacggactgatcggcacctgccgactgaac

SEQ ID NO: 786542 - DNA, 75 bp, synthetic construct
  source 1..75: mol_type = other DNA
gtcatcatgcctgtcgtacggagaattatgccatgacggtccattattaccggttgcgggattacgccctgcagc

SEQ ID NO: 786543 - DNA, 75 bp, synthetic construct
  source 1..75: mol_type = other DNA
agagaatgaccagtcccgacttgttgccaccctcatccctgatgaacagcgcatcagcttctggccgcagtattt

SEQ ID NO: 786544 - DNA, 75 bp, synthetic construct
  source 1..75: mol_type = other DNA
gtatctggaatctgtacactctgaacaacggcggggcatttatggcacccgaaccggatgacgatgatgtcgaaa

SEQ ID NO: 786545 - DNA, 75 bp, synthetic construct
  source 1..75: mol_type = other DNA
gtatctggaatctgtacacactgaacaacggcggggcatttatggcgcccgaaccggatgacgatgatgccgaaa

SEQ ID NO: 786546 - DNA, 75 bp, synthetic construct
  source 1..75: mol_type = other DNA
gtatctggaatctgtacacactgaacaacggcggggcatttatggcccccgaaccggatgacgatgatggcgaaa

SEQ ID NO: 786547 - DNA, 75 bp, synthetic construct
  source 1..75: mol_type = other DNA
tcccgtctttttccgttctgtaccggcaaataccgctggcacggcagtgctgaagcgtataccggtcgtgaagtg

SEQ ID NO: 786548 - DNA, 75 bp, synthetic construct
  source 1..75: mol_type = other DNA
gtgctgagacgtataccggtcgtgaagtacaggatattcccggtgtgctggccgagtttgcagaacgtcgtaagg

SEQ ID NO: 786549 - DNA, 75 bp, synthetic construct
  source 1..75: mol_type = other DNA
ggtcgtgaagtgcaggatattcccggtgtgctggccgtgtttgcagaacgccgtaaggacagttttggcccgtat

SEQ ID NO: 786550 - DNA, 75 bp, synthetic construct
  source 1..75: mol_type = other DNA
ggcaatatgctgacgttgtattcgcagttgttcggatgcattgtctgtggcgtgcctttactggatatgaaacgc

SEQ ID NO: 786551 - DNA, 75 bp, synthetic construct
  source 1..75: mol_type = other DNA
gtgcacgttcgcaccccgtcagccctgacggagaaagcgctgaaacggatcggcgaactgtacgccatcgaggca

SEQ ID NO: 786552 - DNA, 75 bp, synthetic construct
  source 1..75: mol_type = other DNA
ctatgcgctgtctcatcgcgtggaactaagccgcttcctggaagatggtgcggtgccgctggataataatgtgtg

SEQ ID NO: 786553 - DNA, 75 bp, synthetic construct
  source 1..75: mol_type = other DNA
tggagccaaaagaaagctgttgcccggagtgtggtggtgagctggattatctgggggaagtcagcgcagaacaac

SEQ ID NO: 786554 - DNA, 75 bp, synthetic construct
  source 1..75: mol_type = other DNA
gtctacgtccgtgatgaccgtaatgccggttcacagatgcccccggcggtctggttcgcgtactcaccggaccgg

SEQ ID NO: 786555 - DNA, 75 bp, synthetic construct
  source 1..75: mol_type = other DNA
ggcagcctgagttcacagataaaacactctccaggaaacccggggcggttcagtatgacgtcctgcgccagtatg

SEQ ID NO: 786556 - DNA, 75 bp, synthetic construct
  source 1..75: mol_type = other DNA
gctgggtggagatcgacaataacctgtgtgaaaacgccctccgggtagttgcactggggcggcgtaactaccgga

SEQ ID NO: 786557 - DNA, 75 bp, synthetic construct
  source 1..75: mol_type = other DNA
accggtaagtaccgctggcacggcagtgctgagacgtataccggtagtgaagtacaggataattcccggtgtgct

SEQ ID NO: 786558 - DNA, 75 bp, synthetic construct
  source 1..75: mol_type = other DNA
ggacaagcccgaagagtggaagttcatcagaacattttctccgtaccataatattaaagcggaagtaaactatcc

SEQ ID NO: 786559 - DNA, 75 bp, synthetic construct
  source 1..75: mol_type = other DNA
ccgatcttaaaaatctgctcgccgattttccggttgaggaatggtgcgcgccggtgtcaggtgtcatgactgacg

SEQ ID NO: 786560 - DNA, 75 bp, synthetic construct
  source 1..75: mol_type = other DNA
ctgcgataaccagctgcgcgatcagttcacggaacggctggaatcaatggcaacggataactgtgcccgctgggt

SEQ ID NO: 786561 - DNA, 75 bp, synthetic construct
  source 1..75: mol_type = other DNA
ttccgcaatgaggcagtgatccgtcgtgctggtggcgtggaatgtcttgaaagctggttacttcgtgaaaaaggc

SEQ ID NO: 786562 - DNA, 75 bp, synthetic construct
  source 1..75: mol_type = other DNA
tgtgttgcctttgtgcagaaaacaccatgacgaactgcatgcggataccgtggcatttgaagagaagtatggttc

SEQ ID NO: 786563 - DNA, 75 bp, synthetic construct
  source 1..75: mol_type = other DNA
cctcacgcccaccagcaaacccgccacaggaaaagacggtggtcagcattgccgttgatccggagtcaccgaatc

SEQ ID NO: 786564 - DNA, 75 bp, synthetic construct
  source 1..75: mol_type = other DNA
gcgctgggtgaagacacagccgtgtgcgtgttgtggtaagcctgctgacgatccgcatcacctgattggtcatgg

SEQ ID NO: 786565 - DNA, 75 bp, synthetic construct
  source 1..75: mol_type = other DNA
gcgcgaccagacatccgaatcactcgggcagcttgctcaacaaaatctgacagcctggatgattgacgtcatacg

SEQ ID NO: 786566 - DNA, 75 bp, synthetic construct
  source 1..75: mol_type = other DNA
acgcgccgggcgcaatccgtctgtgctggcactgcgataacctgcttcgcgatcagttcacggaacgtctggagt

SEQ ID NO: 786567 - DNA, 75 bp, synthetic construct
  source 1..75: mol_type = other DNA
cgtcgccgctgggtaaatgagaaatacacacgctgggtaaagacacagccgtgtgcgtgttgtggtaagccagcg

SEQ ID NO: 786568 - DNA, 75 bp, synthetic construct
  source 1..75: mol_type = other DNA
ggaaaaaatctgctcggtgtaccgcgaaagcgacatcgtactattactccccaaaatctccaaaattgagcgatg

SEQ ID NO: 786569 - DNA, 75 bp, synthetic construct
  source 1..75: mol_type = other DNA
gtggtaagccagccgacgatccccatcacctgattggtcatggtcagggcggaatgggaacaaaggcccacgata

SEQ ID NO: 786570 - DNA, 75 bp, synthetic construct
  source 1..75: mol_type = other DNA
tggtgccggaactcgggctggtggtccttaagccaggtcgtgaattcatgcaggtatttcataaccctcgagtgc

SEQ ID NO: 786571 - DNA, 75 bp, synthetic construct
  source 1..75: mol_type = other DNA
tggtaccggaacttgggctggtggtccttaatccgggccgtgaatccatgccggtattttacaatacccgggtac

SEQ ID NO: 786572 - DNA, 75 bp, synthetic construct
  source 1..75: mol_type = other DNA
tggtggagccggaaccgaaaagcatgcgcagtctgccgtcaggagctgttcctgccgttcgccagccgctcgtgg

SEQ ID NO: 786573 - DNA, 75 bp, synthetic construct
  source 1..75: mol_type = other DNA
gaaagcgacatcataccgggagagcagacagccaccagcatactgaagcagcgcacaaaaaatattgcgttactg

SEQ ID NO: 786574 - DNA, 75 bp, synthetic construct
  source 1..75: mol_type = other DNA
ccttaagcctggtcgtgaatccatgcaggtatttcataaccctcgagtgctggtggagcctgaaccgaaaagcat

SEQ ID NO: 786575 - DNA, 75 bp, synthetic construct
  source 1..75: mol_type = other DNA
gtgcgggtattacttcgacctgttctggtaccggaactcgggatggtgctccttaagccgggccatgaatcaatg

SEQ ID NO: 786576 - DNA, 75 bp, synthetic construct
  source 1..75: mol_type = other DNA
tggtggaaccggaaccgaaaagtatgcgcggtctgccgtccggagtcgttcctgccgttcgccagccgctggcgg

SEQ ID NO: 786577 - DNA, 75 bp, synthetic construct
  source 1..75: mol_type = other DNA
cccaccgcgtccgtcccgcacattccagcaacgcatctggaggtaacgtgcgggtattacttcgacctgttccgg

SEQ ID NO: 786578 - DNA, 75 bp, synthetic construct
  source 1..75: mol_type = other DNA
cgttaagccaagccgtgaatccatgcgggtatttcatggcgacagggtgctggtggagtctgaaccgaaaagcat

SEQ ID NO: 786579 - DNA, 75 bp, synthetic construct
  source 1..75: mol_type = other DNA
ctctggctgaattatcctggtgggcggtccgcaatcaggtggcggacgcgctaccggaagcggtattacgtcgtt

SEQ ID NO: 786580 - DNA, 75 bp, synthetic construct
  source 1..75: mol_type = other DNA
gctggtgcattgtctgactggctgttgcgccatattaaatcctgccagtggccacacggcgattatcaccacagt

SEQ ID NO: 786581 - DNA, 75 bp, synthetic construct
  source 1..75: mol_type = other DNA
gcgtggtttaccgtccggagtcgtttctgccgttcgccagccgctggcggaagacaaatcattactgccattttt

SEQ ID NO: 786582 - DNA, 75 bp, synthetic construct
  source 1..75: mol_type = other DNA
tgcagatccgctggcgttcgaagaaaagtatggttcccaggttgatttgatttttcgttttcttgatcacgcctt

SEQ ID NO: 786583 - DNA, 75 bp, synthetic construct
  source 1..75: mol_type = other DNA
tctttcatgaagcggcccaaacgtcgccgctgggccaacgaaaaatacacacgctgggtaaagacacagccgtgt

SEQ ID NO: 786584 - DNA, 75 bp, synthetic construct
  source 1..75: mol_type = other DNA
gggaattatcgctggctgaattatcctggtgggcggtctgcaatcaggtggcggacgcgcttccggaggcagtat

SEQ ID NO: 786585 - DNA, 75 bp, synthetic construct
  source 1..75: mol_type = other DNA
cgcgtcgaatcctgaagcttccgggtgaaaaaatccgctcagtataccgcgaaagcgacatcataccgggagagc

SEQ ID NO: 786586 - DNA, 75 bp, synthetic construct
  source 1..75: mol_type = other DNA
gtgcgggtattacttcgacctgttctggtaccggaactcgggatggtggtcgttaagccgggccgtgaatccatg

SEQ ID NO: 786587 - DNA, 75 bp, synthetic construct
  source 1..75: mol_type = other DNA
tcatgcggatcctctggcgttcgaagaaaagcatggttctcaggttgatttaatttttcgttttcttgatcacgc

SEQ ID NO: 786588 - DNA, 75 bp, synthetic construct
  source 1..75: mol_type = other DNA
cgggcagggcggaatgggaacaaaagcacatgatctctttgtgttgcctttgtgcagaaagcatcacaacgagct

SEQ ID NO: 786589 - DNA, 75 bp, synthetic construct
  source 1..75: mol_type = other DNA
taatctgccgtccggggtcgttcctgccgttcgccagccgctggaggacgataaagcatttctgccttttttcag

SEQ ID NO: 786590 - DNA, 75 bp, synthetic construct
  source 1..75: mol_type = other DNA
taatctgccgtccggggtcgttcctgccgttcgccagccgctggaggatgataaagcattcctgccttttttcag

SEQ ID NO: 786591 - DNA, 75 bp, synthetic construct
  source 1..75: mol_type = other DNA
taatctgccgtccggggtcgttcctgccgttcgccagccgctggaggaagataaagcattactgccgtttttcag

SEQ ID NO: 786592 - DNA, 75 bp, synthetic construct
  source 1..75: mol_type = other DNA
tacgtcgttcgctggggttgcgtgcggaaaaaattcgctctgtgtacagtgaaagcgacatcataccgggagagt

SEQ ID NO: 786593 - DNA, 75 bp, synthetic construct
  source 1..75: mol_type = other DNA
agtcgccggagtcttttatgttacgccccaaacgtcgccgctgggttaatgaaaagtacacgcgctgggttaaga

SEQ ID NO: 786594 - DNA, 75 bp, synthetic construct
  source 1..75: mol_type = other DNA
actggtggggtggaatgtcttgaaagctggttacttcgtgaaaagggctgtcagtggcctcattccggatggcac

SEQ ID NO: 786595 - DNA, 75 bp, synthetic construct
  source 1..75: mol_type = other DNA
cacgcaatgaatagcacacaggaacgggaattatcgctggctgaattatcctggtgggcagtctgcaatcaggtg

SEQ ID NO: 786596 - DNA, 75 bp, synthetic construct
  source 1..75: mol_type = other DNA
aaagtacacgcgctgggttaagacacagccgtgtgcatgttgtggaaagcctgctgatgatccccaccacctgat

SEQ ID NO: 786597 - DNA, 75 bp, synthetic construct
  source 1..75: mol_type = other DNA
gcggatgatcctgccgttcgggccgtgttccgcaatgaggcagtgatccgtcgtgctggtggcgtggaatgtctt

SEQ ID NO: 786598 - DNA, 75 bp, synthetic construct
  source 1..75: mol_type = other DNA
taatctgccgtccggggtcgttcctgccgttcgccagccgctggaggaggataaagcattgctgccctttttcag

SEQ ID NO: 786599 - DNA, 75 bp, synthetic construct
  source 1..75: mol_type = other DNA
tgtacatgttgttgtaagccagcagacgatccccatcacctgattggtcacggtcagggcggaatggggacaaaa

SEQ ID NO: 786600 - DNA, 75 bp, synthetic construct
  source 1..75: mol_type = other DNA
ttatcgctggccgaattatcctggtgggcggcctgcaatcaggtggtggatgcactacctgaggcagtagcgcgt

SEQ ID NO: 786601 - DNA, 75 bp, synthetic construct
  source 1..75: mol_type = other DNA
catgcggatccgctggcgttcgaagaaaagcatggttctcaggttgatttaatttttcgttttcttgatcacgcc

SEQ ID NO: 786602 - DNA, 75 bp, synthetic construct
  source 1..75: mol_type = other DNA
gaatctttcatgaagcgacctaaacgtcgccgttgggtaaatgagaaatacacacgctgggtgaagacacagccg

SEQ ID NO: 786603 - DNA, 75 bp, synthetic construct
  source 1..75: mol_type = other DNA
tcagcattccataacggcagaatactggtggagccggaaccaaaaagcatgcgagctctgccgtccggggttgta

SEQ ID NO: 786604 - DNA, 75 bp, synthetic construct
  source 1..75: mol_type = other DNA
actggctcctgcgtcatgtcaaatcctgccagtggcctcatggtgactaccatcacagtgaaaccgtcatacatc

SEQ ID NO: 786605 - DNA, 75 bp, synthetic construct
  source 1..75: mol_type = other DNA
ggacaaaatcccacgatattttcacgctaccgctgtgtcgggagcatcacaacgagcttcatgcggatccgctgg

SEQ ID NO: 786606 - DNA, 75 bp, synthetic construct
  source 1..75: mol_type = other DNA
gcgcggtctgccgtccggagtcgttcctgccgttcgccagccgctggcggaagataaatcattactgccattttt

SEQ ID NO: 786607 - DNA, 75 bp, synthetic construct
  source 1..75: mol_type = other DNA
gtggaatgggaacaaaatcccacgatattttcacgctaccgctgtgtcgggagcatcacaacgagcttcatgcgg

SEQ ID NO: 786608 - DNA, 75 bp, synthetic construct
  source 1..75: mol_type = other DNA
atcagccgaaggataaattcactgaggtaatcatttttgccgggatggatgcttacgcccatgctcaacactgga

SEQ ID NO: 786609 - DNA, 75 bp, synthetic construct
  source 1..75: mol_type = other DNA
atgcgtaatctgccgtccggcatcgtccctgccgttcgccagccgctagtggaagacaaaacattgctgccgttt

SEQ ID NO: 786610 - DNA, 75 bp, synthetic construct
  source 1..75: mol_type = other DNA
gccacattaaatcctgccagtggcctcatggtgactaccatcacagcgaaaccgtcatacatcgttacggtaccg

SEQ ID NO: 786611 - DNA, 75 bp, synthetic construct
  source 1..75: mol_type = other DNA
gaaaaaatcacaacaggtgtgtcatacaccacgtcagcggtggggacgggatactggttactgcagctgctggac

SEQ ID NO: 786612 - DNA, 75 bp, synthetic construct
  source 1..75: mol_type = other DNA
gctgtttggcctgctgacgtacctgacaaacctttatttcaagattaaagaagataagcgcaaggctgcgagagg

SEQ ID NO: 786613 - DNA, 75 bp, synthetic construct
  source 1..75: mol_type = other DNA
ggtgtgctggggagtctgctgtttggcctgctgacgtatctgactaacctgtatttcaaaatcagagaggaccgt

SEQ ID NO: 786614 - DNA, 75 bp, synthetic construct
  source 1..75: mol_type = other DNA
tgggctgcgattggtgtgctggggagcctgttcctgggttttctgacttatctgacgaatctgtacttcaagata

SEQ ID NO: 786615 - DNA, 75 bp, synthetic construct
  source 1..75: mol_type = other DNA
ttgggctgctgacatatctgactaacctgtatttcaaaatcagagaggaccggcgtaaggccgcccggggagagt

SEQ ID NO: 786616 - DNA, 75 bp, synthetic construct
  source 1..75: mol_type = other DNA
actggttcctgcagttgctggacagggtttccccgtctcagtgggcggcaataggcgtgctgggaagtctgctgt

SEQ ID NO: 786617 - DNA, 75 bp, synthetic construct
  source 1..75: mol_type = other DNA
ggtttttggcctgctgacgtatctgacaaacctttatttcaagattaaagaagacaggcgtaaggctgcgagagg

SEQ ID NO: 786618 - DNA, 75 bp, synthetic construct
  source 1..75: mol_type = other DNA
ggggagtctgctgtttggtctgctgacgtacctgacgaacctgtatttcaaaattaaagaagaccgtcgtaaggc

SEQ ID NO: 786619 - DNA, 75 bp, synthetic construct
  source 1..75: mol_type = other DNA
aggcagtgctggctactggtttttacagtggcttgatcaggtcagtccgtcacagtgggctgcgattggtgttct

SEQ ID NO: 786620 - DNA, 75 bp, synthetic construct
  source 1..75: mol_type = other DNA
ggacgggcgactggctggcgataatgtgcctcccgttgtgctggctgatgatcaactggatgaactggcagaact

SEQ ID NO: 786621 - DNA, 75 bp, synthetic construct
  source 1..75: mol_type = other DNA
cagttgctggacagggtttcccccgtctcagtgggcggcaataggcgtgctggggagtctgctgtttgggctgct

SEQ ID NO: 786622 - DNA, 75 bp, synthetic construct
  source 1..75: mol_type = other DNA
acgaagcacggtttgcgttcaaatgtgaccctgacagaggattcagaagactggatgccatcatgtgcatcggtc

SEQ ID NO: 786623 - DNA, 75 bp, synthetic construct
  source 1..75: mol_type = other DNA
aaaaagcctgtcgggatgccttcaccgcgctgaaaaaagaaaacgtgggggaatttgctctccggggcgtctgcg

SEQ ID NO: 786624 - DNA, 75 bp, synthetic construct
  source 1..75: mol_type = other DNA
cgatcggctgttcagtgccaaacgtgaaggtggtgcacagacagaagttgcgtgctgggtcaataacccccgaaa

SEQ ID NO: 786625 - DNA, 75 bp, synthetic construct
  source 1..75: mol_type = other DNA
gaagccacccgtaaggccatttatgatgccatccggccaccggctgaaagcccgttcgacaccatgagcgaagcg

SEQ ID NO: 786626 - DNA, 75 bp, synthetic construct
  source 1..75: mol_type = other DNA
cgtacggaatgttatgccatgacggtccattattaccggttgcgggattacgccctgcagcatccggaatgcagc

SEQ ID NO: 786627 - DNA, 75 bp, synthetic construct
  source 1..75: mol_type = other DNA
cacggctggaaatcgtaatgcgcacctattttgaaaaaccacgaactgttgtcggctggaaaggactaatctccg

SEQ ID NO: 786628 - DNA, 75 bp, synthetic construct
  source 1..75: mol_type = other DNA
gaacggtatcgatccggaagcgtatctgcgccatatcctgagcgtactgccggaatagccttccaaccgagttga

SEQ ID NO: 786629 - DNA, 75 bp, synthetic construct
  source 1..75: mol_type = other DNA
ctattttgaaaaaccacgaaccgttgtcggctggaaaggattaatttccgacccggatttaaacggcagctatcg

SEQ ID NO: 786630 - DNA, 75 bp, synthetic construct
  source 1..75: mol_type = other DNA
cgcaatggctgaatatggcaaggagtaccagaagcgcaaaacaaaacatggcataagatcaaacgtcacacttca

SEQ ID NO: 786631 - DNA, 75 bp, synthetic construct
  source 1..75: mol_type = other DNA
atgcccggagaaaaatccacgatgtgcatgcaagagcgcccacctacatcaccacggaagccctgcagcgtatcg

SEQ ID NO: 786632 - DNA, 75 bp, synthetic construct
  source 1..75: mol_type = other DNA
ggtaatcatttttgccgggacggatgcttacgcccatgctcaacactggattgaaagcgaaggacgaaaacacgg

SEQ ID NO: 786633 - DNA, 75 bp, synthetic construct
  source 1..75: mol_type = other DNA
ggtgctggcgaaccggtacgactggcagctgtttcttgaggtaacggggccgggcggaagtggtaaaagtgttat

SEQ ID NO: 786634 - DNA, 75 bp, synthetic construct
  source 1..75: mol_type = other DNA
cccgttctgaaaaactgcagcgtgaggttgaacaggctgaggcccaactgaaacaacgcgaacaggaaagcgatc

SEQ ID NO: 786635 - DNA, 75 bp, synthetic construct
  source 1..75: mol_type = other DNA
gattttcaacttctccgaagtggtaccggaaaacgaacgcgatcctatgctggccgagaagattgaaggtgagct

SEQ ID NO: 786636 - DNA, 75 bp, synthetic construct
  source 1..75: mol_type = other DNA
gtttggcctgctgacgtatctgactaacctttatttcaagattaaagaagataagcgtaaggtggcgcggggaga

SEQ ID NO: 786637 - DNA, 75 bp, synthetic construct
  source 1..75: mol_type = other DNA
ggtaaagacacagccgtgtgcgtgttgtggtaagccagccgacgatccccatcacctgattggtcatggtcaggg

SEQ ID NO: 786638 - DNA, 75 bp, synthetic construct
  source 1..75: mol_type = other DNA
cctcacgcccaccagcaaaatccaccacaggaaaagacggtggtcagcattgctgttgatccggagtctccggaa

SEQ ID NO: 786639 - DNA, 75 bp, synthetic construct
  source 1..75: mol_type = other DNA
gctggtggtgctggtgcattgtctgactggctgttgcgccatattaaatcctgccagtggcctcatggtgattac

SEQ ID NO: 786640 - DNA, 75 bp, synthetic construct
  source 1..75: mol_type = other DNA
ggaacaaaatcccacgatattttcacgctaccgctgtgtcgggagcatcacaacgagcttcatgcggatccgctg

SEQ ID NO: 786641 - DNA, 75 bp, synthetic construct
  source 1..75: mol_type = other DNA
gcgctgggtgaagacacagccgtgtgcgtgttgtggtaagccagccgacgatccccatcacctgattggtcatgg

SEQ ID NO: 786642 - DNA, 75 bp, synthetic construct
  source 1..75: mol_type = other DNA
ctgccagtggcctcatggcgactatcaccacagcgaaaccgtcatacatcgttacggtaccggcgcgatggtgtt

SEQ ID NO: 786643 - DNA, 75 bp, synthetic construct
  source 1..75: mol_type = other DNA
gggtaaatgagaaatatacgcgctgggtaaagacacagccgtgtgcgtgttgtggtaagccagccgacgatcccc

SEQ ID NO: 786644 - DNA, 75 bp, synthetic construct
  source 1..75: mol_type = other DNA
ggaaaaaatccgctctgtgtaccgtgagagcgacatcgtaccgggagaacagacagccaccagcatactgaagca

SEQ ID NO: 786645 - DNA, 75 bp, synthetic construct
  source 1..75: mol_type = other DNA
gtgctggcactgtgataatcagttacgcgaccagacttcagaatcactcgggcaacttgctcaacaaaacctgac

SEQ ID NO: 786646 - DNA, 75 bp, synthetic construct
  source 1..75: mol_type = other DNA
gtgcatgttgtggaaagcctgctgatgatccccaccacctgacaggtcacggtcagggtggaatgggaacaaaag

SEQ ID NO: 786647 - DNA, 75 bp, synthetic construct
  source 1..75: mol_type = other DNA
cgtgcgcatgttgtggaaagcctgctgatgatgcccaccacctgataggtcacggtcagggtggaatgggtacaa

SEQ ID NO: 786648 - DNA, 75 bp, synthetic construct
  source 1..75: mol_type = other DNA
gaaaaacacggcagccagctgttgttgctgattcgttttttaatgcacgcgagaaattctggtgtcctgaagtgg

SEQ ID NO: 786649 - DNA, 75 bp, synthetic construct
  source 1..75: mol_type = other DNA
aatgcgacacgcgccgggcgcaatccgtctgtgctggcactgcgataaccagctgcgcgatcagttcacggaacg

SEQ ID NO: 786650 - DNA, 75 bp, synthetic construct
  source 1..75: mol_type = other DNA
gcagtgccggctactggtttttgcagtggttggatcaggtcagtccatcacagtgggctgcgattggtgtgctgg

SEQ ID NO: 786651 - DNA, 75 bp, synthetic construct
  source 1..75: mol_type = other DNA
acttatctgacaaatctgtatttcaaaatcagagaagacagacgaaaggctgcgagtgaaccgccccgggtttcc

SEQ ID NO: 786652 - DNA, 75 bp, synthetic construct
  source 1..75: mol_type = other DNA
gtttgggctgctgacatatctgactaacctgtatttcaaaatcaaagaggaccggcgtaaggcggcgcggggaga

SEQ ID NO: 786653 - DNA, 75 bp, synthetic construct
  source 1..75: mol_type = other DNA
gtgtgctggggagtctgctgtttggcctgctgacgtatctgacaaatctttatttcaagattaaagaagataagc

SEQ ID NO: 786654 - DNA, 75 bp, synthetic construct
  source 1..75: mol_type = other DNA
cacagtgggcggcaataggtgtgctgggtagtctggtatttggcttgctgacgtatctgacaaacctttatttca

SEQ ID NO: 786655 - DNA, 75 bp, synthetic construct
  source 1..75: mol_type = other DNA
aggcgtgctgggaagtctgctgtttgggctgctgacatatctgactaacctgtatttcaaaatcagagaggaccg

SEQ ID NO: 786656 - DNA, 75 bp, synthetic construct
  source 1..75: mol_type = other DNA
agggagtctggttctgggcttcctgacttatctgacaaatctgtacttcaaaataagagaagacagaagaaaggc

SEQ ID NO: 786657 - DNA, 75 bp, synthetic construct
  source 1..75: mol_type = other DNA
ctggacagggtttccccgtctcagtgggcggcaataggcgtgctggggagtctgctgtttgggctgctgacatat

SEQ ID NO: 786658 - DNA, 75 bp, synthetic construct
  source 1..75: mol_type = other DNA
atggataagttaacaacaggtgtcgcctatggcacctctgcaggcagtgctggctactggtttttacagttgctc

SEQ ID NO: 786659 - DNA, 75 bp, synthetic construct
  source 1..75: mol_type = other DNA
gtctctccgtcccagtgggtggcgataggtgtgctggggagtctgctgtttggcctgctgacgtatctgactaac

SEQ ID NO: 786660 - DNA, 75 bp, synthetic construct
  source 1..75: mol_type = other DNA
gtttgggctgctgacatatctgacgaacctgtatttcaagattaaagaagaccggcgtaaggcggcacggggaga

SEQ ID NO: 786661 - DNA, 75 bp, synthetic construct
  source 1..75: mol_type = other DNA
acaacaggtgtgtcatacaccacgtcagcggtggggacgggatactggttactgcagctgctggacaaagtctct

SEQ ID NO: 786662 - DNA, 75 bp, synthetic construct
  source 1..75: mol_type = other DNA
ttgacgcgtgctgccagttaatgactccgctgaatgaggccctgtaccgttatgtgatgaatacccgcaagcttc

SEQ ID NO: 786663 - DNA, 75 bp, synthetic construct
  source 1..75: mol_type = other DNA
gtgacggcattttgcgcgtaaaagcggaaatggaaaacctgcgtcgtcgtactgaactggatatcgaaaaagcgc

SEQ ID NO: 786664 - DNA, 75 bp, synthetic construct
  source 1..75: mol_type = other DNA
aaattcagtccgctgtttaccacactgtttttcccgaacgtggcgacattcagcacccagaacatcatgcttgat

SEQ ID NO: 786665 - DNA, 75 bp, synthetic construct
  source 1..75: mol_type = other DNA
atgagatggagttcggcgtcggcatccatggcgagccgggtatcgaccgccgccgcttcagctcgctcgaccaaa

SEQ ID NO: 786666 - DNA, 75 bp, synthetic construct
  source 1..75: mol_type = other DNA
aaagctgcacgttatcagcaagcgttacactcagcgcattgagcgacataacctgaatctgagactacatctggc

SEQ ID NO: 786667 - DNA, 75 bp, synthetic construct
  source 1..75: mol_type = other DNA
acactaaccagcttttcagatacctgaatcgcggggatatttcggaatttaaattcagtccactgtttacgtcgc

SEQ ID NO: 786668 - DNA, 75 bp, synthetic construct
  source 1..75: mol_type = other DNA
gtcagagtgaaatctttgcccgccagggtgtcgaactgagccgtgccttactctccaactgggttgatgcgtgct

SEQ ID NO: 786669 - DNA, 75 bp, synthetic construct
  source 1..75: mol_type = other DNA
actcagaactggcgaaagcgttcgcatacgccctgaaccagtggccggcgctgacgtactatgcagatgatggct

SEQ ID NO: 786670 - DNA, 75 bp, synthetic construct
  source 1..75: mol_type = other DNA
gcagaagtccggggatgttcagcagaacagcgtctggcagcaagaaaagccagagctgcgccactgatgcagtca

SEQ ID NO: 786671 - DNA, 75 bp, synthetic construct
  source 1..75: mol_type = other DNA
caactggagctggtctccagcgccctgaaagtgatccgcacggtcagagtgaaaaaggcctgtacccgatgcgac

SEQ ID NO: 786672 - DNA, 75 bp, synthetic construct
  source 1..75: mol_type = other DNA
tacaccctgaacaacggtggggcatttatggcccctgaaccggatgacgatgatgacgaaacatgggtgctgttc

SEQ ID NO: 786673 - DNA, 75 bp, synthetic construct
  source 1..75: mol_type = other DNA
cgcggattaaagaacctgaaacagtcagactgtatcttggattttacaaactcttattcggggattttagcccca

SEQ ID NO: 786674 - DNA, 75 bp, synthetic construct
  source 1..75: mol_type = other DNA
aaactggcctgtagccggtgtgatgtcatcgttcaggcaccacttccccctaaaccaattgaacgcggttatgcc

SEQ ID NO: 786675 - DNA, 75 bp, synthetic construct
  source 1..75: mol_type = other DNA
gtcttatcgggacgtgcaaattaaacggcgtggatccggaacgctatctgcatcatgtacttgatgtcatcgccg

SEQ ID NO: 786676 - DNA, 75 bp, synthetic construct
  source 1..75: mol_type = other DNA
ttgaacaggctgaggcccaactgaaacaacgcgaacaggaaagcgatcgttacagtgggagtgaggatgacccgc

SEQ ID NO: 786677 - DNA, 75 bp, synthetic construct
  source 1..75: mol_type = other DNA
gaggtccggggctgttcagcagaacagcgtctggcggcaagaaaagccagagccgcgccactgatgcagtcactg

SEQ ID NO: 786678 - DNA, 75 bp, synthetic construct
  source 1..75: mol_type = other DNA
gatcggcacatgccgtctgaacaatgtggaaccagaaaaatggctgcgttacgtcattgaacatatccaggactg

SEQ ID NO: 786679 - DNA, 75 bp, synthetic construct
  source 1..75: mol_type = other DNA
agaacacacattatcgaaaaaatgccgtctgagagatgcgttccggtatatccggaagcactgggttgcgttgtg

SEQ ID NO: 786680 - DNA, 75 bp, synthetic construct
  source 1..75: mol_type = other DNA
tggatgcgtgctgccggttaatggccccgctggatgaagccctctaccactacgtgatggactgccgcaaactgc

SEQ ID NO: 786681 - DNA, 75 bp, synthetic construct
  source 1..75: mol_type = other DNA
gtgaccctggagccccgtatcttcggctggatggaccgtctttgcgaagactactgcagtggtatctggaatctg

SEQ ID NO: 786682 - DNA, 75 bp, synthetic construct
  source 1..75: mol_type = other DNA
tccgccccttccggggtatcctgcaggcggatgcgttcacaggttacgacaggttgggtgatgctgccaacttac

SEQ ID NO: 786683 - DNA, 75 bp, synthetic construct
  source 1..75: mol_type = other DNA
acgtatgtccgggatgatcgtaatgtgggttcgtcatctcctccagcggtctggttcgcgtactcgccgaaccgg

SEQ ID NO: 786684 - DNA, 75 bp, synthetic construct
  source 1..75: mol_type = other DNA
atgaaaaaattgatcaatgatgtgcaagacgtactggacgaacaactggcaggactagcgaaggcgcatccatcg

SEQ ID NO: 786685 - DNA, 75 bp, synthetic construct
  source 1..75: mol_type = other DNA
actgtatcgtcagagtaaaatctttgcccgccagggtgtcgaactgagccgtgccttactctccaactgggttga

SEQ ID NO: 786686 - DNA, 75 bp, synthetic construct
  source 1..75: mol_type = other DNA
acacacgttatcgaagaaatgtcgtctgggagatgcgttccggtatatccggaagcactgggctgcgttgtgcaa

SEQ ID NO: 786687 - DNA, 75 bp, synthetic construct
  source 1..75: mol_type = other DNA
taatgacgccgctgaatgatgccctgtacagttatgtgatgaacacccgcaaggttcacactgatgacacaccag

SEQ ID NO: 786688 - DNA, 75 bp, synthetic construct
  source 1..75: mol_type = other DNA
gccgggtcagcgctggcaccggctgtgtggttcgcgtacagtccggacagaaaaggcatccacccgcagactcat

SEQ ID NO: 786689 - DNA, 75 bp, synthetic construct
  source 1..75: mol_type = other DNA
agtcgcgccatcgtcgtccgttacaggcagattatgttacgcactgccggaatgcttctgtaaagatcattacac

SEQ ID NO: 786690 - DNA, 75 bp, synthetic construct
  source 1..75: mol_type = other DNA
aatacaccgcctggagccagaagaaagctgttgcccggagtgtggcggtgagctggattatctgggggaagtcag

SEQ ID NO: 786691 - DNA, 75 bp, synthetic construct
  source 1..75: mol_type = other DNA
ggaaacacccggagcaacacctccgccccttccggggtatcctgcaggcggatgcgttcacaggttacgacaggt

SEQ ID NO: 786692 - DNA, 75 bp, synthetic construct
  source 1..75: mol_type = other DNA
gcacgtattcggtgaacgcactctggccacactggagcgtcttctaagcctgctgtcggcctttgaggtcgtggt

SEQ ID NO: 786693 - DNA, 75 bp, synthetic construct
  source 1..75: mol_type = other DNA
ttgagcggcataacctgaatctgagacaacatctggcaaggctgggacggaagtcactgtcgttctcaaaatcgg

SEQ ID NO: 786694 - DNA, 75 bp, synthetic construct
  source 1..75: mol_type = other DNA
tcggtgaacgcactctggccacactggagcgtcttctaagcctgctgtcggcctttgaggtcgtggtatggatga

SEQ ID NO: 786695 - DNA, 75 bp, synthetic construct
  source 1..75: mol_type = other DNA
gttgcgcacgtattcggtgaacgcactctggccacactggagcgtcttctgagcctgctgtcggcctttgaggtc

SEQ ID NO: 786696 - DNA, 75 bp, synthetic construct
  source 1..75: mol_type = other DNA
gcacctggcacggctgggacgactgggacggaagtcgctgtcgttctcaaaatcggtggagctgcatgacaaagt

SEQ ID NO: 786697 - DNA, 75 bp, synthetic construct
  source 1..75: mol_type = other DNA
tttacgcgtatgacaggatacggaggacggttgtggcgcacgtcttcggtgaacgcactctggccacactggagc

SEQ ID NO: 786698 - DNA, 75 bp, synthetic construct
  source 1..75: mol_type = other DNA
gtgattgtctgcgctgaaatggacgaacagtggggctacgtcggtgctaaatcacgtcagcgctggctgttttac

SEQ ID NO: 786699 - DNA, 75 bp, synthetic construct
  source 1..75: mol_type = other DNA
ttgctgttcaggcaatcacaacggggaaaaatatcattgagggcgatggtattgaacgttatgaactggactgga

SEQ ID NO: 786700 - DNA, 75 bp, synthetic construct
  source 1..75: mol_type = other DNA
tttaaataggacaagaacaatcccacatttattagggaagggggattaccttatcacaatattgagcattgatga

SEQ ID NO: 786701 - DNA, 75 bp, synthetic construct
  source 1..75: mol_type = other DNA
gcctgaagggaaagctgcacgttatcagcaagcgttacactcagcgcattgagcgacataatctgagacaacatc

SEQ ID NO: 786702 - DNA, 75 bp, synthetic construct
  source 1..75: mol_type = other DNA
ttgtggcgcacgtcttcggtgaacgcactctggccacactggagcgtcttctgagcctgctgtcggcctttgagg

SEQ ID NO: 786703 - DNA, 75 bp, synthetic construct
  source 1..75: mol_type = other DNA
taacctgaatctgaggcagcacctggcacggctgggacggctgggacggctgggacggctgggacggctgggacg

SEQ ID NO: 786704 - DNA, 75 bp, synthetic construct
  source 1..75: mol_type = other DNA
ggttgtggcgcacgtcttcggtgaacgcactctggccacactggagcgtcttctgagcctgctgtcggcctttga

SEQ ID NO: 786705 - DNA, 75 bp, synthetic construct
  source 1..75: mol_type = other DNA
aatcaccccagaagggggtgctgcacgttatcaggcgtcgttacactcagcgcattgagcgacataatctgaatc

SEQ ID NO: 786706 - DNA, 75 bp, synthetic construct
  source 1..75: mol_type = other DNA
tatgaatcacgcctgaagggaaagctgcacgttatcagcaagcgttacactcagcgcattgagcgacataatctg

SEQ ID NO: 786707 - DNA, 75 bp, synthetic construct
  source 1..75: mol_type = other DNA
caagcgttacactcagcgcattgagcgacataatctgaatctgagacaacatctggcaaggctgggacggaagtc

SEQ ID NO: 786708 - DNA, 75 bp, synthetic construct
  source 1..75: mol_type = other DNA
ctggccgctgtatgaatcacgcctgaagggaaagctgcacgttatcagcaagcgttatactcagcgcattgagcg

SEQ ID NO: 786709 - DNA, 75 bp, synthetic construct
  source 1..75: mol_type = other DNA
aggagcataccgtaattactgcctcagcggtccctgacgagttacgcattggcttctggccacagcactttggca

SEQ ID NO: 786710 - DNA, 75 bp, synthetic construct
  source 1..75: mol_type = other DNA
gtggtgaagccatgcgtattcaccgtcagcatcctgcatcccgtctttttccgttctgcaccggtaagtaccgct

SEQ ID NO: 786711 - DNA, 75 bp, synthetic construct
  source 1..75: mol_type = other DNA
cgagcgtggtgcactgctgtacgggctgatcgacacctgccgtctgaacggtatcgatccggaagcgtatctgcg

SEQ ID NO: 786712 - DNA, 75 bp, synthetic construct
  source 1..75: mol_type = other DNA
cgggaaaatactgcgaacacctgccactgtatcgtcagagtgaaatctttgcccgccagggcgtcgaactgagcc

SEQ ID NO: 786713 - DNA, 75 bp, synthetic construct
  source 1..75: mol_type = other DNA
gtgctgagacgtataccggtcgtgaagtgcaggatatccccggtgtgctggccgtgtttgctgaacgccgtaagg

SEQ ID NO: 786714 - DNA, 75 bp, synthetic construct
  source 1..75: mol_type = other DNA
caatggctttgtaccgacagcatccaggctctcggctgtttcgcttctgtaccggcaaatataaatggtccggca

SEQ ID NO: 786715 - DNA, 75 bp, synthetic construct
  source 1..75: mol_type = other DNA
ggaagcactgggttgcgttgtgcaacttctgtgatgacggtctggcggaggcggacaataacacagcggaaagag

SEQ ID NO: 786716 - DNA, 75 bp, synthetic construct
  source 1..75: mol_type = other DNA
gcactgacagaagttgcgtgctgggcccatgcccggcgaaaaatccacgatgtatacatcagcagcaaaagtgcg

SEQ ID NO: 786717 - DNA, 75 bp, synthetic construct
  source 1..75: mol_type = other DNA
gcgggccccggattacttgcccgcgtgttaacgggaaaatactgcgaacatctgccactgtatcgtcagagtgaa

SEQ ID NO: 786718 - DNA, 75 bp, synthetic construct
  source 1..75: mol_type = other DNA
gacgtcctctgttattacagtgatgacggtctggcggaggcggacaataacacagcggaaagagcgcttcgtgct

SEQ ID NO: 786719 - DNA, 75 bp, synthetic construct
  source 1..75: mol_type = other DNA
ggtgccttcaaaacccattgcacgcagttatgccggagcggggcttctggcccatgtcgtcaccgggaagtatgc

SEQ ID NO: 786720 - DNA, 75 bp, synthetic construct
  source 1..75: mol_type = other DNA
ccggaccggaaaggcatctatccacagaattatcttgctggttacagcggagtgcttcaggccgatgcttacggt

SEQ ID NO: 786721 - DNA, 75 bp, synthetic construct
  source 1..75: mol_type = other DNA
gaaatggcggaaacgctgggtgagcagtatgatccggtactgccatccgccctgcgccagtcttcagcccgtaaa

SEQ ID NO: 786722 - DNA, 75 bp, synthetic construct
  source 1..75: mol_type = other DNA
cggacaataacacagcggaaagagcgcttcgtgcagtctgtctcggaaagaaaaattacgtgttcttcggtagcg

SEQ ID NO: 786723 - DNA, 75 bp, synthetic construct
  source 1..75: mol_type = other DNA
gtaaaaaaagcctgtacaaaatgtgactgcatcgttgaagcaccggcgccgtcccgcccgatagagcgtggtatc

SEQ ID NO: 786724 - DNA, 75 bp, synthetic construct
  source 1..75: mol_type = other DNA
tgacggtctggcggaggcggataataacacagcggaaagagcgcttcgtgcagtctgtctcggaaagaaaaactt

SEQ ID NO: 786725 - DNA, 75 bp, synthetic construct
  source 1..75: mol_type = other DNA
atgacaaccgtttcgcataatgccaccacaccttctgtttccgtgaccactgcatcagggaataatccgcctcag

SEQ ID NO: 786726 - DNA, 75 bp, synthetic construct
  source 1..75: mol_type = other DNA
ctggctgtgtttgcagaacgccgtaaggacagttttggtccgtatgtccggctgatgagcgtcaccctgaactga

SEQ ID NO: 786727 - DNA, 75 bp, synthetic construct
  source 1..75: mol_type = other DNA
tgcggagatgagcggagaggctgccggtatagcagtctgcctgatggcatacagccaccatgcctgtcgtaccga

SEQ ID NO: 786728 - DNA, 75 bp, synthetic construct
  source 1..75: mol_type = other DNA
aatcgacaacaacatcgcagagaacgccttacggggagtggccgtaggccggaaaaactggctgttcgcgggttc

SEQ ID NO: 786729 - DNA, 75 bp, synthetic construct
  source 1..75: mol_type = other DNA
gtccctgatgaacagcgcatcagcttctggccgcagcactttggcctcattccacagtgggtgaccctggagccc

SEQ ID NO: 786730 - DNA, 75 bp, synthetic construct
  source 1..75: mol_type = other DNA
accgcgctgaaatgagcccggaagccgccggcattgcagcctgtctgatgacgtacagtcatcacgcctgtcgta

SEQ ID NO: 786731 - DNA, 75 bp, synthetic construct
  source 1..75: mol_type = other DNA
aaatgagtccggaagctgccggtattgctgcctgtctgatggcgtacagccatcatgcctgtcgtacggagtgtt

SEQ ID NO: 786732 - DNA, 75 bp, synthetic construct
  source 1..75: mol_type = other DNA
cctgtacaaaatgtgactgcatcgttgaagcaccggcaccgtcccgcccgatagagcgtggtattgcgggccccg

SEQ ID NO: 786733 - DNA, 75 bp, synthetic construct
  source 1..75: mol_type = other DNA
cgtacagtcatcacgcctgccgtacggagtgttatgccatgacggttcattattaccgtctgcgggattacgccc

SEQ ID NO: 786734 - DNA, 75 bp, synthetic construct
  source 1..75: mol_type = other DNA
gcagaggtccggggctgttcagcagaacagcgtctggcagcaagaaaagccagagcggctccactgatgcagtca

SEQ ID NO: 786735 - DNA, 75 bp, synthetic construct
  source 1..75: mol_type = other DNA
ggcatcccgtctttttccgttctgcacaggtaagtaccgctggcacggcagcactgaagcgtataccggtcgtga

SEQ ID NO: 786736 - DNA, 75 bp, synthetic construct
  source 1..75: mol_type = other DNA
gtgccacactggggcgctacaggtgctgttgctgaactgctggagccgctgtatgacgtcctgcgccagtatgtg

SEQ ID NO: 786737 - DNA, 75 bp, synthetic construct
  source 1..75: mol_type = other DNA
gacgtcgctgcatgaatggatggtggagaagaatggtacgctgtcgaaaaaatccagactgggcgaagcgttcag

SEQ ID NO: 786738 - DNA, 75 bp, synthetic construct
  source 1..75: mol_type = other DNA
tgacctgcaacaactggttaccaccctcgtccctgatgaacagcgcattagcttctggccgcagcactttggcct

SEQ ID NO: 786739 - DNA, 75 bp, synthetic construct
  source 1..75: mol_type = other DNA
gtactgttcaatgccatgaacggcaaccgcgctgaaatgagcccggaagcagccggcattaccgcctgtctgatg

SEQ ID NO: 786740 - DNA, 75 bp, synthetic construct
  source 1..75: mol_type = other DNA
aaaatggctgcgttacgtcattgagcatatccaggactggccggcaaaccgggtacgcgatctgttaccctggaa

SEQ ID NO: 786741 - DNA, 75 bp, synthetic construct
  source 1..75: mol_type = other DNA
acgcgggttgccggtgtctgaacgcctggcggtcaggcaaatgcagagtaaaccgctactgacttccctgtataa

SEQ ID NO: 786742 - DNA, 75 bp, synthetic construct
  source 1..75: mol_type = other DNA
gtgttcttcggtagcgatcacggcggcgagcgtggagcactgctgtacgggctgatcggcacctgccgtctgaac

SEQ ID NO: 786743 - DNA, 75 bp, synthetic construct
  source 1..75: mol_type = other DNA
atgaatcagaaatacctcattcgcatcgctgagctggaaaggctgctctctgagcaggctgaagccctccgtcag

SEQ ID NO: 786744 - DNA, 75 bp, synthetic construct
  source 1..75: mol_type = other DNA
cgaactgagccgggccttactctccaactgggttgacgcgtgctgccagttaatgacaccggtaaaggtactggc

SEQ ID NO: 786745 - DNA, 75 bp, synthetic construct
  source 1..75: mol_type = other DNA
gcctgtcgtacggagtgttatgccatgacggtccattattaccggctgcgggattacgccctgcagcatccggaa

SEQ ID NO: 786746 - DNA, 75 bp, synthetic construct
  source 1..75: mol_type = other DNA
agtgtggcggtgagctggattatctgggggaaggtcagtgcagaacaactggaactggtgagcagcgccctgaaa

SEQ ID NO: 786747 - DNA, 75 bp, synthetic construct
  source 1..75: mol_type = other DNA
tcatggcgaacccggcattgaccgccgtcccttctcttcactcgatcaaaccgtcgatgaaatgttcgacacgtt

SEQ ID NO: 786748 - DNA, 75 bp, synthetic construct
  source 1..75: mol_type = other DNA
ggcgctggacaggtgctgttgctgaactgctggagccgctgtatgacgtgctgcgccagtatgtgctgatgcccg

SEQ ID NO: 786749 - DNA, 75 bp, synthetic construct
  source 1..75: mol_type = other DNA
gtgtgaaaacgccctccgggtagttgcactggggcggcgtaactacatgttcttcggctctgatggtggaggcga

SEQ ID NO: 786750 - DNA, 75 bp, synthetic construct
  source 1..75: mol_type = other DNA
caggcagcagcgaagcaaagcgttactgacgtcgctgcatgaatggatggtggagaagaatggcacgctgtcgaa

SEQ ID NO: 786751 - DNA, 75 bp, synthetic construct
  source 1..75: mol_type = other DNA
atgactccgctgaatgatgccctgtaccgttacgtgatgaacacccgcaaggttcacactgacgatacaccagta

SEQ ID NO: 786752 - DNA, 75 bp, synthetic construct
  source 1..75: mol_type = other DNA
cgccgggttcaacgagctgtaccgggatggccggataacggaagccgcctgttgggctcacgcccgccgtaaaat

SEQ ID NO: 786753 - DNA, 75 bp, synthetic construct
  source 1..75: mol_type = other DNA
aagtgttactgacgtcgctgcatgaatggatgatggagaagaatggtacgctgtcgaaaaaatccagactgggcg

SEQ ID NO: 786754 - DNA, 75 bp, synthetic construct
  source 1..75: mol_type = other DNA
gtgcagtctgtctcggaagaaaattacgtgttcttcggtagcgatcacggcggcgagcgtggtgcactgttgtac

SEQ ID NO: 786755 - DNA, 75 bp, synthetic construct
  source 1..75: mol_type = other DNA
accggcaaataccgctggcacggcagcactgaagcgtataccggtcgtgaagtgcaggatattcccagtgtgctg

SEQ ID NO: 786756 - DNA, 75 bp, synthetic construct
  source 1..75: mol_type = other DNA
gaacagcgcatcagcttctggccgcagcattttggcctcattccacagtgggtgaccctggagccccgtgtcttc

SEQ ID NO: 786757 - DNA, 75 bp, synthetic construct
  source 1..75: mol_type = other DNA
gcacgaaatacgcgggttgccggtgtctgaacgcctggcggtcaggcaaatgcagagtaaaccgctactgacttc

SEQ ID NO: 786758 - DNA, 75 bp, synthetic construct
  source 1..75: mol_type = other DNA
tatcggtgaactgtatgtcatcgaggcagaagtccggggatgttcagcagaacagcgtctggcagcaagaaagcc

SEQ ID NO: 786759 - DNA, 75 bp, synthetic construct
  source 1..75: mol_type = other DNA
acacccgcaaggttcacactgatgacacaccggtaaaggtactggcaccgggtcagaaaaaggcgaaaacagggc

SEQ ID NO: 786760 - DNA, 75 bp, synthetic construct
  source 1..75: mol_type = other DNA
tcgcctgaccgtggcagcggatgacggcagtgagcggctggtcagcacagcccggacggcggaaaccacataccg

SEQ ID NO: 786761 - DNA, 75 bp, synthetic construct
  source 1..75: mol_type = other DNA
aatgaaatcacgcagaccgtcaataagaaactggaagaccagagtgcagcgatccagcagatacagaaggttcag

SEQ ID NO: 786762 - DNA, 75 bp, synthetic construct
  source 1..75: mol_type = other DNA
gcggcggacaggattgcgatgattaatcctgcgaatggcaacacaaaaccgatgtttgttggtcagggcgatcag

SEQ ID NO: 786763 - DNA, 75 bp, synthetic construct
  source 1..75: mol_type = other DNA
actggtatcccacagccagtatcagtgatttgctggttgtggtgatgaagaaatccacagcaggtatcagtatca

SEQ ID NO: 786764 - DNA, 75 bp, synthetic construct
  source 1..75: mol_type = other DNA
gaagagacggaggccttcctgcgctctgcactggcacgtgccgaagaaaagatcgaagaagatgagcgagaatag

SEQ ID NO: 786765 - DNA, 75 bp, synthetic construct
  source 1..75: mol_type = other DNA
tacaccctgaacaacggtggcgcatttatggcccctgaaccggatgacgataatgacgaaacatgggtactgttc

SEQ ID NO: 786766 - DNA, 75 bp, synthetic construct
  source 1..75: mol_type = other DNA
cgtacggagtgttatgccatgacggtccactattaccgtctgcgggattacgccctgcagcatccggaatgcagt

SEQ ID NO: 786767 - DNA, 75 bp, synthetic construct
  source 1..75: mol_type = other DNA
cggcgaaaaatgcggatatcagtggtagtgtgaatgcgaactcaggaacgctcaacaatgtcacgattaaccaga

SEQ ID NO: 786768 - DNA, 75 bp, synthetic construct
  source 1..75: mol_type = other DNA
ctatgccggagcggggcttcttgcccacgttgtcaccggaaaatacgcggaccatctgccgttataccgccagtc

SEQ ID NO: 786769 - DNA, 75 bp, synthetic construct
  source 1..75: mol_type = other DNA
aatgctatgaacggtaaccgcgctgaaatgagcccggaagccgccggcattgccgcctgtctgatgacgtacagt

SEQ ID NO: 786770 - DNA, 75 bp, synthetic construct
  source 1..75: mol_type = other DNA
gttattgatatgccgagtggcaggggaagcgtcactctggagtttaaggttttccagaaaggcaatcagggggca

SEQ ID NO: 786771 - DNA, 75 bp, synthetic construct
  source 1..75: mol_type = other DNA
cggggtatcctgcaggcggatgcattcagcggttacgatcggctgttcagtgccaaacgtgaaggtggtgcacag

SEQ ID NO: 786772 - DNA, 75 bp, synthetic construct
  source 1..75: mol_type = other DNA
atatcctgagcgtactgccggaatggccttccaaccgagttgacgaactcctgccatggaacgtagtactcacca

SEQ ID NO: 786773 - DNA, 75 bp, synthetic construct
  source 1..75: mol_type = other DNA
cgggcctgaaaaagacgaaaacagggcgcatctggacgtatgtccgggatgatcgcaatgcgggttcgtcatctc

SEQ ID NO: 786774 - DNA, 75 bp, synthetic construct
  source 1..75: mol_type = other DNA
cacggtggtgttccgggcaggtgagcaggagcagacaccgccggaggggtttgaatcctccggctccgagacggt

SEQ ID NO: 786775 - DNA, 75 bp, synthetic construct
  source 1..75: mol_type = other DNA
atacagaaggttcaggttgatacaaataataatctgaactgtagtggtcaagtaatattggccacggttttacag

SEQ ID NO: 786776 - DNA, 75 bp, synthetic construct
  source 1..75: mol_type = other DNA
gtctggagcggcggaagtccggggcatggtggcggcagttacagacctgtctacagcacaatctggatcaaagtg

SEQ ID NO: 786777 - DNA, 75 bp, synthetic construct
  source 1..75: mol_type = other DNA
cccggcgttcttgccgtgtttgcagaacgccgtaaggacagttttggcccgtatgtccggctgatgagtgtcacc

SEQ ID NO: 786778 - DNA, 75 bp, synthetic construct
  source 1..75: mol_type = other DNA
atcagtactaaaagcgcgacggcggaagaagccctgaaactaatcggtgaactgtacgccatcgagcacgatata

SEQ ID NO: 786779 - DNA, 75 bp, synthetic construct
  source 1..75: mol_type = other DNA
gacgtcgctgcatgaatggatggtggagaagaatggcacgttgtcgaaaaaatccagactgggcgaagcgttcag

SEQ ID NO: 786780 - DNA, 75 bp, synthetic construct
  source 1..75: mol_type = other DNA
gtcatctcctccagcggtctggttcgcgtactcgccgaaccggcaggggaaacacccggagcaacaccttcgccc

SEQ ID NO: 786781 - DNA, 75 bp, synthetic construct
  source 1..75: mol_type = other DNA
gtgctgaagcgtatactggtcgtgaagtgcaggatattcccggtgtgctggccgtgtttgctgaacgccgtaagg

SEQ ID NO: 786782 - DNA, 75 bp, synthetic construct
  source 1..75: mol_type = other DNA
gctgcctgtctgatgacgtacagccatcatgcctgtcgtacggagaattatgccatgacggtccattattaccgg

SEQ ID NO: 786783 - DNA, 75 bp, synthetic construct
  source 1..75: mol_type = other DNA
gcatcagcttctggccgcagcattttggcctcattccacagtgggtggccctggagccccgtgttttcggctgga

SEQ ID NO: 786784 - DNA, 75 bp, synthetic construct
  source 1..75: mol_type = other DNA
agtgcaggatactcccggtgtgctggctgtgtttgcagaacgccgtaaggacagttttggcccgtatgtccggct

SEQ ID NO: 786785 - DNA, 75 bp, synthetic construct
  source 1..75: mol_type = other DNA
ctgctggagccgctgtatgacgtcctgcgccagtatgtgctgatgcccggtaaagtccatgccgatgatatcccc

SEQ ID NO: 786786 - DNA, 75 bp, synthetic construct
  source 1..75: mol_type = other DNA
ggttaccgggcgttatacgaatccggcagaataacggaagccgcgtgtatggctcatgtccggagaaaaatccac

SEQ ID NO: 786787 - DNA, 75 bp, synthetic construct
  source 1..75: mol_type = other DNA
cattccacagtgggtgaccctggaaccccgtgtcttcggctggatggaccgtctttgcgaagactactgcggtgg

SEQ ID NO: 786788 - DNA, 75 bp, synthetic construct
  source 1..75: mol_type = other DNA
aagccgccggcattgccgcctgtctgatgacgtacagtcatcatgcctgtcgtacggagtgttatgccatgacgg

SEQ ID NO: 786789 - DNA, 75 bp, synthetic construct
  source 1..75: mol_type = other DNA
tgtcatacggagtgttatgccatgacggtccactattaccggctgcgggattacgccctgcaacatccggaatgc

SEQ ID NO: 786790 - DNA, 75 bp, synthetic construct
  source 1..75: mol_type = other DNA
aaatgagcccggaagccgccggtattgccgcctgtctgatgacgtacagccatcatgcctgtcgtacggaggatt

SEQ ID NO: 786791 - DNA, 75 bp, synthetic construct
  source 1..75: mol_type = other DNA
ccactccttctgtttccgtaaccgctgcatcagggaatgaccagcctcagctggttgccaccatagtccctgacg

SEQ ID NO: 786792 - DNA, 75 bp, synthetic construct
  source 1..75: mol_type = other DNA
gtcaccctggagccccgtgtcttcggctggatggaccgtctgtatgaagactactgcggtggtatctggaatctg

SEQ ID NO: 786793 - DNA, 75 bp, synthetic construct
  source 1..75: mol_type = other DNA
ttgaccactacacccgaaccggatgacgatgatgacgaaacatgggtactgttcaatgccatgaacggtaaccgc

SEQ ID NO: 786794 - DNA, 75 bp, synthetic construct
  source 1..75: mol_type = other DNA
ccacgccttctgtttccgtaaccactgcaccagggaataaccagtctcaactggttgccactcccgtccctgatg

SEQ ID NO: 786795 - DNA, 75 bp, synthetic construct
  source 1..75: mol_type = other DNA
gttgcgggattacgccctgcagcatccggaatgcagcgccattatgcgcatcatgactgaatggagagaagcaca

SEQ ID NO: 786796 - DNA, 75 bp, synthetic construct
  source 1..75: mol_type = other DNA
agccagaaagctacctccgctatgtccttgacgtcatagccgactggccgataaaccgggtcggcgaactactcc

SEQ ID NO: 786797 - DNA, 75 bp, synthetic construct
  source 1..75: mol_type = other DNA
cattccacagtgggtaaccctggaaccccgtgtcttcggctggatggaccgtctttgcgaaaactactgcggtgg

SEQ ID NO: 786798 - DNA, 75 bp, synthetic construct
  source 1..75: mol_type = other DNA
gcttctggccgcagcattttggcctcattccacagtgggtgaccctggatccccgtgtcttcggctggatggacc

SEQ ID NO: 786799 - DNA, 75 bp, synthetic construct
  source 1..75: mol_type = other DNA
gcttctggccgcagcattttggcctcattccacagtgggttaccctggaaccccgtgtcttcggctggatggacc

SEQ ID NO: 786800 - DNA, 75 bp, synthetic construct
  source 1..75: mol_type = other DNA
tatgccatgacggtccattattaccggttgcgggattacgccctgcagcatccggaatgcagcgccattatgcgc

SEQ ID NO: 786801 - DNA, 75 bp, synthetic construct
  source 1..75: mol_type = other DNA
cattccacagtgggtcaccctggatccccgtgtcttcggctggatggaccgtctatgcgaaaactactgcggtgg

SEQ ID NO: 786802 - DNA, 75 bp, synthetic construct
  source 1..75: mol_type = other DNA
cattccacagtgggttaccctggaaccccgtgtcttcggctggatggaccgtctgtgcgaaaactactgcggtgg

SEQ ID NO: 786803 - DNA, 75 bp, synthetic construct
  source 1..75: mol_type = other DNA
acggacgcctttatattgcgggtatcggagccggtattgggaatacgccagcaggtatgcagagtcaggtgcttc

SEQ ID NO: 786804 - DNA, 75 bp, synthetic construct
  source 1..75: mol_type = other DNA
gtaagctgcaggtgctgaagaacggacaggaaatctttcagcaacccgcgacggatgtcagcagggtattttcat

SEQ ID NO: 786805 - DNA, 75 bp, synthetic construct
  source 1..75: mol_type = other DNA
tcacagtatctggcctcggtggtggtggataacctgccgccgcgcccgttcagtatccggatgcgcaggatgacg

SEQ ID NO: 786806 - DNA, 75 bp, synthetic construct
  source 1..75: mol_type = other DNA
ttgtaccagtcgggggcaggcacaccgagccgggctgtggctgattaaaacggaactgctggaaacgcagaccgt

SEQ ID NO: 786807 - DNA, 75 bp, synthetic construct
  source 1..75: mol_type = other DNA
tttaagattttccagaaaggcaatcagggggcaggaaatatcaccgaatgtacggtgattgtgaccaaaaaagca

SEQ ID NO: 786808 - DNA, 75 bp, synthetic construct
  source 1..75: mol_type = other DNA
acgctgatttacagtggtgttattgatatgccggctggtcatggtcacatgacactggagttttcggtgtcagca

SEQ ID NO: 786809 - DNA, 75 bp, synthetic construct
  source 1..75: mol_type = other DNA
aagcggattgcggatatcaggcaggttgaaaccacagcccgctatcttggcacggcgctgtactggatagccgcc

SEQ ID NO: 786810 - DNA, 75 bp, synthetic construct
  source 1..75: mol_type = other DNA
gggaatacaccctgacggtcagggcgattaacagctatggccagcagggcgaacctgccaccaccacgttccgga

SEQ ID NO: 786811 - DNA, 75 bp, synthetic construct
  source 1..75: mol_type = other DNA
caccgtttcagtggtctgccactgggggaatacaccctgacggtgcgggcgataaacagttatggccagcagggg

SEQ ID NO: 786812 - DNA, 75 bp, synthetic construct
  source 1..75: mol_type = other DNA
tgttgttccgtggtggtaagcatgagaatttcaacagtaataaccaacagtcatactggtattcaacctgccggt

SEQ ID NO: 786813 - DNA, 75 bp, synthetic construct
  source 1..75: mol_type = other DNA
aaaaagtgtgctgctgaacagtacgccagtgctggacagtgaggggaataccaatatctccggtgtcacggtggt

SEQ ID NO: 786814 - DNA, 75 bp, synthetic construct
  source 1..75: mol_type = other DNA
agggaccattaccgtcaggatttatgacgatcagccgtttgaccgacagattgttattccggcggtggcattcag

SEQ ID NO: 786815 - DNA, 75 bp, synthetic construct
  source 1..75: mol_type = other DNA
gatgtttgttggtcagggcgatcagatattcatgaacgaagtgttcctgaaacgcctgacggctcccaccattac

SEQ ID NO: 786816 - DNA, 75 bp, synthetic construct
  source 1..75: mol_type = other DNA
gataaatggaatgccatgtggggcgtcaaaattgagcagaccgaagacggcaggcattatgtcgcggggcttggc

SEQ ID NO: 786817 - DNA, 75 bp, synthetic construct
  source 1..75: mol_type = other DNA
actcagaaccagctgacttttcagaaaatgattttgctgaaagacaacatgccgtttgatcgcaagcttatgctt

SEQ ID NO: 786818 - DNA, 75 bp, synthetic construct
  source 1..75: mol_type = other DNA
aacacccctgacgggatgcagagccagatactgctggcagcggaccgtgtggcattcattaatccggagaatggt

SEQ ID NO: 786819 - DNA, 75 bp, synthetic construct
  source 1..75: mol_type = other DNA
ttgccatcacggcagtgcagcatgtgccggagaaagaagccatcgtggataacggggcctgctttgagccgcagt

SEQ ID NO: 786820 - DNA, 75 bp, synthetic construct
  source 1..75: mol_type = other DNA
ccggaaaaacgcacgtacagcggcatctgggacggcagtctgaaaccggcatacagcaacaacccggcctggtgc

SEQ ID NO: 786821 - DNA, 75 bp, synthetic construct
  source 1..75: mol_type = other DNA
gctgacggccagtatctggcacaggcgaaatgggacacgccgcgggtggtgaagggcgtgcgcttcagtctgcgc

SEQ ID NO: 786822 - DNA, 75 bp, synthetic construct
  source 1..75: mol_type = other DNA
caatcagggcgcaggtaacatcacagactgtacggtgattgtgaccaaaaaagctgcttccggtatcagtatccg

SEQ ID NO: 786823 - DNA, 75 bp, synthetic construct
  source 1..75: mol_type = other DNA
tgatttttatgtcgttgttttctggtctaagttatgccgggatggctgactataatacatatttaagtaatgttc

SEQ ID NO: 786824 - DNA, 75 bp, synthetic construct
  source 1..75: mol_type = other DNA
gaaaaacggtgctgaaatttataaccgtaccgcgatggataatacgctgctttacagtggtgttattgatatgcc

SEQ ID NO: 786825 - DNA, 75 bp, synthetic construct
  source 1..75: mol_type = other DNA
ggtaaggctttcccccgtgactcccgtgcaccgtagcgttggccatcaggaaccattaccgtcagggtttatgac

SEQ ID NO: 786826 - DNA, 75 bp, synthetic construct
  source 1..75: mol_type = other DNA
gctcaggagctgtggacgcagattgataacggtcagcttgcgcctgacctggctgaaatcaggacgtccattacg

SEQ ID NO: 786827 - DNA, 75 bp, synthetic construct
  source 1..75: mol_type = other DNA
atgaacgaagtgttcctgaaatacctgacggctcccaccattaccagcggcggtaatcctccggcattttccctg

SEQ ID NO: 786828 - DNA, 75 bp, synthetic construct
  source 1..75: mol_type = other DNA
agggtattccgtatgtggccgggattggcgcggggatcgaggatgtcgatggtcagacgctgagtaacattctgc

SEQ ID NO: 786829 - DNA, 75 bp, synthetic construct
  source 1..75: mol_type = other DNA
ccgctgacggacacggacggtaatcccgtgatacatggtgtgacagcggtctggcgcgccggggagcaggagcag

SEQ ID NO: 786830 - DNA, 75 bp, synthetic construct
  source 1..75: mol_type = other DNA
gaagggtgtgcgcttcagtctgcgtctgaccagcggaagcggagaagacagccgtctggtgagcaccgccatcac

SEQ ID NO: 786831 - DNA, 75 bp, synthetic construct
  source 1..75: mol_type = other DNA
atgactatgcggggatcagcatcggcgggcgcgtgctggcggtgaacagccagacgcggacactgacgctcgacc

SEQ ID NO: 786832 - DNA, 75 bp, synthetic construct
  source 1..75: mol_type = other DNA
ccctatgttgccggtattggagcggggattgaggatactgatggccagcccctgagcaacatactgctgctggct

SEQ ID NO: 786833 - DNA, 75 bp, synthetic construct
  source 1..75: mol_type = other DNA
acctgaacagcatgtgggctgtgaagctgcagcagatgcaggacggacgcctttatatcgcgggtattggtgccg

SEQ ID NO: 786834 - DNA, 75 bp, synthetic construct
  source 1..75: mol_type = other DNA
ggacggttacagtcaccatcagcgatgatcataactttgaccgtcaaatcattattccgcccattatctttaacg

SEQ ID NO: 786835 - DNA, 75 bp, synthetic construct
  source 1..75: mol_type = other DNA
cgcggtcgcatcatccaggtgccgtcaaactatgacccggaaaaacgcacgtacagtggtatctgggacggcagc

SEQ ID NO: 786836 - DNA, 75 bp, synthetic construct
  source 1..75: mol_type = other DNA
cagtgtgaacaccgttggcaaatcggcattcgtggaggctgttggccagccgagtgatgatgcatccggctatct

SEQ ID NO: 786837 - DNA, 75 bp, synthetic construct
  source 1..75: mol_type = other DNA
gggggctgaagttgccgacgctgcgtcagcgcctgttccgctgtgtgagtatccgtgagaacgatgacggcacgt

SEQ ID NO: 786838 - DNA, 75 bp, synthetic construct
  source 1..75: mol_type = other DNA
ttcaacagcaacaaccaacagtcatactggtattcaacctgtaagctgcaggtactgaagaacggacaggaaatc

SEQ ID NO: 786839 - DNA, 75 bp, synthetic construct
  source 1..75: mol_type = other DNA
tccggcggtggctttcagcggtgccagacatgaacgggagaatagcgatacttattcgtcatgccgcctgatagt

SEQ ID NO: 786840 - DNA, 75 bp, synthetic construct
  source 1..75: mol_type = other DNA
ctggtgaccaccgccatcaccgcagacacggagcaccgtttcagcggcctgccgctcggggaatacaccctgacg

SEQ ID NO: 786841 - DNA, 75 bp, synthetic construct
  source 1..75: mol_type = other DNA
gcaatcagggcgcaggtaacatcacagactgtacggtgattgtgaccaaaaaagctgcttccggtatcagtatcc

SEQ ID NO: 786842 - DNA, 75 bp, synthetic construct
  source 1..75: mol_type = other DNA
gcgcctgacagcccccaccattaccagcggtggcagtcctccggtattttccctgacatcagacggaaagctgac

SEQ ID NO: 786843 - DNA, 75 bp, synthetic construct
  source 1..75: mol_type = other DNA
gcagaagtcaccgcagacagcggggaataccaggtgctggcgcgctgggacacgccgaaggtggtgaagggggtg

SEQ ID NO: 786844 - DNA, 75 bp, synthetic construct
  source 1..75: mol_type = other DNA
taaaacagtgggcaaagctttcccccgggactcccgtgcaccggagcggtggccatcaggaaccattaccgtcag

SEQ ID NO: 786845 - DNA, 75 bp, synthetic construct
  source 1..75: mol_type = other DNA
caggggaatcagctgttcatgaacgatgtgttcctgaagcggctgtttgcggtgagtatcacctcgtccggcaat

SEQ ID NO: 786846 - DNA, 75 bp, synthetic construct
  source 1..75: mol_type = other DNA
tctatcacgcctatctggcttatatgagggcgcacgggttcagtaagcccgtaacactgacgcgctttggtgcgg

SEQ ID NO: 786847 - DNA, 75 bp, synthetic construct
  source 1..75: mol_type = other DNA
gcagatcgcgtactggcggcattattcatggtgctggcgaaccggtacgactggcagttattcattgaggtaaca

SEQ ID NO: 786848 - DNA, 75 bp, synthetic construct
  source 1..75: mol_type = other DNA
aaaactgtacgattaagggcatgctggaggcgactcaggtcagaggtgacttcgttaaagctgtatccaaatcat

SEQ ID NO: 786849 - DNA, 75 bp, synthetic construct
  source 1..75: mol_type = other DNA
agtgcggaaaaacggtgctgaaatttataaccgtaccgcgctggataatacgctgatttacagtggcgttattga

SEQ ID NO: 786850 - DNA, 75 bp, synthetic construct
  source 1..75: mol_type = other DNA
gaattttctgtatcggcatggctggtaaatggctggtatcccacagcaagtatcagcgatttgctggttgtggtg

SEQ ID NO: 786851 - DNA, 75 bp, synthetic construct
  source 1..75: mol_type = other DNA
aacctggtggggaaatctgcgtttgtggaagtcagcgggcagcccagcaatgatggtgaagggtatctggaattt

SEQ ID NO: 786852 - DNA, 75 bp, synthetic construct
  source 1..75: mol_type = other DNA
agcatcgtttcagtggtctgccgctcggggaatacaccctgacagtcagggcgattaacagttatggccagcagg

SEQ ID NO: 786853 - DNA, 75 bp, synthetic construct
  source 1..75: mol_type = other DNA
ggaggaaggcaagctgagccagtttctggttgccgctaaccgtatcgcgtttattgacccggcaaacgggaatga

SEQ ID NO: 786854 - DNA, 75 bp, synthetic construct
  source 1..75: mol_type = other DNA
aaatccacgcagatgatgagcgtgattgatgcgattggtgagggaccgatagaaggtccggtgaagggactgcag

SEQ ID NO: 786855 - DNA, 75 bp, synthetic construct
  source 1..75: mol_type = other DNA
tacagcgcgtgcagaaggacacaaatgatgaccttgctgcactttacatgctgaaggtacagaaaacaaaaaatg

SEQ ID NO: 786856 - DNA, 75 bp, synthetic construct
  source 1..75: mol_type = other DNA
gagatggcggagatgaagaccaccatcaccgaaacccgcaatgaaatcacacagacggtcagtaaaacgctggaa

SEQ ID NO: 786857 - DNA, 75 bp, synthetic construct
  source 1..75: mol_type = other DNA
ccagagagtggataacgtcagcagcgaactcacgcagacggtcagtcagagtaatgaggagaatgcacgccagat

SEQ ID NO: 786858 - DNA, 75 bp, synthetic construct
  source 1..75: mol_type = other DNA
ctcaccccatcacgttcacaaggtctggaagcgatgattcgcgcaattcgcgccaaagccgctgcacttagctaa

SEQ ID NO: 786859 - DNA, 75 bp, synthetic construct
  source 1..75: mol_type = other DNA
aacgtgaatgcgaactccgggacgctcaacaacgtcacgattaacgagaactgtcgggttctgggaaaactgtcc

SEQ ID NO: 786860 - DNA, 75 bp, synthetic construct
  source 1..75: mol_type = other DNA
gataatcccgcggtgcgtacgccgctggagtggcgtcaggcgatatacgaagaaaaacttgcgcaggcgcgcgag

SEQ ID NO: 786861 - DNA, 75 bp, synthetic construct
  source 1..75: mol_type = other DNA
cggtggaaggtccggtgaagggactgcagagtattctggtgaacaaaaccccgctgacggacacggacggtaatc

SEQ ID NO: 786862 - DNA, 75 bp, synthetic construct
  source 1..75: mol_type = other DNA
cagccagtggagcgtctccggcccgcacatcaggccggggaaggatttctggttttatgtgcgcagcgtcaacct

SEQ ID NO: 786863 - DNA, 75 bp, synthetic construct
  source 1..75: mol_type = other DNA
ctggcgtgccggggagcaggagcagacaccgcctgaaggctttgagtcctccggggcggaaaccgcactgggcgt

SEQ ID NO: 786864 - DNA, 75 bp, synthetic construct
  source 1..75: mol_type = other DNA
ggggtggcttttccggtggatggtagttaccttgcgaacggtacacgaacgctgacggtgtatgacgatcacagc

SEQ ID NO: 786865 - DNA, 75 bp, synthetic construct
  source 1..75: mol_type = other DNA
gtgtggcactggtgctgtcgggctgtgccacctctaaagaagagctgctgcctgccggagagcagacgatgctgg

SEQ ID NO: 786866 - DNA, 75 bp, synthetic construct
  source 1..75: mol_type = other DNA
gttccgctgtgtttccatccgggaaaacacggacggcacctttgccatcacggcggtgcagcacgtaccggaaaa

SEQ ID NO: 786867 - DNA, 75 bp, synthetic construct
  source 1..75: mol_type = other DNA
ggtgtgcgcttcagtctgcgcctgaccagtggaagcggtgaaaacagccgcctggtgaccaccgccatcaccgca

SEQ ID NO: 786868 - DNA, 75 bp, synthetic construct
  source 1..75: mol_type = other DNA
ggaactggtggaagacccggacgccatcctgcgctacgggcgcaacctgctgaagatggacgcgttcggctgtac

SEQ ID NO: 786869 - DNA, 75 bp, synthetic construct
  source 1..75: mol_type = other DNA
cgccgaaggcgctgaaaaaagcgctggaacatgaaaaaacgccggaactggcggcgaagctggcggcagaagcca

SEQ ID NO: 786870 - DNA, 75 bp, synthetic construct
  source 1..75: mol_type = other DNA
tgtggcgcaggggaatcagttgttcatgaacgatgtgttcctgaagcggctgtttgcggtgagtatcacgtcatc

SEQ ID NO: 786871 - DNA, 75 bp, synthetic construct
  source 1..75: mol_type = other DNA
tcaggtgctgctggcggcagacaggattgcgatggttaatcctgcgaatggtaatacaacacccttgtttgtggc

SEQ ID NO: 786872 - DNA, 75 bp, synthetic construct
  source 1..75: mol_type = other DNA
tgccgggaccctgaccggtggacgcatcctgtccatcgatgccgccagccgcacactgacgctggaccgtgaggt

SEQ ID NO: 786873 - DNA, 75 bp, synthetic construct
  source 1..75: mol_type = other DNA
gaaaaacgcatcacggacacggcacaggtggaaacctctgcccgttatctgggtaccggcagccagtggagtgtc

SEQ ID NO: 786874 - DNA, 75 bp, synthetic construct
  source 1..75: mol_type = other DNA
tgaacaccgttggcaaatcggcatttgtggaggctgttggccagccgagtgatgatgcatccggctatctggatt

SEQ ID NO: 786875 - DNA, 75 bp, synthetic construct
  source 1..75: mol_type = other DNA
cagaacggctggcagacctccacggaactggtggaagaccctgaagccatactgcgctacgggcgcaacctgctg

SEQ ID NO: 786876 - DNA, 75 bp, synthetic construct
  source 1..75: mol_type = other DNA
catgtgcaggaagctgcaaacgctcttatcagtgctggtcgatatgacgagaacgaagcaactgtaggtgcagcc

SEQ ID NO: 786877 - DNA, 75 bp, synthetic construct
  source 1..75: mol_type = other DNA
acagttatggccagcagggggaaccggccaccaccacgttcaggattaatgcacctgcggtacccgccacgattg

SEQ ID NO: 786878 - DNA, 75 bp, synthetic construct
  source 1..75: mol_type = other DNA
tcgctgaacagcgtcatcccgccggctgtgcagcacctgacggtggaggtgagcgcggctgacggtcagtatctg

SEQ ID NO: 786879 - DNA, 75 bp, synthetic construct
  source 1..75: mol_type = other DNA
cacagcccgctatcttggcacggcgctgtactggatagctgccagtatcaatatcaagccgggccatgattatta

SEQ ID NO: 786880 - DNA, 75 bp, synthetic construct
  source 1..75: mol_type = other DNA
ggaatgccatgtggggtgtcaaaattgagcagaccgaagacggcaaacattatgtcgcggggcttggcctcagca

SEQ ID NO: 786881 - DNA, 75 bp, synthetic construct
  source 1..75: mol_type = other DNA
gggcaatcagtgcgaatacagggacgctgaataatgtcaccattaatgaaaactgtgtcatcagagggaaactgt

SEQ ID NO: 786882 - DNA, 75 bp, synthetic construct
  source 1..75: mol_type = other DNA
agcgtcatcccgccggctgtgcagcacctgacggtggaggtgagcgcggctgacggtcagtatctggcacaggcg

SEQ ID NO: 786883 - DNA, 75 bp, synthetic construct
  source 1..75: mol_type = other DNA
cagagtcaggtgctgctggcggcggacaggattgcgatggttaatcctgcgaatggcaacacaaaaccgatgttt

SEQ ID NO: 786884 - DNA, 75 bp, synthetic construct
  source 1..75: mol_type = other DNA
gaaggaccggcacacggcggtggaggtgaattacactgacccgcagaacggctggcagacttccacggaactggt

SEQ ID NO: 786885 - DNA, 75 bp, synthetic construct
  source 1..75: mol_type = other DNA
ggtaaggctttcccgcgggactcccgggcaccggagcggtggccatcagggaccattaccgtcaggatttatgac

SEQ ID NO: 786886 - DNA, 75 bp, synthetic construct
  source 1..75: mol_type = other DNA
aacggggccagctttgagccgcagtcaggcaccctgaacagcgttattccaccggcagtgcagcacctgacggtg

SEQ ID NO: 786887 - DNA, 75 bp, synthetic construct
  source 1..75: mol_type = other DNA
acccgcaccctgacgctggaccgtgaggttaccctgccggagacaggtacatcggcggtgaacctgattaacggc

SEQ ID NO: 786888 - DNA, 75 bp, synthetic construct
  source 1..75: mol_type = other DNA
gagccgcagtcaggttccctgaacagcgtcatcccaccggcagtacagcacctgacggtggaggtgagtgcagct

SEQ ID NO: 786889 - DNA, 75 bp, synthetic construct
  source 1..75: mol_type = other DNA
tgagttctggttttcggaggcaaaaatcgcagacacatctcaggtggaaacctctgcccgttatctggggaccgg

SEQ ID NO: 786890 - DNA, 75 bp, synthetic construct
  source 1..75: mol_type = other DNA
ttatttgtggcgcaggggaatcagctgttcatgaacgacgtgttcctgaagcgtctgtttgcggcgagtatcacg

SEQ ID NO: 786891 - DNA, 75 bp, synthetic construct
  source 1..75: mol_type = other DNA
atacagaaggttcaggttgatacaaataataacctgaacagcatgtgggcagtgaagctgcagcagatgcaggac

SEQ ID NO: 786892 - DNA, 75 bp, synthetic construct
  source 1..75: mol_type = other DNA
ttgtggaagccagtggccgggccagcaatgatgcagaagggtatctggggctgtttcgggaaaaaataggaaaac

SEQ ID NO: 786893 - DNA, 75 bp, synthetic construct
  source 1..75: mol_type = other DNA
ctcatcggtgatagatatgccggcagggcggggtcatgtcaccctgacgtttaatgtgtcgtcggccggtgcgaa

SEQ ID NO: 786894 - DNA, 75 bp, synthetic construct
  source 1..75: mol_type = other DNA
tttttctgccaccacgatgctgttttcactgggggccagcatgatactgggcggtgtggcccagatgctggcccc

SEQ ID NO: 786895 - DNA, 75 bp, synthetic construct
  source 1..75: mol_type = other DNA
accttgctgcactttacatgctgaaggtacagaaaacaaaaaatgccggtgaagacatggcaccggaggcggtgt

SEQ ID NO: 786896 - DNA, 75 bp, synthetic construct
  source 1..75: mol_type = other DNA
acgcatcagaggtttaccggatttataccgggataaaaagcagtaaaggtatccggcttccggccacgaagaaat

SEQ ID NO: 786897 - DNA, 75 bp, synthetic construct
  source 1..75: mol_type = other DNA
tgatagtgcggaaaaacggtgctgaaatttataaccgtaccgcgctggataatacgctgatttataccggtgtga

SEQ ID NO: 786898 - DNA, 75 bp, synthetic construct
  source 1..75: mol_type = other DNA
tggggagaaccttttcattatggacgtgtataacgcccttcaaaatcattcaagcgaagtaaaaacagagcatgt

SEQ ID NO: 786899 - DNA, 75 bp, synthetic construct
  source 1..75: mol_type = other DNA
gtgaaatcacgcctgccatcctccggcaccacgctgataagcctggttgacgggcagggtaatccggtcagcgtg

SEQ ID NO: 786900 - DNA, 75 bp, synthetic construct
  source 1..75: mol_type = other DNA
tgtgtcgtctgccggcgcgaacaactggacaccgacgacgtacatcagtgatttactggttgtggtgatgaaaaa

SEQ ID NO: 786901 - DNA, 75 bp, synthetic construct
  source 1..75: mol_type = other DNA
gtcaacctggtggggaaatctgcttttgtggaagccagcgggcagcccagcaatgatggtgaagggtatctggaa

SEQ ID NO: 786902 - DNA, 75 bp, synthetic construct
  source 1..75: mol_type = other DNA
ttatctggcaatagcatttaaaaaatggggcgtctcctgggaggccgttggtgcatacaatgcaggattcaggaa

SEQ ID NO: 786903 - DNA, 75 bp, synthetic construct
  source 1..75: mol_type = other DNA
gaccgtatcgcgatgataaatccggagagcggcaacagcactccgttatttgtggcgcaggggaatcagctgttc

SEQ ID NO: 786904 - DNA, 75 bp, synthetic construct
  source 1..75: mol_type = other DNA
cgtcagggtttatgacgatcagccgtttaaccggcagattgttattccggcggtggctttcagcggtgccagaca

SEQ ID NO: 786905 - DNA, 75 bp, synthetic construct
  source 1..75: mol_type = other DNA
acgcggattaccgatatcaggcaggttgaaaccacagcccgctatcttggcacggcgctgtactggatagccgcc

SEQ ID NO: 786906 - DNA, 75 bp, synthetic construct
  source 1..75: mol_type = other DNA
ccggtgctggacagtgaggagaataccaatatctccggcgtcacggtggtgttccggtcaggtgagcaggagcag

SEQ ID NO: 786907 - DNA, 75 bp, synthetic construct
  source 1..75: mol_type = other DNA
ccggggagcggaaataacccgggaggcacgcgatacacgggttatggttttgaagttcgcaaaaacggcgtatta

SEQ ID NO: 786908 - DNA, 75 bp, synthetic construct
  source 1..75: mol_type = other DNA
aacaaccaacagtcatactggtattcaacctgtaagctgcaggtgttgaagaacggacaggaaatctttcagcaa

SEQ ID NO: 786909 - DNA, 75 bp, synthetic construct
  source 1..75: mol_type = other DNA
agagagcatactgatatttactcctcatgccgtctgatagtgcggaaaacggtagctgtaaattttataaccgta

SEQ ID NO: 786910 - DNA, 75 bp, synthetic construct
  source 1..75: mol_type = other DNA
tgaaaacttcaacagcaacaaccaacagtcatactggtattcaacctgtaagctgcaggtgctgaagaacggaca

SEQ ID NO: 786911 - DNA, 75 bp, synthetic construct
  source 1..75: mol_type = other DNA
gccaaccagattgaaggcgatattgtcaaaacagtgggtaaggctttcccgcgggactcccgggcaccggagcgg

SEQ ID NO: 786912 - DNA, 75 bp, synthetic construct
  source 1..75: mol_type = other DNA
cgctgagcgcggggtatcttcatgcctcgacgaacgtccccggcagtgatgatctgaacgggattaacgtgaaat

SEQ ID NO: 786913 - DNA, 75 bp, synthetic construct
  source 1..75: mol_type = other DNA
acattgttctgtccctgagtgccgcggagggccggtgtacggcatcggcggggctgaccgtttcgcggttatccg

SEQ ID NO: 786914 - DNA, 75 bp, synthetic construct
  source 1..75: mol_type = other DNA
gagaccgttttctcttccctggcacagggcgattaccgggtcagcctcagtgccacagagggcaccggacagtac

SEQ ID NO: 786915 - DNA, 75 bp, synthetic construct
  source 1..75: mol_type = other DNA
ggtgctgaaatttataaccgtaccgcgctggataatacgctgatttacagtggtgttattgatatgccagctggt

SEQ ID NO: 786916 - DNA, 75 bp, synthetic construct
  source 1..75: mol_type = other DNA
ggtgacattattgaaatctgtgataacgactatgccgggaccatgaccggcggacgtgtcctgtccatcgatgcc

SEQ ID NO: 786917 - DNA, 75 bp, synthetic construct
  source 1..75: mol_type = other DNA
cgggacgctcaataatgtcacgattaaccagaactgtcggattctgggaaaactgtcagctaaccagattgaagg

SEQ ID NO: 786918 - DNA, 75 bp, synthetic construct
  source 1..75: mol_type = other DNA
agttcgcaaaaacggtgtattaatcgcatccagagaaactaaaggggccattcccggtagttacagtgcagttat

SEQ ID NO: 786919 - DNA, 75 bp, synthetic construct
  source 1..75: mol_type = other DNA
gtgattgacgccattggtgaagggccgattgaaggtccggtgaaggggctgcagagtattctggtgaacaaaacc

SEQ ID NO: 786920 - DNA, 75 bp, synthetic construct
  source 1..75: mol_type = other DNA
gcaatgaaatcacacagaccgtcaataagaaactggaagaccagagtgcagcgatccagcagatacagaaggttc

SEQ ID NO: 786921 - DNA, 75 bp, synthetic construct
  source 1..75: mol_type = other DNA
cggctgacggcgaaaaatgccgatatcagcggtaacgtgaatgcgaactccgggacgctcaaaaacgtcacgatt

SEQ ID NO: 786922 - DNA, 75 bp, synthetic construct
  source 1..75: mol_type = other DNA
cactggagttttcggtgtcagcatggctggtaaataactggtatcccacagcaagtatcagcgatttgctggttg

SEQ ID NO: 786923 - DNA, 75 bp, synthetic construct
  source 1..75: mol_type = other DNA
cgatctcgttaaaacagtgggcaaagctttcccccgggactcccgtgcaccggagcggtggccatcagggactat

SEQ ID NO: 786924 - DNA, 75 bp, synthetic construct
  source 1..75: mol_type = other DNA
cggctgacggcgaaaaatgccgatatcagcggtaacgtgaatgcgaactccgggacgctcaacaaagtcacgatt

SEQ ID NO: 786925 - DNA, 75 bp, synthetic construct
  source 1..75: mol_type = other DNA
tccggcggtggcattcagcggcgctaaacatgagcgggagaataacgatatttattcgtcatgccgcctgatagt

SEQ ID NO: 786926 - DNA, 75 bp, synthetic construct
  source 1..75: mol_type = other DNA
gaacagcgatgtggtggtggatgataacggcgtggggttccgctacagcttcagtgccctgaaggaccggcacac

SEQ ID NO: 786927 - DNA, 75 bp, synthetic construct
  source 1..75: mol_type = other DNA
tggagttttcggtgtcagcatggctggtaaataactggtatcccacagcaagtatcagcgatctgctggttgtgg

SEQ ID NO: 786928 - DNA, 75 bp, synthetic construct
  source 1..75: mol_type = other DNA
agaccaccatcaccgaaacccgcaatgaaatcacacagacggtcagtaaaacgctggaagaccagagcgccacca

SEQ ID NO: 786929 - DNA, 75 bp, synthetic construct
  source 1..75: mol_type = other DNA
ggatgacaaagggagtgaaatcacctcgaccacggataaaaagctggaagaccagagcgccaccatacagcagat

SEQ ID NO: 786930 - DNA, 75 bp, synthetic construct
  source 1..75: mol_type = other DNA
gatgttgcggaagtgacccgaaaaatcggggaggcggaaaacagcctcacgcagctggttgcgaaaaagaatgag

SEQ ID NO: 786931 - DNA, 75 bp, synthetic construct
  source 1..75: mol_type = other DNA
ggacgcctttatattgcgggtatcggtgccggtattgagaacacccctgacggcatgcagagtcaggtgctgctg

SEQ ID NO: 786932 - DNA, 75 bp, synthetic construct
  source 1..75: mol_type = other DNA
acataccgcttcaggcaactggcgctggggcgttacacgctgacggtccgggcggtaaatgcgtggggacagcag

SEQ ID NO: 786933 - DNA, 75 bp, synthetic construct
  source 1..75: mol_type = other DNA
agggtttatgacgatcagccgtttgatcggcaaattgttattcccgcggtggcgtttcgcggtgctaaacatgag

SEQ ID NO: 786934 - DNA, 75 bp, synthetic construct
  source 1..75: mol_type = other DNA
tggaggacacgcaggccattgcccgttacggtcgtaacgtcacgaagatggatgcttttggctgtaccagccggg

SEQ ID NO: 786935 - DNA, 75 bp, synthetic construct
  source 1..75: mol_type = other DNA
tgatagtgcggaaaaacggtgctgaaatttataaccgtaccgcgctggataatacgctgatttacagtggcgtta

SEQ ID NO: 786936 - DNA, 75 bp, synthetic construct
  source 1..75: mol_type = other DNA
tggcgctaagcatgagagagagcatactgatatttactcctcatgccgtctgatagtgcggaaaaacggtgctga

SEQ ID NO: 786937 - DNA, 75 bp, synthetic construct
  source 1..75: mol_type = other DNA
cctgaccaggctgatcagtattacggatatgctcgtcacggtatcattacgtatgaccgtaaactgacagatgaa

SEQ ID NO: 786938 - DNA, 75 bp, synthetic construct
  source 1..75: mol_type = other DNA
accagagagccaagatgtaggtaaataccactatgcacttcaatctcgcccggctggtgttggtgctgtgccgga

SEQ ID NO: 786939 - DNA, 75 bp, synthetic construct
  source 1..75: mol_type = other DNA
ggtgacatcattgaaatctgtgataacgactatgccgggaccatgaccggcggacgtgtcctgtccattgatgcc

SEQ ID NO: 786940 - DNA, 75 bp, synthetic construct
  source 1..75: mol_type = other DNA
ttgagctgacaccgggctattttcagataacagcggtcccgcgtcttgcggtgtatgacccgacggtacagtttg

SEQ ID NO: 786941 - DNA, 75 bp, synthetic construct
  source 1..75: mol_type = other DNA
ccggtgctggacagtgaaggtaataccaacatctccggtgtcacggtggtgttccgggccggtgagcaggagcag

SEQ ID NO: 786942 - DNA, 75 bp, synthetic construct
  source 1..75: mol_type = other DNA
gcctgacggcacccaccattaccagcggtggcagtcctccggtattttccctgacatcagacggaaagctgaccg

SEQ ID NO: 786943 - DNA, 75 bp, synthetic construct
  source 1..75: mol_type = other DNA
gcatgaaaactttaacagcaacaaccaacagtcatactggtactcaacctgtaagctgcaggtgctgaagaacgg

SEQ ID NO: 786944 - DNA, 75 bp, synthetic construct
  source 1..75: mol_type = other DNA
ttggcaaatcggcattcgtggaggctgtcggtcaggcgagcgatgatgcttccggctatctggattttttcaaag

SEQ ID NO: 786945 - DNA, 75 bp, synthetic construct
  source 1..75: mol_type = other DNA
ctgtcatcgatatgcctgccggacacgggcatgtcaccctgactttcaatgtttcttcatatggtgctaataact

SEQ ID NO: 786946 - DNA, 75 bp, synthetic construct
  source 1..75: mol_type = other DNA
ggagcgaataactggacaccaacaaccagtatcagcgatctgctggttgtggtgatgaagaaatccacagcaggt

SEQ ID NO: 786947 - DNA, 75 bp, synthetic construct
  source 1..75: mol_type = other DNA
ggaagacccggaagccatactgcgctacgggcgcaacctgctgaagatggatgcgttcggttgcaccagtcgcgg

SEQ ID NO: 786948 - DNA, 75 bp, synthetic construct
  source 1..75: mol_type = other DNA
acggaaatcagcgccgacggctggcagtatcaggtgctggcaaagtggggcacgccgaaagtggtgaagggggtg

SEQ ID NO: 786949 - DNA, 75 bp, synthetic construct
  source 1..75: mol_type = other DNA
ggattcccgtgcaccggagcggtggccatcagggaccattaccgtcaggctttatgacgatcagccgtttgaccg

SEQ ID NO: 786950 - DNA, 75 bp, synthetic construct
  source 1..75: mol_type = other DNA
cggtgaacctgattaacggcagcggtaagccggtgagtgtggacatcaccgcacaccccgcgccggaccggatac

SEQ ID NO: 786951 - DNA, 75 bp, synthetic construct
  source 1..75: mol_type = other DNA
atcagtggcagtgtgaatgcgaacgccgggacgctcaacaatgtcacggtaaatgaaaactgtacgattaagggc

SEQ ID NO: 786952 - DNA, 75 bp, synthetic construct
  source 1..75: mol_type = other DNA
agcaatatactgctgcaggcggaccgtatcgcgatgattaacccggagaacggcaacaccacgccgctgtttgtg

SEQ ID NO: 786953 - DNA, 75 bp, synthetic construct
  source 1..75: mol_type = other DNA
ccaccatacagcagatacagcgcgtgcagaaggacacaaatgatgaccttgctgcactttacatgctgaaggtac

SEQ ID NO: 786954 - DNA, 75 bp, synthetic construct
  source 1..75: mol_type = other DNA
gaaatttataaccgtaccgcgctggataatacgctggtttacagtggtgttattgatatgcctgctggtcgcggt

SEQ ID NO: 786955 - DNA, 75 bp, synthetic construct
  source 1..75: mol_type = other DNA
gctgaatgccatgtatatgctgaaggtgcagaaaacaaaaaacggtattccctatgtggccgggattggcgcggg

SEQ ID NO: 786956 - DNA, 75 bp, synthetic construct
  source 1..75: mol_type = other DNA
atctggcggtggcaaaatgggacacgccgagggtggtgaagggcgtgcgcttcagtctgcgcctgaccagcggaa

SEQ ID NO: 786957 - DNA, 75 bp, synthetic construct
  source 1..75: mol_type = other DNA
cagccagtggagcgtctccggcagccggattaagccggggacggatttctggttttacgtgcgcagcgtcaacct

SEQ ID NO: 786958 - DNA, 75 bp, synthetic construct
  source 1..75: mol_type = other DNA
accggaaaaagaagccattgtggataacggggccagctttgagccactgtccggttcgctgaacagcgtcatccc

SEQ ID NO: 786959 - DNA, 75 bp, synthetic construct
  source 1..75: mol_type = other DNA
gtatcccacagccagtatcagcgatttgctggttgtggtgatgaagaaagccactgcaggcatcacgattagctg

SEQ ID NO: 786960 - DNA, 75 bp, synthetic construct
  source 1..75: mol_type = other DNA
acgactatgccgggaccatgaccggcggacgtattctggacaccgatgtaacccgtcgtatcctgacgctggacc

SEQ ID NO: 786961 - DNA, 75 bp, synthetic construct
  source 1..75: mol_type = other DNA
gtggccgggattggtgcagggattgaggatactgatggccagccactgagcaacatactgctgctggctgaccgt

SEQ ID NO: 786962 - DNA, 75 bp, synthetic construct
  source 1..75: mol_type = other DNA
caacagcccgaatcagcagtcgtactggtattccacctgtaagctgcaggtgctgaagaacggggttgagatttt

SEQ ID NO: 786963 - DNA, 75 bp, synthetic construct
  source 1..75: mol_type = other DNA
ttcctgaagcgactgtttgcggtgagtatcacctcgtccggcaatcccccgacgttttccctgacgccggaaggg

SEQ ID NO: 786964 - DNA, 75 bp, synthetic construct
  source 1..75: mol_type = other DNA
aatcagtttgaaatattggctgttgatgtgaaaacagtcgagtcagtgctattgactcgtattcaaaaagaacat

SEQ ID NO: 786965 - DNA, 75 bp, synthetic construct
  source 1..75: mol_type = other DNA
gtatggaacgggcagacgctgacgtttgtgcaggaccgtccgtcagatgtggtgtggcctacaccagcagtgatg

SEQ ID NO: 786966 - DNA, 75 bp, synthetic construct
  source 1..75: mol_type = other DNA
gccagtggacgggccagtgatgatgctgcgggctatctggagtttttccgggaaaagataggaaaaacacatctg

SEQ ID NO: 786967 - DNA, 75 bp, synthetic construct
  source 1..75: mol_type = other DNA
gcgtaacggtaactgggtgacagaaaaggatgtcaccattaacggcaagaccacctcacagttcctggcgtcggt

SEQ ID NO: 786968 - DNA, 75 bp, synthetic construct
  source 1..75: mol_type = other DNA
gctgattaataaaacacatctcggtaaagagctgctggaaaacgtggaactgacggaggataacgccagtaagct

SEQ ID NO: 786969 - DNA, 75 bp, synthetic construct
  source 1..75: mol_type = other DNA
gcccgctaccttggcacggggctgtactggatagccgccagtatcaatatcaaaccgggccatgattattatttt

SEQ ID NO: 786970 - DNA, 75 bp, synthetic construct
  source 1..75: mol_type = other DNA
attaatgagaactgtcagattaaggggaaactgtcagccaaccagattgaaggcgatattgtcaaaacggtcagc

SEQ ID NO: 786971 - DNA, 75 bp, synthetic construct
  source 1..75: mol_type = other DNA
ctgctctgcaatgcgctgtatgccggtatggaacggacagacgctgacgtttgttcaggacagaccatcggatgt

SEQ ID NO: 786972 - DNA, 75 bp, synthetic construct
  source 1..75: mol_type = other DNA
gcgggactcccgggcaccggagcggtggccatcagggaccattaccgtcagggtttatgacgatcagccgtttga

SEQ ID NO: 786973 - DNA, 75 bp, synthetic construct
  source 1..75: mol_type = other DNA
agcagatgacggtgaactaccatatccgcggtcgcatcatccaggtaccgtcaaactatgacccggaaaaacgca

SEQ ID NO: 786974 - DNA, 75 bp, synthetic construct
  source 1..75: mol_type = other DNA
ggagatgaagacctccatcaccgaaacccgcaatgaaatcacacagacggtcagtaaaacgctggaggaccagag

SEQ ID NO: 786975 - DNA, 75 bp, synthetic construct
  source 1..75: mol_type = other DNA
ggcttcgccatgtaccgggcgatgtcattgaaatctgtgatgatgactatgcggggatcagcatcggcgggcgtg

SEQ ID NO: 786976 - DNA, 75 bp, synthetic construct
  source 1..75: mol_type = other DNA
gtggccgggattggtgcggggattgaggatgttgatggtcagaccctgagtaacattctgctgcaggccgatcgc

SEQ ID NO: 786977 - DNA, 75 bp, synthetic construct
  source 1..75: mol_type = other DNA
tgaaaaacggggcagagatttttcatgaaccggcaacggatgtcagccgggtgttctcatcggtgattgacatgc

SEQ ID NO: 786978 - DNA, 75 bp, synthetic construct
  source 1..75: mol_type = other DNA
tgggacggtaaccgtcacagtttacgatgaccagggtttcgaccggcagattatcattcccccggtgctgtttcg

SEQ ID NO: 786979 - DNA, 75 bp, synthetic construct
  source 1..75: mol_type = other DNA
ccggatacaggtcagcaccctgcctgatggtgtggagacatacggtgtgtggggactctccctgccgtcactgcg

SEQ ID NO: 786980 - DNA, 75 bp, synthetic construct
  source 1..75: mol_type = other DNA
aatctgcccgttatctggggactggcagtcagtggactgtctccggcccgcacattaagcccgggaaggatttct

SEQ ID NO: 786981 - DNA, 75 bp, synthetic construct
  source 1..75: mol_type = other DNA
cggtcagcaagtctttcccccgcacgagcacttatgccagcggcaccatcacggtaagaatcagtgatgatcaga

SEQ ID NO: 786982 - DNA, 75 bp, synthetic construct
  source 1..75: mol_type = other DNA
ccgcgaataccggcacgctcaataatgtcaccattaacgagaactgtgtcatcagagggaaactgtctgcaaacc

SEQ ID NO: 786983 - DNA, 75 bp, synthetic construct
  source 1..75: mol_type = other DNA
cgctggagttttcggtgtcagcatggctggtaaatgactggtatcccacagcaagtatcagcgatttgctggttg

SEQ ID NO: 786984 - DNA, 75 bp, synthetic construct
  source 1..75: mol_type = other DNA
aactgggtgacggaaaaggatgtcaccattaacggcaagaccacctcacagtacctggcgtcggtgattctggag

SEQ ID NO: 786985 - DNA, 75 bp, synthetic construct
  source 1..75: mol_type = other DNA
aactggacaccaacaaccagtatcagcgatctgctggttgtggtgatgaaaaaatccacagcaggtatcagtatc

SEQ ID NO: 786986 - DNA, 75 bp, synthetic construct
  source 1..75: mol_type = other DNA
tctgggacgggactctgaaaccggcatacagcaacaacccggcatggtgtctgtgggatatgctgacgcatccac

SEQ ID NO: 786987 - DNA, 75 bp, synthetic construct
  source 1..75: mol_type = other DNA
gaaaaagaagccatcgtggataacggggccagctttgagccgcagtcaggcaccctgaacagcgttattccaccg

SEQ ID NO: 786988 - DNA, 75 bp, synthetic construct
  source 1..75: mol_type = other DNA
cctgacgccggaagggaagctgacagccaggaacgcggatatcagcggagcaattaccgcgaataccggcacgct

SEQ ID NO: 786989 - DNA, 75 bp, synthetic construct
  source 1..75: mol_type = other DNA
gccagtatcaatatcaggccgggccatgattattatttttacgttcgcagtgtgaataccgttggcaaatcggca

SEQ ID NO: 786990 - DNA, 75 bp, synthetic construct
  source 1..75: mol_type = other DNA
gttcatgaacgatgtgttcctgaagcggctgtttgcggtgagtatcacctcgtccggcaatccccctacgttctc

SEQ ID NO: 786991 - DNA, 75 bp, synthetic construct
  source 1..75: mol_type = other DNA
accagagcgccaccatacagcagatacagcgcgtgcagaaggacacaaatgatgaccttgctgcactttacatgc

SEQ ID NO: 786992 - DNA, 75 bp, synthetic construct
  source 1..75: mol_type = other DNA
aactggtatcccacagcaagtatcagcgatctgctggttgtggtgatgaaaaaatccacagcaggtatcagtatc

SEQ ID NO: 786993 - DNA, 75 bp, synthetic construct
  source 1..75: mol_type = other DNA
tgtgcgtgttgtggtaagccagccgacgatccccatcacctgattggtcatggtcagggcggaatgggaacaaag

SEQ ID NO: 786994 - DNA, 75 bp, synthetic construct
  source 1..75: mol_type = other DNA
gccgggagcaccacaacgaacttcatgcagacccgctggagtttgagaaaaagtacggctctcagattgagttaa

SEQ ID NO: 786995 - DNA, 75 bp, synthetic construct
  source 1..75: mol_type = other DNA
tgtgcgtgttgtggtaagccagccgacgatccgcatcacctgattggtcatggtcagggcggaatggggacaaaa

SEQ ID NO: 786996 - DNA, 75 bp, synthetic construct
  source 1..75: mol_type = other DNA
cctcacacccaccagcaacagaacccaccacaggaaaagacggtggtcagcattgccgttgatccggagtctccg

SEQ ID NO: 786997 - DNA, 75 bp, synthetic construct
  source 1..75: mol_type = other DNA
tgcctggatgattgacgtcattcggcatgcaatgaatggcgcacaggaacgtgaattatcgctggctgaattatc

SEQ ID NO: 786998 - DNA, 75 bp, synthetic construct
  source 1..75: mol_type = other DNA
agtttcatgcttcgcctgaccgtggcagcggatgacggcagtgagcggctggtcagcacagcccggacggcagaa

SEQ ID NO: 786999 - DNA, 75 bp, synthetic construct
  source 1..75: mol_type = other DNA
caccacaggaaaagacggtggtcagcattgccgttgatcccgaggctccggaatctttcatgaaacgacctaaac

SEQ ID NO: 787000 - DNA, 75 bp, synthetic construct
  source 1..75: mol_type = other DNA
tagccccgcgtatggggatcgtattgttcagacccggttcagagctgatgcccctgtttatgcaggggcgtgtcc

SEQ ID NO: 787001 - DNA, 75 bp, synthetic construct
  source 1..75: mol_type = other DNA
gaaaaagatagtggcgatgaaggtagacccggagacaccggaatccttcatgcttaaacccaagcgtcgccgctg

SEQ ID NO: 787002 - DNA, 75 bp, synthetic construct
  source 1..75: mol_type = other DNA
atagcgctaccgcttcacgcccaccagccacaaaccacgccacaggaaaagacggtagtaagcatcgccgttgat

SEQ ID NO: 787003 - DNA, 75 bp, synthetic construct
  source 1..75: mol_type = other DNA
ctgattggtcatggtcagggcggaatgggaacaaaatcccacgatattttcacgctaccgctgtgtcgggagcat

SEQ ID NO: 787004 - DNA, 75 bp, synthetic construct
  source 1..75: mol_type = other DNA
tgcgtcgttcgctgggattaccagcggaaaaaatccgctccgtataccgtgagagcgacatcataccgggagagc

SEQ ID NO: 787005 - DNA, 75 bp, synthetic construct
  source 1..75: mol_type = other DNA
ccttaagccgggccgtgaatcaatgtcagcattccataacggcagaatattggtggaaccggaaccgaaaaacat

SEQ ID NO: 787006 - DNA, 75 bp, synthetic construct
  source 1..75: mol_type = other DNA
acgcgccgggcgcaatccgtctgtgttggcactgcgataaccagttgcgtgatcagttcacggaacggctggaat

SEQ ID NO: 787007 - DNA, 75 bp, synthetic construct
  source 1..75: mol_type = other DNA
ttcatcttttgccagtggtgccgttccggcatcatcacaaccgctggcggatgatcctgccgttcgggccgtgtt

SEQ ID NO: 787008 - DNA, 75 bp, synthetic construct
  source 1..75: mol_type = other DNA
caccacaggaaaagacggtggtcagcattgccgttgatccggagcctccggaatctttcatgaaacgacctaaac

SEQ ID NO: 787009 - DNA, 75 bp, synthetic construct
  source 1..75: mol_type = other DNA
gatccggagtcgccagagttttttatgttacgcccaaaacgtcgccgctgggttaacgaaaagtacacgtgctgg

SEQ ID NO: 787010 - DNA, 75 bp, synthetic construct
  source 1..75: mol_type = other DNA
aggtcacggtcagggtggaatgggtacaaaagcgcatgacctctttgtgttgcctttgtgcagaaagcatcacga

SEQ ID NO: 787011 - DNA, 75 bp, synthetic construct
  source 1..75: mol_type = other DNA
tgttacgcccaaaacgtcgtcgctgggttaatgaaaagtacacgcgctgggttaagacgcagccgtgtgcatgtt

SEQ ID NO: 787012 - DNA, 75 bp, synthetic construct
  source 1..75: mol_type = other DNA
acaggcaaattgttattccggcggtggcattctgcggcgctaaacatgagcgggagaataacgatatttattcgt

SEQ ID NO: 787013 - DNA, 75 bp, synthetic construct
  source 1..75: mol_type = other DNA
aatactctgatttacacgggtgttattgatatgcctgcaggcagtggcgtaatgacactggagttttcggtatca

SEQ ID NO: 787014 - DNA, 75 bp, synthetic construct
  source 1..75: mol_type = other DNA
tttcatcagtcattgatatgcctgccggacacggccatgtcaccctgactttcaatgtttcttcatatggtgcta

SEQ ID NO: 787015 - DNA, 75 bp, synthetic construct
  source 1..75: mol_type = other DNA
ctgccagtggccacacggcgattatcaccatagtgaaaccgtcattcaccgttacggtgctggcgcgatggtgtt

SEQ ID NO: 787016 - DNA, 75 bp, synthetic construct
  source 1..75: mol_type = other DNA
cacgccgaaggtggtgaagggggtgagctttatgcttcgcctgactgtggcagcagacgacggcagtgagcggct

SEQ ID NO: 787017 - DNA, 75 bp, synthetic construct
  source 1..75: mol_type = other DNA
gggcaatggcggaatacggcagggagtatatgaaacggaaaacgaagcatggcttgcgttcaaacgtgatactga

SEQ ID NO: 787018 - DNA, 75 bp, synthetic construct
  source 1..75: mol_type = other DNA
ttcgctgattatcatgccggatatgacccgctacgctggtgatggcgcaggaattaaggctattacaggcggtga

SEQ ID NO: 787019 - DNA, 75 bp, synthetic construct
  source 1..75: mol_type = other DNA
tttgaagagaagtatggctcccaactggagctgatatttcgttttatcgatcgcgcgctggcgattggggtgttg

SEQ ID NO: 787020 - DNA, 75 bp, synthetic construct
  source 1..75: mol_type = other DNA
ccagtggcctcattccggctggcacagcgagaatatgaccacaatgcgacacgcgccgggcgcaatccgtctgtg

SEQ ID NO: 787021 - DNA, 75 bp, synthetic construct
  source 1..75: mol_type = other DNA
atcagttacgtgatcagttcacggagcggctggaatcaatggcaacggataactgtgcccattgggtgttgtctg

SEQ ID NO: 787022 - DNA, 75 bp, synthetic construct
  source 1..75: mol_type = other DNA
agtgaccttgtgccttcggttcctgccaccagcatcatccagaataaagcgaaaaaggtgctggcgctgaaagtg

SEQ ID NO: 787023 - DNA, 75 bp, synthetic construct
  source 1..75: mol_type = other DNA
gtgctgaagattcaccagagaaaattgcacgttttgctaaagaagtaaattttatgacgtctaagtgggggaaat

SEQ ID NO: 787024 - DNA, 75 bp, synthetic construct
  source 1..75: mol_type = other DNA
cagcgatgagcgggtgattcgtgctgctggcggtgctggtgcgctgtctgactggctgttacgccacgttaaatc

SEQ ID NO: 787025 - DNA, 75 bp, synthetic construct
  source 1..75: mol_type = other DNA
catgcaatgaatggcacgcaggagcgggaattatcgctggctgaattatcctggtgggcaaccataaataacgta

SEQ ID NO: 787026 - DNA, 75 bp, synthetic construct
  source 1..75: mol_type = other DNA
gaccagacatccgaatcactcgagcaacttgctcatcaaaacctgtcagcatggatgattgacgtcatcggtcac

SEQ ID NO: 787027 - DNA, 75 bp, synthetic construct
  source 1..75: mol_type = other DNA
ccctttaacatccgggtggtcagggtgacggcggacagtaccacggaccagctgcagaacagaacgctgtggtcg

SEQ ID NO: 787028 - DNA, 75 bp, synthetic construct
  source 1..75: mol_type = other DNA
gtgctggcactgcgacaaccagctgcgtgaccagacctccgaatcactcgggcaacttgctcatcaaaacctgtc

SEQ ID NO: 787029 - DNA, 75 bp, synthetic construct
  source 1..75: mol_type = other DNA
taatctgccgtccggggtcgttcctgccgttcgccagccgctgggggatgataaagcatttctgccctttttcag

SEQ ID NO: 787030 - DNA, 75 bp, synthetic construct
  source 1..75: mol_type = other DNA
tggagcctgaaccgaaaagcatgcgcggtctgccgtccggagtcgtccctgccgttcgccagccgctggcggagg

SEQ ID NO: 787031 - DNA, 75 bp, synthetic construct
  source 1..75: mol_type = other DNA
gacggtggtaagcatcaccgttgatccagagtctccggaatctttcatgaagctgcctaaacgtcgccgctgggt

SEQ ID NO: 787032 - DNA, 75 bp, synthetic construct
  source 1..75: mol_type = other DNA
agctgcgtgaccagacatccgaatcactcgagcaacttgctcatcaaaacctgtcagcatggatgattgacgtca

SEQ ID NO: 787033 - DNA, 75 bp, synthetic construct
  source 1..75: mol_type = other DNA
gcgtaatctgccatccggagtcgttcctgccgttcgccagccgctggtggaagacaaaacattgctgccgttttt

SEQ ID NO: 787034 - DNA, 75 bp, synthetic construct
  source 1..75: mol_type = other DNA
taatctgccgtccggggtcgttcctgccgttcgccagccgctgggggatgagaaatcatttctgccctttttcag

SEQ ID NO: 787035 - DNA, 75 bp, synthetic construct
  source 1..75: mol_type = other DNA
ggtggaggtgaattacaccgacccgcagaacggctggcagacttccacggaactggtggaagacccggacgccat

SEQ ID NO: 787036 - DNA, 75 bp, synthetic construct
  source 1..75: mol_type = other DNA
cactacattccggattaatgcgcctgcagcaccggccaccattgagctgacgccggggtattttcagataacggc

SEQ ID NO: 787037 - DNA, 75 bp, synthetic construct
  source 1..75: mol_type = other DNA
tggctgcggcacacacccggtgacattattgaaatctgtgataatgactatgccgggaccctgaccggcggacgt

SEQ ID NO: 787038 - DNA, 75 bp, synthetic construct
  source 1..75: mol_type = other DNA
gtgcagcacctgacggtggaggtgagcgcagctgacggtcagtatctggcgcaggcgaaatgggacacgccgaag

SEQ ID NO: 787039 - DNA, 75 bp, synthetic construct
  source 1..75: mol_type = other DNA
caaagtcaaaaccggggagcgggaggtccagatttccaaaaacgccagcagatatgagccggtatattctgatgt

SEQ ID NO: 787040 - DNA, 75 bp, synthetic construct
  source 1..75: mol_type = other DNA
cagcacctgactgccgaagtcaccgcagacagcggggagtatcaggtactggcccgctgggatacgccgaaggtg

SEQ ID NO: 787041 - DNA, 75 bp, synthetic construct
  source 1..75: mol_type = other DNA
caggacggacgcctttatatcgcgggtattggtgccggtattgagaatgctcctgacggaatgcagagtcaggtg

SEQ ID NO: 787042 - DNA, 75 bp, synthetic construct
  source 1..75: mol_type = other DNA
tgatgcggaaggttatctgaatttttataaagggttgatcaataaaacgcatctcggcaaggaactgctggaaaa

SEQ ID NO: 787043 - DNA, 75 bp, synthetic construct
  source 1..75: mol_type = other DNA
ctgctcggcgatgcgatgtatgccggtatggaacggccagacgctgacgttcgttcaggaccgcccgtcggatgt

SEQ ID NO: 787044 - DNA, 75 bp, synthetic construct
  source 1..75: mol_type = other DNA
tgctggaggcgacccaggtcagaggggatttcgttaaagctgtatcaaaagccttcccgaaaaaagtcggtacgt

SEQ ID NO: 787045 - DNA, 75 bp, synthetic construct
  source 1..75: mol_type = other DNA
cacgcagactgtcaataagaaactggaagaccagagtgcggcgatccagcagatacagaaggttcaggttgatac

SEQ ID NO: 787046 - DNA, 75 bp, synthetic construct
  source 1..75: mol_type = other DNA
tctgacggctcccaccattaccagcggcggtaatcctccggcattttccctgacaccggacgggcggctgacggc

SEQ ID NO: 787047 - DNA, 75 bp, synthetic construct
  source 1..75: mol_type = other DNA
tccgggaaaacacggacggcacctttgccatcacggcggtgcagcacgtaccggaaaaagaagccatcgtggata

SEQ ID NO: 787048 - DNA, 75 bp, synthetic construct
  source 1..75: mol_type = other DNA
acgccgaaggtggtgaagggcgtgagctttatgcttcgcctgaccgtggcagcggatgacggcagtgagcggctg

SEQ ID NO: 787049 - DNA, 75 bp, synthetic construct
  source 1..75: mol_type = other DNA
ctgattaaaactgaactgctggagacgcagaccgtggatttcagcgtcggggctgaagggcttcgccatgtaccg

SEQ ID NO: 787050 - DNA, 75 bp, synthetic construct
  source 1..75: mol_type = other DNA
ctgattaaaactgaactgctggagacgcagaccgtggatttcagcgttggcgcagaagggcttcgccatgtaccg

SEQ ID NO: 787051 - DNA, 75 bp, synthetic construct
  source 1..75: mol_type = other DNA
ctgattaaaactgaactgctggagacgcagaccgtggatttcagcgttggagccgaagggcttcgccatgtaccg

SEQ ID NO: 787052 - DNA, 75 bp, synthetic construct
  source 1..75: mol_type = other DNA
taccacgctgataagcctggttgacggtcagggtattccggtcagcgtggaggtacagtccgtcaccgacggcgt

SEQ ID NO: 787053 - DNA, 75 bp, synthetic construct
  source 1..75: mol_type = other DNA
taccacgctgataagcctggttgacggacagggtagtccggtcagcgtggaggtacagtccgtcaccgacggcgt

SEQ ID NO: 787054 - DNA, 75 bp, synthetic construct
  source 1..75: mol_type = other DNA
ctgattaaaactgaactgctggagacgcagaccgtggatttcagcgtgggtgccgaagggcttcgccatgtaccg

SEQ ID NO: 787055 - DNA, 75 bp, synthetic construct
  source 1..75: mol_type = other DNA
taccacgctgataagcctggttgacgggcagggtaatccggtcagcgtggaggtacagtccgtcaccgacggcgt

SEQ ID NO: 787056 - DNA, 75 bp, synthetic construct
  source 1..75: mol_type = other DNA
gctcaggggctgtgggagctgatagacaacagccagcttgcggatgagatggcggagatgaagacctccatcacc

SEQ ID NO: 787057 - DNA, 75 bp, synthetic construct
  source 1..75: mol_type = other DNA
tattggtggtgtagcgggacactctcataaacagtaccctcgccatcatccgggttatttcagccgtttgttgtt

SEQ ID NO: 787058 - DNA, 75 bp, synthetic construct
  source 1..75: mol_type = other DNA
gtgttcgtcacgccaagggggccattattggcctggtcaataatgatgtcgaagtaatcaatcctgattggctga

SEQ ID NO: 787059 - DNA, 75 bp, synthetic construct
  source 1..75: mol_type = other DNA
gcagaagtcaccgcagacagtggggaatatcaggtgctggcgcgctgggacacgccgaaggtggtgaagggggtg

SEQ ID NO: 787060 - DNA, 75 bp, synthetic construct
  source 1..75: mol_type = other DNA
ggattgaggatactgatggccagcccctgagcaacatactgctgctggctgaccgtatcgcgatgataaatccgg

SEQ ID NO: 787061 - DNA, 75 bp, synthetic construct
  source 1..75: mol_type = other DNA
taaccagaactgtacgattaagggcatgctggaggcgacccaggtcagaggagatttcgttaaagctgtatcaaa

SEQ ID NO: 787062 - DNA, 75 bp, synthetic construct
  source 1..75: mol_type = other DNA
accattaccagcggcggtaatcctccggcattttccctgacatcagacgggagactgacggcgaaaaatgcggat

SEQ ID NO: 787063 - DNA, 75 bp, synthetic construct
  source 1..75: mol_type = other DNA
cggggaatatcaggtgctggcgcgctgggatacgccgaaggtggtgaagggggtgagctttatgcttcgcctgac

SEQ ID NO: 787064 - DNA, 75 bp, synthetic construct
  source 1..75: mol_type = other DNA
ttgccatcacggcggtgcagcacgtaccggaaaagaagccatcgtggataacggggccagctttgagccgcagtc

SEQ ID NO: 787065 - DNA, 75 bp, synthetic construct
  source 1..75: mol_type = other DNA
tcatacaccgaaatcatcgatgtgaaacagtgctacccgaacacggccattgtgggactgcaggtggatgcgaag

SEQ ID NO: 787066 - DNA, 75 bp, synthetic construct
  source 1..75: mol_type = other DNA
cgcacacgccggttgaggcgagagataacctgaaatccacgcagatgatgagcgtgattgatgcgatcggcgaag

SEQ ID NO: 787067 - DNA, 75 bp, synthetic construct
  source 1..75: mol_type = other DNA
ttaatcctgcgaatggcaacacaaaaccgatgtttgttggtcagggtgatcagatattcatgaatgaagtgttcc

SEQ ID NO: 787068 - DNA, 75 bp, synthetic construct
  source 1..75: mol_type = other DNA
cgttattgatatgcctgccggtcacggtcacatgacgctggagttttcggtgtcagcatggctggtaaataactg

SEQ ID NO: 787069 - DNA, 75 bp, synthetic construct
  source 1..75: mol_type = other DNA
tatttttacgttcgcagtgtgaacaccgttggcaaatcggcattcgtggaggctgtcggtcagccgagtgatgat

SEQ ID NO: 787070 - DNA, 75 bp, synthetic construct
  source 1..75: mol_type = other DNA
ttgagttctggttctcggaaaaacggattgcggatatcaggcaggttgaaaccagcgcgcgttatcttggtacgg

SEQ ID NO: 787071 - DNA, 75 bp, synthetic construct
  source 1..75: mol_type = other DNA
gagtatcacctcgtccggcaatcccccgacgttttccctgacgccggacgcggcgactgacggcgaaaaatgcgg

SEQ ID NO: 787072 - DNA, 75 bp, synthetic construct
  source 1..75: mol_type = other DNA
acgcccgacagatagcacaggtccgccagtacgtggataaaaaagggagtgaaattacctcgaccacggataaaa

SEQ ID NO: 787073 - DNA, 75 bp, synthetic construct
  source 1..75: mol_type = other DNA
acggtaagaatcagtgatgatcagaaatttgaccggcaggtcatgataccgccagtgttattccgcggtggtaag

SEQ ID NO: 787074 - DNA, 75 bp, synthetic construct
  source 1..75: mol_type = other DNA
atgtcacgattaatgaaaactgtcagattaaggggaaactgtcagccaatcagattgaaggcgatattgtcaaaa

SEQ ID NO: 787075 - DNA, 75 bp, synthetic construct
  source 1..75: mol_type = other DNA
gataacggtcagcttgcgcctgacctgactgaaatcaggacgtccataacggatgtcagcaatgaaataacacag

SEQ ID NO: 787076 - DNA, 75 bp, synthetic construct
  source 1..75: mol_type = other DNA
gggaggcggaaaacagcctcacgcagctggttgcgaaaaagaatgaggaccagacactggccatcgcgcaggtga

SEQ ID NO: 787077 - DNA, 75 bp, synthetic construct
  source 1..75: mol_type = other DNA
tacagtttgaattctggttctcagaaaaacgcatcacgaacacggcacaggtggaaaaatctgcccgttatctgg

SEQ ID NO: 787078 - DNA, 75 bp, synthetic construct
  source 1..75: mol_type = other DNA
attcagtggcgctaagcatgagagagagcatactgatatttactcctcatgccgtctgatagtgcggaaaaacgg

SEQ ID NO: 787079 - DNA, 75 bp, synthetic construct
  source 1..75: mol_type = other DNA
cgctgagcagtattctgctgcaggctgaccgtatcgcgatgattaccccggagaacggcaacaccacgccgctgt

SEQ ID NO: 787080 - DNA, 75 bp, synthetic construct
  source 1..75: mol_type = other DNA
cattgaactgatacctgggtattttcagataacggcggtcccgaaactggctgtatatgacccgacggtacagtt

SEQ ID NO: 787081 - DNA, 75 bp, synthetic construct
  source 1..75: mol_type = other DNA
ccgctgacggatacggacggtaacccggtggtacatggtgtgactgcagtctggcggtccggggaacaggagcag

SEQ ID NO: 787082 - DNA, 75 bp, synthetic construct
  source 1..75: mol_type = other DNA
ccaggcactgaaagagcgcattgatgcttcagcgctgcgtacggaggtcacgcaactggaagaagacatccgtca

SEQ ID NO: 787083 - DNA, 75 bp, synthetic construct
  source 1..75: mol_type = other DNA
agcatggctggtgaataactggtatcccacagcaagtatcagcgatttgctggttgtggtgatgaagaaagccac

SEQ ID NO: 787084 - DNA, 75 bp, synthetic construct
  source 1..75: mol_type = other DNA
tgatattgtcaaaacggtgggaaaagcctttccgagaaatggcagttatgccagcggtacaataacggtcactgt

SEQ ID NO: 787085 - DNA, 75 bp, synthetic construct
  source 1..75: mol_type = other DNA
cctgcgaatggcaacacaaaaccgatgtttgttggtcagggtgatcagatattcatgaatgaagtgttcctgaaa

SEQ ID NO: 787086 - DNA, 75 bp, synthetic construct
  source 1..75: mol_type = other DNA
ccctttaacatccggatggtccgggagacggcggacagcaccacggaccagctgcagaacagaacgctctggtcg

SEQ ID NO: 787087 - DNA, 75 bp, synthetic construct
  source 1..75: mol_type = other DNA
gcgatgtcattgaaatctgtgatgatgactatgcggggatcagcatcggcgggcgcgtgctggcggtgaacaacc

SEQ ID NO: 787088 - DNA, 75 bp, synthetic construct
  source 1..75: mol_type = other DNA
aaaagcctttccgagaaatggcagttatgccagcggtacaataacggtcactgtgtacgatgaccaggcttttga

SEQ ID NO: 787089 - DNA, 75 bp, synthetic construct
  source 1..75: mol_type = other DNA
ggacgctcaacaacgtcacgattaacgagaactgccgggttctgggaaaactgtccgcgaaccagattgaaggcg

SEQ ID NO: 787090 - DNA, 75 bp, synthetic construct
  source 1..75: mol_type = other DNA
ccgggacgctcaacaacgtcacgattaacgagaactgccgggttctgggaaaactgtccgcgaaccagattgaag

SEQ ID NO: 787091 - DNA, 75 bp, synthetic construct
  source 1..75: mol_type = other DNA
ctgtcagccaaccagattgaaggcgatattgtcaaaacggtcagcaagtctttcccccgcacgagcacttatgcc

SEQ ID NO: 787092 - DNA, 75 bp, synthetic construct
  source 1..75: mol_type = other DNA
atgctgcgggctatctggaacttttccgggaaaagataggaaaaacgcatctggcagaggcgctgtgggcagaga

SEQ ID NO: 787093 - DNA, 75 bp, synthetic construct
  source 1..75: mol_type = other DNA
ggtaaatggttggtatcccacagcaagtatcagcgatttgctggttgttgtgatgaagaaagccactgcaggcat

SEQ ID NO: 787094 - DNA, 75 bp, synthetic construct
  source 1..75: mol_type = other DNA
cggtattttccctgacaccggacgggcggctgacggcgaaaaatgccgatatcagcggtaacgtgaatgcgaact

SEQ ID NO: 787095 - DNA, 75 bp, synthetic construct
  source 1..75: mol_type = other DNA
tggcggcggacaggattgcgatgattaatcctgcgaatggcaacacaaagccgatgtttgttgggcagggcgatc

SEQ ID NO: 787096 - DNA, 75 bp, synthetic construct
  source 1..75: mol_type = other DNA
cattcaggtaccgtcaaactatgacccggaaaaacgcacgtacagcggcatctgggacggcagcctgaaaccggc

SEQ ID NO: 787097 - DNA, 75 bp, synthetic construct
  source 1..75: mol_type = other DNA
ccaccgccatcactgcggatacagagcaccgtttcagcggtctgccgctcggggaatacaccctgacggtcaggg

SEQ ID NO: 787098 - DNA, 75 bp, synthetic construct
  source 1..75: mol_type = other DNA
gatggtgtggagacatacggtgtatggggactctccctgccgtcactgcgccgtcgcctgttccgctgtgtctcc

SEQ ID NO: 787099 - DNA, 75 bp, synthetic construct
  source 1..75: mol_type = other DNA
ctgtatgccatcgggcagtactgcgaccagatggtcccggatggtttcgggggcacagagccgcggatgaccttt

SEQ ID NO: 787100 - DNA, 75 bp, synthetic construct
  source 1..75: mol_type = other DNA
tggctgtatatgacccgacggtacagtttgaattctggttttcggaacagcagattgcggatatcaggcaggttg

SEQ ID NO: 787101 - DNA, 75 bp, synthetic construct
  source 1..75: mol_type = other DNA
ggaccggatacaggtcagtaccctgccggatggtgtggagacatacggtgtgtggggactctccctgccgtcact

SEQ ID NO: 787102 - DNA, 75 bp, synthetic construct
  source 1..75: mol_type = other DNA
ccagtggccgggcgagcaatgatgcggaagggtatctggggctgtttcgggaaaagataggaaaactgcatctgg

SEQ ID NO: 787103 - DNA, 75 bp, synthetic construct
  source 1..75: mol_type = other DNA
gagaaagagagaactggtgcgatggagatatgacgcctttactctcatggtggcgaaatcgacagattccggttt

SEQ ID NO: 787104 - DNA, 75 bp, synthetic construct
  source 1..75: mol_type = other DNA
caggctccctgaacagcgtcatcccaccggcagtgcagcacctgacggtggaggtgagcgcagctgacggccagt

SEQ ID NO: 787105 - DNA, 75 bp, synthetic construct
  source 1..75: mol_type = other DNA
atgcgcgaaaaggattatgtcgtaattataggttcggcgaatattgatgtcgccggatattcacatgaatcatta

SEQ ID NO: 787106 - DNA, 75 bp, synthetic construct
  source 1..75: mol_type = other DNA
gcactggaagcgatggggttaaatctcgaagagctgattgatgaagaaaatgatccgggcctcggtaacggtggc

SEQ ID NO: 787107 - DNA, 75 bp, synthetic construct
  source 1..75: mol_type = other DNA
gtttccacagttctgtactgccgctgcatggcctgaccggcgtgggctggagcgactcctggagcgaatacgcct

SEQ ID NO: 787108 - DNA, 75 bp, synthetic construct
  source 1..75: mol_type = other DNA
gaggcgggacgtgaagtgctccggcacagtaaccggggttttgcctgtgaacagggctggaatgcagccggtcag

SEQ ID NO: 787109 - DNA, 75 bp, synthetic construct
  source 1..75: mol_type = other DNA
caggggctgctgtcggggatattccgccaggatgaacggcgtctgggcatagagtacgaccaccacaaccggccg

SEQ ID NO: 787110 - DNA, 75 bp, synthetic construct
  source 1..75: mol_type = other DNA
cgcccggaaacagagcggttccggtgggacagccgtgaccagctgaccgggtattgcagcgcacagggtgagcag

SEQ ID NO: 787111 - DNA, 75 bp, synthetic construct
  source 1..75: mol_type = other DNA
ggcttaaactgacgtaccacgccagcggctacctgaaagccattcaccgcacggataacggcatacagacgctgg

SEQ ID NO: 787112 - DNA, 75 bp, synthetic construct
  source 1..75: mol_type = other DNA
ctaaccttgaagccagtcgggcagcaagggctgcatctaattttggtaagaaaaatatctatgattttatcaagg

SEQ ID NO: 787113 - DNA, 75 bp, synthetic construct
  source 1..75: mol_type = other DNA
tgccggtgaagatgcgcggccccggcggtcagtcagtgcggttacagtggcagcagcaccataaactgagcggcc

SEQ ID NO: 787114 - DNA, 75 bp, synthetic construct
  source 1..75: mol_type = other DNA
ggcagagaatgatcctggggggaataacgatagccagctatcttctgccgccagcgggactgctgggaaaactga

SEQ ID NO: 787115 - DNA, 75 bp, synthetic construct
  source 1..75: mol_type = other DNA
attacaacgccacgctggactatggtgacggctgcaccaccgtgacggacggcaagggcattcaccgttattact

SEQ ID NO: 787116 - DNA, 75 bp, synthetic construct
  source 1..75: mol_type = other DNA
aacggacggtgaaggccaccgctggcagtaccgctacgataaagacacgctgcaactgacagaagtcatcaaccc

SEQ ID NO: 787117 - DNA, 75 bp, synthetic construct
  source 1..75: mol_type = other DNA
gattggctgcaagttctaaaatcagcagtttgatggactatattggcgatggtcgtcgtgttagtgggcatacgg

SEQ ID NO: 787118 - DNA, 75 bp, synthetic construct
  source 1..75: mol_type = other DNA
gaaatgggcaatgggcttcaattctcgatgacttagctagagatcttgatatattgattatagtttccgctggaa

SEQ ID NO: 787119 - DNA, 75 bp, synthetic construct
  source 1..75: mol_type = other DNA
atggtggaatacttcgccttggagcaggattcagcatcgttctaatgacgctcactgccatttttatctggtttt

SEQ ID NO: 787120 - DNA, 75 bp, synthetic construct
  source 1..75: mol_type = other DNA
gatagattcagtactatttttggtgataaatatatccttactttgctaaattctatgcgaaatatggagggtaat

SEQ ID NO: 787121 - DNA, 75 bp, synthetic construct
  source 1..75: mol_type = other DNA
aagagttgcctctgttgtctctgccgggcgctactatgccggcatttacaaaaccgatccggaacatattgatat

SEQ ID NO: 787122 - DNA, 75 bp, synthetic construct
  source 1..75: mol_type = other DNA
gccattcaaattgtatgtagacatctgtgttttctcatattagcggcagccctacaaccgcttgaaaaaatgtac

SEQ ID NO: 787123 - DNA, 75 bp, synthetic construct
  source 1..75: mol_type = other DNA
atgtaacactgaatgcttaagcataatattagaaatccctgagatatatacaattgatttccctccatcacctga

SEQ ID NO: 787124 - DNA, 75 bp, synthetic construct
  source 1..75: mol_type = other DNA
ggctggcactcagcctgcccgcagacacagactacccggacccgcgcggggaactggacccggaagccgaccccg

SEQ ID NO: 787125 - DNA, 75 bp, synthetic construct
  source 1..75: mol_type = other DNA
gattaaataaaggagcttcattatctaaaatgatgaatagctccagtgatctcatggggttgagaaggcagcccc

SEQ ID NO: 787126 - DNA, 75 bp, synthetic construct
  source 1..75: mol_type = other DNA
gacgaacacaccgtcatccgctgtatcctgccaccggaagatgaacgcgacagacaccccgatgaatccctgctg

SEQ ID NO: 787127 - DNA, 75 bp, synthetic construct
  source 1..75: mol_type = other DNA
ttatagtttgctttaatgcagagaagtatattgaaaaatctcttttggcatttattaatcaagatgttggattag

SEQ ID NO: 787128 - DNA, 75 bp, synthetic construct
  source 1..75: mol_type = other DNA
ggtgaatcatatctttatgttctggataactgcggccgggtgacggaagagcatgactggggcggcgtggtctgg

SEQ ID NO: 787129 - DNA, 75 bp, synthetic construct
  source 1..75: mol_type = other DNA
ctaatccactggggtatgttgatcctttggggctggctatatgtcctgtgatgtatgattggtataaatacaatc

SEQ ID NO: 787130 - DNA, 75 bp, synthetic construct
  source 1..75: mol_type = other DNA
gctgtcggggatattccgccaggatgaacggcgtctgggcatagagtacgaccaccacaaccggccggaaacact

SEQ ID NO: 787131 - DNA, 75 bp, synthetic construct
  source 1..75: mol_type = other DNA
ggtacggtatggttacaacagccagttgcaactgacttcagtgacatatccggatggtttacgcagcagccggaa

SEQ ID NO: 787132 - DNA, 75 bp, synthetic construct
  source 1..75: mol_type = other DNA
attgtggtgaaaaaacgtcgaactttttcgccaccatccttatccgaacaaacagatattatcgtgcctgtatct

SEQ ID NO: 787133 - DNA, 75 bp, synthetic construct
  source 1..75: mol_type = other DNA
gtgatattattaaatagtaaaaccagccagccgaggtatttatgggaaaacatcaggaagaaaggcccccccgtc

SEQ ID NO: 787134 - DNA, 75 bp, synthetic construct
  source 1..75: mol_type = other DNA
ataaggcagatgtgggacgcagcgataaaacgtgccggactccgccatcgaaaatcatatcagtcgagacatact

SEQ ID NO: 787135 - DNA, 75 bp, synthetic construct
  source 1..75: mol_type = other DNA
cctcatgcgcccggcaggtttgattgctgtggcgaatgaagtcacttccggcgcgatcgtcaccttatgttctgc

SEQ ID NO: 787136 - DNA, 75 bp, synthetic construct
  source 1..75: mol_type = other DNA
tctctgtatttgattttgacggtacgttaacgcggcatgatagctttatcccttttctgcggtttgcctttggca

SEQ ID NO: 787137 - DNA, 75 bp, synthetic construct
  source 1..75: mol_type = other DNA
aaaaaaataaatttttgcataaactggttaacagaaaggaggttcagagagcaattaatgaagcaaagcataact

SEQ ID NO: 787138 - DNA, 75 bp, synthetic construct
  source 1..75: mol_type = other DNA
attttttgtgtttctattataattgtttataataattatgaaattggctatattattaatgatactgaaacgatt

SEQ ID NO: 787139 - DNA, 75 bp, synthetic construct
  source 1..75: mol_type = other DNA
tttctaatatttttgtccccatcattccagccattgttgcttctggtttattaatggggctcctgggaatggtga

SEQ ID NO: 787140 - DNA, 75 bp, synthetic construct
  source 1..75: mol_type = other DNA
cgtagggcacctggtagtaacggctaatatcgtcaaaaaagatctgctgcgcgatccaggtctgcaccgttcgat

SEQ ID NO: 787141 - DNA, 75 bp, synthetic construct
  source 1..75: mol_type = other DNA
ggcgcagaaccgtctatatccgcgatgaacagggcagactggcagaaaaacaccgcccggacggtagcgtatggc

SEQ ID NO: 787142 - DNA, 75 bp, synthetic construct
  source 1..75: mol_type = other DNA
ttgaaagtattttatagcatatacctaatggtaaaaaactcagatgagtatcaattacagaggaaatttgccatg

SEQ ID NO: 787143 - DNA, 75 bp, synthetic construct
  source 1..75: mol_type = other DNA
atgatctggcagcctgagttcacagataaaatactctccaggaaacccggggcggttcacatcgatgttcacctc

SEQ ID NO: 787144 - DNA, 75 bp, synthetic construct
  source 1..75: mol_type = other DNA
ggaaacactcaccgacgtgatgggccgtgaacaccacaccgaatacagcggtcacgacctgccggtgaagatgcg

SEQ ID NO: 787145 - DNA, 75 bp, synthetic construct
  source 1..75: mol_type = other DNA
aaaaatttataatcaagactttaccatatcaaaatgaggtcagagtaacatccataccaacaattaataacgaat

SEQ ID NO: 787146 - DNA, 75 bp, synthetic construct
  source 1..75: mol_type = other DNA
ttcatctttaaagaaagtaattaatgaagattttgacacagtaatatcacggttagacaaaaataatcattcagg

SEQ ID NO: 787147 - DNA, 75 bp, synthetic construct
  source 1..75: mol_type = other DNA
aattgtcactcttgtcaccttctccgccatcagcctagtgtgcggtttcgtctattcaaagttcattgtctttag

SEQ ID NO: 787148 - DNA, 75 bp, synthetic construct
  source 1..75: mol_type = other DNA
cggagctggcgtttcctgatggggagacgttgcgtgaagtcttacatacaagagcatttgacgaattaagcaaat

SEQ ID NO: 787149 - DNA, 75 bp, synthetic construct
  source 1..75: mol_type = other DNA
ggaagaagcgccggacggcagcaccaccacgtatgaatgggatgaattccatcacctgctggcccgtcactcccc

SEQ ID NO: 787150 - DNA, 75 bp, synthetic construct
  source 1..75: mol_type = other DNA
acaaacaaacggcggcacacttccacctgctttacgcgctttgctacctggcaagctacgaaaacaaagatgaag

SEQ ID NO: 787151 - DNA, 75 bp, synthetic construct
  source 1..75: mol_type = other DNA
actgctacgtttgactgccacttaatcagagtaaaattaaataaagaaaaaatacttcctgaatatctatatata

SEQ ID NO: 787152 - DNA, 75 bp, synthetic construct
  source 1..75: mol_type = other DNA
ttgtcatgactttgatcatgagcgaattcgcagtttgttgttacaagcaccagcggcattcaatccaactgatga

SEQ ID NO: 787153 - DNA, 75 bp, synthetic construct
  source 1..75: mol_type = other DNA
tcgctatggaatttcgcagggcgggcaggtagattaggttatgcattttcgggaaatgtttatcttattgactat

SEQ ID NO: 787154 - DNA, 75 bp, synthetic construct
  source 1..75: mol_type = other DNA
aaaacaattatctgagaatttattaagggcacttggtaacttccctggagcaagttatttacaagaaaaaaatgg

SEQ ID NO: 787155 - DNA, 75 bp, synthetic construct
  source 1..75: mol_type = other DNA
aaactggcgactggctttacgatgacccgctggatctggctaaagctatcagaaaaggtcctgacattcccgagt

SEQ ID NO: 787156 - DNA, 75 bp, synthetic construct
  source 1..75: mol_type = other DNA
tcatggtttgcctgaaggcagtgatgacgcgctacggtatattgcggaacatgacgatgcgctggcgtttgcgcg

SEQ ID NO: 787157 - DNA, 75 bp, synthetic construct
  source 1..75: mol_type = other DNA
tggtcgtttttacccggcactggtcggcaatgatatcggctgtggcatggcgctatggcaaacagatattctcgc

SEQ ID NO: 787158 - DNA, 75 bp, synthetic construct
  source 1..75: mol_type = other DNA
aacgtggtgagattagaaaacgttaccgtgaggggcaggaggatcaactgggtgcgctggggcttgtcactaacg

SEQ ID NO: 787159 - DNA, 75 bp, synthetic construct
  source 1..75: mol_type = other DNA
gttaatgtcgccgagatgcgtctgtattactacccaccagacagtaatactgtggaagtgtttcctattggtatt

SEQ ID NO: 787160 - DNA, 75 bp, synthetic construct
  source 1..75: mol_type = other DNA
gcaactgctggttcatagcggctcgcgtggtttggggcagtctattttacagcgacatattgcctcgttttctca

SEQ ID NO: 787161 - DNA, 75 bp, synthetic construct
  source 1..75: mol_type = other DNA
caagttaaggccaacggaaattcggttctggatgtggcgcataactttgttagcgcatgtcaaatcggcgatcaa

SEQ ID NO: 787162 - DNA, 75 bp, synthetic construct
  source 1..75: mol_type = other DNA
tggttgatataaatcttaattttttcaatgatattctttatagcgtgcgattaaaaaacattagtaaactggaga

SEQ ID NO: 787163 - DNA, 75 bp, synthetic construct
  source 1..75: mol_type = other DNA
cgccatcggaactaaaaaacagacctcattgctggctggtattcacaccagtttatttctggttgcttctgtgga

SEQ ID NO: 787164 - DNA, 75 bp, synthetic construct
  source 1..75: mol_type = other DNA
ctgccgtgacggtcataccggtaaagatagtgcgcgtcacgggcgatacggttatccggccacatgctgagggtg

SEQ ID NO: 787165 - DNA, 75 bp, synthetic construct
  source 1..75: mol_type = other DNA
gtgacactctggtgtttatgggaatggtatcaacacccgggacaaagccgtttcacccgcagacctgtagatatt

SEQ ID NO: 787166 - DNA, 75 bp, synthetic construct
  source 1..75: mol_type = other DNA
atgtcaaccgttcaaaataaagcgctaaatagtccagaaaaaatcgcgaagttacaagaaaaccgcctgtcacaa

SEQ ID NO: 787167 - DNA, 75 bp, synthetic construct
  source 1..75: mol_type = other DNA
ctccttaaccacgatgcgattgtattcgacgaatccgccgctttaaaacgaatcaacgaaacaaaaggagcctga

SEQ ID NO: 787168 - DNA, 75 bp, synthetic construct
  source 1..75: mol_type = other DNA
aatcccatggggctatatgctatttacatcggcaggctttatgcaatccacggcaccaacgcaaattttggtatc

SEQ ID NO: 787169 - DNA, 75 bp, synthetic construct
  source 1..75: mol_type = other DNA
tcggaaggctgggactttttagagagtgcattagttagttgggataatttacccgctgttgtcctcaaggaatta

SEQ ID NO: 787170 - DNA, 75 bp, synthetic construct
  source 1..75: mol_type = other DNA
agagcaaatggaaaatgtcaatattgtaagcgagatgctccttttctaaaggaagatggtactccatttctagaa

SEQ ID NO: 787171 - DNA, 75 bp, synthetic construct
  source 1..75: mol_type = other DNA
atcatctcggtggttcgatggcgctcgtgcagcctataccagacggaatgtcgccttattatattgagtttgaag

SEQ ID NO: 787172 - DNA, 75 bp, synthetic construct
  source 1..75: mol_type = other DNA
taagaagtttccagtcggagataaatgaaaccgtagcacgtcgtatgcaagatcgtgctgcggtttatgcttatc

SEQ ID NO: 787173 - DNA, 75 bp, synthetic construct
  source 1..75: mol_type = other DNA
ttaatacgttaaatctggaaaacaattgtctaacttgtcttgactttgctgacaatgctagtctcgtcaatatca

SEQ ID NO: 787174 - DNA, 75 bp, synthetic construct
  source 1..75: mol_type = other DNA
taatcaaagtatgcaatattctgatgatactacaaagataaagcatgcccgctccgtgatcgatcatattgattt

SEQ ID NO: 787175 - DNA, 75 bp, synthetic construct
  source 1..75: mol_type = other DNA
ttggttacagaatggctctcgaaatcaaattgatcttaacagggttgaaattgagcgttttggatttttgaatga

SEQ ID NO: 787176 - DNA, 75 bp, synthetic construct
  source 1..75: mol_type = other DNA
cttgaaacttttgctgcgcagtacgggcaagggctgagtaatatgttggaagcgaatccaggcgttgacgttttc

SEQ ID NO: 787177 - DNA, 75 bp, synthetic construct
  source 1..75: mol_type = other DNA
agccagtgaaatacacaacggaaccggatggatcaaagtggctggaagttcatgagccgctgtcgcgcaatcgtg

SEQ ID NO: 787178 - DNA, 75 bp, synthetic construct
  source 1..75: mol_type = other DNA
atcaacccgatcatctcggtggttcaatggttccatttcaatctataccagatggaatgtcacctttttatattg

SEQ ID NO: 787179 - DNA, 75 bp, synthetic construct
  source 1..75: mol_type = other DNA
ggggcatattactctgcgtacggtaatgttatggcaggcctgcagattgacagtaaagttgatgcttcaaacgat

SEQ ID NO: 787180 - DNA, 75 bp, synthetic construct
  source 1..75: mol_type = other DNA
ggtgggaagagcatggtgctcgattatttacaaaaaacataaggaatatgcttggtaaaacagaagtgaatgagg

SEQ ID NO: 787181 - DNA, 75 bp, synthetic construct
  source 1..75: mol_type = other DNA
gtagcattgtcatggtactcggtaaatttactattccaacaaatagaaaaatgataatggatccaatatttgagc

SEQ ID NO: 787182 - DNA, 75 bp, synthetic construct
  source 1..75: mol_type = other DNA
cgaaaatgatctcgacagtgttacatgatgactttcatataggaatgttaaccgccgatgctgccggacgcaatg

SEQ ID NO: 787183 - DNA, 75 bp, synthetic construct
  source 1..75: mol_type = other DNA
atcgcggtgggcaatactgccgaaagttacaagccagccgttgccgaaggatccggacgtgcacaaacatttcgc

SEQ ID NO: 787184 - DNA, 75 bp, synthetic construct
  source 1..75: mol_type = other DNA
caacccgattatctgaacgcagccgtagcgctggaaacaactctcgcaccagaagagttacttaaccatacacag

SEQ ID NO: 787185 - DNA, 75 bp, synthetic construct
  source 1..75: mol_type = other DNA
cgatatgaagaatcgcggctttatgctgtggccgctgtttgaaatcgcgccgaagctggtctttcctgatgggga

SEQ ID NO: 787186 - DNA, 75 bp, synthetic construct
  source 1..75: mol_type = other DNA
cccggctgacgttgggtgatggttatactcagggcgatattttcgatggtattaactttcgcggcgcacaattgg

SEQ ID NO: 787187 - DNA, 75 bp, synthetic construct
  source 1..75: mol_type = other DNA
tggatgtctgaaaacaataatgcacaggtagctttgttaaatacacagttaagcgagtttgccccaaccatgccc

SEQ ID NO: 787188 - DNA, 75 bp, synthetic construct
  source 1..75: mol_type = other DNA
ccgtattctgcgagcatttcctgaatggacgattgttgatgttatttcagcagcaaatttatcacaagttttgcc

SEQ ID NO: 787189 - DNA, 75 bp, synthetic construct
  source 1..75: mol_type = other DNA
gttgaagacaatcagccaaaacatcacgtaatcgaagttctcagctatgcccaatacaaacctgaaactgatagc

SEQ ID NO: 787190 - DNA, 75 bp, synthetic construct
  source 1..75: mol_type = other DNA
gacgttctctgtcccggtcacgccacatacgttccgccattcctatgcgatgcacatgctgtatgccgctgaagg

SEQ ID NO: 787191 - DNA, 75 bp, synthetic construct
  source 1..75: mol_type = other DNA
agatggagatattgcttatgtaatgaaccaaaacgctcaaataatatctgtttatcggcccaataatagtcagaa

SEQ ID NO: 787192 - DNA, 75 bp, synthetic construct
  source 1..75: mol_type = other DNA
ctgataagccagcagttcagccgggtacggcaggcgcatccgtcggtggccccgcagtgggtgacgcggacgaat

SEQ ID NO: 787193 - DNA, 75 bp, synthetic construct
  source 1..75: mol_type = other DNA
atgctgccgatgggcgacattctgcaaaaactccagaacaaatacgggcagagcattgaagggaacgtcaaggca

SEQ ID NO: 787194 - DNA, 75 bp, synthetic construct
  source 1..75: mol_type = other DNA
gaagaagtgaagcgctatctgtccggtcgtaccggctgtatccgggtagctgccctgcgtgtccgggatatcaac

SEQ ID NO: 787195 - DNA, 75 bp, synthetic construct
  source 1..75: mol_type = other DNA
gttaagttttggtatcgctctggcgctggttccactgctgattttcaccagtgacagcaagttgatgggcgatct

SEQ ID NO: 787196 - DNA, 75 bp, synthetic construct
  source 1..75: mol_type = other DNA
atcaatacgctgctgaaaaatcataatatgccttaccgacctacccgccccccgatcgggaaaaatggaaagccc

SEQ ID NO: 787197 - DNA, 75 bp, synthetic construct
  source 1..75: mol_type = other DNA
tgcagcccgttccctttggcctggttcttctgaaatatctgcacactccacgtcgcgtggctccgtttttagcgt

SEQ ID NO: 787198 - DNA, 75 bp, synthetic construct
  source 1..75: mol_type = other DNA
atttataccgggataaaaagcagtaaaggtatccggcttccggccacgaagaaatcacttccggaaattaacagc

SEQ ID NO: 787199 - DNA, 75 bp, synthetic construct
  source 1..75: mol_type = other DNA
atctggcaatagcatttaaaaaatggggcgtcacctgggaggccgttggtgcatacaatgcaggattcaggaaat

SEQ ID NO: 787200 - DNA, 75 bp, synthetic construct
  source 1..75: mol_type = other DNA
aaaatgagcattcgtgcgatagctactgcgctgaatcgcagtccttcgacgatctcacgtgaagttcagcgtaat

SEQ ID NO: 787201 - DNA, 75 bp, synthetic construct
  source 1..75: mol_type = other DNA
tatgcaatggcggcttttaaaaaggagtgtaattccggagcggaagatttcccaaagctattgtacagagattta

SEQ ID NO: 787202 - DNA, 75 bp, synthetic construct
  source 1..75: mol_type = other DNA
tataaatttcatgatttatatgaccctggctactatcattatactaattggtgcacggggagcatttgtatcaac

SEQ ID NO: 787203 - DNA, 75 bp, synthetic construct
  source 1..75: mol_type = other DNA
ggtgtttactttagatttcatgactacatatataccaacatcggatgagaaattagaaatatacacaagagtagt

SEQ ID NO: 787204 - DNA, 75 bp, synthetic construct
  source 1..75: mol_type = other DNA
taccatccccaaagtcttgggatgaatttgaagaaattaccttatccgcagccaaattgcgttggaactctactg

SEQ ID NO: 787205 - DNA, 75 bp, synthetic construct
  source 1..75: mol_type = other DNA
aggaatgcttgaagctattagatatgttggtgttaaaagagtatttgattgttatctaaacgttgccataattgt

SEQ ID NO: 787206 - DNA, 75 bp, synthetic construct
  source 1..75: mol_type = other DNA
ctccacgctcgcccagcttctttccggctttagcggtacggcggttggtgtggtgaaaggcgactggatggcgct

SEQ ID NO: 787207 - DNA, 75 bp, synthetic construct
  source 1..75: mol_type = other DNA
cagggaatgagaattggattgttttctcaaaattatatgaagcgtataaagacattgaaaaagtacaaggattag

SEQ ID NO: 787208 - DNA, 75 bp, synthetic construct
  source 1..75: mol_type = other DNA
gccatacggaatacccttgcagcaataacaacatgggcatgggctgcagcactacagtatttaaaccgcgtcatg

SEQ ID NO: 787209 - DNA, 75 bp, synthetic construct
  source 1..75: mol_type = other DNA
gtcggaccgggtggcataggggctcagttactcagtcacagcgaaaataaaaacaatatagacaactccacccgt

SEQ ID NO: 787210 - DNA, 75 bp, synthetic construct
  source 1..75: mol_type = other DNA
aatcggctatggggtaattaaaggtaaatatctctcgataccgcaaaatttccgagtgaataatattcaactgga

SEQ ID NO: 787211 - DNA, 75 bp, synthetic construct
  source 1..75: mol_type = other DNA
aaaaagggcaaagctccgtcgatatcgacagagttaatcaccacattgttaatgtggaaaagattaactttagat

SEQ ID NO: 787212 - DNA, 75 bp, synthetic construct
  source 1..75: mol_type = other DNA
atgaaaaaacgcatcactttcagcgcaaacaaaaaatcaactattgatgcaattgacgactatagcaatgcaaaa

SEQ ID NO: 787213 - DNA, 75 bp, synthetic construct
  source 1..75: mol_type = other DNA
tagggattttttttttaggtgaaatgctttctaaggtattgccatttctgttattaccttttctcacaagatatc

SEQ ID NO: 787214 - DNA, 75 bp, synthetic construct
  source 1..75: mol_type = other DNA
aagaactacgtaaagatagaaaatcaaataacaataaacttgaatctatgcacgatgtatcaatcggtccattta

SEQ ID NO: 787215 - DNA, 75 bp, synthetic construct
  source 1..75: mol_type = other DNA
aaagtacttattgaacaaatattgaagaaagatactttcactcattattttgatttatgtattaaaagatacttg

SEQ ID NO: 787216 - DNA, 75 bp, synthetic construct
  source 1..75: mol_type = other DNA
catcgttgccatgggattccttgatatctgggacagcatcgatgtttcccgcccgctggagtcaatgaaaaatat

SEQ ID NO: 787217 - DNA, 75 bp, synthetic construct
  source 1..75: mol_type = other DNA
ttcttgatttgactgacaggctgagcagacccctgcgcgcagccggtggtcatgtcagggattttgccagtacaa

SEQ ID NO: 787218 - DNA, 75 bp, synthetic construct
  source 1..75: mol_type = other DNA
gtgggggcagccattcagggggcactgatgccagccattgaaatggacagggcgctcggtgaggtgaaatcactg

SEQ ID NO: 787219 - DNA, 75 bp, synthetic construct
  source 1..75: mol_type = other DNA
gcaaagacgttcgaggcgtgtttatggcgaaaaaagaaacactgctgtctcttgcaaatgttcatgcggtgaatg

SEQ ID NO: 787220 - DNA, 75 bp, synthetic construct
  source 1..75: mol_type = other DNA
ctgaaaacggctaaccatctgtctgaaatcgcagcagcaggcgaaaaggcacaacagaagtcccgggataatctg

SEQ ID NO: 787221 - DNA, 75 bp, synthetic construct
  source 1..75: mol_type = other DNA
tcaagttgagggtgtatacggtgcacaaatagtgccaaacagtggcgagttgtcgttaacaggccaagaaatatc

SEQ ID NO: 787222 - DNA, 75 bp, synthetic construct
  source 1..75: mol_type = other DNA
tcgccgtgccacgaacacgactgtgtgggatcgatggcgggcgtcacctcggcctcgatgtttatgcacatcgtg

SEQ ID NO: 787223 - DNA, 75 bp, synthetic construct
  source 1..75: mol_type = other DNA
catttgtgccatgctgatggcagaagcctgtaacaccggtcctgagccttttatacgtaatgatgtcgcagcact

SEQ ID NO: 787224 - DNA, 75 bp, synthetic construct
  source 1..75: mol_type = other DNA
attttgaccggatgaatatttcagaaaaacgaggagaccataaccggttaggctatgccgtattattatgtacag

SEQ ID NO: 787225 - DNA, 75 bp, synthetic construct
  source 1..75: mol_type = other DNA
atggccgaacttaacccgccactgggcacgacgacgccggaaatattcatggacaacgttaagcgcgctgacgag

SEQ ID NO: 787226 - DNA, 75 bp, synthetic construct
  source 1..75: mol_type = other DNA
ccgacggcgtgaaggtgaaagtgagccgggttcctgacggcgttgccgagtacagcgtgtgggggctgaagctgc

SEQ ID NO: 787227 - DNA, 75 bp, synthetic construct
  source 1..75: mol_type = other DNA
tacggctgtgataatttcgttattgatggtgtcgatatggttaatagcgcgggaatgctgattggctacggtgtt

SEQ ID NO: 787228 - DNA, 75 bp, synthetic construct
  source 1..75: mol_type = other DNA
aaatggggcaaagctccgtcgatatcgacagggttaatcaccatattgttaatgtggaaaagattaactttagat

SEQ ID NO: 787229 - DNA, 75 bp, synthetic construct
  source 1..75: mol_type = other DNA
tcgaatggctttacgctcgcatgtaataaattcagctacaaatatgaaattaaaaataacggcggaaatgtctct

SEQ ID NO: 787230 - DNA, 75 bp, synthetic construct
  source 1..75: mol_type = other DNA
gttacctccaccgctcggcggaaaacatatctaccgtaaggtgcgcgatcgcgcctcctacgcctttgccctggt

SEQ ID NO: 787231 - DNA, 75 bp, synthetic construct
  source 1..75: mol_type = other DNA
ttgcagcgcacagggggagcagtgggaataccgccacgacgccagcggcagacgaacagagaaacgctgcgaccg

SEQ ID NO: 787232 - DNA, 75 bp, synthetic construct
  source 1..75: mol_type = other DNA
cattaagctgtttttcaatcaggccggtaacgcgctgctgaaccagcacggtgacatcaaccgtacccgtaaaat

SEQ ID NO: 787233 - DNA, 75 bp, synthetic construct
  source 1..75: mol_type = other DNA
gcgatctgggctgggtaccggaggagacctttgaaagcgggattgagaaaacggtccgctggtatctggataacc

SEQ ID NO: 787234 - DNA, 75 bp, synthetic construct
  source 1..75: mol_type = other DNA
ccaactgctccaataactacggtccgtaccacttcccggaaaaactgatcccgctgactattctcaatgcgctgg

SEQ ID NO: 787235 - DNA, 75 bp, synthetic construct
  source 1..75: mol_type = other DNA
atgaagattcttgtcaccggcggtgcaggctttatcggctctgccgtggtccgtcatatcattgaaaatacccgg

SEQ ID NO: 787236 - DNA, 75 bp, synthetic construct
  source 1..75: mol_type = other DNA
tggttggcggcggcggtggcggcgctggagcgcgcgccgcaggacctggccaggtagccgttggtggtgccggag

SEQ ID NO: 787237 - DNA, 75 bp, synthetic construct
  source 1..75: mol_type = other DNA
gatacaacggctgcactgaatgaatctgtatcggtcgaggaatttgttcagggcgttgccgatgtgattaatcgc

SEQ ID NO: 787238 - DNA, 75 bp, synthetic construct
  source 1..75: mol_type = other DNA
cctggcgccggttgccgggagtgaacgctactcgttttcccagaccgatatcaccgatgccgctgccgtggcggc

SEQ ID NO: 787239 - DNA, 75 bp, synthetic construct
  source 1..75: mol_type = other DNA
tatccagtcactatcggcgcaggtggggccggtggtgttagtgcgacgaacggcaccaggggcgggaatagcgta

SEQ ID NO: 787240 - DNA, 75 bp, synthetic construct
  source 1..75: mol_type = other DNA
ggaggttattcattatcttggtttgggagatacaagcggatacgtgggacgcttggtgaatacccgggttttcac

SEQ ID NO: 787241 - DNA, 75 bp, synthetic construct
  source 1..75: mol_type = other DNA
tcactggtggaaatggaggcgacggtcagtccggaaatatcagcgtcagcggtgaaggcggaacatcgtactggg

SEQ ID NO: 787242 - DNA, 75 bp, synthetic construct
  source 1..75: mol_type = other DNA
ttccgcttccatcatatctccaccgatgaggtgtacggagacctgcatggcaccgatgacctgttcaccgaagaa

SEQ ID NO: 787243 - DNA, 75 bp, synthetic construct
  source 1..75: mol_type = other DNA
gtatcacttcccggagaaactgatcccgctgactatccttaacgccctggcgggtaaacccctgccggtatatgg

SEQ ID NO: 787244 - DNA, 75 bp, synthetic construct
  source 1..75: mol_type = other DNA
atcggttcgcttgcagcaatataaagagatctttatttccagcgtgatgatgctgttttgtactgagagatcccc

SEQ ID NO: 787245 - DNA, 75 bp, synthetic construct
  source 1..75: mol_type = other DNA
ggtggcggaagtggtgcgtgcatgtatggcggcgcaacacaacaacgcgctggcggagcaggtatggcaggtatt

SEQ ID NO: 787246 - DNA, 75 bp, synthetic construct
  source 1..75: mol_type = other DNA
aaacaggcggtgtatgaattgccggggcgtaacgtaccgctgatcctgtgcagcaacccggcgcgatccggcgtc

SEQ ID NO: 787247 - DNA, 75 bp, synthetic construct
  source 1..75: mol_type = other DNA
ccggcgcggaagcggtggaaaacgcggtgaaaattgctcgcgcccataccggacgacctggcgtgattgcgttta

SEQ ID NO: 787248 - DNA, 75 bp, synthetic construct
  source 1..75: mol_type = other DNA
cggctttgcgcgtaccggtaagctgtttgccatggatcattacgccgataagcctcgcgggcgggatgccgcttt

SEQ ID NO: 787249 - DNA, 75 bp, synthetic construct
  source 1..75: mol_type = other DNA
aacacctgaatgggcggcaagtatcaccggattacccgcgacgcgtattcgtcagttagcaagggaaatggttgc

SEQ ID NO: 787250 - DNA, 75 bp, synthetic construct
  source 1..75: mol_type = other DNA
tttttggggtttgatttttatacatactcaactagggaaattataaaaaaaggctttaccaaaagtggtgaactt

SEQ ID NO: 787251 - DNA, 75 bp, synthetic construct
  source 1..75: mol_type = other DNA
ctcggagaaggttcctatgccagaatttcccatcctttcagccgtggactcatccgatttttgtcttgaatgcct

SEQ ID NO: 787252 - DNA, 75 bp, synthetic construct
  source 1..75: mol_type = other DNA
cggctttgcgcgtaccggtaaactgtttgccatggatcactacgccgataagcgggtcttcccctgttgtggtgg

SEQ ID NO: 787253 - DNA, 75 bp, synthetic construct
  source 1..75: mol_type = other DNA
gcgtggataatccaaccgtaactactgtgacaatcggatatggtggcactggtgcaagtgcgtcggttggtgctc

SEQ ID NO: 787254 - DNA, 75 bp, synthetic construct
  source 1..75: mol_type = other DNA
ccgcaagaatccgtttggcgatatcaaatcggatggcacggtgaaaacggctctcgaaaacctcggtttgggaga

SEQ ID NO: 787255 - DNA, 75 bp, synthetic construct
  source 1..75: mol_type = other DNA
ttctgctgacctgtggcgcatacggcaacgtgattcgtttcctgtatccgctgaccatcccggatgcgcaattcg

SEQ ID NO: 787256 - DNA, 75 bp, synthetic construct
  source 1..75: mol_type = other DNA
tactgctgacctgcggcacctacggtaacgtgattcgtttcttgtatccgctgaccatcccggatacgcaattcg

SEQ ID NO: 787257 - DNA, 75 bp, synthetic construct
  source 1..75: mol_type = other DNA
cggtgctcaacattatcgacaaagaatcactctgcgaacgcgcgaatcaactgggccagcgtctcaaaaacacgt

SEQ ID NO: 787258 - DNA, 75 bp, synthetic construct
  source 1..75: mol_type = other DNA
ctgagttagtggatactattgataaacaatccagtactattgatgctaaaaataaaacttcttcctccgcattct

SEQ ID NO: 787259 - DNA, 75 bp, synthetic construct
  source 1..75: mol_type = other DNA
tcgcattgattttgaaaccaaatctggcaatgctgctgtaagccctggtaactataatatgcctgtgactctttc

SEQ ID NO: 787260 - DNA, 75 bp, synthetic construct
  source 1..75: mol_type = other DNA
atggtgaattactgtcttatatcattggcgctgacaatctcgcctcaatccccgttgtcagcgggttacatcacc

SEQ ID NO: 787261 - DNA, 75 bp, synthetic construct
  source 1..75: mol_type = other DNA
gtatgccatccattgcaacgctcaaccgctggatgtgtgaagacgaggacttccgccaggctgtaaacgactgcc

SEQ ID NO: 787262 - DNA, 75 bp, synthetic construct
  source 1..75: mol_type = other DNA
gacaaactgagaaaattatccataaacgagggtatctcaaatgaccgggttattgaaagtgctctggacatgatt

SEQ ID NO: 787263 - DNA, 75 bp, synthetic construct
  source 1..75: mol_type = other DNA
gcgcacgtagagaaaaccacaccgaagggaattcttaacgagctgattaacgatgcctttaatgatgcgaagagt

SEQ ID NO: 787264 - DNA, 75 bp, synthetic construct
  source 1..75: mol_type = other DNA
tatgcgccaggcgcaggtatggccggaatataatttctggcgtatgttgaagcccggctatgattactttgaaaa

SEQ ID NO: 787265 - DNA, 75 bp, synthetic construct
  source 1..75: mol_type = other DNA
agcccggctatgattactttgaaaaaaatcaccgattgccaaccatcaccgttgaaaatcggcgttataaaatta

SEQ ID NO: 787266 - DNA, 75 bp, synthetic construct
  source 1..75: mol_type = other DNA
tatggttcacgggaattgtgtttcagcgggctgctatgccatgaccgataccggtattgaagagatttatcaact

SEQ ID NO: 787267 - DNA, 75 bp, synthetic construct
  source 1..75: mol_type = other DNA
caatcacttcgctggaggacaatactggaaaatggtatctgactcaggtgaaagctttaaggtttttgtgaaaac

SEQ ID NO: 787268 - DNA, 75 bp, synthetic construct
  source 1..75: mol_type = other DNA
tatacaacaggcgatacccgcgttgggaagagatgcgtcaaggtatgaaagatgtaacaatatgcgaacaaagca

SEQ ID NO: 787269 - DNA, 75 bp, synthetic construct
  source 1..75: mol_type = other DNA
gcggcagtgtatgaccgcagcaatacacaggtgcgcagctttacttacgatgataataccggggccggatggtgg

SEQ ID NO: 787270 - DNA, 75 bp, synthetic construct
  source 1..75: mol_type = other DNA
ctctttcagtatcactgatatccacttctgcgttagctcaggattcccatataaccggtgaacctcatatacagg

SEQ ID NO: 787271 - DNA, 75 bp, synthetic construct
  source 1..75: mol_type = other DNA
atatcgctgagatcttcgactacaccgcaaatctcatgaaagacctcgagatgttctgtcaaaagcctagtctaa

SEQ ID NO: 787272 - DNA, 75 bp, synthetic construct
  source 1..75: mol_type = other DNA
atgagttcgaatagtcttgcgcctcagtatataaaatatgaaatcagacggggagtggagcctagccacatggag

SEQ ID NO: 787273 - DNA, 75 bp, synthetic construct
  source 1..75: mol_type = other DNA
gaatgatctaccggtccggcaaacgccgatgtttacgctgctgcgtgaggcgggattttcaagttcgccacaagg

SEQ ID NO: 787274 - DNA, 75 bp, synthetic construct
  source 1..75: mol_type = other DNA
cggtgctgctggtgccaccgcagctgcgccctttgctggcgcgttatgcaaggttgtttgcgccggggctgcatg

SEQ ID NO: 787275 - DNA, 75 bp, synthetic construct
  source 1..75: mol_type = other DNA
tatcggtggggcggcgattttcgctatcctgctttcctgtgtcggtaaactggctgccgctatccagatgatccc

SEQ ID NO: 787276 - DNA, 75 bp, synthetic construct
  source 1..75: mol_type = other DNA
ttgcagcccgtccaacgtaccaatcaccaccaccgaaggcttcgtatacgctaagagtattgatctggttcgtta

SEQ ID NO: 787277 - DNA, 75 bp, synthetic construct
  source 1..75: mol_type = other DNA
ttgctgccagcctcctgccttcctgtgtactggcctggaacacgccgggagaggatttcagcggagagcttaagc

SEQ ID NO: 787278 - DNA, 75 bp, synthetic construct
  source 1..75: mol_type = other DNA
tgcgggagtgttgcgccatgtgaagggcgggcaatcggtgtatgccggcctgtatgacgacctgaatgtgaatgg

SEQ ID NO: 787279 - DNA, 75 bp, synthetic construct
  source 1..75: mol_type = other DNA
tttcgtggtttcctggcaattatcccgattttaattggcgtgctggtggggtacgcgctctctttcgcaatggga

SEQ ID NO: 787280 - DNA, 75 bp, synthetic construct
  source 1..75: mol_type = other DNA
gctcttccggtggtcaccatgggcgggctggcgctggccggaagctggcttcatcagcatgtcagcgaacgtcgc

SEQ ID NO: 787281 - DNA, 75 bp, synthetic construct
  source 1..75: mol_type = other DNA
aaaatagttcaaagaagcggcgatctaatatttggagtgagcaatataaatcttttcgagtttagtttacttcaa

SEQ ID NO: 787282 - DNA, 75 bp, synthetic construct
  source 1..75: mol_type = other DNA
cagtgaacagcatattgccccgccaacgtattaccattgtcagcagcagcggcatcatcctgataaacgcagtgc

SEQ ID NO: 787283 - DNA, 75 bp, synthetic construct
  source 1..75: mol_type = other DNA
tatcaggaactgaacttcaaagctcgtatggaatccccaagcaaagatgctaccccgggcaacgtttacgctcag

SEQ ID NO: 787284 - DNA, 75 bp, synthetic construct
  source 1..75: mol_type = other DNA
ggggttctgttgcccgtattgcccgggagcatgatatcaatgataatcttctgttcaaatggctcaggctctcgc

SEQ ID NO: 787285 - DNA, 75 bp, synthetic construct
  source 1..75: mol_type = other DNA
actgtaaatctgggtgaagtagcagataccgttctgaaaagcgaccagaaatctttggctgagcctttcactatt

SEQ ID NO: 787286 - DNA, 75 bp, synthetic construct
  source 1..75: mol_type = other DNA
attctttcatattcatatgaagacaagctaaaaaatgaagtaacaagtaaaagacagtttattcttttaagattg

SEQ ID NO: 787287 - DNA, 75 bp, synthetic construct
  source 1..75: mol_type = other DNA
cagaattcaaatcaagtttttatcctacaagacttgggggatatattactaaggagctaatcagtaattttacat

SEQ ID NO: 787288 - DNA, 75 bp, synthetic construct
  source 1..75: mol_type = other DNA
cctagagaaatgctgtgaggtcgaagatgtcattgatatcattgcgcaccagcaagttgaagctacacgctggcg

SEQ ID NO: 787289 - DNA, 75 bp, synthetic construct
  source 1..75: mol_type = other DNA
ttgcaaagtttctttgagaaggttttaaaactaattaaggttggcaaaaatgctgaagcacaaaaattgttagcc

SEQ ID NO: 787290 - DNA, 75 bp, synthetic construct
  source 1..75: mol_type = other DNA
ggcaaatgcggcaaggagagcaggggaaatacgccttgaaccgccccgggaatcctggagactaaactccctgag

SEQ ID NO: 787291 - DNA, 75 bp, synthetic construct
  source 1..75: mol_type = other DNA
cgtggtctggtaaacataccatttgacgtattgcagggcggcgcaagcctgattaatgcaatcagtcaggggctt

SEQ ID NO: 787292 - DNA, 75 bp, synthetic construct
  source 1..75: mol_type = other DNA
cgggcatattaatatgcaggggcgctattcatttacagtgccggaatcggtcagtaagggtgagctgagagcgtt

SEQ ID NO: 787293 - DNA, 75 bp, synthetic construct
  source 1..75: mol_type = other DNA
attatcgaataaaaataatgccgatcagttttttaatgcgctaaaagaaatgaacagaaccttttcgataatata

SEQ ID NO: 787294 - DNA, 75 bp, synthetic construct
  source 1..75: mol_type = other DNA
aagaggcaacaaaggcagttaaggttggggcaagtgatggtgcattagcggcggcggaacgcagatttatggcaa

SEQ ID NO: 787295 - DNA, 75 bp, synthetic construct
  source 1..75: mol_type = other DNA
gtggtcttgctcaggcagaggggattctggcgtcaaagcccggaattacacaggatgcacataccaaagcattca

SEQ ID NO: 787296 - DNA, 75 bp, synthetic construct
  source 1..75: mol_type = other DNA
tatcaggaactgaatttcaaagctcgtatggaatccccaagcaaagatgccacccgggcaacgtttacgctcagg

SEQ ID NO: 787297 - DNA, 75 bp, synthetic construct
  source 1..75: mol_type = other DNA
agtcagatctcgacctgatgtataccgtagtaacaagcccggatacgccaaaagccaacttctggggacatatgc

SEQ ID NO: 787298 - DNA, 75 bp, synthetic construct
  source 1..75: mol_type = other DNA
acaattagcgccagtggctatgacgatacgttacaagcggcaaagactactgtcgatggttcaatcaccttaacc

SEQ ID NO: 787299 - DNA, 75 bp, synthetic construct
  source 1..75: mol_type = other DNA
actgtttgccgagcttgcggtgactaaaaagcgtaaatcccaggacgaagagaacgaaacctgggcgctgtttac

SEQ ID NO: 787300 - DNA, 75 bp, synthetic construct
  source 1..75: mol_type = other DNA
atgaatatgatgatctcatatcaggaacttgttcgcaccttcccttattcaaaagcgaaggttactttcaccaca

SEQ ID NO: 787301 - DNA, 75 bp, synthetic construct
  source 1..75: mol_type = other DNA
tttttggtggctgtgaatttattcgttatgacgatcgtccctggagcgaaaaagagttcaatcgtctgcaaacat

SEQ ID NO: 787302 - DNA, 75 bp, synthetic construct
  source 1..75: mol_type = other DNA
gcaggcaaccgttgttgttgagcagccacaaggcgttggcttaagaacgcgacttgttgtcacgcctcctaattc

SEQ ID NO: 787303 - DNA, 75 bp, synthetic construct
  source 1..75: mol_type = other DNA
cggcggcgccactggcgttggcgtacgtattctggacagccagagcggcgaagtaactttagggaaggtgcgaac

SEQ ID NO: 787304 - DNA, 75 bp, synthetic construct
  source 1..75: mol_type = other DNA
tatcaggaactgaacttcaaagctcgtatggaatccccgggcaaagatgctaccccgggcaacgtttacgctcag

SEQ ID NO: 787305 - DNA, 75 bp, synthetic construct
  source 1..75: mol_type = other DNA
atttaaaggtgaagttatctctgctccatgttctattaaaccaggtgacgaagatttaactgtaaatctgggtga

SEQ ID NO: 787306 - DNA, 75 bp, synthetic construct
  source 1..75: mol_type = other DNA
aggttccattattaatgggggttcacaggtagttaatgagggcggtctggctgaaaactcggtgcttaatgacgg

SEQ ID NO: 787307 - DNA, 75 bp, synthetic construct
  source 1..75: mol_type = other DNA
taaaaatgtagtgctggaaaacgctggctcattaacagtcgtcactggttcccgggcagttgatacgattattaa

SEQ ID NO: 787308 - DNA, 75 bp, synthetic construct
  source 1..75: mol_type = other DNA
gatgccggaatatgaaggcggattctggcacttcattcgcctgccggacggtggcggttacatgatgccggatgg

SEQ ID NO: 787309 - DNA, 75 bp, synthetic construct
  source 1..75: mol_type = other DNA
tgaaaccgtagcacgtcgtatgcaagatcgtgctgcggtttatgcttatcacttaaagactcaaaaattaggtga

SEQ ID NO: 787310 - DNA, 75 bp, synthetic construct
  source 1..75: mol_type = other DNA
atgtgggaaatcagctatattctccagatttccatattatggaaatgcatgattattttatccaaggtcttggcg

SEQ ID NO: 787311 - DNA, 75 bp, synthetic construct
  source 1..75: mol_type = other DNA
aacaattacgcgtttggatggcatcgaatgcgaaaatccaattgttatctgcaatgaagatcaccgatttattgt

SEQ ID NO: 787312 - DNA, 75 bp, synthetic construct
  source 1..75: mol_type = other DNA
tttttcgtccttggggcagtcatgacactatagctgaagggcaacgctttcaggttaaacatgtgattgtattac

SEQ ID NO: 787313 - DNA, 75 bp, synthetic construct
  source 1..75: mol_type = other DNA
cggcttaatgcgccatcctgtttatagcccggagattgattatctggagctttttgacgaaccattagtggtggt

SEQ ID NO: 787314 - DNA, 75 bp, synthetic construct
  source 1..75: mol_type = other DNA
gttaccggttgatcaccctttagcacatgaaaaagagatcaccgccgcgcaactggatggcgtgaatttcgtcag

SEQ ID NO: 787315 - DNA, 75 bp, synthetic construct
  source 1..75: mol_type = other DNA
aagtcgcgttgacggcggcgggagaatgttttctccaggacgcgctggcaatcctcgaacaagcggaaaatgcca

SEQ ID NO: 787316 - DNA, 75 bp, synthetic construct
  source 1..75: mol_type = other DNA
tcattattgctggcgggtccggcagtcgtttatggcctctgtcgcgcacactctatcccaaacagtttttatgtc

SEQ ID NO: 787317 - DNA, 75 bp, synthetic construct
  source 1..75: mol_type = other DNA
agcacttgctgcattacatgctcaaaaaggtggtcaggatcctgtaatgctggttcttgctgctgaccatgtaat

SEQ ID NO: 787318 - DNA, 75 bp, synthetic construct
  source 1..75: mol_type = other DNA
acgataataatcatatcagtggtgatgtcgtaattaaaaattccataggtaattatatccgctcagaatcaggat

SEQ ID NO: 787319 - DNA, 75 bp, synthetic construct
  source 1..75: mol_type = other DNA
ttgtcagcaatccttagcttcctcgactcaagatttagattttatccgcttggataattcttctttttcttgctg

SEQ ID NO: 787320 - DNA, 75 bp, synthetic construct
  source 1..75: mol_type = other DNA
tctgtatttatcgatgaactgaaaaaattccgaccagatattttagccagttgccaacgctccttgtcctcttcg

SEQ ID NO: 787321 - DNA, 75 bp, synthetic construct
  source 1..75: mol_type = other DNA
acctccgttcagattcagggctgcttgctacagttggggtaaaagatcttgttgttgttcaaacaaaagatgctg

SEQ ID NO: 787322 - DNA, 75 bp, synthetic construct
  source 1..75: mol_type = other DNA
gaagtgaatttactgccaaaagtattgcccatgttccgactgaaacagccagaaaccttgatcgagttggtgagt

SEQ ID NO: 787323 - DNA, 75 bp, synthetic construct
  source 1..75: mol_type = other DNA
gtttaaaattccatgttaacggtgatccaagtgattttaatcaggctgttgagtatttaaaacaagattcacaaa

SEQ ID NO: 787324 - DNA, 75 bp, synthetic construct
  source 1..75: mol_type = other DNA
gcgccggacgctatctcgaagaactgaaaaaatatcgtccggatattctcgatgcctgtgaaaaagcgatgagcg

SEQ ID NO: 787325 - DNA, 75 bp, synthetic construct
  source 1..75: mol_type = other DNA
gtcagataatcttaaagagctgcgtttacgccacctcgaaccgaaacgtgatttgatcgtcactattggcaagga

SEQ ID NO: 787326 - DNA, 75 bp, synthetic construct
  source 1..75: mol_type = other DNA
ccggtggtgacttcaccctgccacaatacagggatgaagtgttaaagcagcttccacgggaataccatgaaatcg

SEQ ID NO: 787327 - DNA, 75 bp, synthetic construct
  source 1..75: mol_type = other DNA
tggtgcgcagaataagatgaatggggcaacctgctgaatgaagagaacccgcatcagctgcagcagcttatccgg

SEQ ID NO: 787328 - DNA, 75 bp, synthetic construct
  source 1..75: mol_type = other DNA
agacgatttatcagccggggagcttcacaccactcatcagagttgaaactgccaccggtgaactggccagaacgc

SEQ ID NO: 787329 - DNA, 75 bp, synthetic construct
  source 1..75: mol_type = other DNA
cgaagcccggagacaataatgtcctgcagctggccatgcagagccagctgaaattgttttaccggccgaaagcca

SEQ ID NO: 787330 - DNA, 75 bp, synthetic construct
  source 1..75: mol_type = other DNA
cagcaaagccgaaagaaaaaccatatcgacttctcgatggtgatggtctgtacctttatgtccctgtgtcaggga

SEQ ID NO: 787331 - DNA, 75 bp, synthetic construct
  source 1..75: mol_type = other DNA
gtagagccaagcaaattcactaaccaagaaagtgccgagtaccaagccgtttttagtacagatttacagggggcc

SEQ ID NO: 787332 - DNA, 75 bp, synthetic construct
  source 1..75: mol_type = other DNA
caagctggtgaccttcggcattgtgccggatctacctgaaaccggttatggctatattcgtcgcggtgaagtgtc

SEQ ID NO: 787333 - DNA, 75 bp, synthetic construct
  source 1..75: mol_type = other DNA
gtgcgtaatcttgtcacccgtttccctttgcgcagcggtttgttgaatcgcgtaacgcgggaagtgcatgccgtt

SEQ ID NO: 787334 - DNA, 75 bp, synthetic construct
  source 1..75: mol_type = other DNA
catctgcgtggcgaagaggtggcagccgtctcgttgcaatgcgtcgggccggggcattacgtcgcacaaccacaa

SEQ ID NO: 787335 - DNA, 75 bp, synthetic construct
  source 1..75: mol_type = other DNA
atcagtgaaaatgaatccatctatataccactaggtgccaagcactgtttggaaaaccctggaaaaatcacactc

SEQ ID NO: 787336 - DNA, 75 bp, synthetic construct
  source 1..75: mol_type = other DNA
acagcatttatggcgaaggtcttacccgtaccaacaaatacgggcaattctcaattctgacgtttaccccgctga

SEQ ID NO: 787337 - DNA, 75 bp, synthetic construct
  source 1..75: mol_type = other DNA
acgacgtgctatccgccgttcgctatgcatacatgatgcgccgcttcgcaaaaatgatgcgcgacatcaaaaaac

SEQ ID NO: 787338 - DNA, 75 bp, synthetic construct
  source 1..75: mol_type = other DNA
agatctttattacgagagatcaacgttggccttttttcattagctgcttcccattcatttcataatttccccggc

SEQ ID NO: 787339 - DNA, 75 bp, synthetic construct
  source 1..75: mol_type = other DNA
tgatttggatgaagtggcgggggggctcatttttttttcatgcgtctcgtcgataaaattcaccggagcaggcga

SEQ ID NO: 787340 - DNA, 75 bp, synthetic construct
  source 1..75: mol_type = other DNA
cgtagaagcaaaaatagttgctgaattacgctacgaatatgctttgaatttattaggtagactcggtgtatcaaa

SEQ ID NO: 787341 - DNA, 75 bp, synthetic construct
  source 1..75: mol_type = other DNA
ggacaacaaaggaagggatggtagagacacagctacttatcaagggcgtactcaaagaaatagttatagatgccg

SEQ ID NO: 787342 - DNA, 75 bp, synthetic construct
  source 1..75: mol_type = other DNA
cagtcgatggtccgcgacgataaacagcgcgcgatgctctacgacctggaccgtaccattcagtctcttaaggcc

SEQ ID NO: 787343 - DNA, 75 bp, synthetic construct
  source 1..75: mol_type = other DNA
cgggcagaaaaaactggttcagttgttcgactccggtgaagtctgcgcgtttcgtatcaaatatcccaacggtac

SEQ ID NO: 787344 - DNA, 75 bp, synthetic construct
  source 1..75: mol_type = other DNA
gattccggtgaagtctgcgcgtttcgtatcaaataccccaacggtacggttgatgttttccgtggctggctgagt

SEQ ID NO: 787345 - DNA, 75 bp, synthetic construct
  source 1..75: mol_type = other DNA
aaaacgccattatgatggtcgattttgcgcttgaagcccaacggcacggtaacctgacgccgcaggaagctattt

SEQ ID NO: 787346 - DNA, 75 bp, synthetic construct
  source 1..75: mol_type = other DNA
gtgccaaccgtgctggtgggtaaggtggcagatatcgtcagcaatccttatggcgtgagctggcaaaacctggtg

SEQ ID NO: 787347 - DNA, 75 bp, synthetic construct
  source 1..75: mol_type = other DNA
cgctttggcgacggagaagaggtcctctctctgctcaatatgtatcacaacctgctgcgccagtggacggaagta

SEQ ID NO: 787348 - DNA, 75 bp, synthetic construct
  source 1..75: mol_type = other DNA
ctgccggggcagcagtatgataaggagtcggggctgtactataaccgtcaccggtactacgatccgttgcagggg

SEQ ID NO: 787349 - DNA, 75 bp, synthetic construct
  source 1..75: mol_type = other DNA
agaaagattattgaaccaacagatattgaaacaaaaaaatataattgtctgacatctgttagagaggcatggttt

SEQ ID NO: 787350 - DNA, 75 bp, synthetic construct
  source 1..75: mol_type = other DNA
attcaaaagatggatatcatgaagaaacacacaattatgatgatactcattttaataataaaataatcgttccat

SEQ ID NO: 787351 - DNA, 75 bp, synthetic construct
  source 1..75: mol_type = other DNA
ataaaaatgatgtcctcgacgcgcttcaggcgcttattaagcgctatgacatcgttcagtatggcgagttgcaat

SEQ ID NO: 787352 - DNA, 75 bp, synthetic construct
  source 1..75: mol_type = other DNA
gctgagcactgggttgttgtggctggtaccgcgaaggtgacaatcaatgacaatatcatgctgcttgctgaaaac

SEQ ID NO: 787353 - DNA, 75 bp, synthetic construct
  source 1..75: mol_type = other DNA
cggtgaaacctggcggtgccttctcgatgcagatgcaccaccatcgcgctgagcattgggttattctcgccggca

SEQ ID NO: 787354 - DNA, 75 bp, synthetic construct
  source 1..75: mol_type = other DNA
cttctgcagatttatattatgatgaccttgatactcataatcttgtttttggtgcaggtatatctgggacaacag

SEQ ID NO: 787355 - DNA, 75 bp, synthetic construct
  source 1..75: mol_type = other DNA
ggtttcgccgtggcgctcggtttgctgcaacagaagattcacgcggtggattatcgcgatcccaccggggtgacc

SEQ ID NO: 787356 - DNA, 75 bp, synthetic construct
  source 1..75: mol_type = other DNA
caccggccgccaccattcacggtttcgccgtggcgctcggtttgctgcaacagaagattcacgcggtggattatc

SEQ ID NO: 787357 - DNA, 75 bp, synthetic construct
  source 1..75: mol_type = other DNA
tgcctatcgggaacatgggataagcatacttacgggtaaaaaaggacgctattctgctgagttaaaacgtaagcg

SEQ ID NO: 787358 - DNA, 75 bp, synthetic construct
  source 1..75: mol_type = other DNA
gcattaccctcgttcgcgacggcaaaatagtgaataaaatcgagatttcccgcctggacacgctgcttgatgaaa

SEQ ID NO: 787359 - DNA, 75 bp, synthetic construct
  source 1..75: mol_type = other DNA
cgccttatatccccgccctgaaggacggggttttacggcgcaccggataaaccaggccaagcgtatgctggttga

SEQ ID NO: 787360 - DNA, 75 bp, synthetic construct
  source 1..75: mol_type = other DNA
tatcgtcaggggcgagaaatttgcgatcggctcctgcgccatttaagcgacgatcctacaggaaatcgggttaac

SEQ ID NO: 787361 - DNA, 75 bp, synthetic construct
  source 1..75: mol_type = other DNA
atcacgaagttgacttcttactgcctgcacagaaatttaacattcagttctcatatatttcccagaaaggactac

SEQ ID NO: 787362 - DNA, 75 bp, synthetic construct
  source 1..75: mol_type = other DNA
tgggtggtgcagttcttctgtcaggatgaaaatgatgtggatgcgtatcttgaccatctgaaggggtatgtgaag

SEQ ID NO: 787363 - DNA, 75 bp, synthetic construct
  source 1..75: mol_type = other DNA
aaagcacaaatagcaacctatttcggcctgacccaccgtgagacagaggaggcgatttccgatcttgtgcagcgt

SEQ ID NO: 787364 - DNA, 75 bp, synthetic construct
  source 1..75: mol_type = other DNA
taccccacatccttacgccatttagagcgcctatggcttcggtctgcgctaagcgtaaaggccaggttctacatc

SEQ ID NO: 787365 - DNA, 75 bp, synthetic construct
  source 1..75: mol_type = other DNA
aacaaaatcagcgtgaaaccgggctccggtgtcagcctgcccccgtttgcggatgcgtataaactggttgaggaa

SEQ ID NO: 787366 - DNA, 75 bp, synthetic construct
  source 1..75: mol_type = other DNA
cggccatcccggattcagtttctttaaccggggtggggatgtgctgacatttgatccgctgaataaactggatcg

SEQ ID NO: 787367 - DNA, 75 bp, synthetic construct
  source 1..75: mol_type = other DNA
tttattcaggttgctccacaatttacacttctgtatacccttaaacttgtcacgcttattaatcttggaatccag

SEQ ID NO: 787368 - DNA, 75 bp, synthetic construct
  source 1..75: mol_type = other DNA
tttaacccttccttcccgttccgcctgttacatatgtccactgcggctttccttgcaagcgctttttttgtcgga

SEQ ID NO: 787369 - DNA, 75 bp, synthetic construct
  source 1..75: mol_type = other DNA
actgggaaaacccgccgggtgagcccacgccgctgctgctgtttggctggccggatatggaacaggaacgcaccc

SEQ ID NO: 787370 - DNA, 75 bp, synthetic construct
  source 1..75: mol_type = other DNA
gcgcttacggaagaacagagccaactgctgcgctcagcggtaaaatcaccggggcagtataccgagggcgtggtg

SEQ ID NO: 787371 - DNA, 75 bp, synthetic construct
  source 1..75: mol_type = other DNA
atggctcttactgatatcaaagtcagaacggttaagcctgcagacaaatctttcaaacttaccgatgatgagggg

SEQ ID NO: 787372 - DNA, 75 bp, synthetic construct
  source 1..75: mol_type = other DNA
acgccgggcaaaggcggcagagatggcggaatcactgggaatgttcacccagaaagggagttttgaggcggagct

SEQ ID NO: 787373 - DNA, 75 bp, synthetic construct
  source 1..75: mol_type = other DNA
cctacatcagccagtaatttgacatggttcttgcagcaatttttaccggatcttcctgacagctatcgggtgatt

SEQ ID NO: 787374 - DNA, 75 bp, synthetic construct
  source 1..75: mol_type = other DNA
aggttaatggtgactcactgttgattaactggaactgtgcagcctcgaaatccccaccgaagacccctgatgaaa

SEQ ID NO: 787375 - DNA, 75 bp, synthetic construct
  source 1..75: mol_type = other DNA
gaacaccgaggtgctgaataaccgaaccacggatgtgataaacagccatgctgagaccatcggcaacaatcaggt

SEQ ID NO: 787376 - DNA, 75 bp, synthetic construct
  source 1..75: mol_type = other DNA
aaaaaatgtcggcaatgaatatgatcacgtgttttatagcggcacgattgacggttattttgactactcccatgg

SEQ ID NO: 787377 - DNA, 75 bp, synthetic construct
  source 1..75: mol_type = other DNA
cagaacctgcgctaccagggacagtacctcgacagggaaacagggctgcattacaatctgcacaggtactatgat

SEQ ID NO: 787378 - DNA, 75 bp, synthetic construct
  source 1..75: mol_type = other DNA
cgtgatgcccttgctaacggtgttcgggatgaactggttcgccggggaataatgaaaattaagggaaataaaatt

SEQ ID NO: 787379 - DNA, 75 bp, synthetic construct
  source 1..75: mol_type = other DNA
gcagactggccttaacagacaaatcaaatggctatttttcagaggttggcgagataccgcatctttcaactattc

SEQ ID NO: 787380 - DNA, 75 bp, synthetic construct
  source 1..75: mol_type = other DNA
taaagctgatgagattcaaaactactgtgcttattctagtgcttccgtggctataaaactcatcattgataagta

SEQ ID NO: 787381 - DNA, 75 bp, synthetic construct
  source 1..75: mol_type = other DNA
cagctcgccgcgcagcactcgccgaccttccaggcattaccagcagaacgtcagtcgttcttccgctccgtgctc

SEQ ID NO: 787382 - DNA, 75 bp, synthetic construct
  source 1..75: mol_type = other DNA
ttacaccgataaaggcgaatggctgacgctgaagcaactccgtgagcgtgatgcacaggtattcagaaaagcagg

SEQ ID NO: 787383 - DNA, 75 bp, synthetic construct
  source 1..75: mol_type = other DNA
attctcggcaattgattgtgataaatatattcatactttttatagtggcacaatcgatgggttctttaattatga

SEQ ID NO: 787384 - DNA, 75 bp, synthetic construct
  source 1..75: mol_type = other DNA
gtccgttttaattatgatgataattatttttcgcatcaatatcagggaatgccggaggacggctatacacctcta

SEQ ID NO: 787385 - DNA, 75 bp, synthetic construct
  source 1..75: mol_type = other DNA
attgggtacgtatcgatatttagatatggatgtaactatcactgaggccttaaacaccgccgaacagtttttaga

SEQ ID NO: 787386 - DNA, 75 bp, synthetic construct
  source 1..75: mol_type = other DNA
cgtcatcattgtaattgcactggcttatatgttcttcgctggccgcgcactgcgcgcagaagaagatgcagaaaa

SEQ ID NO: 787387 - DNA, 75 bp, synthetic construct
  source 1..75: mol_type = other DNA
ataatttactaatattgttgttttcgataattccatttattattactctgctcgcagataaatatgtgatttttt

SEQ ID NO: 787388 - DNA, 75 bp, synthetic construct
  source 1..75: mol_type = other DNA
ttggttttatttttttgtattttctatttttgaagcagttattactttgagatggttttatcatggtattcagca

SEQ ID NO: 787389 - DNA, 75 bp, synthetic construct
  source 1..75: mol_type = other DNA
cctggcccgcctgcgcgacggcgcgacggcgcgggtttatcagcagggccgctggcagccgctcgcaggcgcggt

SEQ ID NO: 787390 - DNA, 75 bp, synthetic construct
  source 1..75: mol_type = other DNA
ccttacattgaagcgaactggatcaacaatagcaaagtctacgccgtgaagatgaatggtcaaaccgtaggccgt

SEQ ID NO: 787391 - DNA, 75 bp, synthetic construct
  source 1..75: mol_type = other DNA
ttggtccgaagtctgagccgatcaaaggcgatctcctgaactacgatgaagtgatggagcgcatggatcacttca

SEQ ID NO: 787392 - DNA, 75 bp, synthetic construct
  source 1..75: mol_type = other DNA
tacattgagattttctacaatcgtcagcgtcgtcactctcgtcttgggaatatctccccggcagccttcaggata

SEQ ID NO: 787393 - DNA, 75 bp, synthetic construct
  source 1..75: mol_type = other DNA
accagtgaatcactggaaaaaaccggaaaagatgctgataaaacggcccgtcgaatggaagatgccgggaaacgg

SEQ ID NO: 787394 - DNA, 75 bp, synthetic construct
  source 1..75: mol_type = other DNA
ggaaaaatcaagttttctatagatgagatttatgtcgctatggcgggggcaaaagaaaacttaattctcgttagt

SEQ ID NO: 787395 - DNA, 75 bp, synthetic construct
  source 1..75: mol_type = other DNA
ttctggtgttatgatgaatgggatgatatttatgctccagaggtattaattaggagtgttaaaaacaatgaaaca

SEQ ID NO: 787396 - DNA, 75 bp, synthetic construct
  source 1..75: mol_type = other DNA
ctgaagttactaaagcggcctcttcagaaaacgcgagttcagcaaaactctccgtgccggagagacaaaaactgg

SEQ ID NO: 787397 - DNA, 75 bp, synthetic construct
  source 1..75: mol_type = other DNA
gtcagataatcttaaagagttacgtttacgccacctcgaaccgaaacgtgatttgatcgttactattggcaagga

SEQ ID NO: 787398 - DNA, 75 bp, synthetic construct
  source 1..75: mol_type = other DNA
cttcctcatctaaacgtccctacagaaaagggaatccgctttctgctgcagagcgtcagcagaaagctgttgcac

SEQ ID NO: 787399 - DNA, 75 bp, synthetic construct
  source 1..75: mol_type = other DNA
tttctacaatagcaataatcaacctgcttatatatttgaaggtggtttgatgccttgcaataaagcctttgacat

SEQ ID NO: 787400 - DNA, 75 bp, synthetic construct
  source 1..75: mol_type = other DNA
cagattgcttagcaagctcgatagcgcggtgaataacaacaatcaagaaaaaggaaaactcgacgttatatcctc

SEQ ID NO: 787401 - DNA, 75 bp, synthetic construct
  source 1..75: mol_type = other DNA
aataccgttaatcgtcttcaggtgagggaacaaattgaacaacggctacaaaaaattaaggccattaatccccat

SEQ ID NO: 787402 - DNA, 75 bp, synthetic construct
  source 1..75: mol_type = other DNA
tgattttggcggctatggttaccgccttactgttcgtcattctggtaaattacctctacattcgtcccagaatga

SEQ ID NO: 787403 - DNA, 75 bp, synthetic construct
  source 1..75: mol_type = other DNA
taagtctcagaacggtgctgcaatgtccttcggtcgtacctccaccttcctggatgtgtacatcgaacgtgacct

SEQ ID NO: 787404 - DNA, 75 bp, synthetic construct
  source 1..75: mol_type = other DNA
acgggctggatgtcgctgtcacggaaaccggaagtgacctggtacggctgggacggcgaccggctgaccacgata

SEQ ID NO: 787405 - DNA, 75 bp, synthetic construct
  source 1..75: mol_type = other DNA
gccggcaccggctggtgcactacacgcggacacaatatgcagagccgctggtcgaaagtcgctatctttacgacc

SEQ ID NO: 787406 - DNA, 75 bp, synthetic construct
  source 1..75: mol_type = other DNA
cattggtattggtctgtccgggctgctttctccagtactggcgatcgtagcgctgtgtgttgcagccatcgggtt

SEQ ID NO: 787407 - DNA, 75 bp, synthetic construct
  source 1..75: mol_type = other DNA
gtagattttgatttactacgtaattttaatggggggccagggttaaatcgagaaaactttatttatatcagcaat

SEQ ID NO: 787408 - DNA, 75 bp, synthetic construct
  source 1..75: mol_type = other DNA
gtcggggatgatatttttgcaagagaggacgccgaaagcattctttttgatttgattaactggcgatatggctat

SEQ ID NO: 787409 - DNA, 75 bp, synthetic construct
  source 1..75: mol_type = other DNA
ggccagtagtgcgcctaatgttttcaaaacattcttcagagcattaagtccttacgattacacactgtattgcag

SEQ ID NO: 787410 - DNA, 75 bp, synthetic construct
  source 1..75: mol_type = other DNA
caacgctcagtggctgcaagccaacatgaacgctccacgtcagtatgctacttacgactgtataaaagttaactg

SEQ ID NO: 787411 - DNA, 75 bp, synthetic construct
  source 1..75: mol_type = other DNA
ctggcagcggtggcggtcatcggttcgctgattattttcactctgcgtgtaaatcgcactgttgcgcagaccgac

SEQ ID NO: 787412 - DNA, 75 bp, synthetic construct
  source 1..75: mol_type = other DNA
ttggcgtcacggcgaccgtactcgaaacagccggttttcatcaggagatttcgatggggcgctttgcgctggtga

SEQ ID NO: 787413 - DNA, 75 bp, synthetic construct
  source 1..75: mol_type = other DNA
acagcgcgggggcgtcactggggaccgggttcaccttgtacgatgacgtgtccttctctgtcagtgccggataca

SEQ ID NO: 787414 - DNA, 75 bp, synthetic construct
  source 1..75: mol_type = other DNA
cgtcagcgctgctgcatccgacaagggcagccgcagtgcttcggcgtcggtgaattatgactttgatgcagtgca

SEQ ID NO: 787415 - DNA, 75 bp, synthetic construct
  source 1..75: mol_type = other DNA
tatgactatggatgctcatagatgtataaaagaacaaactaaaccaagtggtgctgcaaaaataacttgctgtgg

SEQ ID NO: 787416 - DNA, 75 bp, synthetic construct
  source 1..75: mol_type = other DNA
gcagtatgacatggtagcggggagacgttcttccgggggagacatgaaaaagccgttttctgattcggataaggg

SEQ ID NO: 787417 - DNA, 75 bp, synthetic construct
  source 1..75: mol_type = other DNA
gatgaacttttttggaaactatgctgatccattttggtctagatatccggcattttcatttgagccattttacta

SEQ ID NO: 787418 - DNA, 75 bp, synthetic construct
  source 1..75: mol_type = other DNA
gggtgatttattgttagggaagtctcagacccggagcgaactgttttcagattttaatttctacggtattgccct

SEQ ID NO: 787419 - DNA, 75 bp, synthetic construct
  source 1..75: mol_type = other DNA
ggtaatggaaagcaatgtcagttttccgcaaaaggtttaaaagcaaatatcaatgaggttcaggaggttcgttgt

SEQ ID NO: 787420 - DNA, 75 bp, synthetic construct
  source 1..75: mol_type = other DNA
ggggatgggagacagtgccgtttctccatggcaggattgaaagcaaatactaacaaggttcaggaggttcgctgt

SEQ ID NO: 787421 - DNA, 75 bp, synthetic construct
  source 1..75: mol_type = other DNA
gtgttatttcatcaacgtttatttaaactatctacgttaagtcttgcattagtttcacacttttcttttgcaggt

SEQ ID NO: 787422 - DNA, 75 bp, synthetic construct
  source 1..75: mol_type = other DNA
taacagtggaggatgcgtcaggccgaaaaactaccacaacatatccggtcaccactctcccgacactgctgcgtc

SEQ ID NO: 787423 - DNA, 75 bp, synthetic construct
  source 1..75: mol_type = other DNA
atatttctggtattgcggccacaccgtcccgtattaccgtcacgcagaatggctacaccgtttattcccgaatga

SEQ ID NO: 787424 - DNA, 75 bp, synthetic construct
  source 1..75: mol_type = other DNA
tgaagggtatgtacctgttcaggaaagttttaaaagaactgatgttttttttgattccatgattatggatgctca

SEQ ID NO: 787425 - DNA, 75 bp, synthetic construct
  source 1..75: mol_type = other DNA
cgctttcattaaacaccgtcgttgcgaagtgatcagcgtctcgccgctgttgcgccagctactgcttgaggctgt

SEQ ID NO: 787426 - DNA, 75 bp, synthetic construct
  source 1..75: mol_type = other DNA
acgcaggacggagaatgggtggttcctccgcaacacgctgtctggatcccccctgaaaccgtgcatgccgtcaga

SEQ ID NO: 787427 - DNA, 75 bp, synthetic construct
  source 1..75: mol_type = other DNA
attttcaaataccagcgttgaacaattagatcgttttaaaaatagccaaattattatggcgtatggtgatttata

SEQ ID NO: 787428 - DNA, 75 bp, synthetic construct
  source 1..75: mol_type = other DNA
tgcgtattggcgagtacgatatcgatattctcgacgtacaggacaatatgattaagcaggtaaaagtttttcctg

SEQ ID NO: 787429 - DNA, 75 bp, synthetic construct
  source 1..75: mol_type = other DNA
catcatctttcgccactatgttccgccgtgtcacgggacagccgccttcgtattgtcggcttgatttcaaaagct

SEQ ID NO: 787430 - DNA, 75 bp, synthetic construct
  source 1..75: mol_type = other DNA
agcaggcaaaccggtgaacgaagtggcattatcccttggatacgacaatgcgtcctctttcgccaccatgttccg

SEQ ID NO: 787431 - DNA, 75 bp, synthetic construct
  source 1..75: mol_type = other DNA
gaaatgcctgcagacattgtgagtaatatatatgatttattaaacctgcgaatgcaaaaagatgaggggcattta

SEQ ID NO: 787432 - DNA, 75 bp, synthetic construct
  source 1..75: mol_type = other DNA
acatgtttttattattcttccgcacaaggctatcagactcgcttacaacatacatctcaagatgttcgcgagtta

SEQ ID NO: 787433 - DNA, 75 bp, synthetic construct
  source 1..75: mol_type = other DNA
aagattgatgaaataatcgcttgcttagccagtcctcaggggattacatgtttttattattcttccgcacaaggc

SEQ ID NO: 787434 - DNA, 75 bp, synthetic construct
  source 1..75: mol_type = other DNA
gctatacaccacatttctcaggtcatgagacttttccactgaagcagatgtggctaaaaaagtcgtacgatcaaa

SEQ ID NO: 787435 - DNA, 75 bp, synthetic construct
  source 1..75: mol_type = other DNA
acagaaatggaacaggctcttgctgctgaactggaggcatatgcatccaccccgggagcacaggacgtgttgcgc

SEQ ID NO: 787436 - DNA, 75 bp, synthetic construct
  source 1..75: mol_type = other DNA
gctatacaccccacttctccggtcatgagactttcccactaaagcagatgtggctgaaaaagtcttatgatcaaa

SEQ ID NO: 787437 - DNA, 75 bp, synthetic construct
  source 1..75: mol_type = other DNA
tttgatgctgcaatcaacctagggcgctgggtactctccagtaacatgaacgtgtctcatgaacgtgataaaacc

SEQ ID NO: 787438 - DNA, 75 bp, synthetic construct
  source 1..75: mol_type = other DNA
gccaagattgaagcgataacaacacaaactctacttttcgacgcggaacagaaaaataagcagcttgaagatcag

SEQ ID NO: 787439 - DNA, 75 bp, synthetic construct
  source 1..75: mol_type = other DNA
cccgttagtcaggcatttgcattacgttctattataaaaatagctcaggaggtaaaaaaggatggtaaaatgtca

SEQ ID NO: 787440 - DNA, 75 bp, synthetic construct
  source 1..75: mol_type = other DNA
caggaaataaaacgcttaatagtaaatatcatgtccggttctcggaacgttagcactgatattcttgactatttt

SEQ ID NO: 787441 - DNA, 75 bp, synthetic construct
  source 1..75: mol_type = other DNA
ctgactttattctggtcaagtgctctgaaaaagaggttatagaattagcactcaaatacatgtctagcgagacaa

SEQ ID NO: 787442 - DNA, 75 bp, synthetic construct
  source 1..75: mol_type = other DNA
tggtgcgtggcgtttacgcgacaataccatctggagttataacagtagcgacagatcatcaggtagcaaaaataa

SEQ ID NO: 787443 - DNA, 75 bp, synthetic construct
  source 1..75: mol_type = other DNA
atgtctggagtgttggcaagtacagcggcggctgtaggtatcattgacaaagctgtaggtattgcaaagaagctc

SEQ ID NO: 787444 - DNA, 75 bp, synthetic construct
  source 1..75: mol_type = other DNA
cttatcagcccggaaggggaaacggcgtggtgcggggagtatgacgaatggggaaacctgctgggcgaaaccagt

SEQ ID NO: 787445 - DNA, 75 bp, synthetic construct
  source 1..75: mol_type = other DNA
ccttctcgctaatgatgggcgtgccgggaaggctctgagcgatgggcagttaataaattctcaggctgaaatgtg

SEQ ID NO: 787446 - DNA, 75 bp, synthetic construct
  source 1..75: mol_type = other DNA
ctctatgacccgctgggccgccggacgggaaaacgggtatggcggcgggagcgtgacctgacggggtggatgtcg

SEQ ID NO: 787447 - DNA, 75 bp, synthetic construct
  source 1..75: mol_type = other DNA
cattaacgggttcgccagtcggcgcaatgaaggtatttttgattttctatatcgcctgcgtagtgattacctggg

SEQ ID NO: 787448 - DNA, 75 bp, synthetic construct
  source 1..75: mol_type = other DNA
tggaattctacaaaaacaaaggcgctcgccaccaatgaaaaacagcaaatcacatttttaggtaaacatcatgac

SEQ ID NO: 787449 - DNA, 75 bp, synthetic construct
  source 1..75: mol_type = other DNA
taaacttgccactttcacttggcgttactcgacggacgctattcaggtggatgagtaagattaaaaattggcccg

SEQ ID NO: 787450 - DNA, 75 bp, synthetic construct
  source 1..75: mol_type = other DNA
ggtgaacgccggcaacagtgcgtcggggctggcgaccagcggtaagggtattcaggtggttgaagccattaacgg

SEQ ID NO: 787451 - DNA, 75 bp, synthetic construct
  source 1..75: mol_type = other DNA
gggggacctgtttctgggaaaatcacagacccgtacggagctgttttctgactttaatttctacggagcggcact

SEQ ID NO: 787452 - DNA, 75 bp, synthetic construct
  source 1..75: mol_type = other DNA
caatacagtgttgatgtatttgttaacaatgaaaaaaccggtacggctgagttaaacattacgccggcagatgaa

SEQ ID NO: 787453 - DNA, 75 bp, synthetic construct
  source 1..75: mol_type = other DNA
cgactgggttacagcgtcagtgctgcagcctcagacaaaggcgcacgcagtgcatcagccagtatgaactatggc

SEQ ID NO: 787454 - DNA, 75 bp, synthetic construct
  source 1..75: mol_type = other DNA
ctggcggtctggggggcacgcagatgctggggggcctgggggcgttgtcactcagtgcgaacgtgtcaaaggcca

SEQ ID NO: 787455 - DNA, 75 bp, synthetic construct
  source 1..75: mol_type = other DNA
gatgatgaaaaaagatgcttattatgatgtttttgacaaggaaaaacagtgttatgtattgacccgtaatcccca

SEQ ID NO: 787456 - DNA, 75 bp, synthetic construct
  source 1..75: mol_type = other DNA
atatctccggggttgctcccacgccttcccgtattaccgtgaaacagaacggatatacggtctattcaaaaatgg

SEQ ID NO: 787457 - DNA, 75 bp, synthetic construct
  source 1..75: mol_type = other DNA
cattttactcctaacattgtacctgatacattattaagccaaggtaggacaaaatacatcctttatgtatctcgc

SEQ ID NO: 787458 - DNA, 75 bp, synthetic construct
  source 1..75: mol_type = other DNA
gacgctggttttcttgatgcaaccactatcaagcccactaagttaactgactttattctcgttggatgctctgaa

SEQ ID NO: 787459 - DNA, 75 bp, synthetic construct
  source 1..75: mol_type = other DNA
cacggcgactgcaggcagcaatgtcagcttcaccccgtctcagaaaggcacgtcgcttgacctgcaggcgggtat

SEQ ID NO: 787460 - DNA, 75 bp, synthetic construct
  source 1..75: mol_type = other DNA
ttagatgctgcgattaacgctggacgctgggtgttatctagtaatatgaacgtttctcactctgataatgaatca

SEQ ID NO: 787461 - DNA, 75 bp, synthetic construct
  source 1..75: mol_type = other DNA
gaaaatcggggcggttcactatggcaaacagatattctcactcgcaaatacaacgccgataagtttgaaaagcga

SEQ ID NO: 787462 - DNA, 75 bp, synthetic construct
  source 1..75: mol_type = other DNA
cgaacgaaaaaacgctccactcgctggcgcatggggcagggcgtaaatgggggcgcaccgagtgtaaagggcgtc

SEQ ID NO: 787463 - DNA, 75 bp, synthetic construct
  source 1..75: mol_type = other DNA
cagtcattcacgtcctcgaaaacagtgatgcggtacataacatcgttgtttgtacgctgtgctcctgctatccgt

SEQ ID NO: 787464 - DNA, 75 bp, synthetic construct
  source 1..75: mol_type = other DNA
tattttcattattaagtattcaaggggttggttatatcctgccattaattactttgccatatcttgttcggattt

SEQ ID NO: 787465 - DNA, 75 bp, synthetic construct
  source 1..75: mol_type = other DNA
agataatacttcgtctgctcgcaatggcttaacatggcttaaggtagattatgacttcacattagaagattttgg

SEQ ID NO: 787466 - DNA, 75 bp, synthetic construct
  source 1..75: mol_type = other DNA
cccggcgtttctctttctgcggcggtagccttactggagcgacgcagtcaggcaatccatgccccggcgctggat

SEQ ID NO: 787467 - DNA, 75 bp, synthetic construct
  source 1..75: mol_type = other DNA
tgcgtctggaacatcccaacgctagtgccgaagcggcgctgacgatgctggcgcagttatccccggcacaatccg

SEQ ID NO: 787468 - DNA, 75 bp, synthetic construct
  source 1..75: mol_type = other DNA
atcgaggccgtcatgtcctgggatgctttcgccgagagcgtcaccgaagcgcagcggctcgcgcaacccgaggac

SEQ ID NO: 787469 - DNA, 75 bp, synthetic construct
  source 1..75: mol_type = other DNA
tatcttgcaatttccagcatgttttccagatagtgttattggttttatagctgataaatccaaatgcgatgttta

SEQ ID NO: 787470 - DNA, 75 bp, synthetic construct
  source 1..75: mol_type = other DNA
tttccggcagaaaaattatgacggcataatggatgctgaaaccgctgccatcctgtatgcattgctggagaagta

SEQ ID NO: 787471 - DNA, 75 bp, synthetic construct
  source 1..75: mol_type = other DNA
gaaaaacgtcgcgacgacggcattccaggcattacaaactatatcttctcagaaacggccgcccgtggaatgtat

SEQ ID NO: 787472 - DNA, 75 bp, synthetic construct
  source 1..75: mol_type = other DNA
gaacatggggtgcgctggtatatcaatttggttgatgctgtggatgtgagttatttagtattcgaactctatagc

SEQ ID NO: 787473 - DNA, 75 bp, synthetic construct
  source 1..75: mol_type = other DNA
cgcgatgcttgccgctatgacagcgatttccgggaaagatgctgatgcgctggcggtttttgagcgtgaacatcc

SEQ ID NO: 787474 - DNA, 75 bp, synthetic construct
  source 1..75: mol_type = other DNA
aaaaatagcaatataaatgaaacattagagcaaatggcgcaagccctgttcaaaagctggtttgtcgattttgaa

SEQ ID NO: 787475 - DNA, 75 bp, synthetic construct
  source 1..75: mol_type = other DNA
gcaggctgtgaatcggactcggatttgctaaagttagtccgttatttttgtggtgcacattctaaattatttaat

SEQ ID NO: 787476 - DNA, 75 bp, synthetic construct
  source 1..75: mol_type = other DNA
caaactatgcagtttcctataagaatatagacaagaagcaacgggaatatttatgtcatctcaatcacttttcta

SEQ ID NO: 787477 - DNA, 75 bp, synthetic construct
  source 1..75: mol_type = other DNA
atggaaaatcttattggcactccaccaaactatgcagttccccataagtatatagacatggagcaaatggaatat

SEQ ID NO: 787478 - DNA, 75 bp, synthetic construct
  source 1..75: mol_type = other DNA
caaaccacgcagttccccataagtatatagacatggagcaaatggaatatttatgtcatctcaatcgtttttcta

SEQ ID NO: 787479 - DNA, 75 bp, synthetic construct
  source 1..75: mol_type = other DNA
tggctattgcgggccgtacctgattgagatgtggagcgaaacggcggaagacccggcggcagaagtagcgaaagc

SEQ ID NO: 787480 - DNA, 75 bp, synthetic construct
  source 1..75: mol_type = other DNA
aaaaaaataaaaccgtaagcaatgtcactgcgggtaaattttctgcacctgccacatttacagtaacctataact

SEQ ID NO: 787481 - DNA, 75 bp, synthetic construct
  source 1..75: mol_type = other DNA
ttttttattaaaactgtgctcaaatacttgtattccagccccatatgccgataacactgtctttgataacaaaat

SEQ ID NO: 787482 - DNA, 75 bp, synthetic construct
  source 1..75: mol_type = other DNA
aacaccgagtatgacaaaggcacttacgccggcaacgccgtgatcaacgccgtgccgttcagtaactacaacagc

SEQ ID NO: 787483 - DNA, 75 bp, synthetic construct
  source 1..75: mol_type = other DNA
atagattttattcaacagaattcatctattctaagtatgagttatcataatacaggagataacctcggtggggct

SEQ ID NO: 787484 - DNA, 75 bp, synthetic construct
  source 1..75: mol_type = other DNA
atgacttataacgggtttaaccgtcctgcgttagttgctggtatacccttaatgttgttattgttcacggctttt

SEQ ID NO: 787485 - DNA, 75 bp, synthetic construct
  source 1..75: mol_type = other DNA
atgccaacaccaaatcctctggcaccggtgaaaggggccggaaccactctgtgggtttataaggggaacggtgac

SEQ ID NO: 787486 - DNA, 75 bp, synthetic construct
  source 1..75: mol_type = other DNA
gccggtttcagcagtcatttaaatcaactaagtgatgccgattttatcaatgccctgcccgatttacgcgcggcg

SEQ ID NO: 787487 - DNA, 75 bp, synthetic construct
  source 1..75: mol_type = other DNA
atcaaacgccgcgaccaggagaacgaggatattgcgcttacggttgggaagctgcgtgttgagttggaagctgca

SEQ ID NO: 787488 - DNA, 75 bp, synthetic construct
  source 1..75: mol_type = other DNA
caacgctgggccgacctcctgagtagcgaaagttggcaggaggtgctcgataaaaccgccgcttaccagcaggag

SEQ ID NO: 787489 - DNA, 75 bp, synthetic construct
  source 1..75: mol_type = other DNA
gagttaaaagcgttgaccgtctggcacgtaatacccgtgaccttctgggtatactggatgaattgactacaaagg

SEQ ID NO: 787490 - DNA, 75 bp, synthetic construct
  source 1..75: mol_type = other DNA
aaagttcgtcctggcgacacggttcgagttaaaagcgttgaccgcttggcacgtaatacccgcgatctgctggag

SEQ ID NO: 787491 - DNA, 75 bp, synthetic construct
  source 1..75: mol_type = other DNA
gtctacggacctgcaagcaagtgtggtactcgctttccaatcgttatttgaggctaagggtgttcccgttgacta

SEQ ID NO: 787492 - DNA, 75 bp, synthetic construct
  source 1..75: mol_type = other DNA
aggcggttcctgttaccgcattaagcctgacagaccttgaacagagtgcactagactggtcacaattctattttg

SEQ ID NO: 787493 - DNA, 75 bp, synthetic construct
  source 1..75: mol_type = other DNA
cctgcgctccgttgaaggcggcgcagcgtttcagacgctaattaccatcgccaaaattatcccgttcactatcgt

SEQ ID NO: 787494 - DNA, 75 bp, synthetic construct
  source 1..75: mol_type = other DNA
atctctgccaccagttggtcgtataccggcatggcctctatctgttatatgaccggcgaaattaaaaccccggaa

SEQ ID NO: 787495 - DNA, 75 bp, synthetic construct
  source 1..75: mol_type = other DNA
ggagtccatccgactcaggccactaaaatcagctatggctggatacgtaaaggccagaaaaaagcagtaaaaaca

SEQ ID NO: 787496 - DNA, 75 bp, synthetic construct
  source 1..75: mol_type = other DNA
attaaccagcaatgtacaggagttatcactgaaccagaaaaatacaccacgggtatctataaagccacaatggat

SEQ ID NO: 787497 - DNA, 75 bp, synthetic construct
  source 1..75: mol_type = other DNA
attaatgagggtgccaatgtaaaagtacaaaatgcgcaaggcgtttatactgatttttggggaaatgcgattgtt

SEQ ID NO: 787498 - DNA, 75 bp, synthetic construct
  source 1..75: mol_type = other DNA
tgcacaaatcgactgggcgatgagctacgcgcttgccctgctcgcgcctggctggcgttttcactctattcagaa

SEQ ID NO: 787499 - DNA, 75 bp, synthetic construct
  source 1..75: mol_type = other DNA
ggataactggttaacggtactactgggattaggctctggtttaaattgcacggccattttatcaaaaaatatagc

SEQ ID NO: 787500 - DNA, 75 bp, synthetic construct
  source 1..75: mol_type = other DNA
atttttatctatatgcagcaccagaacaagtgtgctcgcttgcagatattaatcttaataccgtattgatgaccg

SEQ ID NO: 787501 - DNA, 75 bp, synthetic construct
  source 1..75: mol_type = other DNA
ctgacgccgaatgtcggtgatgcaaactcgcaaacgccggaatataaagcgttcttagtcaacattgagaaggcg

SEQ ID NO: 787502 - DNA, 75 bp, synthetic construct
  source 1..75: mol_type = other DNA
gctgggcgcggagggcattttgatcaatatctcgcgcggcagcgtggtggatgaggacgcgctgatagccgcact

SEQ ID NO: 787503 - DNA, 75 bp, synthetic construct
  source 1..75: mol_type = other DNA
cgacccagttgccgtttgtggtggcgctgtttactgccatcaaaaacgatccgcaactgtgccatctcacctgcc

SEQ ID NO: 787504 - DNA, 75 bp, synthetic construct
  source 1..75: mol_type = other DNA
gtcttgcgggtgcgtttgttctgatgatcgatgtactggacttcaaagaagttcgcgatcatatgggggctccgg

SEQ ID NO: 787505 - DNA, 75 bp, synthetic construct
  source 1..75: mol_type = other DNA
ctattaccgcgaaacctatgccgaagcagaacaacgtttaggtgaagttcgcgccctgcgcctggcgggtcataa

SEQ ID NO: 787506 - DNA, 75 bp, synthetic construct
  source 1..75: mol_type = other DNA
acaacgtttaggtgaagttcgcgccctgcgcctggcgggtcataacaatatattccccacgctttcatggctaaa

SEQ ID NO: 787507 - DNA, 75 bp, synthetic construct
  source 1..75: mol_type = other DNA
tccttgtgtggagagttataaagggctgatttttggcaactgggataccagcgcaccgggcctgcgtgattacct

SEQ ID NO: 787508 - DNA, 75 bp, synthetic construct
  source 1..75: mol_type = other DNA
attttcagttttgggcattataattaacgctgtcaataatggtgtccaaaattataagaaatacattgggcttgg

SEQ ID NO: 787509 - DNA, 75 bp, synthetic construct
  source 1..75: mol_type = other DNA
atgggtaaaaaagagcagttcccgtatgtgggtacgacctatcgtctgaccgagcacttccacacctggaccaag

SEQ ID NO: 787510 - DNA, 75 bp, synthetic construct
  source 1..75: mol_type = other DNA
gaaggtccgttcccggaacactacgagccaattgaaacgccgctgggaactaacccgctgcatccgaacgtggtt

SEQ ID NO: 787511 - DNA, 75 bp, synthetic construct
  source 1..75: mol_type = other DNA
atgggcgttgcgtgccggaacatgggatcgctgtgcgtgatagacgtactggcttacctcccgcatcttgaaata

SEQ ID NO: 787512 - DNA, 75 bp, synthetic construct
  source 1..75: mol_type = other DNA
tagcgaggtggttgacatctttaaatatgaaaccacagcgcttagctggcgttgcacacaacaggagtatgacgc

SEQ ID NO: 787513 - DNA, 75 bp, synthetic construct
  source 1..75: mol_type = other DNA
atcttctgtcatatgttatttatttttgttttgtttttattgtcatgaacaaagttgtgattttctctcggaagg

SEQ ID NO: 787514 - DNA, 75 bp, synthetic construct
  source 1..75: mol_type = other DNA
tggtaagttagaattacttaataatgatattgatacacaaaatattttactcaataagggcataaatctatattc

SEQ ID NO: 787515 - DNA, 75 bp, synthetic construct
  source 1..75: mol_type = other DNA
agtaatgaaatagaagcccagaatattatgttatccaaaggaataaatttacacactcattatgccagcacttta

SEQ ID NO: 787516 - DNA, 75 bp, synthetic construct
  source 1..75: mol_type = other DNA
agttctgtacagggctctctctatgctctacagcaaattgcatcagctgaaggagagatggacctggtacgtagc

SEQ ID NO: 787517 - DNA, 75 bp, synthetic construct
  source 1..75: mol_type = other DNA
ggcgattccgattgcgattctggttaacgtggcgatgttactgacccgtatgacgcgggtggtaaatgttgatat

SEQ ID NO: 787518 - DNA, 75 bp, synthetic construct
  source 1..75: mol_type = other DNA
cgcggcggtgtggcgaaactggatgaaggtcaccggctggccgcactctggcaggcgctgccggaagagcttcgc

SEQ ID NO: 787519 - DNA, 75 bp, synthetic construct
  source 1..75: mol_type = other DNA
agagagcaaatcaaaccgcgccattggtgtggcgctgaacgataccgcctgtaaagtgttgcgtgatcaaatagg

SEQ ID NO: 787520 - DNA, 75 bp, synthetic construct
  source 1..75: mol_type = other DNA
cgcctggagcatgggttccgaattcagatggccgcctgaaagatggagtgtccagaattggagacccgctcagta

SEQ ID NO: 787521 - DNA, 75 bp, synthetic construct
  source 1..75: mol_type = other DNA
atttatctcaccggtattttcatgacctggcgtagggcgcgcggctttatcaaacaagagaaagtcgttctcgca

SEQ ID NO: 787522 - DNA, 75 bp, synthetic construct
  source 1..75: mol_type = other DNA
agaatatgatgaatggggcaacctgctgaatgaagagaacccgcatcagctgcagcagcttatccgcctgccggg

SEQ ID NO: 787523 - DNA, 75 bp, synthetic construct
  source 1..75: mol_type = other DNA
tatgtcagggttacattttcagaccccaacatgtggtatctacgttcgggtcatcatttacactcagttcacaat

SEQ ID NO: 787524 - DNA, 75 bp, synthetic construct
  source 1..75: mol_type = other DNA
ggcttggattttttcaactatgttgacatattcgaacaccctgactattatcaggggcaaatagaaattggattc

SEQ ID NO: 787525 - DNA, 75 bp, synthetic construct
  source 1..75: mol_type = other DNA
gcggcggagctccttggtattaacagcaatacgctatacagcaaaatgaaaaaattaggaattgtggtgaaaatc

SEQ ID NO: 787526 - DNA, 75 bp, synthetic construct
  source 1..75: mol_type = other DNA
tatggtggcttcaatggatcagggcggttctcccattacctggttactgattcaggttttctccccgcaaaatat

SEQ ID NO: 787527 - DNA, 75 bp, synthetic construct
  source 1..75: mol_type = other DNA
gagcaaacctggcattttagaaaagtgggcgttgctggcgtgacgcttgaaaagatgccaaatgatgatagtgaa

SEQ ID NO: 787528 - DNA, 75 bp, synthetic construct
  source 1..75: mol_type = other DNA
aacaaaccttgcgtgctttttttagatgaatttgatgcaatagcacgttcacgcgaggatggtaacgagcacaat

SEQ ID NO: 787529 - DNA, 75 bp, synthetic construct
  source 1..75: mol_type = other DNA
cgcgataaagcgattaatcatgacttccgccagctggaaaaatatctggagccaatccccaaagcggactgggag

SEQ ID NO: 787530 - DNA, 75 bp, synthetic construct
  source 1..75: mol_type = other DNA
ttagatgcgctgaaatctcagcgtatctattttgaccaatatggacgcgaacaaaccgaatatcaccttgacgaa

SEQ ID NO: 787531 - DNA, 75 bp, synthetic construct
  source 1..75: mol_type = other DNA
ctgattaccttagaattagatgaatccaaatttggatgcatcttttttgatcaatatggacgcgagcaaacagaa

SEQ ID NO: 787532 - DNA, 75 bp, synthetic construct
  source 1..75: mol_type = other DNA
gctgagaccattggcaacaatcagatgattgcggttaccaacaatcagatacagacggtgggcgttaaccagata

SEQ ID NO: 787533 - DNA, 75 bp, synthetic construct
  source 1..75: mol_type = other DNA
aggttttctccccgcaaaatattcccggtttcattattatcggcgcaatttatcttaccggtattttcatgacct

SEQ ID NO: 787534 - DNA, 75 bp, synthetic construct
  source 1..75: mol_type = other DNA
tcatagcggctcgcggggtttgggccagtctattttacagcggcatattgcctcgttttcgcatcatggtttgcc

SEQ ID NO: 787535 - DNA, 75 bp, synthetic construct
  source 1..75: mol_type = other DNA
gatgaccaaagacgaccatctggttgttctgcatgaccattatctcgatcgtgttactgatgttgccgatcgttt

SEQ ID NO: 787536 - DNA, 75 bp, synthetic construct
  source 1..75: mol_type = other DNA
cgcagtttaagcaggatgtgacccgccagaccgaagaaaacgcgcaggcgtttacctcgctgaaacgttccctcg

SEQ ID NO: 787537 - DNA, 75 bp, synthetic construct
  source 1..75: mol_type = other DNA
aaaacaccgaaagcagatcacaggcgcgccgcaagttaagtacaggcggtgacggcgattcggcggtctccacgc

SEQ ID NO: 787538 - DNA, 75 bp, synthetic construct
  source 1..75: mol_type = other DNA
agcacaccgaagacaaaacgcagccgcgccgcaagttaagcgccggtggcgacggtgattcgtctggctccacgc

SEQ ID NO: 787539 - DNA, 75 bp, synthetic construct
  source 1..75: mol_type = other DNA
ttccgcaccttaatctcgggtgtcatcattatgagtatcaccctgtggatcgcgacgcaaactattggtttgcac

SEQ ID NO: 787540 - DNA, 75 bp, synthetic construct
  source 1..75: mol_type = other DNA
agtaagttggcagcatcacccggtgatattactattcgtatttatccaaatggaacattgggtactcaacgagaa

SEQ ID NO: 787541 - DNA, 75 bp, synthetic construct
  source 1..75: mol_type = other DNA
gaagaacgcactgttaccggcaagttgcgcgtacctttcagaggcaaggaatacgatgtgtctgatgttcctggt

SEQ ID NO: 787542 - DNA, 75 bp, synthetic construct
  source 1..75: mol_type = other DNA
ggatggcgtacctgaagccgcgctggatgaggtgatggtcaccctgaccactccggcccgcaacagcgttatcag

SEQ ID NO: 787543 - DNA, 75 bp, synthetic construct
  source 1..75: mol_type = other DNA
tccgtttatcgagaaagtacagccaatgtacgcaaacttcgctaaggacaacccagcccttgccccaaattcagg

SEQ ID NO: 787544 - DNA, 75 bp, synthetic construct
  source 1..75: mol_type = other DNA
caaagagcaagagctatcattaaagagacattaccttttactgggttttgttttagtagttatgatgaagcctca

SEQ ID NO: 787545 - DNA, 75 bp, synthetic construct
  source 1..75: mol_type = other DNA
gaacagatgaaaccaccggtgagtttttcccgttgtccgaagatgccatcagccgtgccctgcgtaactatggcc

SEQ ID NO: 787546 - DNA, 75 bp, synthetic construct
  source 1..75: mol_type = other DNA
tcgacataacaccggatacgtctgccacgcgtaaagctgtccagtcccgcctgttgacgcttcagaagacgctac

SEQ ID NO: 787547 - DNA, 75 bp, synthetic construct
  source 1..75: mol_type = other DNA
ccggaaatcagcaacgcgataaacgttgtgggtcaacgctgtacatgcggaaattgctctcagcggttgtgggat

SEQ ID NO: 787548 - DNA, 75 bp, synthetic construct
  source 1..75: mol_type = other DNA
gagaatattttttgtctatcatttgaagagtttgaatatctcattgcatcatgcaaaaggtttaaaattccgcct

SEQ ID NO: 787549 - DNA, 75 bp, synthetic construct
  source 1..75: mol_type = other DNA
aacccttatctggacattgagcgcgatgaccacccggcctacatgcctaaacgcggtcaggcttcagatgtgcgc

SEQ ID NO: 787550 - DNA, 75 bp, synthetic construct
  source 1..75: mol_type = other DNA
accgcaccgcaatccacagccgccacagcatgtcgcgtaccgatgcctggctgagaatcaccgaagagcaactgg

SEQ ID NO: 787551 - DNA, 75 bp, synthetic construct
  source 1..75: mol_type = other DNA
tcaagaaactgatcaaggaaaaatccgtcgtccggcatgccgatggtaacgggctatacctgatgacccctgctc

SEQ ID NO: 787552 - DNA, 75 bp, synthetic construct
  source 1..75: mol_type = other DNA
atttggcccatttggcgagcctgtcaccgtgggttttgtgatggggctgattatcggcatcctcgcgggttacga

SEQ ID NO: 787553 - DNA, 75 bp, synthetic construct
  source 1..75: mol_type = other DNA
ccttacttattatttggcggtacagcggtcattggcggtgggattgcattaggcaatgtcggtaatgctgccaac

SEQ ID NO: 787554 - DNA, 75 bp, synthetic construct
  source 1..75: mol_type = other DNA
caatggtgactaatctgttgtttgattatggcggcgataaagaccctgatgaatgggattatcaggcgatggaac

SEQ ID NO: 787555 - DNA, 75 bp, synthetic construct
  source 1..75: mol_type = other DNA
acggcatatgcgcggataatctgccagaaacgctgactgatgatatggcactattcggtactgagcgggtgaatg

SEQ ID NO: 787556 - DNA, 75 bp, synthetic construct
  source 1..75: mol_type = other DNA
cgagaggaccgacgggaagtgctggagtatctggcaaaaatggggtcgccggagctggcgagagcagtggcgcag

SEQ ID NO: 787557 - DNA, 75 bp, synthetic construct
  source 1..75: mol_type = other DNA
acctggatgcgtctgtcaggaaaaaccttccgggagcttatcagtgagcagaaacgctataacctggtgacaaaa

SEQ ID NO: 787558 - DNA, 75 bp, synthetic construct
  source 1..75: mol_type = other DNA
ttcataaaaaacacaaacgataccgctactggtgtagcctatcgcaattcatcgtctaccatagtgatcccacct

SEQ ID NO: 787559 - DNA, 75 bp, synthetic construct
  source 1..75: mol_type = other DNA
accataggttcgccacctccgttggtttactttaactgtgccgaatatgctcataatccggagttgctttcctca

SEQ ID NO: 787560 - DNA, 75 bp, synthetic construct
  source 1..75: mol_type = other DNA
aaccttgggctggcacgcaactcggttagtaaagatcttaatcaattatggaatgaaggcctggtggtaaaaagt

SEQ ID NO: 787561 - DNA, 75 bp, synthetic construct
  source 1..75: mol_type = other DNA
agcgatggcatttgcacgtaatttcgatgaattaagtgatgatgagtttaaacgtctacgtgaattgttaactaa

SEQ ID NO: 787562 - DNA, 75 bp, synthetic construct
  source 1..75: mol_type = other DNA
atgcatgacgtcgtgttccggtggtgtgttgtcggggctcagggtgtgacagggaggatgtatccatgcctgtcg

SEQ ID NO: 787563 - DNA, 75 bp, synthetic construct
  source 1..75: mol_type = other DNA
ttccgtcaacatcttagccagaccatgcgcgaattaaatgccattacccccgcgcccggttttaatcaggtttat

SEQ ID NO: 787564 - DNA, 75 bp, synthetic construct
  source 1..75: mol_type = other DNA
acagaagaagtggggtaaaagacccgtctttaattgtaattgcttgtgaaggagagaaaacagagcaggactatt

SEQ ID NO: 787565 - DNA, 75 bp, synthetic construct
  source 1..75: mol_type = other DNA
aacatgcgcgcatggcaaatgttcgcctggcgattgaaccgttgcacccaatgtatgcaggcgatcgcgcctgca

SEQ ID NO: 787566 - DNA, 75 bp, synthetic construct
  source 1..75: mol_type = other DNA
ccgtttatcccgactgtttcctgaggtgtatgtcaaaggttatattaatgaggtgttcagcaaaatgtcgcctca

SEQ ID NO: 787567 - DNA, 75 bp, synthetic construct
  source 1..75: mol_type = other DNA
aacaacattataggtgacctgctacgtaaatcacggaaagaagcgcgccgcgccgggcggaaacagaaacgatgg

SEQ ID NO: 787568 - DNA, 75 bp, synthetic construct
  source 1..75: mol_type = other DNA
gtcaattacagttgaacgtgacagatcgtaaaaccggacaaacttcgacaatcgaagtgtcgggtttacaaaata

SEQ ID NO: 787569 - DNA, 75 bp, synthetic construct
  source 1..75: mol_type = other DNA
ataacaccttggtgatgttgggctacctcatggatgtgatcagtggtgaacatcactggaagcaacgactcatcc

SEQ ID NO: 787570 - DNA, 75 bp, synthetic construct
  source 1..75: mol_type = other DNA
ttcactcacggcgacccgtcgctacgcttttcacaatgcagcgacatcacacgcagtggtttctcaggtcattga

SEQ ID NO: 787571 - DNA, 75 bp, synthetic construct
  source 1..75: mol_type = other DNA
aaattccaggtgaggtatatcaacatatgctttctggtaattttattgggggccctccaaattttgcaataaaaa

SEQ ID NO: 787572 - DNA, 75 bp, synthetic construct
  source 1..75: mol_type = other DNA
atgaaaaaactgtcagttctttcagccatcatattatcagtggcaagcggttccgtgctggctgacaaccattcg

SEQ ID NO: 787573 - DNA, 75 bp, synthetic construct
  source 1..75: mol_type = other DNA
gatcgcgaataaaacgacagaatctcaggctgattttaaactggttgctagtgggtgcatggatttgcccctata

SEQ ID NO: 787574 - DNA, 75 bp, synthetic construct
  source 1..75: mol_type = other DNA
acagcagaagcgctaaagctgttagcggataatagattgtactttagcaaaaataatggtcgctcacaaatcaca

SEQ ID NO: 787575 - DNA, 75 bp, synthetic construct
  source 1..75: mol_type = other DNA
caatggaaaggattaacgctgacagaattgttatctgcttttaagcaggtatatgtcgatttgccccctcctagc

SEQ ID NO: 787576 - DNA, 75 bp, synthetic construct
  source 1..75: mol_type = other DNA
caatttaaaacaagcatgtacatatatatcagaggaatatattcgagacaaccgcgaatttaatctttttaaaat

SEQ ID NO: 787577 - DNA, 75 bp, synthetic construct
  source 1..75: mol_type = other DNA
gtcaattgcagttgaacgtgacagatcgtaaaaccggacaaacctcgaccatccaggtttcgggtttacaaaata

SEQ ID NO: 787578 - DNA, 75 bp, synthetic construct
  source 1..75: mol_type = other DNA
gcactgtatcgccacattctgaaaaatttccccgatcgcaaaatagtgacctatgaagatccggtggaatacatt

SEQ ID NO: 787579 - DNA, 75 bp, synthetic construct
  source 1..75: mol_type = other DNA
cggcggatacgggatcaggtgctgaccatgtatctgaatgggcgcattgagaaatctgaagcagcactcttcatc

SEQ ID NO: 787580 - DNA, 75 bp, synthetic construct
  source 1..75: mol_type = other DNA
atgatgaggcggggaggctgaaggcacagacggatgcggcggggcggcggacggagtacagcctgcatatggcgt

SEQ ID NO: 787581 - DNA, 75 bp, synthetic construct
  source 1..75: mol_type = other DNA
tgtcctgtcactgttgcagttcattctggttcaggttctggtcagaacaaatgacggtggtcgtaaagccgtccg

SEQ ID NO: 787582 - DNA, 75 bp, synthetic construct
  source 1..75: mol_type = other DNA
gttgaaatagcacctatggataccgtaaccaatggtgaatggctgaaagtttctaaaataataaatgaacatgga

SEQ ID NO: 787583 - DNA, 75 bp, synthetic construct
  source 1..75: mol_type = other DNA
tgttaataatacctttcccggtactggtaatcgcctccccggaatccacccagctcgccctcgcgctgaagcaac

SEQ ID NO: 787584 - DNA, 75 bp, synthetic construct
  source 1..75: mol_type = other DNA
agttaagttgtctggatataattatctctcgaaaaaaaccattctaatccttttattcagcattcctatttctat

SEQ ID NO: 787585 - DNA, 75 bp, synthetic construct
  source 1..75: mol_type = other DNA
ctgtggcaatttcttttctatctaaaatttatgcggaaactgatgatcataaagcaatggaaattactgctgggc

SEQ ID NO: 787586 - DNA, 75 bp, synthetic construct
  source 1..75: mol_type = other DNA
aaccacgcaagcaccttaaaatcaccatcatacactaaatcagtaagttggcagcattaccgcgctcaggcccaa

SEQ ID NO: 787587 - DNA, 75 bp, synthetic construct
  source 1..75: mol_type = other DNA
agaaaaacagaacagtaccgatatcacaggaactatatgacgaactccccaagcacagagggaagttattcacgc

SEQ ID NO: 787588 - DNA, 75 bp, synthetic construct
  source 1..75: mol_type = other DNA
aatgacaacggcgacctggtgcgcatcagcggcccgcgacagacgcgggaatacggctacagtgccacgggcagg

SEQ ID NO: 787589 - DNA, 75 bp, synthetic construct
  source 1..75: mol_type = other DNA
tatttcaatgactatttattcaagggtcaatcagttttccctttcctatttttcaggcagctatgaattaggaat

SEQ ID NO: 787590 - DNA, 75 bp, synthetic construct
  source 1..75: mol_type = other DNA
tttcacaatcggggggcatggtacccccacatctattgaatccgcaacgcgcagtatcatgacagctaaagatct

SEQ ID NO: 787591 - DNA, 75 bp, synthetic construct
  source 1..75: mol_type = other DNA
cttaccggaaacagcactgcatcagcagcagtgggagcacagagcgggaagaatgctgttgagaataactatctg

SEQ ID NO: 787592 - DNA, 75 bp, synthetic construct
  source 1..75: mol_type = other DNA
aagttggggggagatgcacctgctggttacgatcaatttatggataacaaagggttactcatcgctggtgcttca

SEQ ID NO: 787593 - DNA, 75 bp, synthetic construct
  source 1..75: mol_type = other DNA
gctgtaaggcaattttcgggcatacagaaacggatacctattgcgactggtcgccatctcgtttcattcccgtga

SEQ ID NO: 787594 - DNA, 75 bp, synthetic construct
  source 1..75: mol_type = other DNA
tggctggaacggcgtcggcgcatttattgctctgatgctggtcattgctctgctggtcgggacgcgtttgcatcg

SEQ ID NO: 787595 - DNA, 75 bp, synthetic construct
  source 1..75: mol_type = other DNA
ggcaccaccgccaccgacagggcctagtggactaccgccccttgcacaggcattaaaagatcatttagctgccta

SEQ ID NO: 787596 - DNA, 75 bp, synthetic construct
  source 1..75: mol_type = other DNA
tgctgcctgtaaggctcagacagaagcaaaatggacggcaattgacctggggcaggatggtagctttgctgcagg

SEQ ID NO: 787597 - DNA, 75 bp, synthetic construct
  source 1..75: mol_type = other DNA
cggctggatcaaacggaaactgcggtgcctgttgtggcggcagtggaagagtccgggaacccggacgaagaacct

SEQ ID NO: 787598 - DNA, 75 bp, synthetic construct
  source 1..75: mol_type = other DNA
ataattaaacgagatgaggcattagatgaggaaatatatattggggttatttgtaaggttggaaagataattcag

SEQ ID NO: 787599 - DNA, 75 bp, synthetic construct
  source 1..75: mol_type = other DNA
atcatacagatgcaattgcttcattgatgaagggggttatggtatctaatggcgcccctgtggtttatgggagga

SEQ ID NO: 787600 - DNA, 75 bp, synthetic construct
  source 1..75: mol_type = other DNA
attataacccggaagaccctgaaaaaatgcaactcccgaatggtaagacctgcggcgactgcgcccatatccgtc

SEQ ID NO: 787601 - DNA, 75 bp, synthetic construct
  source 1..75: mol_type = other DNA
atgaatccgtggagtaatgcactgtggctgaatgaacatggcccgcgcggtggtgatgaaattaatatcccgcaa

SEQ ID NO: 787602 - DNA, 75 bp, synthetic construct
  source 1..75: mol_type = other DNA
agagcggcatctggcatttgacaggatgcgcagttttattgataccttgtatgcccgtcccgtgcagcgttttga

SEQ ID NO: 787603 - DNA, 75 bp, synthetic construct
  source 1..75: mol_type = other DNA
tgctggagcgctgtgcgcgcgagctgctggcgcgggaaacgctcgacgaaagcgatatccgtcaattgactcaag

SEQ ID NO: 787604 - DNA, 75 bp, synthetic construct
  source 1..75: mol_type = other DNA
attcaactttgtagaggtgatttacagggattgggcaagtaaaaggcataccgcaagaaatcttgaggatgcgct

SEQ ID NO: 787605 - DNA, 75 bp, synthetic construct
  source 1..75: mol_type = other DNA
actggagagagcataataagaaaacattcaactttgtagaggtgatttacagggattgggcaagtaaaaggcata

SEQ ID NO: 787606 - DNA, 75 bp, synthetic construct
  source 1..75: mol_type = other DNA
agctctagattctattgataaattattgtctatgaatagaatcaactataagcgttatgtcgacgactttgttat

SEQ ID NO: 787607 - DNA, 75 bp, synthetic construct
  source 1..75: mol_type = other DNA
agaatgcagccgccgaacgcatgatgttcattcatcgcaactggcgcggtaaatctgaacctgaggagggctcct

SEQ ID NO: 787608 - DNA, 75 bp, synthetic construct
  source 1..75: mol_type = other DNA
ttagcctcccccttttcaaacagcagattgagtttgaggaggatgacagggacgagctgatcacgctgtacgcac

SEQ ID NO: 787609 - DNA, 75 bp, synthetic construct
  source 1..75: mol_type = other DNA
ttgaagaaaccttggttttgccaaaagttgggcgtagctgtcacgaacggtgcaatagtgatccacacccaacgc

SEQ ID NO: 787610 - DNA, 75 bp, synthetic construct
  source 1..75: mol_type = other DNA
atcagctatagcgccagcatgggggtggctcccctcgacgtccgcttaaactcttccgagcaggtgatgcagcag

SEQ ID NO: 787611 - DNA, 75 bp, synthetic construct
  source 1..75: mol_type = other DNA
ggtgataaaatctggcaaagcagtgaatattttatgaatgtcttctgtaataatgcactacccgccccatcacca

SEQ ID NO: 787612 - DNA, 75 bp, synthetic construct
  source 1..75: mol_type = other DNA
ctgaatatcaattcgaagtatttcaatacgagacgcttaacccaaaaaaaatgtcacacacaccttatttaaaga

SEQ ID NO: 787613 - DNA, 75 bp, synthetic construct
  source 1..75: mol_type = other DNA
gattttgaaaagatacggcgtggagtggtgaagagctcattgaattggccaaatagtttgtttgatcaattatat

SEQ ID NO: 787614 - DNA, 75 bp, synthetic construct
  source 1..75: mol_type = other DNA
taacttttttctttgttatcttttctgttaatgtggttgcgaaggaatttaccttagatttctcgacagcaaaga

SEQ ID NO: 787615 - DNA, 75 bp, synthetic construct
  source 1..75: mol_type = other DNA
gggtatttctctgatcgtatctaacctagattttcgtggtcgagcaatagccatgagaaggaattatattgcact

SEQ ID NO: 787616 - DNA, 75 bp, synthetic construct
  source 1..75: mol_type = other DNA
ttatcgtctattccggcaaatacactgacagcgatggtaccgaaaaatatttccttgagcctgatttgctggtcc

SEQ ID NO: 787617 - DNA, 75 bp, synthetic construct
  source 1..75: mol_type = other DNA
gccactgcagcagatcggttgccttattttaccggagcagaccgagcagcgctggcaacccttacagctattggt

SEQ ID NO: 787618 - DNA, 75 bp, synthetic construct
  source 1..75: mol_type = other DNA
gggtacgaaaccagcattatccgccctggctacatgaagccaaaacacgaaatcgatccattaaaaacaataatg

SEQ ID NO: 787619 - DNA, 75 bp, synthetic construct
  source 1..75: mol_type = other DNA
ggacgatcagcagataacagcacatcatgaagcgatggtgacattgcttcgtgatgatgtaagtctggtggaggc

SEQ ID NO: 787620 - DNA, 75 bp, synthetic construct
  source 1..75: mol_type = other DNA
gtcagcgcgaactcaaaattcagcaatagcctccccagagcaaaggccgaaaacttcaaggatacaattgaactt

SEQ ID NO: 787621 - DNA, 75 bp, synthetic construct
  source 1..75: mol_type = other DNA
tgtgcgtattgccagcagaacgcatatcagtattcagaactggtcgccatccggagagggcaccgaagattgttg

SEQ ID NO: 787622 - DNA, 75 bp, synthetic construct
  source 1..75: mol_type = other DNA
tctcggtaaaggctttcgctggcagcccatccacacacagcgtctgtacgactgcctgcaaccggaagccgcacg

SEQ ID NO: 787623 - DNA, 75 bp, synthetic construct
  source 1..75: mol_type = other DNA
cgtctttgatccaaaaggcgacgcggatctgctgaagcgtctgtggacagaggcgcagcacgccggacgcggcga

SEQ ID NO: 787624 - DNA, 75 bp, synthetic construct
  source 1..75: mol_type = other DNA
gggcggcatcaacggctttaccagcaacacctgcgagcaggtgaccacccgcaatgtaccgctgctggataccgc

SEQ ID NO: 787625 - DNA, 75 bp, synthetic construct
  source 1..75: mol_type = other DNA
gataccgcagacaaggtgaaggggatctacgtgcgcccttatccgaccacgtcgcagccggacatggttcgctag

SEQ ID NO: 787626 - DNA, 75 bp, synthetic construct
  source 1..75: mol_type = other DNA
gaaaatctagagccggaaaatcattggagctacatcttgagcaaatttttattgagcatggactgcatcattttg

SEQ ID NO: 787627 - DNA, 75 bp, synthetic construct
  source 1..75: mol_type = other DNA
aaatgaaaaacgtatcactcggtggggggctggcagtcccctacaggatccggaaaatacaggtgctttgtctgt

SEQ ID NO: 787628 - DNA, 75 bp, synthetic construct
  source 1..75: mol_type = other DNA
ggcgattggtctctccagcgattgaagaaaggcggtgcggacaagaagccagccccgacgtacatccatgttttc

SEQ ID NO: 787629 - DNA, 75 bp, synthetic construct
  source 1..75: mol_type = other DNA
tagagcaatatgttgcgttggctgcggttgcaggtgcattaagtaacatgggagctgtcgctgtattaaatgaat

SEQ ID NO: 787630 - DNA, 75 bp, synthetic construct
  source 1..75: mol_type = other DNA
ccatttgatattgtgccggaacaaatcccgcagttaactgaatacgcctgggcggtacgggaagggctcgataat

SEQ ID NO: 787631 - DNA, 75 bp, synthetic construct
  source 1..75: mol_type = other DNA
atgagatcgactccctacgatttcattcagttaatcaaagaagtcataatgcctggaaaaacagccgctctatac

SEQ ID NO: 787632 - DNA, 75 bp, synthetic construct
  source 1..75: mol_type = other DNA
gtaaaggatatgcagctccagaaaaacaatataattttttatgtggatattttccctatgaagattatgaaatcc

SEQ ID NO: 787633 - DNA, 75 bp, synthetic construct
  source 1..75: mol_type = other DNA
ttattcgctaatggaggccctgtaactaaaatagtggataataaaagaatcctgcgaaattctataactttttct

SEQ ID NO: 787634 - DNA, 75 bp, synthetic construct
  source 1..75: mol_type = other DNA
gcaggagttccgtttcagtcactatagcaaccttggctcggatgagatgatggaagtggtacgcgatggtgtatt

SEQ ID NO: 787635 - DNA, 75 bp, synthetic construct
  source 1..75: mol_type = other DNA
tctggctgacgcagcgtgtgctgcgtgagcaaggtgctattcagatgccacacgcagcccggcttcttattgaat

SEQ ID NO: 787636 - DNA, 75 bp, synthetic construct
  source 1..75: mol_type = other DNA
caatcacatcttctgcaagagataggattgaacggtactattccttaaatattatttcgggaaaatggttaagtt

SEQ ID NO: 787637 - DNA, 75 bp, synthetic construct
  source 1..75: mol_type = other DNA
gagtttcccacgcggcagtccatctggccgccacggtgggaacactgctggtctgggtcggtgaagcgggcgttc

SEQ ID NO: 787638 - DNA, 75 bp, synthetic construct
  source 1..75: mol_type = other DNA
tatttatgaggaattgaaagcgcaattaatttatcctgaatatgatcaagtcattgtttcaagagaacttgagaa

SEQ ID NO: 787639 - DNA, 75 bp, synthetic construct
  source 1..75: mol_type = other DNA
ctgaatttaaattccttttaactcagagagatgatactaactccttagcagaaaaaccaaataaaaaagcaagat

SEQ ID NO: 787640 - DNA, 75 bp, synthetic construct
  source 1..75: mol_type = other DNA
gtttattttacagtatttaatgacctttctaatattaactcattatatgaattatggatattttcactttcttac

SEQ ID NO: 787641 - DNA, 75 bp, synthetic construct
  source 1..75: mol_type = other DNA
aaacgcagcattttagtaaggaatggagttgatctaaagaacttatcgattaaaagagccagctttgaacgcgat

SEQ ID NO: 787642 - DNA, 75 bp, synthetic construct
  source 1..75: mol_type = other DNA
tggttgacacctatgacaagatacggaggacggatgtggaccacgttttcggtgaacgcactctggccacactgg

SEQ ID NO: 787643 - DNA, 75 bp, synthetic construct
  source 1..75: mol_type = other DNA
attatctgaacataaaaacactatcagtaagttggagtcattaccaaaaaaagcaacagcgtattttgcacagga

SEQ ID NO: 787644 - DNA, 75 bp, synthetic construct
  source 1..75: mol_type = other DNA
gcctgaagggaaagctgcacgttatcagtaagcgttacactcagcgcattgagcgacataatctgaatctgagac

SEQ ID NO: 787645 - DNA, 75 bp, synthetic construct
  source 1..75: mol_type = other DNA
tgttttacgcgtgtgacaggatacggaggacggctgtggcgcacgtcttcggggaacgcactctggccacactgg

SEQ ID NO: 787646 - DNA, 75 bp, synthetic construct
  source 1..75: mol_type = other DNA
tatgacaggatacggaggacagttgtggcgcacgttttcggtgaacgcactctggccacactggcgcgtcttctg

SEQ ID NO: 787647 - DNA, 75 bp, synthetic construct
  source 1..75: mol_type = other DNA
atggacgaacagtggggctacgtcggggctaaatcacgccagcgctggctgttttacgcgtacgacaggctccgg

SEQ ID NO: 787648 - DNA, 75 bp, synthetic construct
  source 1..75: mol_type = other DNA
cgttggatgccgggcaactgcacgcattatgggcgttggcctcaacacggttttacgtcacttaaaaaactcagg

SEQ ID NO: 787649 - DNA, 75 bp, synthetic construct
  source 1..75: mol_type = other DNA
agcaagtgttacactcagcgcattgagcgacataatctgaatctgagacaacatctggcaaggctgggacggaag

SEQ ID NO: 787650 - DNA, 75 bp, synthetic construct
  source 1..75: mol_type = other DNA
agcggaataacctgaatctgaggcagcacctggcacggctgggacggctgggacggaagttgctgtcgttctcaa

SEQ ID NO: 787651 - DNA, 75 bp, synthetic construct
  source 1..75: mol_type = other DNA
ctttgaggtcgtggtatggatgacagatggctggccgctttatgaatcacgcctgaagggagaactgcacgttat

SEQ ID NO: 787652 - DNA, 75 bp, synthetic construct
  source 1..75: mol_type = other DNA
gctctggggcgcacctggtccgctatccggggtggtgcaggtaaagttctggggcgcgttgctgctccgctggca

SEQ ID NO: 787653 - DNA, 75 bp, synthetic construct
  source 1..75: mol_type = other DNA
aaggtcttgatgattttgccgtcttgcttggctggaaccaggcgtcagctattacatcaggttcaccggacgagg

SEQ ID NO: 787654 - DNA, 75 bp, synthetic construct
  source 1..75: mol_type = other DNA
agcgaggcgatgctgatgcgcgtgcgagactcaaggtcgacaattattccagtgagtcagcacgcatgctggatg

SEQ ID NO: 787655 - DNA, 75 bp, synthetic construct
  source 1..75: mol_type = other DNA
gatgtggattacgctggtgtcggtattggcaacgcttgtggaatggcggatttggtttgaagcctatttttactc

SEQ ID NO: 787656 - DNA, 75 bp, synthetic construct
  source 1..75: mol_type = other DNA
gcaggctgcccggtggataacttcccgtgtgtgtttgttgatgatgtgtatctggagccccttccaccagaaccg

SEQ ID NO: 787657 - DNA, 75 bp, synthetic construct
  source 1..75: mol_type = other DNA
tgctgatgcgcgtgcgagactcaaggtcgacaactattccagtgagtcagcacgcatgctggatgcagtaaaagc

SEQ ID NO: 787658 - DNA, 75 bp, synthetic construct
  source 1..75: mol_type = other DNA
gtgtctcaaccactttcggaaatattgacatgggatgatgaacaatgggaggtatttgtccatgattggcttatt

SEQ ID NO: 787659 - DNA, 75 bp, synthetic construct
  source 1..75: mol_type = other DNA
acagcggggaggtgcgggcggaacaatatgataatgcccgacccacattctggggtatggctcggtatttaacag

SEQ ID NO: 787660 - DNA, 75 bp, synthetic construct
  source 1..75: mol_type = other DNA
ggtgaacgcactctggccacactggcgcgtcttctgagcctgctgtcggcctttgaggtcgtggtatggatgatg

SEQ ID NO: 787661 - DNA, 75 bp, synthetic construct
  source 1..75: mol_type = other DNA
ggacggagcaactctaaacctgggcgctatcaaatactggaatggtgataaagcgaacaactatacattaaccta

SEQ ID NO: 787662 - DNA, 75 bp, synthetic construct
  source 1..75: mol_type = other DNA
ttttattactcaggctatagtcccaatggtttttattctttaaaggactactttcactctcataaaaatgaagag

SEQ ID NO: 787663 - DNA, 75 bp, synthetic construct
  source 1..75: mol_type = other DNA
ttcggaatccaatatatgtaataattttagcaaagatttaggattaataacaaattttaacttttataagaagaa

SEQ ID NO: 787664 - DNA, 75 bp, synthetic construct
  source 1..75: mol_type = other DNA
ccacttgatgcaatggagcctgtcgaggcagatgacgagtaacagagctcggtatctcaatcaggacctgattgt

SEQ ID NO: 787665 - DNA, 75 bp, synthetic construct
  source 1..75: mol_type = other DNA
agacttcggcgagtcggaatggattatgtacactggttcaggttatctgattcgcctgtatgcctggtcgtttcc

SEQ ID NO: 787666 - DNA, 75 bp, synthetic construct
  source 1..75: mol_type = other DNA
agcacaagaaaaggtcggtttaaatcccggttggcaatgctacacctcatttttatgcgggtttgccagggcaag

SEQ ID NO: 787667 - DNA, 75 bp, synthetic construct
  source 1..75: mol_type = other DNA
ccatacagaatacatcacagatcaaaaaacagtaataataaagatcgtgaaaaaaaataccgcgatggagacaaa

SEQ ID NO: 787668 - DNA, 75 bp, synthetic construct
  source 1..75: mol_type = other DNA
tcactctcatccggcgttatggcgtcagtctcattcatctggatgccggcgctgaatgtctgccgggttttccca

SEQ ID NO: 787669 - DNA, 75 bp, synthetic construct
  source 1..75: mol_type = other DNA
caacgccatcgatgatgtcagtgacacggacacgttcgattgtgtcatcatgaatccgcctttttcgctacagta

SEQ ID NO: 787670 - DNA, 75 bp, synthetic construct
  source 1..75: mol_type = other DNA
ttaccggttgggtttgcgatgaacgacgcggactggagctgcgggaacttttgccgttgattccggcggaaaaat

SEQ ID NO: 787671 - DNA, 75 bp, synthetic construct
  source 1..75: mol_type = other DNA
ccgtgctggctggaatggtaaggggatatatctgttcattatccagcagaatgcttgggggtttgagtgtgacct

SEQ ID NO: 787672 - DNA, 75 bp, synthetic construct
  source 1..75: mol_type = other DNA
ccaaaccggctggcgcagcagctggtgggaaaggagagtcagacggtcgggctggtgactatttcgctggcctgg

SEQ ID NO: 787673 - DNA, 75 bp, synthetic construct
  source 1..75: mol_type = other DNA
gttttaaaaattgcgccttcccggtgtaagacaaattgccatggcgataacctacctgataatacccggcgctgg

SEQ ID NO: 787674 - DNA, 75 bp, synthetic construct
  source 1..75: mol_type = other DNA
cttacctgataatacccgacgttggcagttgtcaggcgggaacgaaaaagaacatacttatcttcacgatatgtc

SEQ ID NO: 787675 - DNA, 75 bp, synthetic construct
  source 1..75: mol_type = other DNA
ttgatggcgatgatccggcagtattcagaccaatacaaaaatacatcaatggcacatggtataacgtcgtacagg

SEQ ID NO: 787676 - DNA, 75 bp, synthetic construct
  source 1..75: mol_type = other DNA
agttcgtggtggtacaaccactatcggtgcagatagccatatttcttccgcgcagggcggtggtctcgtcaccag

SEQ ID NO: 787677 - DNA, 75 bp, synthetic construct
  source 1..75: mol_type = other DNA
cagatgctgttgctaaattgagaatggactctattcgttcagaaattcaaagttataaccccgaattattcattg

SEQ ID NO: 787678 - DNA, 75 bp, synthetic construct
  source 1..75: mol_type = other DNA
atgctaagacttaaacattttgacgctaacgaaaaattacagattttatatgccaagcaactctgcgagcgtttt

SEQ ID NO: 787679 - DNA, 75 bp, synthetic construct
  source 1..75: mol_type = other DNA
gcaaagctctcccaagttcatacaaggtagcttgatgcatggtctggaaggaaactggacaccttatggcggaat

SEQ ID NO: 787680 - DNA, 75 bp, synthetic construct
  source 1..75: mol_type = other DNA
atatcatttgcattacatataaaaaccttttcttaggcaatggtagtatcctagctaatacttatgctaaagatg

SEQ ID NO: 787681 - DNA, 75 bp, synthetic construct
  source 1..75: mol_type = other DNA
tgcagccttccttttttcccaacatatagaaagctattttgatagagttattaattctgatgtagtaaatgagat

SEQ ID NO: 787682 - DNA, 75 bp, synthetic construct
  source 1..75: mol_type = other DNA
gatcatcttaaagaaaagttacccaaagataataaagtagttgattttttgtttccacacgcgaatgcaaatata

SEQ ID NO: 787683 - DNA, 75 bp, synthetic construct
  source 1..75: mol_type = other DNA
gaccaacacagactactatgctaaccaggcgacccaggatgcggctacgaatattcagattgagctccaggatac

SEQ ID NO: 787684 - DNA, 75 bp, synthetic construct
  source 1..75: mol_type = other DNA
gattatttattcgctataaaagggaatcaggggcggcttaataaagcagggaaagatcatcagaagttcactttt

SEQ ID NO: 787685 - DNA, 75 bp, synthetic construct
  source 1..75: mol_type = other DNA
cgacaaaccgttccgtccggtcaacaaagaacaaactcaggctgcggtaagtctgctggaaaaagcgcgctacag

SEQ ID NO: 787686 - DNA, 75 bp, synthetic construct
  source 1..75: mol_type = other DNA
gcagccaacccgccaccgtgcgggtggaagccaatctcaacggtcgtcacagcaccatgctgttgtgcgacgacc

SEQ ID NO: 787687 - DNA, 75 bp, synthetic construct
  source 1..75: mol_type = other DNA
aaaggcaggaaaaaaggcatttggatttacagggcaggatattgacgttgttgttccaattattctgaaagcaat

SEQ ID NO: 787688 - DNA, 75 bp, synthetic construct
  source 1..75: mol_type = other DNA
ggtggctcgcaccgtcgctacgcaggcgtaggcgacatcatcaagatcaccatcaaagaagcaattccgcgtggt

SEQ ID NO: 787689 - DNA, 75 bp, synthetic construct
  source 1..75: mol_type = other DNA
tgtaagtacggtagaaggcttttctgaactatgtattcgtgcaggaataaaaccggaactgctgacaggaaaata

SEQ ID NO: 787690 - DNA, 75 bp, synthetic construct
  source 1..75: mol_type = other DNA
ctgcgtttcccggatgtaccggcagcaacggacgcagctgtgatatcccgcttcatcaatgccctgaaagcccga

SEQ ID NO: 787691 - DNA, 75 bp, synthetic construct
  source 1..75: mol_type = other DNA
atccgaaaaaggagtggcgctgggaccggagccgtggcatatgcatccgattgtgtttttggaggctgttgctga

SEQ ID NO: 787692 - DNA, 75 bp, synthetic construct
  source 1..75: mol_type = other DNA
ggatgaaagcagtatccgaaaaaggagtggcgctgggaccggagccgtggcatatgcatccgattgtgtttttgg

SEQ ID NO: 787693 - DNA, 75 bp, synthetic construct
  source 1..75: mol_type = other DNA
cggcaaagccattctcaatgctcagtggctgcaagccagcatggattcgccgcgtcagtatgcaacatacgactg

SEQ ID NO: 787694 - DNA, 75 bp, synthetic construct
  source 1..75: mol_type = other DNA
gtcggcacgatatttgaatgatgattgtgttattttaattggtggagcaggggagttaaaggatgatttacaagc

SEQ ID NO: 787695 - DNA, 75 bp, synthetic construct
  source 1..75: mol_type = other DNA
cgggctcgaatgttgaagggcgatctgcatttgagtatcgccgtcgccagtcagtggcacgtaacgccttcaaca

SEQ ID NO: 787696 - DNA, 75 bp, synthetic construct
  source 1..75: mol_type = other DNA
gcacagcggtaaagtgccacgaatcaaaaaatttgatgatgaagtgctgcgcgtggtgtttggatttgccctggc

SEQ ID NO: 787697 - DNA, 75 bp, synthetic construct
  source 1..75: mol_type = other DNA
aaacctgggcgaagtggtgagctttaaaggctatcttggtgatctggcccttatcgtctattccggcaaatacac

SEQ ID NO: 787698 - DNA, 75 bp, synthetic construct
  source 1..75: mol_type = other DNA
atgtgcacacggagctccccagtctattacagaactatgttcggaatatcgcaacacacaaatatatacgataaa

SEQ ID NO: 787699 - DNA, 75 bp, synthetic construct
  source 1..75: mol_type = other DNA
aagaccggcgcttatgttgacagctgggcgctgtataactggtttgataacagcgtcagttccgataaccgttct

SEQ ID NO: 787700 - DNA, 75 bp, synthetic construct
  source 1..75: mol_type = other DNA
tgatggcaggctacgccaatcagcacagtaatactcagagtaatcgtgtgggttataaatcggatgggcgcatca

SEQ ID NO: 787701 - DNA, 75 bp, synthetic construct
  source 1..75: mol_type = other DNA
cgtaacgccagcggatacgcccgaccccatcaataatccccctgttgtggatccggaaggcccatcagtttatcg

SEQ ID NO: 787702 - DNA, 75 bp, synthetic construct
  source 1..75: mol_type = other DNA
gacgattgccaaacatggcaatcgaaaggtaagtcacttatcgactggagtggggaatcttgcggtcccgaaggg

SEQ ID NO: 787703 - DNA, 75 bp, synthetic construct
  source 1..75: mol_type = other DNA
gctttacggatctcctattatcgtcaaagagttgaaaatgtagcttcgcttgaaaccagttcctacgtaggttta

SEQ ID NO: 787704 - DNA, 75 bp, synthetic construct
  source 1..75: mol_type = other DNA
agttaagttcacatattagcccggtagtgccagtaataatcggttcgaaagaggaaggtttacgcatctggcgcg

SEQ ID NO: 787705 - DNA, 75 bp, synthetic construct
  source 1..75: mol_type = other DNA
gcatggcccgtgttatcaccaaccaggttaatgaaattcgtcattccaacggtgatttaccaatgaaacgccaat

SEQ ID NO: 787706 - DNA, 75 bp, synthetic construct
  source 1..75: mol_type = other DNA
acccggatacagaaagcctggtgcagcgccattgggcttgattatcctgaatatgcttatctcccgcattttccg

SEQ ID NO: 787707 - DNA, 75 bp, synthetic construct
  source 1..75: mol_type = other DNA
tttacagttatctgggaaattatactaagcctgacgctgataatatggcgacccgaatacagaaagcctggtgca

SEQ ID NO: 787708 - DNA, 75 bp, synthetic construct
  source 1..75: mol_type = other DNA
ctggtctgtcttggtaatgattctctcctgactttattctcatccggagaagaacattttatcagtactgttaca

SEQ ID NO: 787709 - DNA, 75 bp, synthetic construct
  source 1..75: mol_type = other DNA
gtcagggcatggccagggttattagtaaggaagtgacagagattaagcacagccccagcaaccttcctttaagac

SEQ ID NO: 787710 - DNA, 75 bp, synthetic construct
  source 1..75: mol_type = other DNA
gccactaatcaacccggccgctgggttgggcttgagtacatcaagcgcaacggaaaagctattctcaacgcacag

SEQ ID NO: 787711 - DNA, 75 bp, synthetic construct
  source 1..75: mol_type = other DNA
agatttatgatgattatatcattgatagaaaacccatggggcttgcagaggtttcacgagaaaattttgtaaaac

SEQ ID NO: 787712 - DNA, 75 bp, synthetic construct
  source 1..75: mol_type = other DNA
aagcatattgatgccaaagatgcgcctcgtaatgctgaagaacgagagtttatcaagcgcctgcggatgattgaa

SEQ ID NO: 787713 - DNA, 75 bp, synthetic construct
  source 1..75: mol_type = other DNA
atgaagcccctcctcctggcaaataattctaatgaatacccaggtttgttttcagcgatacagcataaacagcaa

SEQ ID NO: 787714 - DNA, 75 bp, synthetic construct
  source 1..75: mol_type = other DNA
ctttatctgaccatgcacgcctgtttggatttaccgctgaagatattatggatttttggcaacacaaagcgccac

SEQ ID NO: 787715 - DNA, 75 bp, synthetic construct
  source 1..75: mol_type = other DNA
caacacaagaaacccaacggcaaagactttgcgtaacaccggaggaataccgccttgctgtcaatgcccttgtcg

SEQ ID NO: 787716 - DNA, 75 bp, synthetic construct
  source 1..75: mol_type = other DNA
tcgatgattttgataatcatgttgttatcatgagcgaagtcgtgatgcgtcttaattcatatcgacaaacgcatt

SEQ ID NO: 787717 - DNA, 75 bp, synthetic construct
  source 1..75: mol_type = other DNA
gcgaatgcgcgtactgcagcagaacaaaaacaaaaaatagatactctggcgactaaccaggcaacacaacagcat

SEQ ID NO: 787718 - DNA, 75 bp, synthetic construct
  source 1..75: mol_type = other DNA
gatatcagagcatgattgacgccagacagactgctgctgccaatgcgcaacaggaacaagcggacacccagcagc

SEQ ID NO: 787719 - DNA, 75 bp, synthetic construct
  source 1..75: mol_type = other DNA
ctgtcgctggcgctgatcatgcgtctgggactgttatcgctgatttcatggatggtcaccctgaccaaaccgcta

SEQ ID NO: 787720 - DNA, 75 bp, synthetic construct
  source 1..75: mol_type = other DNA
attgatttctattcaagcaattatgagccgcacagaataggggtcaaaaactacgtcgaagctgttaatccaggg

SEQ ID NO: 787721 - DNA, 75 bp, synthetic construct
  source 1..75: mol_type = other DNA
gttaaccatctgccggtgatgatggcggcggtagtgattgcgatggcggttatgctgctggcatcgaaaccgctg

SEQ ID NO: 787722 - DNA, 75 bp, synthetic construct
  source 1..75: mol_type = other DNA
ggaaagccgccgctggctggcatcgtgcggcctgactgtggcgcagatgcaaagccagatggacccggtatacac

SEQ ID NO: 787723 - DNA, 75 bp, synthetic construct
  source 1..75: mol_type = other DNA
caacttctgtccggcacagccttttcctcagcctgtaccaaaacgcataccatcagccacatcttcggacagctc

SEQ ID NO: 787724 - DNA, 75 bp, synthetic construct
  source 1..75: mol_type = other DNA
catcagccacatcttcggacagctccctggtcgccaggctgcggaagaagaccaatcctcagaggagaaacgctc

SEQ ID NO: 787725 - DNA, 75 bp, synthetic construct
  source 1..75: mol_type = other DNA
gcgtgggggctggtggtccgccgccacggtagcggcacttacctggtgcgcaaagatgtactgcatcaaaccgcc

SEQ ID NO: 787726 - DNA, 75 bp, synthetic construct
  source 1..75: mol_type = other DNA
tcaggcggcgctaattcagatatcacgatccgcacattcgaagcagtgcgtaaatcgaaggaagcgttagacctg

SEQ ID NO: 787727 - DNA, 75 bp, synthetic construct
  source 1..75: mol_type = other DNA
ggcaacagaagctggagccgggccaaaagataaccttttcgatgtcagtttttacattgccggaagaaaggcaaa

SEQ ID NO: 787728 - DNA, 75 bp, synthetic construct
  source 1..75: mol_type = other DNA
gccatcctgcgtttgatggggggtaaacgtcaggcgaacgttcagcacgatgccgataacccgatgccgatccct

SEQ ID NO: 787729 - DNA, 75 bp, synthetic construct
  source 1..75: mol_type = other DNA
tgtcgcttatgaaggttccggcagtggtgactggcgcactgacggcttcatcgtgggtgtcggttataaattctg

SEQ ID NO: 787730 - DNA, 75 bp, synthetic construct
  source 1..75: mol_type = other DNA
aaaggatgcaggataatatatctgaatttctgggggcgtatggaataaatcactcagtgtacatggttctcacca

SEQ ID NO: 787731 - DNA, 75 bp, synthetic construct
  source 1..75: mol_type = other DNA
gctgttgatgatgtatcagatgaatatgatgcttgtgagctggttttagaaatgcttgaagctgacagaaacgaa

SEQ ID NO: 787732 - DNA, 75 bp, synthetic construct
  source 1..75: mol_type = other DNA
cagtggtgtcgacgcaaaaatctgcatccctgacaggtaaaaaattgatggtcgttactttagttaatctggacg

SEQ ID NO: 787733 - DNA, 75 bp, synthetic construct
  source 1..75: mol_type = other DNA
tatttggtgaaaaagggtccgcgttacaccacgattctgctgtcgattgtggcgttgagcgtggtctgctcgctg

SEQ ID NO: 787734 - DNA, 75 bp, synthetic construct
  source 1..75: mol_type = other DNA
cgggtgtggcttacagccgtgtgtcgactttttccggggattatctctgcgtaactgacagcaaggggaaaaggc

SEQ ID NO: 787735 - DNA, 75 bp, synthetic construct
  source 1..75: mol_type = other DNA
atgaagcgtactggtgtacgccggaacggctgcataagctggcagttcgtgaactctgccagttgaagctgttta

SEQ ID NO: 787736 - DNA, 75 bp, synthetic construct
  source 1..75: mol_type = other DNA
gagacaagaatcgccagattacccgttacagcgatacccgctggcatgaagattccgtgcgtaaccgctggttca

SEQ ID NO: 787737 - DNA, 75 bp, synthetic construct
  source 1..75: mol_type = other DNA
actttattcgtcaccagtcgatgctgcctctgcgtgcccgtactgccgacgccattctgcgtttgatggggggaa

SEQ ID NO: 787738 - DNA, 75 bp, synthetic construct
  source 1..75: mol_type = other DNA
tgagctattcaaaattcacttccagtcaggcggcgctaattcagatatcacgacccgcactatcgaagcggtgcg

SEQ ID NO: 787739 - DNA, 75 bp, synthetic construct
  source 1..75: mol_type = other DNA
acaggctgcaccgcgagacggtgcgcagcttcggcaataacgcatacgaactgaccagcacatacactcccgcag

SEQ ID NO: 787740 - DNA, 75 bp, synthetic construct
  source 1..75: mol_type = other DNA
cctgaaacccttgacccgatcaacctactgggcgtgctgcgtcgtgctcgcgggagcttcgttatcgtgaccaac

SEQ ID NO: 787741 - DNA, 75 bp, synthetic construct
  source 1..75: mol_type = other DNA
cgacaggagccgcatccagacgatttatcagccggggagcttcacgccactcatcagggtcgaaactgccaccgg

SEQ ID NO: 787742 - DNA, 75 bp, synthetic construct
  source 1..75: mol_type = other DNA
ttgaaactggcatgtggaacatcccggcggagtttatgaaaatgaagaagcctcacaaagttccactgagcaaag

SEQ ID NO: 787743 - DNA, 75 bp, synthetic construct
  source 1..75: mol_type = other DNA
ggagtctgctcaggctctgtatctctatttggaaggtctgcccacaaatcctgctccagttagtattaagcgttt

SEQ ID NO: 787744 - DNA, 75 bp, synthetic construct
  source 1..75: mol_type = other DNA
ccggcgatgccggaaaccctgcaagtgatgctgagtacggaagagtttaaccgcctgcgcgacgcggtgccggaa

SEQ ID NO: 787745 - DNA, 75 bp, synthetic construct
  source 1..75: mol_type = other DNA
ggtaatatcgaccttggtgtggttggtgtggattatttttctggtaacgtcgcacctgaagatgattatccgggt

SEQ ID NO: 787746 - DNA, 75 bp, synthetic construct
  source 1..75: mol_type = other DNA
ctattcaggacccggcaaataccttcaacgttcttagtgccactggtagctcacgttccgtttatccggtcatgt

SEQ ID NO: 787747 - DNA, 75 bp, synthetic construct
  source 1..75: mol_type = other DNA
gaaatttagcactcgaatgcaaaaaatcgatccagcgctgaatgtcacctctggccaacttataagccatgtgtt

SEQ ID NO: 787748 - DNA, 75 bp, synthetic construct
  source 1..75: mol_type = other DNA
gtgctgactcgcgttttatgatcgacgcagacggcgctgaagatattccgttgaataataaacgcgcggtaacta

SEQ ID NO: 787749 - DNA, 75 bp, synthetic construct
  source 1..75: mol_type = other DNA
ttgaagaagaggacgggcaagtcacgcaatggcaagttgcatctaatagtattccttatctgacgcgtaaagggc

SEQ ID NO: 787750 - DNA, 75 bp, synthetic construct
  source 1..75: mol_type = other DNA
acttagccgcgattttgatatcgggccattaaaaaacgtctccacttctctaacatttagccgaataaactggga

SEQ ID NO: 787751 - DNA, 75 bp, synthetic construct
  source 1..75: mol_type = other DNA
gaacaacagagaaaaaacaaagattactgatgccctgagacaaacatatcccctgacagaattactgcgtgttct

SEQ ID NO: 787752 - DNA, 75 bp, synthetic construct
  source 1..75: mol_type = other DNA
gtggtcaaatacctcaaggagagcttctttgtccggtattgccggttcgataacttgattcacgataatcagcta

SEQ ID NO: 787753 - DNA, 75 bp, synthetic construct
  source 1..75: mol_type = other DNA
ctggggtgacaaatcttgctttattcaaccacccaagagcagcaacttaaccaccggaacggttattttaccgtg

SEQ ID NO: 787754 - DNA, 75 bp, synthetic construct
  source 1..75: mol_type = other DNA
ccattcaggacccggccaatatattcaatgttcttagttcagcgggaaattctcgttcagtgtatccagtaatga

SEQ ID NO: 787755 - DNA, 75 bp, synthetic construct
  source 1..75: mol_type = other DNA
cgatcgctcatggcgtgtaggccaatactacgattgtgccggtgatatcgttcgcattaagtcgctggacttcga

SEQ ID NO: 787756 - DNA, 75 bp, synthetic construct
  source 1..75: mol_type = other DNA
gtgactcgttataaaaaagccctgatacttattttatgttttattagcggatttgttctttttattacctatcat

SEQ ID NO: 787757 - DNA, 75 bp, synthetic construct
  source 1..75: mol_type = other DNA
tcgggcttattggtggcgtgcccgggttggtaatgcttggggccggtgcctggtatgcgatgtaccaaaaccagg

SEQ ID NO: 787758 - DNA, 75 bp, synthetic construct
  source 1..75: mol_type = other DNA
gacagcgttaccaagccctgatgaatttcgggcagatttagaacttattttagatttagcaaaaaaagcagcagc

SEQ ID NO: 787759 - DNA, 75 bp, synthetic construct
  source 1..75: mol_type = other DNA
ggcctgtatatcccagtgctgagcaagacaactcgatgcgaagattatatagccgtatgagatcaacggttgaga

SEQ ID NO: 787760 - DNA, 75 bp, synthetic construct
  source 1..75: mol_type = other DNA
attgatagtaagaacttcgcgaatatcgaatttgattataatccaatttcagagctaaggaaggtgcgaacaagt

SEQ ID NO: 787761 - DNA, 75 bp, synthetic construct
  source 1..75: mol_type = other DNA
gcgaactgaaaaccctgacggagatgcagaagcaggaactgctgcgtaacgcggccctgattgaccagcaaaaaa

SEQ ID NO: 787762 - DNA, 75 bp, synthetic construct
  source 1..75: mol_type = other DNA
gcgtggcccgtaaagatctgaaggcgatggcggacgatggtcaactgacggcggataaagtcgttcctgcgttaa

SEQ ID NO: 787763 - DNA, 75 bp, synthetic construct
  source 1..75: mol_type = other DNA
agatgtactcaatcagttgcatattgaattccgccctcttagcggtgtaatggcaacaggctccaggcaaatatt

SEQ ID NO: 787764 - DNA, 75 bp, synthetic construct
  source 1..75: mol_type = other DNA
agtaaaaagtcgaaggcaatgtctttgcctgaagcttcagacaatgctgagaaaacgcgcgcagcattgaatgag

SEQ ID NO: 787765 - DNA, 75 bp, synthetic construct
  source 1..75: mol_type = other DNA
cagtatccgttgaatccggtcataaatgtagatccgcaaggtttggttgatataaatttataccccgaaagtgat

SEQ ID NO: 787766 - DNA, 75 bp, synthetic construct
  source 1..75: mol_type = other DNA
ttgcagcagatccgcgacagcttccgccagaaggatgcggaccttcagtctcagtatcagaccggggatatcagt

SEQ ID NO: 787767 - DNA, 75 bp, synthetic construct
  source 1..75: mol_type = other DNA
gcaatgatcaaaggtatgcccatcattccttttattctgtgtctgctggctctcatggtttctttttttgttggc

SEQ ID NO: 787768 - DNA, 75 bp, synthetic construct
  source 1..75: mol_type = other DNA
gaccattatgttatggtgtggtgcaacctggagatgatataaaagacggtatagaattaattcgtgtttgtgata

SEQ ID NO: 787769 - DNA, 75 bp, synthetic construct
  source 1..75: mol_type = other DNA
gttcctgattgattccgaagccaatatttctggcgcactggagcggatgcgctctgaaagtgctacccatgcgca

SEQ ID NO: 787770 - DNA, 75 bp, synthetic construct
  source 1..75: mol_type = other DNA
aatgcgcacaggccttcatcccgaaattcgggatacacttcaacaacttgtagaggatggttgtacaactgcttc

SEQ ID NO: 787771 - DNA, 75 bp, synthetic construct
  source 1..75: mol_type = other DNA
cgcaccatggaatggcggtgggatgaacagcagcttatcggaaaaaacgacctgctgcagtataccggcaaagga

SEQ ID NO: 787772 - DNA, 75 bp, synthetic construct
  source 1..75: mol_type = other DNA
cgtaatgatcgccatcaaacaaatgtgtgccgatgacccgaacgccatgtctgccagggcactaaaatttaaagg

SEQ ID NO: 787773 - DNA, 75 bp, synthetic construct
  source 1..75: mol_type = other DNA
agtattctactggcaaagggcagcaaacattttcagcttcaagggtaaaatttaagacggctattacgctgcatt

SEQ ID NO: 787774 - DNA, 75 bp, synthetic construct
  source 1..75: mol_type = other DNA
cagcaaaggcttggaataaccaaccaattaaaaaattcggatatggttgggttagggaaaaagaaaagtctaagc

SEQ ID NO: 787775 - DNA, 75 bp, synthetic construct
  source 1..75: mol_type = other DNA
cgtttttattaatggtgataattatcaagcgttaaatcttttgaagaaaaaatataattccgtaattgattgtgt

SEQ ID NO: 787776 - DNA, 75 bp, synthetic construct
  source 1..75: mol_type = other DNA
gcatccgggaaaatcaccaagacagctatcaatgaagcgctacgccggatgaagatagcgggtatcaccaagcct

SEQ ID NO: 787777 - DNA, 75 bp, synthetic construct
  source 1..75: mol_type = other DNA
cgacgaccggaaaatcgcttcgcatcactcaaattcaatttaacataatatacattatgcgcaccaacataaacc

SEQ ID NO: 787778 - DNA, 75 bp, synthetic construct
  source 1..75: mol_type = other DNA
gaaagaaaataccagggagcagcggggccacatcgccccgaagcgcggcgcagccgctgacgaacataccaggat

SEQ ID NO: 787779 - DNA, 75 bp, synthetic construct
  source 1..75: mol_type = other DNA
ttcgagcacatcaaagcccctatgtacgaagatagagaagatattactgattatctcaatgtactgtccggaatt

SEQ ID NO: 787780 - DNA, 75 bp, synthetic construct
  source 1..75: mol_type = other DNA
ggatacagtgctaacagcaccaacgaaccttaattcaaataaggatctaatggctataacaacaaaagaccttgg

SEQ ID NO: 787781 - DNA, 75 bp, synthetic construct
  source 1..75: mol_type = other DNA
cctgtattacaaccgccaccgctattatgacccgctgcaggggcgatatatcactcaggatccgattgggctgaa

SEQ ID NO: 787782 - DNA, 75 bp, synthetic construct
  source 1..75: mol_type = other DNA
ttcagcgcgtgatggttatggatttgaggctgactggtcagagttttacaccacaacccgcaaaccctctgcggg

SEQ ID NO: 787783 - DNA, 75 bp, synthetic construct
  source 1..75: mol_type = other DNA
atccatcatcaccggcattccgtcatggcaagtcgttaggctctgggaaaaataaagactggtcacgggtaaaat

SEQ ID NO: 787784 - DNA, 75 bp, synthetic construct
  source 1..75: mol_type = other DNA
ggaaatatcagcgtcagcggtgaaggcggaacatcgcactggggcggcggtggacgtgcaggcgctggcggtggt

SEQ ID NO: 787785 - DNA, 75 bp, synthetic construct
  source 1..75: mol_type = other DNA
tgggacagtaatcaccacgctgatcctgacgaaggatagttatcctgtcactatcggcgcaggtggggccggcgg

SEQ ID NO: 787786 - DNA, 75 bp, synthetic construct
  source 1..75: mol_type = other DNA
aaaacttgaaagagaagggcgtagttatgtgattattacaaataattctggccttgttcgtatggttcctgcatc

SEQ ID NO: 787787 - DNA, 75 bp, synthetic construct
  source 1..75: mol_type = other DNA
gccctgcggtagtgatgggcgttctgtccattgccctgccacaaatcgcgctagccgctggcacagatactggtg

SEQ ID NO: 787788 - DNA, 75 bp, synthetic construct
  source 1..75: mol_type = other DNA
ccttcgatgaaagccattctcggcgcgggtaaaaaaccggtaaatcagtggcaggcaagtgatattgactggagc

SEQ ID NO: 787789 - DNA, 75 bp, synthetic construct
  source 1..75: mol_type = other DNA
ttagtgcgacgaacggcctcaagggcggtgatagctcgttcggatcggtaatagcccctggtggtgaaggtggtg

SEQ ID NO: 787790 - DNA, 75 bp, synthetic construct
  source 1..75: mol_type = other DNA
atgagcacaaaattttatacactgctgacggatattggcgcggcgaaacttgccagcgccgccgcgcttggtgtg

SEQ ID NO: 787791 - DNA, 75 bp, synthetic construct
  source 1..75: mol_type = other DNA
tgcttccacctttaattatcaaggtgttttacttacaggaattgttgatggtgagcttgttactttttattcagg

SEQ ID NO: 787792 - DNA, 75 bp, synthetic construct
  source 1..75: mol_type = other DNA
aaatgcagaagtgtttgccaatattgagaaacaattgcgcatgattcaatgtttgcgtactgttgcactggaact

SEQ ID NO: 787793 - DNA, 75 bp, synthetic construct
  source 1..75: mol_type = other DNA
agttttttttcgccagcatattttaatgctgctgatgtgatcactttacttttatttagcaatgtatttaaatca

SEQ ID NO: 787794 - DNA, 75 bp, synthetic construct
  source 1..75: mol_type = other DNA
atattcattcgacatttttgtgttcgaaagaggcgattaaaatcatgaaagcgcagcagccaatgggaggacgta

SEQ ID NO: 787795 - DNA, 75 bp, synthetic construct
  source 1..75: mol_type = other DNA
gttcagctgactaacagggctctgatccgctggtcggggttgtatgggcagatgccggaaccagtgcagaagaag

SEQ ID NO: 787796 - DNA, 75 bp, synthetic construct
  source 1..75: mol_type = other DNA
tacccggacccgcgcggggagcgggacgcggaagccgaccccggcctgctgtatgcgggacagtggcgggatgcg

SEQ ID NO: 787797 - DNA, 75 bp, synthetic construct
  source 1..75: mol_type = other DNA
gcgggacagtggcaggatacggaatccgggctgtgctataaccggttccggtattacgagccggaaaccggaatg

SEQ ID NO: 787798 - DNA, 75 bp, synthetic construct
  source 1..75: mol_type = other DNA
ggacattaatttggaaattaaaaatattatgatttcttttgtaaaagcaccattatttattgttaaagacataaa

SEQ ID NO: 787799 - DNA, 75 bp, synthetic construct
  source 1..75: mol_type = other DNA
gttcagcgggtgagtgggatatttctggtacctatgccgccaatgattacagttccgtcagcagcagctggagcg

SEQ ID NO: 787800 - DNA, 75 bp, synthetic construct
  source 1..75: mol_type = other DNA
accggctggtgttttacacgcggatacagcatgaggagccactggtcaagagccgctatctctacgacccgctgg

SEQ ID NO: 787801 - DNA, 75 bp, synthetic construct
  source 1..75: mol_type = other DNA
actcagagaagagcaatggatattcttcactatatcaagaatgaaggttctaaaaatataacttttgaaaataaa

SEQ ID NO: 787802 - DNA, 75 bp, synthetic construct
  source 1..75: mol_type = other DNA
tcatttttttaccgcgccatatctggtttgtgcatggaatacgcgctgacgaatatcgtgaaaaatggaacatac

SEQ ID NO: 787803 - DNA, 75 bp, synthetic construct
  source 1..75: mol_type = other DNA
gatatcacgacccgaactatcgaagcggtgcgtaaatcgaaggaagcgttagacctgttcaccaccggagcataa

SEQ ID NO: 787804 - DNA, 75 bp, synthetic construct
  source 1..75: mol_type = other DNA
gtaatttgctcaatcaaggtcctatgacaccaagacaattggttgaaagactaagtgttagccaaccaacgatat

SEQ ID NO: 787805 - DNA, 75 bp, synthetic construct
  source 1..75: mol_type = other DNA
cgcagtgggtgacgcgaacgaattatgcggtgagcgacctgacgggccgtccgctgatgctctttaacagtgaag

SEQ ID NO: 787806 - DNA, 75 bp, synthetic construct
  source 1..75: mol_type = other DNA
aggtattgtatgggctatgcttcaaactcattatgagttcactgcagccatttccgcatgttcaaaggaatcagc

SEQ ID NO: 787807 - DNA, 75 bp, synthetic construct
  source 1..75: mol_type = other DNA
gacactcctgatggcatcctctgtcgtactgtgttgcgtaagcctttggggcaagttgcctaccgattggaattg

SEQ ID NO: 787808 - DNA, 75 bp, synthetic construct
  source 1..75: mol_type = other DNA
tgtcaggaatggggctagattggagtaagaactcgctgggtatagatcatggaggcctgtttcaaagtgccgatc

SEQ ID NO: 787809 - DNA, 75 bp, synthetic construct
  source 1..75: mol_type = other DNA
cagccgctgacgaacataccaggatgcacagggccatcccttcaccctgcaaagcccaacggactgacaggccat

SEQ ID NO: 787810 - DNA, 75 bp, synthetic construct
  source 1..75: mol_type = other DNA
atatcccaaccgtgctgactcgaacagctgaagaaggcggtgaaactcgcgtcttaaagctacgccaaatagagc

SEQ ID NO: 787811 - DNA, 75 bp, synthetic construct
  source 1..75: mol_type = other DNA
acttgaaagttatgaggatgctcttaataatatacaattacgaagttattcattgcatcaggatattttcgacat

SEQ ID NO: 787812 - DNA, 75 bp, synthetic construct
  source 1..75: mol_type = other DNA
taatgggaaacaaggtgttcttgatgagttagatgctatcagggatgacctgctttttaatagactaatttatta

SEQ ID NO: 787813 - DNA, 75 bp, synthetic construct
  source 1..75: mol_type = other DNA
gtgatgtatgattggtataaatacaatcgttctcaaggtatgacagcagcacaagcgcatcaagcaattaaaaat

SEQ ID NO: 787814 - DNA, 75 bp, synthetic construct
  source 1..75: mol_type = other DNA
cggaaatccgggaataccgcgatgataaactgtacagcgtacggcacctggtgtttaacagctttgagctgataa

SEQ ID NO: 787815 - DNA, 75 bp, synthetic construct
  source 1..75: mol_type = other DNA
ccgtattgtcaaaccggtcaacatttatgaatgtgaactcagggacaacgtgtttgtcggccccttcgttgagag

SEQ ID NO: 787816 - DNA, 75 bp, synthetic construct
  source 1..75: mol_type = other DNA
gcggatggtcagggcacgtcgacatgtctggaactacgcgtactggctgaccggcgcggccggtctggcccttct

SEQ ID NO: 787817 - DNA, 75 bp, synthetic construct
  source 1..75: mol_type = other DNA
aaagataacttgactctaatagacctaagaaaccctcgtgaaaccgtttcaccgtttttattaaccgatccaggt

SEQ ID NO: 787818 - DNA, 75 bp, synthetic construct
  source 1..75: mol_type = other DNA
gtgtttccgggaaaactagactgatgtttgactcaaaggagcaggcactggaagttaaggaagggtacaaatttt

SEQ ID NO: 787819 - DNA, 75 bp, synthetic construct
  source 1..75: mol_type = other DNA
ggcaatcagaaagcccaactaagggattcttccggagcgaagcggcagaaatctcttcaggacgaaagctatctg

SEQ ID NO: 787820 - DNA, 75 bp, synthetic construct
  source 1..75: mol_type = other DNA
cgccgaaggcatcgaaacagcgctgtcagcgcaccagatttataacgtgaacacctgggcaaccattaacagcgg

SEQ ID NO: 787821 - DNA, 75 bp, synthetic construct
  source 1..75: mol_type = other DNA
caagtataacgattatgactgacgggcgagaagctctcttccgccactacccaaatccaaatgctcctttttgtt

SEQ ID NO: 787822 - DNA, 75 bp, synthetic construct
  source 1..75: mol_type = other DNA
acggggcggaggggcgcggaaaaaggcgcattttttgatttttatggcaccatcaccaccactataagttattga

SEQ ID NO: 787823 - DNA, 75 bp, synthetic construct
  source 1..75: mol_type = other DNA
attttatgatgaaaatacaaatttgaggataaaacatggcctcaataatcatatgccacatcaattattaatgaa

SEQ ID NO: 787824 - DNA, 75 bp, synthetic construct
  source 1..75: mol_type = other DNA
ggaaattacgtttgcgacaacacgcaatctgcgctggagctggcacgaaatcacctggggattgtgtttgcgcca

SEQ ID NO: 787825 - DNA, 63 bp, synthetic construct
  source 1..63: mol_type = other DNA
atgggcggaaaaccggcggcgcggcagggtgatatgacccgcaagggactggatattgtgcag

SEQ ID NO: 787826 - DNA, 75 bp, synthetic construct
  source 1..75: mol_type = other DNA
aataatatgcatgatattacagagataaagttatcggaagtgcataataaacaaactaaggcatttagtcagcaa

SEQ ID NO: 787827 - DNA, 75 bp, synthetic construct
  source 1..75: mol_type = other DNA
tgatgcacctcacttaaatggactttatgggcgcacacaatacagcaaaaaaaatgagatgttaagtattgacat

SEQ ID NO: 787828 - DNA, 75 bp, synthetic construct
  source 1..75: mol_type = other DNA
tggactttatgggcgcacacaatacagcaaaaaaaatgagatgttaagtattgacatgtgcgcacatatgatttt

SEQ ID NO: 787829 - DNA, 75 bp, synthetic construct
  source 1..75: mol_type = other DNA
tagctatgactatccgaggatactcacagggaaaactggccagagaagttggcatggctcaatcgagcgtcaata

SEQ ID NO: 787830 - DNA, 75 bp, synthetic construct
  source 1..75: mol_type = other DNA
ctttcggcccatcgtcgtttcccgctgggcagcgaagatgacgcggtgcgggcgcaggggctggagattatgcgc

SEQ ID NO: 787831 - DNA, 75 bp, synthetic construct
  source 1..75: mol_type = other DNA
tcgtcgcggtgcatgtgaaagacaccaaaccgggcgtcttcaaaaacgtgccgtttggcgaaggtgtagtggatt

SEQ ID NO: 787832 - DNA, 75 bp, synthetic construct
  source 1..75: mol_type = other DNA
tgattaacgtggcctgcgacaatggctactcccttcgtgttgttgatgaatctgaccggaccgcaactgacagca

SEQ ID NO: 787833 - DNA, 75 bp, synthetic construct
  source 1..75: mol_type = other DNA
gtcttggtaaatctgcgtctaatgtggtttctgaaaggatgaaagcaaattattgggatatgtggaacaaaataa

SEQ ID NO: 787834 - DNA, 75 bp, synthetic construct
  source 1..75: mol_type = other DNA
ttaacgaattcttatatgaatggaatgggaaaaaagaatacagtagttacttgggaacaccaaataacacctatc

SEQ ID NO: 787835 - DNA, 75 bp, synthetic construct
  source 1..75: mol_type = other DNA
atggcagggcatcggcgttttactataaccaccacagccagttaacgtcagccaccgggcctgacgggctggaaa

SEQ ID NO: 787836 - DNA, 75 bp, synthetic construct
  source 1..75: mol_type = other DNA
ctgtatcgcgccaatcgcctgttcatggaggcgtataccgaaattctggaactggattcctgcttcaaagattga

SEQ ID NO: 787837 - DNA, 75 bp, synthetic construct
  source 1..75: mol_type = other DNA
tatggggtggaaatagaaacaccaactggcaaaagaattcgcttatcaaatcattaccagaatataatcccataa

SEQ ID NO: 787838 - DNA, 75 bp, synthetic construct
  source 1..75: mol_type = other DNA
gaagagggaataccagtaagattcagtgtccaaaccgtttcttccgaaaataaaaatttttctgggcaacgaact

SEQ ID NO: 787839 - DNA, 75 bp, synthetic construct
  source 1..75: mol_type = other DNA
gggctatgacgtttactaccaggaagccaataacgaaacgcgtcgtcgtttccgtgacggcctgaaagagagcgt

SEQ ID NO: 787840 - DNA, 75 bp, synthetic construct
  source 1..75: mol_type = other DNA
cgagtgtgacttatattttgtgtctgctacgttagattttatagcaaaagcaatgacggaaaaatttaatgtatc

SEQ ID NO: 787841 - DNA, 75 bp, synthetic construct
  source 1..75: mol_type = other DNA
ctgcctaatgaaaaagatataaattatggggtggaaatagaaataccatctggcaacagaattcgcttatcaaat

SEQ ID NO: 787842 - DNA, 75 bp, synthetic construct
  source 1..75: mol_type = other DNA
atgctaaaacgccagacacaccgaagtggccttgcgataattgggaagaacaacaacccattaattccacattct

SEQ ID NO: 787843 - DNA, 75 bp, synthetic construct
  source 1..75: mol_type = other DNA
gagttttttttatgtgtcttttaatactaacagtagctggttgctatggaaaaggaaatgaaaacttaatattgc

SEQ ID NO: 787844 - DNA, 75 bp, synthetic construct
  source 1..75: mol_type = other DNA
ctggctaaataccaggaactgggcgtaatcaacgcgcagcagttcgaagacggaaagacggccatcgcaaggcag

SEQ ID NO: 787845 - DNA, 75 bp, synthetic construct
  source 1..75: mol_type = other DNA
atcaaccgcgtcgccggggcaattgccgcctcactcgtagttgactggggtaaggcgtttctcgttgctgctgac

SEQ ID NO: 787846 - DNA, 75 bp, synthetic construct
  source 1..75: mol_type = other DNA
gccagatcattcagctcaccgaaacacttcagaaaatcgggcgtattggtggatcctcatccgaggaaatggcga

SEQ ID NO: 787847 - DNA, 75 bp, synthetic construct
  source 1..75: mol_type = other DNA
aaatcacggcagcgtcacgacttcatgtgctgagtggtccctggcgtgaccggatcctgaacgttgtcgggctgc

SEQ ID NO: 787848 - DNA, 75 bp, synthetic construct
  source 1..75: mol_type = other DNA
gttgatggttacggtctgggatcacccggaactaacccccccgcagggcaataccgtagcgccagtgataccggc

SEQ ID NO: 787849 - DNA, 75 bp, synthetic construct
  source 1..75: mol_type = other DNA
gcaatacagctttagatgaatgcaatggtgatcctgttgatgcgttaaacaaaatgactgattattatgcggctc

SEQ ID NO: 787850 - DNA, 75 bp, synthetic construct
  source 1..75: mol_type = other DNA
cgaaggagaagtttggcggtgtgctcaaacttaccggaagcgaagagtttaagaaagaatgtgctcttgtagcgg

SEQ ID NO: 787851 - DNA, 75 bp, synthetic construct
  source 1..75: mol_type = other DNA
gaaaatgaaaacagcatttctggtgctgaaattgagctatcactggaaaaagctgttcaggcacaaaagcgattg

SEQ ID NO: 787852 - DNA, 75 bp, synthetic construct
  source 1..75: mol_type = other DNA
tagataaaagcctttcagaatctgaaattgaaccagatgaacttgatttccatttggaaaatggaacgccatgtg

SEQ ID NO: 787853 - DNA, 75 bp, synthetic construct
  source 1..75: mol_type = other DNA
cattataccaattaggctcaatggaatttgagttacccgatgacatggaagtaatagaggatggaaacaaacaag

SEQ ID NO: 787854 - DNA, 75 bp, synthetic construct
  source 1..75: mol_type = other DNA
atacgtgagaatgtccttgctccattacgtaatacggatacgaaagaacaaatagaacaagaaagattaaagaag

SEQ ID NO: 787855 - DNA, 75 bp, synthetic construct
  source 1..75: mol_type = other DNA
taccgctgtatctcgatgacgacggcgtgatggtgctgaaacccccgctgaactatctcggctttggccgcaaaa

SEQ ID NO: 787856 - DNA, 75 bp, synthetic construct
  source 1..75: mol_type = other DNA
aaggatattattggggataaagcatattctcttgataaggtcagggcggcaggatatgttctaggacatcgttgt

SEQ ID NO: 787857 - DNA, 75 bp, synthetic construct
  source 1..75: mol_type = other DNA
tgctttgaatgataataaagttaaacaagaaaaaatatataaaacaggaatgatcgactcttgtccaatttatgt

SEQ ID NO: 787858 - DNA, 75 bp, synthetic construct
  source 1..75: mol_type = other DNA
atgagccatataatcaatggacagattatgtatgatgagataagatattctgtatctaatgtcgaaacgcatgat

SEQ ID NO: 787859 - DNA, 75 bp, synthetic construct
  source 1..75: mol_type = other DNA
accatcacgaatgcacaaccgatcaggccgacgagctggtggccagttaccgtcgtcgtggcgccacggtagaac

SEQ ID NO: 787860 - DNA, 75 bp, synthetic construct
  source 1..75: mol_type = other DNA
gtctggagttcaaaatggcactcagctatttgaactatcaagaaatagagttacacagtttcttaacaatgcttg

SEQ ID NO: 787861 - DNA, 75 bp, synthetic construct
  source 1..75: mol_type = other DNA
agcttcctttcagtcgccttcgcttactttttttgtccgcaaaatggaagtgattcgccccagctcgacactggt

SEQ ID NO: 787862 - DNA, 75 bp, synthetic construct
  source 1..75: mol_type = other DNA
gctctttatgtcgctgtaatgattgttgatgcagcaggagagtcacaactggcaacccgcaaagaaaaagaatgg

SEQ ID NO: 787863 - DNA, 75 bp, synthetic construct
  source 1..75: mol_type = other DNA
cggcgcgaaaagttcatttttaccactgcgaccaccggggcctgccgctggcgctcatcagcgaagacggcaata

SEQ ID NO: 787864 - DNA, 75 bp, synthetic construct
  source 1..75: mol_type = other DNA
atgatgcagtggtggtcggattatctggatgtgtgccgcgaggggtatgttgcgccgtacatttatgcccggcag

SEQ ID NO: 787865 - DNA, 75 bp, synthetic construct
  source 1..75: mol_type = other DNA
gcgtgattgggtgaaagcgcgcatggcgaaagcgggcatggcgaaagcgggcatggcgaaagcgggcatggtgga

SEQ ID NO: 787866 - DNA, 75 bp, synthetic construct
  source 1..75: mol_type = other DNA
accatcacgaatgcacaaccgagcaggccgacgacctggtggccagttactgccgccgtggcgccacggtagagc

SEQ ID NO: 787867 - DNA, 75 bp, synthetic construct
  source 1..75: mol_type = other DNA
tgggcagcgaagatgacgcggtgcgggcgcaggggctggagattatgcgcaaagctatccagttcgcccaggacg

SEQ ID NO: 787868 - DNA, 75 bp, synthetic construct
  source 1..75: mol_type = other DNA
cgtctggtgacgatgaaaggattaacctggaacaaatgcgggaaaagacagaccgacaagctggtcatgggtatg

SEQ ID NO: 787869 - DNA, 75 bp, synthetic construct
  source 1..75: mol_type = other DNA
tactgccaacgcggccaaaggcgaacgactggtatcttctgaattccagctcacttttgcaggctatgaagatat

SEQ ID NO: 787870 - DNA, 75 bp, synthetic construct
  source 1..75: mol_type = other DNA
ctggacagctggacgccagccgaccttctggccgctgtagaactggcaaataaccagctctatctcaccgtttta

SEQ ID NO: 787871 - DNA, 75 bp, synthetic construct
  source 1..75: mol_type = other DNA
catggctcggcgtacgctggcaaatatccgtttcagacctggccctgagccttggctacagctggattgaaagcg

SEQ ID NO: 787872 - DNA, 75 bp, synthetic construct
  source 1..75: mol_type = other DNA
ttaaaaagctttgttatctcatctgtcaaagacgtttgcatgagtaatatctctttcaggataatccccgaaatt

SEQ ID NO: 787873 - DNA, 75 bp, synthetic construct
  source 1..75: mol_type = other DNA
tacttcacccggcgcaacctttatcccggtcaggaaattatccatacaacaccagccggtgatttgctcattatt

SEQ ID NO: 787874 - DNA, 75 bp, synthetic construct
  source 1..75: mol_type = other DNA
gaaccttatcgtgtcgtgaatgacagagggctctggtatctagccgcccggtacgaaggaaagttgaagagtttt

SEQ ID NO: 787875 - DNA, 75 bp, synthetic construct
  source 1..75: mol_type = other DNA
cattgcatcggtagttcttcccggtggggaacgtggacaaatcatcattccacctgcaacagaaaataacagcgt

SEQ ID NO: 787876 - DNA, 75 bp, synthetic construct
  source 1..75: mol_type = other DNA
ctaaaaaacacacagcagtgttaactgagcggcagaaatatttattcgagttatcgcgtaagggtgatgccgcaa

SEQ ID NO: 787877 - DNA, 75 bp, synthetic construct
  source 1..75: mol_type = other DNA
accaggagtcactacagactggaaagaaaccgcagatggcgtctataaggcgacctataccgcctataccaaagg

SEQ ID NO: 787878 - DNA, 75 bp, synthetic construct
  source 1..75: mol_type = other DNA
ggctgatgcagcttgccagtaacagcctccctgttggaggctacagctggtcccagggactggagtgggcagtgg

SEQ ID NO: 787879 - DNA, 75 bp, synthetic construct
  source 1..75: mol_type = other DNA
agaagtcaaagcggcgatcaaagaaaccggtttaccggtgaccaccgcctgcggtggctatgacggatggattgg

SEQ ID NO: 787880 - DNA, 75 bp, synthetic construct
  source 1..75: mol_type = other DNA
tgttatggctatcgtcacctgcatgcgatgctaaggcatgaagggggacggctatcagaaaaggttgtaggcaga

SEQ ID NO: 787881 - DNA, 75 bp, synthetic construct
  source 1..75: mol_type = other DNA
tcaaagacgtttgcatgagtaatatctctttcaggataatccccgaaattaatgaaaaaatagaaaagacagatg

SEQ ID NO: 787882 - DNA, 75 bp, synthetic construct
  source 1..75: mol_type = other DNA
taatattgctgatgctaactcagctggtgctgcaacgactgctgcatatctgcagccgatttctgaagatgattc

SEQ ID NO: 787883 - DNA, 75 bp, synthetic construct
  source 1..75: mol_type = other DNA
gctttatcaacacaaacaatttctttgtctgcatatatggcaactactgataaaacagcagatacgaatggcact

SEQ ID NO: 787884 - DNA, 75 bp, synthetic construct
  source 1..75: mol_type = other DNA
gccgtaaatttaatcatggtgcagccggtctgtattggtttaaccaggattcactttcagagcaatctctcgggg

SEQ ID NO: 787885 - DNA, 75 bp, synthetic construct
  source 1..75: mol_type = other DNA
atgggcaggctggggttaatcttggggcttggggcctggcgcctgcgtactgattaccagtacgatcaatcattt

SEQ ID NO: 787886 - DNA, 75 bp, synthetic construct
  source 1..75: mol_type = other DNA
tcgttgacctgattgatgaggggatcgatcttgtcgttcgcattggtgagctgtcagacagcagtgggctggttg

SEQ ID NO: 787887 - DNA, 75 bp, synthetic construct
  source 1..75: mol_type = other DNA
taaagctgcagatactgatggttctaaggttactcctggtacggtttctgccaggggggttatgactattaaagc

SEQ ID NO: 787888 - DNA, 75 bp, synthetic construct
  source 1..75: mol_type = other DNA
aaaatagcttccttgttccagtaatgtttttttttgcgggtattacaatgacctgtgcggttaattttattaata

SEQ ID NO: 787889 - DNA, 75 bp, synthetic construct
  source 1..75: mol_type = other DNA
ttatccctctcatcaaatactggatgcccgaggttgaagttctaaaaccagcatcgattcgtaatcaggttacgc

SEQ ID NO: 787890 - DNA, 75 bp, synthetic construct
  source 1..75: mol_type = other DNA
agatggtataacgagcggcgtataaaattatcgctgggtgcagtcagccctgaaatgtaccgccaacaatgcggg

SEQ ID NO: 787891 - DNA, 75 bp, synthetic construct
  source 1..75: mol_type = other DNA
accgacagcaggatgcgagccgggtattggagttgagtggacttgtatcaaataagcgatgttatgaaggtgttc

SEQ ID NO: 787892 - DNA, 75 bp, synthetic construct
  source 1..75: mol_type = other DNA
tctctaaagtttatgggatcgccgttaaatataaactcagcaaaatcaacatcatggacttattaaggaaggtgc

SEQ ID NO: 787893 - DNA, 75 bp, synthetic construct
  source 1..75: mol_type = other DNA
attcttttagtcaacgtcaattattcacactgttggccgctaaaaatcatgaaaacatgtcagctgttcatatag

SEQ ID NO: 787894 - DNA, 75 bp, synthetic construct
  source 1..75: mol_type = other DNA
tgcaggtaaagtctggctgtcaccggtggtggattgcttcgatggaaaagttgtgagctggtctctcagtacacg

SEQ ID NO: 787895 - DNA, 75 bp, synthetic construct
  source 1..75: mol_type = other DNA
actgcatgttctgagccttgcccgtagcagttatttttatcaccgggctgcactgaaagccggtgataaatacgc

SEQ ID NO: 787896 - DNA, 75 bp, synthetic construct
  source 1..75: mol_type = other DNA
tccacatgaagtagtgagtggcattgaggcatccctacagccaggggaaactaaagcgaattttatagttacagc

SEQ ID NO: 787897 - DNA, 75 bp, synthetic construct
  source 1..75: mol_type = other DNA
aaagctgccgaggagatcgggcaacttgttgccgtcgcgcgtgaagaactccagcggcgcaaggccaaagagcag

SEQ ID NO: 787898 - DNA, 75 bp, synthetic construct
  source 1..75: mol_type = other DNA
aaccgatggaagaaaaaaaggataccttggcatgagtgaaatatggattccatccatccaccataatgagtatta

SEQ ID NO: 787899 - DNA, 75 bp, synthetic construct
  source 1..75: mol_type = other DNA
tactcggcagcagaaaaaggcgtggctcaggcggcaaatgacatgagtgtctttatcttcagtctgatttgttcc

SEQ ID NO: 787900 - DNA, 75 bp, synthetic construct
  source 1..75: mol_type = other DNA
caacgaccgtaccaccaccgtaaaacacgatcaccgcgaaaccgtaaaaaatgaccagacggtcacgatccagga

SEQ ID NO: 787901 - DNA, 75 bp, synthetic construct
  source 1..75: mol_type = other DNA
tcatatttctactggcactattttctttgatacagagtcgaacaaatggtatttatgtgtatctgcggcatgtga

SEQ ID NO: 787902 - DNA, 75 bp, synthetic construct
  source 1..75: mol_type = other DNA
tggcaaaaatcatggctcagatgtccatgatgcaggcagttaaggggattggttcggcgtttggctgggggagtg

SEQ ID NO: 787903 - DNA, 75 bp, synthetic construct
  source 1..75: mol_type = other DNA
aagaaaaaacaattcagctgaccagtcaactggctgaagaagagcgcgctcagcgtcagcaacatgacctggata

SEQ ID NO: 787904 - DNA, 75 bp, synthetic construct
  source 1..75: mol_type = other DNA
gaggtatatcactcaggatccgattgggctgaaggggggatggaatttttatcagtatccgctgaatccggttca

SEQ ID NO: 787905 - DNA, 75 bp, synthetic construct
  source 1..75: mol_type = other DNA
aaattaaaaaagaacatttaaaattaaaaataatttcatttaacatgatgttgtttaagaattatttccagactc

SEQ ID NO: 787906 - DNA, 75 bp, synthetic construct
  source 1..75: mol_type = other DNA
cgggttccccaaaggattccgtatcgggctgcgtcgcattggctggtatgaagatgaggtactcgcctggttgaa

SEQ ID NO: 787907 - DNA, 75 bp, synthetic construct
  source 1..75: mol_type = other DNA
gatgaagcatccgaccagactggcccaggttcactggaatcgctgatcaccagcatgagtgacagcctgaatacg

SEQ ID NO: 787908 - DNA, 75 bp, synthetic construct
  source 1..75: mol_type = other DNA
ttactttggggactggctggaatacacgcattggtgccatttccgtcgatgccacgaagtcgcatagtaaacaag

SEQ ID NO: 787909 - DNA, 75 bp, synthetic construct
  source 1..75: mol_type = other DNA
attttaaggcggagcaacctaatcagaaatggctgacagatatcacggagttccagctccctgcaggtaaagtct

SEQ ID NO: 787910 - DNA, 75 bp, synthetic construct
  source 1..75: mol_type = other DNA
agccccactgtatattgcacaagagttgcaggagctgagtgtggcgccacaaacgttggctgattttacccaaca

SEQ ID NO: 787911 - DNA, 75 bp, synthetic construct
  source 1..75: mol_type = other DNA
cgatggaaaagttgtgagctggtctctcagtacacgccccgatgctgaactggtcaacactatgctggatagcgc

SEQ ID NO: 787912 - DNA, 75 bp, synthetic construct
  source 1..75: mol_type = other DNA
tggtctatgaacagtattatggcgatgaagtggccctgttcgataaagacgatcggcaaagtaatcctcatgcca

SEQ ID NO: 787913 - DNA, 75 bp, synthetic construct
  source 1..75: mol_type = other DNA
gttgcccttaaaatggcagttataggattttttttggggatatgtctatggctttcctattacttgccctataga

SEQ ID NO: 787914 - DNA, 75 bp, synthetic construct
  source 1..75: mol_type = other DNA
gcattaaaacgaagccacccacttttctctacgctgcgcatactcgggatgcaatttcatccgcaggaaggcatc

SEQ ID NO: 787915 - DNA, 75 bp, synthetic construct
  source 1..75: mol_type = other DNA
ctggctggttgcgagactcgacggtcagcttacacagcttaataaccagcacattatccagcatattcaacaaac

SEQ ID NO: 787916 - DNA, 75 bp, synthetic construct
  source 1..75: mol_type = other DNA
ctggaacttggggatgattttgcctttgttggtcggcagcgaaggttacgcattgatgacaactggtttcgtgtc

SEQ ID NO: 787917 - DNA, 75 bp, synthetic construct
  source 1..75: mol_type = other DNA
cacgcactaaaacagagccgtaatctgttctcaacgctacgcattctggggctacaagttcatcctcaggaaggt

SEQ ID NO: 787918 - DNA, 75 bp, synthetic construct
  source 1..75: mol_type = other DNA
gatgtccggctgtacccggtttatgctcagccccgacacccgcgtcgtggccgttgatctgaacaatgtggccgg

SEQ ID NO: 787919 - DNA, 75 bp, synthetic construct
  source 1..75: mol_type = other DNA
ggtacagcttatccgtgacagcctgccggagcagagaaaggacgaagccgtggggatcattctgagcaatgatcc

SEQ ID NO: 787920 - DNA, 75 bp, synthetic construct
  source 1..75: mol_type = other DNA
tggtgataatggcaaaggcgttgctattggttatgatgagaatattataacccaatatcatattcttgcccggtt

SEQ ID NO: 787921 - DNA, 75 bp, synthetic construct
  source 1..75: mol_type = other DNA
gtgtaacaaatgcgaaattcaatgaagagcaatctaatattctctttattgaaataggaattctgtcaatactga

SEQ ID NO: 787922 - DNA, 75 bp, synthetic construct
  source 1..75: mol_type = other DNA
tcatgctattgacttaaccagtaaaaatgggcgagagctatgtcgtacacttgcctataaaacattcgaaaaaat

SEQ ID NO: 787923 - DNA, 75 bp, synthetic construct
  source 1..75: mol_type = other DNA
aacaaatattgtggttcttgaatgtattaccctcgctgatcttctgacaaatgataacattgattttttatataa

SEQ ID NO: 787924 - DNA, 75 bp, synthetic construct
  source 1..75: mol_type = other DNA
ttaacgaaaaatatactaaggctgttaatattttaaaggataaccttaaagaaaactaccatgttttttatggtg

SEQ ID NO: 787925 - DNA, 75 bp, synthetic construct
  source 1..75: mol_type = other DNA
ttagattaagtgagattctttttcctgccggtgagtatggctctgaacaattttttagtgattttgaaaagataa

SEQ ID NO: 787926 - DNA, 75 bp, synthetic construct
  source 1..75: mol_type = other DNA
gcgatgcagagccagctgaataaccagcaacgccagattaacgaattatccgttcgtttgcagtctgcggagtcc

SEQ ID NO: 787927 - DNA, 75 bp, synthetic construct
  source 1..75: mol_type = other DNA
gatgtttatatggatatgcataacgatagtgcctacaccgccgagctgaatacagaatacggtattaagaaggca

SEQ ID NO: 787928 - DNA, 75 bp, synthetic construct
  source 1..75: mol_type = other DNA
gtcagaaacaccctcaaatcagggcgaaaaaagcgaagctgcaaatgctggagaacgtagtttgcagcagttgcg

SEQ ID NO: 787929 - DNA, 75 bp, synthetic construct
  source 1..75: mol_type = other DNA
aagagtaaaggtgtaaattcattcagtgatttttatgctattgacttaaccagtaaaaatggacgagagttatgc

SEQ ID NO: 787930 - DNA, 75 bp, synthetic construct
  source 1..75: mol_type = other DNA
gaataaagctctgataggtatatgcgtaccttcatatcgtgcaagagggaaagggataagtgaaatcgctggcta

SEQ ID NO: 787931 - DNA, 75 bp, synthetic construct
  source 1..75: mol_type = other DNA
ctgaaattgattttgaatcacggtattgatgttataactctttgcgataatacagtctataatattgactcattg

SEQ ID NO: 787932 - DNA, 75 bp, synthetic construct
  source 1..75: mol_type = other DNA
attagacattaaggttttggttattgacgacctgtctgaattgctgactaatgaaacgctggcttcattatacaa

SEQ ID NO: 787933 - DNA, 75 bp, synthetic construct
  source 1..75: mol_type = other DNA
ggcgccggctaactaccaggaactacgcggaccttcaccgctggcgcatctggttatgtcggacagccacgctta

SEQ ID NO: 787934 - DNA, 75 bp, synthetic construct
  source 1..75: mol_type = other DNA
ctgcatctgttctggtgaaggctggcggcaagtaagaactctgcgtggtgtcactgcgctgcgccaggcctttgt

SEQ ID NO: 787935 - DNA, 75 bp, synthetic construct
  source 1..75: mol_type = other DNA
tttgttcttactgatgacggctggattttactggctgccgatgccgcgtgggcacctgctagttatcgggaactg

SEQ ID NO: 787936 - DNA, 75 bp, synthetic construct
  source 1..75: mol_type = other DNA
atggaactgaaaaacataacccgctattatcctgaaaatatgccatatggtaatgatgtacagtattttcagagt

SEQ ID NO: 787937 - DNA, 75 bp, synthetic construct
  source 1..75: mol_type = other DNA
cttgactgcggaagacattgtcgagacgccagccccggatattgtgccaatgaaacgtggtgcggctgaaacaaa

SEQ ID NO: 787938 - DNA, 75 bp, synthetic construct
  source 1..75: mol_type = other DNA
ctaccgcacgcttgggcaattacatcagctttggcaaaacggcgcagtggatattcgattatgccacgaggggga

SEQ ID NO: 787939 - DNA, 75 bp, synthetic construct
  source 1..75: mol_type = other DNA
gatgaagggtatcagatagttcatgaagcggatggcgccagagctcgtttattactagacaagcagacctgggat

SEQ ID NO: 787940 - DNA, 75 bp, synthetic construct
  source 1..75: mol_type = other DNA
acacagcaatcgacaacggatattcaaagcatgatcagcgctctacaagagcgcaatccgctgttacagtcatgg

SEQ ID NO: 787941 - DNA, 75 bp, synthetic construct
  source 1..75: mol_type = other DNA
gcgagaaacacattacaatgcgggtatattcgtttgggtgttaatgttttcacgcctgattataaaacaccgtta

SEQ ID NO: 787942 - DNA, 75 bp, synthetic construct
  source 1..75: mol_type = other DNA
cgaactgcgtagaaagagttcctcagtgtttgggggctgggcggtatctatgatcaacgatatacatgttgatct

SEQ ID NO: 787943 - DNA, 75 bp, synthetic construct
  source 1..75: mol_type = other DNA
taatagttcgatgattatcggtacgggcagtaccacttttgagctggctaacctgttatgtatgaaatctgggtt

SEQ ID NO: 787944 - DNA, 75 bp, synthetic construct
  source 1..75: mol_type = other DNA
gcaggttttggctgcggaaaaattatatgctcaattgagaagcgggaaggccgcgaggccgaaattggctgctag

SEQ ID NO: 787945 - DNA, 75 bp, synthetic construct
  source 1..75: mol_type = other DNA
gcgcccaggcgtcggtgagtttgatgagacgtttgccacagaacacagttttgatggcgaaaaatgggtagttaa

SEQ ID NO: 787946 - DNA, 75 bp, synthetic construct
  source 1..75: mol_type = other DNA
cacaaaggaagtcgccgccggctccgctttacccggccatgcaggcatggccttgtgggttttcagttatgtggc

SEQ ID NO: 787947 - DNA, 75 bp, synthetic construct
  source 1..75: mol_type = other DNA
catggaatcgatctccgtttgtgcggtgaaatggcgggcgatcccatgtgcgtggcaatcctcattgggcttggg

SEQ ID NO: 787948 - DNA, 75 bp, synthetic construct
  source 1..75: mol_type = other DNA
ttattgaatcagaactggttgccattccagctatgcaaaaacggctggaaaaagaatatcagcaaccgatcagcg

SEQ ID NO: 787949 - DNA, 75 bp, synthetic construct
  source 1..75: mol_type = other DNA
cttttagctgcatgctgttttcttattgaaagatataaagaattgtggtttgtattattttcatttagtcccttg

SEQ ID NO: 787950 - DNA, 75 bp, synthetic construct
  source 1..75: mol_type = other DNA
ggtaattactctatttttgaacagctttctaaaaaaaataaaatacggaaaatacaaaagcctttagaaaaatta

SEQ ID NO: 787951 - DNA, 75 bp, synthetic construct
  source 1..75: mol_type = other DNA
tcactttttcaggtagtaacgtaaatcgattgttctgcgctgtaattcgtaagatcgttaataagcatgggcatg

SEQ ID NO: 787952 - DNA, 75 bp, synthetic construct
  source 1..75: mol_type = other DNA
cgcccgagccatctggctggcggttcagcagccggtaaaatccgtcgccgttaaaagcgaggagcaacaggccac

SEQ ID NO: 787953 - DNA, 75 bp, synthetic construct
  source 1..75: mol_type = other DNA
ggcgggcaaccgcccgtttcttttccggtaaaggatgtcgccgtgctcctctttttactgcgccggctgacgcgg

SEQ ID NO: 787954 - DNA, 75 bp, synthetic construct
  source 1..75: mol_type = other DNA
gcgattgaaaaacagggcattacaatcatcaaaacgttcgatgcccccggaggaatgaaaggttatctcggaaag

SEQ ID NO: 787955 - DNA, 75 bp, synthetic construct
  source 1..75: mol_type = other DNA
cgtcgtccagccagtgtggcaatcgtcgccatggcaaacaagctggcacgaacagtatgggcgataaccgcccat

SEQ ID NO: 787956 - DNA, 75 bp, synthetic construct
  source 1..75: mol_type = other DNA
gccaccggtgcttccgtatgggtgctctctaaccgtcgtgcaaacagcgagatggccagctggctggagcagcac

SEQ ID NO: 787957 - DNA, 75 bp, synthetic construct
  source 1..75: mol_type = other DNA
actgggcgcgtgagcttcagaaactgggacataaggtcagattactcaaaggccggttcgtcaaagcattcgtga

SEQ ID NO: 787958 - DNA, 75 bp, synthetic construct
  source 1..75: mol_type = other DNA
tatccattagtaataatgtattctgctaatggtgctgcaatttctttattagtaacggagttgtttgttacggct

SEQ ID NO: 787959 - DNA, 75 bp, synthetic construct
  source 1..75: mol_type = other DNA
catctcggttatcagcacttacgtcgatgcaattgtgatgcgccatccgcaggaaggtgcggcgcgcctggcaac

SEQ ID NO: 787960 - DNA, 75 bp, synthetic construct
  source 1..75: mol_type = other DNA
atatcatttccataaacgaccttagtcgcgatgaccttaatctggtactggcgacagcggcgaaattaaaagcaa

SEQ ID NO: 787961 - DNA, 75 bp, synthetic construct
  source 1..75: mol_type = other DNA
gggtgccagcgtggtgggattctccgacagcgccaacacgtcattgggtaaaaaaggggaaacgctggccgatac

SEQ ID NO: 787962 - DNA, 75 bp, synthetic construct
  source 1..75: mol_type = other DNA
gccatcgccgcccctaacaaaaaagttgccgagaacatcatcatcggcaaattgtgggaagcctaccctgaccac

SEQ ID NO: 787963 - DNA, 75 bp, synthetic construct
  source 1..75: mol_type = other DNA
tttcaagcttcgattatctgttttcttcactttatagacgtgaatttgtcaaaacgctacgcctaagtgagtgca

SEQ ID NO: 787964 - DNA, 75 bp, synthetic construct
  source 1..75: mol_type = other DNA
cctggagcctgcatagttccattgaagaagtgatggcggaagtggacattttgtatatgacccgcgtgcaaaaag

SEQ ID NO: 787965 - DNA, 75 bp, synthetic construct
  source 1..75: mol_type = other DNA
ccgtagttttaacacgtgagtatggtagttcctcttctaccggcaaccttattcttgatgcaatgatggaaaaaa

SEQ ID NO: 787966 - DNA, 75 bp, synthetic construct
  source 1..75: mol_type = other DNA
cagtcatattcagcgtgatgttttctcacagtatactagctcaggacgttactatttattatacgaatgatattc

SEQ ID NO: 787967 - DNA, 75 bp, synthetic construct
  source 1..75: mol_type = other DNA
gcatgtgtttatatcaacatcagcaataagtttatatactacaagcacaactgttatattagggtttgtagctgg

SEQ ID NO: 787968 - DNA, 75 bp, synthetic construct
  source 1..75: mol_type = other DNA
tagtgatccctctattgtgccaccgccacctgcctggcaaatgaaagcggcttcgctaatgcacatcatgcttta

SEQ ID NO: 787969 - DNA, 75 bp, synthetic construct
  source 1..75: mol_type = other DNA
gccgaccggtgaaaccacagcgctgattctggaaatgtcccgcgccctgatgtaccgccgcctgcgtgccgcgac

SEQ ID NO: 787970 - DNA, 75 bp, synthetic construct
  source 1..75: mol_type = other DNA
tacggcagattttgccgatcctcgtaatttgtatcggtctttatttcttactgatgccaaagctgggtgaagaag

SEQ ID NO: 787971 - DNA, 75 bp, synthetic construct
  source 1..75: mol_type = other DNA
aatatcgccatgacctttgtcggctcaatgagcggcgcattgctggtgcagtatgttcaggctgatgtcttacgg

SEQ ID NO: 787972 - DNA, 75 bp, synthetic construct
  source 1..75: mol_type = other DNA
gatttgtattggtctttatttcttactgatgcccaaactgggagaagaagatcgccagcgtcggatgtatggact

SEQ ID NO: 787973 - DNA, 75 bp, synthetic construct
  source 1..75: mol_type = other DNA
gcttatgacgagcaaatggaggccgctaaaaaggcgctaaaaagaatggaaaatcgcaagcaagaaaaagcccgg

SEQ ID NO: 787974 - DNA, 75 bp, synthetic construct
  source 1..75: mol_type = other DNA
ctttacacaatagcaaactgctattccttgctctacgaggcccgaagagttgaatggtactcagacgatctaatg

SEQ ID NO: 787975 - DNA, 75 bp, synthetic construct
  source 1..75: mol_type = other DNA
ggggtactcaaggcaatcgagagtgttaatacagagattaatgacagccttaaagggcatgatgtgcgcgatcaa

SEQ ID NO: 787976 - DNA, 75 bp, synthetic construct
  source 1..75: mol_type = other DNA
tcgcatggcaggcaccagataccagagactggcatgttgttggtaacttgcaagagcgcaaatcggggtatgttt

SEQ ID NO: 787977 - DNA, 75 bp, synthetic construct
  source 1..75: mol_type = other DNA
cgcgcaacactttggccctgcggatcgccggcctcgacccgctcaaggccactcgccgccgggaaggtcaggatg

SEQ ID NO: 787978 - DNA, 75 bp, synthetic construct
  source 1..75: mol_type = other DNA
tttattctcggtggcaaagtgatttgggcgacgggctttgtcatgctggtggggcagttcctcggcgcgcgcatg

SEQ ID NO: 787979 - DNA, 75 bp, synthetic construct
  source 1..75: mol_type = other DNA
ggggcagttcctcggcgcgcgcatgggttcaagactggtgttgagcaaaggacaaaagctgatccgcccgatgat

SEQ ID NO: 787980 - DNA, 75 bp, synthetic construct
  source 1..75: mol_type = other DNA
ttggcccggctgccggatcgttttacgcgctggccttcgttacgctgtgcggattcaacctcgccaaagccacgg

SEQ ID NO: 787981 - DNA, 75 bp, synthetic construct
  source 1..75: mol_type = other DNA
aacaaactgataagcaggaaggggaatataaatcaacgttcgatgttcttgattacgtttattccgccgttgctc

SEQ ID NO: 787982 - DNA, 75 bp, synthetic construct
  source 1..75: mol_type = other DNA
ttggataccgggcggggtggaacatagcaatcaagtgacagctaacgctgaactctgttttctgtttatcgaacc

SEQ ID NO: 787983 - DNA, 75 bp, synthetic construct
  source 1..75: mol_type = other DNA
cgcactatatgctgggcaccgcagctggcccacatccttatccgaccattgtccgtgagtttcagcggatgattg

SEQ ID NO: 787984 - DNA, 75 bp, synthetic construct
  source 1..75: mol_type = other DNA
ctgatgagaaacgggaaagcagttccttttggctctgtcgttacggccagaaacggggggagcagtattgccgga

SEQ ID NO: 787985 - DNA, 75 bp, synthetic construct
  source 1..75: mol_type = other DNA
gccgctgtccaccctgaccggctctggtaaacatccggctgccgcgcgcctgaatccggtatcccggggagcgca

SEQ ID NO: 787986 - DNA, 75 bp, synthetic construct
  source 1..75: mol_type = other DNA
tcgaagttgatgctctgccggaaaccagtgtcctgcaggaacaactgaccacgcttgctcagtcaatgcaactga

SEQ ID NO: 787987 - DNA, 75 bp, synthetic construct
  source 1..75: mol_type = other DNA
acctgtacggtggaaaatgctttgtggatggtgccgccacaatatgcggtttggataccgggcggggtggaacat

SEQ ID NO: 787988 - DNA, 75 bp, synthetic construct
  source 1..75: mol_type = other DNA
ccagacccgcaacaagaattacaggaaggtgttaatattgtaggggataaagtttatttcattgcgagcgatgat

SEQ ID NO: 787989 - DNA, 75 bp, synthetic construct
  source 1..75: mol_type = other DNA
cgctctatctggtgaaatatgtgtctgcggttgaaaaaacgctgtcggtcattcatttaccggacccacaacaag

SEQ ID NO: 787990 - DNA, 75 bp, synthetic construct
  source 1..75: mol_type = other DNA
tgatgcttacattaataataatgatctggtgactgtggaaggggtttactactggagtaataatgaattttttcc

SEQ ID NO: 787991 - DNA, 75 bp, synthetic construct
  source 1..75: mol_type = other DNA
cctgatggtgctaattatctgggcggttgatccgcaatatcgcctgaatgcgatgattgccaccaccgtggtgtt

SEQ ID NO: 787992 - DNA, 75 bp, synthetic construct
  source 1..75: mol_type = other DNA
atgggtaaaaccgaaatcattgccgaaaccggtgcaggtcagcatggcgtggcttctgcgcttgcaagcgccctg

SEQ ID NO: 787993 - DNA, 75 bp, synthetic construct
  source 1..75: mol_type = other DNA
tccggaatattttcgcccgttgacgcagaatgtggcgcaatataaagattcgctctatctggtgaagtatgtttc

SEQ ID NO: 787994 - DNA, 75 bp, synthetic construct
  source 1..75: mol_type = other DNA
cgattttctgccgatcctccggcgcacgctgacccgcaccggctttgtcatcgaccacatccactactacgccga

SEQ ID NO: 787995 - DNA, 75 bp, synthetic construct
  source 1..75: mol_type = other DNA
ccagcgtagatcttaacggaatgacagagaccgctgctgcacgcactgctttacgaaatcttattagagaaaaca

SEQ ID NO: 787996 - DNA, 75 bp, synthetic construct
  source 1..75: mol_type = other DNA
ttaaccgtgcggcccccgttgcgctactggcgattggcatgacgctggttatcgccaccggtgggattgatctct

SEQ ID NO: 787997 - DNA, 75 bp, synthetic construct
  source 1..75: mol_type = other DNA
aactggtgaaacaattcaggttttccagcgtattcaacgctgggttcgttacgctatcgcttaaatccagtaccc

SEQ ID NO: 787998 - DNA, 75 bp, synthetic construct
  source 1..75: mol_type = other DNA
ccgatgttattccgtgccccctttgcggtgtctcagaaccaggctgacgcttcttatattgagcagctgggcctg

SEQ ID NO: 787999 - DNA, 75 bp, synthetic construct
  source 1..75: mol_type = other DNA
gttctgcacaacaggttactgctcgccagttgccagacatgccctacgagagcgatgccaatcatttggtgtttg

SEQ ID NO: 788000 - DNA, 75 bp, synthetic construct
  source 1..75: mol_type = other DNA
ttatcttaaattagtaaggatatcagtaggcaaggaagatgacgcgtatgatattttcgaggttttgaatgcaag

SEQ ID NO: 788001 - DNA, 75 bp, synthetic construct
  source 1..75: mol_type = other DNA
tgcgttggaacatgatggcttcatctgcctgcataaactgtcggatggtgactgggtacacccgtatctgcgtat

SEQ ID NO: 788002 - DNA, 75 bp, synthetic construct
  source 1..75: mol_type = other DNA
taagcgagggtttagttaagcaatttagatattctgctgtgtttagtgcaggtcatgtaaatttaagccgtaaaa

SEQ ID NO: 788003 - DNA, 75 bp, synthetic construct
  source 1..75: mol_type = other DNA
acaaattaatgactggagaactgagctacaactgggcacgatcagtgatgaagacagagcagcactggcaagatg

SEQ ID NO: 788004 - DNA, 75 bp, synthetic construct
  source 1..75: mol_type = other DNA
tatgctgtttctcaacgttttctgcgtaagttgtttggcaccgacagagaggcatacctttgccgcaaggatcgt

SEQ ID NO: 788005 - DNA, 75 bp, synthetic construct
  source 1..75: mol_type = other DNA
ctaacggtttcttacaggcagtcgtataaaaccgcgtacattggcggaagatcctttgaggttggcactggcttt

SEQ ID NO: 788006 - DNA, 75 bp, synthetic construct
  source 1..75: mol_type = other DNA
aagaacaaaatattcattttcaacttcctgtcgcgactggctgaaacaggtgtggatttggtgaaggaatcaccg

SEQ ID NO: 788007 - DNA, 75 bp, synthetic construct
  source 1..75: mol_type = other DNA
gccgcgtttctccactggctccgctgcataattacgccaatttaagtggcattgaatcggcgcagcaattatttc

SEQ ID NO: 788008 - DNA, 75 bp, synthetic construct
  source 1..75: mol_type = other DNA
tcgggtgctgacatccggggccagaaaagcgattcgccgcctgagcgatcggctgaatattgacgtggtgcctgt

SEQ ID NO: 788009 - DNA, 75 bp, synthetic construct
  source 1..75: mol_type = other DNA
atgcaggatatcaatgcttttcagatgcgctataacgcgttctttcagcctgccgagggcgttcactggctgcat

SEQ ID NO: 788010 - DNA, 75 bp, synthetic construct
  source 1..75: mol_type = other DNA
tgcgcgaaaccgaacctgaaatgcaggatattaatgcttttcagatgcgctataacgcgttctttcagcctgccg

SEQ ID NO: 788011 - DNA, 75 bp, synthetic construct
  source 1..75: mol_type = other DNA
cgccgaaaacggacgttgctgatccgcaggcagacaacctgcctccggccaaaccgttcgaccagatcgaggagt

SEQ ID NO: 788012 - DNA, 75 bp, synthetic construct
  source 1..75: mol_type = other DNA
ttattacaatgaaaatttcgtcgaaattgatagcaataacattgtttgcgaaatttttatccccgttcgtccggt

SEQ ID NO: 788013 - DNA, 75 bp, synthetic construct
  source 1..75: mol_type = other DNA
gcccgtctcgccgcacccattaccgatgcacaggtgaggctggcgctgggttttctacgagagacagagcctgaa

SEQ ID NO: 788014 - DNA, 75 bp, synthetic construct
  source 1..75: mol_type = other DNA
gttattccgacaaatgaagaaaaaatgattgcgttagatgctattcatttaggcaaagttaacgctcccgcagaa

SEQ ID NO: 788015 - DNA, 75 bp, synthetic construct
  source 1..75: mol_type = other DNA
tgaaaatgcgcgcgtaattttcgccgttattccgactaatgaagaaaaaatgattgccttagatgcaattcattt

SEQ ID NO: 788016 - DNA, 75 bp, synthetic construct
  source 1..75: mol_type = other DNA
caaaccaaccagagcctgggggacctggagcgcgtagtgaataaagagtcgggattattaggtatttccggcctt

SEQ ID NO: 788017 - DNA, 75 bp, synthetic construct
  source 1..75: mol_type = other DNA
tgcactgtcccggggagctgccgacagggtggctgtgcgatgcgctggatcagatatttatcgccgctccacaac

SEQ ID NO: 788018 - DNA, 75 bp, synthetic construct
  source 1..75: mol_type = other DNA
tgagaaacacaggatttctatcttagaccagttaactgaatggtgtgtggatgcaaaagacgtaagaccaatatt

SEQ ID NO: 788019 - DNA, 75 bp, synthetic construct
  source 1..75: mol_type = other DNA
ttatattgtatgcagtgaccttaaaaaacgctcagagcttatttcttatttaaaagagagtggaatacattccgt

SEQ ID NO: 788020 - DNA, 75 bp, synthetic construct
  source 1..75: mol_type = other DNA
ttgcccgtattaactggtcgggagctgctgcggtcaatattgatacgcttcgtgcattgcacctgaaacacaatt

SEQ ID NO: 788021 - DNA, 75 bp, synthetic construct
  source 1..75: mol_type = other DNA
ccgagatccggaagaagctgaaaagctggcgcttgagaagtacgactctgacgaaacgaaggtaaaaaaggtaca

SEQ ID NO: 788022 - DNA, 75 bp, synthetic construct
  source 1..75: mol_type = other DNA
acggcaactacagctacattgataccctctctgaagcgcagaaagtattgaatagtgaaatgcggcagatgttga

SEQ ID NO: 788023 - DNA, 75 bp, synthetic construct
  source 1..75: mol_type = other DNA
gtaacggaataccgtcagattggttatgaaaagcgccaacttcgagtggaacattttaataacgacaacgttgat

SEQ ID NO: 788024 - DNA, 75 bp, synthetic construct
  source 1..75: mol_type = other DNA
tttctacaccgagcatgatgtaaagagcgccgaggcgacctctgtgctcaatgacatcttccagggtacggaggg

SEQ ID NO: 788025 - DNA, 75 bp, synthetic construct
  source 1..75: mol_type = other DNA
gacgtcagtctctgtcacccgctccattgaatccgtagccggatattttgagctgggggtgaacgtgccaccggg

SEQ ID NO: 788026 - DNA, 75 bp, synthetic construct
  source 1..75: mol_type = other DNA
cggatggcaggctttttaccggctggacgtcagtctctgtcacccgctccattgaatccgtagccggatattttg

SEQ ID NO: 788027 - DNA, 75 bp, synthetic construct
  source 1..75: mol_type = other DNA
gtacaatacttgcacactaaaagtggttttttggggataacagattgcccactgttacgtaaaagcaatatcgtg

SEQ ID NO: 788028 - DNA, 75 bp, synthetic construct
  source 1..75: mol_type = other DNA
cagatgtcgggcaaccggtgcaggttctgcaacgtgttgattctgccacccggaccgggttggcaggagagacga

SEQ ID NO: 788029 - DNA, 75 bp, synthetic construct
  source 1..75: mol_type = other DNA
agacaacgtcgccagttctgcgacagtgatgacctgctggaatgaggtgatggcagatatggatgagctggtcgc

SEQ ID NO: 788030 - DNA, 75 bp, synthetic construct
  source 1..75: mol_type = other DNA
cgaccgttccgcatgacggcgttcctgtggggggagtattacgaatataaacttgaaaagctgatcgctgccctg

SEQ ID NO: 788031 - DNA, 75 bp, synthetic construct
  source 1..75: mol_type = other DNA
ttaaaggcgtggcagaacggcgcatcatctaccgccgtgaaggttacgaatatgattgcgtgatgcctgtttatc

SEQ ID NO: 788032 - DNA, 75 bp, synthetic construct
  source 1..75: mol_type = other DNA
ggattagcctgcgcaataactttaccgcctttctcggcctccaggcgctgccgttcaaactggcgatgaatgacg

SEQ ID NO: 788033 - DNA, 75 bp, synthetic construct
  source 1..75: mol_type = other DNA
tcggtggtggtgctggtgatgctgtggattagcctgcgcaataactttgccgcctttctcggcctgcaggcgctg

SEQ ID NO: 788034 - DNA, 75 bp, synthetic construct
  source 1..75: mol_type = other DNA
cccgacccactacgccgtggcgttgcagtatgaccagtcgcgcgccgccgcgccgtttgtggtggcgaaaggcac

SEQ ID NO: 788035 - DNA, 75 bp, synthetic construct
  source 1..75: mol_type = other DNA
ccggcggctggctattcttaccgaaaaaaatcctcccggatttcagcaaaatcagcccgttaaaaggcattgggc

SEQ ID NO: 788036 - DNA, 75 bp, synthetic construct
  source 1..75: mol_type = other DNA
gtttgtcgctctacgccagcgtgatgcgcaactttgtcatcctgtttattttctttgcacttatcgacgtgccgc

SEQ ID NO: 788037 - DNA, 75 bp, synthetic construct
  source 1..75: mol_type = other DNA
ggcgatggggcaaattcgcaaagtggtgccgaaagccaacgtggtgatcaccaacccgacccactacgccgtggc

SEQ ID NO: 788038 - DNA, 75 bp, synthetic construct
  source 1..75: mol_type = other DNA
aaagtgcgcaatggcgcagaagctattacccagcagcgcccacgctggacgccgatgaatctgcatcaggcgcag

SEQ ID NO: 788039 - DNA, 75 bp, synthetic construct
  source 1..75: mol_type = other DNA
ctgagcgccgggtatcgaatgtctgccagcgcggcctggcctgccttgttgaatgataagtggcagagtaaaacg

SEQ ID NO: 788040 - DNA, 75 bp, synthetic construct
  source 1..75: mol_type = other DNA
ctgccagtggcaaaactcacaccgaatttatgtgcggggatatttaccgcgataagtacggcggcatcgtgacga

SEQ ID NO: 788041 - DNA, 75 bp, synthetic construct
  source 1..75: mol_type = other DNA
tttgattgcgtccgcagtcagcggcgcattaatgctcgtcagggggagattcgcctgttgatggatgggcgttta

SEQ ID NO: 788042 - DNA, 75 bp, synthetic construct
  source 1..75: mol_type = other DNA
tatgactgtgtgatgcctgtttatcagttccggcgtgatttttcactgatacagtccacaccacgcaaacagccc

SEQ ID NO: 788043 - DNA, 75 bp, synthetic construct
  source 1..75: mol_type = other DNA
accagcaaggagaaagcacgcgccaatattcaggaaataaaaaagatgcttaacgtattcaggggtaagaaatga

SEQ ID NO: 788044 - DNA, 75 bp, synthetic construct
  source 1..75: mol_type = other DNA
catcgagttttagcgttagacataaatgattacaaccacttgaaaatatacattgataaaataagtaaaaatacc

SEQ ID NO: 788045 - DNA, 75 bp, synthetic construct
  source 1..75: mol_type = other DNA
tggaaggcgtgccgggcagcttcttgctggagaatctcggttatacctttggttttattatcgtcattatggccc

SEQ ID NO: 788046 - DNA, 75 bp, synthetic construct
  source 1..75: mol_type = other DNA
acatggacacaccatcaccgttaacgctgctggtaatgcggaaaacaccgtcaaaaacatcgcatttaactatat

SEQ ID NO: 788047 - DNA, 75 bp, synthetic construct
  source 1..75: mol_type = other DNA
ttcttcaagagacggttatggttttgaggaagactgggcagaagtttatacctcgaaaaatcttccaccagaaag

SEQ ID NO: 788048 - DNA, 75 bp, synthetic construct
  source 1..75: mol_type = other DNA
ccctactccctggatttgcttacgccgaagagcttcctgcacccgttaaagtgattgaaaaacaggggattacga

SEQ ID NO: 788049 - DNA, 75 bp, synthetic construct
  source 1..75: mol_type = other DNA
atgttaaaaaagataatttttttaaccctactcccaggattagcttacgccgaagagcttcctgcgcccgttaaa

SEQ ID NO: 788050 - DNA, 75 bp, synthetic construct
  source 1..75: mol_type = other DNA
gagcggcaaagattgtggtaattatattaatgacgtggcttatcgccctgggtgacaccactcacatcgtcgtgg

SEQ ID NO: 788051 - DNA, 75 bp, synthetic construct
  source 1..75: mol_type = other DNA
aaggccgcgtatgatcttgctaacggtaaatatactgcgcaggatgccaccacagcgcgaaaaggccttgtccag

SEQ ID NO: 788052 - DNA, 75 bp, synthetic construct
  source 1..75: mol_type = other DNA
acgggattggcgcaatgaaccgccccgggtttcctggagagtattttatctgtgaactcaggctgccagatcatt

SEQ ID NO: 788053 - DNA, 75 bp, synthetic construct
  source 1..75: mol_type = other DNA
ttggttaatgggacaacctcagcggtcgtggtagatgaaggtggtgaattgttggtgtatccaggtggggaagcc

SEQ ID NO: 788054 - DNA, 75 bp, synthetic construct
  source 1..75: mol_type = other DNA
cagtaaaacagactttgctgataagcgtggtatgcgttatgtgcgggttaacgctcctgcaggtgcaacatctgg

SEQ ID NO: 788055 - DNA, 75 bp, synthetic construct
  source 1..75: mol_type = other DNA
gtggctgctggttcgtggcgtatgggaaacgctggcaatgaccttcgtatccggatttttgggtttgtggttggt

SEQ ID NO: 788056 - DNA, 75 bp, synthetic construct
  source 1..75: mol_type = other DNA
gcaccgtttattgcccgtatggtcgagaacgctctgctggagatcccaaccgggttaattgaagcttcccgcgca

SEQ ID NO: 788057 - DNA, 75 bp, synthetic construct
  source 1..75: mol_type = other DNA
caaatcctctgactcagtcgcaagcggaaatatcgatattgcttatgacgaatctgcgtcatgcgttgcgagtca

SEQ ID NO: 788058 - DNA, 75 bp, synthetic construct
  source 1..75: mol_type = other DNA
gaatacaccttcaccgtactggtgatgggagaggatgttcacacgcaacgaagccgtcttcgggatgcccttcgc

SEQ ID NO: 788059 - DNA, 75 bp, synthetic construct
  source 1..75: mol_type = other DNA
gttattaagagatatattcgagttatctaagcaaaccagtggggatgttctaatctataatactctttggcaata

SEQ ID NO: 788060 - DNA, 75 bp, synthetic construct
  source 1..75: mol_type = other DNA
ggagttacgtatccgccagtcgcaaagtgttgcgttgccatcaataaccccatttgaagcactggatggtgctgt

SEQ ID NO: 788061 - DNA, 75 bp, synthetic construct
  source 1..75: mol_type = other DNA
ttacgggttatacctcacagatagggcagcagatccagcaggctatttccgactattgtagtggcacactaaatt

SEQ ID NO: 788062 - DNA, 75 bp, synthetic construct
  source 1..75: mol_type = other DNA
gaaactgatgcggagttacgtatccgccagtcgcaaagtgttgcgttgccatcaataaccccatttgaagcactg

SEQ ID NO: 788063 - DNA, 75 bp, synthetic construct
  source 1..75: mol_type = other DNA
tgcctacctcgaaccggacagtaaagacggtcagatggtggctctgatggcgctggcaattcatgatgccaataa

SEQ ID NO: 788064 - DNA, 75 bp, synthetic construct
  source 1..75: mol_type = other DNA
gacggccagatggtcgctctggtggctctggccattcacgatgccaacaacacggccatttctgtttaccggtca

SEQ ID NO: 788065 - DNA, 75 bp, synthetic construct
  source 1..75: mol_type = other DNA
tccgcactcaatcgcggccattgtcgaaggtggtgatgcgacggtcatagcaaacagcattcgtggtgtgaaagg

SEQ ID NO: 788066 - DNA, 75 bp, synthetic construct
  source 1..75: mol_type = other DNA
cgagcagatcaaacaggctgttgccgattatattaatggcctgacaattggcgacgacgtgctgctgagccgtat

SEQ ID NO: 788067 - DNA, 75 bp, synthetic construct
  source 1..75: mol_type = other DNA
tacagtgatggcgaccgcaacatgttctgtcagtggtgcagtggcggcgctggatggaactatcactgaaattaa

SEQ ID NO: 788068 - DNA, 75 bp, synthetic construct
  source 1..75: mol_type = other DNA
accccctcttctgcccaaaagcataacccgctaaatcctttcccttccgggcatcttcagttccgcaattttttg

SEQ ID NO: 788069 - DNA, 75 bp, synthetic construct
  source 1..75: mol_type = other DNA
gccgaaaagctggcattttatttctcatggtgaaatgtggtcgccaatgccgggggatgccgcctgtgtctggtt

SEQ ID NO: 788070 - DNA, 75 bp, synthetic construct
  source 1..75: mol_type = other DNA
tccgcaccttgctgttagttgctgataaaaacaaacccagcctgcaacgtgtggctaaatacagtaaaaacttcc

SEQ ID NO: 788071 - DNA, 75 bp, synthetic construct
  source 1..75: mol_type = other DNA
taaaaacaaacccagcctgcaacgtgtggctaaatacagtaaaaacttcccccatgcgacactcgccgcactggc

SEQ ID NO: 788072 - DNA, 75 bp, synthetic construct
  source 1..75: mol_type = other DNA
tgggtggaaattctattgttttaggcgatagtgatactggatttaaacaaaacggtgatggtgtccttgatacct

SEQ ID NO: 788073 - DNA, 75 bp, synthetic construct
  source 1..75: mol_type = other DNA
cattactaccaggggcgggttgaagagatcctgaatggctggaactccccggaagcacaattagcagaacaggcg

SEQ ID NO: 788074 - DNA, 75 bp, synthetic construct
  source 1..75: mol_type = other DNA
gatgtatggctgtttctgaattatatactccccggaagcacaattagcagaacaggcgctccgcagcggtcacat

SEQ ID NO: 788075 - DNA, 75 bp, synthetic construct
  source 1..75: mol_type = other DNA
aaagcccccccctgcgcgccctggttatccaatcatcgaagacaaaaagctgcctgcacagcaaaaaacacgtga

SEQ ID NO: 788076 - DNA, 75 bp, synthetic construct
  source 1..75: mol_type = other DNA
ttattaccttgcgtcgtccggctggtcagtctaatcatatcgcttttcaggataaccgcaccggaaatattactc

SEQ ID NO: 788077 - DNA, 75 bp, synthetic construct
  source 1..75: mol_type = other DNA
tactgtagagtatggcaaaagtgctgatgtgactttaaatgtatatgatacacctgaattaactctcgttaagcc

SEQ ID NO: 788078 - DNA, 75 bp, synthetic construct
  source 1..75: mol_type = other DNA
taacaacaaggtagaccagaataaatcttctactgatgccgcaattgccgcagctaaccagcgaattgattctat

SEQ ID NO: 788079 - DNA, 75 bp, synthetic construct
  source 1..75: mol_type = other DNA
ggtaacgttcaattaggcggtgatggtaacgaagatgcattaacgttagaacgtgcaagccgtgccgctcgtttt

SEQ ID NO: 788080 - DNA, 75 bp, synthetic construct
  source 1..75: mol_type = other DNA
gactaacgttaagccgtctactggtgttacagatggacgtgttattacaatgttcaacaccgaaaacaaggccgg

SEQ ID NO: 788081 - DNA, 75 bp, synthetic construct
  source 1..75: mol_type = other DNA
gacgcggatactaagattaccaatcttactggcactgttaatagcaaccataccgcaattaacaacaaggtagac

SEQ ID NO: 788082 - DNA, 75 bp, synthetic construct
  source 1..75: mol_type = other DNA
ttgcgccggatcttaccacctttgcgaaatcgatcgcaggcggcttcccgctggcgggcgtcaccgggcgcgcgg

SEQ ID NO: 788083 - DNA, 75 bp, synthetic construct
  source 1..75: mol_type = other DNA
tcgccatggcaaacaagctggcacgaacagtgtgggcaatagctgcttacggacgtaaatacgacaagaatcacg

SEQ ID NO: 788084 - DNA, 75 bp, synthetic construct
  source 1..75: mol_type = other DNA
tggcacgaacagtatgggcgataaccgcccatggtcgtaagtatgacaggaaccatgtcagtatcagaccatatt

SEQ ID NO: 788085 - DNA, 75 bp, synthetic construct
  source 1..75: mol_type = other DNA
atgaaatatacaccggttggcgttgatatcgcaaaacatgtcattcagattcacttcatcaatgagcacacagat

SEQ ID NO: 788086 - DNA, 75 bp, synthetic construct
  source 1..75: mol_type = other DNA
ttcgtggataaccgaactgaaaaacgtcgtccagccagcgtggcgatcgtcgccatggcaaacaagctggcgcga

SEQ ID NO: 788087 - DNA, 75 bp, synthetic construct
  source 1..75: mol_type = other DNA
atatgcgtggctggacgattaagggcaaacctgccagtggtcgggccgtattgtctcaggaacaggacggcatta

SEQ ID NO: 788088 - DNA, 75 bp, synthetic construct
  source 1..75: mol_type = other DNA
tcgccatggcaaacaagctggcgcgaacggtgtgggcaatagccgctcacggacgtaaatatgacaggaaccacg

SEQ ID NO: 788089 - DNA, 75 bp, synthetic construct
  source 1..75: mol_type = other DNA
ttgcgccggatcttaccacctttgcgaaatcgatcgcggcggcttcccgctggcgggcgtcaccgggcgcgcgga

SEQ ID NO: 788090 - DNA, 75 bp, synthetic construct
  source 1..75: mol_type = other DNA
tgggcctgatgccagggcacgtttatcgcgcgctttatccttgcccgctgcacggcatcagtgaagatgacgcta

SEQ ID NO: 788091 - DNA, 75 bp, synthetic construct
  source 1..75: mol_type = other DNA
cacggcatcagcgaggatgacgcgatcgccagtatccatcgaatcttcaaaaatgacgccgcgccggaagatatc

SEQ ID NO: 788092 - DNA, 75 bp, synthetic construct
  source 1..75: mol_type = other DNA
gcagcagaagcatttaaggaagccattaagtctgactcctctgattatcatcctgaacctttaagctttggtaag

SEQ ID NO: 788093 - DNA, 75 bp, synthetic construct
  source 1..75: mol_type = other DNA
aacctgcaacaccagaacaactgacagagattacacaggataccccctgtgcagcagaagcatttaaggaagcca

SEQ ID NO: 788094 - DNA, 75 bp, synthetic construct
  source 1..75: mol_type = other DNA
gattgttggcgatcgccgaaaaacacacggagatcggcgacgtacgcggtctgggggcgatgatcgccatcgagc

SEQ ID NO: 788095 - DNA, 75 bp, synthetic construct
  source 1..75: mol_type = other DNA
ggatcagcgaaacggggctaataaacgtcaaggctggtttggttttggttctacagatactaacgattttcaatg

SEQ ID NO: 788096 - DNA, 75 bp, synthetic construct
  source 1..75: mol_type = other DNA
ctgccagcggcaagcctcgccctgaatttaagcgcggtgatatttaccgcgaccagtacggcggcacggtaatga

SEQ ID NO: 788097 - DNA, 75 bp, synthetic construct
  source 1..75: mol_type = other DNA
acgcttccgcctgaactgaaaaatggcggcattaagatctcacgccaggcgttgaaagcgtgggttcaacgccag

SEQ ID NO: 788098 - DNA, 75 bp, synthetic construct
  source 1..75: mol_type = other DNA
atcgctgattccgtttggcgagcacgatgactggctgctctctttgccgctatttcacgtttccggtcagggaat

SEQ ID NO: 788099 - DNA, 75 bp, synthetic construct
  source 1..75: mol_type = other DNA
cacttaccgccgtgaaggctacgaatatgattgcgttatgcctgtttatcagttcgatcgtgatttttctctggt

SEQ ID NO: 788100 - DNA, 75 bp, synthetic construct
  source 1..75: mol_type = other DNA
ctgccagtggcaaaactcgcactaaattcatgcgcggtgatatttaccgcgataagtacggcggcacggtaatga

SEQ ID NO: 788101 - DNA, 75 bp, synthetic construct
  source 1..75: mol_type = other DNA
acagaccgcgccgcataacgtgcccaccagcagggagaaagcacgcgccaatattcaggaaataaaaaagatgct

SEQ ID NO: 788102 - DNA, 75 bp, synthetic construct
  source 1..75: mol_type = other DNA
gctgcacattcagctggttgaaggcgcacatgccgctgcgtggcagccgacgcgtctgtgctcaatgacgttgac

SEQ ID NO: 788103 - DNA, 75 bp, synthetic construct
  source 1..75: mol_type = other DNA
ttttcagcaaccggtgcgttggtttacgcttccgccagagctgaaaaatggggggattaaaatttcgcgtcaggc

SEQ ID NO: 788104 - DNA, 75 bp, synthetic construct
  source 1..75: mol_type = other DNA
atgatcttctctgactggccgtggcgtcactggcggcaggtgcggggagatgccatcgccttacggctcaatgat

SEQ ID NO: 788105 - DNA, 75 bp, synthetic construct
  source 1..75: mol_type = other DNA
gcgagcagggcattcgttgctggtgtggttatggtctgacggaattcgcctccacggtttgtgcgaaagaagctg

SEQ ID NO: 788106 - DNA, 75 bp, synthetic construct
  source 1..75: mol_type = other DNA
tcgaccggtggcggtgatggagtatgaccacgagagcgttgatcttagtgaatgggtgaaagataagctggcccg

SEQ ID NO: 788107 - DNA, 75 bp, synthetic construct
  source 1..75: mol_type = other DNA
gctgccgggtcgggaagtgaaaatcgtaaacgacgaagtgtggttgcgggctgccagcacggctgaaggttactg

SEQ ID NO: 788108 - DNA, 75 bp, synthetic construct
  source 1..75: mol_type = other DNA
atggttaaaaactggataaaaggctaccgcaaatctggtaatgaggcctttatcaggcgcaggaaggagaaaagc

SEQ ID NO: 788109 - DNA, 75 bp, synthetic construct
  source 1..75: mol_type = other DNA
ggaaatgctatggtgcgtatgcacgtacacgatgcaacttttgactttaacgctgctggtgactttaccgcaggt

SEQ ID NO: 788110 - DNA, 75 bp, synthetic construct
  source 1..75: mol_type = other DNA
aacttccgcatataacgtatggaaagcgaccaaatggggtttagaccacatcgcggcaatgggtgtacacgttcc

SEQ ID NO: 788111 - DNA, 75 bp, synthetic construct
  source 1..75: mol_type = other DNA
tcgtctggctactggtgccactgatgctcaggatattctaaccgttgaatctagtagctctattgctgggactca

SEQ ID NO: 788112 - DNA, 75 bp, synthetic construct
  source 1..75: mol_type = other DNA
taacgtagtccaaattagtgtttctccagaaaaacacgctgaactgaatacgaaagtagacaataacaaaactag

SEQ ID NO: 788113 - DNA, 75 bp, synthetic construct
  source 1..75: mol_type = other DNA
tagcaatatcacaacaactggtgctgatattacgtttaaacgcgctggcaataagcacatctggtttagagatcc

SEQ ID NO: 788114 - DNA, 75 bp, synthetic construct
  source 1..75: mol_type = other DNA
tttgactttcgacgctgggcgattaaattcccgcgattatttccggtttaaccattggggtgatagcaataacgg

SEQ ID NO: 788115 - DNA, 75 bp, synthetic construct
  source 1..75: mol_type = other DNA
aagcggtagcatttgagcgatacacaatcgtcaatgccagtcagaaagaatggggaggccagcgagcagaccgcc

SEQ ID NO: 788116 - DNA, 75 bp, synthetic construct
  source 1..75: mol_type = other DNA
tggtgatgacttacttgtcgcgcttttatgtctgagcactggaggaagatggacggaagttgccacgctaaaacc

SEQ ID NO: 788117 - DNA, 75 bp, synthetic construct
  source 1..75: mol_type = other DNA
atggcaggtcagccctttagcatacagcgtgacggtattctgacggtggggattcagttcactgctggtgagcat

SEQ ID NO: 788118 - DNA, 75 bp, synthetic construct
  source 1..75: mol_type = other DNA
tggcttggcgcgagcgtagaccgccgcacgttgagcgagttgttagatacctggtggctgctatatgggcagact

SEQ ID NO: 788119 - DNA, 75 bp, synthetic construct
  source 1..75: mol_type = other DNA
cagacttgccacgcgggcaggctacgcatgtgctccggcacacgttcgcgagctggttcatgatgaacgggggta

SEQ ID NO: 788120 - DNA, 75 bp, synthetic construct
  source 1..75: mol_type = other DNA
gtgaagctgttacagaaatggcttttttgtccagtgaagagattacacggctgttatccatgctcgatggtgatg

SEQ ID NO: 788121 - DNA, 75 bp, synthetic construct
  source 1..75: mol_type = other DNA
aagaaatttggtggggcctttggtggcatagctatacatgcctttaaaaatggttccttagtaggaaaggcttct

SEQ ID NO: 788122 - DNA, 75 bp, synthetic construct
  source 1..75: mol_type = other DNA
tggaaacagggcagcaagaaacgtgcggccattacgtttccactgttcgatgaaatgcggaacggtggacggctc

SEQ ID NO: 788123 - DNA, 75 bp, synthetic construct
  source 1..75: mol_type = other DNA
tttgcgtttgaagcgttcgaaaatgcggtaatgacgggcgatccgcaaatcttcctgtccgcatccaaagcacag

SEQ ID NO: 788124 - DNA, 75 bp, synthetic construct
  source 1..75: mol_type = other DNA
cccaggaggattttgacacctgggcagaggagcatcttttcgaatatcagaaacacctgcgccgcaacataggcc

SEQ ID NO: 788125 - DNA, 75 bp, synthetic construct
  source 1..75: mol_type = other DNA
atgaactggaagtggcaggcggcacagattaagaagctgtttggccagtacaacatgacctacatcggcattgat

SEQ ID NO: 788126 - DNA, 75 bp, synthetic construct
  source 1..75: mol_type = other DNA
cgggaagtgggcatcactgctgcctgttgaatcggtggaaaatgtcatcgcccgccgtatcgaccagctctcccg

SEQ ID NO: 788127 - DNA, 75 bp, synthetic construct
  source 1..75: mol_type = other DNA
aagcgtgcggcgtggaggtggacacctggcaggatcacgacccggatgcaaaacggccgtttggtgacaggccag

SEQ ID NO: 788128 - DNA, 75 bp, synthetic construct
  source 1..75: mol_type = other DNA
gcttacaggctgtggacaggggatgaatggaagggcgacgatccgaaacgtaaggcggcggagttcccgaccagc

SEQ ID NO: 788129 - DNA, 75 bp, synthetic construct
  source 1..75: mol_type = other DNA
acctgcggcgggggagaagggaaaaagcggcgctaccggaaaaacgacgtttccggactgactgctgaaatgctg

SEQ ID NO: 788130 - DNA, 75 bp, synthetic construct
  source 1..75: mol_type = other DNA
agcagagagttttgagccgtttaccaaaaaactgttcgcttatcagttgcacctgcgtgaaaacaaattccgtcg

SEQ ID NO: 788131 - DNA, 75 bp, synthetic construct
  source 1..75: mol_type = other DNA
aaagagatcccggccagctttatggctgtacgccgcaccaccacgcaaagcggtaacgccatgacatttgtcgct

SEQ ID NO: 788132 - DNA, 75 bp, synthetic construct
  source 1..75: mol_type = other DNA
tgatgaaatgcgcaacggcggacggctttgcccggatggtcagtggcgctatgtcatcacgatggaggatgccat

SEQ ID NO: 788133 - DNA, 75 bp, synthetic construct
  source 1..75: mol_type = other DNA
tgtcatcacaatggaggatgcgtgcgctaagggactcagtgccagagttaacattgagaagctgcgtaaccgcta

SEQ ID NO: 788134 - DNA, 75 bp, synthetic construct
  source 1..75: mol_type = other DNA
gaaaaataaacacgctgaaaaaatggcggaatctgccgcgcacaagttacacggcgcagataacacggcaacaga

SEQ ID NO: 788135 - DNA, 75 bp, synthetic construct
  source 1..75: mol_type = other DNA
attatcggtgtatcgaaagatgcagctggcaataccgcgctgcgcatggcaatgcagactcgcgagcaacatatt

SEQ ID NO: 788136 - DNA, 75 bp, synthetic construct
  source 1..75: mol_type = other DNA
acctggccggaatttgccgaactgcacccgttctgcccaccggagcaggccgaaggttatcagcagatgattgcg

SEQ ID NO: 788137 - DNA, 75 bp, synthetic construct
  source 1..75: mol_type = other DNA
gtactggcgcgtgccgaagcggctgaaatcaacctgcgtagcgatattctgaacgccgtggggatcacccttgat

SEQ ID NO: 788138 - DNA, 75 bp, synthetic construct
  source 1..75: mol_type = other DNA
ggaagatgcgatcgcgggcggcttcaatctggccaacattgacgacttgcgcgatcgctacagtgaaaccgcttt

SEQ ID NO: 788139 - DNA, 75 bp, synthetic construct
  source 1..75: mol_type = other DNA
gcaggtggtggttgtggcgtgtgataaaaacggcaacatcgatctgactgatctgcgcgcgaaagccgaacaggc

SEQ ID NO: 788140 - DNA, 75 bp, synthetic construct
  source 1..75: mol_type = other DNA
ataccgcgtatactccgtatcaacctgaagtctcgcagggccgccttgaagcactgctcaacttccagcaggtaa

SEQ ID NO: 788141 - DNA, 75 bp, synthetic construct
  source 1..75: mol_type = other DNA
ctgctgcccgtgcgctgtatctgaaacggtatacgccgaaagaaatacaaaaaaagctggggcttaacagtccgc

SEQ ID NO: 788142 - DNA, 75 bp, synthetic construct
  source 1..75: mol_type = other DNA
aatcacattaaaagggaacccgataaatttaaaaacggcgcacgggatcgcaccgctgcattttctggcaacaaa

SEQ ID NO: 788143 - DNA, 75 bp, synthetic construct
  source 1..75: mol_type = other DNA
tatgacgtatatcggcgttgatgtaaccgggatcggtgtcggtgtatttgaactcattcaaaattttgcgcggcg

SEQ ID NO: 788144 - DNA, 75 bp, synthetic construct
  source 1..75: mol_type = other DNA
aacctttggttttgaagtgattgtcgatgacgcgcaaaaagtgctcgaccatcaggacgtcttcggcgtgctgtt

SEQ ID NO: 788145 - DNA, 75 bp, synthetic construct
  source 1..75: mol_type = other DNA
agatgccattgccggtggatttaaccttgccgatatcaacgagctgcgcgaacgatacagtgagaccgcgttcag

SEQ ID NO: 788146 - DNA, 75 bp, synthetic construct
  source 1..75: mol_type = other DNA
tattgcccatgcgctcagtaatgagccgctgaattacaaaaataaacgcaaatcaacgtgggtttttgctgatga

SEQ ID NO: 788147 - DNA, 75 bp, synthetic construct
  source 1..75: mol_type = other DNA
ctgctgcaaaatcgctctatctgaaaaggcacacaccaaaagaaatacaaaagaagctcggactgaacagcccgc

SEQ ID NO: 788148 - DNA, 75 bp, synthetic construct
  source 1..75: mol_type = other DNA
atgttaggcctcctcttgccgcgatgaatgattgttgtgatgcgcagattgcgcggcagataaatgaagttatcg

SEQ ID NO: 788149 - DNA, 75 bp, synthetic construct
  source 1..75: mol_type = other DNA
aaacaagacaacgaatattcaccatatgagccatttgtaaatatgataaaagcattttatcggatggagctcact

SEQ ID NO: 788150 - DNA, 75 bp, synthetic construct
  source 1..75: mol_type = other DNA
atggataagaaaatatgcgttgtttcgatgagcgtcggcaaaccggcgtcaatgactgctgcatggatcaacaat

SEQ ID NO: 788151 - DNA, 75 bp, synthetic construct
  source 1..75: mol_type = other DNA
tgaatcatcgttgggcgttgttgagtaccacggcacgttagcgggcaaagacgcttattcaacgaatggcggctg

SEQ ID NO: 788152 - DNA, 75 bp, synthetic construct
  source 1..75: mol_type = other DNA
gctggcggctttttacgaagatgaaccgcgcgtgacggttgatgtgtcccctgctatcgtccaccacacacagta

SEQ ID NO: 788153 - DNA, 75 bp, synthetic construct
  source 1..75: mol_type = other DNA
gtattatcaggtaatcacgatcagtcggggatgatttggctacgtgctgcgctggcggctttttacgaagatgaa

SEQ ID NO: 788154 - DNA, 75 bp, synthetic construct
  source 1..75: mol_type = other DNA
aagcatcttcgattccgaacacgacaaaaaaggcgatgaatttttcaacatcaactggagcgaaataacgacaga

SEQ ID NO: 788155 - DNA, 75 bp, synthetic construct
  source 1..75: mol_type = other DNA
gaacgccagaaagcgatcaagttaccgcgcaaggaatccggcaaatacatcctccaccaaagcatcttcgattcc

SEQ ID NO: 788156 - DNA, 75 bp, synthetic construct
  source 1..75: mol_type = other DNA
tacttcatcctcgccactggcttacctggtctggtttgggtctgctgtggcttctcgttcaacttccttatcttg

SEQ ID NO: 788157 - DNA, 75 bp, synthetic construct
  source 1..75: mol_type = other DNA
gtcccctagtgaatataattcaagctactcatgaaattgccgcgcggaaagtgcctaaaggttcattaactggta

SEQ ID NO: 788158 - DNA, 75 bp, synthetic construct
  source 1..75: mol_type = other DNA
atactggcaggacgtctcggaaaacgtgcccgtcaaagagcacggataaatttatcactttgttttccggaatat

SEQ ID NO: 788159 - DNA, 75 bp, synthetic construct
  source 1..75: mol_type = other DNA
gcgcccgtcaacgggccctgattaatttatcgctttgttttccggagtacagtgataaagaaaaggagaatatcg

SEQ ID NO: 788160 - DNA, 75 bp, synthetic construct
  source 1..75: mol_type = other DNA
ctgctatcgtccaccacacgcagtacggcaaaacattccttgcctatcatcacgggcacactatcaaaaaacccg

SEQ ID NO: 788161 - DNA, 75 bp, synthetic construct
  source 1..75: mol_type = other DNA
tgaagctatcaggattctttcatatcgcactgatatgatactaaatatgctttctgcattaacggctgcgcttgg

SEQ ID NO: 788162 - DNA, 75 bp, synthetic construct
  source 1..75: mol_type = other DNA
ccagcgcgtaagactatcgggaagaaatcttgtggctggttactaagtgaccttctctggtggattcagatcaga

SEQ ID NO: 788163 - DNA, 75 bp, synthetic construct
  source 1..75: mol_type = other DNA
ccgccacgtaaaactattggaaagaaatcctgtgggtggttattaagtgatctattgtggtggattagtcagtat

SEQ ID NO: 788164 - DNA, 75 bp, synthetic construct
  source 1..75: mol_type = other DNA
cagtcaaacagcggccacctgtatattgacgaatatctgtggatccccggttttcgtcgtctcaatgaagtggca

SEQ ID NO: 788165 - DNA, 75 bp, synthetic construct
  source 1..75: mol_type = other DNA
gtcatccaaaacacaccagggttacccgttctggtctggcgatgaatggcgcaaaggcgatccgaaacgaaaagg

SEQ ID NO: 788166 - DNA, 75 bp, synthetic construct
  source 1..75: mol_type = other DNA
tggtacaaaaacaaacgtataccgcgaagttgttattcaacagatagataaatttgaaaaaaccataccaggtat

SEQ ID NO: 788167 - DNA, 75 bp, synthetic construct
  source 1..75: mol_type = other DNA
aggcatgggaagccggacggcggcggatacagatctccatactcccagccgtggcaagactgttagcggtttctc

SEQ ID NO: 788168 - DNA, 75 bp, synthetic construct
  source 1..75: mol_type = other DNA
gacttcttcgactacgcggtgggcgcggcaccaatgtctgaaaaggctgttttgttgttaggaggtgatattctt

SEQ ID NO: 788169 - DNA, 75 bp, synthetic construct
  source 1..75: mol_type = other DNA
atgtcgcaaagaaagatcagcgacgagcaattaatcgctgaatacaacaatgggaaaacttacaagcaaatagcc

SEQ ID NO: 788170 - DNA, 75 bp, synthetic construct
  source 1..75: mol_type = other DNA
agcgcgcgatctacagaagactatggattcacagcaaaaacgcctacagagcgttacagagccttttaaaggact

SEQ ID NO: 788171 - DNA, 75 bp, synthetic construct
  source 1..75: mol_type = other DNA
ggcgaattacgcgataatgcgctgcaaaaagctgacgggaatgggcagtgtggccagcgctttgcagcactgcta

SEQ ID NO: 788172 - DNA, 75 bp, synthetic construct
  source 1..75: mol_type = other DNA
ctactgctctgtgtccaaatcaacggatcaggcaatggggcgtgtgcgggagctgctgccggaaaaacgccgtaa

SEQ ID NO: 788173 - DNA, 75 bp, synthetic construct
  source 1..75: mol_type = other DNA
tcgagcggctggcgaacaacacagagaatctgtacaactttatttccggaaagacacagcctgtagcgaatccgc

SEQ ID NO: 788174 - DNA, 75 bp, synthetic construct
  source 1..75: mol_type = other DNA
aacggcgcgagaaatacagaacattgaagaccgcatttatcgaaatatgcgctccattgctcgtgatgacccgat

SEQ ID NO: 788175 - DNA, 75 bp, synthetic construct
  source 1..75: mol_type = other DNA
tcgctataacccaccgctgaccggtcagacgcttctcctgtgggcgctaccagtggtgctgttactgctgatggt

SEQ ID NO: 788176 - DNA, 75 bp, synthetic construct
  source 1..75: mol_type = other DNA
gagagattacgccgcgccgggcaactggcatccgatgaacttcagcgagaggctgctctcaaaaaacgccgtgtc

SEQ ID NO: 788177 - DNA, 75 bp, synthetic construct
  source 1..75: mol_type = other DNA
ttaccggttcaggcatccagcgtgggacatggaagggagaactaacccgtagcgtattcctgtttaagtcgtttc

SEQ ID NO: 788178 - DNA, 75 bp, synthetic construct
  source 1..75: mol_type = other DNA
atattgcgcgctggtcggataacatccgcaactggatggttgccagtcgtctcggttctgctctgttgtcatcgt

SEQ ID NO: 788179 - DNA, 75 bp, synthetic construct
  source 1..75: mol_type = other DNA
aaatggaaagttgtatgctctggggaaatatacaggaactattcggagggataacgggaaaagcaagagtctgat

SEQ ID NO: 788180 - DNA, 75 bp, synthetic construct
  source 1..75: mol_type = other DNA
acgttacaatgcgatcagtcgtattattgatgctgaaggggtgtatagtcaggagcaacggcggatcatatatgc

SEQ ID NO: 788181 - DNA, 75 bp, synthetic construct
  source 1..75: mol_type = other DNA
ctttctctcatttacctggcagcaacaatcattccggtcattgctctgtgtgttcgtcgtctgcacgatactgac

SEQ ID NO: 788182 - DNA, 75 bp, synthetic construct
  source 1..75: mol_type = other DNA
atgaataaacggtttctcatgttactgctgctgtttgctggctttgtacacgctcaggtcgtagacacctggcaa

SEQ ID NO: 788183 - DNA, 75 bp, synthetic construct
  source 1..75: mol_type = other DNA
tatgactttaccagcttggatacaacgccttatgcaaaaaaattactggaaatgttttataagtttgaaaacagt

SEQ ID NO: 788184 - DNA, 75 bp, synthetic construct
  source 1..75: mol_type = other DNA
caaaaagcgacgctaacccccatttcaaatcagcaatcgtcgtttaccgctaaacttagcgcctacggtacgctg

SEQ ID NO: 788185 - DNA, 75 bp, synthetic construct
  source 1..75: mol_type = other DNA
ggtgcgaatctctggtacttgaaggcggctctcgatcacatgatctttaaccagatgcaggagtatttttcacca

SEQ ID NO: 788186 - DNA, 75 bp, synthetic construct
  source 1..75: mol_type = other DNA
acccgactctcgaatggttcttgtctcattaccacattcataagtacccatccaagagcacgcttattcaccagg

SEQ ID NO: 788187 - DNA, 75 bp, synthetic construct
  source 1..75: mol_type = other DNA
ggttgatgtgcgcaagcgccagtcaaaaaccgtgccgtataaagagatcgaacgctacggcattgatcgtaaccg

SEQ ID NO: 788188 - DNA, 75 bp, synthetic construct
  source 1..75: mol_type = other DNA
taattgcaggttttagtctttccgccacagcagccgaaaccattcgttttgccaccgaagcctcctatcctccgt

SEQ ID NO: 788189 - DNA, 75 bp, synthetic construct
  source 1..75: mol_type = other DNA
atcgccgtctttgcaatgagcaaccagtcgatggtggagcagctccggctgcgtcagaaccgtcagcgcctgcag

SEQ ID NO: 788190 - DNA, 75 bp, synthetic construct
  source 1..75: mol_type = other DNA
atgtcactaggcaatagagtgattattgtcgacgcagatgaccagaaatcagtattaacctggtacaacaatcgc

SEQ ID NO: 788191 - DNA, 75 bp, synthetic construct
  source 1..75: mol_type = other DNA
tattgaccgccagtgaaggtctggccaataaaatgaccatatctgttgagggtgacagtaaattaaatgatctgc

SEQ ID NO: 788192 - DNA, 75 bp, synthetic construct
  source 1..75: mol_type = other DNA
ctctgttgagtccagaacaaaagccactcgtgattatgcattgagtcaattgcaagaggcatttgaagcagttga

SEQ ID NO: 788193 - DNA, 75 bp, synthetic construct
  source 1..75: mol_type = other DNA
gtggtgatctggttaagcttggaaaaggtctgacacctggtgccaacatctggtacctgaaggctgcgcttgatc

SEQ ID NO: 788194 - DNA, 75 bp, synthetic construct
  source 1..75: mol_type = other DNA
aaacactctccaggaaacccggggcggttcaaggaatgtatacaagcggtccagcaggcggcgcagcgcacgtta

SEQ ID NO: 788195 - DNA, 75 bp, synthetic construct
  source 1..75: mol_type = other DNA
cctatatcgccagtattgcgcgtattacccgtggctctatgattgaagtattacactccaactttattcgtactg

SEQ ID NO: 788196 - DNA, 75 bp, synthetic construct
  source 1..75: mol_type = other DNA
ctgatctcatgcatgaagtattttctgtgacagggccacaacgaccattgcgtaataagttgtttcctcatatca

SEQ ID NO: 788197 - DNA, 75 bp, synthetic construct
  source 1..75: mol_type = other DNA
tcatcgttggcggtggtgtagcaggagccaccgctgctctggtgttggcaagagccggatgcgatgtgctggtgg

SEQ ID NO: 788198 - DNA, 75 bp, synthetic construct
  source 1..75: mol_type = other DNA
atccttcatattagtcgtaataatgtagatgcgggttctccagttgtaggtgttgaaacaggatattccacacca

SEQ ID NO: 788199 - DNA, 75 bp, synthetic construct
  source 1..75: mol_type = other DNA
cgaaaagcacgaggtcagagccctttatttcacatgtgaaaacgatcggagctccaaaggattgcgtgacgcagc

SEQ ID NO: 788200 - DNA, 75 bp, synthetic construct
  source 1..75: mol_type = other DNA
catatgatagtatgttgactgaattaaataatatgcaaactgcatataatacggctgtaaaacgcagtgatcata

SEQ ID NO: 788201 - DNA, 75 bp, synthetic construct
  source 1..75: mol_type = other DNA
gcggattatcaaaacgcaattaacactgagtcaaataatcttctcaatgagaaaactaagcttgacttagcaaaa

SEQ ID NO: 788202 - DNA, 75 bp, synthetic construct
  source 1..75: mol_type = other DNA
tctcccgcggcaaagatgtcacgccagaacagctggcacgctcccagggtgagctgcgctatatgaaaaaacgct

SEQ ID NO: 788203 - DNA, 75 bp, synthetic construct
  source 1..75: mol_type = other DNA
gccgagctgtaccaccatgagtcggtctcccgcggcaaagacgtcacgccagaacagctggcgcgctcccaaggt

SEQ ID NO: 788204 - DNA, 75 bp, synthetic construct
  source 1..75: mol_type = other DNA
gcaactggcactacgccaggcagcaggaaaaaccgatttagcgcgcgatatgctgcaaatgttactcgatttcct

SEQ ID NO: 788205 - DNA, 75 bp, synthetic construct
  source 1..75: mol_type = other DNA
agtatggatgaacctgtaagaatatcttttaagttaaaagaaatcagttttaaagatttttacctgcatgaaact

SEQ ID NO: 788206 - DNA, 75 bp, synthetic construct
  source 1..75: mol_type = other DNA
gatgcgatgaatttcatcgattcagtttggaaaaccttaagaacaggggttagtaatgaaaatatcccctttgtt

SEQ ID NO: 788207 - DNA, 75 bp, synthetic construct
  source 1..75: mol_type = other DNA
taaagatttttaccagcatgaaaccactatgcagtcagtaataacgtggctgaaatcactcatcaatagaacagg

SEQ ID NO: 788208 - DNA, 75 bp, synthetic construct
  source 1..75: mol_type = other DNA
tttcccgacatgaagccgtctatgctggatggactgaaaaagaagttatcagagcctgtaacgcatgcgcaaaac

SEQ ID NO: 788209 - DNA, 75 bp, synthetic construct
  source 1..75: mol_type = other DNA
cgacaacctcccacagatactggctgattacttgaaagaaacaaccggaaacgtaccggaaaagttgctacagaa

SEQ ID NO: 788210 - DNA, 75 bp, synthetic construct
  source 1..75: mol_type = other DNA
ctcttacaaaatcatcgctgaactggattatctggcatcgtcactacaaatgatggatgcaatgggtaacaaact

SEQ ID NO: 788211 - DNA, 75 bp, synthetic construct
  source 1..75: mol_type = other DNA
ctctggcgccggttgcgccgggtgtggcctttctatcagcgcctgaatgcgcaaaagcgcaagcgtctggggctg

SEQ ID NO: 788212 - DNA, 75 bp, synthetic construct
  source 1..75: mol_type = other DNA
gctatcactattcagcgtcaagagcatgacaagcgtattgagcttgagcaatcgctaaagatgtcaccaaaaaca

SEQ ID NO: 788213 - DNA, 75 bp, synthetic construct
  source 1..75: mol_type = other DNA
atctttgtgtctcctgagcctcaagaaatgcctgatgtatgcaaaactgaagcattacttgagcttgagcgtgaa

SEQ ID NO: 788214 - DNA, 75 bp, synthetic construct
  source 1..75: mol_type = other DNA
tactacgcttgatctgctggtcccccgctatcgtaaaacagcctgctatggtcactttggtcgcgacagctttcc

SEQ ID NO: 788215 - DNA, 75 bp, synthetic construct
  source 1..75: mol_type = other DNA
gtgttgcaacgtgggcgggtattgctgctgctgtatcatcttttgttccgtcttctttgagttcatctgacggct

SEQ ID NO: 788216 - DNA, 75 bp, synthetic construct
  source 1..75: mol_type = other DNA
tgccggagcatcacgccccactctggcagcaggtcagtcaggtggaacacagaccgttgagtacgtatgaggagc

SEQ ID NO: 788217 - DNA, 75 bp, synthetic construct
  source 1..75: mol_type = other DNA
ttggcgagggcaatcgcgcggacctggtgctggcgcatcgcaagggcaatcacattcatatcgaccacgtctggc

SEQ ID NO: 788218 - DNA, 75 bp, synthetic construct
  source 1..75: mol_type = other DNA
cgttgccagcgcaattgccattggtttcagtgattatccctactagaaatggtattgctcatttacgcccttgta

SEQ ID NO: 788219 - DNA, 75 bp, synthetic construct
  source 1..75: mol_type = other DNA
ctctggcgctgccagactcgttttctcgtcatgctggttggcttttgattcgagggcgtgttttaacgagtcaaa

SEQ ID NO: 788220 - DNA, 75 bp, synthetic construct
  source 1..75: mol_type = other DNA
atgcaaagcgattaccactggcacactctggcactgccagacccttctttatcccgcgcgggctggtttttgatc

SEQ ID NO: 788221 - DNA, 75 bp, synthetic construct
  source 1..75: mol_type = other DNA
atcccaacggtgagaacgaccgttatcccctgcaaaagcaggagatcgtaaccgaccctctggagcaagaagtta

SEQ ID NO: 788222 - DNA, 75 bp, synthetic construct
  source 1..75: mol_type = other DNA
tggttggcgatcagggcgtttatcgcgccaatatgcaatcagagcgcgaacgcaagcgcggtgaacgcattgccg

SEQ ID NO: 788223 - DNA, 75 bp, synthetic construct
  source 1..75: mol_type = other DNA
ggcgtgggtgtggtaggagcaaagctgtattacggaaatggcttgattcagcatgcaggcgatgctgtcggccct

SEQ ID NO: 788224 - DNA, 75 bp, synthetic construct
  source 1..75: mol_type = other DNA
acggaatgcgtttaacaaacaagtctatgatgatttacatcgcgcagcggcgtttttgttcctgaaccgacattg

SEQ ID NO: 788225 - DNA, 75 bp, synthetic construct
  source 1..75: mol_type = other DNA
gcaggacaacagcgaaatgctggccgctgacgtcatcatcagccagaaacgcatcggtaacctgccggcggtacg

SEQ ID NO: 788226 - DNA, 75 bp, synthetic construct
  source 1..75: mol_type = other DNA
tggcagcagattgaacagtggcgtgctcgtcagtgcctgaaatacgatattcacagtgaaaagattaaaccgcag

SEQ ID NO: 788227 - DNA, 75 bp, synthetic construct
  source 1..75: mol_type = other DNA
accgatgaagtcattgataatatccgtcgcgtttctccactggcacccctgcataattacgccaatttaagtggt

SEQ ID NO: 788228 - DNA, 75 bp, synthetic construct
  source 1..75: mol_type = other DNA
ttatgggaagtataaaactccgtatttcccattacaggagatggaagccttcctcggtgcggaagggcgttctga

SEQ ID NO: 788229 - DNA, 75 bp, synthetic construct
  source 1..75: mol_type = other DNA
aatgtcccaggagtcctgtcatcagcagacaacgcgttcggatgtttccttgccggattggctggagaagatgcg

SEQ ID NO: 788230 - DNA, 75 bp, synthetic construct
  source 1..75: mol_type = other DNA
ctaacagtggcgcgccaaacatcagagagctttatcatgacagtggcttcagagtggaacctctttttgccagac

SEQ ID NO: 788231 - DNA, 75 bp, synthetic construct
  source 1..75: mol_type = other DNA
aatctgctaaatgatgtgaatgctgacctgattaacttttacaagactctgcaacgcgaggcgcattcacttatc

SEQ ID NO: 788232 - DNA, 75 bp, synthetic construct
  source 1..75: mol_type = other DNA
tgctcgaacagacctcgatcccgcaacggtactttttgagttcgaaggcgtgcgccgggatattgcgccgagccg

SEQ ID NO: 788233 - DNA, 75 bp, synthetic construct
  source 1..75: mol_type = other DNA
aaaaaaccggttgtctacgtaggcggtggggcaatcacggcgggctgccatcagcagttgaaagaaacggtggag

SEQ ID NO: 788234 - DNA, 75 bp, synthetic construct
  source 1..75: mol_type = other DNA
tggcagcagattgaacagtggcgcgctcgtcagtgcctgaaatatgacactcacagtgaaaagattaaaccgcag

SEQ ID NO: 788235 - DNA, 75 bp, synthetic construct
  source 1..75: mol_type = other DNA
tggccggagtcggtcagtatgcgctcttataacccaacaacgctgggccataaggggcagattaaacgcgcgctg

SEQ ID NO: 788236 - DNA, 75 bp, synthetic construct
  source 1..75: mol_type = other DNA
tgaaaatgcgcgtgtcatttgcgccgttattccgactaacgaagaaaaaatgattgctttggatgccattcattt

SEQ ID NO: 788237 - DNA, 75 bp, synthetic construct
  source 1..75: mol_type = other DNA
ggcgcagtttaatgatctgctaaaaaactatgccggacgcccgaccgcgctgactaaatgccagaatattacggc

SEQ ID NO: 788238 - DNA, 75 bp, synthetic construct
  source 1..75: mol_type = other DNA
ctcatcccgatgacaacaacagccgcccctggtggggactgccctgcaccgtgacaccctgtttcggcgtccgtc

SEQ ID NO: 788239 - DNA, 75 bp, synthetic construct
  source 1..75: mol_type = other DNA
gaatccccgcaatcagcataccgtcacgctgtatgcgaaggggctggcctgtgaagccgataccctcagcagttg

SEQ ID NO: 788240 - DNA, 75 bp, synthetic construct
  source 1..75: mol_type = other DNA
cgtaccatccggaccaggcctttccgctgctgatgaaacaaccggaactcatgctcaccagcggtgaactgaatc

SEQ ID NO: 788241 - DNA, 75 bp, synthetic construct
  source 1..75: mol_type = other DNA
agaggccgcttcagcgacgcagatgtataccatctggaccaggcctttccgctgctgatgaaacaactggaatta

SEQ ID NO: 788242 - DNA, 75 bp, synthetic construct
  source 1..75: mol_type = other DNA
ctcatcccgacgacaattacgaccgcccctggtgggggcttccctgcacagtgaggccctgttttggcgcccgtc

SEQ ID NO: 788243 - DNA, 75 bp, synthetic construct
  source 1..75: mol_type = other DNA
agaggcctgttcagcgatgcagatgcgtaccctctggaccaggcctttcctctgctgatgaaacaactgtaactc

SEQ ID NO: 788244 - DNA, 75 bp, synthetic construct
  source 1..75: mol_type = other DNA
agaggcctgttcagcgatgcagatgcgtaccctctggaccaggcatttccgctgctgatgaaacaactggaactc

SEQ ID NO: 788245 - DNA, 75 bp, synthetic construct
  source 1..75: mol_type = other DNA
aggtgtacgccgttatggtttccacggcacgtcgcaccgctatgtttcccagcgcgcacattctttgctgaatct

SEQ ID NO: 788246 - DNA, 75 bp, synthetic construct
  source 1..75: mol_type = other DNA
cctttccgctgctgatgaaacaactggagctcatgctcaccagtggtgaactcagcccccgctatcagcataccg

SEQ ID NO: 788247 - DNA, 75 bp, synthetic construct
  source 1..75: mol_type = other DNA
agaggcctgttcagcgatgcagatgcgtaccctctggaccaggcgtttcccctgctgatgaaacaactgaaactc

SEQ ID NO: 788248 - DNA, 75 bp, synthetic construct
  source 1..75: mol_type = other DNA
agaggcctgttcagcgatgcagatgcgtaccctctggaccaggcgtttccactgctgatgaaacaactgcaactc

SEQ ID NO: 788249 - DNA, 75 bp, synthetic construct
  source 1..75: mol_type = other DNA
tatgccgggatatcaatggtgcgctctaactaatttcaatattgcatttccagatatttgttctcggttcttgtc

SEQ ID NO: 788250 - DNA, 75 bp, synthetic construct
  source 1..75: mol_type = other DNA
gaccattgctccggcactgctgaaagaactggcagagagcgaaggggctattgaacgtaaactgtcctacactgg

SEQ ID NO: 788251 - DNA, 75 bp, synthetic construct
  source 1..75: mol_type = other DNA
atggttcagaagcccctcattaagcagggatattcgctggcagaggaaattgccaacagcgtcagtcacggcatt

SEQ ID NO: 788252 - DNA, 75 bp, synthetic construct
  source 1..75: mol_type = other DNA
cgtgcgaaaacctccaaccgtagtgaaaacccgctactgcaggatgtgaacaaaggctggctgcagaaaatccgt

SEQ ID NO: 788253 - DNA, 75 bp, synthetic construct
  source 1..75: mol_type = other DNA
gttgaggactatcgctgcgctgcactggtggaaaacatccagattggcgattttagcgtcgccgcagcagaaacc

SEQ ID NO: 788254 - DNA, 75 bp, synthetic construct
  source 1..75: mol_type = other DNA
cgaaagagcgtgaacctgtcgatccgacgctgatggtcgatgtggaatacaaatgcgaacagaccaactttgaca

SEQ ID NO: 788255 - DNA, 75 bp, synthetic construct
  source 1..75: mol_type = other DNA
acctcgatgcgttggtgatggatgcgaccaccaacctgattgatgagatttatcaggatgacccggagctcgtcg

SEQ ID NO: 788256 - DNA, 75 bp, synthetic construct
  source 1..75: mol_type = other DNA
attgccggaaccactgataccacagctaaagagcgtgagcctgtcgatccgacgctgatggtcgatgtggaatat

SEQ ID NO: 788257 - DNA, 75 bp, synthetic construct
  source 1..75: mol_type = other DNA
caaaaaaggaagaaaaaatcgcgctgcaaatgagtttgaaaaacactttcgaggccgttgctcgcgagtggcatc

SEQ ID NO: 788258 - DNA, 75 bp, synthetic construct
  source 1..75: mol_type = other DNA
gatatttgtttttctgcatgactcttatgaaatggaatttttatattcttctttagaagaattactgatgaagtc

SEQ ID NO: 788259 - DNA, 75 bp, synthetic construct
  source 1..75: mol_type = other DNA
gccacaaatcctgatgcctgctctgcgccagctggaagaagcttttgtcagcgcgcaaaaagatcctgaatttca

SEQ ID NO: 788260 - DNA, 75 bp, synthetic construct
  source 1..75: mol_type = other DNA
taccgctgcgctgcactggtggaaaacatccagattggcgatttcagcgccgccgcagcagaagccggagcgtaa

SEQ ID NO: 788261 - DNA, 75 bp, synthetic construct
  source 1..75: mol_type = other DNA
tgagcttatcgacgtggtctaccaggacgatgacgagctggtggtgatttgcggtcgtgagctgctatctgacaa

SEQ ID NO: 788262 - DNA, 75 bp, synthetic construct
  source 1..75: mol_type = other DNA
ttttaccgcgctcgaatccaacaaatacgaatgcgcgcaaatcaacttcgatttccatattcgttacaaacagct

SEQ ID NO: 788263 - DNA, 75 bp, synthetic construct
  source 1..75: mol_type = other DNA
aaaggtggcgaatatgctaacctggatgccgtggtgatggatgctgtcaatgagcttatcgacgtggtttaccag

SEQ ID NO: 788264 - DNA, 75 bp, synthetic construct
  source 1..75: mol_type = other DNA
tcccgtacttcccggcggatgcgatgctcatcacaaagctggaaaacctgtccatctactacatggatgacagcc

SEQ ID NO: 788265 - DNA, 75 bp, synthetic construct
  source 1..75: mol_type = other DNA
ttgttaagcgtcaggcgctcgatttcatcatggccggttttaacggtaccacccgcgccgccacctctgaccgcg

SEQ ID NO: 788266 - DNA, 75 bp, synthetic construct
  source 1..75: mol_type = other DNA
tcagtatcgcgggattacgtggtgggcttgatgatgagcgcggcgcgctaactttgaagtatgtggagcttgcaa

SEQ ID NO: 788267 - DNA, 75 bp, synthetic construct
  source 1..75: mol_type = other DNA
agagtggaacctctttttgccagacgttctgtgtcttgtaagggggacactcgaggtgtagctcatgacgtttta

SEQ ID NO: 788268 - DNA, 75 bp, synthetic construct
  source 1..75: mol_type = other DNA
aaaaccagttgccatgctccaaagtggccgcagtgtggttgtatttatggaccgcagcgaaaagtggcctggaga

SEQ ID NO: 788269 - DNA, 75 bp, synthetic construct
  source 1..75: mol_type = other DNA
gagccagttgaaagttgacctgatgtctttctccggccacaaaatttatggcccgaaaggtatcggtgcgctgta

SEQ ID NO: 788270 - DNA, 75 bp, synthetic construct
  source 1..75: mol_type = other DNA
aaaaccgaacacaaagcggtactggacacctgccgtcagcttgagcgtgaaggttttgaagtcacctacctggcg

SEQ ID NO: 788271 - DNA, 75 bp, synthetic construct
  source 1..75: mol_type = other DNA
ttttaccgcgctcgaatccaacaaatacgaatgcgcgcaaatcaacttcgatttccacatccgttacaaacagct

SEQ ID NO: 788272 - DNA, 75 bp, synthetic construct
  source 1..75: mol_type = other DNA
agaccagatccagcaatccgccgcattcctgatgctgattaatgtcacgccagtgactgagcagtctggtcagtt

SEQ ID NO: 788273 - DNA, 75 bp, synthetic construct
  source 1..75: mol_type = other DNA
gttgaggactaccgctgcgccgcactggtggaaaacatccagattggcgatttcagcgccgccgcagcagaaacc

SEQ ID NO: 788274 - DNA, 75 bp, synthetic construct
  source 1..75: mol_type = other DNA
ccgcagcgtaatggcattatcgacctgaaagaacttgaagcagcgatgcgtgacgacaccatcctcgtttccatc

SEQ ID NO: 788275 - DNA, 75 bp, synthetic construct
  source 1..75: mol_type = other DNA
actcatgctcaccagcggtgaactgaatccccgccatcagcataccgtcaccctgtatgcgaacggactgacctg

SEQ ID NO: 788276 - DNA, 75 bp, synthetic construct
  source 1..75: mol_type = other DNA
actcatgctcaccagcggtgaactgaatccccgccatcagcataccgtaacgctgtatgcgaaaggactgacctg

SEQ ID NO: 788277 - DNA, 75 bp, synthetic construct
  source 1..75: mol_type = other DNA
actcatgctcaccagcggtgaactgaatccccgccatcagcataccgtaactctgtatgcgaatggactgacctg

SEQ ID NO: 788278 - DNA, 75 bp, synthetic construct
  source 1..75: mol_type = other DNA
acgttgcatcataacggactcacctgcgaggcggatactctcagctcttatggctacgtttacatcgttatttat

SEQ ID NO: 788279 - DNA, 75 bp, synthetic construct
  source 1..75: mol_type = other DNA
ctgcgaagccgataccctcggcagctgtggttgcgtttatctggctgtttatccgacacccgaaacgaaaaagta

SEQ ID NO: 788280 - DNA, 75 bp, synthetic construct
  source 1..75: mol_type = other DNA
actcatgctcaccagcggtgaactgaatccccgccatcagcataccgtgacactgtatgcgaaaggactgacctg

SEQ ID NO: 788281 - DNA, 75 bp, synthetic construct
  source 1..75: mol_type = other DNA
gccctgcaccgtgacgccctgtttcggcgcccgtctggtgcaggagggtaaccggttgcattaccttgccgaccg

SEQ ID NO: 788282 - DNA, 75 bp, synthetic construct
  source 1..75: mol_type = other DNA
agaataaccttctgctccggcctggtgttttcaccacgccactgtcccattttttatctctgcatatcaggaaaa

SEQ ID NO: 788283 - DNA, 75 bp, synthetic construct
  source 1..75: mol_type = other DNA
gtgtcagacacactccccgggacaacacttcccgacgacaatcacgaccgcccctggtggggactaccctgcaca

SEQ ID NO: 788284 - DNA, 75 bp, synthetic construct
  source 1..75: mol_type = other DNA
actcatgctcaccagcggtgaactgaatccccgccatcagcataccgtaacactgtatgcgaagggactgacctg

SEQ ID NO: 788285 - DNA, 75 bp, synthetic construct
  source 1..75: mol_type = other DNA
gggctgacctgcgatgccgacaccctcgggtcctgtggttacgtttatctggctgtttatcctgcgaccgaaacg

SEQ ID NO: 788286 - DNA, 75 bp, synthetic construct
  source 1..75: mol_type = other DNA
tttctgtgaggattttatcgtgtcagacacactttccgggacaacgcatcccgatgacaatgacgaccatccctg

SEQ ID NO: 788287 - DNA, 75 bp, synthetic construct
  source 1..75: mol_type = other DNA
aaacggtcagccgaaaacggtggcgttaatccgtggcgtacagtttaaaggcgagatccgtaggctggaaggtga

SEQ ID NO: 788288 - DNA, 75 bp, synthetic construct
  source 1..75: mol_type = other DNA
agcttgtgggtgcatcatccgatgactacgctcgccttcatgaggcgatggaatcccgaagatactttcgcgaaa

SEQ ID NO: 788289 - DNA, 75 bp, synthetic construct
  source 1..75: mol_type = other DNA
cgcgtgagcttttcgcgttgctggataaaagtaaactcggtacctctgagcctcttatctgcaaccagtttaccg

SEQ ID NO: 788290 - DNA, 75 bp, synthetic construct
  source 1..75: mol_type = other DNA
tgacctgtgaagccgacaccctcggctcctgtggttacgtttatctggctgtttatccgacacctgaaacgaaaa

SEQ ID NO: 788291 - DNA, 75 bp, synthetic construct
  source 1..75: mol_type = other DNA
aagaaaaaagcaatagaagtaaaaaatggcctctcatacccaagaaataaagttgtatcaaaaaatgcattgaac

SEQ ID NO: 788292 - DNA, 75 bp, synthetic construct
  source 1..75: mol_type = other DNA
aagaaagctgcaatagaagtcaaaaatggactctcatacccaagaagtaaatctgtttcaaaaaatgcgcttaac

SEQ ID NO: 788293 - DNA, 75 bp, synthetic construct
  source 1..75: mol_type = other DNA
gaatcccgaagatactttcgcgaaattcaagatggagcaggaaactggttttatcttccagacgctgagtacaca

SEQ ID NO: 788294 - DNA, 75 bp, synthetic construct
  source 1..75: mol_type = other DNA
gtatgcaaaagggctgacctgcgaagccgacaccctcagctcctgtggttacgtttatctggctgtttatccggc

SEQ ID NO: 788295 - DNA, 75 bp, synthetic construct
  source 1..75: mol_type = other DNA
cgcatcccgacgacaatcacgaccgcccctggtggggggggccctgcaccgtgacgccctgtttcggggcccgac

SEQ ID NO: 788296 - DNA, 75 bp, synthetic construct
  source 1..75: mol_type = other DNA
agaggccggttcagagatgcgaatgtgtaccctctggaccaggcctttccgctgctgatgaaacaactggagctc

SEQ ID NO: 788297 - DNA, 75 bp, synthetic construct
  source 1..75: mol_type = other DNA
tgctcaccagtggtgaactcagcccccgctatcagcataccgtcacgctgtatgcgaaaggactgacctgcgaag

SEQ ID NO: 788298 - DNA, 75 bp, synthetic construct
  source 1..75: mol_type = other DNA
cgcttcccgacgacaacaaagaccgcccctggtggggactgccctgcaccgtgacgccctgtttcggagcccgtc

SEQ ID NO: 788299 - DNA, 75 bp, synthetic construct
  source 1..75: mol_type = other DNA
cccgccatcagcataccgtcacgctgtatgcaaaaggtctgacctgcaaagccgacaccctcggcagttgtggct

SEQ ID NO: 788300 - DNA, 75 bp, synthetic construct
  source 1..75: mol_type = other DNA
gggctgacctgcgaagccgacaccctcggcagctgtggttacgtttatatggctgtttatccgacactggcaccc

SEQ ID NO: 788301 - DNA, 75 bp, synthetic construct
  source 1..75: mol_type = other DNA
cccctggtggggactgccctgtaccgtgacaccttgttttggcgcccgtctggtgcaggagggtaaccggttgca

SEQ ID NO: 788302 - DNA, 75 bp, synthetic construct
  source 1..75: mol_type = other DNA
gtgtcagacacgctccctgagacaaataaccccaacgacaatcacgaccgcccctggtgggggctaccctgcacc

SEQ ID NO: 788303 - DNA, 75 bp, synthetic construct
  source 1..75: mol_type = other DNA
gcgcgcaaaaagatcctgaatttcaggctcagttcaacgacctgctgaaaaactatgccgggcgtccaaccgcac

SEQ ID NO: 788304 - DNA, 75 bp, synthetic construct
  source 1..75: mol_type = other DNA
atgacaactgatttttcacaagatcataaagacgaaaaaaatcagatgcctacatctgaaacaaaaggcgccgac

SEQ ID NO: 788305 - DNA, 75 bp, synthetic construct
  source 1..75: mol_type = other DNA
gccgtacgtcgtaccgtctctggtcttttgaaattaatgcatcctgatggtgcttacattaaagaagatgtacgc

SEQ ID NO: 788306 - DNA, 75 bp, synthetic construct
  source 1..75: mol_type = other DNA
atgatgcgcctcgctccgggcagcccttttaccggcgaacgtactttaccaccggaagtgatggccaatatcgaa

SEQ ID NO: 788307 - DNA, 75 bp, synthetic construct
  source 1..75: mol_type = other DNA
gagatgcgccagcggcgtcgcttgctggggcgtgatggattaccaacacgttttgttgaatttagctgataagca

SEQ ID NO: 788308 - DNA, 75 bp, synthetic construct
  source 1..75: mol_type = other DNA
ctcaaggccgcgttcccacaaatcgaacaacgcaaatcagcctggtgaacaaagaagaaaatcgctggcagtgcg

SEQ ID NO: 788309 - DNA, 75 bp, synthetic construct
  source 1..75: mol_type = other DNA
cggcgatgctctgcgcagtcggcttgggctgggtgaggatgagctggcggtactgattggttcggcggcagttaa

SEQ ID NO: 788310 - DNA, 75 bp, synthetic construct
  source 1..75: mol_type = other DNA
gagatagcaaacgttggggaaaagtttgcggaggtgagagtacccgtcagtgaagaagatgcggtcgatgactgg

SEQ ID NO: 788311 - DNA, 75 bp, synthetic construct
  source 1..75: mol_type = other DNA
gcgcagccggcttggattgggtgaggatgagctggcagtactgattggttcggcggcagtcaaacaactctggca

SEQ ID NO: 788312 - DNA, 75 bp, synthetic construct
  source 1..75: mol_type = other DNA
tgatgctcatgccaaatttgttgcacgacgagcggtaatgctggctgaaaaagaacgattgcatttcgggcgtgt

SEQ ID NO: 788313 - DNA, 75 bp, synthetic construct
  source 1..75: mol_type = other DNA
gctgtacgcagaactgtttcgggcttgttaaagctactacaccccgacgcacagtacacaaaagatgatgtaaga

SEQ ID NO: 788314 - DNA, 75 bp, synthetic construct
  source 1..75: mol_type = other DNA
tcgtttatatggctgtttatgctacccgattctcaaatcaattaccgaaagcttctgttcatcaactaactcatt

SEQ ID NO: 788315 - DNA, 75 bp, synthetic construct
  source 1..75: mol_type = other DNA
accggttgcattaccttgccgaccgcgccggtatcagaggccggttcagcgatgcagatgcataccacctggacc

SEQ ID NO: 788316 - DNA, 75 bp, synthetic construct
  source 1..75: mol_type = other DNA
tgtgaagccgacaccctcggcagttgtggttacgtttatctggctgtttatccaacatccgaaacgaaaaagtaa

SEQ ID NO: 788317 - DNA, 75 bp, synthetic construct
  source 1..75: mol_type = other DNA
gtgtcagacatactccccgggacaacgcatcccgacgataacaacgaccgcccctggtgggggctaccctgcacc

SEQ ID NO: 788318 - DNA, 75 bp, synthetic construct
  source 1..75: mol_type = other DNA
tcaccctgtaccacaacggtttcacctgcgaagccgatacacttggcagttgcggctatgtatacatcgccgttt

SEQ ID NO: 788319 - DNA, 75 bp, synthetic construct
  source 1..75: mol_type = other DNA
tttatcgtgtcagacacactttccgggacaacgcatcccgatgacaatgacgaccatccctggtggggactaccc

SEQ ID NO: 788320 - DNA, 75 bp, synthetic construct
  source 1..75: mol_type = other DNA
gttgaagagctccagagaatcgactttaacatgcttgatttcaccaactttatggacgacctgatgaaaaatcaa

SEQ ID NO: 788321 - DNA, 75 bp, synthetic construct
  source 1..75: mol_type = other DNA
aaaaagccctcgctaaagccaagaaagataagctgaccgtcagtgtgggggaattctgctctaaaaaggtgctgg

SEQ ID NO: 788322 - DNA, 75 bp, synthetic construct
  source 1..75: mol_type = other DNA
gtgtcagacacactccccgggacaacgcatcccgacgacaacaacgaccgcccctggtgggggctcccctgcacc

SEQ ID NO: 788323 - DNA, 75 bp, synthetic construct
  source 1..75: mol_type = other DNA
tgctcggcatgtactgcgcctctgacgatgacgacgtggtcgagcaagggttgcaaaacgttaagcgtattctgg

SEQ ID NO: 788324 - DNA, 75 bp, synthetic construct
  source 1..75: mol_type = other DNA
gccgagacccttggctcctgtggttacgtttatctggctgtttatcctgcgaccgaaacggaaaatgtagtggtc

SEQ ID NO: 788325 - DNA, 75 bp, synthetic construct
  source 1..75: mol_type = other DNA
atgctcaccagcggtgaactgaatccccggcatcagcataccgtcacgctgtatgcgaaagggctgacctgcgat

SEQ ID NO: 788326 - DNA, 75 bp, synthetic construct
  source 1..75: mol_type = other DNA
ttgcgacggaggcaatccgctggcctgaaagtgtggatgaacacaaaaaggcaaatgcctttgccggcacagccc

SEQ ID NO: 788327 - DNA, 75 bp, synthetic construct
  source 1..75: mol_type = other DNA
tcgctgatgcagaagttagtgaccgtctttatcaacgcgctatgggcttcgtggctccagacatcgatattcgtg

SEQ ID NO: 788328 - DNA, 75 bp, synthetic construct
  source 1..75: mol_type = other DNA
gggatccggaaaacaattgattggtatttaaataatacagagtggtgtcgtcgtgtacaagacggtagctatcaa

SEQ ID NO: 788329 - DNA, 75 bp, synthetic construct
  source 1..75: mol_type = other DNA
atgagcaaaattaaagtaaaagccgccagtgggttgagcgtgccgcgcgaggataatgcgcgccgctacatcacc

SEQ ID NO: 788330 - DNA, 75 bp, synthetic construct
  source 1..75: mol_type = other DNA
gatgagtctgaagccaccgtgacggctgaacaggacgccgtgcaggtaaaagcgaaggtgaagaaagagaaacag

SEQ ID NO: 788331 - DNA, 75 bp, synthetic construct
  source 1..75: mol_type = other DNA
ttgctactgaagcgctgaaatggcctgcttccgtggatgaggtaaaaaaggcgaatgcatttgccggtagtgcca

SEQ ID NO: 788332 - DNA, 75 bp, synthetic construct
  source 1..75: mol_type = other DNA
gtgaagatacttgttactggtggcgcaggatttattggttctgctgtagttcgtcacattataaataatacgcag

SEQ ID NO: 788333 - DNA, 75 bp, synthetic construct
  source 1..75: mol_type = other DNA
cgcagtggggataacattatcctcaacatgccgaataacgtcaccttcgacagcagcagcgctaccctgaaacct

SEQ ID NO: 788334 - DNA, 75 bp, synthetic construct
  source 1..75: mol_type = other DNA
aaatcaataataaaaaagaagaaaaagggttgtcgttgattgaatcagcaatggttttggctctggctgccacag

SEQ ID NO: 788335 - DNA, 75 bp, synthetic construct
  source 1..75: mol_type = other DNA
cattggttattctgaatgctctggaaggtaaggcattacctatttatggtaaaggggatcaaattcgcgactggt

SEQ ID NO: 788336 - DNA, 75 bp, synthetic construct
  source 1..75: mol_type = other DNA
aagcggcgcgcaattactggtctgctctgaatgatgaaaagaaaaaaagtttccgctttcatcatatttctactg

SEQ ID NO: 788337 - DNA, 75 bp, synthetic construct
  source 1..75: mol_type = other DNA
cagcttacgcgccaagcagcccttattctgcttcgaaagcatcaagcgatcatttagtccgtgcgtggaaacgta

SEQ ID NO: 788338 - DNA, 75 bp, synthetic construct
  source 1..75: mol_type = other DNA
ggatcacccgtcgcttccagtgcttcccgctggctccgctgccggaatcacacagtcaccgcgtaccagacatcc

SEQ ID NO: 788339 - DNA, 75 bp, synthetic construct
  source 1..75: mol_type = other DNA
ctgtgaatggtccgggtatggatacgttttccttttgcactgcgaccggaaatcccgcctttcagcatattctcc

SEQ ID NO: 788340 - DNA, 75 bp, synthetic construct
  source 1..75: mol_type = other DNA
ttgaggtggaaataaatgctaaagagccgttatttgataaattgaatatagcctataatgattttagagtgttaa

SEQ ID NO: 788341 - DNA, 75 bp, synthetic construct
  source 1..75: mol_type = other DNA
ctagctatctacagggtgcacggctcagttctagctttgtcaaactgaatatatttagtaagatatcagaagttg

SEQ ID NO: 788342 - DNA, 75 bp, synthetic construct
  source 1..75: mol_type = other DNA
atggtcatagagtttcttctccagcagatcttctcgacccagagaccaacgtcatggttggggcagaggtgctat

SEQ ID NO: 788343 - DNA, 75 bp, synthetic construct
  source 1..75: mol_type = other DNA
aaataacaataaggcaaactattgttatatttttaggggcatggattttttccatgatattaagtgatttagaca

SEQ ID NO: 788344 - DNA, 75 bp, synthetic construct
  source 1..75: mol_type = other DNA
accagcaggtggtactgttccataaactggaaaacctgcgcgatcgtctgatcgatcaaggtgatgacgccatcg

SEQ ID NO: 788345 - DNA, 75 bp, synthetic construct
  source 1..75: mol_type = other DNA
gacaccgcgcatcatgcccaggctgtcatggcagcaggcttcccgcagcggatgcagaaagattatcgcgatacc

SEQ ID NO: 788346 - DNA, 75 bp, synthetic construct
  source 1..75: mol_type = other DNA
atgcggctgttgttgccgtccagcacagatgagctgataacaacggcaatatggcaggtttctgtcccggatgaa

SEQ ID NO: 788347 - DNA, 75 bp, synthetic construct
  source 1..75: mol_type = other DNA
gcggttatccctgccacccatgcctactctgtgaatgttgtgtccagtcagccggtcacccgacagatcatgccg

SEQ ID NO: 788348 - DNA, 75 bp, synthetic construct
  source 1..75: mol_type = other DNA
tcggtattcagatcgacggcgacaaggcggtcgtgaacaacgacggtgacagtgccatcagcaacggcggcacag

SEQ ID NO: 788349 - DNA, 75 bp, synthetic construct
  source 1..75: mol_type = other DNA
attgtctctgccgcaattgtcttattctgtctgcataaactggttaaccgccatcgtcttaatattggcacagga

SEQ ID NO: 788350 - DNA, 75 bp, synthetic construct
  source 1..75: mol_type = other DNA
atgcagacaatcgtaggcataagtctctcccctgtttatatcctcccattgatgttcatattttccattattgga

SEQ ID NO: 788351 - DNA, 75 bp, synthetic construct
  source 1..75: mol_type = other DNA
acacaatcagctatttctgaagtgatgagtgcaacttcagcgattaatggcctatatattggacaaagtaattat

SEQ ID NO: 788352 - DNA, 75 bp, synthetic construct
  source 1..75: mol_type = other DNA
tcctacgtagtacgaagagccgtatgtggcctgacgccaaagaattacaacaatgtatttatgaatgtattgcgg

SEQ ID NO: 788353 - DNA, 75 bp, synthetic construct
  source 1..75: mol_type = other DNA
tggtaaaagaaggcgtgttgattcaggtccagggcaaaggtacgtttgttaaaaaagagaacgtggcatatccgt

SEQ ID NO: 788354 - DNA, 75 bp, synthetic construct
  source 1..75: mol_type = other DNA
ttcttcccctatcttgtcaaaagtatatttgttgcttttttagttacattatacatccagtataaaaaggattga

SEQ ID NO: 788355 - DNA, 75 bp, synthetic construct
  source 1..75: mol_type = other DNA
ttacaatgagtatcgtgattatgtaagtaaggacttgtcttcacaacgagcagatctgcaagtaaagcgcctcaa

SEQ ID NO: 788356 - DNA, 75 bp, synthetic construct
  source 1..75: mol_type = other DNA
atgaaatccgagacgctaactgtccaacaactttttcaagaccgccgacaatactgtgttccattctatcaacgt

SEQ ID NO: 788357 - DNA, 75 bp, synthetic construct
  source 1..75: mol_type = other DNA
agtggtcagctctactggaggatatcctagagaaagtacaatcccggctctcgggtacaaaaccaactccccatt

SEQ ID NO: 788358 - DNA, 75 bp, synthetic construct
  source 1..75: mol_type = other DNA
aatgttatcccctgagtcagtcagtgacatttcccgtaccataaaactgcagcagtttttccccgctattgggag

SEQ ID NO: 788359 - DNA, 75 bp, synthetic construct
  source 1..75: mol_type = other DNA
tggccattgatatccagacagcccgcgaacacactctgcgcgagctgggtaaacgcttcgaggttatgtacggta

SEQ ID NO: 788360 - DNA, 75 bp, synthetic construct
  source 1..75: mol_type = other DNA
taatcgtttttgtttgggcaatgtcgcttcctgtaataacagttttcatttttatatttctgggtggtaagataa

SEQ ID NO: 788361 - DNA, 75 bp, synthetic construct
  source 1..75: mol_type = other DNA
aaaaatgacccgcagcgcgcatctgaagcaggtaaaaaaggtggcaagagcagtcacggtaaaagcgacaactag

SEQ ID NO: 788362 - DNA, 75 bp, synthetic construct
  source 1..75: mol_type = other DNA
acccggaaaaatgtcagagagccagttctggttattagctgaaatatctccggttcacagtgaaaaggttcttaa

SEQ ID NO: 788363 - DNA, 75 bp, synthetic construct
  source 1..75: mol_type = other DNA
agcaattttttccggctattggccgggaagtagatggacgaattgaagtattagacggtacgcgtcgtcgcgctg

SEQ ID NO: 788364 - DNA, 75 bp, synthetic construct
  source 1..75: mol_type = other DNA
cgtactggcaacctttagtgaggccgatgcgttaacccgcagccagcgcgagcaaagcatcgctttactggcaaa

SEQ ID NO: 788365 - DNA, 75 bp, synthetic construct
  source 1..75: mol_type = other DNA
gcgcggatgtgcatatttttgccggaagcgatccggcgcatactgcaaccgctaccagtggcgtcagtgctgcca

SEQ ID NO: 788366 - DNA, 75 bp, synthetic construct
  source 1..75: mol_type = other DNA
aggtgctttttcgactggacccgacgcgttatcaggcgcgggtggatcggctgatggcggatatcgttaccgcag

SEQ ID NO: 788367 - DNA, 75 bp, synthetic construct
  source 1..75: mol_type = other DNA
atggtgacgaaaactatcactgaacagcgtgcggaagtacgtatttttgccggtaatgatccggctcataccgcc

SEQ ID NO: 788368 - DNA, 75 bp, synthetic construct
  source 1..75: mol_type = other DNA
gctggatggagccaccgggaaactggtggtctgggacggacagaaagccggtagtgcggttggcatactggtact

SEQ ID NO: 788369 - DNA, 75 bp, synthetic construct
  source 1..75: mol_type = other DNA
gcgcggatgtgcacatttttgccggaagcgagccggcgcataccgcaaccgccaccagtggtatcagtgccgcca

SEQ ID NO: 788370 - DNA, 75 bp, synthetic construct
  source 1..75: mol_type = other DNA
ccactgagtcgctggtctggcctgactctgtggatgcggtgaaaaaagccaacgcatttgtgggaagtgctatca

SEQ ID NO: 788371 - DNA, 75 bp, synthetic construct
  source 1..75: mol_type = other DNA
aagccgaagtgattctggtgcccgaaaacagcccgatcaaaactgtggctgaactaaagggccacaaagtcgcgt

SEQ ID NO: 788372 - DNA, 75 bp, synthetic construct
  source 1..75: mol_type = other DNA
aaagtcgatattaacgcatctggcagcccactcaactggaaggaaaacaattatgagtctgaatatgttctggtt

SEQ ID NO: 788373 - DNA, 75 bp, synthetic construct
  source 1..75: mol_type = other DNA
caaaaacgatgggcttaccggcaccggtgattgcctcttacttagatcatcgccctcctaccaccatcaaaccgg

SEQ ID NO: 788374 - DNA, 75 bp, synthetic construct
  source 1..75: mol_type = other DNA
gcatgggatggtcagaaagccggaacggcagtgggcgtgctggctctggcgctcaccggaacagaacccacgctg

SEQ ID NO: 788375 - DNA, 75 bp, synthetic construct
  source 1..75: mol_type = other DNA
tgaattatatgaaaatgagtggaagagctttgaagataaatactggtcggaaaagcaacgccgtggacgtattaa

SEQ ID NO: 788376 - DNA, 75 bp, synthetic construct
  source 1..75: mol_type = other DNA
catgcgacattgcaatcagaaaggcagcgtgaaattgatctgtctcgcctttacaatgagtatcgtgattatgta

SEQ ID NO: 788377 - DNA, 75 bp, synthetic construct
  source 1..75: mol_type = other DNA
aagaattacagaaagagtggactcaatcgcgttgggaaggcattactcgcccatacagcgcggaagatgtggtga

SEQ ID NO: 788378 - DNA, 75 bp, synthetic construct
  source 1..75: mol_type = other DNA
ccctcagcctgtagcgcgatcctgttcgattcccactctgtgcctattacgggacgaatacgcagaaagctataa

SEQ ID NO: 788379 - DNA, 75 bp, synthetic construct
  source 1..75: mol_type = other DNA
gaaagccaaaaccgaagcattcaggacgtatagcaaaggcgctgggatgagagagttagccgaatatgtggagtg

SEQ ID NO: 788380 - DNA, 75 bp, synthetic construct
  source 1..75: mol_type = other DNA
ataaggtgacgaccattattcagggcggcacgtcttcagttactgcgctgaccggctccaccgaagagtcgcagt

SEQ ID NO: 788381 - DNA, 75 bp, synthetic construct
  source 1..75: mol_type = other DNA
ataaagtgacgaccattattcagggtggcacatcgtcggttaccgcactgaccggctctaccgaagaatcgcagt

SEQ ID NO: 788382 - DNA, 75 bp, synthetic construct
  source 1..75: mol_type = other DNA
gtgacgaccattattcagggcggcacgtcttcagtcaccgcgctgaccggctccactgaagaatcgcagttctaa

SEQ ID NO: 788383 - DNA, 75 bp, synthetic construct
  source 1..75: mol_type = other DNA
tttttcaaagtcataacggcgtctggatatttcaaatcttcgtcccaaaatacatgcgtcatctgtttggcaata

SEQ ID NO: 788384 - DNA, 75 bp, synthetic construct
  source 1..75: mol_type = other DNA
atcacaaaggcatgttccgcttccttctgaacgaaatctctcaggatggaccgatggcaaagatgcttaaagggt

SEQ ID NO: 788385 - DNA, 75 bp, synthetic construct
  source 1..75: mol_type = other DNA
ttccagtccggttacatctattacgacatccgccgcgacggcgtgttgtgggaacatatcgcccgctatggtggt

SEQ ID NO: 788386 - DNA, 75 bp, synthetic construct
  source 1..75: mol_type = other DNA
agcaagctattcataaccaacgaaagctcatcagctattgctccctatgctttaagttctgcttttgcaaaacga

SEQ ID NO: 788387 - DNA, 75 bp, synthetic construct
  source 1..75: mol_type = other DNA
ttgcggtttgatttaattcagagcatctatgatcaatgtgctgaaacgctgggaagaaccaattttgagatggtg

SEQ ID NO: 788388 - DNA, 75 bp, synthetic construct
  source 1..75: mol_type = other DNA
cagcggccacagatcgccagtgtttccactctctgcgcggtcacttcattacctgcctagatagagctggcgtac

SEQ ID NO: 788389 - DNA, 75 bp, synthetic construct
  source 1..75: mol_type = other DNA
ataaagtgacgaccattattcagggcggtacgtcttcagttactgctctgaccggctccaccgaagaatcgcagt

SEQ ID NO: 788390 - DNA, 75 bp, synthetic construct
  source 1..75: mol_type = other DNA
aaccttcggtgaactggagcgtatctcaggcatgatttcggtgcttaccgataagatggaggccatcggctcgac

SEQ ID NO: 788391 - DNA, 75 bp, synthetic construct
  source 1..75: mol_type = other DNA
tatttactggaacggtctaccgacaggaacgcttccgcttacatccaacatttaatcaatttgatcgagatgata

SEQ ID NO: 788392 - DNA, 75 bp, synthetic construct
  source 1..75: mol_type = other DNA
ccggtgatcgggatgctgaccggcttactgaccaatttactctggggattgctgaccgacccgatcgccgccgca

SEQ ID NO: 788393 - DNA, 75 bp, synthetic construct
  source 1..75: mol_type = other DNA
tccgatattaatacactggattcgtttggaagaaatatactgttttactgtaaaaacccaagaatgattgacact

SEQ ID NO: 788394 - DNA, 75 bp, synthetic construct
  source 1..75: mol_type = other DNA
aaaagggattattagaaaaggcattagaccttgccatttctgaatcattcttcaatgcaagatcacctgatgata

SEQ ID NO: 788395 - DNA, 75 bp, synthetic construct
  source 1..75: mol_type = other DNA
ggcctgtcgtccgggggcgataccaaggatatttttctgcggcagctcgtccagcaggtgtcacatattgatctc

SEQ ID NO: 788396 - DNA, 75 bp, synthetic construct
  source 1..75: mol_type = other DNA
atgatcgtgcaaaaagagctggttgctatttacgattatgagatccctgtacctgaagatccgttttccttcaga

SEQ ID NO: 788397 - DNA, 75 bp, synthetic construct
  source 1..75: mol_type = other DNA
gccggatctggaactggcgcgtcgctttgcacaagctatccacgcgaaatatccaggcaaactgctggcttataa

SEQ ID NO: 788398 - DNA, 75 bp, synthetic construct
  source 1..75: mol_type = other DNA
ccacagcatgtggttcaacatgttcgacctggcaaacgcctatgcccagggcgaaggtatgaagcactatgttga

SEQ ID NO: 788399 - DNA, 75 bp, synthetic construct
  source 1..75: mol_type = other DNA
ggtgattgtctggcttttactgcgacaactgccgattcgcactacgcgccattttccaacgatggcagccgtgcg

SEQ ID NO: 788400 - DNA, 75 bp, synthetic construct
  source 1..75: mol_type = other DNA
ttacgcttgcggtaacggtcgtcgctgtaccgctgcgtactgcgctgttcggcggtgtcaccggtagcggagccg

SEQ ID NO: 788401 - DNA, 75 bp, synthetic construct
  source 1..75: mol_type = other DNA
tttcatcaacgtgatcgagaagatgctgacccgctaataaatgatgcgttgatttatataagagatgagtgtatt

SEQ ID NO: 788402 - DNA, 75 bp, synthetic construct
  source 1..75: mol_type = other DNA
actgctgcaacttagccacctacgcttgcgactattaccggaaaaggcggtgacagacgcgtggatcggcctgcc

SEQ ID NO: 788403 - DNA, 75 bp, synthetic construct
  source 1..75: mol_type = other DNA
gcttgcgaaagggtacggggcaaaggcgtatgatatagaaagaacgagcatctggctgctgaaacaccttcggtg

SEQ ID NO: 788404 - DNA, 75 bp, synthetic construct
  source 1..75: mol_type = other DNA
atcgattcagatgccattttgcaccttcagaatttgagcttgctgcagttgttcctgataaggatctggataaat

SEQ ID NO: 788405 - DNA, 75 bp, synthetic construct
  source 1..75: mol_type = other DNA
cattacaagagtcagttacaggcttacaaagaccagttagccaccgctactggtatcagagatattcaggggctt

SEQ ID NO: 788406 - DNA, 75 bp, synthetic construct
  source 1..75: mol_type = other DNA
caaagtattgctctagaactataccagagcgtatttcaattgaagaaattgatgaaataaaatttatccagaatc

SEQ ID NO: 788407 - DNA, 75 bp, synthetic construct
  source 1..75: mol_type = other DNA
ataacgcttgaagaagctactcaactatcgataattttcaacacagatgcatctttttggatgaaattgcaagag

SEQ ID NO: 788408 - DNA, 75 bp, synthetic construct
  source 1..75: mol_type = other DNA
ctacatgaggcatggtttaataaaaaaagtaatggtattcaattagattgcttagtcctaatacataatatgctt

SEQ ID NO: 788409 - DNA, 75 bp, synthetic construct
  source 1..75: mol_type = other DNA
gccagaacggggtaaggtatattcaggctcactgactcctgctaacgcagctattctttgttctgatgggcctaa

SEQ ID NO: 788410 - DNA, 75 bp, synthetic construct
  source 1..75: mol_type = other DNA
tcagaagtaatgagcgcaacgtctgcaattaatggtctgtatattgggcagaccagttatactggattgaactca

SEQ ID NO: 788411 - DNA, 75 bp, synthetic construct
  source 1..75: mol_type = other DNA
tatcttgcgcatcacaaaatttcgtttgaaacgctgaccgctgaagatgcggaagaatttaaagcccgcgctaaa

SEQ ID NO: 788412 - DNA, 75 bp, synthetic construct
  source 1..75: mol_type = other DNA
cggaagatggtcaggtgctggtaatgctgaaaaatggcacgatcagtatcaccgacctgatgcaggggtgcccga

SEQ ID NO: 788413 - DNA, 75 bp, synthetic construct
  source 1..75: mol_type = other DNA
tgtcggtttttccccgaaacagacgaccactattaataaagactccgtactgcaggctgcacggcaggcatacac

SEQ ID NO: 788414 - DNA, 75 bp, synthetic construct
  source 1..75: mol_type = other DNA
taacagcgagtgggggactgggggaaataccgcaggatactctttctggcatacgaacactggcttctaacggag

SEQ ID NO: 788415 - DNA, 75 bp, synthetic construct
  source 1..75: mol_type = other DNA
atggatgggctttttaaagcctgtaaatcaagacaatggctgcgctcaaaagcagaactggcatacttcttctac

SEQ ID NO: 788416 - DNA, 75 bp, synthetic construct
  source 1..75: mol_type = other DNA
tccgaatggagtagacgaatatatgaaggggcacggtatttagacaaactggggcgtaatgttgtttccgcacaa

SEQ ID NO: 788417 - DNA, 75 bp, synthetic construct
  source 1..75: mol_type = other DNA
aacggaggaatgccgagcgggaactcaagaccgccagagatgccgcaaatgccattcagccggaacaggagcaaa

SEQ ID NO: 788418 - DNA, 75 bp, synthetic construct
  source 1..75: mol_type = other DNA
taagtacgttggggatctggacaggtacagagaacgtgagattctggcagcggcatctttagagaacactaggca

SEQ ID NO: 788419 - DNA, 75 bp, synthetic construct
  source 1..75: mol_type = other DNA
tctgaatggatattacccctcaacctcatcggggaatctctataatatcgttagagttcctgaatcaggacctga

SEQ ID NO: 788420 - DNA, 75 bp, synthetic construct
  source 1..75: mol_type = other DNA
ccctgttcacgtcgccaatctgaacgaggggcagatcgcggcaattcaggaacacagggcggcgacgcgtcagca

SEQ ID NO: 788421 - DNA, 75 bp, synthetic construct
  source 1..75: mol_type = other DNA
aaaaaatcaggacagttgagcgttcaccggagttactggctcagtaccgcaaggttatgaaaacggtcattcagg

SEQ ID NO: 788422 - DNA, 75 bp, synthetic construct
  source 1..75: mol_type = other DNA
tactttacttggcctgcttttatgcagttggatatggcgctggatatataacaggtggaataacttggcacacac

SEQ ID NO: 788423 - DNA, 75 bp, synthetic construct
  source 1..75: mol_type = other DNA
aatatcatcccttcggctatcgcattacttgtgggatttactgacgcagtgaccagaggattccttacttatttc

SEQ ID NO: 788424 - DNA, 75 bp, synthetic construct
  source 1..75: mol_type = other DNA
gtaggcaaattaatcaagaagccaccaagctacggtagcccttttgtgaaggttggggtggttaggactgaacat

SEQ ID NO: 788425 - DNA, 75 bp, synthetic construct
  source 1..75: mol_type = other DNA
agaacgcacagaacgcaggccagcgccggagcgccaacaggaactggagcaaaaacaagaaacaaaaatcaaggc

SEQ ID NO: 788426 - DNA, 75 bp, synthetic construct
  source 1..75: mol_type = other DNA
caaaagcaaaaaatcaggacagttgagcgttcaccggagttactggctcagtaccgcaaggttatgaaaacggtc

SEQ ID NO: 788427 - DNA, 75 bp, synthetic construct
  source 1..75: mol_type = other DNA
aacgttattccttctgctatcgcgttacttgtaggatttacggacgcagtgaccagaggctttcttacttatttc

SEQ ID NO: 788428 - DNA, 75 bp, synthetic construct
  source 1..75: mol_type = other DNA
gaactgtttgcccgtagcggtattacgttacctacccgtgagatgtgggcgcaattgcgcgacgacgtgatgcgc

SEQ ID NO: 788429 - DNA, 75 bp, synthetic construct
  source 1..75: mol_type = other DNA
tgacgcaggaaacgatggattatcacgctctgaatgcgatgcttaacctttacgatagtgcaggtcgcattcagt

SEQ ID NO: 788430 - DNA, 75 bp, synthetic construct
  source 1..75: mol_type = other DNA
cttatggttcgccggaagcactggatttcaccaatctctatttctataccatcacctggcacgcactgcgtacct

SEQ ID NO: 788431 - DNA, 75 bp, synthetic construct
  source 1..75: mol_type = other DNA
tttcaccaatctctatttctacaccatcacctggcacgccctgcgtacttcaatgttgctggcgcgcgaacgcgg

SEQ ID NO: 788432 - DNA, 75 bp, synthetic construct
  source 1..75: mol_type = other DNA
gacgagaatctcgactatgctcgcacaggccatgatatttcctgcaatttaggctcgttgaatattgctcacact

SEQ ID NO: 788433 - DNA, 75 bp, synthetic construct
  source 1..75: mol_type = other DNA
caggccatgatatttcctgcaatttaggttcgttgaatattgcccacaccatggattccccaactttgcccgcac

SEQ ID NO: 788434 - DNA, 75 bp, synthetic construct
  source 1..75: mol_type = other DNA
ggatggagcgaccagctctgctgtcggttttaacattcaactgaatgattgcgataccgatgttgcaagtaaagc

SEQ ID NO: 788435 - DNA, 75 bp, synthetic construct
  source 1..75: mol_type = other DNA
acgacggttaatggtgggaccgttcactttaaaggggaagttgttaacgccgcttgcgcagttgatgcaggctct

SEQ ID NO: 788436 - DNA, 75 bp, synthetic construct
  source 1..75: mol_type = other DNA
tacagtgagtagcggtagcgcgaaaaacagcgctattactccaggagaggctgcaagctcctgcactgcgaataa

SEQ ID NO: 788437 - DNA, 75 bp, synthetic construct
  source 1..75: mol_type = other DNA
ccgaacagtgtgaccttcagtagccagcagcagcgcctgaactggctggtcaacgaaggttactatgatgaaagc

SEQ ID NO: 788438 - DNA, 75 bp, synthetic construct
  source 1..75: mol_type = other DNA
tgatgaaaatgctggaagatgccttttcctacgccaaccagctcggcgcgcgtcagggagctggcgcggtatatc

SEQ ID NO: 788439 - DNA, 75 bp, synthetic construct
  source 1..75: mol_type = other DNA
tgcacaaacaaccctgaataacggtaccaacaccattccgttccaggcgcgttattatgcaatcggcgaggcaac

SEQ ID NO: 788440 - DNA, 75 bp, synthetic construct
  source 1..75: mol_type = other DNA
tgaaacctttgccgggttcaaacagtcgcgctatgccagcggtgaatattttagccaatatctgcaaggtaactg

SEQ ID NO: 788441 - DNA, 75 bp, synthetic construct
  source 1..75: mol_type = other DNA
atgccaatcatttatcccaaaaatgatggggcattaatagaagcaggcattcctgttgaatttgctggctattta

SEQ ID NO: 788442 - DNA, 75 bp, synthetic construct
  source 1..75: mol_type = other DNA
caaggcttttatcatgagtcgttcacaatcattgtgcgtggctcgtcaattacaacgactattgagaaagcgcgt

SEQ ID NO: 788443 - DNA, 75 bp, synthetic construct
  source 1..75: mol_type = other DNA
tgccgacatgctcggaagccttgcagaagcagctcgatattatgctggacgatctgacgaaagctaccgggcagg

SEQ ID NO: 788444 - DNA, 75 bp, synthetic construct
  source 1..75: mol_type = other DNA
taccaatgctcaacgtaataacgaacaacaaattaataaggaatccatcatggaaaaaacttttgacctgaacaa

SEQ ID NO: 788445 - DNA, 75 bp, synthetic construct
  source 1..75: mol_type = other DNA
ccagaagcgttaaggattggctatcagaaaagcaatatcagttcggtactggcgaaaaattaccaaatgctggaa

SEQ ID NO: 788446 - DNA, 75 bp, synthetic construct
  source 1..75: mol_type = other DNA
aaacgctatccgcaaacaaaaatctcgtgggtggagtttcccgcgggaccgcaaatgttggaggcgttaaacgtt

SEQ ID NO: 788447 - DNA, 75 bp, synthetic construct
  source 1..75: mol_type = other DNA
agcggtgatcgatggcgtacgtgaaggttgccgcacctttggtgtgcaggcgaagcttatcggcattatgagccg

SEQ ID NO: 788448 - DNA, 75 bp, synthetic construct
  source 1..75: mol_type = other DNA
accttttgcctcattctggcaaataaccttgctgatgggggtatggtttggtccggcatgggggatttgtatgtg

SEQ ID NO: 788449 - DNA, 75 bp, synthetic construct
  source 1..75: mol_type = other DNA
gcagccgaaaacggcgaaagttggcgaactgtttgctcgtagcggtatcacattacctactcgtgaaatgtgggt

SEQ ID NO: 788450 - DNA, 75 bp, synthetic construct
  source 1..75: mol_type = other DNA
actcccgcaatgccgtcttccgccacaatgatttcggatctgaactggatcccggtcgattccatcgaacgtatt

SEQ ID NO: 788451 - DNA, 75 bp, synthetic construct
  source 1..75: mol_type = other DNA
cagaccagcaccgtggcttctctgcaggcgcatccgttgaaaacgttccttgagcatggcatacgcgccagcatt

SEQ ID NO: 788452 - DNA, 75 bp, synthetic construct
  source 1..75: mol_type = other DNA
tttagctggcgatgagctgggttttccggggaacctgttcctttcccattttaatcgcgcacgtgatgcaggctg

SEQ ID NO: 788453 - DNA, 75 bp, synthetic construct
  source 1..75: mol_type = other DNA
atactaccattccaggctcgttatattgctctcgggcagtccgtagctggtactgcaaacgcagatgcgaccttc

SEQ ID NO: 788454 - DNA, 75 bp, synthetic construct
  source 1..75: mol_type = other DNA
aaggatacactttacttccttcttatgagatttctgtaaaagccattgatttagcagaagaatttttaaggaaac

SEQ ID NO: 788455 - DNA, 75 bp, synthetic construct
  source 1..75: mol_type = other DNA
atgaattctacaatctggctggcgcttgcccttgttttggtgctggaaggtttagggccgatgctctatccacag

SEQ ID NO: 788456 - DNA, 75 bp, synthetic construct
  source 1..75: mol_type = other DNA
aaaccccgcgtcacccggcaaaagaccccggtttgccggctaaattgttgtggcactggccgtgggccatcatcg

SEQ ID NO: 788457 - DNA, 75 bp, synthetic construct
  source 1..75: mol_type = other DNA
aatgtgttagtttatccctccgaaagtgaaagtctgggtttagtaccattagaagctatgtcatctggtgtttat

SEQ ID NO: 788458 - DNA, 75 bp, synthetic construct
  source 1..75: mol_type = other DNA
ccataagataaaaaatgtatttaccgtaacattatttaaacatagcttattaatattatgtccctctcaacaata

SEQ ID NO: 788459 - DNA, 75 bp, synthetic construct
  source 1..75: mol_type = other DNA
tagataaaaaattgattgagcatagtacagataatatcgaactccttaaagaacgccgcaccgcccttatctccg

SEQ ID NO: 788460 - DNA, 75 bp, synthetic construct
  source 1..75: mol_type = other DNA
aacgacttcattcaatctcactggcaatagcaacaatccacaaagtccttttccagaatcaggtttgaaccgccc

SEQ ID NO: 788461 - DNA, 75 bp, synthetic construct
  source 1..75: mol_type = other DNA
atactgggcgtcatcttcgcacggtgcagaagttcaaaatgcgcaaagctggtcagcgaccattcgtcagcgtga

SEQ ID NO: 788462 - DNA, 75 bp, synthetic construct
  source 1..75: mol_type = other DNA
tcgccgccatgtgcagcagccccccatttcatgaaatgggggaaatcatttgtcgtaacatcgaatctgttctca

SEQ ID NO: 788463 - DNA, 75 bp, synthetic construct
  source 1..75: mol_type = other DNA
atggctgattcccgtcgtgatgtgaatcgccctgacaccgcacaaccgccacgccggcacgggctgctgtataac

SEQ ID NO: 788464 - DNA, 75 bp, synthetic construct
  source 1..75: mol_type = other DNA
gttgctgagcctgctgattgagtacgtgggtattgcatttttctggcctgaacagggagcgaagcacagtgaagc

SEQ ID NO: 788465 - DNA, 75 bp, synthetic construct
  source 1..75: mol_type = other DNA
cccaatctgctgctgttgcctgccgccatattgttgggtgtcgccatcacggtcaccacggcttcattcaagaaa

SEQ ID NO: 788466 - DNA, 75 bp, synthetic construct
  source 1..75: mol_type = other DNA
atggcaacgaatgaaagcatcatggcgctaccgctggcgagtaaatttaaagcagaagcgcgggcaatggctgac

SEQ ID NO: 788467 - DNA, 75 bp, synthetic construct
  source 1..75: mol_type = other DNA
gatctgctcgaccgctggcagcagcagttaccgccagaaagcccgaactactcgccacagaacaggttacgccgc

SEQ ID NO: 788468 - DNA, 75 bp, synthetic construct
  source 1..75: mol_type = other DNA
cgtggcgatctgcttgaccgctggcagcagcagctacctccagaaagcccgaactactttttaattaacattgcc

SEQ ID NO: 788469 - DNA, 75 bp, synthetic construct
  source 1..75: mol_type = other DNA
tatgttgctgttgctggcacaggtgcaggtgggaatgcgtcagcgccatcaggagctggtggtgtggcgcacact

SEQ ID NO: 788470 - DNA, 75 bp, synthetic construct
  source 1..75: mol_type = other DNA
gggcgctgttggatagcctggaaaatcacacgccagttatcagaaaaaaagccagtgatttgagtgcactgatga

SEQ ID NO: 788471 - DNA, 75 bp, synthetic construct
  source 1..75: mol_type = other DNA
agctaccgccagaaagcccgaactactttttaatcaacatcgccacagaacaggttacgccgctaaaagcgttcc

SEQ ID NO: 788472 - DNA, 75 bp, synthetic construct
  source 1..75: mol_type = other DNA
gctgcttgccggattaatgggcggcagtatgctgctctgggcggtgctggcgggcgcggtagtactggctttgct

SEQ ID NO: 788473 - DNA, 75 bp, synthetic construct
  source 1..75: mol_type = other DNA
tgaccatagagcaggaacgcccgaaggttgcaccagagcttaccgcagcctttgaaaactttatggacatgcaca

SEQ ID NO: 788474 - DNA, 75 bp, synthetic construct
  source 1..75: mol_type = other DNA
tttgaaaactttatggacatgcacagcccgcaagccgtatcagctggcatggcatacgatggcagaaacccgggc

SEQ ID NO: 788475 - DNA, 75 bp, synthetic construct
  source 1..75: mol_type = other DNA
cgctaccgctggcgagtaaatttaaagccgaagcgcgggcaatggctgacagaggtttatcaacctatgaggccg

SEQ ID NO: 788476 - DNA, 75 bp, synthetic construct
  source 1..75: mol_type = other DNA
tgacgctgaaatcgctacctctgcgcctggcggtcagccgcttgctgcgccaaccgtggttaacgttgagccagc

SEQ ID NO: 788477 - DNA, 75 bp, synthetic construct
  source 1..75: mol_type = other DNA
ggtcagccgcctgttacgtcagccgtggtcaacgttaagccagctttcggcattttcgctctcctttatgctgct

SEQ ID NO: 788478 - DNA, 75 bp, synthetic construct
  source 1..75: mol_type = other DNA
aatggcgctcgccttcgctattgattgtctggctggcgttaagcctggcggtggcctgcgtgctggcgctgggca

SEQ ID NO: 788479 - DNA, 75 bp, synthetic construct
  source 1..75: mol_type = other DNA
gatcgccgctatgctatcgacgcacataagattgccgctgaattgggttggaagcctgcagaaacatttgaaagt

SEQ ID NO: 788480 - DNA, 75 bp, synthetic construct
  source 1..75: mol_type = other DNA
atctggcaaatactctttgggtagaaaacatcaaaagcgggacatatcaaaggtggatcgagcagaactacaggg

SEQ ID NO: 788481 - DNA, 75 bp, synthetic construct
  source 1..75: mol_type = other DNA
cgggttttattggatctgctgttgtacgttatattataaataatacacaagactgtgttgtcaatattgataaat

SEQ ID NO: 788482 - DNA, 75 bp, synthetic construct
  source 1..75: mol_type = other DNA
cggggttttcgccggagctacaaggtgtctatagcgaaaccgatgccgacggcatgaaacgtttatacggttatg

SEQ ID NO: 788483 - DNA, 75 bp, synthetic construct
  source 1..75: mol_type = other DNA
aaccaatatcgttggcacttatgtgcttctggaagccgcccgggcttactggtcaacgttggatgagcaagcgaa

SEQ ID NO: 788484 - DNA, 75 bp, synthetic construct
  source 1..75: mol_type = other DNA
catctggttcgcgcctggctgcgtccctatgggttcccaaccatcgtcactaactgctccaataactacggcccg

SEQ ID NO: 788485 - DNA, 75 bp, synthetic construct
  source 1..75: mol_type = other DNA
tcaccggcaaagttgaccgcactcgcggctattcaacgaaccatttcaaaccgggttacacgaaacccaagcaca

SEQ ID NO: 788486 - DNA, 75 bp, synthetic construct
  source 1..75: mol_type = other DNA
tcatgagagcttcaatcatgagaaagagcatgttaagtctgtaattaattctcttattttgaatcaaaagaatta

SEQ ID NO: 788487 - DNA, 75 bp, synthetic construct
  source 1..75: mol_type = other DNA
actttaaaggggaagttgttaacgccgcttgtgcggttgatgcaggctctgttgatcaaactgttcagttaggtc

SEQ ID NO: 788488 - DNA, 75 bp, synthetic construct
  source 1..75: mol_type = other DNA
tgtacgttgaagatcacgcccgtgcgctctacaccgtagtcaccaccggcgtggtgggcgagacctacaacatcg

SEQ ID NO: 788489 - DNA, 75 bp, synthetic construct
  source 1..75: mol_type = other DNA
ggacgaagacgcgctgaaagagggtatttgcgaagcgacgcgctatccaaaagtctggaccactaccggtgatcc

SEQ ID NO: 788490 - DNA, 75 bp, synthetic construct
  source 1..75: mol_type = other DNA
tcaccggcaaagttgaccgcactcgcggctattcaacgaaccatttcaaaccgggttacacgaagccgaaacaca

SEQ ID NO: 788491 - DNA, 75 bp, synthetic construct
  source 1..75: mol_type = other DNA
cgtgatgccgaagggcgaattgcggcagaaggggcgttgccttatccacctggcgtgctttgcgtggtacccggg

SEQ ID NO: 788492 - DNA, 75 bp, synthetic construct
  source 1..75: mol_type = other DNA
atgccgacgcgcagagagtttttaattaaaagtgttgcgggtgctttaattgtttcaatgcctcgcattgtattt

SEQ ID NO: 788493 - DNA, 75 bp, synthetic construct
  source 1..75: mol_type = other DNA
aacaaattgtggtttatggcctcagaagatgatgaaggagcttttcccagtttcaacactattactgaacgtctt

SEQ ID NO: 788494 - DNA, 75 bp, synthetic construct
  source 1..75: mol_type = other DNA
gcgccggatcataaaaactttcgtgaatgtggcgatcaattcttgcgttattttctgcgtggactggcagcacgc

SEQ ID NO: 788495 - DNA, 75 bp, synthetic construct
  source 1..75: mol_type = other DNA
gcaattttgcagaagaccgcgaaagagcatcagaagcaggtaaaaaaggtggacagcacagcggggggaatttca

SEQ ID NO: 788496 - DNA, 75 bp, synthetic construct
  source 1..75: mol_type = other DNA
ttcttatgtttttaaagcgtatataatatctcaagcattatatatgttctccttaatagtaacgatctgttatct

SEQ ID NO: 788497 - DNA, 75 bp, synthetic construct
  source 1..75: mol_type = other DNA
tggtgacggagttcgacttattgcgatcgctgtagaatttgaaaaacctataaacaaggaagaactttcaacaat

SEQ ID NO: 788498 - DNA, 75 bp, synthetic construct
  source 1..75: mol_type = other DNA
cccggccgattttatcgaaaccaatatcgttggcacctacacgctgctggaagcggcccgcgcctactggagcga

SEQ ID NO: 788499 - DNA, 75 bp, synthetic construct
  source 1..75: mol_type = other DNA
gtgtttttgtattccgaacatgctgttgaattacctgcgggcgttacggcggtaatcaacggcaacgagcagcag

SEQ ID NO: 788500 - DNA, 75 bp, synthetic construct
  source 1..75: mol_type = other DNA
agcccgttctacccgctgtttgccgcgctggacgttaacgccaaaattcatgaaggggagagtgggcgtcggctg

SEQ ID NO: 788501 - DNA, 75 bp, synthetic construct
  source 1..75: mol_type = other DNA
ccgcgcagaaagtaatcgtcagcgaagcaggcgcgtcggtttactcggcttccgagctggctgcacaggagttcc

SEQ ID NO: 788502 - DNA, 75 bp, synthetic construct
  source 1..75: mol_type = other DNA
aaaggggatcaaattcgcgattggttgtatgtcgaggatcatgctcgagcgttatatacagtcgttactgaaggt

SEQ ID NO: 788503 - DNA, 75 bp, synthetic construct
  source 1..75: mol_type = other DNA
gcggccacaacgagaagcagaacctcgacgtggttcacaccatctgcgacctgctcgacgagatggtgccgaaaa

SEQ ID NO: 788504 - DNA, 75 bp, synthetic construct
  source 1..75: mol_type = other DNA
atgaaaattaaaactctggcaattgttgttctgtcggcgctgtccctcagttctacagcggctctggccgctacc

SEQ ID NO: 788505 - DNA, 75 bp, synthetic construct
  source 1..75: mol_type = other DNA
gtcacgaacccgtgcctggcattatgggtaaaagcggggccggtaaatcctcactctgtaatgcactgtttcagg

SEQ ID NO: 788506 - DNA, 75 bp, synthetic construct
  source 1..75: mol_type = other DNA
gccatccctctgatgacacgcctgcaggacgaactgcgcacggagtctgtccgcactcagacccgtgaacagttt

SEQ ID NO: 788507 - DNA, 75 bp, synthetic construct
  source 1..75: mol_type = other DNA
tggaacaactgattctgtctgataaagaaaatgctcgtggtccggctggtctggttaaacaactggtagacgcta

SEQ ID NO: 788508 - DNA, 75 bp, synthetic construct
  source 1..75: mol_type = other DNA
ctctgttgcacgcacggttctgcgtgccgtccgtgactctgtggtctctgttgcccgcgccgtatggaactggat

SEQ ID NO: 788509 - DNA, 75 bp, synthetic construct
  source 1..75: mol_type = other DNA
ctctgttgcacgcacggttctgcgagccgtccgtgactcagtggtctctgttgcccgcgcagtatggaactggat

SEQ ID NO: 788510 - DNA, 75 bp, synthetic construct
  source 1..75: mol_type = other DNA
gggtaaaagcggggccggtaaatcctcactctgtaatgcactgtttcagggggaggtcaccccggtcagtgcact

SEQ ID NO: 788511 - DNA, 75 bp, synthetic construct
  source 1..75: mol_type = other DNA
cgtggtggctctgtattcgttccggctgctgctctgcgtgctgcttccgaaggtaacaccaaagctactctgact

SEQ ID NO: 788512 - DNA, 75 bp, synthetic construct
  source 1..75: mol_type = other DNA
attgccgcattgaccgacgctggcgttcctgctcaggctatcaagttcgctatgagtggtgcaactgctgctgaa

SEQ ID NO: 788513 - DNA, 75 bp, synthetic construct
  source 1..75: mol_type = other DNA
aagaacaaattgaagaaatcaaagaagaacaagaatccgctcaggttgaagaaactccggtagaagaaaataaag

SEQ ID NO: 788514 - DNA, 75 bp, synthetic construct
  source 1..75: mol_type = other DNA
tcgtttgtaacgctcgaatcgatgcggataacgtaggtcgtgctctggttaaattctctaagcatggcactttgg

SEQ ID NO: 788515 - DNA, 75 bp, synthetic construct
  source 1..75: mol_type = other DNA
tgaaggtacgatggaaaaaatttctgtcggctatgacattaaagaatatcacatcgattatgccaaagggcaatt

SEQ ID NO: 788516 - DNA, 75 bp, synthetic construct
  source 1..75: mol_type = other DNA
cataatttcgataatcacattggtgttgtttgtaacgctcgaatcgatgcggataacgtaggtcgtgctctggtt

SEQ ID NO: 788517 - DNA, 75 bp, synthetic construct
  source 1..75: mol_type = other DNA
ctctgttgcacgcacggttctgcgcgccgtccgtgactctgtggtctctgttgcccgcgctgtatggaactggat

SEQ ID NO: 788518 - DNA, 75 bp, synthetic construct
  source 1..75: mol_type = other DNA
tcgagtgccacgatctggcgctgaaaatggcgccctgcggcaggcttagtacctgtcttgcactgctgcggccca

SEQ ID NO: 788519 - DNA, 75 bp, synthetic construct
  source 1..75: mol_type = other DNA
acgatttacttaccatccccttcagtgccgctactgatttcaccgatctggctgctcactgcgatcgcttcgccc

SEQ ID NO: 788520 - DNA, 75 bp, synthetic construct
  source 1..75: mol_type = other DNA
tgctggaaaacggtcatgtcgtgctttccgataccggcgacgcgctactggcgaatgaagcggtgagaagtgcgt

SEQ ID NO: 788521 - DNA, 75 bp, synthetic construct
  source 1..75: mol_type = other DNA
ttctacagcggctctggctgaaactacacccacgacggtaaatggtgggaccgttcactttaaaggggaagttgt

SEQ ID NO: 788522 - DNA, 75 bp, synthetic construct
  source 1..75: mol_type = other DNA
aggcttaatacctgtcttgcactgttgcggcccacgctgaacgaaccgatcccgccgtacctgatcgaccgcttt

SEQ ID NO: 788523 - DNA, 75 bp, synthetic construct
  source 1..75: mol_type = other DNA
gttcttcctgatgttttaccggaatttacccctgatgcagacctgctctgtgattactgcctggcgctggcgcag

SEQ ID NO: 788524 - DNA, 75 bp, synthetic construct
  source 1..75: mol_type = other DNA
aggcttaatacctgtctttcactgttgcagcccacgctgaacgaaccgatcccaccacatctgatccatggcttt

SEQ ID NO: 788525 - DNA, 75 bp, synthetic construct
  source 1..75: mol_type = other DNA
atgccattgaggcaattgaaaaaccgctctcctcccctgccttactcactttcccgtcacatcctggaacatctg

SEQ ID NO: 788526 - DNA, 75 bp, synthetic construct
  source 1..75: mol_type = other DNA
ccatccatctgatgacacgcctgcaggacgaactgcgcacggagtctgtccgcactcagacccgtgaacagttta

SEQ ID NO: 788527 - DNA, 75 bp, synthetic construct
  source 1..75: mol_type = other DNA
gcgagcaggggatgactatcttcctcgtcgagcagaacgccaaccaggcgctgaagctcgctgatcgcggctacg

SEQ ID NO: 788528 - DNA, 75 bp, synthetic construct
  source 1..75: mol_type = other DNA
gtctggtattttgccgccgaaatgaaagccccgcgctggctgcgtactgtcgatggtgtgaagtttattgacggt

SEQ ID NO: 788529 - DNA, 75 bp, synthetic construct
  source 1..75: mol_type = other DNA
gctgaccggactgctgtgcgaactggtctggtattttgccgccgatctgaacgccccacgctggatacgtactgc

SEQ ID NO: 788530 - DNA, 75 bp, synthetic construct
  source 1..75: mol_type = other DNA
cacatactgaaaaaattgattgattccggcgtagatatacaccataaaaatggtctcggccaaacctgtttatgc

SEQ ID NO: 788531 - DNA, 75 bp, synthetic construct
  source 1..75: mol_type = other DNA
aacaacgcaaaaattgattccggcggattcgctccgtttgcagttctacgacggcacgcgctggcaggcgagttg

SEQ ID NO: 788532 - DNA, 75 bp, synthetic construct
  source 1..75: mol_type = other DNA
cattactggaaatgctgattgcgattgcgatttttgcctcgttggcattaatggcacagcaggtgacaaacggtg

SEQ ID NO: 788533 - DNA, 75 bp, synthetic construct
  source 1..75: mol_type = other DNA
tggacatggacgataatgtaaaccctgtcgtacaaaaattgattaaggccgatacattcagcctgtttttttatg

SEQ ID NO: 788534 - DNA, 75 bp, synthetic construct
  source 1..75: mol_type = other DNA
aacccgattgcctgcgtagcggcgctggaagtgttgaaggtgttcgagcaggaaaatctgctgcaaaaagccaac

SEQ ID NO: 788535 - DNA, 75 bp, synthetic construct
  source 1..75: mol_type = other DNA
caattggattctttgtttagcactcttgcaccgggtagtaaattaaatcctttttcagaaaaagtgcaaaaaaga

SEQ ID NO: 788536 - DNA, 75 bp, synthetic construct
  source 1..75: mol_type = other DNA
cccacgatctgacccaaatgatgccgcgtccggtaagaggcgatcagggccagcgagaaccagcgttactggcgg

SEQ ID NO: 788537 - DNA, 75 bp, synthetic construct
  source 1..75: mol_type = other DNA
gcctgccggaattcgagcagtcactgtttatggcagcgcaacccgacaatctactactggcgaccgcgccgcgct

SEQ ID NO: 788538 - DNA, 75 bp, synthetic construct
  source 1..75: mol_type = other DNA
tcctgctgacctgtggcgcatacggcaacgtgattcgcttcctgtatccgctgaccatcccggatgtgcaattcg

SEQ ID NO: 788539 - DNA, 75 bp, synthetic construct
  source 1..75: mol_type = other DNA
actgtcagtactacaatcaactccatcaactgccgttggttgctcttcctctcccgtttgacgaaagccagcaaa

SEQ ID NO: 788540 - DNA, 75 bp, synthetic construct
  source 1..75: mol_type = other DNA
ccgatgcagcaggcagcgtgaagccaacaacgcaaaaattaatcccggcagattcgctccgtttgcagttctacg

SEQ ID NO: 788541 - DNA, 75 bp, synthetic construct
  source 1..75: mol_type = other DNA
atacaggtttatccttggagtgttatttaggaaaagttaatgctataaagaaaaactatttgggaacaaaggttg

SEQ ID NO: 788542 - DNA, 75 bp, synthetic construct
  source 1..75: mol_type = other DNA
tgccattgaggaacagttgaatttgtccaagatacttcttaatataaaaaatacaggtttatccttggagtgtta

SEQ ID NO: 788543 - DNA, 75 bp, synthetic construct
  source 1..75: mol_type = other DNA
tggaagtgttgaaggtgttcgagcaggaaaatctgctgcaaaaagccaacgttctggggcagaagctgaaagacg

SEQ ID NO: 788544 - DNA, 75 bp, synthetic construct
  source 1..75: mol_type = other DNA
tgcttttactgtctggcctgcttttgttgactctggcgatcgcggtgttgaatacacttgtgccgctgtggctcg

SEQ ID NO: 788545 - DNA, 75 bp, synthetic construct
  source 1..75: mol_type = other DNA
cggtactggtcagtgcgggtatccttggacaatggccgattggacgtctggcggataagtttggtcgactgctgg

SEQ ID NO: 788546 - DNA, 75 bp, synthetic construct
  source 1..75: mol_type = other DNA
cgcgctgatgtgcagcggtacgtcacgtaaccgtgggcggttacttgccgcctatatgatggtttattatgtggg

SEQ ID NO: 788547 - DNA, 75 bp, synthetic construct
  source 1..75: mol_type = other DNA
tatgtcaaagaattcaaaaaaaggtagtcttagaagtcatccatcctctgtaaaaaatccaactaaatattttag

SEQ ID NO: 788548 - DNA, 75 bp, synthetic construct
  source 1..75: mol_type = other DNA
ggatggattgagcgaaggtatctcccaggaaaaagaagagcaaatcaggtcttatctaatgggatggaaagaggg

SEQ ID NO: 788549 - DNA, 75 bp, synthetic construct
  source 1..75: mol_type = other DNA
ccgatgcggcaggcagcgtgaagccaacaacgcaaaaattaatcccggcggattcgctccgtttgcagttctacg

SEQ ID NO: 788550 - DNA, 75 bp, synthetic construct
  source 1..75: mol_type = other DNA
gccaccagtaagactgagtggggacgggcgttccgcgaccgtctggcggctaatggcaagaaaggaaaggtgatt

SEQ ID NO: 788551 - DNA, 75 bp, synthetic construct
  source 1..75: mol_type = other DNA
ggtgattctcggcgcgatgatgcgcaagctggcaccaggtggcgtatggagtgctgaagtcaggcgtgccgttcg

SEQ ID NO: 788552 - DNA, 75 bp, synthetic construct
  source 1..75: mol_type = other DNA
agggcgaaggtggtttctacgccgcaacaccagcctttatgctgcgtttacgcgcgctgtgtgacgaacacggga

SEQ ID NO: 788553 - DNA, 75 bp, synthetic construct
  source 1..75: mol_type = other DNA
ggcgtggttaatccgttgatgcgtctgccgcgcagtaatctgctcaccgtcggttaccgcattcatgacggttat

SEQ ID NO: 788554 - DNA, 75 bp, synthetic construct
  source 1..75: mol_type = other DNA
aacaacgcaaaaattaatcccggcggattcgctccgtttgcagttctacgacggcacgcgctggcaggagagctg

SEQ ID NO: 788555 - DNA, 75 bp, synthetic construct
  source 1..75: mol_type = other DNA
gcgtccggtaagaggcgatcagggccagcgtgaacctgcgttactggctggcgctggcgtgctggcgtctgagag

SEQ ID NO: 788556 - DNA, 75 bp, synthetic construct
  source 1..75: mol_type = other DNA
gaataatgccaggcgcgttaaaatagcgtcgcagttattaagtgaaacaccgaatgaaacgtcgatcagtaaatt

SEQ ID NO: 788557 - DNA, 75 bp, synthetic construct
  source 1..75: mol_type = other DNA
tgccgataccatccgacagggatttgataatgggcgtgtgatagctgaacggatcaatgaagcaggctatcaaac

SEQ ID NO: 788558 - DNA, 75 bp, synthetic construct
  source 1..75: mol_type = other DNA
gtgggtaaaaatggtgactatgaaaacctcgatgcgctggtcatggatgcgaccaccaacctgattgatgagatt

SEQ ID NO: 788559 - DNA, 75 bp, synthetic construct
  source 1..75: mol_type = other DNA
gaagcgaatcggcaacctgcctgctgtgcgtgtgccgtacttcccggcgaatgccgtgttagtgacaacgctgga

SEQ ID NO: 788560 - DNA, 75 bp, synthetic construct
  source 1..75: mol_type = other DNA
atgacacaacagcgttgttactaccccccactgcggcgcgtacggactcgctacagtgtaggggccaaaatattt

SEQ ID NO: 788561 - DNA, 75 bp, synthetic construct
  source 1..75: mol_type = other DNA
aggacagcacatttgagcaggaacaattgagagagcactttacccatcaacctaaaaagccaaagcgccccaagc

SEQ ID NO: 788562 - DNA, 75 bp, synthetic construct
  source 1..75: mol_type = other DNA
gtccacgtagataccagcgttctggataaatttaacaaacgagttgaggaattacttgaacaaacgcttgccgga

SEQ ID NO: 788563 - DNA, 75 bp, synthetic construct
  source 1..75: mol_type = other DNA
aaggcctgactcaggcggcccgtaacgccaacgacggtatctccgttgcgcagaccaccgaaggcgcgctgtccg

SEQ ID NO: 788564 - DNA, 75 bp, synthetic construct
  source 1..75: mol_type = other DNA
tcgtgaactgacggttcaggcttctaccgggactaattctgattcggatctggactccattcaggacgaaatcaa

SEQ ID NO: 788565 - DNA, 75 bp, synthetic construct
  source 1..75: mol_type = other DNA
atcatccagcaggcaggtaactccgtgctgtccaaagctaaccaggtaccgcagcaggttctgtctctgctgcag

SEQ ID NO: 788566 - DNA, 75 bp, synthetic construct
  source 1..75: mol_type = other DNA
aaaatgtgaaagttgacactacaacttatactacaacttatactgatggcactgctatcaaagataaagctgcat

SEQ ID NO: 788567 - DNA, 75 bp, synthetic construct
  source 1..75: mol_type = other DNA
gcctgtcgctgttgacccaaaacaacctgaacaaatctcagtcctccctgagttccgctattgagcgtctgtcat

SEQ ID NO: 788568 - DNA, 75 bp, synthetic construct
  source 1..75: mol_type = other DNA
actgataatggtaatgattactatgcgaaaatcaccggtggtgataacgatgggaagtattacgcagtaacagtt

SEQ ID NO: 788569 - DNA, 75 bp, synthetic construct
  source 1..75: mol_type = other DNA
atgaccgtagaaagaatgaaaaggccgtggagtgttgttggcactggattcaacgatgatggtgtttatgtcacg

SEQ ID NO: 788570 - DNA, 75 bp, synthetic construct
  source 1..75: mol_type = other DNA
aaactcgttcaggtttgggggaatggagcatcatttgactgcgttattctccgcaacagttattcgctgacaggg

SEQ ID NO: 788571 - DNA, 75 bp, synthetic construct
  source 1..75: mol_type = other DNA
gtaagaataacgctgtgtcagattacctgatcgccgaaatggaacatctcattaaagaaataccaaagaccgatg

SEQ ID NO: 788572 - DNA, 75 bp, synthetic construct
  source 1..75: mol_type = other DNA
attgccaccacatcatcactggaaaaacagcgtctggcgcaggcatcaatggggcagcaggcactgagaacgttg

SEQ ID NO: 788573 - DNA, 75 bp, synthetic construct
  source 1..75: mol_type = other DNA
gatggcggcattgaagttactgccagccataacccgatggattacaacggcatgaagctggtgcgcgaaggggct

SEQ ID NO: 788574 - DNA, 75 bp, synthetic construct
  source 1..75: mol_type = other DNA
agcctgattgtgaccacagtagatgacgacgtttcggatcaacgaaaaagattgccttcattaaaaaatgtttat

SEQ ID NO: 788575 - DNA, 75 bp, synthetic construct
  source 1..75: mol_type = other DNA
catacgtgataacgccgacccagaaaaagttcaggtctggggtaatggcgctacgtttgacaatgtaatccttcg

SEQ ID NO: 788576 - DNA, 75 bp, synthetic construct
  source 1..75: mol_type = other DNA
gcataagtgtactgttctttgtctttagctgcctgctttctattccaccttcgtatattgaagcggctaaagaag

SEQ ID NO: 788577 - DNA, 75 bp, synthetic construct
  source 1..75: mol_type = other DNA
ggttccgaacagtttgggccaatgatatagataaggatgcatgtgatacatttaagcttaatcatgaatcacctg

SEQ ID NO: 788578 - DNA, 75 bp, synthetic construct
  source 1..75: mol_type = other DNA
acccactgcggcgcatacggactcgctacagtgtaggagccaaaatatttctactgttctgggctgcaggattgg

SEQ ID NO: 788579 - DNA, 75 bp, synthetic construct
  source 1..75: mol_type = other DNA
cgcgctgcatggctataacagcagcgtgacaagtgcctggaatgttttaaagcagtttggtaccaacagaggaac

SEQ ID NO: 788580 - DNA, 75 bp, synthetic construct
  source 1..75: mol_type = other DNA
aatatggctggggtgtcaggtggtggggacaatggttcggtaatggctgactacggacaaaattctggtcgtatc

SEQ ID NO: 788581 - DNA, 75 bp, synthetic construct
  source 1..75: mol_type = other DNA
tcaagaactgagagtttgactggccagatgagcgagaatctcactcagcaatttgcgaactttgttcagcatcgt

SEQ ID NO: 788582 - DNA, 75 bp, synthetic construct
  source 1..75: mol_type = other DNA
ggcagaaccgcattaaatttacactggaccataacttcagccttaccagcgtcaaatttgcggatgaattgcttg

SEQ ID NO: 788583 - DNA, 75 bp, synthetic construct
  source 1..75: mol_type = other DNA
cgctatgcatggaaatggttttatccttgttgaagcaaagcgcgaacaaaaattcttccccgccggttatccagc

SEQ ID NO: 788584 - DNA, 75 bp, synthetic construct
  source 1..75: mol_type = other DNA
cgagttcgcggcgggcaagtacgacatcacccggcccaaggcggcaggctgccccccccactctattgtaaacaa

SEQ ID NO: 788585 - DNA, 75 bp, synthetic construct
  source 1..75: mol_type = other DNA
aaattggtaacgatgtttggattggtgaaggcgcatttattcgtcgcggagttaaaataggtgatggtgctataa

SEQ ID NO: 788586 - DNA, 75 bp, synthetic construct
  source 1..75: mol_type = other DNA
tgggtaaaacggggcctcaggggccgcgaggtgagcagggaccagcggggagtgtggcaaatgtggttgacggga

SEQ ID NO: 788587 - DNA, 75 bp, synthetic construct
  source 1..75: mol_type = other DNA
acggtattgcgccgggctatttcaaaacagaaatgactaaagcactggttgaggacgaagccttcaccgcctggt

SEQ ID NO: 788588 - DNA, 75 bp, synthetic construct
  source 1..75: mol_type = other DNA
cccacgtccgacatgatcccgcgcactgtttggcacctggcctgttccgcagcctcaagcgtggcgatcgcaaac

SEQ ID NO: 788589 - DNA, 75 bp, synthetic construct
  source 1..75: mol_type = other DNA
tctcgaacccaagtgggaagccgtccagcaggatgcgatggtggtcaagggtagctatcggtcgctggcccgtga

SEQ ID NO: 788590 - DNA, 75 bp, synthetic construct
  source 1..75: mol_type = other DNA
atatagcgctaagctcgcaggcagaaggtggtgtgccgctggtgatggacacgctggagatcctcggcgcagata

SEQ ID NO: 788591 - DNA, 75 bp, synthetic construct
  source 1..75: mol_type = other DNA
cgacatggacgaggtgcgggcgctacagaccgacccggcgcggctgatgcatcagcgcctatgcggctggatcga

SEQ ID NO: 788592 - DNA, 75 bp, synthetic construct
  source 1..75: mol_type = other DNA
atacgcaaaaaacaagtttgaaatcggcaggccgaaagcaacgcatctgctcggcccagcacccaaaacacagga

SEQ ID NO: 788593 - DNA, 75 bp, synthetic construct
  source 1..75: mol_type = other DNA
caaatccgggcgcgtggaactggacacgctttgcggctatgtctggccagatgaagccaatgccgaagctatgaa

SEQ ID NO: 788594 - DNA, 75 bp, synthetic construct
  source 1..75: mol_type = other DNA
ctgaaccgttgctagcgcttgaagcctccgttgaggcgttgagcgagaaagtggccgagcatttgcgggcgatgg

SEQ ID NO: 788595 - DNA, 75 bp, synthetic construct
  source 1..75: mol_type = other DNA
aattgaagatgtgaaacacgatacgcgtgaagcggaagatgtgctggatgtggcggtggccattgcggaggcaga

SEQ ID NO: 788596 - DNA, 75 bp, synthetic construct
  source 1..75: mol_type = other DNA
tggcgaaattgagcctgaagagcgcaaggtgctggaagagatagccggtgttctgggccttcgtctggagaatca

SEQ ID NO: 788597 - DNA, 75 bp, synthetic construct
  source 1..75: mol_type = other DNA
cgaggatgtgaaacacgatacgcgtgaagcggaagatgtgctggatgtggcggtggccattgcggaggcagacgg

SEQ ID NO: 788598 - DNA, 75 bp, synthetic construct
  source 1..75: mol_type = other DNA
caggtactgcgtaatcagcctgcgctgtccgcgtttacgtcagaaattaatgcgattagcgcaaccattatcggt

SEQ ID NO: 788599 - DNA, 75 bp, synthetic construct
  source 1..75: mol_type = other DNA
ggtcagcttgacaccaactttaaaattggtcgtcgtgcagcattacgtgagatcgaggatgtgaaacacgatacg

SEQ ID NO: 788600 - DNA, 75 bp, synthetic construct
  source 1..75: mol_type = other DNA
ttggtcgtcgtgcagcgttgcgtgaaattgaagatgtgaaacacgatacgcgtgaagcggaagatgtgctggatg

SEQ ID NO: 788601 - DNA, 75 bp, synthetic construct
  source 1..75: mol_type = other DNA
gcgatgcagttgggcgacgccattaaaatcatgaacgacaggctgaaaccgcaggtgaatgttgacagcttcagc

SEQ ID NO: 788602 - DNA, 75 bp, synthetic construct
  source 1..75: mol_type = other DNA
gccatcaaaatcatgaacgacaggctgaaaccgcaggttaatgttgacagcttcagcctcgaacaggcagtctaa

SEQ ID NO: 788603 - DNA, 75 bp, synthetic construct
  source 1..75: mol_type = other DNA
agccagcctttctcccggcaaacgggtcaaggttagcgtcaggatttcccgttcgtttcaggtcagcctgctgtc

SEQ ID NO: 788604 - DNA, 75 bp, synthetic construct
  source 1..75: mol_type = other DNA
atgcccgtcgtctttaccagcgcactgggctttgagcaggataacttcctcgcccggcgtaatctgctcaaaccg

SEQ ID NO: 788605 - DNA, 75 bp, synthetic construct
  source 1..75: mol_type = other DNA
atgctgctgagctggcatcccggcgaaagctggctgcacagcgcgcagtcactacagcagcggctgagccagaac

SEQ ID NO: 788606 - DNA, 75 bp, synthetic construct
  source 1..75: mol_type = other DNA
agggggtgaataactaccgtcttcagaatgagcaacgcactgccgtgaccccaatgggatttaatgtgccctttg

SEQ ID NO: 788607 - DNA, 75 bp, synthetic construct
  source 1..75: mol_type = other DNA
gaactgcaacagctgcaccgtcgcctgaaaacgacttcactctacgttacccacgatcaggttgaggcgatgacg

SEQ ID NO: 788608 - DNA, 75 bp, synthetic construct
  source 1..75: mol_type = other DNA
aacagagatcgctgcatctcgccgaaatcgattaatgcaatttgataacctttgtcgggcatggatagtttgtag

SEQ ID NO: 788609 - DNA, 75 bp, synthetic construct
  source 1..75: mol_type = other DNA
cagctaccagttctacggtacgcgcgataaagttgacgatcgcagcgtcaacgatctttatgacggcaccgcctg

SEQ ID NO: 788610 - DNA, 75 bp, synthetic construct
  source 1..75: mol_type = other DNA
ggcggttacggcaacatcttccaggatgagcgtgacgtgaaatttatggtaatcgcaccattcaccatcttctga

SEQ ID NO: 788611 - DNA, 75 bp, synthetic construct
  source 1..75: mol_type = other DNA
cttgaaaacctgatgctgcgtcagcgcatcaccgatcagtacctggtgaatttcgccagccaggtcagcgcgtaa

SEQ ID NO: 788612 - DNA, 75 bp, synthetic construct
  source 1..75: mol_type = other DNA
cctatggctgcaaaacggtggaggaagcgatcgcctatcgtgagaatttcagccagcgtgaagggatgttgattt

SEQ ID NO: 788613 - DNA, 75 bp, synthetic construct
  source 1..75: mol_type = other DNA
actcacgattccttttagtgaagccactgttgataacatcttgagcaaagaaaatctctcatggtgtaatgaaaa

SEQ ID NO: 788614 - DNA, 75 bp, synthetic construct
  source 1..75: mol_type = other DNA
aagagcaataaaggccgcgtacaggcttatgacggccctatctatattgccgatgccgcgctgttcgtcaaagcg

SEQ ID NO: 788615 - DNA, 75 bp, synthetic construct
  source 1..75: mol_type = other DNA
tacaacatcaaaaccttcccgacgccgccggatagctggcaagtggtttttgtggcccaggagctgcctgacggt

SEQ ID NO: 788616 - DNA, 75 bp, synthetic construct
  source 1..75: mol_type = other DNA
ggacgatttctggtttatcgctttcgatggtaaaggcgggaagatttacccgctgaaaacccaaagagactaccg

SEQ ID NO: 788617 - DNA, 75 bp, synthetic construct
  source 1..75: mol_type = other DNA
ttctcactccacctggaatgccaacctcgattttcagtccggttatgctgctgatatgttcggccttgatattgc

SEQ ID NO: 788618 - DNA, 75 bp, synthetic construct
  source 1..75: mol_type = other DNA
ttcaaaaacgagggtgtggttgcttccagtgcctggccctatcaggccaacgccctgaaagccgaaggccagcct

SEQ ID NO: 788619 - DNA, 75 bp, synthetic construct
  source 1..75: mol_type = other DNA
gcctgtgcgcgctcagcatgtcattaatgactgcctatgccgcagaacttccaacccatttagataaccctgaag

SEQ ID NO: 788620 - DNA, 75 bp, synthetic construct
  source 1..75: mol_type = other DNA
cgcttgtgcgtaaagacgggttccgcttctggggttcccgctgcctgagcgatgacccgctctttgccttcgaaa

SEQ ID NO: 788621 - DNA, 75 bp, synthetic construct
  source 1..75: mol_type = other DNA
agacttatacggctgaatgctcttgcagcaaggcttgcaccttattatacagatgagtcgtcggcatttgactaa

SEQ ID NO: 788622 - DNA, 75 bp, synthetic construct
  source 1..75: mol_type = other DNA
tgcgcgttgttgaagtcaacgagggcacccgatccattaccacggtgagtaccgccatcgtgggcatggtctgca

SEQ ID NO: 788623 - DNA, 75 bp, synthetic construct
  source 1..75: mol_type = other DNA
cgaaggtatccgcgccaaaatgcgcagtctggtcagtcagggctatcttattggtggtgattgctggctggatga

SEQ ID NO: 788624 - DNA, 75 bp, synthetic construct
  source 1..75: mol_type = other DNA
tgatggtcgggccgtctggctgcgggaaatccacgctgctgcgcatggttgccgggctggagcgggtaacgacgg

SEQ ID NO: 788625 - DNA, 75 bp, synthetic construct
  source 1..75: mol_type = other DNA
ctgaaaattcgcggcatgggcaagcagcaaattgccgagcgcgttaaagaagcggcgcgcattctggagctggac

SEQ ID NO: 788626 - DNA, 75 bp, synthetic construct
  source 1..75: mol_type = other DNA
cgctggtgatggacacgctggagatcctcggcgcagataacctggcgcacggacgctggggcgaacagaagctgg

SEQ ID NO: 788627 - DNA, 75 bp, synthetic construct
  source 1..75: mol_type = other DNA
gatgatccgctttttgcctttgagaactacacccgcacagcacaggttctgatggacaccattgcagaggcgcat

SEQ ID NO: 788628 - DNA, 75 bp, synthetic construct
  source 1..75: mol_type = other DNA
ggaagaagaaaccacgacgaatatcatcggtgcagtgaccgctgaaggtaaaaaaactggcatgaaagccctgtt

SEQ ID NO: 788629 - DNA, 75 bp, synthetic construct
  source 1..75: mol_type = other DNA
aaaagctggaagtaccgtttactctgctgtggcacaaacggaatagccataacccgaagatcgtctggttacggg

SEQ ID NO: 788630 - DNA, 75 bp, synthetic construct
  source 1..75: mol_type = other DNA
ctgcgtgggtttgcttacctgtcagcgtatggctgcaaaacagtgcaggaggcgatcacttaccgagaaaacttc

SEQ ID NO: 788631 - DNA, 75 bp, synthetic construct
  source 1..75: mol_type = other DNA
ctttgccaccaagaatggtggcattacaaccaatggtcacattatgtcctataacaatatccatatcattaaaat

SEQ ID NO: 788632 - DNA, 75 bp, synthetic construct
  source 1..75: mol_type = other DNA
tatgccaccgcccgtgcgctcggtctgcgcgccaaaattgatgaacagaccgggtggcacaaaagcctgtccaac

SEQ ID NO: 788633 - DNA, 75 bp, synthetic construct
  source 1..75: mol_type = other DNA
ccgctagcctttgattatcgaggaaaaattgccgatgtacgctggcgtaaaatgtgggacaccggtctggtgatt

SEQ ID NO: 788634 - DNA, 75 bp, synthetic construct
  source 1..75: mol_type = other DNA
accaacagctacgcgcggaagttcctgatgagttcacaatggcgtcccgatcgctgcgcggtcattgccggggcg

SEQ ID NO: 788635 - DNA, 75 bp, synthetic construct
  source 1..75: mol_type = other DNA
cggaaatgagaaaacctggcgtgacgcgccaactgttgtggatggaatacaaggcacaggcgggtgacaaagcga

SEQ ID NO: 788636 - DNA, 75 bp, synthetic construct
  source 1..75: mol_type = other DNA
gatataaggaaaatcagtggtgaatatctgctggtttttcccggtgacagcaacccatataaaccgatgagcgaa

SEQ ID NO: 788637 - DNA, 75 bp, synthetic construct
  source 1..75: mol_type = other DNA
ttgctctacactctctggagctactacaaaatgtggggactagactggccccctgaatctccagacaaccagtat

SEQ ID NO: 788638 - DNA, 75 bp, synthetic construct
  source 1..75: mol_type = other DNA
ttgtgggacagcacttccagtcagctgacgctgagcattatgttggtaatcgtgctgatatttttgcccattgtg

SEQ ID NO: 788639 - DNA, 75 bp, synthetic construct
  source 1..75: mol_type = other DNA
caaactgactagtattttacctgtcgtgccaggcggttcttatcaggcgcagggggtattgcaatcattaacggt

SEQ ID NO: 788640 - DNA, 75 bp, synthetic construct
  source 1..75: mol_type = other DNA
tctgaccatttcagccatgtttctgtgatgcgtaaagtgttgttgaggatgaccagttggatgcattacttgtat

SEQ ID NO: 788641 - DNA, 75 bp, synthetic construct
  source 1..75: mol_type = other DNA
gtgtttattcctgagcagaaacggcaaattgtcgcccagttccggcaaaattcgctgctacgtctggaagccggc

SEQ ID NO: 788642 - DNA, 75 bp, synthetic construct
  source 1..75: mol_type = other DNA
gaagtcaccgacaaaaataatcagcttattcagaagggcgaggtgctttttaagctcgacccggtacgttatcag

SEQ ID NO: 788643 - DNA, 75 bp, synthetic construct
  source 1..75: mol_type = other DNA
agcaatggctacgttactcaggtactgatccgcccaggtacatacgcagctgccttgccgttgcgtccggtgatg

SEQ ID NO: 788644 - DNA, 75 bp, synthetic construct
  source 1..75: mol_type = other DNA
taaaatcttccgcattccggtaaatcagtggacgctggcgacggcggcgctgggaggcgtgtttctggtgagtgg

SEQ ID NO: 788645 - DNA, 75 bp, synthetic construct
  source 1..75: mol_type = other DNA
tggctcccggcgaatctcccaggacatcagcacccgtgatgaaggtggtggcgggaaggtggtggttatcgggcg

SEQ ID NO: 788646 - DNA, 75 bp, synthetic construct
  source 1..75: mol_type = other DNA
attttttttttttaaaaactggtttcagttaccaagtggtcatattgttcaaatgttttcgatgaatgtttatgg

SEQ ID NO: 788647 - DNA, 75 bp, synthetic construct
  source 1..75: mol_type = other DNA
cagctggcgaccaaacgcgccgcactactggtgatgctgtgctttttgctggcgggttactggctgtggggttgg

SEQ ID NO: 788648 - DNA, 75 bp, synthetic construct
  source 1..75: mol_type = other DNA
cttcttctgaagacgaagaaaatactgtagaagaaagcgacgagaaagccggtttaagagagcgtgtcaaaaatg

SEQ ID NO: 788649 - DNA, 75 bp, synthetic construct
  source 1..75: mol_type = other DNA
gttgtcgacagataacgccgtccggcaaggtgcaattaacggtagatttaccagtcaatacagaacggaatcctc

SEQ ID NO: 788650 - DNA, 75 bp, synthetic construct
  source 1..75: mol_type = other DNA
gatgccggaagggtcatcttaagcatgcaggggtggttaacaggaagtcattatcataatattcggtcatgggat

SEQ ID NO: 788651 - DNA, 75 bp, synthetic construct
  source 1..75: mol_type = other DNA
attacctgatttacgcggtgagtttatccgtggttgggatgatgggcgaggtgtggatgcgggaaggggcatctt

SEQ ID NO: 788652 - DNA, 75 bp, synthetic construct
  source 1..75: mol_type = other DNA
gtctgctgccgctggtggcgcgtaatgatgatgaacgccggatagtgataaacagcgttggtgcacactgggaag

SEQ ID NO: 788653 - DNA, 75 bp, synthetic construct
  source 1..75: mol_type = other DNA
aatgtgggatgccggtctggtcatcggcagtctggtgccgccggtagtcttcggtatcgccttcggcaacttgtt

SEQ ID NO: 788654 - DNA, 75 bp, synthetic construct
  source 1..75: mol_type = other DNA
cgacaaataaattgcctgatttacgtggtgagtttattcgtggctgggatgacggtcgttcagtagatactggtc

SEQ ID NO: 788655 - DNA, 75 bp, synthetic construct
  source 1..75: mol_type = other DNA
gtgagcagaaagaaacaggtcaccctggtatcttctcccgacaaaaacacagcaccataatatatgtcatttgtt

SEQ ID NO: 788656 - DNA, 75 bp, synthetic construct
  source 1..75: mol_type = other DNA
taactatgaccaaatcgttgacaaccaacctggattctcccgtttttcatttgcaggtccttcgcgaggcgatgg

SEQ ID NO: 788657 - DNA, 75 bp, synthetic construct
  source 1..75: mol_type = other DNA
tgtggccctcagccacaccgccaacaggctggctgaaatgtaacggtgcagtattttctgctgggaagtacccca

SEQ ID NO: 788658 - DNA, 75 bp, synthetic construct
  source 1..75: mol_type = other DNA
ccggcaaaattttctcgcgcaggatgcgctggtaaaaggttcgatagcggagcaagcgcaaattcaaagtcagtt

SEQ ID NO: 788659 - DNA, 75 bp, synthetic construct
  source 1..75: mol_type = other DNA
atgttccgtggtcgtaacgaaggcgtactccagctttcgctaaatgccgatccgcagttcgacgagccgccgaaa

SEQ ID NO: 788660 - DNA, 75 bp, synthetic construct
  source 1..75: mol_type = other DNA
gcatcaaggtgctgatgcatctggaaaccgaactgatgggtaccgtgcgcgaacgcgcggaagatgaagcaatca

SEQ ID NO: 788661 - DNA, 75 bp, synthetic construct
  source 1..75: mol_type = other DNA
cgaataagtttgtggaagatccgcacaccgtggtgaaagcgggtgacattgtgaaggtgaaagtgctggaagtcg

SEQ ID NO: 788662 - DNA, 75 bp, synthetic construct
  source 1..75: mol_type = other DNA
agcaggcgcatcggtttactctgcttccgaactggcagcacaggagttcccggatctcgatgtttctctgcgtgg

SEQ ID NO: 788663 - DNA, 75 bp, synthetic construct
  source 1..75: mol_type = other DNA
gagaacgggctattcaaaaaccgtcaacaactgttaaaagtgagccgtctggggccaaaagccttcgaacagtgt

SEQ ID NO: 788664 - DNA, 75 bp, synthetic construct
  source 1..75: mol_type = other DNA
ctggtggcgaccgataccatttatccacacaccgggcaggccgcaaaagcggcgatgactgttgccgcactgtgt

SEQ ID NO: 788665 - DNA, 75 bp, synthetic construct
  source 1..75: mol_type = other DNA
ccgggatgagcgggcctgttcatgtggatacggatattaccgaagtggcgaaaaataacgcgctgactgatgatg

SEQ ID NO: 788666 - DNA, 75 bp, synthetic construct
  source 1..75: mol_type = other DNA
cgctcaagtttttctatgaattctggcaccagaaacatggcgtgactttttgcttcagtttctattcctcgaacc

SEQ ID NO: 788667 - DNA, 75 bp, synthetic construct
  source 1..75: mol_type = other DNA
acattttcgccatattgtactgcgaggttatgatttacgcggggacattgaaaccattaaatggtttatccgcaa

SEQ ID NO: 788668 - DNA, 75 bp, synthetic construct
  source 1..75: mol_type = other DNA
gaagacctctacctgccctacaaacctaaacgccgcacccgcgggcaaatcgccattgaagcagggcttgagccg

SEQ ID NO: 788669 - DNA, 75 bp, synthetic construct
  source 1..75: mol_type = other DNA
atgtttctgaatacagaacaatttgaatataacggtgtgtccgtcacgctttccgaattgtctgcgctgcagcgt

SEQ ID NO: 788670 - DNA, 75 bp, synthetic construct
  source 1..75: mol_type = other DNA
tggtggcgatgtccctgtggcataaccatccgcagaaaacggagtcaccgtcaatgaatgaggccgtgatgaaga

SEQ ID NO: 788671 - DNA, 75 bp, synthetic construct
  source 1..75: mol_type = other DNA
gccgatgccattgcccgggcggaagacgtggtgttgtgcctgtccgggatgatcgaagctgttcgtccggatact

SEQ ID NO: 788672 - DNA, 75 bp, synthetic construct
  source 1..75: mol_type = other DNA
ccttgcgcttcggtactttgcttatatggaaaagcagtcgggcaaggtggagggagtgagtgcagaagtgctgaa

SEQ ID NO: 788673 - DNA, 75 bp, synthetic construct
  source 1..75: mol_type = other DNA
taaaacatttaatctccgtaagaattttttaaatcagtgttcaacggcagacccggctgcaatcttactgatcat

SEQ ID NO: 788674 - DNA, 75 bp, synthetic construct
  source 1..75: mol_type = other DNA
accatctggcgcagtaaacgagcgcgaccaaaaatttactcgttcgccgtgtactggatgattttaacgctgggg

SEQ ID NO: 788675 - DNA, 75 bp, synthetic construct
  source 1..75: mol_type = other DNA
ttgcgggcggggccatgaataacataggcggagaagatattcataccctcgttgagaacgaagccgtttatcgcc

SEQ ID NO: 788676 - DNA, 75 bp, synthetic construct
  source 1..75: mol_type = other DNA
aacggatggcctacagctctatagctccggtaagactaaagatctgaccgttaacgccggaggtcgggttgaaat

SEQ ID NO: 788677 - DNA, 75 bp, synthetic construct
  source 1..75: mol_type = other DNA
ggttttttaaatcagtgctcaacggcagacccggcggcaatctctctgatcatgagtaagtttggtaagattaag

SEQ ID NO: 788678 - DNA, 75 bp, synthetic construct
  source 1..75: mol_type = other DNA
gatgagcggaaattacgaggtgaatcacctgaaactgtaatagcaattttaatcgtgaactacagaatatattca

SEQ ID NO: 788679 - DNA, 75 bp, synthetic construct
  source 1..75: mol_type = other DNA
gatgagcgaatattacgaggtgaatcaccagaaactgtaatagcaatttttaatcgtgaactacataatatattc

SEQ ID NO: 788680 - DNA, 75 bp, synthetic construct
  source 1..75: mol_type = other DNA
ttgaatataacggtgtgtctgtcacgctttccgaattgtctgcgctgcagcgtatcgagcatcttgccctcctga

SEQ ID NO: 788681 - DNA, 75 bp, synthetic construct
  source 1..75: mol_type = other DNA
gaatatctgcgtctgtactacaccggtaacttcttccagttgcttaacccgttcggcctgctggcaggcgtggtg

SEQ ID NO: 788682 - DNA, 75 bp, synthetic construct
  source 1..75: mol_type = other DNA
aactccattgcaccacactgggacggtaaccaggtttggctgatcaccgcgggcggcgcactctttgctgcctgg

SEQ ID NO: 788683 - DNA, 75 bp, synthetic construct
  source 1..75: mol_type = other DNA
ccgtggcatctggaaatggatgagttttatcagaacgataaaaccaccaaagttgattatctgcactccatcggt

SEQ ID NO: 788684 - DNA, 75 bp, synthetic construct
  source 1..75: mol_type = other DNA
gtggtgattggcgcttctattcgctacggtcactaccattctgcgttcatggaatttgttaaaaagcatgcgacg

SEQ ID NO: 788685 - DNA, 75 bp, synthetic construct
  source 1..75: mol_type = other DNA
agcgttgagctggatgcgccgtaatggcgaagaaattatagatgaagatatcgctcggctatctcccctgatgca

SEQ ID NO: 788686 - DNA, 75 bp, synthetic construct
  source 1..75: mol_type = other DNA
atcaatatgttgggccattatacattcacactgccagaggatattttaaaaggagagctgagagctctaaattta

SEQ ID NO: 788687 - DNA, 75 bp, synthetic construct
  source 1..75: mol_type = other DNA
ttgagatagatgccagaacgggctttacacgtgagtttacgcatgtcagtgaatccggggcccgggcgcaggatc

SEQ ID NO: 788688 - DNA, 75 bp, synthetic construct
  source 1..75: mol_type = other DNA
acgccttcaggatgcactgcgccgccgggacaactggcttgaaaacagtgatcgctggggagatcctcgcgagaa

SEQ ID NO: 788689 - DNA, 75 bp, synthetic construct
  source 1..75: mol_type = other DNA
ggaatttgtcaaaaaacatgcgacgcggctgaattcgatgccgagcgccttttactccgtgaatctggtggcgcg

SEQ ID NO: 788690 - DNA, 75 bp, synthetic construct
  source 1..75: mol_type = other DNA
gttccagtgtgccgggcattgggtcaccccaccaatggcagtaaagcatcggtgcaattggcagcacggttggat

SEQ ID NO: 788691 - DNA, 75 bp, synthetic construct
  source 1..75: mol_type = other DNA
aaggaaaaacatatcacccgcaggggatacacgctctgctttctcagtaaactgcaggatagtctgaggcggagg

SEQ ID NO: 788692 - DNA, 75 bp, synthetic construct
  source 1..75: mol_type = other DNA
cattacacattcacgctgccggaggatattctgaagggagagcttcgccctttaaatattaatataaacaatgaa

SEQ ID NO: 788693 - DNA, 75 bp, synthetic construct
  source 1..75: mol_type = other DNA
cccgttacgcaggcatggcgtcggtaaaatatatcgcgcgaatgccacagcagagaaaactggccgtactcacag

SEQ ID NO: 788694 - DNA, 75 bp, synthetic construct
  source 1..75: mol_type = other DNA
aactggccgcgttgccggacagctggcagaccgcccgcgtgacggagcttctggacattcctgaggggcagcgta

SEQ ID NO: 788695 - DNA, 75 bp, synthetic construct
  source 1..75: mol_type = other DNA
caattcatgcgtcagaactcattcgatcgctattgagaagtacccgaccgtcagggcttgctcaggcaataatgg

SEQ ID NO: 788696 - DNA, 75 bp, synthetic construct
  source 1..75: mol_type = other DNA
ctcaaggatcttgaccgcgcggcgttgctgctggcgcgggcatgcgcacttttacttgatgaagataccgccgat

SEQ ID NO: 788697 - DNA, 75 bp, synthetic construct
  source 1..75: mol_type = other DNA
caaattccggtcttctctaggtgccgtgcagaaccgtctcgattccgctatcaccaacctgaacaacaccaccac

SEQ ID NO: 788698 - DNA, 75 bp, synthetic construct
  source 1..75: mol_type = other DNA
tgatcaaagtttcagcagataaagacggcgcagctcaaggtttcgtcacacttcaaggcaaaaactattctgctg

SEQ ID NO: 788699 - DNA, 75 bp, synthetic construct
  source 1..75: mol_type = other DNA
ctaaagttgacaatctgcgttctgacctcggtgcagtacaaaaccgtttcgactctgctatcaccaaccttggca

SEQ ID NO: 788700 - DNA, 75 bp, synthetic construct
  source 1..75: mol_type = other DNA
atttgcagaagattgactcttctacattaggactgaacggtttctccgtttcgggtcagtcacttaacgttagtg

SEQ ID NO: 788701 - DNA, 75 bp, synthetic construct
  source 1..75: mol_type = other DNA
caaagacaccgataatggactaacgactgctgctactcagaaagatcaactgattaaagttgccgctgactctga

SEQ ID NO: 788702 - DNA, 75 bp, synthetic construct
  source 1..75: mol_type = other DNA
ccaccaacctgtctgaagcgcagtcccgtattcaggacgccgactatgcgaccgaagtgtctaacatgtcgaaag

SEQ ID NO: 788703 - DNA, 75 bp, synthetic construct
  source 1..75: mol_type = other DNA
gccgtctgtcgtgcgctgggacaccccactgacggcagaaaagcggtacaacagctggcagcgcaactggatgag

SEQ ID NO: 788704 - DNA, 75 bp, synthetic construct
  source 1..75: mol_type = other DNA
acaaattttcaggatgaaatggtggagcagtacggccgggtgaagcgcttccttcctgcgcttctgcgcgacctg

SEQ ID NO: 788705 - DNA, 75 bp, synthetic construct
  source 1..75: mol_type = other DNA
ctgctgtatgtccgcgcctggctcagtaatgaacgtcccggcctgatgtttgatttcgccacagcatggctgctt

SEQ ID NO: 788706 - DNA, 75 bp, synthetic construct
  source 1..75: mol_type = other DNA
atcgttgcaatctaccaccaacccgctcgaaactatcgacaaagcattggctaaagttgacaatctgcgttctga

SEQ ID NO: 788707 - DNA, 75 bp, synthetic construct
  source 1..75: mol_type = other DNA
tgccaggatgtcaccgcagaaaaggatggcggttctggttgcctttgtccttgcatgggaaacgctggcgctgga

SEQ ID NO: 788708 - DNA, 75 bp, synthetic construct
  source 1..75: mol_type = other DNA
gatcgacaaaaacgcccattacggcgcactagatgaactggcaagaggatgcgtggagttaaccaggattgaaaa

SEQ ID NO: 788709 - DNA, 75 bp, synthetic construct
  source 1..75: mol_type = other DNA
aacggttcgaaaaaacgcatactggacgatgcgcctgaacacatcatcaccggcccctggaaacgtctggtctat

SEQ ID NO: 788710 - DNA, 75 bp, synthetic construct
  source 1..75: mol_type = other DNA
gattcgctatatggcgctattgtttgtgccgattggcgtaggcgtcatgcaatattttgatttgctccgcgcaca

SEQ ID NO: 788711 - DNA, 75 bp, synthetic construct
  source 1..75: mol_type = other DNA
tgccaagagcccggaaagctacatgcagtatgtcgatcagcatccggaacagagcatcaaaatggccgttacgtt

SEQ ID NO: 788712 - DNA, 75 bp, synthetic construct
  source 1..75: mol_type = other DNA
cgcagtgcgactggcgcttccgtatgggtgctctcaaaccgtcgtgcaaacagcgagatggcaagctggctggaa

SEQ ID NO: 788713 - DNA, 75 bp, synthetic construct
  source 1..75: mol_type = other DNA
aaactgatgctgtttgtactggtggatggctggcaattgctggtcggttcgctggcgcagagcttttacagttag

SEQ ID NO: 788714 - DNA, 75 bp, synthetic construct
  source 1..75: mol_type = other DNA
tgcgtgaatttatgctgcgtcagacccgcgaggcagatttagggttgtttgccagactggcgaatactggcccgt

SEQ ID NO: 788715 - DNA, 75 bp, synthetic construct
  source 1..75: mol_type = other DNA
atgtcgatgcgtaccagccattcagcgaagagaaaatatcaatgcaggaggcgctggaaaaaggggcgcagccgc

SEQ ID NO: 788716 - DNA, 75 bp, synthetic construct
  source 1..75: mol_type = other DNA
atgccatttgctcgttatttctgcattttcataaacgttggtttgggagaaggctcagcattacctgttggggtg

SEQ ID NO: 788717 - DNA, 75 bp, synthetic construct
  source 1..75: mol_type = other DNA
tagtgggcgcgcactgctttcacatcaaaacagtcaaaacttgtcgcacgttcatgatgacgttggcgcagtcgg

SEQ ID NO: 788718 - DNA, 75 bp, synthetic construct
  source 1..75: mol_type = other DNA
agcgattaatggtaaatttaccagtcaatacagaacggagttatctggggggaatgaaacccgcccacgtaacat

SEQ ID NO: 788719 - DNA, 75 bp, synthetic construct
  source 1..75: mol_type = other DNA
cagctggcagaagccatttacaaaggcctgcgcaattacttccttgcgcatccgatgcaatctgcgccgcagggt

SEQ ID NO: 788720 - DNA, 75 bp, synthetic construct
  source 1..75: mol_type = other DNA
ctgctgaagaatacccggaactgtcaaaggcttacccgacaaataaattgccagatttacgtggtgagtttattc

SEQ ID NO: 788721 - DNA, 75 bp, synthetic construct
  source 1..75: mol_type = other DNA
aacggtagatttaccagtcaatacagaacggaatcctcagaggggaatgaaacccgcccacgcaatattgccttc

SEQ ID NO: 788722 - DNA, 75 bp, synthetic construct
  source 1..75: mol_type = other DNA
ctccggggtgaaaacgccagtgcaaaaaaatgaatcaatattgagccggttaagtggctttgtagcgggagggta

SEQ ID NO: 788723 - DNA, 75 bp, synthetic construct
  source 1..75: mol_type = other DNA
cgcccccaggatacaaactttcaggatgaaatggtggagcagtacggacgggtaaggcgttttttgcccgcacta

SEQ ID NO: 788724 - DNA, 75 bp, synthetic construct
  source 1..75: mol_type = other DNA
ccgctcgcggggtactggggaggtggtgaggttgcctccgcagatggtatgcgttttgtcacaccggttaaaacg

SEQ ID NO: 788725 - DNA, 75 bp, synthetic construct
  source 1..75: mol_type = other DNA
cccgttatgccggaatggcttcggtgaaatacatttcaagaatgcctgacgaacggcgactggccgtgcttactg

SEQ ID NO: 788726 - DNA, 75 bp, synthetic construct
  source 1..75: mol_type = other DNA
cagaacaatcaatgccggaccgaaccgcaaatactttggtaataacagagggatcacctggtacaactttgtgtc

SEQ ID NO: 788727 - DNA, 75 bp, synthetic construct
  source 1..75: mol_type = other DNA
tgcccgtcagcatcagcgccgtgctgatggctgaagcctgcaatatcggtctggaaccactgatcagatcaaatg

SEQ ID NO: 788728 - DNA, 75 bp, synthetic construct
  source 1..75: mol_type = other DNA
taaaatcgaaagccactgggatgagatgatgcgggttgcaggttcgctgaagctgggcacaattcatgcgtcaga

SEQ ID NO: 788729 - DNA, 75 bp, synthetic construct
  source 1..75: mol_type = other DNA
cctcaaaaacaccatcatacactaaatcagtaagttggcagcatcaccgccggatcccgtatattattatgaata

SEQ ID NO: 788730 - DNA, 75 bp, synthetic construct
  source 1..75: mol_type = other DNA
ttgccggtaactgtgccgacgcaattgcttattatcaacgcacgttgggcgcggaactgctctataaaatcagct

SEQ ID NO: 788731 - DNA, 75 bp, synthetic construct
  source 1..75: mol_type = other DNA
tttccggtaactgtgccgacgcgatagcctattaccaacgcgcgttaggcgcggaactgctctataaaatcagct

SEQ ID NO: 788732 - DNA, 75 bp, synthetic construct
  source 1..75: mol_type = other DNA
ggtaggcgttgtcagctcatcctattttaccggcaacctggtcggtacattgctgacagggtatgtcattaagcg

SEQ ID NO: 788733 - DNA, 75 bp, synthetic construct
  source 1..75: mol_type = other DNA
gttgactctggcgatcgcagtgttaaatacactcgtgccgctttggctcgcccaggaacacatgtccacatggca

SEQ ID NO: 788734 - DNA, 75 bp, synthetic construct
  source 1..75: mol_type = other DNA
gcacacgcaccgaggcaaaggagtcgcgcacagtctcatcgaatttgcgaaaaagtgggcactaagcagacagct

SEQ ID NO: 788735 - DNA, 75 bp, synthetic construct
  source 1..75: mol_type = other DNA
gctgggctacgtcggcgtgctggcagctatgattatggcgagcctttctggttctgccgttgcggataccgccgc

SEQ ID NO: 788736 - DNA, 75 bp, synthetic construct
  source 1..75: mol_type = other DNA
tcactggcctatatggagcgattaaaagaagcaaaactgctggcatcaacagggagtacaggcgactcgtatgac

SEQ ID NO: 788737 - DNA, 75 bp, synthetic construct
  source 1..75: mol_type = other DNA
tggcccgtgcagaaggattcgataaggttgagatcaccggcccccggctggatatggataacgatttcaagacct

SEQ ID NO: 788738 - DNA, 75 bp, synthetic construct
  source 1..75: mol_type = other DNA
acgtattaccactgtcagcaacagcgacatcatcctgataaacgcggtccacatgcccagcgcgatgactggctg

SEQ ID NO: 788739 - DNA, 75 bp, synthetic construct
  source 1..75: mol_type = other DNA
cagaagtggaactggccacactcacgtgggtggactggtataacaatcgacgattgctgggaaggctgggccata

SEQ ID NO: 788740 - DNA, 75 bp, synthetic construct
  source 1..75: mol_type = other DNA
cagaagtggaactggccacactcacgtgggtggactggtataacaatcgatgattgctgggaaggccgggccata

SEQ ID NO: 788741 - DNA, 75 bp, synthetic construct
  source 1..75: mol_type = other DNA
gtacagtggtgcgcctcatggcggttatgggacttgccggtattctccggggtaaaaggtccgcactaccgtcag

SEQ ID NO: 788742 - DNA, 75 bp, synthetic construct
  source 1..75: mol_type = other DNA
acgtattaccattgtcagcagcagcggcatcatcctgataaacgcagtgcccgttgtcaacgccacgatgtttga

SEQ ID NO: 788743 - DNA, 75 bp, synthetic construct
  source 1..75: mol_type = other DNA
ttcagtcagtgaataactcaggtattgggttatcagctaatatcgagactcaaaaaatggaaaaacccgctcgac

SEQ ID NO: 788744 - DNA, 75 bp, synthetic construct
  source 1..75: mol_type = other DNA
cgtgtccactattgctgggtaagatcaattgaacacactcttcaagccgtagcaaggaaatggttggacgagaag

SEQ ID NO: 788745 - DNA, 75 bp, synthetic construct
  source 1..75: mol_type = other DNA
acgtattaccactgtcagcaacagcgacatcatcctgataaacgccgtacacatgcacagcgcgatgactggctg

SEQ ID NO: 788746 - DNA, 75 bp, synthetic construct
  source 1..75: mol_type = other DNA
ccgcgtaaaccgtcagttcgtggcagaacgtcctgaccagttgtgggtggctgattttaattacgtcagcacatg

SEQ ID NO: 788747 - DNA, 75 bp, synthetic construct
  source 1..75: mol_type = other DNA
gtgggtggctgattttacttacgtcagcacatggcagggggtcgtctatgtggcgttcatcattgatgtgtttgc

SEQ ID NO: 788748 - DNA, 75 bp, synthetic construct
  source 1..75: mol_type = other DNA
ctgattttaattacgtcagcacatggcagggcttcgtctatgtggcgttcatcattgatgtgtttgccggataca

SEQ ID NO: 788749 - DNA, 75 bp, synthetic construct
  source 1..75: mol_type = other DNA
atcaacagggagtacaggtgactcgtatgacaacgcgatggcggagagcatcaatggtctttacaaagcggaggt

SEQ ID NO: 788750 - DNA, 75 bp, synthetic construct
  source 1..75: mol_type = other DNA
gccccgtcaacgtattaccactgtcagcaacagcgacatcatcctgataaacgcagcgcccgtgcgcagcgcgat

SEQ ID NO: 788751 - DNA, 75 bp, synthetic construct
  source 1..75: mol_type = other DNA
gacatcatccttataaacgcagtgcccgtgcgcagcgcgatgactggctgaagaaagagatactgcgcgtatacg

SEQ ID NO: 788752 - DNA, 75 bp, synthetic construct
  source 1..75: mol_type = other DNA
ttgccccgtcaacgtattaccactgtcagcaacagcgacatcatcctgataaacgcagtgcccgtgcgcagcgcg

SEQ ID NO: 788753 - DNA, 75 bp, synthetic construct
  source 1..75: mol_type = other DNA
tcacgtgggtggactggtataacaatcgatgcttactggtaaggctgggccacatccctccgtcagaggcagaaa

SEQ ID NO: 788754 - DNA, 75 bp, synthetic construct
  source 1..75: mol_type = other DNA
tgggcccgtcgaccgtccggcacggtccatcacagtgataaaggttctcagtatgtatcgctggcctacacacag

SEQ ID NO: 788755 - DNA, 75 bp, synthetic construct
  source 1..75: mol_type = other DNA
ttgtggcagaacgtcctgaccagttgtgggtggctgattttacttacgtcagcacatggcagggggtcgtctatg

SEQ ID NO: 788756 - DNA, 75 bp, synthetic construct
  source 1..75: mol_type = other DNA
ggagcgattaaaagaagcaaaactgctggcatcaacagggagtacaggcgactcgtatggcagcgcgatggcgga

SEQ ID NO: 788757 - DNA, 75 bp, synthetic construct
  source 1..75: mol_type = other DNA
gattaaaagaagcaaaactgctggcatcaacagggagtacaggcgactcgtatgacaacgcgatggcggagagca

SEQ ID NO: 788758 - DNA, 75 bp, synthetic construct
  source 1..75: mol_type = other DNA
ccgttgtcagcgcgatgactggctgaagagagagatacagcgcgtatacgatgaaaatcatcaggtgtacggtgt

SEQ ID NO: 788759 - DNA, 75 bp, synthetic construct
  source 1..75: mol_type = other DNA
agcagtacggggtcggaccgctatgcagcgaactgcatattgccccggcaacgtattactactgtcagcaacagc

SEQ ID NO: 788760 - DNA, 75 bp, synthetic construct
  source 1..75: mol_type = other DNA
gctgctgaggagtctggcaagtttaggactgatgtcttagaagccgcccttgcccactcgaagaaagatgaaata

SEQ ID NO: 788761 - DNA, 75 bp, synthetic construct
  source 1..75: mol_type = other DNA
gcgctcgttggagtgatatagaccaagatcatcgattctggaacatccccggtgagtttatgaagatgaagcgtc

SEQ ID NO: 788762 - DNA, 75 bp, synthetic construct
  source 1..75: mol_type = other DNA
atgtgttcgccggatacatcggtgggatggcatgtctcatcatccatggaaacaacattcgtgctggatgcactg

SEQ ID NO: 788763 - DNA, 75 bp, synthetic construct
  source 1..75: mol_type = other DNA
actctctttccctcgggctgttaccgtccattatcagccagatgccgccgctctttacctgggcaattgaagcta

SEQ ID NO: 788764 - DNA, 75 bp, synthetic construct
  source 1..75: mol_type = other DNA
ctcagaacaagggaaaatcttccattcgcagatccgccatctgttgcaacagttagagagcaatctggcagagct

SEQ ID NO: 788765 - DNA, 75 bp, synthetic construct
  source 1..75: mol_type = other DNA
accgatgagaagcacacccgggaatacatcacccatctggtacagtcagcctactacgatactgaacgggatatt

SEQ ID NO: 788766 - DNA, 75 bp, synthetic construct
  source 1..75: mol_type = other DNA
cctgtttgggcgtaaagccagcggcggcaagattgaagtgctggttgagcggatgctcgacgacaaacgcattct

SEQ ID NO: 788767 - DNA, 75 bp, synthetic construct
  source 1..75: mol_type = other DNA
aagttaaaaccaccgcatgatgagagtgctgagaaccctcaactgccagccgcaccgggtgatgtgagtccggag

SEQ ID NO: 788768 - DNA, 75 bp, synthetic construct
  source 1..75: mol_type = other DNA
gtgtcgagcaactggcgctgaccagcgaggccgacgtgcgcggcagaaccggctttgaatcggctgattacccgc

SEQ ID NO: 788769 - DNA, 75 bp, synthetic construct
  source 1..75: mol_type = other DNA
cgggtgtggaaagagacggaaagcgccctcaccacacgcaatccgcaagttttcttccaggtattgcgtgattgc

SEQ ID NO: 788770 - DNA, 75 bp, synthetic construct
  source 1..75: mol_type = other DNA
aaggccgttggttgcgcgaagcctgggaagtggcgcagtcagtgccgacaaaagcggtcgttgaagcgggattta

SEQ ID NO: 788771 - DNA, 75 bp, synthetic construct
  source 1..75: mol_type = other DNA
atcgacaccggtattcataccttaatgacgctctcaatggcggcgatgctgagtccgcaggtcgatgtccgtttc

SEQ ID NO: 788772 - DNA, 75 bp, synthetic construct
  source 1..75: mol_type = other DNA
gacgtgcgcggcagaaccggttttgaatcagcggactacccgcaaggccgctggttgcgcgaagcctgggaagtg

SEQ ID NO: 788773 - DNA, 75 bp, synthetic construct
  source 1..75: mol_type = other DNA
tgcgcgttatgcccacctcggttttcgtattgccgatgaaactctggcgctgatgcgcgagatgacccacgcggg

SEQ ID NO: 788774 - DNA, 75 bp, synthetic construct
  source 1..75: mol_type = other DNA
cttctgcattcattaccgccggcccaagttaaagccacctcatgatgagagtgcggagaacccgcagctgccagc

SEQ ID NO: 788775 - DNA, 75 bp, synthetic construct
  source 1..75: mol_type = other DNA
aaatacactgtcacgcaccgatgccacggaagaactgacgcgtctttccctggcccgggctgagggattcgataa

SEQ ID NO: 788776 - DNA, 75 bp, synthetic construct
  source 1..75: mol_type = other DNA
attgaaaccaaatggctttatgattttctgaccctggaaaaatgtcgcaatttttcccaggcggcagtcagtcgc

SEQ ID NO: 788777 - DNA, 75 bp, synthetic construct
  source 1..75: mol_type = other DNA
cgccctatcagtggtcatagagaatgggttttccccagcatcaaagctcccctcagtcatatgcatgaacaaaca

SEQ ID NO: 788778 - DNA, 75 bp, synthetic construct
  source 1..75: mol_type = other DNA
gacatcatcctgataaacgcagtgcacatgcacagcgcgatgactggctgaagagagagatacagcgcgtatacg

SEQ ID NO: 788779 - DNA, 75 bp, synthetic construct
  source 1..75: mol_type = other DNA
gcgggaagcggataaagaagcccgcgatcacgttcgcaaagatgagcaagttatcgggattttttatccggacta

SEQ ID NO: 788780 - DNA, 75 bp, synthetic construct
  source 1..75: mol_type = other DNA
tcagtcatcacgcaagctccgggagcgtatcagcccctcgctcaaacgtattgcgggtactgtgatctcgttttc

SEQ ID NO: 788781 - DNA, 75 bp, synthetic construct
  source 1..75: mol_type = other DNA
ctacgcggttccggcattcaatattcacaatctcgaaacgatgcaggtagtggtggaaaccgcagctagcctgaa

SEQ ID NO: 788782 - DNA, 75 bp, synthetic construct
  source 1..75: mol_type = other DNA
accggcgcttgatttttctcgactggagaacattcgccagtgggtgaacttaccgctggtgctgcatggcgcgtc

SEQ ID NO: 788783 - DNA, 75 bp, synthetic construct
  source 1..75: mol_type = other DNA
gtacgtggtatcgacaaagcagatgctgaacaacgcacagcgcggcggttatgcggttccggcattcaatattca

SEQ ID NO: 788784 - DNA, 75 bp, synthetic construct
  source 1..75: mol_type = other DNA
cagacgggcaatggagcagttgcgcgagattggatatcttgattacacggagatccagcgggggcggacaaaatt

SEQ ID NO: 788785 - DNA, 75 bp, synthetic construct
  source 1..75: mol_type = other DNA
cggtattttcccagaaccagacggtaagacgggcaatggagcagttgcgcgagattggataccttgattacacgg

SEQ ID NO: 788786 - DNA, 75 bp, synthetic construct
  source 1..75: mol_type = other DNA
cgcctttttgaactgtaccagtttgacagaaaagtccttctccagcttaaggcgattaatgccctgaagcgacgg

SEQ ID NO: 788787 - DNA, 75 bp, synthetic construct
  source 1..75: mol_type = other DNA
gcgtggcggcagcgattacgcgcaacgtaaaatcaagatagccgctgcacactctctttccctcggtcttttacc

SEQ ID NO: 788788 - DNA, 75 bp, synthetic construct
  source 1..75: mol_type = other DNA
ctctttacctgggcaattgaagccattgatgttgatgaagcggtcgataaactgcgtgaagggcaaagtgactgt

SEQ ID NO: 788789 - DNA, 75 bp, synthetic construct
  source 1..75: mol_type = other DNA
ggctgacttcacgtatggtgtgcccggagttcagggcgggcatggatgcttaaatgaaccgcgagtctgtctgga

SEQ ID NO: 788790 - DNA, 75 bp, synthetic construct
  source 1..75: mol_type = other DNA
tttacttacgtcagcacatggcagggcttcgtttatgtggcgttcatcattgatgtgttcgccggatacatcgtg

SEQ ID NO: 788791 - DNA, 75 bp, synthetic construct
  source 1..75: mol_type = other DNA
ccaggcttccgcttattttgcgaaggcggagttcgaccgcctctggaaaaagtgatgccactgctggataagctg

SEQ ID NO: 788792 - DNA, 75 bp, synthetic construct
  source 1..75: mol_type = other DNA
gcgctggagcaggcgttgtgggcccgttgccgtccgtctggcaccatccatcacagcgataaaggctctcagtat

SEQ ID NO: 788793 - DNA, 75 bp, synthetic construct
  source 1..75: mol_type = other DNA
ttattttgcgaaggcggagttcgaccgcctctggaaaaagtgatggcactgctggataagctgcgtgagcagtac

SEQ ID NO: 788794 - DNA, 75 bp, synthetic construct
  source 1..75: mol_type = other DNA
acgattgctgggaaggctgggtcatatccctccggcagaagcagaaaaagcttattatgcttccatcagaaacga

SEQ ID NO: 788795 - DNA, 75 bp, synthetic construct
  source 1..75: mol_type = other DNA
aatcgacgattgctgggaaggctgggccatactcctccggcagaagcagaaaaagcttattatgcttccatcgga

SEQ ID NO: 788796 - DNA, 75 bp, synthetic construct
  source 1..75: mol_type = other DNA
cagtgaactgcatattgccccgtcaacgtattaccactgtcagcaacagcgacatcatcctgataaacgcagtgc

SEQ ID NO: 788797 - DNA, 75 bp, synthetic construct
  source 1..75: mol_type = other DNA
ccgtgcgcagcgcgatgactggctgaagaaagagatactgcgcgtatacgatgggaatcatcaggtatatggtgt

SEQ ID NO: 788798 - DNA, 75 bp, synthetic construct
  source 1..75: mol_type = other DNA
tgcatattgccccgtcaacgtattaccactgtcagcaacagagacatcatcctgataaacgcagtgcacatgcac

SEQ ID NO: 788799 - DNA, 75 bp, synthetic construct
  source 1..75: mol_type = other DNA
aaagattattatcacaaaggttatgcaacagatatcgagatgattggcattgaggacggcattgttgaattccat

SEQ ID NO: 788800 - DNA, 75 bp, synthetic construct
  source 1..75: mol_type = other DNA
tcgcctttaactttaacaacttcgtgctgattcagctgttaaccaacggcggcccggatcgtcttggcacgacca

SEQ ID NO: 788801 - DNA, 75 bp, synthetic construct
  source 1..75: mol_type = other DNA
ctggaaaaactttacccgcgtctttaccgacgaaggcattcagaaaccgttcctcgccattttcgtctggaccgt

SEQ ID NO: 788802 - DNA, 75 bp, synthetic construct
  source 1..75: mol_type = other DNA
gtgattacccagaatcgtcaggcgctgagtgacattaccgccattctgccggatggcaacaaagtgatgatgagc

SEQ ID NO: 788803 - DNA, 75 bp, synthetic construct
  source 1..75: mol_type = other DNA
tatgggacttgccggtgttctccggggtaaaaaggtccgtacgaccatcagccggaaagccgttgccgcaggcga

SEQ ID NO: 788804 - DNA, 75 bp, synthetic construct
  source 1..75: mol_type = other DNA
ataacccagaatcgtcaggcgctgagcgacattaccgccattctgccggatggcaacaaagtgattatgagttcc

SEQ ID NO: 788805 - DNA, 75 bp, synthetic construct
  source 1..75: mol_type = other DNA
caactacagcagcactaaccagctaacttttgaacgcgcccaggaagttctgttagatcgttcctggcaagcggg

SEQ ID NO: 788806 - DNA, 75 bp, synthetic construct
  source 1..75: mol_type = other DNA
aagaaagagatacagcgcgtatacgatgaaaatcacaaggtatacggtgtaaagtctggcgtcagttgttacggg

SEQ ID NO: 788807 - DNA, 75 bp, synthetic construct
  source 1..75: mol_type = other DNA
tctttcagaagaaagcggatgcagataaaaccaaaacatttgctgaaattaaagattattatcacaaaggttatg

SEQ ID NO: 788808 - DNA, 75 bp, synthetic construct
  source 1..75: mol_type = other DNA
cagataaaaccaaaacattcgcagaagttaaagattattatcagaaaggctacgcgacagatatcgaaatgattg

SEQ ID NO: 788809 - DNA, 75 bp, synthetic construct
  source 1..75: mol_type = other DNA
aaggtccgtacgaccatcagccggaaagccgttgccgcaggcgaccgcgtaaaccgtcagttcgtggcagaacga

SEQ ID NO: 788810 - DNA, 75 bp, synthetic construct
  source 1..75: mol_type = other DNA
cgttcatcattgatgtgtttgccggatacatcgtggggtggcgggtctcatcgtccatggaaacgacattcgtgc

SEQ ID NO: 788811 - DNA, 75 bp, synthetic construct
  source 1..75: mol_type = other DNA
gaaaggctgggccatatcccaccggcagaagcagaaaaagcttattatgcttccatcggaaacgatgatctggca

SEQ ID NO: 788812 - DNA, 75 bp, synthetic construct
  source 1..75: mol_type = other DNA
accgaaagcggcctattatttgattcagcggcgtgatagtcgccagacaccactgaccgcgtcattaatcacgca

SEQ ID NO: 788813 - DNA, 75 bp, synthetic construct
  source 1..75: mol_type = other DNA
caccgtaagagctggaaaaaccgtgcagaagtggaactggccacactcacgtgggtggactggtataacaatcga

SEQ ID NO: 788814 - DNA, 75 bp, synthetic construct
  source 1..75: mol_type = other DNA
catggaaacgacattcgtgctggatgcactggagcaggcgttgtgggcccgtcaaccgtccggcacagtccatca

SEQ ID NO: 788815 - DNA, 75 bp, synthetic construct
  source 1..75: mol_type = other DNA
gaacgacctgaccagctgtgggtggctgattttacttacggtgtgcccggagctcagggcgggcatggatgctta

SEQ ID NO: 788816 - DNA, 75 bp, synthetic construct
  source 1..75: mol_type = other DNA
ctcatcgtctatggaaacgacattcgtgctggatgcactggagcaggcgttttgggcccgacgcccgtccggcac

SEQ ID NO: 788817 - DNA, 75 bp, synthetic construct
  source 1..75: mol_type = other DNA
tcgtggggtggcgggtctcatcgtctatggaaacgacattcgtgctggatgcgctggagcaggcgttgtgggccc

SEQ ID NO: 788818 - DNA, 75 bp, synthetic construct
  source 1..75: mol_type = other DNA
ccgcgtaaaccgtcagttcgtggcagaacgtcctgaccagttgtgggtggctgattttacttgggtcagcacatg

SEQ ID NO: 788819 - DNA, 75 bp, synthetic construct
  source 1..75: mol_type = other DNA
tgggcgatgacgaaagcatcaacgccacaatgaccgcgcgccacggcgcattgtttgaagtcgaatttaacgatg

SEQ ID NO: 788820 - DNA, 75 bp, synthetic construct
  source 1..75: mol_type = other DNA
ggtaaaaaggtccgtacgaccatcagccggaaagctgttgccgcaggcgaccgcgtaaaccgtcagttcgtggca

SEQ ID NO: 788821 - DNA, 75 bp, synthetic construct
  source 1..75: mol_type = other DNA
tcgtgctggatgcactggagcaggcgttgtgggcccgtcggccgtccggcacagtccatcacagtgataaaggtt

SEQ ID NO: 788822 - DNA, 75 bp, synthetic construct
  source 1..75: mol_type = other DNA
tcgtatgacaacgcaatggcggagagcctcaatggtctttacaaagcggagggaatacatcgtaagcgctggaaa

SEQ ID NO: 788823 - DNA, 75 bp, synthetic construct
  source 1..75: mol_type = other DNA
ttattttgcgaaggcggagttcgaccgcctctggaaaaaaataatgccactgctggataagctgcgtgagcagtg

SEQ ID NO: 788824 - DNA, 75 bp, synthetic construct
  source 1..75: mol_type = other DNA
ggcaagattgaagtgctggttgagcggatgctcgacgacaaacgcattcttgcgcatattcgcgcctcgaaagcg

SEQ ID NO: 788825 - DNA, 75 bp, synthetic construct
  source 1..75: mol_type = other DNA
ctcatcgtctatggaaacgacattcgtgctggatgcactggagcaggcgttttgggcccgccgaccgtccggcac

SEQ ID NO: 788826 - DNA, 75 bp, synthetic construct
  source 1..75: mol_type = other DNA
ccgtaagagctggaaaaaccggacagaagtggaacaggccacactaacgtgggtggactggtataacaatcgacg

SEQ ID NO: 788827 - DNA, 75 bp, synthetic construct
  source 1..75: mol_type = other DNA
cctccggcagaagcagaaaaagcttattatgcttccatcggaacaatgatctggcagcctgagttcacagataaa

SEQ ID NO: 788828 - DNA, 75 bp, synthetic construct
  source 1..75: mol_type = other DNA
tcgctggcctacacgcagcggcttaaggaagccggattactggcatcaacagggaacacaggcgactcgtatgac

SEQ ID NO: 788829 - DNA, 75 bp, synthetic construct
  source 1..75: mol_type = other DNA
gcagtgccagtgagtaagaaaagaaccaagatgagccttgggacctaccctcaccttaccctggcaagagcaaga

SEQ ID NO: 788830 - DNA, 75 bp, synthetic construct
  source 1..75: mol_type = other DNA
atgccactgctggataagctgcgtgagcagtacggggtcggaccggtatgtagcgaactgcatattgccccgtca

SEQ ID NO: 788831 - DNA, 75 bp, synthetic construct
  source 1..75: mol_type = other DNA
gtggccagatgcactgtggcacgtctcatggcagttatgggacttgccggtgttctccggggtaaaaaggtccgc

SEQ ID NO: 788832 - DNA, 75 bp, synthetic construct
  source 1..75: mol_type = other DNA
actactggcatcaacaggtagtacaggcgactcgtatgacaacgcgatggcggagagcatcaatggcctttacaa

SEQ ID NO: 788833 - DNA, 75 bp, synthetic construct
  source 1..75: mol_type = other DNA
ctcatcgtctatggaaacgacattcgtgctggatgcgctggagcaggcgttttgggcccggcggccgtccggcac

SEQ ID NO: 788834 - DNA, 75 bp, synthetic construct
  source 1..75: mol_type = other DNA
ctcatcgtctatggaaacgacattcgtgctggatgccctggagcaggcgttttgggcccgacgaccgtccggcac

SEQ ID NO: 788835 - DNA, 75 bp, synthetic construct
  source 1..75: mol_type = other DNA
gaacgacctgaccagctgtgggtggctgatttttacttacgtcagcacatggcagggcttcgtctatgtggcgtt

SEQ ID NO: 788836 - DNA, 75 bp, synthetic construct
  source 1..75: mol_type = other DNA
actcctggcatcaacaggaagtactggcgactcgtatgacaacgcgatggcggagagcatcaatggcctttacaa

SEQ ID NO: 788837 - DNA, 75 bp, synthetic construct
  source 1..75: mol_type = other DNA
acttctggcatcaacagggagtacaggcgactcgtatgacaacgcgatggcggagagcatcaatggcctttacaa

SEQ ID NO: 788838 - DNA, 75 bp, synthetic construct
  source 1..75: mol_type = other DNA
tctctcgttgaactggtgggctcttatcaagaaataaatgcttctctcaaagctaaaattgcagaattcgaaaac

SEQ ID NO: 788839 - DNA, 75 bp, synthetic construct
  source 1..75: mol_type = other DNA
tatcgggcactgggtggtgagttcttctgccacagccagtggcggtgacagcggggataattcggccacgataaa

SEQ ID NO: 788840 - DNA, 75 bp, synthetic construct
  source 1..75: mol_type = other DNA
agcggcaccctgaatcagtcgcagtccggtggaaccagtggttctgtatctgtcaatggttctgtgctggcagtc

SEQ ID NO: 788841 - DNA, 75 bp, synthetic construct
  source 1..75: mol_type = other DNA
aaatcgacgtcgcaggcgaagcagaaaaactgcgtgaacgcctggcgcgcatcaacgcccgcgcaccggtctaca

SEQ ID NO: 788842 - DNA, 75 bp, synthetic construct
  source 1..75: mol_type = other DNA
gcgtcggttgtgactcgcgcgactatcggcggcgttatagaacagtacaatattccgctgtctgagtggacgaca

SEQ ID NO: 788843 - DNA, 75 bp, synthetic construct
  source 1..75: mol_type = other DNA
ggtttaagcgcagcggaaatcgttgagttaatccgcgaagaagccgcagctatttgcagtaaaggcggtgccgta

SEQ ID NO: 788844 - DNA, 75 bp, synthetic construct
  source 1..75: mol_type = other DNA
acaatggtgggaattccgccacgataaatatgtttacggcaagccgtgccattcgtctgttaaatgcagaccttc

SEQ ID NO: 788845 - DNA, 75 bp, synthetic construct
  source 1..75: mol_type = other DNA
gtacagtggtgaccgggcttatctgaatggtgccctgaaccactcgcagtccggcggaaccagtggttctgtctc

SEQ ID NO: 788846 - DNA, 75 bp, synthetic construct
  source 1..75: mol_type = other DNA
gcgttacctgctgcaggtgaagcagcgtaacggtgagtttgtaccgggtggaacctgggcgcgggacagtaagaa

SEQ ID NO: 788847 - DNA, 75 bp, synthetic construct
  source 1..75: mol_type = other DNA
cgctgtacaccagcggggatgtgacaatgaaggttaccggagaagacggacgtgagcagacccaggtattcccat

SEQ ID NO: 788848 - DNA, 75 bp, synthetic construct
  source 1..75: mol_type = other DNA
cactgaacggtaattatgcgccggggcgctacctggttgacctgtccctgaacgggaaggagagcggaaagcaga

SEQ ID NO: 788849 - DNA, 75 bp, synthetic construct
  source 1..75: mol_type = other DNA
gtacagcggtgaccggtcttatctgagtggtgccctgaaccactctcattccggcggaaccagtggttctgtctc

SEQ ID NO: 788850 - DNA, 75 bp, synthetic construct
  source 1..75: mol_type = other DNA
cttctcaatgtcgccatgctggtcacccgtctgaccaaaacgatgaacgtcgatatttacaattactggcactac

SEQ ID NO: 788851 - DNA, 75 bp, synthetic construct
  source 1..75: mol_type = other DNA
gccaaccaccctggcacctggcgtgctggaaggcagtgaaccgacgcctgcaccacagcccgtggtcacagcacc

SEQ ID NO: 788852 - DNA, 75 bp, synthetic construct
  source 1..75: mol_type = other DNA
gactggatgatagcgatacagtaacgcttaaggaagcgacagaagcattgctggattgtgcggaacagcttatcg

SEQ ID NO: 788853 - DNA, 75 bp, synthetic construct
  source 1..75: mol_type = other DNA
caaacgaattgcagagctgaaagctaatcttgtggcgctggcggcggagaatgcggtaataaagtctgcaattcc

SEQ ID NO: 788854 - DNA, 75 bp, synthetic construct
  source 1..75: mol_type = other DNA
caaacgcattgcagagctggagactaatcttgctgcgcttgcggcggagaatgcggggctgaataaatttatcgt

SEQ ID NO: 788855 - DNA, 75 bp, synthetic construct
  source 1..75: mol_type = other DNA
gcctgcaacctcgcctgcaatggtgacaccgcaagccgcctcgcaaagcgccagcggcaactttatggtgcaagt

SEQ ID NO: 788856 - DNA, 75 bp, synthetic construct
  source 1..75: mol_type = other DNA
tagtgcatcaggcagacatgtgaatcctatgtttttagggacgactctgtttatagcgaaaaaattaaaatttaa

SEQ ID NO: 788857 - DNA, 75 bp, synthetic construct
  source 1..75: mol_type = other DNA
aagggacgcaatatcgatgctcaggagatccagaaacgctacggcatggtcggcgatccggtgattatcggcgta

SEQ ID NO: 788858 - DNA, 75 bp, synthetic construct
  source 1..75: mol_type = other DNA
aactggttgtagagcataaagatactctgcaacctgccgatttttatcaggatttcaaactgcggggcattcgct

SEQ ID NO: 788859 - DNA, 75 bp, synthetic construct
  source 1..75: mol_type = other DNA
atcatgctcaggaccagataatcgccccaataagcgattcatagcagcagccaatccggctaccgtgctggcact

SEQ ID NO: 788860 - DNA, 75 bp, synthetic construct
  source 1..75: mol_type = other DNA
tcaccggttttttaggcgcgggcaaaaccaccctgctgcgccatattcttaacgaacagcacggctataagattg

SEQ ID NO: 788861 - DNA, 75 bp, synthetic construct
  source 1..75: mol_type = other DNA
ggtccgttctccatcacggatgtgccgctgtacaccagtggtgatgtgaccatgaaaatcaccggtgaagacggg

SEQ ID NO: 788862 - DNA, 75 bp, synthetic construct
  source 1..75: mol_type = other DNA
gatattcagctcaaattgcttcgtagcttcgacgcctcagaacaacgcaaaacgcgatctgataaagcggcatcg

SEQ ID NO: 788863 - DNA, 75 bp, synthetic construct
  source 1..75: mol_type = other DNA
tgtattgcgaaaactgcgacgacgatggcatggtcgtaaaaaccgaaaaaggttgcggcctcatgctgtatcaag

SEQ ID NO: 788864 - DNA, 75 bp, synthetic construct
  source 1..75: mol_type = other DNA
attgaagataacgccgcagcgccagagccagaacgcattgttcttgatgaaaaaataaaaattcatcctgattta

SEQ ID NO: 788865 - DNA, 75 bp, synthetic construct
  source 1..75: mol_type = other DNA
gtcactttccggctggcaacggagttattacccggcctctgcaatcagtgctcaccgccagcaaaaggacagcgg

SEQ ID NO: 788866 - DNA, 75 bp, synthetic construct
  source 1..75: mol_type = other DNA
gaaggccaatatcgggcactgggtggtgagttcttcggccacggccagcacgggtgacggcggagaaaattccgc

SEQ ID NO: 788867 - DNA, 75 bp, synthetic construct
  source 1..75: mol_type = other DNA
gaatgaccgcttcagttatggttttggcggtggtcgtgatggtgatggcggtgccagcagttatctgaacgcgtc

SEQ ID NO: 788868 - DNA, 75 bp, synthetic construct
  source 1..75: mol_type = other DNA
tgcactgtctggttacacaggtagcccgctggtcgttctggccgcgagattgttgattattacaggtgttcgtac

SEQ ID NO: 788869 - DNA, 75 bp, synthetic construct
  source 1..75: mol_type = other DNA
gatccgcagtaataacggcgtacagatggtaatcgcgcctcatatcgttaacaaaatgcagcagcaggaggtcca

SEQ ID NO: 788870 - DNA, 75 bp, synthetic construct
  source 1..75: mol_type = other DNA
ggagctttatgaacgcctgggctatcgggacatgattcaactgcgccagggcatttcacgggcgcggttaacgtt

SEQ ID NO: 788871 - DNA, 75 bp, synthetic construct
  source 1..75: mol_type = other DNA
ggctgcggcttcatactgtatcaagatgataaatttgtttgcccgcgatgcggtggtcgtggtgagatagagatc

SEQ ID NO: 788872 - DNA, 75 bp, synthetic construct
  source 1..75: mol_type = other DNA
tgtattgcgaaaactgcgacgacgacggcatggttgttaaaactgaaaaaggctgcggcttcatactgtatcaag

SEQ ID NO: 788873 - DNA, 75 bp, synthetic construct
  source 1..75: mol_type = other DNA
cggcagccgcaatctatagcggtaacaattatcagcgagaaatgaacgtcaaacgtgcgattgagcagtatttcg

SEQ ID NO: 788874 - DNA, 75 bp, synthetic construct
  source 1..75: mol_type = other DNA
atttcaacgcgtcgtacagtggtgaccgggcatatctgagtggtgcgctgaattattcgcagtccggcggaacca

SEQ ID NO: 788875 - DNA, 75 bp, synthetic construct
  source 1..75: mol_type = other DNA
gaaacggaatatgacgttacctctccccaaaagagaatggggagaagattttctgcatgtgcattttatgcctgg

SEQ ID NO: 788876 - DNA, 75 bp, synthetic construct
  source 1..75: mol_type = other DNA
gcttattccccatcttgaatttgatgaccggggcgatctgacggccgcttcggtgacagcagagctgtgggggaa

SEQ ID NO: 788877 - DNA, 75 bp, synthetic construct
  source 1..75: mol_type = other DNA
acctttgcccgaccccgactggctgcggaagtgtccagcccggacggcacattaacggaaaataacgaagtatgg

SEQ ID NO: 788878 - DNA, 75 bp, synthetic construct
  source 1..75: mol_type = other DNA
cgacagagctgtggtcgcagtcaaatcatggtcgccagccgaaggatgaatggaatgccggtatcagtcagtcgg

SEQ ID NO: 788879 - DNA, 75 bp, synthetic construct
  source 1..75: mol_type = other DNA
tggctgacgaaggccgggatttacgtcagtgcagattactttcgtgagggatatgacgccacacgacagtgctat

SEQ ID NO: 788880 - DNA, 75 bp, synthetic construct
  source 1..75: mol_type = other DNA
ccgtcgggccgcacttgcgcttgccgtatcagctgcttttgccagtgccacaggtattgcaggtgaaaaactgga

SEQ ID NO: 788881 - DNA, 75 bp, synthetic construct
  source 1..75: mol_type = other DNA
gaaacgtaacaagactttgcctctcccaaaaagagaatggggagaaaattatctgcacgtgcattttatgcctgg

SEQ ID NO: 788882 - DNA, 75 bp, synthetic construct
  source 1..75: mol_type = other DNA
acggttttacttcaggcatggttaccggtatagggcatttgggggcagtatcagttgatggagcatatgcttctg

SEQ ID NO: 788883 - DNA, 75 bp, synthetic construct
  source 1..75: mol_type = other DNA
gaacagttatgactggaatacggtgacggtggatgcagggacattgccgctggatacggagctgggcaatacaag

SEQ ID NO: 788884 - DNA, 75 bp, synthetic construct
  source 1..75: mol_type = other DNA
tctcaggaagtttagtctccaggattcccggggcggttcagttttttaagatggtgaggtacttcgggttccttg

SEQ ID NO: 788885 - DNA, 75 bp, synthetic construct
  source 1..75: mol_type = other DNA
tcatcagttttggcaacaacatctacagctccggtctctcctttctggtttcctggagcacattcgttggtgtgg

SEQ ID NO: 788886 - DNA, 75 bp, synthetic construct
  source 1..75: mol_type = other DNA
aatttgaccaaaagcttacgcgtggttatgcccgctgggggcgttgggtgtggcggatgctaatagcgatccccg

SEQ ID NO: 788887 - DNA, 75 bp, synthetic construct
  source 1..75: mol_type = other DNA
ctgcagcctgatatggaacatcttcttgccgggctcatcgccattgatgctgccagagctgctgtgttgtgcaat

SEQ ID NO: 788888 - DNA, 75 bp, synthetic construct
  source 1..75: mol_type = other DNA
cttttgcggggctttgttctgcgcttgaaaaccgcctggcacgttcagggggcatggaggcactggtcccccaga

SEQ ID NO: 788889 - DNA, 75 bp, synthetic construct
  source 1..75: mol_type = other DNA
tactacctgattcgcgcctttgacagtgctgaaagtatgagtgcggttctcgatgctttttacgcaagcgcagac

SEQ ID NO: 788890 - DNA, 75 bp, synthetic construct
  source 1..75: mol_type = other DNA
tatattttgcgcatggtgcccaaaggcacgcacgacgtgaagaaatttataaaaccggcagaactgctgggctgg

SEQ ID NO: 788891 - DNA, 75 bp, synthetic construct
  source 1..75: mol_type = other DNA
ggcatatgaccgggctgcattacaaccctatcactaacacctttaagctcggccccggcgttgatgtgaactata

SEQ ID NO: 788892 - DNA, 75 bp, synthetic construct
  source 1..75: mol_type = other DNA
gacatataaccgggctacattacaacccgatcactaatacttttaaactcggccccggcgtggatgtgaactata

SEQ ID NO: 788893 - DNA, 75 bp, synthetic construct
  source 1..75: mol_type = other DNA
agtgtgctcacgacgtagaagcagtattgtcgagtgactcctatcctttcttcctcgacgccatgtacggcgaca

SEQ ID NO: 788894 - DNA, 75 bp, synthetic construct
  source 1..75: mol_type = other DNA
tccgggttcgctggatgtcctacgttatgtaaagtctttaggcgataacgtacgtctggtgctggggaatcacga

SEQ ID NO: 788895 - DNA, 75 bp, synthetic construct
  source 1..75: mol_type = other DNA
ctaccgcgtagtaactgaccgcaccatcgacagccacattaaaaacctgcgtcgcaagctggaagctctggacga

SEQ ID NO: 788896 - DNA, 75 bp, synthetic construct
  source 1..75: mol_type = other DNA
acaccttacgcaaaggcagcggtgccgcttttcacgccataatgcaggaaatcagtgttcccctacaccaaagcc

SEQ ID NO: 788897 - DNA, 75 bp, synthetic construct
  source 1..75: mol_type = other DNA
tttgctatggctgcaacagcattactggcaaagccgttactctgtctcctttccgcgcctgcgcccgtgtactgg

SEQ ID NO: 788898 - DNA, 75 bp, synthetic construct
  source 1..75: mol_type = other DNA
atgaaaaccttcagcgatcgctggcgacaactggactgggacgacatccgcctgcgtatcaacagcaaaacggct

SEQ ID NO: 788899 - DNA, 75 bp, synthetic construct
  source 1..75: mol_type = other DNA
tggatatgggttttgaaccgctacaggttgcaaagctacacgcgctggaaagcggtattcaggtggagtacgtgc

SEQ ID NO: 788900 - DNA, 75 bp, synthetic construct
  source 1..75: mol_type = other DNA
gagaatttctttggtcacctgaaagaagaaatttactatcgccgggactacagaaatgtagaagagctggaaaat

SEQ ID NO: 788901 - DNA, 75 bp, synthetic construct
  source 1..75: mol_type = other DNA
ccgaaaaatagaaatcctgctgggaacgctggtggcaatcgatccggtacgggcagcggtactgtgtgactcgca

SEQ ID NO: 788902 - DNA, 75 bp, synthetic construct
  source 1..75: mol_type = other DNA
ccggtggatgcgccgcaggtacagaccatcacctccgggcgcgacctgctcgaccaggcgaaagtgctggcccgt

SEQ ID NO: 788903 - DNA, 75 bp, synthetic construct
  source 1..75: mol_type = other DNA
ggcgcactgcgcgttttattcccggaaattgacgccctgtttggcgttccggcccctgccaggtggcatccggaa

SEQ ID NO: 788904 - DNA, 75 bp, synthetic construct
  source 1..75: mol_type = other DNA
gttcttccaggtactgcgcgattgcggcgcactgcgcgttttattcccggaaattgacgccctgttcggcgttcc

SEQ ID NO: 788905 - DNA, 75 bp, synthetic construct
  source 1..75: mol_type = other DNA
taaataaggggctggaaagccttgcagaaggagaaaaaccgctgctccacagtgatcaagggtggcattaccgga

SEQ ID NO: 788906 - DNA, 75 bp, synthetic construct
  source 1..75: mol_type = other DNA
gtcttaccggggaaatatgggactcgctgcagaaaatatccttcagcggcagttcaaagcggaagctccctgtga

SEQ ID NO: 788907 - DNA, 75 bp, synthetic construct
  source 1..75: mol_type = other DNA
aaagcatgccggacagtatgatgtggtaacctgcatggagatgctggagcacgttcccgatccgcagtcagtggt

SEQ ID NO: 788908 - DNA, 75 bp, synthetic construct
  source 1..75: mol_type = other DNA
gtggatcagaccagtcttaaagaacgtcatatgaccgggctgcattacaacccgatcactaactcctttaagctc

SEQ ID NO: 788909 - DNA, 75 bp, synthetic construct
  source 1..75: mol_type = other DNA
tactggcgctggagccggaagcactggagatggcagacagtcagggcgtggaagcggcgctgggctggatacaga

SEQ ID NO: 788910 - DNA, 75 bp, synthetic construct
  source 1..75: mol_type = other DNA
aactgctggagcaggccgacctgatgttcagcaccggcgtcagccatttctggctggatatccagtggtatctgc

SEQ ID NO: 788911 - DNA, 75 bp, synthetic construct
  source 1..75: mol_type = other DNA
aatcaaaaaagaataaaactcagtcttgggggactcagtccggtagaataccggactgagtatcaaaaagccggt

SEQ ID NO: 788912 - DNA, 75 bp, synthetic construct
  source 1..75: mol_type = other DNA
gtgcgccagacaccaccggatctgatcctgttggatctgatgctccctggcaccgatggcctgacgctgtgccgg

SEQ ID NO: 788913 - DNA, 75 bp, synthetic construct
  source 1..75: mol_type = other DNA
ggcatgacatgccaaatgaccccaagtggcgaactattgccagggtctcaggacagccaatcgcaacagtgatgg

SEQ ID NO: 788914 - DNA, 75 bp, synthetic construct
  source 1..75: mol_type = other DNA
cgtcgccggattttcgacggcgtgctgcgctgtggggaacggtcctgccggaaccggaatttacacctgctgaac

SEQ ID NO: 788915 - DNA, 75 bp, synthetic construct
  source 1..75: mol_type = other DNA
cgattgctagggtgtcagggcagtcaatagcaactgttatggctgtttatgtccacctcctggtggatgcgtcac

SEQ ID NO: 788916 - DNA, 75 bp, synthetic construct
  source 1..75: mol_type = other DNA
aacccaaagagctaaaccccacacataacgcacgcgagagtgctccgaccagtgagcagaaagttttgtcgttac

SEQ ID NO: 788917 - DNA, 75 bp, synthetic construct
  source 1..75: mol_type = other DNA
atgggggaggtgtattcgaaccgctggacccagaagaacggggccgcaccttcgaagctctggattgcccagatt

SEQ ID NO: 788918 - DNA, 75 bp, synthetic construct
  source 1..75: mol_type = other DNA
cagacagccgaacctgaatacctggacggcctgagcgaaccgatcgggaaattttcgatgactactgtctggcag

SEQ ID NO: 788919 - DNA, 75 bp, synthetic construct
  source 1..75: mol_type = other DNA
tcgcctccatgcgcctgtttgcccgcttatccctggatagcgccatgccggagcgcaccaccatcatgaatttcc

SEQ ID NO: 788920 - DNA, 75 bp, synthetic construct
  source 1..75: mol_type = other DNA
aaattcgggcagcacgtgagcagtgggaacgtgaaaacggatttatcagcgacggaaacggcctggaagctgtgg

SEQ ID NO: 788921 - DNA, 75 bp, synthetic construct
  source 1..75: mol_type = other DNA
tcgcctccatgcgcctgtttgcccgcttatccctggatagcgccgtgccggaacgcaccaccatcatgaatttcc

SEQ ID NO: 788922 - DNA, 75 bp, synthetic construct
  source 1..75: mol_type = other DNA
tcgcctccatgcgcctgtttgcccgcttatccctggatagcgccttgccggatcgcaccaccatcatgaatttcc

SEQ ID NO: 788923 - DNA, 75 bp, synthetic construct
  source 1..75: mol_type = other DNA
atcctcaatgctgggaacatcgcttgtattgccgttacataaagggcgtattcagaccggcacctggcaaggcat

SEQ ID NO: 788924 - DNA, 75 bp, synthetic construct
  source 1..75: mol_type = other DNA
ggcttcgtgaaagccagatacaaggggctgctgaaaaacgataaccaactggggatgttattcaccctggccaac

SEQ ID NO: 788925 - DNA, 75 bp, synthetic construct
  source 1..75: mol_type = other DNA
cgatggcctgacgctgtgccgggaaattcgtcgtttttctgacattccgatcgtgatggtgacagcaaaaatcga

SEQ ID NO: 788926 - DNA, 75 bp, synthetic construct
  source 1..75: mol_type = other DNA
tcgcctccatgcggctgtttgcccgattatccctggatagcgccctgccggagcgcaccaccatcatgaatttcc

SEQ ID NO: 788927 - DNA, 75 bp, synthetic construct
  source 1..75: mol_type = other DNA
atgtttgtcatctggagccatgaaaaagggttcatcatgagtcatcagctcaccttcgccgacagtgaattcagc

SEQ ID NO: 788928 - DNA, 75 bp, synthetic construct
  source 1..75: mol_type = other DNA
tcccgcatggagcagattctgccatggcagaatatgaccgctgtcatcgagccgttttatctcaaggcgggcaat

SEQ ID NO: 788929 - DNA, 75 bp, synthetic construct
  source 1..75: mol_type = other DNA
tctggtaacggatgaaattctgaatcaactggcagatatgccgcgtgttaatgtcggtttactgcacctgttgct

SEQ ID NO: 788930 - DNA, 75 bp, synthetic construct
  source 1..75: mol_type = other DNA
atggcttccagtaaatcgctacagcaggcaattgccaacataaaaatttggcaccaaggtgaacagcgcgcaccg

SEQ ID NO: 788931 - DNA, 75 bp, synthetic construct
  source 1..75: mol_type = other DNA
cctccatgcgcctgtttgcccgattatccctggatagcgccctgccggatcgcaccaccatcatgaatttccgcc

SEQ ID NO: 788932 - DNA, 75 bp, synthetic construct
  source 1..75: mol_type = other DNA
gtcagttgttacgggaaggaatcagggtggccagatgtacagtggcgcgcctcatggcggttatgggactttccg

SEQ ID NO: 788933 - DNA, 75 bp, synthetic construct
  source 1..75: mol_type = other DNA
tcgggtggtgttcagcaaaacctcatccatcggtaccaggcgtacgtcagggggataccccgttcaggaagacac

SEQ ID NO: 788934 - DNA, 75 bp, synthetic construct
  source 1..75: mol_type = other DNA
ctcaggtatttaccatgaatctggtgatgctgggcggtgccggacacctgtactttaacggtaacgagcagacac

SEQ ID NO: 788935 - DNA, 75 bp, synthetic construct
  source 1..75: mol_type = other DNA
gccggagaaggaagtcattgtggataacggagccacctttgagccgttgtccggttcgctgaacagtgtcacacc

SEQ ID NO: 788936 - DNA, 75 bp, synthetic construct
  source 1..75: mol_type = other DNA
gcgcaacgggttcaaggtttgctttcatgaccgctttatagctgtaaccagtaccggagaacagccagatgctat

SEQ ID NO: 788937 - DNA, 75 bp, synthetic construct
  source 1..75: mol_type = other DNA
cttttttacaggggtggttcaatacttcatgatacgagtcaaattcggatcccggacccggttctgttttacctg

SEQ ID NO: 788938 - DNA, 75 bp, synthetic construct
  source 1..75: mol_type = other DNA
ggaagtgacgaaggcaaagccggtgacgcgcaccatcacatcagcgaacattgaccgtctgcgtgtcaccttcgg

SEQ ID NO: 788939 - DNA, 75 bp, synthetic construct
  source 1..75: mol_type = other DNA
ggtgccggaatcgaaaatacgtctgacggaattcagagtcagatcctgatgcaggcagatcgtattgcgatgatt

SEQ ID NO: 788940 - DNA, 75 bp, synthetic construct
  source 1..75: mol_type = other DNA
cgcaggccgcctgtttttcaatggcgagcgaatcgacgtatatgacgataacaatgtgttaagagtacgactggg

SEQ ID NO: 788941 - DNA, 75 bp, synthetic construct
  source 1..75: mol_type = other DNA
catctggctcaggagctgtggacgcagattgataacggtcagcttgcgcctgacctgactgaaatcaggacgtcc

SEQ ID NO: 788942 - DNA, 75 bp, synthetic construct
  source 1..75: mol_type = other DNA
cgcgatgaaaggcgcggtcaccggagcgctggtgttcgaaggactggcgaaagatctcgacgaggcggctgaact

SEQ ID NO: 788943 - DNA, 75 bp, synthetic construct
  source 1..75: mol_type = other DNA
gaaatcacacagaccgtcaataagaaactggaagatcagagtgcagcgatccagcagatacagaaggttcaggtt

SEQ ID NO: 788944 - DNA, 75 bp, synthetic construct
  source 1..75: mol_type = other DNA
agctggttgcgaaaaagaatgaggatcagacactggccatcgcgcaggtgagccagaaagtggaccgggtgagca

SEQ ID NO: 788945 - DNA, 75 bp, synthetic construct
  source 1..75: mol_type = other DNA
ggattgaggatactgatggtcagacgctgagcaacatactgctgcaggctgaccgtatagcgatgattaacccgc

SEQ ID NO: 788946 - DNA, 75 bp, synthetic construct
  source 1..75: mol_type = other DNA
tcggccggtgcgaacaactggacgccgacaacgtacatcagtgatttactggttgtggtcatgaaaaaatccacg

SEQ ID NO: 788947 - DNA, 75 bp, synthetic construct
  source 1..75: mol_type = other DNA
gccagtggccgggcgagcaatgatgcagaagggtatctggggctgtttcgggaaaagataggaaaactgcatctg

SEQ ID NO: 788948 - DNA, 75 bp, synthetic construct
  source 1..75: mol_type = other DNA
tgtttgcggtgagcatcacctcgtccggcaatcccccgacgttctccctgacgccggagggcaggctgacggccc

SEQ ID NO: 788949 - DNA, 75 bp, synthetic construct
  source 1..75: mol_type = other DNA
ccggttcactgaacagcgtcatcccgccggcagtgcagcacctcacggtggaggtgagtgcctcagacggccagt

SEQ ID NO: 788950 - DNA, 75 bp, synthetic construct
  source 1..75: mol_type = other DNA
gcgaccgcgcctgcaatcgtcgcgctggtgggcggcacggtggaagaggctatcgatttctcccgtcagatgcgt

SEQ ID NO: 788951 - DNA, 75 bp, synthetic construct
  source 1..75: mol_type = other DNA
gacaacattgccgattcaccgctggcggacaaaatcgctgccgctaatcagcaggcgctggaacgcattatccaa

SEQ ID NO: 788952 - DNA, 75 bp, synthetic construct
  source 1..75: mol_type = other DNA
atccggtgctgattggttttgatcaggcgattaacgtggtgccgggcatgacgccgaaaaccattcttcacgccg

SEQ ID NO: 788953 - DNA, 75 bp, synthetic construct
  source 1..75: mol_type = other DNA
cacattaagcccgggaaggatttctggttttatgtacgcagcgttaacctggtggggaaatctgcttttgttgaa

SEQ ID NO: 788954 - DNA, 75 bp, synthetic construct
  source 1..75: mol_type = other DNA
agacggtcccggatggtttcgggggcacagagccgcggatgacctttaatgcgtacctgtcacaacagcgtaagg

SEQ ID NO: 788955 - DNA, 75 bp, synthetic construct
  source 1..75: mol_type = other DNA
atcgtggatggttttcaccgccatgaaattggtaaaggctcatcatcgttaaaattacgcttaaaaggttatttg

SEQ ID NO: 788956 - DNA, 75 bp, synthetic construct
  source 1..75: mol_type = other DNA
ctgtgatacatggtgtgaccgcggtctggcgcgccggggagcaggagcagacaccacctgaaggctttgagtcct

SEQ ID NO: 788957 - DNA, 75 bp, synthetic construct
  source 1..75: mol_type = other DNA
cgctgggacacgccgaaggtggtgaagggcgtgagctttatgcttcgcctgaccgtggcagcggatgacggcagt

SEQ ID NO: 788958 - DNA, 75 bp, synthetic construct
  source 1..75: mol_type = other DNA
ccggggaaggatttctggttttatgtgcgcagcgtcaacctggtggggaaatctgcgtttgtggaagccagtggc

SEQ ID NO: 788959 - DNA, 75 bp, synthetic construct
  source 1..75: mol_type = other DNA
cattcaggtgccgtcaaactatgacccggaaaaacgcacctacagcggtatctgggacggcagtctgaaaccggc

SEQ ID NO: 788960 - DNA, 75 bp, synthetic construct
  source 1..75: mol_type = other DNA
ttaatgcacctgcggtacccgccacgattgagctgacaccgggctattttcagataacagcggtcccgcgtcttg

SEQ ID NO: 788961 - DNA, 75 bp, synthetic construct
  source 1..75: mol_type = other DNA
cctgcaagagttgtttgccgaccgtcaaaagagttgtttgccgaccgtcaatattcccgcgcctggacggttaaa

SEQ ID NO: 788962 - DNA, 75 bp, synthetic construct
  source 1..75: mol_type = other DNA
atctggctcaggagctgtggacgcagattgataacggtcagcttgcgcctgacctggctgaaatcaggacgtcca

SEQ ID NO: 788963 - DNA, 75 bp, synthetic construct
  source 1..75: mol_type = other DNA
acatatcgcttcacgcagctggcgctggggcggtacacgctgacagtccgggcggtaaatgcatggggacagcag

SEQ ID NO: 788964 - DNA, 75 bp, synthetic construct
  source 1..75: mol_type = other DNA
tacctggataaaaagcagtaaaggcatccggattccgaccacgaagaaatcacttcccaaattaacagcgtgcag

SEQ ID NO: 788965 - DNA, 75 bp, synthetic construct
  source 1..75: mol_type = other DNA
ataccggtgcttattatctggctatagcctttaaaaaatggggcgtctcctgggaggccgttggtgcatacaacg

SEQ ID NO: 788966 - DNA, 75 bp, synthetic construct
  source 1..75: mol_type = other DNA
caggattcaggaaaaccgaacgccagaaccagcagacgtcttgcctatgcatcagatgtttaccggatttacagc

SEQ ID NO: 788967 - DNA, 75 bp, synthetic construct
  source 1..75: mol_type = other DNA
ggaaaaaataggaaaactgcatctggctcaggggctgtgggagctgatagataacagccagcttgcagatgagat

SEQ ID NO: 788968 - DNA, 75 bp, synthetic construct
  source 1..75: mol_type = other DNA
actggatgagttttcgaaagagtggaaggacgctaacgataaatggaatgccatgtggggcgtcaaaattgagca

SEQ ID NO: 788969 - DNA, 75 bp, synthetic construct
  source 1..75: mol_type = other DNA
ggtatctggggctgtttcgggaaaaaataggaaaactgcatctggctcaggggctgtgggagctgatagacaaca

SEQ ID NO: 788970 - DNA, 75 bp, synthetic construct
  source 1..75: mol_type = other DNA
gtggagtgtatccggcccgcacattaagcccgggaaggatttctggttttacgtgcgcagcgtcaacctggtggg

SEQ ID NO: 788971 - DNA, 75 bp, synthetic construct
  source 1..75: mol_type = other DNA
tatgccgagtggcaggggaagcgtcactctggagtttaaggttttccataaaggcaatcagcgggcaggtaatat

SEQ ID NO: 788972 - DNA, 75 bp, synthetic construct
  source 1..75: mol_type = other DNA
acgctgatttacagtggcgttattgatatgcctgccggtcacggtcacatgacgctggagttttcggtgtcagca

SEQ ID NO: 788973 - DNA, 75 bp, synthetic construct
  source 1..75: mol_type = other DNA
tggctggtaaataactggtatcccacagcaagtatcagcgatctgctggttgtggtgatgaaaaaatccacagca

SEQ ID NO: 788974 - DNA, 75 bp, synthetic construct
  source 1..75: mol_type = other DNA
cccgccaccattgagctgacgccggggtattttcagataacggcggtcccgcgtcttgcggtgtatgacccgacg

SEQ ID NO: 788975 - DNA, 75 bp, synthetic construct
  source 1..75: mol_type = other DNA
gctgtactggatagctgccagtatcaatattaagccgggccatgattattatttttacgttcgcagtgtgaacac

SEQ ID NO: 788976 - DNA, 75 bp, synthetic construct
  source 1..75: mol_type = other DNA
acaggaaatctttcagcaacccgcgacggatgtcagcagggtattttcatccgtcattgatatgcctgccggaca

SEQ ID NO: 788977 - DNA, 75 bp, synthetic construct
  source 1..75: mol_type = other DNA
agaacggcaacaccacgccgctgtttgtggcgcaggggaatcagctgttcatgaacgacgtgttcctgaagcgac

SEQ ID NO: 788978 - DNA, 75 bp, synthetic construct
  source 1..75: mol_type = other DNA
aaaaaagggagtgaaattacctcgaccacggataaaaagctgggtgaccaggccgtgaccatacagcaaatccag

SEQ ID NO: 788979 - DNA, 75 bp, synthetic construct
  source 1..75: mol_type = other DNA
agatatgccggcaggacggggtcatgtcaccctgacgtttaatgtgtcgtcgaccggcgcgaacaaatggacgcc

SEQ ID NO: 788980 - DNA, 75 bp, synthetic construct
  source 1..75: mol_type = other DNA
ggaggacacgcaggccattctccgttacggtcgtaacgtcacgaagatggatgcttttggctgtaccagccgggg

SEQ ID NO: 788981 - DNA, 75 bp, synthetic construct
  source 1..75: mol_type = other DNA
ccagtgctggacagtgaggggaataccaatatctccggtgtcacggtggtgttccgggcaggtgagcaggagcag

SEQ ID NO: 788982 - DNA, 75 bp, synthetic construct
  source 1..75: mol_type = other DNA
atatgcctgccggacaggggacgctgacactgacattcaccgtatcttcatcaggagcgaataactggacaccaa

SEQ ID NO: 788983 - DNA, 75 bp, synthetic construct
  source 1..75: mol_type = other DNA
aatctgcccgttatctggggaccggcagtcagtggactgtccagggcgatcggattaagccggggatggatttct

SEQ ID NO: 788984 - DNA, 75 bp, synthetic construct
  source 1..75: mol_type = other DNA
acaacgtcacgattaatgagaactgtcagattaaggggaaactgtcagccaaccagattgaaggcgatattgtca

SEQ ID NO: 788985 - DNA, 75 bp, synthetic construct
  source 1..75: mol_type = other DNA
ctggcgcgccggggagcaggagcagacaccacccgaaggctttgagtcctccggggcggaaaccgcactgggcgt

SEQ ID NO: 788986 - DNA, 75 bp, synthetic construct
  source 1..75: mol_type = other DNA
ttatctggcaatagcttttaaaaaatggggcgtcgcctgggaggccgttggtgcatacaatgcaggattcaggaa

SEQ ID NO: 788987 - DNA, 75 bp, synthetic construct
  source 1..75: mol_type = other DNA
tagtacggaaaaacggtgctgaaatttataaccgtaccgcgctggataatacgctggtttacagtggtgttattg

SEQ ID NO: 788988 - DNA, 75 bp, synthetic construct
  source 1..75: mol_type = other DNA
ttatctggcaatagcatttaaaaaatggggcgtcgcctgggaggccgttggtgcatacaatgctggattcaggaa

SEQ ID NO: 788989 - DNA, 75 bp, synthetic construct
  source 1..75: mol_type = other DNA
caggaaaagaaacgccagaaatacgcgcaagaaattcaggcgatttatatggatatcaagaaaaatacgccacca

SEQ ID NO: 788990 - DNA, 75 bp, synthetic construct
  source 1..75: mol_type = other DNA
tttaccggatttataccgggataaagagcagtaaaggcatccaggttccgaccacgaagaaatcacttccggaaa

SEQ ID NO: 788991 - DNA, 75 bp, synthetic construct
  source 1..75: mol_type = other DNA
ctcaacattgtctcacagaacgaatacgctgtaggtaaaatgcagatacactcacaaaattttttacacctggca

SEQ ID NO: 788992 - DNA, 75 bp, synthetic construct
  source 1..75: mol_type = other DNA
cgtggctggtgaatgactggtatcccacggcaagcatcagcgatttgctggttgtggtgatgaagaaatccacag

SEQ ID NO: 788993 - DNA, 75 bp, synthetic construct
  source 1..75: mol_type = other DNA
agcttcctgcttcgcctgaccgtggcagcggacgatggcagtgagcggctggtcagtacggccaggacgacggaa

SEQ ID NO: 788994 - DNA, 75 bp, synthetic construct
  source 1..75: mol_type = other DNA
acataccgcttcaggcagctggcgttggggcgttacacgctgacagtccgggcggtaaatgcccggggacagcag

SEQ ID NO: 788995 - DNA, 75 bp, synthetic construct
  source 1..75: mol_type = other DNA
gctacggcatggggaaacgccttggtgcggcagatgtggataaatgggcgctgtacgttatcggccagtactgcg

SEQ ID NO: 788996 - DNA, 75 bp, synthetic construct
  source 1..75: mol_type = other DNA
agaaatgctgatatcagcggtaacgtgaatgcgaactccgggacgctcaataatgtcacggtaaatgaaaactgt

SEQ ID NO: 788997 - DNA, 75 bp, synthetic construct
  source 1..75: mol_type = other DNA
ggtggtggataacctgccgccgcgaccgttcaatatcaggatgcgcaggctgacaccggacagcaccacagacca

SEQ ID NO: 788998 - DNA, 75 bp, synthetic construct
  source 1..75: mol_type = other DNA
ctcccagcattttaaggaactgtcccgttatggaatagaaccggaacacctagtaacagatccttgcatgaatat

SEQ ID NO: 788999 - DNA, 75 bp, synthetic construct
  source 1..75: mol_type = other DNA
attttccagaaaggcaatcagggcgcaggtaacatcacagactgtacggtgattgtgaccaaaaaagctgcttcc

SEQ ID NO: 789000 - DNA, 75 bp, synthetic construct
  source 1..75: mol_type = other DNA
gctctggataatactctgatttacacgggtgttattgatatgcctgcaggcagtggcgtaatgacactggagttt

SEQ ID NO: 789001 - DNA, 75 bp, synthetic construct
  source 1..75: mol_type = other DNA
cgatagaaggtccggtggatggattaaaaagcgtgctgctgaacagtacaccggtgctggacagtgagggaaata

SEQ ID NO: 789002 - DNA, 75 bp, synthetic construct
  source 1..75: mol_type = other DNA
tggtgggtggcacggtggaagaggctatcgatttctcccgtcagatgcgcgaaatcacccttggcgaaaacccca

SEQ ID NO: 789003 - DNA, 75 bp, synthetic construct
  source 1..75: mol_type = other DNA
cgactgcgtgggatcgatggcgggtgttacctcggcctcgatgtttatgcacatcgtaaaaaacaaaacctacgg

SEQ ID NO: 789004 - DNA, 75 bp, synthetic construct
  source 1..75: mol_type = other DNA
catgacgctggagttttcggtgtcagcatggctggtaaatgactggtatcccacagcaagtatcagtgatttgct

SEQ ID NO: 789005 - DNA, 75 bp, synthetic construct
  source 1..75: mol_type = other DNA
gtcaccattaatgaaaactgtgtcatcagagggaaactgtctgctaatcagattgaaggcgatctcgtcaaaacg

SEQ ID NO: 789006 - DNA, 75 bp, synthetic construct
  source 1..75: mol_type = other DNA
gaaacccgcaatgaaatcacacagacggtcaataaaatcctggaagaccagagtgtcaccatacagcagatacag

SEQ ID NO: 789007 - DNA, 75 bp, synthetic construct
  source 1..75: mol_type = other DNA
cacgcaactggaagaagacatccgccagcggctggagacggatgttgcggaagtgacccgaaaaatcggggaggc

SEQ ID NO: 789008 - DNA, 75 bp, synthetic construct
  source 1..75: mol_type = other DNA
gatggtgtggagacatacggtgtatggggactctccctgccgtcactgcgtcgtcgcctgttccgctgtgtttcc

SEQ ID NO: 789009 - DNA, 75 bp, synthetic construct
  source 1..75: mol_type = other DNA
tcgtcgaccggtgcaaataactggacgccgacaacgtacatcagtgatttactggttgtggtcatgaaaaaatcc

SEQ ID NO: 789010 - DNA, 75 bp, synthetic construct
  source 1..75: mol_type = other DNA
cacgccgaaggtggtgaagggcgtgagtttcatgcttcgcctgaccgtggcagcggatgacggcagtgagcggct

SEQ ID NO: 789011 - DNA, 75 bp, synthetic construct
  source 1..75: mol_type = other DNA
cgtcaccgacggcgtgaaggtgaaagtgagccgtgttcctgacggcgttgccggatacagcgtgtgggggctgaa

SEQ ID NO: 789012 - DNA, 75 bp, synthetic construct
  source 1..75: mol_type = other DNA
aacagagctacccgaacacagccatagtggggctgcaggtggatgcggagcagttcggtgggcagcagatggcgg

SEQ ID NO: 789013 - DNA, 75 bp, synthetic construct
  source 1..75: mol_type = other DNA
atcagaacggacgccggatttattcaggcaggtcagtggcagagccgggaattttcagcgggatcatcgatatgc

SEQ ID NO: 789014 - DNA, 75 bp, synthetic construct
  source 1..75: mol_type = other DNA
gcgcttcagtctgcgcctgaccagcggaaccggtgaaaacagccgtctggtgaccagcgccatcactgccgatac

SEQ ID NO: 789015 - DNA, 75 bp, synthetic construct
  source 1..75: mol_type = other DNA
aatctatttttattatcctggcggtaatttattgaacgcatcagataaacttttttatctgccgtttgctttcat

SEQ ID NO: 789016 - DNA, 75 bp, synthetic construct
  source 1..75: mol_type = other DNA
ccctggcaattaaacgaacctcattttcatgagcgttttatcgccatcatgaaagaacatgaactgacagcgaaa

SEQ ID NO: 789017 - DNA, 75 bp, synthetic construct
  source 1..75: mol_type = other DNA
ttacccgtaaaatagcgatggtaaacgattttgacagcagctttggctaccgcaatctgcgcatccataagtctg

SEQ ID NO: 789018 - DNA, 75 bp, synthetic construct
  source 1..75: mol_type = other DNA
acgctatcagaaggagatacgctggttgtctggaagctggacaggctgggcaggagtatgaaacacctgatcacg

SEQ ID NO: 789019 - DNA, 75 bp, synthetic construct
  source 1..75: mol_type = other DNA
ccggtggattaggtggctcaaatctcaccacccctgagtggatcaacagtattcacacgctgtttccgcaacagg

SEQ ID NO: 789020 - DNA, 75 bp, synthetic construct
  source 1..75: mol_type = other DNA
cgtcaacaaggagtacggatatcgattgatgactttggtacaggtttgtcaaacctgaagcgtttttatgaaatt

SEQ ID NO: 789021 - DNA, 75 bp, synthetic construct
  source 1..75: mol_type = other DNA
gggcgttttttctttcatgtgatgggtgccctggctgaaatggaacgagaactcattgtcgagcggacacgcgcc

SEQ ID NO: 789022 - DNA, 75 bp, synthetic construct
  source 1..75: mol_type = other DNA
agataagcggtacaaagtccgaaaggccgggactgaaaaaactgctcaggacattatcggcaggtgatacgctgg

SEQ ID NO: 789023 - DNA, 75 bp, synthetic construct
  source 1..75: mol_type = other DNA
gccggacgattaattgcatcaggagttcctcgccagaaggtggcgatcatttatgatgttggcgtatcgactttg

SEQ ID NO: 789024 - DNA, 75 bp, synthetic construct
  source 1..75: mol_type = other DNA
taatagcgaaggtaattataatattattgattctgtcgatactgaatatatcgaaaaaacatcagcggtgccaaa

SEQ ID NO: 789025 - DNA, 75 bp, synthetic construct
  source 1..75: mol_type = other DNA
tactgcgggaaaaattgtgcgcattattttcgatctggcacgctataaccggatcccggtgattgcggaaggcgt

SEQ ID NO: 789026 - DNA, 75 bp, synthetic construct
  source 1..75: mol_type = other DNA
tgccgggatcatcaaactgtgtggactggaagctgttgaagccgtgttcggtgtcgaagagcgtaataaaattat

SEQ ID NO: 789027 - DNA, 75 bp, synthetic construct
  source 1..75: mol_type = other DNA
gacgcattggcggacgtcgcccgaagttgacaaaagaacaacatgagcaaatagaaaggctgattaaaaacggcc

SEQ ID NO: 789028 - DNA, 75 bp, synthetic construct
  source 1..75: mol_type = other DNA
aatgggcatggccatggaagaaggctgcggtatctaccgtacgccggaactgatgcagaaaaccatcgacaagct

SEQ ID NO: 789029 - DNA, 75 bp, synthetic construct
  source 1..75: mol_type = other DNA
cgttcgcggcctggtggcaatgaacatgatggaaggtacgctggtgcaaatccgtgctaatgcggtggttatggc

SEQ ID NO: 789030 - DNA, 75 bp, synthetic construct
  source 1..75: mol_type = other DNA
ttgtctggaaactggatcggctggggcgcagtatgcggcatctggtcattctggttgaggagttgcgcgaacgtg

SEQ ID NO: 789031 - DNA, 75 bp, synthetic construct
  source 1..75: mol_type = other DNA
gcaacgtaatgcactgaactgcgcgggatgtgagcggatttttgaggataaaatcagtggaactaagtccgacag

SEQ ID NO: 789032 - DNA, 75 bp, synthetic construct
  source 1..75: mol_type = other DNA
cagcgttttgacgaacacttcgtactggatattctggtcgatgatggtcatgttcgcggcctggtagcaatgaac

SEQ ID NO: 789033 - DNA, 75 bp, synthetic construct
  source 1..75: mol_type = other DNA
agccgaaaaacaaatatatggaactgggtccacgcgacaaagtttctcaggccttctggcacgaatggcgtaaag

SEQ ID NO: 789034 - DNA, 75 bp, synthetic construct
  source 1..75: mol_type = other DNA
gacgcatcaggtgaaaaagtgtgtccagagcggcatcaaagtgctgggactggcagcgctcgatagcacagcaac

SEQ ID NO: 789035 - DNA, 75 bp, synthetic construct
  source 1..75: mol_type = other DNA
caacaaatgaccagaacaccgatttgcaacgtaatgcactgaactgtgcaggatgcgagctgatttttgaagaca

SEQ ID NO: 789036 - DNA, 75 bp, synthetic construct
  source 1..75: mol_type = other DNA
caacaaatgaccagaatacggaattgcagcgtaatgcgctggagtgtgcaggatgtgagctgatttttgaggata

SEQ ID NO: 789037 - DNA, 75 bp, synthetic construct
  source 1..75: mol_type = other DNA
actgatagttgaacgtaccaaggcagggctggctgcagctcgtgctaaaggcagagtaggtggacgccgtcctaa

SEQ ID NO: 789038 - DNA, 75 bp, synthetic construct
  source 1..75: mol_type = other DNA
ctcgatcgacacttcgacgccagcagggcgattcttcttccacgtcatgagcgccctggcagaaatggagcgcga

SEQ ID NO: 789039 - DNA, 75 bp, synthetic construct
  source 1..75: mol_type = other DNA
atgcttattggatatgtacgcgtgtcaacaaatgaccagaacaccgatttgcaacgtagtgcgctgaactgcgcg

SEQ ID NO: 789040 - DNA, 75 bp, synthetic construct
  source 1..75: mol_type = other DNA
ttcaattgatacctgcacaccaatgggacgctttttcttccatgtgatgggtgccctagctgaaatggaacgtga

SEQ ID NO: 789041 - DNA, 75 bp, synthetic construct
  source 1..75: mol_type = other DNA
tggataattccttatacagtaattggcaagaagcaggtaaaggaaataaaggactctgatggatttccgggttta

SEQ ID NO: 789042 - DNA, 75 bp, synthetic construct
  source 1..75: mol_type = other DNA
gtcgtattggtggcagacgtccgaaactcaccgcgagtgagtgggagcaggccgggcggttgctggcttcagggg

SEQ ID NO: 789043 - DNA, 75 bp, synthetic construct
  source 1..75: mol_type = other DNA
atgcaaataggctatgtgagggtgtcaacaaatgaccagaacactgctttgcaacgtgatgcactggaacgctca

SEQ ID NO: 789044 - DNA, 75 bp, synthetic construct
  source 1..75: mol_type = other DNA
aattatctatgatattggactgtcaacgatctaccgctatcaccctgttgggactgtcataacgcaacctgaaat

SEQ ID NO: 789045 - DNA, 75 bp, synthetic construct
  source 1..75: mol_type = other DNA
gtcgtattggtggcagacgtccgaaactcaccgcgagtgagtgggagcaggtcggacggttgctggctgcggggg

SEQ ID NO: 789046 - DNA, 75 bp, synthetic construct
  source 1..75: mol_type = other DNA
cagaagtatgaaacacctgatcacgcttattgaggaattgcgggaaaaaggtgttaatttccgtagcctgacgga

SEQ ID NO: 789047 - DNA, 75 bp, synthetic construct
  source 1..75: mol_type = other DNA
aagtaagccggattactggcatcaacaggggagtacaggcgactcgtatgacaacgcgatggctgagagcatcaa

SEQ ID NO: 789048 - DNA, 75 bp, synthetic construct
  source 1..75: mol_type = other DNA
gttatgggacttgccggtgctctccggggtaaaaaggtccgtactaccgtcagccgatttacgggccgtaagtaa

SEQ ID NO: 789049 - DNA, 75 bp, synthetic construct
  source 1..75: mol_type = other DNA
agcagtacggggtcggaccgctatgcagtgaacagcatattgccccgtcaacgtattaccactgtcagcaacagc

SEQ ID NO: 789050 - DNA, 75 bp, synthetic construct
  source 1..75: mol_type = other DNA
aagctgtctccgtatgacaccgaagagatgcttgaggctatgcgtatttttctggaagaacagggaggcgagcaa

SEQ ID NO: 789051 - DNA, 75 bp, synthetic construct
  source 1..75: mol_type = other DNA
atgaataatgatgagctggccacactcacgtgggtggactggtataacaatcgacgattgctggaaaggctgggc

SEQ ID NO: 789052 - DNA, 75 bp, synthetic construct
  source 1..75: mol_type = other DNA
gcatcaacaggaagtacaggcgactcgtatgacaacgcgatggcggagagcatcaatggtctttacaaagcggag

SEQ ID NO: 789053 - DNA, 75 bp, synthetic construct
  source 1..75: mol_type = other DNA
acttgcaccagaacaatgggcgcaggccgggcgattaattgcatcaggcgttcctcgccagaaggtggcgatcat

SEQ ID NO: 789054 - DNA, 75 bp, synthetic construct
  source 1..75: mol_type = other DNA
ctgccgcccgccggatagtgcgccaggttgttgaagaaattatggctcgactggcaaaggaagttcgtcaggctt

SEQ ID NO: 789055 - DNA, 75 bp, synthetic construct
  source 1..75: mol_type = other DNA
cgctggttgtctggaagctggacaggttggggcgcagtatgcggcatcttgttacgttgatagaagagttgcgcc

SEQ ID NO: 789056 - DNA, 75 bp, synthetic construct
  source 1..75: mol_type = other DNA
ggttttactggttgatcaaagtggatcaatggtggattcggtgatccactcggcagtgatggcggcctgtctatg

SEQ ID NO: 789057 - DNA, 75 bp, synthetic construct
  source 1..75: mol_type = other DNA
tcccccgtaagcaggttgcaatcatctatgatgtggctgtttccacgctttataagaagtttccggcgtcgtcat

SEQ ID NO: 789058 - DNA, 75 bp, synthetic construct
  source 1..75: mol_type = other DNA
gcactgatttttgatgtgggcgtttccacaatttatagaaaatttccggcaaataagagcagtgaatccccctga

SEQ ID NO: 789059 - DNA, 75 bp, synthetic construct
  source 1..75: mol_type = other DNA
gcagagtaggtgggcgtcgtcctaagttgaccaccgaacagtgggcacagattggacgtttactcgaggccggag

SEQ ID NO: 789060 - DNA, 75 bp, synthetic construct
  source 1..75: mol_type = other DNA
atcctgaccgcggacaaaacagaaaagtatctgatagaggtcttacatctcgagacaggaggagaatagcgagat

SEQ ID NO: 789061 - DNA, 75 bp, synthetic construct
  source 1..75: mol_type = other DNA
gggctggctgcagctcgtgccaaaggcagagtaggtggacgccttcctaagttgaccaccgaacagtgggcacag

SEQ ID NO: 789062 - DNA, 75 bp, synthetic construct
  source 1..75: mol_type = other DNA
gtcgtataggtggacgtcggcctaaataccaagaagaaacatggcagcaaatgcggcgattgctcgagaagggca

SEQ ID NO: 789063 - DNA, 75 bp, synthetic construct
  source 1..75: mol_type = other DNA
aatggggcgctttttctttcatgtgatgggtgccctggctgaaatggagcgtgaactgattgttgaaagaacaaa

SEQ ID NO: 789064 - DNA, 75 bp, synthetic construct
  source 1..75: mol_type = other DNA
gccgggcgtttattagcacaaggaatcccccgcaagcaggttgcattgatctacgatgtggccctgtcaactctg

SEQ ID NO: 789065 - DNA, 75 bp, synthetic construct
  source 1..75: mol_type = other DNA
gttgacagctgaacagtgggcacagattgggcgtttacttgaggctggagaatcaagacagcgtattgcactgat

SEQ ID NO: 789066 - DNA, 75 bp, synthetic construct
  source 1..75: mol_type = other DNA
atgttagtcgccctgatcgtcatctgtattaccgtcattgtgacggcactggtaacgcggaaagacctctgcgag

SEQ ID NO: 789067 - DNA, 75 bp, synthetic construct
  source 1..75: mol_type = other DNA
aaggcgatgttaatcgccctgatcgtcatctgtttaaccgtcatagtgacggcactggtaacgaggaaagacctc

SEQ ID NO: 789068 - DNA, 75 bp, synthetic construct
  source 1..75: mol_type = other DNA
tcgccctgattgtcatctgtttaaccgtcatagtgacggcactggtaacgaggaaggacctctgcgaggtacgaa

SEQ ID NO: 789069 - DNA, 75 bp, synthetic construct
  source 1..75: mol_type = other DNA
tgaacagaatattcataacctgccgcgcgaccaggggccggggaataccgtctcgcttgaagtcgaaagtgaaaa

SEQ ID NO: 789070 - DNA, 75 bp, synthetic construct
  source 1..75: mol_type = other DNA
gacctctgcgaggtacgaatccgaaccggccagacggaggtcgttgtcttcacagcttacgaacctgaggagtaa

SEQ ID NO: 789071 - DNA, 75 bp, synthetic construct
  source 1..75: mol_type = other DNA
accgtcatagtgacggcactggtaacgaggaaggacctctgcgaggtacgaatccgaaccggccagacggaggtc

SEQ ID NO: 789072 - DNA, 75 bp, synthetic construct
  source 1..75: mol_type = other DNA
atgaagcagcaaaaggcgatgttaatcgccctgatcgtcatctgtttaaccgtcataatgacggcactggtaacg

SEQ ID NO: 789073 - DNA, 75 bp, synthetic construct
  source 1..75: mol_type = other DNA
cttacgcgccgaaaggcaaggagcagcaggctatgaagcagcaaaaggcgatgctaatcgccctgatcgtcatct

SEQ ID NO: 789074 - DNA, 75 bp, synthetic construct
  source 1..75: mol_type = other DNA
tgtgaacttacacaggagaagcaggctatgaagcagcaaaaggcgatgttaatcgccctgatcgtcatctgttta

SEQ ID NO: 789075 - DNA, 75 bp, synthetic construct
  source 1..75: mol_type = other DNA
aggaaagacctctgcgaggtacgaatccgaaccagccagacggaggtcgctgtcttcacagcctacgaatctgaa

SEQ ID NO: 789076 - DNA, 75 bp, synthetic construct
  source 1..75: mol_type = other DNA
aagcagcaaaaggcgatgttaatcgcccttatcgtcatctgtttaaccgtcatagtgacggcactggtaacgagg

SEQ ID NO: 789077 - DNA, 75 bp, synthetic construct
  source 1..75: mol_type = other DNA
tcgccctgatcgtcatctgtattaccgtcattgtgacggcactggtaacgaggaaagacctctgcgaggtacgaa

SEQ ID NO: 789078 - DNA, 75 bp, synthetic construct
  source 1..75: mol_type = other DNA
ctggggcgtaagttgaacaatcagggccattctattggtatcgccctcaatgcctgtaccgttcctgccgcggga

SEQ ID NO: 789079 - DNA, 75 bp, synthetic construct
  source 1..75: mol_type = other DNA
tagtgaagaaaaacggtgctgaaatttataaccgtaccgcgatggataatacgctggtttacagtggtgttattg

SEQ ID NO: 789080 - DNA, 75 bp, synthetic construct
  source 1..75: mol_type = other DNA
gatggtgtggagacatacggggtgtggggactctccctgccgtcactgcgtcgtcgcctgttccgctgtgtctcc

SEQ ID NO: 789081 - DNA, 75 bp, synthetic construct
  source 1..75: mol_type = other DNA
gggattcagaaattcagcatcatgcctgatagaggtgaagtgttctcgtgctgatttgttggcagatagaaaaaa

SEQ ID NO: 789082 - DNA, 75 bp, synthetic construct
  source 1..75: mol_type = other DNA
cgcctgaagcaaattaacggcctgcaagaactgtttgccgaccgccaatattcccgcgcctggactgtcaaataa

SEQ ID NO: 789083 - DNA, 75 bp, synthetic construct
  source 1..75: mol_type = other DNA
gccatgtcagaaatcgttcgtgaactcagccagttaggatgggacgacaataaaatcggcaaagagctgggtatg

SEQ ID NO: 789084 - DNA, 75 bp, synthetic construct
  source 1..75: mol_type = other DNA
aaccaaacaaccgctccagtctggcgacagggtgattgcgctggttaacaatcttggcgcaactccactttctga

SEQ ID NO: 789085 - DNA, 75 bp, synthetic construct
  source 1..75: mol_type = other DNA
acgctggtttacagtggtgttattgatatgcctgctggtcgcggcgacatgacgctggagttttctgtatcagca

SEQ ID NO: 789086 - DNA, 75 bp, synthetic construct
  source 1..75: mol_type = other DNA
gattctggagaatctgcctgagcggccctttaacatccggatggtcagggagacggcggacagcaccacagacca

SEQ ID NO: 789087 - DNA, 75 bp, synthetic construct
  source 1..75: mol_type = other DNA
atggtgcccggttatttctgcgtttgcccgctgatgactcacaccctttattgtggttgttggcatcgtctgaag

SEQ ID NO: 789088 - DNA, 75 bp, synthetic construct
  source 1..75: mol_type = other DNA
ataaaatctttgaatgcgccatgcagattgatggcggcgaaggcgtactgctgatcatcaaaaattacaccggcg

SEQ ID NO: 789089 - DNA, 75 bp, synthetic construct
  source 1..75: mol_type = other DNA
gacgaattggtggacgtcgtcccaaacttacaccagaacaatgggcgcaggccggacgattaattgcagcaggaa

SEQ ID NO: 789090 - DNA, 75 bp, synthetic construct
  source 1..75: mol_type = other DNA
gcctatctgcgcgacggcgacgtgctggccgtctggcggctggatcggctcgggcgctcgatgccacacctcatc

SEQ ID NO: 789091 - DNA, 75 bp, synthetic construct
  source 1..75: mol_type = other DNA
ggcgcacaggcggacgtcgcccgaagctgacaaaagaacagcatgagcaaatagcaaggctgatcaaaaacgggc

SEQ ID NO: 789092 - DNA, 75 bp, synthetic construct
  source 1..75: mol_type = other DNA
caccttcaaaaaggtgacacgctggttgtctggaaactggatcgcctcgggcgaagcatgaaacatctgatttct

SEQ ID NO: 789093 - DNA, 75 bp, synthetic construct
  source 1..75: mol_type = other DNA
actgatagttgaacgtaccagggcggggctggctgcagctcgcgccaaaggcagagtaggtggacgccatcctaa

SEQ ID NO: 789094 - DNA, 75 bp, synthetic construct
  source 1..75: mol_type = other DNA
tgcgcgggatgtgagcggatttttgaggataaaatcagtggcactaagtccgacagaccggggcttaaaaaactg

SEQ ID NO: 789095 - DNA, 75 bp, synthetic construct
  source 1..75: mol_type = other DNA
ggcgggcggctcatcttccacgtgttcggcgcgctgggccagttcgagcgcgacttgatccgtgagcgcaccaag

SEQ ID NO: 789096 - DNA, 75 bp, synthetic construct
  source 1..75: mol_type = other DNA
tgtgtctgattgccaacactgctccggtggcgtttggtgccttgggcgtgccaattctggtcgcaggtcaggtca

SEQ ID NO: 789097 - DNA, 75 bp, synthetic construct
  source 1..75: mol_type = other DNA
agcacagtctgatttttgccagcgttatcggcattatcaccctgctgcaggcgtatgtgtttaccgggatgttag

SEQ ID NO: 789098 - DNA, 75 bp, synthetic construct
  source 1..75: mol_type = other DNA
gctacaccgtgaagcacagtctgatttttgccagcgttatcggcattatcacgctgttgcaggcgtatgtgttta

SEQ ID NO: 789099 - DNA, 75 bp, synthetic construct
  source 1..75: mol_type = other DNA
acgctctataaaaaattccccgcctcagtgacaaaaaataaattgtgtcatcccttagccaaccgggacaaatag

SEQ ID NO: 789100 - DNA, 75 bp, synthetic construct
  source 1..75: mol_type = other DNA
cgctcaacgctcaccgatactctagggggcagtttggatatagagaattattgtacggtaagtctgttttttgaa

SEQ ID NO: 789101 - DNA, 75 bp, synthetic construct
  source 1..75: mol_type = other DNA
taactacattggtccggaactgccggatattacttcggcgctggtgagtatcgtctcactctctttattccttaa

SEQ ID NO: 789102 - DNA, 75 bp, synthetic construct
  source 1..75: mol_type = other DNA
aaatcagtggcactaagtccgacagaccggggctgaaaaaactgctcaggacactatcgacaggagacacgctgg

SEQ ID NO: 789103 - DNA, 75 bp, synthetic construct
  source 1..75: mol_type = other DNA
acattatcggaaggtgacactctggttgtctggaagctggaccggctggggcgtagtatgcggcatctggtcatt

SEQ ID NO: 789104 - DNA, 75 bp, synthetic construct
  source 1..75: mol_type = other DNA
ctggttgaggagttgcgcgaacgtggcgttaatttgcgcagcctgacggatgctattgataccagcacaccgatg

SEQ ID NO: 789105 - DNA, 75 bp, synthetic construct
  source 1..75: mol_type = other DNA
ggactggaagcggccagagccaaaggtcgtattggtggcagacgaccgaaactcaccgcgagagagtgggagcag

SEQ ID NO: 789106 - DNA, 75 bp, synthetic construct
  source 1..75: mol_type = other DNA
aaatcagtggcactaagtccgacagaccggggcttaaaaaactgctcaggacactattggcaggagacacgctgg

SEQ ID NO: 789107 - DNA, 75 bp, synthetic construct
  source 1..75: mol_type = other DNA
atgatcatgcttattggctatgtacgcgtgtcaacaaatgaccagaacacggaattgcagagtaatgcgctggag

SEQ ID NO: 789108 - DNA, 75 bp, synthetic construct
  source 1..75: mol_type = other DNA
gggccctggctgaaatggagcgcgaactaatagttgaacgtaccagggcggggcttgctgcagctcgcgccaaag

SEQ ID NO: 789109 - DNA, 75 bp, synthetic construct
  source 1..75: mol_type = other DNA
gccggacgattaattgcatcaggcgttcctcgccagaaggtggcgatcatctatgatgttggtatatcgacactg

SEQ ID NO: 789110 - DNA, 75 bp, synthetic construct
  source 1..75: mol_type = other DNA
cactggtagtctggaagctggacaggctggggcgtagtatgcggcatctggtcattctggttgaggaactgcgcg

SEQ ID NO: 789111 - DNA, 75 bp, synthetic construct
  source 1..75: mol_type = other DNA
gcgtgaatttccgaagcctgactgatagtattgataccagtaccccaatgggccgtttcttttttcatgttatgg

SEQ ID NO: 789112 - DNA, 75 bp, synthetic construct
  source 1..75: mol_type = other DNA
ggccgtttcttttttcatgtcatgggtgccctggctgaaatggagcgagaactcattgtcgagcggacacgcgca

SEQ ID NO: 789113 - DNA, 75 bp, synthetic construct
  source 1..75: mol_type = other DNA
atgctgacagaagagttgcgccagcatggtgtgaattttagaagcctgactgacagtattgataccagtacccca

SEQ ID NO: 789114 - DNA, 75 bp, synthetic construct
  source 1..75: mol_type = other DNA
tatctacggggtggggttatcgacgctctaccggtattttccggttgatggtcagaggaaggatgacgcgatagg

SEQ ID NO: 789115 - DNA, 75 bp, synthetic construct
  source 1..75: mol_type = other DNA
ttctaacatttatctctggtgctgctttcgcggcgccagagataaatgttaagcaaaacgaatcgttacctgatt

SEQ ID NO: 789116 - DNA, 75 bp, synthetic construct
  source 1..75: mol_type = other DNA
ccagttacggcatccccggtctgctgatgcttgccggagcgctgctggtctggcaggtcagggacacgctgcgtc

SEQ ID NO: 789117 - DNA, 75 bp, synthetic construct
  source 1..75: mol_type = other DNA
gttgcaggaggagctttgcagcgtggtggaggcatccggtgccagtctggagaaggcgcggcacgatcagctgct

SEQ ID NO: 789118 - DNA, 75 bp, synthetic construct
  source 1..75: mol_type = other DNA
atgccaccgaggaagaagggggcacctcagaaaacggaatctatggtcactcccgtttttgcaacaccgattttg

SEQ ID NO: 789119 - DNA, 75 bp, synthetic construct
  source 1..75: mol_type = other DNA
cgtagtgctgaacatttcgtgatgaatgccaccgaggaagaagggggcacctcagaaaacggaatctatggtcac

SEQ ID NO: 789120 - DNA, 75 bp, synthetic construct
  source 1..75: mol_type = other DNA
gaatctcaggccagaagctatctgcaaagtcaaatcacctcaaccgcacaatctatattgaagacacactctctc

SEQ ID NO: 789121 - DNA, 75 bp, synthetic construct
  source 1..75: mol_type = other DNA
agcagcgtcgggtgatggcacagaaagccccggacggcacaccctacgcgccacgccagcagcagagcgccagaa

SEQ ID NO: 789122 - DNA, 75 bp, synthetic construct
  source 1..75: mol_type = other DNA
gcgcgtcctctgctcggctttacctgtgaggatgtgcagatgattgaagagattatcctggctcaccttgagcgt

SEQ ID NO: 789123 - DNA, 75 bp, synthetic construct
  source 1..75: mol_type = other DNA
agacggtaagaaaattgattatccggcgcgccctctgctcggctttaccggtgaggatgtgcagatgattgaaga

SEQ ID NO: 789124 - DNA, 75 bp, synthetic construct
  source 1..75: mol_type = other DNA
aacagcaaaagcggcagcgatgaattatgcggatattgtagctctgcaaggcaagaccaatgatgcgaccccaac

SEQ ID NO: 789125 - DNA, 75 bp, synthetic construct
  source 1..75: mol_type = other DNA
cgaccctcatgaaatcgtcaacgtgatgggagaagccggattcgcctggtttgcccgctgtgccgaacaggcaag

SEQ ID NO: 789126 - DNA, 75 bp, synthetic construct
  source 1..75: mol_type = other DNA
ctgcgatgttaacggtgccagttttacccttgaacagatgctcgcctggcgggaccatccgcaggttaccggcct

SEQ ID NO: 789127 - DNA, 75 bp, synthetic construct
  source 1..75: mol_type = other DNA
acatacatacttacaacgatataataaggttttcattatgcaaatatggaataccaaaagattatggagaaaaaa

SEQ ID NO: 789128 - DNA, 75 bp, synthetic construct
  source 1..75: mol_type = other DNA
ccggcgccacaggtcagttatcaacctgtaccggcccctaaccagatccaacgacgtacattcagttatgacaaa

SEQ ID NO: 789129 - DNA, 75 bp, synthetic construct
  source 1..75: mol_type = other DNA
accctgtcattccaattggtgccggtaatgaggtgaccgttgtgttccaggatggattccagttgaaaacgattg

SEQ ID NO: 789130 - DNA, 75 bp, synthetic construct
  source 1..75: mol_type = other DNA
gctgaccagatacgtatcgacaagctcagcagtgacaatgaagccatgcagactcagctgaaggcgctgggcgtg

SEQ ID NO: 789131 - DNA, 75 bp, synthetic construct
  source 1..75: mol_type = other DNA
tctgcccgacggcggcaatcaaactgtcgcaagagtacgaactggcggtgtggaagaaagaagacttcctgcaac

SEQ ID NO: 789132 - DNA, 75 bp, synthetic construct
  source 1..75: mol_type = other DNA
ggttgaaattgacttggaagaagccagcagcgacgatctcgcagaacacctgaaggtgctgattgctctatggca

SEQ ID NO: 789133 - DNA, 75 bp, synthetic construct
  source 1..75: mol_type = other DNA
gtttgtctataaagccagacagcaatgggaaacactggacgataagcatcgtaatgccgttattcaccatgatgc

SEQ ID NO: 789134 - DNA, 75 bp, synthetic construct
  source 1..75: mol_type = other DNA
catggcggtgacctttattatcggtaacacctaccagctcgacagcgcctcgctgtatatgccgggcaacagtat

SEQ ID NO: 789135 - DNA, 75 bp, synthetic construct
  source 1..75: mol_type = other DNA
accgagcttgcgcctggctggctgaagcgcccgctgggtatcgccattgagctgctggcagccattccaagtatc

SEQ ID NO: 789136 - DNA, 75 bp, synthetic construct
  source 1..75: mol_type = other DNA
gctgctggctgccattccaagtatcgtttacggcatgtggggcttgtttatcttcgccccgctgttcgccgttta

SEQ ID NO: 789137 - DNA, 75 bp, synthetic construct
  source 1..75: mol_type = other DNA
ctgtgcggcctgcgtcaatgcctgcccgtcaaacgccttaacggttgaaactgacctcgccactggtgagctggc

SEQ ID NO: 789138 - DNA, 75 bp, synthetic construct
  source 1..75: mol_type = other DNA
cacctgcggtacaagaaggtctgcgcgaaaccatcatagccatgcatgaaggcaacattgaaagccagcaattgg

SEQ ID NO: 789139 - DNA, 75 bp, synthetic construct
  source 1..75: mol_type = other DNA
ttggtggggtcacatccggaacagtatatctgggttttaaaattgttaaaaacgcgcaaatcaaacgaagcggac

SEQ ID NO: 789140 - DNA, 75 bp, synthetic construct
  source 1..75: mol_type = other DNA
cgctgtcaccgtcagggcgtcggcgactgagcgccgaactggcgaaacgtctgcggcagagtcagcagcgtcggg

SEQ ID NO: 789141 - DNA, 75 bp, synthetic construct
  source 1..75: mol_type = other DNA
tggtatgtggcaattaaatgggacattaagtagcactttatcttctgcaacagctcctaatttgtttgaagctgg

SEQ ID NO: 789142 - DNA, 75 bp, synthetic construct
  source 1..75: mol_type = other DNA
tttatggcatggattatctggcaggcaaaaacctatgcttcacagcttgctggcgtgggtgttgaaggtgccatg

SEQ ID NO: 789143 - DNA, 75 bp, synthetic construct
  source 1..75: mol_type = other DNA
gcttgataacgccaatcaagctatagatggcttaaaagagactctcgccggtggtgatccttggttatggatgga

SEQ ID NO: 789144 - DNA, 75 bp, synthetic construct
  source 1..75: mol_type = other DNA
ggagagttacagagaaggaaggacaggcggctgcagatatcgccagtcgcgtggcgggggtgaaacacgtcatca

SEQ ID NO: 789145 - DNA, 75 bp, synthetic construct
  source 1..75: mol_type = other DNA
tttcgtctttgttgctgttacagggttgtgttgccgctgcgctggtcggtacggctgctgtgggtactaaagtgt

SEQ ID NO: 789146 - DNA, 75 bp, synthetic construct
  source 1..75: mol_type = other DNA
taataaggaacctcaaatgaaggagaggagtgattattttcttagtgtcactggttcaggaaatgaagggaaact

SEQ ID NO: 789147 - DNA, 75 bp, synthetic construct
  source 1..75: mol_type = other DNA
attagtttgtcttttggttttctccggcaaatgtttaatagctggcttcagttaatatttagctcatgcttcata

SEQ ID NO: 789148 - DNA, 75 bp, synthetic construct
  source 1..75: mol_type = other DNA
cagcccgtgatgtgattattgatgttcttgaccagtctttggctggtcagcttgattctttctcttcaatagcat

SEQ ID NO: 789149 - DNA, 75 bp, synthetic construct
  source 1..75: mol_type = other DNA
accggacagggagttaacattggtgccaagagacttcgacaggctgctattgatatggcgaaaaagaaatacgga

SEQ ID NO: 789150 - DNA, 75 bp, synthetic construct
  source 1..75: mol_type = other DNA
ttgccggagtgggtgtagagggcgctttacaaggtgcagcggctatggggttaggagcggcaacgttcggggcat

SEQ ID NO: 789151 - DNA, 75 bp, synthetic construct
  source 1..75: mol_type = other DNA
agatggtttgaaagagtcgttctctggtggcgacccgtggttatggcttgatcagttatggactaaagtccaaca

SEQ ID NO: 789152 - DNA, 75 bp, synthetic construct
  source 1..75: mol_type = other DNA
actggacagggggtaaacattggcgccaagagacttcgccaggctgctattgaaatggcgaaaaagaaatacgga

SEQ ID NO: 789153 - DNA, 75 bp, synthetic construct
  source 1..75: mol_type = other DNA
aaaatttagtggtgataaggaaagcgccatgaaagagcgtgctgactactttttaaaggtgacgggaagtaatac

SEQ ID NO: 789154 - DNA, 75 bp, synthetic construct
  source 1..75: mol_type = other DNA
attcgaacgctggaaagctatcgacaccagggataagcgggaaaaattcacggcgctgattccggcaattatgga

SEQ ID NO: 789155 - DNA, 75 bp, synthetic construct
  source 1..75: mol_type = other DNA
aataccaacattactttgcagataaacaaatatctgtctggggttcgtatgagtatcgatgcgctacgatgggct

SEQ ID NO: 789156 - DNA, 75 bp, synthetic construct
  source 1..75: mol_type = other DNA
gatgatggcgcggttgatcaacgggcgcttggcgttaaccgggtgaagatattcgaacgctggaaggctatcgac

SEQ ID NO: 789157 - DNA, 75 bp, synthetic construct
  source 1..75: mol_type = other DNA
ggattaatgatttcaggttgtatcgtgaaattactgacggaaaaagcatcacgtgcatgatcgccgggttaaaca

SEQ ID NO: 789158 - DNA, 75 bp, synthetic construct
  source 1..75: mol_type = other DNA
agggttacgtcaggcgattactgatttcgctaactggcagcaggcaacgcgggtgacattaggacgctgcccgca

SEQ ID NO: 789159 - DNA, 75 bp, synthetic construct
  source 1..75: mol_type = other DNA
gaacagtggctggcggattactaccggctgaaacgtccagcgttggcggcgtggcgtgatgtgagatctgaacag

SEQ ID NO: 789160 - DNA, 75 bp, synthetic construct
  source 1..75: mol_type = other DNA
acatggcgtacagggatcggcgctgggacgtccgtggctacctccaacggagtgggtcgttgaggggaattccgc

SEQ ID NO: 789161 - DNA, 75 bp, synthetic construct
  source 1..75: mol_type = other DNA
tgtttggtggtgatctcacccgtcgttatgggcaaaaggtgcataagctgacgctgcatggcggttttagctgcc

SEQ ID NO: 789162 - DNA, 75 bp, synthetic construct
  source 1..75: mol_type = other DNA
gcttcgtttgctgatgaggcccagcaacaccgttcgatcgccgaacaactggcgcatcaggctaatctggtcaac

SEQ ID NO: 789163 - DNA, 75 bp, synthetic construct
  source 1..75: mol_type = other DNA
gagcgagtggttgaaaccggcgtggacggcataaagctgcatccgctgcatattgtgaaaggcagtattatggcg

SEQ ID NO: 789164 - DNA, 75 bp, synthetic construct
  source 1..75: mol_type = other DNA
cgcgggctgaaagtgtgctcgcacttaattgtcggcctgccgggtgaaggacgcactgaatgtctgcaaacgctg

SEQ ID NO: 789165 - DNA, 75 bp, synthetic construct
  source 1..75: mol_type = other DNA
gcctcgtttgccgatgaagcgcagcaacatcgttccattgccgagcaactggcgcaccaggcgaatttagttaac

SEQ ID NO: 789166 - DNA, 75 bp, synthetic construct
  source 1..75: mol_type = other DNA
acgcacgtatccgtgcttctctgccgaccattgaactggccctgaaacaaggcgcgaaagtgatggtaacttccc

SEQ ID NO: 789167 - DNA, 75 bp, synthetic construct
  source 1..75: mol_type = other DNA
cgtattactggaaaaacacctacggcacgcagtacgacaccatttacggggcgtacaaaaacagggagagcgaca

SEQ ID NO: 789168 - DNA, 75 bp, synthetic construct
  source 1..75: mol_type = other DNA
aaagaggcctggcagccgtttggtagtccggtggacataactccttataccctgatgcaggcgattgcagcagaa

SEQ ID NO: 789169 - DNA, 75 bp, synthetic construct
  source 1..75: mol_type = other DNA
gcgagcattttgacggtttgtgcaaactgcttgagagcgcaggtattgcctataccgtaaaccagcgtctggtgc

SEQ ID NO: 789170 - DNA, 75 bp, synthetic construct
  source 1..75: mol_type = other DNA
gcggcatgaacgattacctgcctggcgaaacggccatctggcagcgcattgaaggcacactgaaaaacgtgctcg

SEQ ID NO: 789171 - DNA, 75 bp, synthetic construct
  source 1..75: mol_type = other DNA
cgttctccattgctggtggcggcgacactctggcagcaatcgacctgttcggcatcgctgacaaaatctcctaca

SEQ ID NO: 789172 - DNA, 75 bp, synthetic construct
  source 1..75: mol_type = other DNA
ctgacacagggcggcagactgacctgtaagttccgcctgtcaggcgcactgaccaacaatcagttcggtctggga

SEQ ID NO: 789173 - DNA, 75 bp, synthetic construct
  source 1..75: mol_type = other DNA
gtatcatcaaatcgccagacgcatttcagttcatgggcgcgcaggagcattattccggatcgtatggcaaccgct

SEQ ID NO: 789174 - DNA, 75 bp, synthetic construct
  source 1..75: mol_type = other DNA
gcattgcagaaaaacccaaaaaacatgctgctggccgtatgctggatgcagggcgaatttgacatgagcgccgct

SEQ ID NO: 789175 - DNA, 75 bp, synthetic construct
  source 1..75: mol_type = other DNA
cgttctccatcgctggcggcggcgacactctggcagcaatcgacctgtttggcattgctgacaaaatctcctaca

SEQ ID NO: 789176 - DNA, 75 bp, synthetic construct
  source 1..75: mol_type = other DNA
accagctgattgttggtggtggtatcgctaacacctttatcgcggcacaaggccacgatgtgggtaaatccctgt

SEQ ID NO: 789177 - DNA, 75 bp, synthetic construct
  source 1..75: mol_type = other DNA
agacgctggagctggtgttcaccgccagcagtgccacggttactccgaaactgaatggagtggctggcccggcat

SEQ ID NO: 789178 - DNA, 75 bp, synthetic construct
  source 1..75: mol_type = other DNA
atgctcaccgcccgctggtggcgcgcgctgggtatctccgagcacgtaactcttgagctgaactctatcggttcg

SEQ ID NO: 789179 - DNA, 75 bp, synthetic construct
  source 1..75: mol_type = other DNA
acgcaaggtcacacgcgagaaaatctccttcttaaccgaagaaagcgccgttaccctcgattttcaccgcgagca

SEQ ID NO: 789180 - DNA, 75 bp, synthetic construct
  source 1..75: mol_type = other DNA
gcatcttataccgtattgcgtaatcgtctggacccgtggttgatggaacaagccgagcaggcgggcgcgcagttt

SEQ ID NO: 789181 - DNA, 75 bp, synthetic construct
  source 1..75: mol_type = other DNA
tgacactgggactgaatgcgctgacgctgacggatgttacaaaaaatgcagcgtatggcgttgagatagaaagtc

SEQ ID NO: 789182 - DNA, 75 bp, synthetic construct
  source 1..75: mol_type = other DNA
tagaacgcggtgacagcgccggatgcaagaatatgactggcgggcgtctttatgcccacacgcttgaggctatta

SEQ ID NO: 789183 - DNA, 75 bp, synthetic construct
  source 1..75: mol_type = other DNA
atcccgggcgttcgcgtcgatgcgctggttcgtgaaggaaacaaggtcactggcgtccaggccggggatgatatt

SEQ ID NO: 789184 - DNA, 75 bp, synthetic construct
  source 1..75: mol_type = other DNA
aacaacaccccgccattcgcccgctgattagcggcggcaaactgcttgaatattccgcgcatatggtgccggaag

SEQ ID NO: 789185 - DNA, 75 bp, synthetic construct
  source 1..75: mol_type = other DNA
gtgctgacgctgacggatgttacaaaaaatgcagcgtatggcgttgagatagaaagtctggtgctggagataaat

SEQ ID NO: 789186 - DNA, 75 bp, synthetic construct
  source 1..75: mol_type = other DNA
accctgatgcaggcgattgccgcggagggggatgtgaccacgccagtggttgtgcccggcacgggggatggtggc

SEQ ID NO: 789187 - DNA, 75 bp, synthetic construct
  source 1..75: mol_type = other DNA
ggacgaagactgcaaacgtcgcatgtataccaacccgctgcgtgtgctggattctaaaaatccggaagtgcaggc

SEQ ID NO: 789188 - DNA, 75 bp, synthetic construct
  source 1..75: mol_type = other DNA
ggcgcactgaaatctctgtcattaaattcgatgacattcaggtgcgcatagtgagtatcaacggcgagccgtggt

SEQ ID NO: 789189 - DNA, 75 bp, synthetic construct
  source 1..75: mol_type = other DNA
aagcagagcaataaaacctggtccctgacgcatccggtggatgacgcagtctccctgctgacacggggtggcaga

SEQ ID NO: 789190 - DNA, 75 bp, synthetic construct
  source 1..75: mol_type = other DNA
gcgctgacgctgacggatgttacaaaaaatgcagcgtatggcgttgagatagaaagcctggtgctggagataaat

SEQ ID NO: 789191 - DNA, 75 bp, synthetic construct
  source 1..75: mol_type = other DNA
acgctgacggatgttacaaaaaatgcagcgtatggcgttgagatagaaagtctgatgctggagataaatgcaccg

SEQ ID NO: 789192 - DNA, 75 bp, synthetic construct
  source 1..75: mol_type = other DNA
gggcgagttcgggaatacgccctttaagaaagcacctgttgactggatgcagccggggatgacttatctgaaagg

SEQ ID NO: 789193 - DNA, 75 bp, synthetic construct
  source 1..75: mol_type = other DNA
tccttctttctgcagacggatgcgacgaacctgaacgcgatgcaccacaagaagccgaatgcgaagctggaaacg

SEQ ID NO: 789194 - DNA, 75 bp, synthetic construct
  source 1..75: mol_type = other DNA
atggcggaattcaggtgtcagatggtgtatttacgatcaccaagcagagcaataaagcctggtcactgacccacc

SEQ ID NO: 789195 - DNA, 75 bp, synthetic construct
  source 1..75: mol_type = other DNA
tgggtgctgcagaggtttgggcaccgggagaactggccgcagatgtgcgatttacgggagcgattgatgtcgttg

SEQ ID NO: 789196 - DNA, 75 bp, synthetic construct
  source 1..75: mol_type = other DNA
tttcagatattgggaaagtcaccactcaatatgttgaagtaccacaccagcaacttaaaccgcacgaagtacgga

SEQ ID NO: 789197 - DNA, 75 bp, synthetic construct
  source 1..75: mol_type = other DNA
ttgctcaactctggcatgtacatccctgaagatttcgatgctgttatcgaatggctggcggatgggcggtttgat

SEQ ID NO: 789198 - DNA, 75 bp, synthetic construct
  source 1..75: mol_type = other DNA
agccgcgcggaaaaccaccgcgaaagctttgagacttgcccggaatgtaagcgccagaaatgtctggtgccgtcc

SEQ ID NO: 789199 - DNA, 75 bp, synthetic construct
  source 1..75: mol_type = other DNA
gtcgcaagagtacgaactggcggtgtggaagaaagaagatttcctgcaacagtcccgtttcgcgctgtgcaactg

SEQ ID NO: 789200 - DNA, 75 bp, synthetic construct
  source 1..75: mol_type = other DNA
atgtttacctttatcaaaaaagtcattaaaaccggcacggcgacctcgtcttacccgctggagccgattgcggtt

SEQ ID NO: 789201 - DNA, 75 bp, synthetic construct
  source 1..75: mol_type = other DNA
gcatatatgcggaaggtggttatgtgggcggtgccggaagtccggcgcagatgcggcgggctgaaggcattaatt

SEQ ID NO: 789202 - DNA, 75 bp, synthetic construct
  source 1..75: mol_type = other DNA
gtggtacttgctggtcaatccaatgccatgtcatatggtgagggaatgccgctgccggattcttacgatgcgccc

SEQ ID NO: 789203 - DNA, 75 bp, synthetic construct
  source 1..75: mol_type = other DNA
gaaagcggcggcagatattgccagccgggtgagcggcgtgaagcgggtaactacggcgtttacgtttattaaata

SEQ ID NO: 789204 - DNA, 75 bp, synthetic construct
  source 1..75: mol_type = other DNA
cctgttgccgacagccggagatgctgctgcgcagggctggagcattaagaatggcggaattcagttgtcagatgg

SEQ ID NO: 789205 - DNA, 75 bp, synthetic construct
  source 1..75: mol_type = other DNA
aattagtcgggcgaatggatgccaaaatacatcgccaggcgggcattcttgaagttatctccctctggttacagg

SEQ ID NO: 789206 - DNA, 75 bp, synthetic construct
  source 1..75: mol_type = other DNA
agcgctttctgaagtggttaatgcgctgaaacgtctggacgaagtgtatgcgctgtatgccgatccagatgctga

SEQ ID NO: 789207 - DNA, 75 bp, synthetic construct
  source 1..75: mol_type = other DNA
attatggcgggcattgataaagacatcgaaggcgaagctcgcccgcagccagatattaagattggttatttgccg

SEQ ID NO: 789208 - DNA, 75 bp, synthetic construct
  source 1..75: mol_type = other DNA
gttcggcatttacccagggcgcggagggacattcagcgagtccacgggggccagtcaggattcggcacgctgggg

SEQ ID NO: 789209 - DNA, 75 bp, synthetic construct
  source 1..75: mol_type = other DNA
ggcacatttgcgcaccgtttcagtaactgggtattccgcgaggttattccttcaatccgcaaaacggggagttat

SEQ ID NO: 789210 - DNA, 75 bp, synthetic construct
  source 1..75: mol_type = other DNA
atctttgaagtgttctctctctggttacaggatggtgtaaaaccaacagtgacccttcaaaaagggctgcgtcag

SEQ ID NO: 789211 - DNA, 75 bp, synthetic construct
  source 1..75: mol_type = other DNA
gaaattatctccctctggttacaggatggcatcaaacagacggctcctcttcaaaaaggactgcgccaggcgatt

SEQ ID NO: 789212 - DNA, 75 bp, synthetic construct
  source 1..75: mol_type = other DNA
gtgatactacgtcatcgtactggcccggcattccaggccataaaagacggtctggcagtgggactaaatgcactg

SEQ ID NO: 789213 - DNA, 75 bp, synthetic construct
  source 1..75: mol_type = other DNA
ggttcggcattcacccagggcacggaggggacattcagcgagtccacgggggccagtcaggattcggctcgctgg

SEQ ID NO: 789214 - DNA, 75 bp, synthetic construct
  source 1..75: mol_type = other DNA
gatatcgaaaccctgcgcgcgctggaaaatgccctgctggagttcccgggctgtgcgatggttatctcgcacgac

SEQ ID NO: 789215 - DNA, 75 bp, synthetic construct
  source 1..75: mol_type = other DNA
aactttaccgagtacgaagagtacaaaaaacgcacgctgggcgcagacgcgctggagccgaagcgtatcaagtac

SEQ ID NO: 789216 - DNA, 75 bp, synthetic construct
  source 1..75: mol_type = other DNA
aactttaccgagtacgaagagtacaagaaacgcacgctgggcgcagacgcactggagccgaagcgtatcaagtac

SEQ ID NO: 789217 - DNA, 75 bp, synthetic construct
  source 1..75: mol_type = other DNA
cctggctgacagattttcctgcgctactgcgtcttgtcagtgaaggagatgagttgctgctattgcaggatggcg

SEQ ID NO: 789218 - DNA, 75 bp, synthetic construct
  source 1..75: mol_type = other DNA
tgtcgacaccgcacaccgactggcggaagatatcctgcgcttcgcccgctgccgtcagggcggggcactgacctg

SEQ ID NO: 789219 - DNA, 75 bp, synthetic construct
  source 1..75: mol_type = other DNA
aagccctgaaattattagagttacaagggattgctaacactacgctggagatggttgctgaacgagtggattatc

SEQ ID NO: 789220 - DNA, 75 bp, synthetic construct
  source 1..75: mol_type = other DNA
cgggtggtaaccgcagatgaacatctgaaggaagtttatacggaagatgcttccctgccggaaaaaatcaggaaa

SEQ ID NO: 789221 - DNA, 75 bp, synthetic construct
  source 1..75: mol_type = other DNA
ttccctgccgggaaaaatcagggaatgccatgtttatttccctgatgacagaacaatcagaaacaacggagataa

SEQ ID NO: 789222 - DNA, 75 bp, synthetic construct
  source 1..75: mol_type = other DNA
ttcgtaagacaaacagcacctgccggacagttcccggtcagtgaatgctggttttcttcctctgattcttcaggc

SEQ ID NO: 789223 - DNA, 75 bp, synthetic construct
  source 1..75: mol_type = other DNA
aggcattccctgccgcccggtatgttgttgcccgtgtcctgtccggggtgttctggtgtctgaaatacgccgtca

SEQ ID NO: 789224 - DNA, 75 bp, synthetic construct
  source 1..75: mol_type = other DNA
ggaactcatgggggaggtttattcgaaccgctggacccagaagaacggggccgcaccttcgaagctctggattgc

SEQ ID NO: 789225 - DNA, 75 bp, synthetic construct
  source 1..75: mol_type = other DNA
ggcctgattgaacccatcgggaaatttccgatgaccgatggctggcatccgtcgctggattttcgacgacgggct

SEQ ID NO: 789226 - DNA, 75 bp, synthetic construct
  source 1..75: mol_type = other DNA
gtcgacaccgcacatcggctggcggaagatatcctgcgcttcgcccgctgccgccagggtggcgcactgacctga

SEQ ID NO: 789227 - DNA, 75 bp, synthetic construct
  source 1..75: mol_type = other DNA
caaccgctatccgggctgtctgtttatcgctgcctgtacgttttatcccgatcctggccaccctattcatcaact

SEQ ID NO: 789228 - DNA, 75 bp, synthetic construct
  source 1..75: mol_type = other DNA
ccacactggaagttgacgatccggcgatggtagcaaagcagatggaactggtgctggaaggctgtttaagccgaa

SEQ ID NO: 789229 - DNA, 75 bp, synthetic construct
  source 1..75: mol_type = other DNA
agacatgggctgctgcacggtatgttgttgcccgtgttctgcgtggactgttccgggggctgaagtacatagtta

SEQ ID NO: 789230 - DNA, 75 bp, synthetic construct
  source 1..75: mol_type = other DNA
aaacaaagattaaattgttctacagaccagcatcaattactccaaaaccaaatgaggcctggcaggataagttaa

SEQ ID NO: 789231 - DNA, 75 bp, synthetic construct
  source 1..75: mol_type = other DNA
tgaaattcctccgaagagtgataaggcgaatgtactgcagatagctctgcagaccaaaatcaagctgttttaccg

SEQ ID NO: 789232 - DNA, 75 bp, synthetic construct
  source 1..75: mol_type = other DNA
gaaaatgaaaccggcgctgaaaaaaacgctgatggcggtagcgtgcctgagcgcagtacctgcagcccaggctgc

SEQ ID NO: 789233 - DNA, 75 bp, synthetic construct
  source 1..75: mol_type = other DNA
gcgcaggcattgtgtaaagagattgatgcgacctgcactttctctaaccaggcgtttgacagcctgatcccaagc

SEQ ID NO: 789234 - DNA, 75 bp, synthetic construct
  source 1..75: mol_type = other DNA
tattgacggcgtattcggtgacaccgcagtggtaaccgaatggctgaacaataatcccaaactggcaccagttgg

SEQ ID NO: 789235 - DNA, 75 bp, synthetic construct
  source 1..75: mol_type = other DNA
ccaatggattaaaaatgaatgtattgataacatctatttaattgaaaatccagtatcggtttattgggggggaag

SEQ ID NO: 789236 - DNA, 75 bp, synthetic construct
  source 1..75: mol_type = other DNA
taacagtacctccaattccgcttccagctactctgactttggaaacaccagtaccgcacatacccgatactctga

SEQ ID NO: 789237 - DNA, 75 bp, synthetic construct
  source 1..75: mol_type = other DNA
tggtggtcttgtttggtcagcgaatcactatcatggaaagtttctggaggagcagaagcgtgctgacgctgcgga

SEQ ID NO: 789238 - DNA, 75 bp, synthetic construct
  source 1..75: mol_type = other DNA
gcacagtatgtggctgatacgcacacgccagaaattcaggctgcacgcggtcgcaagggcggttctaagtctaag

SEQ ID NO: 789239 - DNA, 75 bp, synthetic construct
  source 1..75: mol_type = other DNA
gatctacatcaacgactacggcgggcgtccggtactgcagttcagctgcagcggagaccgttgtacggcagtgaa

SEQ ID NO: 789240 - DNA, 75 bp, synthetic construct
  source 1..75: mol_type = other DNA
tcgctgctttcctttttactgtcgtcagttctttcatctggtcagccaactactactacagcaaatatcagcacg

SEQ ID NO: 789241 - DNA, 75 bp, synthetic construct
  source 1..75: mol_type = other DNA
gtgcctgctgccgctgctgagcggttgcggaagtatgcggacagtttacgtgaacactccgacggtaccactgcc

SEQ ID NO: 789242 - DNA, 75 bp, synthetic construct
  source 1..75: mol_type = other DNA
ggcggagggcaaagtgttcacgcaggttcagtgggagcagaaattcgcccgtcacgtaaatcacgtcagggcaca

SEQ ID NO: 789243 - DNA, 75 bp, synthetic construct
  source 1..75: mol_type = other DNA
tacgacgtgtttgcgaccctccgttctgatgcgaaagtgccgctggtggtgaatggggtgcgtatcgagccgggc

SEQ ID NO: 789244 - DNA, 75 bp, synthetic construct
  source 1..75: mol_type = other DNA
ccgagaccttacgctcaggagttatggggatcttggttgcctactactaaaattccggcaaatgcttcttatgca

SEQ ID NO: 789245 - DNA, 75 bp, synthetic construct
  source 1..75: mol_type = other DNA
atcctgagccagtagcagtgtatgaccctaagaacccgcaggcctcaacttttaaggttaatggtcaggccctat

SEQ ID NO: 789246 - DNA, 75 bp, synthetic construct
  source 1..75: mol_type = other DNA
gattgtgcagggtgatactgctgagtacgaaccctctgacactgacctcaatcaggctactgtagaaacgaaggg

SEQ ID NO: 789247 - DNA, 75 bp, synthetic construct
  source 1..75: mol_type = other DNA
cttgtaggggggcctgccaatgacaaggtgcagttgtcttggcgtgaggagtcgaaaggtcgattccgccttgag

SEQ ID NO: 789248 - DNA, 75 bp, synthetic construct
  source 1..75: mol_type = other DNA
gttcctgatgtggtcggctcttccagtcttcttgtcatgacctccgcgccgaactcacccatcttggttgtggac

SEQ ID NO: 789249 - DNA, 75 bp, synthetic construct
  source 1..75: mol_type = other DNA
ccaacgggcaatatctcgtttgccttgagtgccggtatcgaccgaaaggtaaagatttcggtgattcggtcggat

SEQ ID NO: 789250 - DNA, 75 bp, synthetic construct
  source 1..75: mol_type = other DNA
acataataccggactgggtaatgaatttatctgccagtatgaatgaggtcagagacggttttgaactcctgatgt

SEQ ID NO: 789251 - DNA, 75 bp, synthetic construct
  source 1..75: mol_type = other DNA
tccatcagtaagctgtttatggcgggcattgcccctggcatgatgatgggcgcaacgctgatgcttacctggtag

SEQ ID NO: 789252 - DNA, 75 bp, synthetic construct
  source 1..75: mol_type = other DNA
cactgtgttccctaatggggaggatctatatacgcttcatttcgaggccctggataaagcagggaacaaagggtc

SEQ ID NO: 789253 - DNA, 75 bp, synthetic construct
  source 1..75: mol_type = other DNA
aaccgcacagagttgtctatcagacctgccttcttgacagtgcttcgtggtggtgccatcggtgctggcgtggag

SEQ ID NO: 789254 - DNA, 75 bp, synthetic construct
  source 1..75: mol_type = other DNA
tctgcatctgatgccggttcttcggtttcctctatacaggcgtatgctgtagatagcaaaggcaagaggagtcct

SEQ ID NO: 789255 - DNA, 75 bp, synthetic construct
  source 1..75: mol_type = other DNA
tcactcttcaattccagctcagtgatagcgcagggaatagttacctttcaccaccgcaaaaggtgatgtttgaca

SEQ ID NO: 789256 - DNA, 75 bp, synthetic construct
  source 1..75: mol_type = other DNA
aattcgggcagcacgtgagcagtgggaacgtgaaaacggatttatcagcgacggaaacggcgtggaagctgtggg

SEQ ID NO: 789257 - DNA, 75 bp, synthetic construct
  source 1..75: mol_type = other DNA
tatttggaacaagacccgaagcgattaagatggcccctttagtacatcagttagctaacgatgagcgctttgact

SEQ ID NO: 789258 - DNA, 75 bp, synthetic construct
  source 1..75: mol_type = other DNA
gagcatcaatgtggcagagaacaagttgcccgtgtgtagcctgaaatcacgagagaccgttggatcgtggatcgt

SEQ ID NO: 789259 - DNA, 75 bp, synthetic construct
  source 1..75: mol_type = other DNA
taatcccgtcaatacgtaaaaccggttcatacggcgtcccgttctcattcctaaatgacttcagtcgccgcaagg

SEQ ID NO: 789260 - DNA, 75 bp, synthetic construct
  source 1..75: mol_type = other DNA
ggataagcctaaggataaggctaacgctttgtcatgcggtatccagataacagataacagatatataaaccccac

SEQ ID NO: 789261 - DNA, 75 bp, synthetic construct
  source 1..75: mol_type = other DNA
atcgctgagagccgcgtcctacggggtttctgaggctttggggatggcattcgataaggcaatccctttgcctga

SEQ ID NO: 789262 - DNA, 75 bp, synthetic construct
  source 1..75: mol_type = other DNA
tcctcattcgtgatcagtacaaacctgatggtggttatgacgccaacacaatgggtgtgtggaaagtacgtctga

SEQ ID NO: 789263 - DNA, 75 bp, synthetic construct
  source 1..75: mol_type = other DNA
aagaaagaggccgcaagcaagggggccgggagtgccagtagaacctgtctgtttgagtggcagcagatccctgat

SEQ ID NO: 789264 - DNA, 75 bp, synthetic construct
  source 1..75: mol_type = other DNA
aaggcagatgttgctatggccgcagatccgattcgtgacccagtatgtttgctacagtgggacagaactccggat

SEQ ID NO: 789265 - DNA, 75 bp, synthetic construct
  source 1..75: mol_type = other DNA
acgcgaccgtattttgactcatgtttactcggtcgatggcacaccgttggaaaacagcggttactacggcaaagc

SEQ ID NO: 789266 - DNA, 75 bp, synthetic construct
  source 1..75: mol_type = other DNA
agcgatacaagtatcagcttgtgaagaccttcgacaagggggagtaccaggttcgagccaaagtggtgaacgtaa

SEQ ID NO: 789267 - DNA, 75 bp, synthetic construct
  source 1..75: mol_type = other DNA
caggcctgctttcttaactgtgcttcgtggtggagccatcgctgctggagtagaggctcgcaagttgtctggtga

SEQ ID NO: 789268 - DNA, 75 bp, synthetic construct
  source 1..75: mol_type = other DNA
gcaaatatctccttcaccagcaatagcggcggcaagaaagcgaccaaagctgtaacggttaattctgccgaataa

SEQ ID NO: 789269 - DNA, 75 bp, synthetic construct
  source 1..75: mol_type = other DNA
atatgctaacatagctatattatatttaatatatacaactgtactgaatagtaaattaaaatcactagcactaat

SEQ ID NO: 789270 - DNA, 75 bp, synthetic construct
  source 1..75: mol_type = other DNA
accagtctgacgacgttcgcgtgttctcagttgagttttccgcttacccggacgacgctggcgtgttggggaaaa

SEQ ID NO: 789271 - DNA, 75 bp, synthetic construct
  source 1..75: mol_type = other DNA
gcgtggtgtggcgcagggtactgcaaatatctccttcaccagcaatagcggtgctaagaaggcaactaagtcagt

SEQ ID NO: 789272 - DNA, 75 bp, synthetic construct
  source 1..75: mol_type = other DNA
cgtgacgattacacctgaatctccgactgttaaggtaggttcgacagttcaactgactgctaatttcaccccaga

SEQ ID NO: 789273 - DNA, 75 bp, synthetic construct
  source 1..75: mol_type = other DNA
accagtctgatgatgttcgtgtgttctctgttcagttcaacgcgtaccctgatgatgagggagttcttggcaaaa

SEQ ID NO: 789274 - DNA, 75 bp, synthetic construct
  source 1..75: mol_type = other DNA
gcccagccaggattgttaggggcactaaatgaatttggtaaacactatgttcgccccatcgagaacgaagatggc

SEQ ID NO: 789275 - DNA, 75 bp, synthetic construct
  source 1..75: mol_type = other DNA
tggtgaaacgcatatcaccgcaccatggaatgacagccaattaccgttggatgctgctaaaaccttcagtaagaa

SEQ ID NO: 789276 - DNA, 75 bp, synthetic construct
  source 1..75: mol_type = other DNA
ttgataccgcaactgaatgcggaaaataagatcgcagaagttacgctgatacttgagcctgtttcacctgttccc

SEQ ID NO: 789277 - DNA, 75 bp, synthetic construct
  source 1..75: mol_type = other DNA
aatcgaatttctgaacattatcttaatcatcttgatgtgatcattaaagaattcgaactaccatcaacatggcaa

SEQ ID NO: 789278 - DNA, 75 bp, synthetic construct
  source 1..75: mol_type = other DNA
cttatcagcgcgtggtggaaaacaaaggtgtggcggagttgaaaccgtggctgaagaagaactggcgcagcgtat

SEQ ID NO: 789279 - DNA, 75 bp, synthetic construct
  source 1..75: mol_type = other DNA
tttacggagcttcgagatttacagcgcgagcttcaacatgcaatccaccaaaagtttggtttccgccctgtcatt

SEQ ID NO: 789280 - DNA, 75 bp, synthetic construct
  source 1..75: mol_type = other DNA
cagtattcagatcttgttagaaggaaaagtggcaatgatggcacatattatcaaaacaacctaagtcaacatctt

SEQ ID NO: 789281 - DNA, 75 bp, synthetic construct
  source 1..75: mol_type = other DNA
ctggccggacagggcgttaatattggtgccaaaaagcttcgtcaggcagctattgagagggcaaagaaaatgtat

SEQ ID NO: 789282 - DNA, 75 bp, synthetic construct
  source 1..75: mol_type = other DNA
tttatcttttgcctgatgtttggttttttgagacaaatgtttaatagctggttgcagcttattttcagttcatgc

SEQ ID NO: 789283 - DNA, 75 bp, synthetic construct
  source 1..75: mol_type = other DNA
gggtgaccgacctgaccaccgccattttcgagagaaagatgggcattcaacttgaacagaaagttcacctggcag

SEQ ID NO: 789284 - DNA, 75 bp, synthetic construct
  source 1..75: mol_type = other DNA
gagcgggaatgactttcctaaatggcatcctaaccatatctatagcaaatgcagatgagttaaatcttatctcta

SEQ ID NO: 789285 - DNA, 75 bp, synthetic construct
  source 1..75: mol_type = other DNA
atttgtctgtctttcggttttttacgacaaatgtttaatagctggctacagctaatatttagctcatgcttgata

SEQ ID NO: 789286 - DNA, 75 bp, synthetic construct
  source 1..75: mol_type = other DNA
atggttctattgcggctatattgacatatgctggcggtattttagcgctgttactaacgtcaatagtttatcttg

SEQ ID NO: 789287 - DNA, 75 bp, synthetic construct
  source 1..75: mol_type = other DNA
tcgatgattagcctcgtagctactggccgtagtcagttaagccccgaaaaggtattgcgtatcgcagaggctacg

SEQ ID NO: 789288 - DNA, 75 bp, synthetic construct
  source 1..75: mol_type = other DNA
ccattatttatcgtttctgaaaatattaatattcatgctgaacctgatatcgaatattttcgagttatcgatagg

SEQ ID NO: 789289 - DNA, 75 bp, synthetic construct
  source 1..75: mol_type = other DNA
aatatattatggtaagtactatcagcaagtgtgtaacatcgttggagatagctcattaatacatgatcataataa

SEQ ID NO: 789290 - DNA, 75 bp, synthetic construct
  source 1..75: mol_type = other DNA
gggtaaccgatctgaccaccgccattttcgagaaaaagatgggcattcaacttgaacaaaaagttcgtctggcag

SEQ ID NO: 789291 - DNA, 75 bp, synthetic construct
  source 1..75: mol_type = other DNA
acgtttgtcttttgtaacccgatgaccttaagtcttggtcgctttatgccggaaaagtacaaacccagctattac

SEQ ID NO: 789292 - DNA, 75 bp, synthetic construct
  source 1..75: mol_type = other DNA
accgatggtttacctgttggatgtaaggctaacacacaaaatgcacaggagttgattcatgaaaatcaggcatga

SEQ ID NO: 789293 - DNA, 75 bp, synthetic construct
  source 1..75: mol_type = other DNA
tttacggagcttcgagatttacagcgcgaacttcaacatgcgatccaccaaaagtttggtttccgccctgtcatt

SEQ ID NO: 789294 - DNA, 75 bp, synthetic construct
  source 1..75: mol_type = other DNA
ttcacacccagcgcctgatcgcgatggcagaaaacatgccgattgatattctgcgcgtgcgtgacgacgacattc

SEQ ID NO: 789295 - DNA, 75 bp, synthetic construct
  source 1..75: mol_type = other DNA
aagtcgaagttatctaccgctcgaaagcctgcctgatccaacgcgatggcgaaatggaagaatccaaacagcaac

SEQ ID NO: 789296 - DNA, 75 bp, synthetic construct
  source 1..75: mol_type = other DNA
ttctacacccacatctccgaccaatacgcgccattccacaccaaggtggtcaatgtcggcctgcgcgactcaacc

SEQ ID NO: 789297 - DNA, 75 bp, synthetic construct
  source 1..75: mol_type = other DNA
ggtcagtagcgaaaccctgttctgggaaacgatggaaaaactgaaagcgctgggtgccagttcaatcctggtcct

SEQ ID NO: 789298 - DNA, 75 bp, synthetic construct
  source 1..75: mol_type = other DNA
tcagggcgtgatccaggcgcgcgaatcgaaatacatcatgatgcacgcaccgaccgaacgtctggatgatgtcat

SEQ ID NO: 789299 - DNA, 75 bp, synthetic construct
  source 1..75: mol_type = other DNA
agaccttgggattatcggcgaaaacgtgctggaagaagaactgcttaaccgccgcgcccagggtgaagatccgcg

SEQ ID NO: 789300 - DNA, 75 bp, synthetic construct
  source 1..75: mol_type = other DNA
atgacagtgaagatgattattatctttcaccgaaaaagaaacaaacccaggatgacaagaagcaaaaaattaaac

SEQ ID NO: 789301 - DNA, 75 bp, synthetic construct
  source 1..75: mol_type = other DNA
aaagagattgatgcaacctgcactttctctaaccaggcgtttgacagcctgatcccaagcctgaaattccgtcgc

SEQ ID NO: 789302 - DNA, 75 bp, synthetic construct
  source 1..75: mol_type = other DNA
gccaccgaagcctcctatcctccgtttgaatcgattgatgcaaacaaccagatcgttggttttgacgtcgacctg

SEQ ID NO: 789303 - DNA, 75 bp, synthetic construct
  source 1..75: mol_type = other DNA
gcacgtcaagatcaccgaactgctgctcgaagtcgatgagtggacgggcttcacccggcacttcacgcacttgaa

SEQ ID NO: 789304 - DNA, 75 bp, synthetic construct
  source 1..75: mol_type = other DNA
gtcggagatgaagaacgcgttgcgttccggcgacatctgggtgcaggggtcgcgccagttcaaggacttcgagga

SEQ ID NO: 789305 - DNA, 75 bp, synthetic construct
  source 1..75: mol_type = other DNA
tctaccgtaataatatcatggcctccttaacggaagcgctggcagaaaactgcccggtcctgcaacgacaggttg

SEQ ID NO: 789306 - DNA, 75 bp, synthetic construct
  source 1..75: mol_type = other DNA
gcggccaaatccgcattattggcgggcagtggcgaggccgtaaactcccggttcctgatagcccaggtctgcgcc

SEQ ID NO: 789307 - DNA, 75 bp, synthetic construct
  source 1..75: mol_type = other DNA
gagtacatatcctcgaatatcagagtaagattaataaattattatgttatttgactaaccggtatcctaggttaa

SEQ ID NO: 789308 - DNA, 75 bp, synthetic construct
  source 1..75: mol_type = other DNA
attacctcaccaaagttgagagcaaagtttttggtgaaggggatcgtaacttcggctgcagccaaatcgatctgt

SEQ ID NO: 789309 - DNA, 75 bp, synthetic construct
  source 1..75: mol_type = other DNA
cggacttgccaaagcactgagagaaattggccgcattgagcgaaccctgtttatgctcgactggttccgcgaccc

SEQ ID NO: 789310 - DNA, 75 bp, synthetic construct
  source 1..75: mol_type = other DNA
tgactatctcgcaaaaacgatcgttatcaggccagaatcgttacagttaaaactgcgaaaatcgctggtggtaga

SEQ ID NO: 789311 - DNA, 75 bp, synthetic construct
  source 1..75: mol_type = other DNA
cattaccacagcaagtatcaggcagaaaagttgcgggctgataaagcggaaggtgaagctgaatatcaagggaaa

SEQ ID NO: 789312 - DNA, 75 bp, synthetic construct
  source 1..75: mol_type = other DNA
gtgatagctaatcaggcattcaacttcaatcgattcaatcaggttgcagaacatgccaacaggcttaattccctg

SEQ ID NO: 789313 - DNA, 75 bp, synthetic construct
  source 1..75: mol_type = other DNA
cgacgatctgctcaagcgccgggacaacggcaagacgacctggttggcttggttgcgccagtctccggccaagcc

SEQ ID NO: 789314 - DNA, 75 bp, synthetic construct
  source 1..75: mol_type = other DNA
acccgcctggccaaggacaacgagctgcccgatgccatcctcaccgagtcagggctgaaaatcaccccgctggat

SEQ ID NO: 789315 - DNA, 75 bp, synthetic construct
  source 1..75: mol_type = other DNA
aacctggtgacggcggctatcgtgctgtggaacacggtgtacctggaacggcactgttgcaaagttagcgatgag

SEQ ID NO: 789316 - DNA, 75 bp, synthetic construct
  source 1..75: mol_type = other DNA
aaaggtgaggcgcgcaactcgctggccagggcggtgttcttcaaccgccttggggaaatcagggatcggagcttc

SEQ ID NO: 789317 - DNA, 75 bp, synthetic construct
  source 1..75: mol_type = other DNA
gacggctgttctatacccatatctccgaccagtacgcgccgttcagcacccgcgtggtgaatgtcggcgtccgcg

SEQ ID NO: 789318 - DNA, 75 bp, synthetic construct
  source 1..75: mol_type = other DNA
tcgaggactacctggtaccgcccgagaagttcaccagcctcaagcagtccagcgaattgccgctggccgtggcca

SEQ ID NO: 789319 - DNA, 75 bp, synthetic construct
  source 1..75: mol_type = other DNA
ttgtggtcggtgcgggtgttgcgggtaccgttgctgcactggtcatggcgcgagccgggctggatgtgctggtaa

SEQ ID NO: 789320 - DNA, 75 bp, synthetic construct
  source 1..75: mol_type = other DNA
gctttgcaatgtgcctgggtcgtaggcagtgcaggagctgctgtgagtgctgtcagttatctgcaacaactggca

SEQ ID NO: 789321 - DNA, 75 bp, synthetic construct
  source 1..75: mol_type = other DNA
ccgttgcagtggcctccccaccgacggcgagcatcgatgaattgcttgccagagccgatgaatatcctgaaagcg

SEQ ID NO: 789322 - DNA, 75 bp, synthetic construct
  source 1..75: mol_type = other DNA
atgcggcgtaacgacgagaaagtgatctttctggtgccgcacggctgggcggtagatatccccgcgatgctgatg

SEQ ID NO: 789323 - DNA, 75 bp, synthetic construct
  source 1..75: mol_type = other DNA
ttgagcgacctcgcagcccaacgacaagcatttaatattttgctggtgaagaacgtaccgcgcctgttccaagtg

SEQ ID NO: 789324 - DNA, 75 bp, synthetic construct
  source 1..75: mol_type = other DNA
gcttaacgatgtccgcaacggatgcttcccggtgatcctgccgcgtgtagtaaagggcagtaacgataaagtgac

SEQ ID NO: 789325 - DNA, 75 bp, synthetic construct
  source 1..75: mol_type = other DNA
ctagccgattatcctcaggccgatattcgcctcaacaacgataaaggcggctcaaccatgctgcgttcattggct

SEQ ID NO: 789326 - DNA, 75 bp, synthetic construct
  source 1..75: mol_type = other DNA
gaaaggggtttctgcgatgacactggtatctaatcatgtgccattatcaactgtggtaatttctccaaatgaata

SEQ ID NO: 789327 - DNA, 75 bp, synthetic construct
  source 1..75: mol_type = other DNA
tgtaaatacgtacaaattgatcccgagatggtgacggtgcaacttgagcaaaaagatggcgatatttctattctt

SEQ ID NO: 789328 - DNA, 75 bp, synthetic construct
  source 1..75: mol_type = other DNA
cgcggaagaaaaacacagccaacattgcaaaagaacggctgcagattattgttgctgaacgccgtcgcagcgatg

SEQ ID NO: 789329 - DNA, 75 bp, synthetic construct
  source 1..75: mol_type = other DNA
tatgatgggaaaacgcatcgcctgacgattcaggttcgcccaccgatggatgatctgttagacgcggatgatcat

SEQ ID NO: 789330 - DNA, 75 bp, synthetic construct
  source 1..75: mol_type = other DNA
acgttgcccgcgattggtcgtttgatgaaagtgtgccgtgcgcgcgttgtaccgctgtttccgatttatgatggc

SEQ ID NO: 789331 - DNA, 75 bp, synthetic construct
  source 1..75: mol_type = other DNA
ttgccttatccgaaactggaaaagcatggaaacgaaaaaaataatagcgaatacattcctgagtttgataaatcc

SEQ ID NO: 789332 - DNA, 75 bp, synthetic construct
  source 1..75: mol_type = other DNA
ataatacgacgcacagaacgtattcccggaagctgtagtgaatggaaagaggtggcattaccacttaaagccaga

SEQ ID NO: 789333 - DNA, 75 bp, synthetic construct
  source 1..75: mol_type = other DNA
tccggatggtgtggtggtggaatatgaccgcctgacacccttcgtgcatgaagatgacgccatgctgatgacggt

SEQ ID NO: 789334 - DNA, 75 bp, synthetic construct
  source 1..75: mol_type = other DNA
cgtggctatactctgggttaattctcgggtcgatgatggggccaacgattgtgttttccattccggtggcgctcg

SEQ ID NO: 789335 - DNA, 75 bp, synthetic construct
  source 1..75: mol_type = other DNA
cgattggcgtggcgatgatgctggtgccaaaagaagacgcggcaacggctaaaaccgcagcggaggcgcaatcgt

SEQ ID NO: 789336 - DNA, 75 bp, synthetic construct
  source 1..75: mol_type = other DNA
gcggatcagtacagaggatgaagccatgctgatgatggtgtctgagggaattgcaggaggtgtacgctatggcgg

SEQ ID NO: 789337 - DNA, 75 bp, synthetic construct
  source 1..75: mol_type = other DNA
ccacgagatattatctccggaaatgtgggtgatagtgatgtttatggtgcacagcaacacgcacctttattaagt

SEQ ID NO: 789338 - DNA, 75 bp, synthetic construct
  source 1..75: mol_type = other DNA
cgcaagtcattcgttcgaaaaatgccggaccttacgaactggttttagatattttatttaaaacgaaagaaaact

SEQ ID NO: 789339 - DNA, 75 bp, synthetic construct
  source 1..75: mol_type = other DNA
tggccgggatagtcactattccgattggctgtattgccggcggtttgatcgccatgtattccggcgtacagatca

SEQ ID NO: 789340 - DNA, 75 bp, synthetic construct
  source 1..75: mol_type = other DNA
gctggcgccggtactggcgcatgtgctgggtccggtgatcattccggtttacgaaatgctcggcgcaaacccttc

SEQ ID NO: 789341 - DNA, 75 bp, synthetic construct
  source 1..75: mol_type = other DNA
acatcatgatgttctttatgttgatagctgccgtagacaggatcctgtcgcagtttggcggttcggctcgtttcc

SEQ ID NO: 789342 - DNA, 75 bp, synthetic construct
  source 1..75: mol_type = other DNA
aagaggaagatatatataaaaccccacacatagcgcacgtgcgcgagggtgctccgaccagtgaagcgaacagta

SEQ ID NO: 789343 - DNA, 75 bp, synthetic construct
  source 1..75: mol_type = other DNA
gccagctttgccattgtgctgggtgcggcgctgtttggttactcatccgcgcaggaacaactggcgatggccttc

SEQ ID NO: 789344 - DNA, 75 bp, synthetic construct
  source 1..75: mol_type = other DNA
ttctccatgtgtggggagtctgtcggaggtttttaatgataccggtgaaacgcgaaaggatgctcacgatacggg

SEQ ID NO: 789345 - DNA, 75 bp, synthetic construct
  source 1..75: mol_type = other DNA
atgtttgatgggctgtttatggatcagcgagaaaaggccaaattgttggcttatgtattaaaaaccgagtggaac

SEQ ID NO: 789346 - DNA, 75 bp, synthetic construct
  source 1..75: mol_type = other DNA
tttacacaccttaaaagtggtgctgatcccggtgctgatcgccggagcaactgcgctattactgagccgcgcact

SEQ ID NO: 789347 - DNA, 75 bp, synthetic construct
  source 1..75: mol_type = other DNA
tttactggcaggcggtgcgcttggccttgccggggcgttaatgcaaaccctcacccgaaacccacttgccgatcc

SEQ ID NO: 789348 - DNA, 75 bp, synthetic construct
  source 1..75: mol_type = other DNA
gaacagtttaagcctcggcagtgacaccgcgacggcgctgggcagtcgcgtggcgcgcacacagttgattggtct

SEQ ID NO: 789349 - DNA, 75 bp, synthetic construct
  source 1..75: mol_type = other DNA
agattaacaaatctggtgtgctgacagaggctgccattgacgagccacgatttgaacgtgatggcctgcttattg

SEQ ID NO: 789350 - DNA, 75 bp, synthetic construct
  source 1..75: mol_type = other DNA
ttggatatgccattgttaatacgcggtctttattggttgaaatcaccggtgtagctgccgacaggctcaccgcac

SEQ ID NO: 789351 - DNA, 75 bp, synthetic construct
  source 1..75: mol_type = other DNA
cttgttgaagtaaatacactatgggaacctggctttatgcctaatattactggtggagcaaggattctggatata

SEQ ID NO: 789352 - DNA, 75 bp, synthetic construct
  source 1..75: mol_type = other DNA
gattgctggttttgtctgtaatagctcgactgaatttcgttgctgttgtaatggttacctgtcacctgttcagac

SEQ ID NO: 789353 - DNA, 75 bp, synthetic construct
  source 1..75: mol_type = other DNA
gcagagaatattgacgaagtggtatgcggtttttttataaccaatcctgaagatggtggtttttcttctgattcg

SEQ ID NO: 789354 - DNA, 75 bp, synthetic construct
  source 1..75: mol_type = other DNA
atccttcaagaaaataaagaaacagaaaatttcgatcttcattatatttcaaaagaggctaccaaattacttggt

SEQ ID NO: 789355 - DNA, 75 bp, synthetic construct
  source 1..75: mol_type = other DNA
tcacccgaaacccgcttgccgatcctggtttgcttggcgtgaacgccggtgccagttttgccattgtgctgggcg

SEQ ID NO: 789356 - DNA, 75 bp, synthetic construct
  source 1..75: mol_type = other DNA
gtggtgctgaccctgagccgtatttggtatagcgcggtgaccggcaaaattgcgccgaaagatgtggcggcggat

SEQ ID NO: 789357 - DNA, 75 bp, synthetic construct
  source 1..75: mol_type = other DNA
tgtaaatatgtacaaattgatcctgagatggtaaccgtacagcttgagcaaaaagatggcgatatttctattctt

SEQ ID NO: 789358 - DNA, 75 bp, synthetic construct
  source 1..75: mol_type = other DNA
atgaatactgtaaccatcaacaacaaacagtttccggtaatcgaatatcgcggtcagcgcatggtgacgctggcg

SEQ ID NO: 789359 - DNA, 75 bp, synthetic construct
  source 1..75: mol_type = other DNA
atttctggatggcctgagtgaacctattgggaaatttccgatgaccgatggctggcatccgtcgccggattttcg

SEQ ID NO: 789360 - DNA, 75 bp, synthetic construct
  source 1..75: mol_type = other DNA
cctttccggaacgttcgagcctgccgttctggatcacgatcttgcgattttgctgaccaaggcgaggcaacacag

SEQ ID NO: 789361 - DNA, 75 bp, synthetic construct
  source 1..75: mol_type = other DNA
ttgatttaaaagataatgttaatcagggagccggatatcttcagtttgcagatgattatacagtaacaacgagca

SEQ ID NO: 789362 - DNA, 75 bp, synthetic construct
  source 1..75: mol_type = other DNA
ccgccgcatatcgtcgaaaaattatgtactgtggcccagcgcccggacacgcatggttactccacttcacgcggc

SEQ ID NO: 789363 - DNA, 75 bp, synthetic construct
  source 1..75: mol_type = other DNA
cggcgctgtttggttactcttccgcgcaggaacaactggcgatggccttcgccggggcgctggtggcctcgttga

SEQ ID NO: 789364 - DNA, 75 bp, synthetic construct
  source 1..75: mol_type = other DNA
tgatgagtgaagcagaaccacgaggtgcacgctggtatcacccgaaaatggggttgttccaggcgctgggctggc

SEQ ID NO: 789365 - DNA, 75 bp, synthetic construct
  source 1..75: mol_type = other DNA
atggttgccgcgatggctcttgaagcagttcgtcagcagaaacggatcactcaggtggaagaaaaagtcagccac

SEQ ID NO: 789366 - DNA, 75 bp, synthetic construct
  source 1..75: mol_type = other DNA
tgttaatataaggagtgtgcgattaataaaagatcttgagtctcacggttttacacctgaaatagttcgagagtg

SEQ ID NO: 789367 - DNA, 75 bp, synthetic construct
  source 1..75: mol_type = other DNA
gaaaatctctgccaccaatacgttccatgccctcgccacggaatggcaccagcataaatctttgtcatggtctga

SEQ ID NO: 789368 - DNA, 75 bp, synthetic construct
  source 1..75: mol_type = other DNA
tttggaacgtgccagcagagcgcatgaaaatgcgccgccctcatctggttccgttatcaagccaggcaattgacc

SEQ ID NO: 789369 - DNA, 75 bp, synthetic construct
  source 1..75: mol_type = other DNA
gtccagtgccctcgaagtacacaaatcaaatcattttcctttcttaaaatcagatgagatacctgattttctgcg

SEQ ID NO: 789370 - DNA, 75 bp, synthetic construct
  source 1..75: mol_type = other DNA
tcaaatcattttcctttcttaaaatcagatgagatacctgattttctgcgtgctttagatagttatacaggaagc

SEQ ID NO: 789371 - DNA, 75 bp, synthetic construct
  source 1..75: mol_type = other DNA
tgttgatccttactggcctaagaacgggtgaattgcgtggtgccttatggtcggaaatcgattccgagaaagcgc

SEQ ID NO: 789372 - DNA, 75 bp, synthetic construct
  source 1..75: mol_type = other DNA
catgaagcagtccactatccattcctcaaagccaacgagctgccggagttctttactgcccttaacgcttattca

SEQ ID NO: 789373 - DNA, 75 bp, synthetic construct
  source 1..75: mol_type = other DNA
tgagtgaagcgagtatgaatcaggtattcaaacggattgggtatacggggaaggtaacggggcatggtttccgtc

SEQ ID NO: 789374 - DNA, 75 bp, synthetic construct
  source 1..75: mol_type = other DNA
gtggtgtttggtgtctacccgaccattaccttagccgatgccagaagcaaaagagatgatgctaaaaagctgctg

SEQ ID NO: 789375 - DNA, 75 bp, synthetic construct
  source 1..75: mol_type = other DNA
gggatatgcatcagacatcatggaagcgtttaagaacgacatttttccttatgtgggaacaaggccagtgggaga

SEQ ID NO: 789376 - DNA, 75 bp, synthetic construct
  source 1..75: mol_type = other DNA
gggatatgcatcagacatcatggaagcgtttaagaacgacatttttccttatgttggaacaaggcctgtgggaga

SEQ ID NO: 789377 - DNA, 75 bp, synthetic construct
  source 1..75: mol_type = other DNA
agagagatgatgcagtggtattcagactatttgattgatctacactctgtacgtagaatcttacatgcggtagtg

SEQ ID NO: 789378 - DNA, 75 bp, synthetic construct
  source 1..75: mol_type = other DNA
gaagatgaaacggcctcacctggtgcccctctctacccaagcgctggagattgcacagcagctcaaagtgatgtc

SEQ ID NO: 789379 - DNA, 75 bp, synthetic construct
  source 1..75: mol_type = other DNA
tattaaacggattggttatggagggaaagttaccgggcatggttttcggcatatgttttcaacacttttacatga

SEQ ID NO: 789380 - DNA, 75 bp, synthetic construct
  source 1..75: mol_type = other DNA
cgctatgcaatagtcactggtcgcgcagagtataaccctgcaccagaccttactagcgcgatgcaaggccatgaa

SEQ ID NO: 789381 - DNA, 75 bp, synthetic construct
  source 1..75: mol_type = other DNA
gtgctacagaaaaagccaaaaaagtgaggcagcggtgcggggaagttttccgctatgcaatagtcactggtcgcg

SEQ ID NO: 789382 - DNA, 75 bp, synthetic construct
  source 1..75: mol_type = other DNA
cgctatgcaattgtcactggacgtgctgagtataaccctgcaccggatctcaccagcgcgatgcaaggtcatgaa

SEQ ID NO: 789383 - DNA, 75 bp, synthetic construct
  source 1..75: mol_type = other DNA
agccctatccagatataccggaagcccgctggttgtgcttgccgcacgtttgctgatccttacgggagttcgtac

SEQ ID NO: 789384 - DNA, 75 bp, synthetic construct
  source 1..75: mol_type = other DNA
cgttacgccatcgttaccggtcgtgcggaatacaaccctgccgcggatctaaccagcgcgatgtcagggcatgaa

SEQ ID NO: 789385 - DNA, 75 bp, synthetic construct
  source 1..75: mol_type = other DNA
tttgggaaattcctgctgaaaggatgaaaatgcgcaggccgcatcttgtgccattgtctactcaggcgttagatt

SEQ ID NO: 789386 - DNA, 75 bp, synthetic construct
  source 1..75: mol_type = other DNA
gcaggggcgggcggatattgttatcgcgccggatatgcattttcgctcctcgtcggagatcaactcgcgcaaact

SEQ ID NO: 789387 - DNA, 75 bp, synthetic construct
  source 1..75: mol_type = other DNA
gacgatgccgtatccgatggtcgaaaaagatattgcggaagggcggttgcgtgtcgtcagcccggaatcgaccag

SEQ ID NO: 789388 - DNA, 75 bp, synthetic construct
  source 1..75: mol_type = other DNA
ggcgaacaaatgcggtaacacctttgaggcgatcgcccgtgagtggtatgaaaaacgcctggaccgatggtctcc

SEQ ID NO: 789389 - DNA, 75 bp, synthetic construct
  source 1..75: mol_type = other DNA
tgactactgatgcggaagccctcgcgcgcggttgggaaacgcatctcaccgttgtgaccgaggcgctggtgccga

SEQ ID NO: 789390 - DNA, 75 bp, synthetic construct
  source 1..75: mol_type = other DNA
gtggtgctgtttgaccgctcgggccatcgcaccaaattcaccaatgttggtcgtatgctgctggagcggggacgc

SEQ ID NO: 789391 - DNA, 75 bp, synthetic construct
  source 1..75: mol_type = other DNA
tggcgggggcgtgggaacggctggagcaggggcgggcggatattgttatcgcgccggatatgcattttcgttcct

SEQ ID NO: 789392 - DNA, 75 bp, synthetic construct
  source 1..75: mol_type = other DNA
gcagggctataacaccgcgtggatagagacacagctcgcacacgtcgataaaaactcaattcgtggcacatacaa

SEQ ID NO: 789393 - DNA, 75 bp, synthetic construct
  source 1..75: mol_type = other DNA
cctgatggcgctggcattcttcggtaacggttttgcttcgattacctggtcgctggtctcttctctggcaccgat

SEQ ID NO: 789394 - DNA, 75 bp, synthetic construct
  source 1..75: mol_type = other DNA
gccgccgcgcctgaccaaaggcatcagcaaagctgaactggattacattcgtgatggcggcggtctggtggatgg

SEQ ID NO: 789395 - DNA, 75 bp, synthetic construct
  source 1..75: mol_type = other DNA
agatgacaaacatgatctcatatcagggacttgttcgcaccttccctaacctggccgtggcttccgcccatattc

SEQ ID NO: 789396 - DNA, 75 bp, synthetic construct
  source 1..75: mol_type = other DNA
aacggttttgcttcgattacctggtcgctggtcgctggtctcttctctggcaccgatgcgcctgattggtttaac

SEQ ID NO: 789397 - DNA, 75 bp, synthetic construct
  source 1..75: mol_type = other DNA
gaccaataaccggatggtgaccagctggttcccggaacatgaacgcgcttctgccgttggtttttatacgtctgg

SEQ ID NO: 789398 - DNA, 75 bp, synthetic construct
  source 1..75: mol_type = other DNA
atgtcatctcaaaactacacagagaaagcagtaaaagctgcgggaaaatctttatctgaagtagcccgtcacttt

SEQ ID NO: 789399 - DNA, 75 bp, synthetic construct
  source 1..75: mol_type = other DNA
aaaatctgacccgtcaaaatttgatgcgtcgaaatctggcaaaaaagcgggttttcacccgtcagaatctggtgg

SEQ ID NO: 789400 - DNA, 75 bp, synthetic construct
  source 1..75: mol_type = other DNA
ctaacctacaggtcgaagtaggtacaagtgctggcagtactattgcaacggattttgaagtaatcccggaagtga

SEQ ID NO: 789401 - DNA, 75 bp, synthetic construct
  source 1..75: mol_type = other DNA
gctgagggaaaaaaccctagtgaggtacgaaaagaacaaaaactagcattaagaattcaatctgagaatgcattc

SEQ ID NO: 789402 - DNA, 75 bp, synthetic construct
  source 1..75: mol_type = other DNA
gcgtgacgacgccaagaaaaagcttgccgaaggtatcgatccatcgcttgccaagaaagaagaaaagctggttcg

SEQ ID NO: 789403 - DNA, 75 bp, synthetic construct
  source 1..75: mol_type = other DNA
ggctgaccccatgctgattgtggtggagcgcgataaagcgtccggccagaacgacgcggcccggggtgatgaact

SEQ ID NO: 789404 - DNA, 75 bp, synthetic construct
  source 1..75: mol_type = other DNA
tcaggtacgtactcaggttaaaatcacctactacgaaaacgcaacccgtacaactggcttcttcgtaatctacaa

SEQ ID NO: 789405 - DNA, 75 bp, synthetic construct
  source 1..75: mol_type = other DNA
ttatgaaacctatgtagctttcgtatcaagtacttctacaaatggcgataaggatcaagcagttacccgtgacat

SEQ ID NO: 789406 - DNA, 75 bp, synthetic construct
  source 1..75: mol_type = other DNA
gtcgctgcaagcccggggtttcgcgtcatggatggaagtccgccagggcggagacagctccgctggctccgttca

SEQ ID NO: 789407 - DNA, 75 bp, synthetic construct
  source 1..75: mol_type = other DNA
actaccggtttctatgttgtttatacttgctttgttagttctaccactattgacggtgataaagatgaagtagta

SEQ ID NO: 789408 - DNA, 75 bp, synthetic construct
  source 1..75: mol_type = other DNA
ttgccaaatcaaactaagctattttgaagatgctactaaagagaacggattctatgtggtttatacgtgctttgt

SEQ ID NO: 789409 - DNA, 75 bp, synthetic construct
  source 1..75: mol_type = other DNA
tacatcctattttaaatgagtttaatagtcatcttgaaagtgaaaggctattaacatcggaaaaaaaacaaccta

SEQ ID NO: 789410 - DNA, 75 bp, synthetic construct
  source 1..75: mol_type = other DNA
cgcgcttataactaccagtgcgcgatatgtggctttaatatgcgccacgacgacaccaccgtcgcgctggaagcg

SEQ ID NO: 789411 - DNA, 75 bp, synthetic construct
  source 1..75: mol_type = other DNA
gcggcccttgtgaaatccccaatggtctggcgctttgcgcaatacaccataaagcctttgataaaggatcgattg

SEQ ID NO: 789412 - DNA, 75 bp, synthetic construct
  source 1..75: mol_type = other DNA
aatacagaactgcactattcaactgaaggcaaagcgtaacagcaccactgtactggtgaacacggtggcctctga

SEQ ID NO: 789413 - DNA, 75 bp, synthetic construct
  source 1..75: mol_type = other DNA
caggcacgctgaatgattttctcggggccatgacggaagaagatgtcatgccggaggcattgcgtcgttttgagg

SEQ ID NO: 789414 - DNA, 75 bp, synthetic construct
  source 1..75: mol_type = other DNA
tgggattaaagcgatgttccgtgccgacggtttactacccgccagcagcaaacatattcacgaaaacgcggaata

SEQ ID NO: 789415 - DNA, 75 bp, synthetic construct
  source 1..75: mol_type = other DNA
atgattacgggcttttcgccatcatataaaaagattgttattggcgacgacgaaataacgatgcctggtgacaag

SEQ ID NO: 789416 - DNA, 75 bp, synthetic construct
  source 1..75: mol_type = other DNA
gtgacgccggatacaccggaaatacgggctgccatcaccgcggagttgcgttcgttcctgctgcgtgatggttat

SEQ ID NO: 789417 - DNA, 75 bp, synthetic construct
  source 1..75: mol_type = other DNA
aggccaaagatgagatgctgaccactatgaagaaagtgggtatggaggctgaatgtgatttagtaccacatccgg

SEQ ID NO: 789418 - DNA, 75 bp, synthetic construct
  source 1..75: mol_type = other DNA
cacgacgggtgaagcactcactatgacagtagggtacacctacggtaatgcctccagtaaagagccgggctggcg

SEQ ID NO: 789419 - DNA, 75 bp, synthetic construct
  source 1..75: mol_type = other DNA
ggccaccccacaagtagaagatgggccttgtgtatcatcttttattatatcaggagcgacggcggcgactcgtgc

SEQ ID NO: 789420 - DNA, 75 bp, synthetic construct
  source 1..75: mol_type = other DNA
ggctgtcgatgtatcaggcgataataagtgtgtgacgacatcgtgcagatttaaaacggatttggaactcctgtt

SEQ ID NO: 789421 - DNA, 75 bp, synthetic construct
  source 1..75: mol_type = other DNA
gttggtacaagtaaagcgcataccattatcggactgtattcgagtaccggaggggttgatacttcaggggacgaa

SEQ ID NO: 789422 - DNA, 75 bp, synthetic construct
  source 1..75: mol_type = other DNA
ctggcacgctgaatgattttctcggtgccatgacggaagaagatgtcatgccggaggcattgcgtcgttttgagg

SEQ ID NO: 789423 - DNA, 75 bp, synthetic construct
  source 1..75: mol_type = other DNA
tgcaagtgcggcggctgcttctgcctctgcatcagccaacagtcaaaaagctgcaaaaaccagtgaaaccaacgc

SEQ ID NO: 789424 - DNA, 75 bp, synthetic construct
  source 1..75: mol_type = other DNA
aagcaacctatattaataaatctggtgtgctgacagaggctgccattgacgagccacgatttgaacgtgatggcc

SEQ ID NO: 789425 - DNA, 75 bp, synthetic construct
  source 1..75: mol_type = other DNA
ttcatatttacggcgcggtgattgccggggcgcaggtacgctcagtgccgctggtggaaggtgtcgatttcttca

SEQ ID NO: 789426 - DNA, 75 bp, synthetic construct
  source 1..75: mol_type = other DNA
aagttatccgaaaccgaagatgatgatcctcggcttcccgtcgaacccaaccgcgcaatgcgtggaactggagtt

SEQ ID NO: 789427 - DNA, 75 bp, synthetic construct
  source 1..75: mol_type = other DNA
taaaaccaaatgggaatatatccggagtacagcaaccattcgcattggtggacaaactacagcaggattacgcca

SEQ ID NO: 789428 - DNA, 75 bp, synthetic construct
  source 1..75: mol_type = other DNA
caggctgcggagccgtataaacaagttttgcagccgcttcccgatgtgtggataccgtttaacgattcactggat

SEQ ID NO: 789429 - DNA, 75 bp, synthetic construct
  source 1..75: mol_type = other DNA
cgggcacgctgaatgattttctcggagccatgacggaagaagatgtcatgccggaggcattgcgtcgttttgagg

SEQ ID NO: 789430 - DNA, 75 bp, synthetic construct
  source 1..75: mol_type = other DNA
ccggcacgctgaatgattttctcggggccatgacggaagacgatgtcatgccggaggcattgcgtcgttttgagg

SEQ ID NO: 789431 - DNA, 75 bp, synthetic construct
  source 1..75: mol_type = other DNA
ctggcacgctgaatgattttctcggggccatgacggaagatgatgtcatgccggaggcattgcgtcgttttgagg

SEQ ID NO: 789432 - DNA, 75 bp, synthetic construct
  source 1..75: mol_type = other DNA
cgggcacgctgaatgattttctcggggccatgacggaagaggatgtcatgccggaggcattgcgtcgttttgagg

SEQ ID NO: 789433 - DNA, 75 bp, synthetic construct
  source 1..75: mol_type = other DNA
cgggcacgctgaatgattttctcggcgccatgacggaagacgatgtcatgccggaggcattgcgtcgttttgagg

SEQ ID NO: 789434 - DNA, 75 bp, synthetic construct
  source 1..75: mol_type = other DNA
cgggcacgctgaatgattttctcggtgccatgacggaagatgatgtcatgccggaggcattgcgtcgttttgagg

SEQ ID NO: 789435 - DNA, 75 bp, synthetic construct
  source 1..75: mol_type = other DNA
cctgctgccggcagccggagaggctgctgcgcagggctggagcattaaggatggcggaattcagttgtcagatgg

SEQ ID NO: 789436 - DNA, 75 bp, synthetic construct
  source 1..75: mol_type = other DNA
gtctggtgctgccggatgactggccggatgaactttatccgctgcgtaaagacagcatggattaccgtcagcgtc

SEQ ID NO: 789437 - DNA, 75 bp, synthetic construct
  source 1..75: mol_type = other DNA
gcagccgggcgcacctcagccttcatcagtggtaaggcaccggaaatcaaaccctcgcccggcggcaacacgcca

SEQ ID NO: 789438 - DNA, 75 bp, synthetic construct
  source 1..75: mol_type = other DNA
atttcagttcatgggcgcgcaggtagcattattccggatcgtctggcaaccgctattctgaacgcagccgggcgc

SEQ ID NO: 789439 - DNA, 75 bp, synthetic construct
  source 1..75: mol_type = other DNA
tgacatgatccagacccgccagctggcgcaacagatgcgtcgtgaagtgcaggagctggtggatgtgctgctgag

SEQ ID NO: 789440 - DNA, 75 bp, synthetic construct
  source 1..75: mol_type = other DNA
gacgttatttcgcgtctgaaagtgcgtatcaacgaagtctataccgcgctgaacatgatcgactacggtctggat

SEQ ID NO: 789441 - DNA, 75 bp, synthetic construct
  source 1..75: mol_type = other DNA
gatctgcggcttcgcccacagcaccgcttacaccacctcggtggaaaacgcgatggggattcaggtaccagaacg

SEQ ID NO: 789442 - DNA, 75 bp, synthetic construct
  source 1..75: mol_type = other DNA
cattaagaatggcggaattcagttgtcagagggtgtatttaagatcaccaagcagagcaataaagcctggtccct

SEQ ID NO: 789443 - DNA, 75 bp, synthetic construct
  source 1..75: mol_type = other DNA
cgtatatcccgaataacgcggggatcctgctggtaccatgctgtcgtggtggttcggcatttacccagggcgcgg

SEQ ID NO: 789444 - DNA, 75 bp, synthetic construct
  source 1..75: mol_type = other DNA
atgtcgattaaacattacgatgttgtcagggcggcgtcgccgtcagaccttgcggaaaagctgacacacaaactg

SEQ ID NO: 789445 - DNA, 75 bp, synthetic construct
  source 1..75: mol_type = other DNA
gtgagtgagggggagcttccctcacttgcagagtcaggcaatcacccgcatgtttcagcgaagcctgaagcagcg

SEQ ID NO: 789446 - DNA, 75 bp, synthetic construct
  source 1..75: mol_type = other DNA
acagggagagtgagggcgtttattttgtgcccttcatgacagacggtaacggcgtcaataccgccactaacgcgc

SEQ ID NO: 789447 - DNA, 75 bp, synthetic construct
  source 1..75: mol_type = other DNA
caccgccggcagtgccacggttactccgaaactgaatggagtggctggcccggcattccaggtcataaaagacag

SEQ ID NO: 789448 - DNA, 75 bp, synthetic construct
  source 1..75: mol_type = other DNA
tcgcggcatggaaaaactggcggaaacccgcatgggttacaacgaagtgaccttcctctctgaccgagtttgtgg

SEQ ID NO: 789449 - DNA, 75 bp, synthetic construct
  source 1..75: mol_type = other DNA
ggagatccacaggtcggcccttcatctgagccggactggttctacgtggttgtgcttgccggacagtccaatgcc

SEQ ID NO: 789450 - DNA, 75 bp, synthetic construct
  source 1..75: mol_type = other DNA
ctgacggatgttacaaaaaatgcagcgtatggcgttgagatagaaagtctgatgctggagataaatgcaccggca

SEQ ID NO: 789451 - DNA, 75 bp, synthetic construct
  source 1..75: mol_type = other DNA
accggaaatcaaaccctcgcccggcggcaacacgccatcgggtccgtctgcagatacgtccgttcgcacaatctc

SEQ ID NO: 789452 - DNA, 75 bp, synthetic construct
  source 1..75: mol_type = other DNA
cattattcccgatcgtatggcaaccgctattctgaacgcagccgggcgcacctcagctttcatcagtggtaaggc

SEQ ID NO: 789453 - DNA, 75 bp, synthetic construct
  source 1..75: mol_type = other DNA
gacgctgacggatgttacaaaaaatgcagcgtatggcgttgagatagaaagtctgatgctggagataaatgcacc

SEQ ID NO: 789454 - DNA, 75 bp, synthetic construct
  source 1..75: mol_type = other DNA
atttatctgtataccgatgtagcgttacctgacgtcgtggcgatgaccgggactggtaacccgttcctgatgtcg

SEQ ID NO: 789455 - DNA, 75 bp, synthetic construct
  source 1..75: mol_type = other DNA
acctctccgtgtttaacgcgcagtgccatggtggcagtgctgcagatgtgccgtggatttgtggtgacacgacgt

SEQ ID NO: 789456 - DNA, 75 bp, synthetic construct
  source 1..75: mol_type = other DNA
actcagaccactgacggcagagtgaatctgatgcatcacaggaaagccggaaacacgaagctgggggagttcggc

SEQ ID NO: 789457 - DNA, 75 bp, synthetic construct
  source 1..75: mol_type = other DNA
aaagagggctggcagccgtttggtagtccggtggccataaccccttataccctgaggtgtactggcaatagcgga

SEQ ID NO: 789458 - DNA, 75 bp, synthetic construct
  source 1..75: mol_type = other DNA
gttcaccaccggagccgatggcacatacagtgacgcgagtggtgcctcggagaattcaacccgctggggggtgga

SEQ ID NO: 789459 - DNA, 75 bp, synthetic construct
  source 1..75: mol_type = other DNA
catatcgccaaaaaattgctgccgtttataccggcgaatgcgggcattctgctggttccgtgctgtcgtggtggt

SEQ ID NO: 789460 - DNA, 75 bp, synthetic construct
  source 1..75: mol_type = other DNA
cagacctgagcaaagggcagtacggctgtgtcggccagggcttacatattgccaaaaaactgcttccgtatatcc

SEQ ID NO: 789461 - DNA, 75 bp, synthetic construct
  source 1..75: mol_type = other DNA
attgttggtacaagtaaagcgcataccattatcggactgtattcgagtaccggaggggttgatacttcaggggac

SEQ ID NO: 789462 - DNA, 75 bp, synthetic construct
  source 1..75: mol_type = other DNA
actgcgttactatcagggcaaagaatcagaaatagcggacgccgttgaattttttagcgataacaaagatgttgt

SEQ ID NO: 789463 - DNA, 75 bp, synthetic construct
  source 1..75: mol_type = other DNA
cgcaaacgcttgaaattaatatgacaggtggggctgccggcagaattacggcacgagtcaggaaggataagacca

SEQ ID NO: 789464 - DNA, 75 bp, synthetic construct
  source 1..75: mol_type = other DNA
atggttcaatatgctccagtaaaaggttcaggcacagcatctggagactatctggatatcgcaactccacaagtg

SEQ ID NO: 789465 - DNA, 75 bp, synthetic construct
  source 1..75: mol_type = other DNA
gttgatacttcaggggacgaaaagtatgtaactatatcctgtcgggtaaaaagtgaagttgataatatcgacgtt

SEQ ID NO: 789466 - DNA, 75 bp, synthetic construct
  source 1..75: mol_type = other DNA
taaagtcagatcagtctacgtgctcagtaagtaacgggcgtatatccagcgaaaagaaagccacatggtcctata

SEQ ID NO: 789467 - DNA, 75 bp, synthetic construct
  source 1..75: mol_type = other DNA
acggatttccttattgcgatattggaggagctaacagacgggtaaacgaaaacgcatcgcttgaaaaaatggtta

SEQ ID NO: 789468 - DNA, 75 bp, synthetic construct
  source 1..75: mol_type = other DNA
acatcatgatggttctacttacacttttttgggagatgcttacctcaatttatcaacacttgtaattgataaaac

SEQ ID NO: 789469 - DNA, 75 bp, synthetic construct
  source 1..75: mol_type = other DNA
cagcggcatcatcgaagaacgcagcgaaaacctcagaaacgaatgcagctaatagtgcacaggcggcagcgacct

SEQ ID NO: 789470 - DNA, 75 bp, synthetic construct
  source 1..75: mol_type = other DNA
aaacggcggaaattaatgagccgcgatttgagtgtgatggcctgcttattgagggacaaagaacgaactacatgc

SEQ ID NO: 789471 - DNA, 75 bp, synthetic construct
  source 1..75: mol_type = other DNA
cagcggcatcatcaaagaacgcggcgaaaacctcagaaacgaatgcagctaatagtgcacaggcggcagcgacct

SEQ ID NO: 789472 - DNA, 75 bp, synthetic construct
  source 1..75: mol_type = other DNA
acagccgggttacgtcatttatttggtcatgtcaggaatttcagaatatggcacaaggcattgactgatgctcag

SEQ ID NO: 789473 - DNA, 75 bp, synthetic construct
  source 1..75: mol_type = other DNA
ttccttttacggttctttgtgaggtacataagaactggtataaaacgccaaatgcagcaccgcgtgtttttaaca

SEQ ID NO: 789474 - DNA, 75 bp, synthetic construct
  source 1..75: mol_type = other DNA
gtatatccagcgaaacaaaaaccacatggtcctgtattcagaacaccgcaattatccgtattggaggccagacta

SEQ ID NO: 789475 - DNA, 75 bp, synthetic construct
  source 1..75: mol_type = other DNA
cacatcagggacacgtcatctattcggccatttgagaaatcttcgtctctggcataaagaattaactgatgcgca

SEQ ID NO: 789476 - DNA, 75 bp, synthetic construct
  source 1..75: mol_type = other DNA
tttgaacgtgatggcctgcttattgaggggcaaagaacgaactacatgctcaattcggaaagccctgccagttgg

SEQ ID NO: 789477 - DNA, 75 bp, synthetic construct
  source 1..75: mol_type = other DNA
taaggggtttaactatggaaggataactgttattaatgaaaatccgacagcacaaggatatcaggcaattgctgt

SEQ ID NO: 789478 - DNA, 75 bp, synthetic construct
  source 1..75: mol_type = other DNA
tatccccaatggctctacgttagatattgcgatgcctcaggcggagattgggtcgtacaggacgtcatttatcat

SEQ ID NO: 789479 - DNA, 75 bp, synthetic construct
  source 1..75: mol_type = other DNA
taaaacgccaaatgcagcgccacgtgtttttgataccggcggtcatcaaaccggagcggctattattcttggctt

SEQ ID NO: 789480 - DNA, 75 bp, synthetic construct
  source 1..75: mol_type = other DNA
atagaccgcttacgtgtcttgtcgaggttaatagaaattggggcgatattcctcctaatgtagcaccgcgtattt

SEQ ID NO: 789481 - DNA, 75 bp, synthetic construct
  source 1..75: mol_type = other DNA
atatatccggagtacagcaaccattcgcattggtggacaaactacagcaggattacgccatttatttgggcatgt

SEQ ID NO: 789482 - DNA, 75 bp, synthetic construct
  source 1..75: mol_type = other DNA
atataagtggttcagaccgacgaataaatgaaaatgccgggctggaaaaaatgcttattggtatgcgggtaaagt

SEQ ID NO: 789483 - DNA, 75 bp, synthetic construct
  source 1..75: mol_type = other DNA
atgattgaatggcaagatctgcatcactctgaattatcggtttcccagctttatgccttattacaactgcgttgc

SEQ ID NO: 789484 - DNA, 75 bp, synthetic construct
  source 1..75: mol_type = other DNA
agcagcccaaagcgagagcgcggcagccggttctgcgacttcagcagctggatcagcaactgctgcggctaacag

SEQ ID NO: 789485 - DNA, 75 bp, synthetic construct
  source 1..75: mol_type = other DNA
cggcatcatcgaagaacgcggcgaaaacctcagaaacgaatgcagctaatagtgcacaggcggcagcgacctcaa

SEQ ID NO: 789486 - DNA, 75 bp, synthetic construct
  source 1..75: mol_type = other DNA
actgcaggtaaggttgcgtatccgatttgataaatatgacggtagcgcaacaacttttcttggtgatgcgtatat

SEQ ID NO: 789487 - DNA, 75 bp, synthetic construct
  source 1..75: mol_type = other DNA
ctgtcggcagcgacacgggctgaaaaggcggcagaccgcgcagaagtcgcagcggaagtgactgcagagccctat

SEQ ID NO: 789488 - DNA, 75 bp, synthetic construct
  source 1..75: mol_type = other DNA
gatggcctgcttattgagggacaaagaacgaactacatgctcaattcggaaagtccagccagctgggggaagtca

SEQ ID NO: 789489 - DNA, 75 bp, synthetic construct
  source 1..75: mol_type = other DNA
cagcggcatcatcgaagaacgcggcgaaaacctcagaaacgaatgcagctaatagtgcacaggcggcagcggcct

SEQ ID NO: 789490 - DNA, 75 bp, synthetic construct
  source 1..75: mol_type = other DNA
tgatttctactgggacatcccgtgtgattccagttgttggtggtgaatatgttactatatctattcgtgttaagg

SEQ ID NO: 789491 - DNA, 75 bp, synthetic construct
  source 1..75: mol_type = other DNA
tgcttattgaggggcaaagaacaaactacatgctcaattcggaaagccctgcaagttgggggcgatcatcaaata

SEQ ID NO: 789492 - DNA, 75 bp, synthetic construct
  source 1..75: mol_type = other DNA
tgccccgggctataaaacaataaccatcggcagtgatgaaataacaatgcctgttaatggcatatgccaatttag

SEQ ID NO: 789493 - DNA, 75 bp, synthetic construct
  source 1..75: mol_type = other DNA
caacaaatctggcgaactgaaaacggcggaaattaatgagccacgatttgaaaaagaaggtttattgattgaagg

SEQ ID NO: 789494 - DNA, 75 bp, synthetic construct
  source 1..75: mol_type = other DNA
gggtgctaattttgataagactagttttatggatgtaaccacccctcaaatagagctaggttcttgcttatcatc

SEQ ID NO: 789495 - DNA, 75 bp, synthetic construct
  source 1..75: mol_type = other DNA
cacagactgcatcggcaaactccgcgacagcagccaaaaaatcagaaaccaacgcgaaaaacagcgagacagccg

SEQ ID NO: 789496 - DNA, 75 bp, synthetic construct
  source 1..75: mol_type = other DNA
cccgcgctagtgatatggttaatattcctattaccaataatttgggatctattccgttgagttgcttagttgagg

SEQ ID NO: 789497 - DNA, 75 bp, synthetic construct
  source 1..75: mol_type = other DNA
cggcgacgcgcgcaagcgatatggttacagttccgattaagaataatctttataatcttccttttacggttcttt

SEQ ID NO: 789498 - DNA, 75 bp, synthetic construct
  source 1..75: mol_type = other DNA
tcgggggctgtcgatgtatcaggcgataataagtgtgtgacgacatcgtgcagatttaaaacggatttggaactc

SEQ ID NO: 789499 - DNA, 75 bp, synthetic construct
  source 1..75: mol_type = other DNA
gttgcgtatccgatttgataaatatgacggtagcgcaacaacttttcttggtgatgcgtatattgatacacaaac

SEQ ID NO: 789500 - DNA, 75 bp, synthetic construct
  source 1..75: mol_type = other DNA
aaaaatggttatggggatgcgtgtaaagtcagatcagtctacgtgctcagtaagtaacgggcgtatatccagcga

SEQ ID NO: 789501 - DNA, 75 bp, synthetic construct
  source 1..75: mol_type = other DNA
agaaatatccacggattcttttaattttacttatggtagatttactgtaaaagatactcttattggtcaaacaag

SEQ ID NO: 789502 - DNA, 75 bp, synthetic construct
  source 1..75: mol_type = other DNA
cttacgccatctaagtggggagctacaacaagtgtaactataacagaaagtggtgttgatgagtttggctttact

SEQ ID NO: 789503 - DNA, 75 bp, synthetic construct
  source 1..75: mol_type = other DNA
gtctgtaacgattctctgattgggcaaacctcagccattaatatggcatcaattgctgcaacaaagtcagttgat

SEQ ID NO: 789504 - DNA, 75 bp, synthetic construct
  source 1..75: mol_type = other DNA
ccgggctataaaaaaatagctattggtgacgatgtggttcaggtcgccagtgataaacaggttaatttcagtcgc

SEQ ID NO: 789505 - DNA, 75 bp, synthetic construct
  source 1..75: mol_type = other DNA
tgaccatttcatgccgtgtcagaagtgatgttgaaaatataaggtgtcgtttaagatttgaacatcatgatggtt

SEQ ID NO: 789506 - DNA, 75 bp, synthetic construct
  source 1..75: mol_type = other DNA
tgcaacagaagatgatgttcgtccggaggcactgtatcgttttgaaaagatggtggaagaggtggcacgcaacgc

SEQ ID NO: 789507 - DNA, 75 bp, synthetic construct
  source 1..75: mol_type = other DNA
tgcagcagcccaaagcgagagagcggcagccagttctgcaagtgcggcggctacttctgccacggcatcagccaa

SEQ ID NO: 789508 - DNA, 75 bp, synthetic construct
  source 1..75: mol_type = other DNA
gcaattgatggtgagttaaaaataggctctcagatacagtattcacctaagcagggaggggcaaccgtatctggt

SEQ ID NO: 789509 - DNA, 75 bp, synthetic construct
  source 1..75: mol_type = other DNA
cttcggcagatgggccagacggatttccttattgcgatattggtggatcaaatagacgtgttaacgaaaacgcat

SEQ ID NO: 789510 - DNA, 75 bp, synthetic construct
  source 1..75: mol_type = other DNA
tatatttatctggccacccctcaggttgaggatggttcgtgtgtatcatcttttattatatcaggaacgacggcg

SEQ ID NO: 789511 - DNA, 75 bp, synthetic construct
  source 1..75: mol_type = other DNA
cgcagccagagagtatgcaagtcaggcagcagagccgtataaatatgtcttacagccactgcctgatgtgtggat

SEQ ID NO: 789512 - DNA, 75 bp, synthetic construct
  source 1..75: mol_type = other DNA
ggaccgtatccggcagtaaaactctctctgaaatatcagacacgaccgaaggtcgctccggagtttattccgcgt

SEQ ID NO: 789513 - DNA, 75 bp, synthetic construct
  source 1..75: mol_type = other DNA
gtgaccgcggtctggcgtgccggggagcaggagcagacaccaccggaaggctttgagtcctccggagctgaaacc

SEQ ID NO: 789514 - DNA, 75 bp, synthetic construct
  source 1..75: mol_type = other DNA
tggccaatgcaaaaggcggcgtgtatacctcggcaaacctgagtgcgtacagcaacagtattgtggatacgccca

SEQ ID NO: 789515 - DNA, 75 bp, synthetic construct
  source 1..75: mol_type = other DNA
cgaagaccagttattgcaggatgcctatctcaatagtctacgactggtagcggcaaacggctatgcgacagtggc

SEQ ID NO: 789516 - DNA, 75 bp, synthetic construct
  source 1..75: mol_type = other DNA
attgccctacgggacacgcagtcattactcttgcaggcgatctccccgccaaagctgttgtacataccgttggac

SEQ ID NO: 789517 - DNA, 75 bp, synthetic construct
  source 1..75: mol_type = other DNA
actattggtgctgatttttttataccagataatcgtgagcatataatacacaatgatgtttttgtcatcctttgt

SEQ ID NO: 789518 - DNA, 75 bp, synthetic construct
  source 1..75: mol_type = other DNA
gtcaactggaagggcttggtatgacgcaacagcaggcatcaggctggattgcccagcagatcaccaatcaggggc

SEQ ID NO: 789519 - DNA, 75 bp, synthetic construct
  source 1..75: mol_type = other DNA
ggacagcaacgaaaaaattgctggcatggctgacgaaatcaaaaaccatgccgacgaactcgagcagcaggcgaa

SEQ ID NO: 789520 - DNA, 75 bp, synthetic construct
  source 1..75: mol_type = other DNA
aacaagaaaccatcctgcagggtgccaaagggggaggtggcagttcacatactccggttgagcagcctgacgatc

SEQ ID NO: 789521 - DNA, 75 bp, synthetic construct
  source 1..75: mol_type = other DNA
gttttgcgccccctggctgggacaacgtcctgaagcggtttggcggcaatccagaaaatcgccagtcattgattg

SEQ ID NO: 789522 - DNA, 75 bp, synthetic construct
  source 1..75: mol_type = other DNA
accaacaatgtcatttgctgttatgacggcgaccgcgcaggtcgtgatgccgcgtggcgagcgttagaaactgcg

SEQ ID NO: 789523 - DNA, 75 bp, synthetic construct
  source 1..75: mol_type = other DNA
tggcgaagaccctgacacgctggtacgcaaagaaggtaaagaggcgtttgaagcgcggatggagcaggcgatgcc

SEQ ID NO: 789524 - DNA, 75 bp, synthetic construct
  source 1..75: mol_type = other DNA
tcgcggcgtagaaatgacttacaccaaggatttgctggttgaagtttatctgaacggtctggggaatggcctcag

SEQ ID NO: 789525 - DNA, 75 bp, synthetic construct
  source 1..75: mol_type = other DNA
ataccgataccgctaatggtgttactaccggttccatgactggtaagtacgttaaagttggagctgatgcattgg

SEQ ID NO: 789526 - DNA, 75 bp, synthetic construct
  source 1..75: mol_type = other DNA
gaacttccgtaccagactgtacacgaaatcattagcgaagcggaaaaagcacgtaagactaatggcgatgaaccc

SEQ ID NO: 789527 - DNA, 75 bp, synthetic construct
  source 1..75: mol_type = other DNA
aaaaaaatgcagctacttacgtttatctgaacggcacgcgcctgaccgtagaacttccgtaccagactgtacacg

SEQ ID NO: 789528 - DNA, 75 bp, synthetic construct
  source 1..75: mol_type = other DNA
gctgccacaggtaatggtaaattaaccgccaatgttgatggtaaggctgttgaattcactatttcggggagtact

SEQ ID NO: 789529 - DNA, 75 bp, synthetic construct
  source 1..75: mol_type = other DNA
caataactacagacatagatgtttacaaaaatagcgcgggccagttcactactacaaaagtggaaaataaagccg

SEQ ID NO: 789530 - DNA, 75 bp, synthetic construct
  source 1..75: mol_type = other DNA
gtttccggtcagacccagttcaacggcgtgaatgtgctggcgaaagatggttcgatgaagattcaggttggcgcg

SEQ ID NO: 789531 - DNA, 75 bp, synthetic construct
  source 1..75: mol_type = other DNA
atgaacgtgctgatggttccgttccgctgaaactgtccggaaaaatccacaaacagcctgaaagtattgcccgaa

SEQ ID NO: 789532 - DNA, 75 bp, synthetic construct
  source 1..75: mol_type = other DNA
ctgccggatcaaccgctggccggtaaaccggtattgattcagaccagctcaatgggcgtgattggcggcgcgcgc

SEQ ID NO: 789533 - DNA, 75 bp, synthetic construct
  source 1..75: mol_type = other DNA
atcgagcgcacttatacccgtgatttgctcgtggaagtttttctcgacggacgcggtaacggcctcaatcactaa

SEQ ID NO: 789534 - DNA, 75 bp, synthetic construct
  source 1..75: mol_type = other DNA
gggcgtcaataaaattaagcgcgacgggaacggtattgcgtaaatccggtacgctggtggtaactaaaattgccg

SEQ ID NO: 789535 - DNA, 75 bp, synthetic construct
  source 1..75: mol_type = other DNA
aatcgcggcctccagttctgccggtgctgcggtggcgacaccggtactgattgctgaaatgatccccgcctttaa

SEQ ID NO: 789536 - DNA, 75 bp, synthetic construct
  source 1..75: mol_type = other DNA
gatgggggtttcctgtcaggttgttgaggatattgtctacggtcgccggcgcctcactgttgtcgaagcgtccaa

SEQ ID NO: 789537 - DNA, 75 bp, synthetic construct
  source 1..75: mol_type = other DNA
ggtgtaaagaactcggctatcgctataatccagaacgggctggcacaggttacttcccgccgctctcaaaccgtg

SEQ ID NO: 789538 - DNA, 75 bp, synthetic construct
  source 1..75: mol_type = other DNA
atggctgtaagacagcataccccacgacttgcgcacacacaaacggcctttgtgtggcgttttctggcactgagt

SEQ ID NO: 789539 - DNA, 75 bp, synthetic construct
  source 1..75: mol_type = other DNA
tatttgataatgatccgtatcgcattttggctatagaggatggccaagttgtctggatgcaaataagcgctgata

SEQ ID NO: 789540 - DNA, 75 bp, synthetic construct
  source 1..75: mol_type = other DNA
tgaggtggatattttgcgcaacgatgtctgtgatatcagccttaacctgcaattgacggaacgtgtgctggtcag

SEQ ID NO: 789541 - DNA, 75 bp, synthetic construct
  source 1..75: mol_type = other DNA
atcccgccgttattcaggccatgcattacattcgtaatcacgcctgtaaagggattaaagtggatcaggtactgg

SEQ ID NO: 789542 - DNA, 75 bp, synthetic construct
  source 1..75: mol_type = other DNA
atgtttactaaacgtcatcgcatcacgttgctgttcaatgctaataaagcctatgaccgtcaagtagtagaaggt

SEQ ID NO: 789543 - DNA, 75 bp, synthetic construct
  source 1..75: mol_type = other DNA
atggctggaacacagcataccccacgcctagcgcacacacaaacggcctttgtgtggcgttttctggcactgagt

SEQ ID NO: 789544 - DNA, 75 bp, synthetic construct
  source 1..75: mol_type = other DNA
ctgacgtggtggcgctgtttgaaaaagcgcatcgggaagaggcgaaagattgcccgcaatctatctgcgttacgc

SEQ ID NO: 789545 - DNA, 75 bp, synthetic construct
  source 1..75: mol_type = other DNA
aatatactaaggagttacgcgatgccgggcaggagtatattccgcaacttatcgatgattattcggaaggcgtta

SEQ ID NO: 789546 - DNA, 75 bp, synthetic construct
  source 1..75: mol_type = other DNA
aaaaaatgctggagcaccgttcacaggccggggcgcaccgcaaagtggttgatctggcgaaactgcaaatcactc

SEQ ID NO: 789547 - DNA, 75 bp, synthetic construct
  source 1..75: mol_type = other DNA
atgctcaaacccgacagcctgcgcagggcgctgactgatgccgtcacggtgctgaaaactaaccccgagatgctg

SEQ ID NO: 789548 - DNA, 75 bp, synthetic construct
  source 1..75: mol_type = other DNA
cagtgcgccgcgttcagtttctaaaggtgatatcgataagaccttgcacgaattgaccgctgactggaaacatcc

SEQ ID NO: 789549 - DNA, 75 bp, synthetic construct
  source 1..75: mol_type = other DNA
gttaaagcagccggggaagatgatattgatgcattactttatactcgtgccgatattctgattgaacttcagcgt

SEQ ID NO: 789550 - DNA, 75 bp, synthetic construct
  source 1..75: mol_type = other DNA
taccggaaaaattatgcgtgattggcatcgataacgaagaactgacccgttatctttcgcgtgtcgccctctctt

SEQ ID NO: 789551 - DNA, 75 bp, synthetic construct
  source 1..75: mol_type = other DNA
tgcagagcttcactgaggtgattgacgccaagttacgatatccaaacacagcgttactctacatcgaattcgatt

SEQ ID NO: 789552 - DNA, 75 bp, synthetic construct
  source 1..75: mol_type = other DNA
taagattacctctgacgccaacagcgcgaagatcggcgacacgatgatgctgcagagcttcaccgaggtgattga

SEQ ID NO: 789553 - DNA, 75 bp, synthetic construct
  source 1..75: mol_type = other DNA
ttatgccgacgcgatggagccggtatttgagcaggcgctggtagcgcgatacggcttcaatcagctggaaatgac

SEQ ID NO: 789554 - DNA, 75 bp, synthetic construct
  source 1..75: mol_type = other DNA
cggaagacgatgcgatgctgctggcagacgtaccctatccgcagcgcaagtatcagcagatgggcctaaaggctg

SEQ ID NO: 789555 - DNA, 75 bp, synthetic construct
  source 1..75: mol_type = other DNA
gcggtaaaggtggcagcaatcagacccgaacacccgttgaagcaccggacagcattcagtccattgcaagggcaa

SEQ ID NO: 789556 - DNA, 75 bp, synthetic construct
  source 1..75: mol_type = other DNA
tgaagctcaggcaagggcaactgctgttgatcagctcactgcgagtactcaggtcatttctgataaagctgattc

SEQ ID NO: 789557 - DNA, 75 bp, synthetic construct
  source 1..75: mol_type = other DNA
aaggatatctatctcgatggaactccactggagaatgcggacggatcgcaaaacttcagcggcgtggcgtgggaa

SEQ ID NO: 789558 - DNA, 75 bp, synthetic construct
  source 1..75: mol_type = other DNA
gccgcaagggcggcagctcaagttcccgcaccccgactgaacaaccagacgatctccagtccgtagcgaaggcca

SEQ ID NO: 789559 - DNA, 75 bp, synthetic construct
  source 1..75: mol_type = other DNA
catcgtatcgatttaccacaggcaggcagtacatggacggtgcgcctgcgtaagcttacggcggatgccaacagc

SEQ ID NO: 789560 - DNA, 75 bp, synthetic construct
  source 1..75: mol_type = other DNA
taagattacctctgatgccaacagcgcgaagatcggcgacacgatgacgctgcagagcttcaccgaggtgattga

SEQ ID NO: 789561 - DNA, 75 bp, synthetic construct
  source 1..75: mol_type = other DNA
acggacggcggcacatggcagacggtactcaataccagcgtgaccggcaaaacgacgtctggttatgagcgcagc

SEQ ID NO: 789562 - DNA, 75 bp, synthetic construct
  source 1..75: mol_type = other DNA
ataaggattcatccagttctgggcacgcaagacacgtctgtgttatagcaaacgttaaaggtaatggtgcaggac

SEQ ID NO: 789563 - DNA, 75 bp, synthetic construct
  source 1..75: mol_type = other DNA
gtccaaatacttccatgctaattcaacggaagaagattcactggctgtcggtgaagactcgctggcaatgggtgc

SEQ ID NO: 789564 - DNA, 75 bp, synthetic construct
  source 1..75: mol_type = other DNA
atctgctgacctccggtgaatcagaatatcaggtgcataaatccctgccggtgcagactgaaatcaacggcaatc

SEQ ID NO: 789565 - DNA, 75 bp, synthetic construct
  source 1..75: mol_type = other DNA
tggataacgatgaacaggtgtatgttggcgattcagcgttaaacctgaaaggtcttgttaccctggacggcgtgc

SEQ ID NO: 789566 - DNA, 75 bp, synthetic construct
  source 1..75: mol_type = other DNA
gctgcactatctacttagccagggactggatactgaaaccattcgcaaggctatgagccaaaacctacgcggcga

SEQ ID NO: 789567 - DNA, 75 bp, synthetic construct
  source 1..75: mol_type = other DNA
cgatcaacggtattgctatcggcagtaacgcacgcgcaaaccatgcaaacagtattgcaatgggtaacggttctc

SEQ ID NO: 789568 - DNA, 75 bp, synthetic construct
  source 1..75: mol_type = other DNA
atgccaatgcccagggtaaagatagcgttgctattggttctggttccattgctgccgctgacaacagcgtcgctc

SEQ ID NO: 789569 - DNA, 75 bp, synthetic construct
  source 1..75: mol_type = other DNA
aaatccgaatggcaaaaactgggtaggcaaagactcaaccgctattgctggcgtgaacgtggatatcggcaaatc

SEQ ID NO: 789570 - DNA, 75 bp, synthetic construct
  source 1..75: mol_type = other DNA
ccatgaactggaacgtctcgatcagacactgaatctgccactggtgaattttacctggtcgcgcgatatccagtt

SEQ ID NO: 789571 - DNA, 75 bp, synthetic construct
  source 1..75: mol_type = other DNA
tcgacggtactggtgcctttcttatccatgaactggaacgtctcgatcagacactgaatctgccactggtgaatt

SEQ ID NO: 789572 - DNA, 75 bp, synthetic construct
  source 1..75: mol_type = other DNA
ctcgatagcgtgaacagcattctgtctaatgcctgggcagcatccggttattccatcgtgccttctgatctgcgc

SEQ ID NO: 789573 - DNA, 75 bp, synthetic construct
  source 1..75: mol_type = other DNA
tggcgattccgcattaaacctgaaaggccttgttaccctggacggcgtgcctgtcaacaacgctgccaaaacgtg

SEQ ID NO: 789574 - DNA, 75 bp, synthetic construct
  source 1..75: mol_type = other DNA
acgctgaacctgccgctggtgggttacacctggacccgcgatattcagctgcgtgaagacgtttctatcgcagat

SEQ ID NO: 789575 - DNA, 75 bp, synthetic construct
  source 1..75: mol_type = other DNA
gactggcagcatattgctgaagatattaaagcgcactatgacgactatgatggttttgtcattctgcacggtaca

SEQ ID NO: 789576 - DNA, 75 bp, synthetic construct
  source 1..75: mol_type = other DNA
gtggtacttcctccaaaagtgcgttacgaggagatggccaataatgaattttgtccaaatctagcgaaaattttc

SEQ ID NO: 789577 - DNA, 75 bp, synthetic construct
  source 1..75: mol_type = other DNA
aaaggcgatccgaaagcggtgaagattgaagagagtgaaatcaattacctgctgaaagtgtataacgcgcacttt

SEQ ID NO: 789578 - DNA, 75 bp, synthetic construct
  source 1..75: mol_type = other DNA
cacgacctggcggcaccgatcctggcgggaattattaccgcagcgattgtcagctggtggcgtaaccggaagtaa

SEQ ID NO: 789579 - DNA, 75 bp, synthetic construct
  source 1..75: mol_type = other DNA
ctgcgcgacaatcgcaacaacgatcgccacatcatgcgtgaaatccgtgaggcggtcgccagtctgattgttcct

SEQ ID NO: 789580 - DNA, 75 bp, synthetic construct
  source 1..75: mol_type = other DNA
gtaattatcaacatgtaaaactgctggaagatgtcattctcccctcgtatgacgaactcagtaccatgctcgacc

SEQ ID NO: 789581 - DNA, 75 bp, synthetic construct
  source 1..75: mol_type = other DNA
gttttccataaatcattttattatgaagaattctgtaacgttaaagatgaaattgatgatccaattttattgcaa

SEQ ID NO: 789582 - DNA, 75 bp, synthetic construct
  source 1..75: mol_type = other DNA
atttatcaagttttccgtgctccagggacattcaaagaactctacaaaaataatcttttttatagtgtcttggct

SEQ ID NO: 789583 - DNA, 75 bp, synthetic construct
  source 1..75: mol_type = other DNA
cggcagtgctggcgcgtgatgcagggctaaacgtggtgatggatcgctgcccggcgattgagatccctcgtctgg

SEQ ID NO: 789584 - DNA, 75 bp, synthetic construct
  source 1..75: mol_type = other DNA
gccggtaaaacgctgctgggccagcagggttacggtacgctggcggaagttccggaaaaagtagatatggtagat

SEQ ID NO: 789585 - DNA, 75 bp, synthetic construct
  source 1..75: mol_type = other DNA
atgattgaagaaaaagaagtagacaaggaaattcctgacggtcgtgatgagcttatttgttttgacggcggcctg

SEQ ID NO: 789586 - DNA, 75 bp, synthetic construct
  source 1..75: mol_type = other DNA
acgctgtctcgtggtgcatggctggcagtattcatagtgactctgctatggttaatcttaaatcgtcagtggaaa

SEQ ID NO: 789587 - DNA, 75 bp, synthetic construct
  source 1..75: mol_type = other DNA
aatcgtcagtggaaattattgatgctgacttccatcgttatttctgttgccgcagtgggtgtatttacctataaa

SEQ ID NO: 789588 - DNA, 75 bp, synthetic construct
  source 1..75: mol_type = other DNA
tgccggaaacatctccgtaatggagtacatcaggatcaacagcatcgcgttccaggagaacggcgtgccgttgga

SEQ ID NO: 789589 - DNA, 75 bp, synthetic construct
  source 1..75: mol_type = other DNA
tgctggcgcgatgatccgcgcaggcagcatcgttacggctatgacccgcaacggcaatatgttcgggattcgggt

SEQ ID NO: 789590 - DNA, 75 bp, synthetic construct
  source 1..75: mol_type = other DNA
cggattactgagtggttttaatacggcataccgcggtgcaattcatgccccgtctgcatctgccactgtgaacaa

SEQ ID NO: 789591 - DNA, 75 bp, synthetic construct
  source 1..75: mol_type = other DNA
atgaactggttttcaaatcactttggaaaaacttggctggcgattctggctttcatagctctcatggccgccggt

SEQ ID NO: 789592 - DNA, 75 bp, synthetic construct
  source 1..75: mol_type = other DNA
atgagttccatcaacgcaacattgcttcctcagcactgttgatgcgtgcgctggcaccgcaaatcgcccgtctcg

SEQ ID NO: 789593 - DNA, 75 bp, synthetic construct
  source 1..75: mol_type = other DNA
gcgcggtatcgatctcaccgcgatgatggcgcagggcattaccatgggcgatgagttccatcagcgcaatattgc

SEQ ID NO: 789594 - DNA, 75 bp, synthetic construct
  source 1..75: mol_type = other DNA
gagcggtatctgaagagatggcggaaatcttccttgaacgcaatatgcagttgcagatccccggctgggatttcc

SEQ ID NO: 789595 - DNA, 75 bp, synthetic construct
  source 1..75: mol_type = other DNA
gtcttcccgagcgaaaacggtctgcgctgcgggacgcgcgaattgaattatggcccacaccagtggcgcggcgac

SEQ ID NO: 789596 - DNA, 75 bp, synthetic construct
  source 1..75: mol_type = other DNA
ctaagagtgatacaaaagtcggtggtacaggtattgatgcgactgggcttgcaaaagccgcagtttctttagcta

SEQ ID NO: 789597 - DNA, 75 bp, synthetic construct
  source 1..75: mol_type = other DNA
atgtatctgagcaaatcagaaggtggtagcccgattctggtaaacgaagatgcagcaaaatcgttgcaatctgct

SEQ ID NO: 789598 - DNA, 75 bp, synthetic construct
  source 1..75: mol_type = other DNA
gccacggggcgcgcgcctgacggttctcattggctggaaaggagaaccgctgaacagaaaaaggcacttacattg

SEQ ID NO: 789599 - DNA, 75 bp, synthetic construct
  source 1..75: mol_type = other DNA
tcactattttgacaccgggaatggacgagcagggcaatatgagcgaggaggggatcccggcggcgctggtggcaa

SEQ ID NO: 789600 - DNA, 75 bp, synthetic construct
  source 1..75: mol_type = other DNA
ccatcgccatctgctgcacgcggaagaaggcacatggctgaatatcgacggtttccatatggggattggtggcga

SEQ ID NO: 789601 - DNA, 75 bp, synthetic construct
  source 1..75: mol_type = other DNA
atgagttccatcagcgcaacattgcatcctcagcactgttgatgcgcgcgctggcaccgcaaattgcccgcctcg

SEQ ID NO: 789602 - DNA, 75 bp, synthetic construct
  source 1..75: mol_type = other DNA
ttaaatcgttatgtaaatgagacactgtatgatgagatggatctggaatatggttcggtaatcatcaaaatagta

SEQ ID NO: 789603 - DNA, 75 bp, synthetic construct
  source 1..75: mol_type = other DNA
taagtatgttatgtgaaaaaacacctgaagtgatgagtcttatccaagaaagcttggatatatttatcgcattaa

SEQ ID NO: 789604 - DNA, 75 bp, synthetic construct
  source 1..75: mol_type = other DNA
ttgacatgcgccctgaggggcgtaaaggcaaacgcattcgacaaaaaatttaaaacgaaatcggatgcagtttta

SEQ ID NO: 789605 - DNA, 75 bp, synthetic construct
  source 1..75: mol_type = other DNA
gagcagtcatctttcaccaacaccgatctggcagccgctggtggtgtaaacccgaacggtaaaaactggataggc

SEQ ID NO: 789606 - DNA, 75 bp, synthetic construct
  source 1..75: mol_type = other DNA
gagcagtcctccttcaccaacaccgatatcgcggccgctggtggtgtgaacccgaacggcaaaaactggatcggc

SEQ ID NO: 789607 - DNA, 75 bp, synthetic construct
  source 1..75: mol_type = other DNA
ttgcagagcgttcctatccagtatcgcggtctgtaccagattgcgacctactatggcaagctcggtgcggttgag

SEQ ID NO: 789608 - DNA, 75 bp, synthetic construct
  source 1..75: mol_type = other DNA
taacgactttgcagacgtggccaggcagacgatttccgcttcggttgatcatgaagaaggtacgctagcgatgta

SEQ ID NO: 789609 - DNA, 75 bp, synthetic construct
  source 1..75: mol_type = other DNA
tttacgccagtgaggaggattatcaactgcaccgacaaacgccgcacttcctggattacctcaggcaaacggcgc

SEQ ID NO: 789610 - DNA, 75 bp, synthetic construct
  source 1..75: mol_type = other DNA
tggcaggagatgaccgggcccatgaaaggggcatgcgtgggcgcgtgtttgtttgaaggctgggcgaaagatgaa

SEQ ID NO: 789611 - DNA, 75 bp, synthetic construct
  source 1..75: mol_type = other DNA
tgctggatgcactggctgaaaatcccgatgaacggctggctgtcgaaatccttctgtcgaccggggcgcgatggg

SEQ ID NO: 789612 - DNA, 75 bp, synthetic construct
  source 1..75: mol_type = other DNA
ggggcgtaaaggcaaacgcattcgtaaaaaatttaaaacgaaatcggatgcagttttatatgagcggtgggtgct

SEQ ID NO: 789613 - DNA, 75 bp, synthetic construct
  source 1..75: mol_type = other DNA
accgtaaaaattatccaccagttgttagcgggcgtacatattgctgccggagccgaagcgatggcgcttgcagcc

SEQ ID NO: 789614 - DNA, 75 bp, synthetic construct
  source 1..75: mol_type = other DNA
ggggatcgatggtgaaattgtttatcagaggtcaaaaaaacacggtgttttccgggtgctgccggtaaaaggcgc

SEQ ID NO: 789615 - DNA, 75 bp, synthetic construct
  source 1..75: mol_type = other DNA
tttggcgatgatgcctcgcctttcggtcttaagtgggagaagaataagccagaaagtgttttctacctttgtgag

SEQ ID NO: 789616 - DNA, 75 bp, synthetic construct
  source 1..75: mol_type = other DNA
catgcggatggcaccgaaatgactatttcccgtgtctgctgggacaccggggggatcgatggtgaaattgtttat

SEQ ID NO: 789617 - DNA, 75 bp, synthetic construct
  source 1..75: mol_type = other DNA
cggaacttgaccagacagacgggcgctggatttgtgacaacaccgggatgtggacgcaagacggcctggcatttt

SEQ ID NO: 789618 - DNA, 75 bp, synthetic construct
  source 1..75: mol_type = other DNA
ctggctggatgcgctgaaggatccgaacggcgtcaagacgtttattaacaccacgctcggggagccctatgaaga

SEQ ID NO: 789619 - DNA, 75 bp, synthetic construct
  source 1..75: mol_type = other DNA
ggccgtgggcgaaaaactcgatcaccaggtactgatggataaggttgtgcgttacacggcggcggtgcctgcccg

SEQ ID NO: 789620 - DNA, 75 bp, synthetic construct
  source 1..75: mol_type = other DNA
cagttatttcagtttgaacccagggaggtcagacggatttttgctggcgagtacgaaatccgttacgaacttaat

SEQ ID NO: 789621 - DNA, 75 bp, synthetic construct
  source 1..75: mol_type = other DNA
atctgccggatctgatcgcttcgctcgatcagccgttcctgctgatcctcgacggtgtaaccgatccgcacaacc

SEQ ID NO: 789622 - DNA, 75 bp, synthetic construct
  source 1..75: mol_type = other DNA
ccttgagtcccagggcgtggttatccagttggcaaaccgtcagtatctcgatgagaaaagcgacggtgccgtgca

SEQ ID NO: 789623 - DNA, 75 bp, synthetic construct
  source 1..75: mol_type = other DNA
ctggtgcagggggtgatccgcgacaataacggtaacacgctggatctcggcacttacggtactacccccctcgac

SEQ ID NO: 789624 - DNA, 75 bp, synthetic construct
  source 1..75: mol_type = other DNA
tccacagtttcacctgggacggtacgttgactgacggcagcactgcgccgaacggttcttacaatgtagcgatta

SEQ ID NO: 789625 - DNA, 75 bp, synthetic construct
  source 1..75: mol_type = other DNA
aagttacggccaccatcaccgataaaaatggtgcggttgtgcgcaccattgatattggtgaactgaccgccggag

SEQ ID NO: 789626 - DNA, 75 bp, synthetic construct
  source 1..75: mol_type = other DNA
aaatctgcccgtgttggctatacaaagatgttgctgggggggggcgggtattttattgagcataaatcccgaaac

SEQ ID NO: 789627 - DNA, 75 bp, synthetic construct
  source 1..75: mol_type = other DNA
ctaattctgcaggagcgatagcaaccggccttcttgcgctaaaaattcctgtccccctgacgacagttcagtggg

SEQ ID NO: 789628 - DNA, 75 bp, synthetic construct
  source 1..75: mol_type = other DNA
tttcccgtgtctgctgggacaccggggggatcgatggcgaaatcgtctatcagaggtcaaaaaaacacggtgttt

SEQ ID NO: 789629 - DNA, 75 bp, synthetic construct
  source 1..75: mol_type = other DNA
ctgagcttgaccagagcaacgggcggtggatctgcgaaaacacggggatgtggacccgcgacggtctgacgtttt

SEQ ID NO: 789630 - DNA, 75 bp, synthetic construct
  source 1..75: mol_type = other DNA
tggctgtactggcaaaatcccgggaagaagagacgacccggccaacccttaaagaactggcagcgaagctgtccg

SEQ ID NO: 789631 - DNA, 75 bp, synthetic construct
  source 1..75: mol_type = other DNA
ccatacgtggctcaacgccgaaaattaaaggctcctgtcagattgagaaagccgcgaatgaatctgcgcatttca

SEQ ID NO: 789632 - DNA, 75 bp, synthetic construct
  source 1..75: mol_type = other DNA
cgggtggcaaaacagatcgaagaaggggttgaatcgcaggctattctggtagcgggaaggcgaagcggcgtgcat

SEQ ID NO: 789633 - DNA, 75 bp, synthetic construct
  source 1..75: mol_type = other DNA
tcgccatcatgaacagtatggggaatgatcagatccgcactgttaatctgattaaatctgcccgtgttggctata

SEQ ID NO: 789634 - DNA, 75 bp, synthetic construct
  source 1..75: mol_type = other DNA
ggtatggccgacagatgtgtccaccctggatgttgatgcaatggtggtacgcgaaaccacccaccgtttcagccg

SEQ ID NO: 789635 - DNA, 75 bp, synthetic construct
  source 1..75: mol_type = other DNA
tcggcgcgtgcctgcgtagcgcagatgccgctggtgttcatgcggtgattgtgccgaaagatcgctccgcccagc

SEQ ID NO: 789636 - DNA, 75 bp, synthetic construct
  source 1..75: mol_type = other DNA
aggaagagacgctgttacgtgtggatgcggcgatcaacaaaaaataccgccatgcagacggaaccgaaatgacca

SEQ ID NO: 789637 - DNA, 75 bp, synthetic construct
  source 1..75: mol_type = other DNA
gcctgaaatgggagaagggcaagccggagacggtgtattacctgtgtgaacataatggctgcgtgatccgtcagt

SEQ ID NO: 789638 - DNA, 75 bp, synthetic construct
  source 1..75: mol_type = other DNA
ctgaaagttggcggtgccggagtgcgctcaccgcttgatgcgctgccgggcactgttgcaaatagtcggtggtga

SEQ ID NO: 789639 - DNA, 75 bp, synthetic construct
  source 1..75: mol_type = other DNA
atgatttcagacgcacagaaggcagctaatgcagccggtgcgatagcaacagggcttttatctctcattattcct

SEQ ID NO: 789640 - DNA, 75 bp, synthetic construct
  source 1..75: mol_type = other DNA
cacatgtatgaccagacctttcagcgcgccttcaaacgtgccgtagaacaagcaggggcactgttgcaaatagtc

SEQ ID NO: 789641 - DNA, 75 bp, synthetic construct
  source 1..75: mol_type = other DNA
tcatgttgagccaacgataagggaggttcctgcgttgctggagctggctccatggttcggaagaaaacaccgcga

SEQ ID NO: 789642 - DNA, 75 bp, synthetic construct
  source 1..75: mol_type = other DNA
atttcagtacaacgatggcaactggaccttgaggcactggcccgggcacgaagagacgagcaggatgaggatgat

SEQ ID NO: 789643 - DNA, 75 bp, synthetic construct
  source 1..75: mol_type = other DNA
tgcttactccaaggaaatcttcaacaatcttatccgagcattctcccctgcttccattgatataaatgcagtaaa

SEQ ID NO: 789644 - DNA, 75 bp, synthetic construct
  source 1..75: mol_type = other DNA
agatgttgctgggggtggtcgggtattttattgagcataaatcccgaaacagtctgctttttcagcccacggatt

SEQ ID NO: 789645 - DNA, 75 bp, synthetic construct
  source 1..75: mol_type = other DNA
tggacgcgtgacggtctgacattttacagcgccggtgatgaggaaatcccgccaccgcgctcaatctcgtatcac

SEQ ID NO: 789646 - DNA, 75 bp, synthetic construct
  source 1..75: mol_type = other DNA
atcttcgaaaaagactcgactcgtacccgttgctctttcgaagttgccgcatttgaccagggcgcgcgcgttacc

SEQ ID NO: 789647 - DNA, 75 bp, synthetic construct
  source 1..75: mol_type = other DNA
gccgacgctgcttggcgataaacgtatcgaaggctcggtatggcctaaatccatacgcggctcaacgccaaaaat

SEQ ID NO: 789648 - DNA, 75 bp, synthetic construct
  source 1..75: mol_type = other DNA
ctacattagagagtcaaattcataattttgtttttcctttccgggccgggctgagggggctgattcgtccgttgc

SEQ ID NO: 789649 - DNA, 75 bp, synthetic construct
  source 1..75: mol_type = other DNA
gtacgaaatccgctacgaactcactggtcagactatctatgtattacgtctgtggcatacgcgggagaacagata

SEQ ID NO: 789650 - DNA, 75 bp, synthetic construct
  source 1..75: mol_type = other DNA
ttttattgagcacaaatcccgcaacactcttctttttcagccgacggactcagctgctgaagattttatgaagtc

SEQ ID NO: 789651 - DNA, 75 bp, synthetic construct
  source 1..75: mol_type = other DNA
atctggctgtactggcaaaatcccgggaagaagagacgacccggccaaccctgaaagaactggcagcgaagctgt

SEQ ID NO: 789652 - DNA, 75 bp, synthetic construct
  source 1..75: mol_type = other DNA
ggcttaaatgggagaaggactgccccgaaagcgttttctacctttgtgagcatcatggctgtgtgattcatcagt

SEQ ID NO: 789653 - DNA, 75 bp, synthetic construct
  source 1..75: mol_type = other DNA
tggatgctgatattggttttggctcttcggcctttaacgtcgcccgcaccgtgaaatcgatgatcaaagcagggg

SEQ ID NO: 789654 - DNA, 75 bp, synthetic construct
  source 1..75: mol_type = other DNA
agacgctgttacgtgtggatgcggcgatcaacaaaaaatactgccatgcagacggaaccgaaatgaccatttccc

SEQ ID NO: 789655 - DNA, 75 bp, synthetic construct
  source 1..75: mol_type = other DNA
tgcggttttatgtgccatgccctcattgtggtgaagcccagtatctgaagtttggcgatgatgcgacaacctttg

SEQ ID NO: 789656 - DNA, 75 bp, synthetic construct
  source 1..75: mol_type = other DNA
tcatcgggcgtcggtttctggtgcctgggcggcgctgccgccaaaaactaccgtgaaaaatccgtggacgtggtc

SEQ ID NO: 789657 - DNA, 75 bp, synthetic construct
  source 1..75: mol_type = other DNA
aaccgcactggcaaaatcccgcacagaagaacagcaacaaccaacacttgaacaacttgccgcaatactggcagg

SEQ ID NO: 789658 - DNA, 75 bp, synthetic construct
  source 1..75: mol_type = other DNA
gtcccctgccttaaagcgttgtctccgtggctgggcagaaaacatcgtgacaacacgctcaccctgaagcgtttt

SEQ ID NO: 789659 - DNA, 75 bp, synthetic construct
  source 1..75: mol_type = other DNA
catgaaccgcgccgctgaacatgtctacaacgtcctgcgtcaggaaggcacgcagaaaagcgtcatcgacaccat

SEQ ID NO: 789660 - DNA, 75 bp, synthetic construct
  source 1..75: mol_type = other DNA
gatgcggtgcaggtgccgatcctcgccaacattaccgaatttggtgccacgccgctgtttaccaccgacgaatta

SEQ ID NO: 789661 - DNA, 75 bp, synthetic construct
  source 1..75: mol_type = other DNA
accattaaaggctatcttaatgacggcattgtgattggcgggctggttgtggctgcgacggcttttatcgtggtg

SEQ ID NO: 789662 - DNA, 75 bp, synthetic construct
  source 1..75: mol_type = other DNA
gtttctgtgtaccgggatcacacctgctctggctgatttgcctcagatagagccgccaacatccggtggtggtgg

SEQ ID NO: 789663 - DNA, 75 bp, synthetic construct
  source 1..75: mol_type = other DNA
tcctccggcggtggcagcggtctgtttggacagattaaaggctattcccaggacggtgtggtgctgggtggtctg

SEQ ID NO: 789664 - DNA, 75 bp, synthetic construct
  source 1..75: mol_type = other DNA
gccaagagcccggaaagctacatgcagtatgtcgatcagcatccggaacagagcatcaaaatgggcgttacgttt

SEQ ID NO: 789665 - DNA, 75 bp, synthetic construct
  source 1..75: mol_type = other DNA
ggcgcagtttgccatgagcggcgtgcgcgatgccaacgtgcgcgtgggggattttgtggtggtggtagggcttgg

SEQ ID NO: 789666 - DNA, 75 bp, synthetic construct
  source 1..75: mol_type = other DNA
cgttgaagcgcctgagtccggaggcggaagcgggctgtccggacaaatcaagggctacctgcaggacggcattgt

SEQ ID NO: 789667 - DNA, 75 bp, synthetic construct
  source 1..75: mol_type = other DNA
tattaacacagtacaaagtttatctcaaaagaaactacataaacaggctattgatatagaattagtaaaaatcaa

SEQ ID NO: 789668 - DNA, 75 bp, synthetic construct
  source 1..75: mol_type = other DNA
tcagcaagctgcatgaggcagtgtcattctttaccgcccgtgccgccgaacagcttcgaaacgatggctcctgga

SEQ ID NO: 789669 - DNA, 75 bp, synthetic construct
  source 1..75: mol_type = other DNA
tcctgcccggatcaaaaaactgctgagtcttatcaatacccgggaaatctggggcattgggcgaaaaatcagtga

SEQ ID NO: 789670 - DNA, 75 bp, synthetic construct
  source 1..75: mol_type = other DNA
atgaagtggtgttttcgttttctgaaacgtcttgtttctctgccgcacacaatgctgttacgcctgtggcaggcc

SEQ ID NO: 789671 - DNA, 75 bp, synthetic construct
  source 1..75: mol_type = other DNA
cagatgcaaccgaagtggctgcggatttcccaactgttgaagcgttacgccagcacatggctgcgcagagcgatc

SEQ ID NO: 789672 - DNA, 75 bp, synthetic construct
  source 1..75: mol_type = other DNA
gaggctataacacaagcagcaaagaacaaagaatcaatatcaaagcttgagctagataaaaaaaataaacaagca

SEQ ID NO: 789673 - DNA, 75 bp, synthetic construct
  source 1..75: mol_type = other DNA
ggcgcagtttgccatgagcggcgtgcgcgatgccaacgtgcgcgtgggtgattttgttgtggtggtagggcttgg

SEQ ID NO: 789674 - DNA, 75 bp, synthetic construct
  source 1..75: mol_type = other DNA
atatgccgcagaaattcggcctgtatgaagatctgacggtgatggagaacctcaatctgtacgcggatttgcgca

SEQ ID NO: 789675 - DNA, 75 bp, synthetic construct
  source 1..75: mol_type = other DNA
taaaacagaaaaatgtggcactttccattcttttaaagggaaagcgcccaatgttaaatctacgcttgaaaaaca

SEQ ID NO: 789676 - DNA, 75 bp, synthetic construct
  source 1..75: mol_type = other DNA
caggaggtgaatcaatgagctggcctgatgcaatcgtaactctggggatggtattcgcagtagcgtttgttgtgt

SEQ ID NO: 789677 - DNA, 75 bp, synthetic construct
  source 1..75: mol_type = other DNA
cagacgtagtggcgctgtttgaaaaagcgcaccgggaagaggcaaaagattgcccgcaatctatctgtgtcacgc

SEQ ID NO: 789678 - DNA, 75 bp, synthetic construct
  source 1..75: mol_type = other DNA
tgccccaacattgtcctccgccgtatcagcggcggaggcttcaaactagacgatctcttccgcgtactgccaaag

SEQ ID NO: 789679 - DNA, 75 bp, synthetic construct
  source 1..75: mol_type = other DNA
ggcgagacggtgatcgaagcgaaagaactgaccaaaaaatttggtgattttgccgccaccgatcacgtcaacttt

SEQ ID NO: 789680 - DNA, 75 bp, synthetic construct
  source 1..75: mol_type = other DNA
cctcggacgcgaagcgcatttcaataacgccaaaattgtcttctcccgcgcgtgcagcgaaccgaacccggatta

SEQ ID NO: 789681 - DNA, 75 bp, synthetic construct
  source 1..75: mol_type = other DNA
cgcgattggtcaaatttccattcaactggcaaaacgcgctggcgcgtcggtggtaattggcgtcgatcctattac

SEQ ID NO: 789682 - DNA, 75 bp, synthetic construct
  source 1..75: mol_type = other DNA
ggcgcagtttgccatgagcggcgtgcgcgatgccaacgtacgcgtaggggattttgtggtggtggtagggcttgg

SEQ ID NO: 789683 - DNA, 75 bp, synthetic construct
  source 1..75: mol_type = other DNA
cggtagggattgcaatggcggtggcgctggtggtgtattctatttgccgctggggtaaggtattaaaaaacgccc

SEQ ID NO: 789684 - DNA, 75 bp, synthetic construct
  source 1..75: mol_type = other DNA
tcatcgggtggtggcagcggtctgttcgggcagattaaaggctattcccaggacggtgtggtgctgggggggctg

SEQ ID NO: 789685 - DNA, 75 bp, synthetic construct
  source 1..75: mol_type = other DNA
cctcggacgcgaagcgcatttcaataacgccaaaattgttttctcccgtgcgtgcagcgagccgaacccggatta

SEQ ID NO: 789686 - DNA, 75 bp, synthetic construct
  source 1..75: mol_type = other DNA
tccggttgcatgaatcccctcctgtcagacaacaaattatcgtctcgcggagctttggccagcgccttaatacat

SEQ ID NO: 789687 - DNA, 75 bp, synthetic construct
  source 1..75: mol_type = other DNA
agttgaatgggctgatcaaaattattatctgcctaaagaatcctcatacggtgagggcgaatggaaaacgctgcc

SEQ ID NO: 789688 - DNA, 75 bp, synthetic construct
  source 1..75: mol_type = other DNA
ctggcgtgtgacggtaaagcgccgcgcattttcgctaaactgtcgcgtggtggcgtgccgcgtaatgcgctgtat

SEQ ID NO: 789689 - DNA, 75 bp, synthetic construct
  source 1..75: mol_type = other DNA
gcagaagtctcatccataaccaagcccggtgcggaaattcatgagtatcagcctacccctggcgatattaaacgt

SEQ ID NO: 789690 - DNA, 75 bp, synthetic construct
  source 1..75: mol_type = other DNA
cgggcattgactcgcagcgaaaccgttttgagatgtatgtctggggatgggctccgggagaggaagcctttctgg

SEQ ID NO: 789691 - DNA, 75 bp, synthetic construct
  source 1..75: mol_type = other DNA
atggaaaacgctgccattccagatcgccattatgaactgtatgggtaacgaccaggttcgcacggttaacctgat

SEQ ID NO: 789692 - DNA, 75 bp, synthetic construct
  source 1..75: mol_type = other DNA
gatccatcagtctgagcttgaccagagtaacgggcggtggatctgtgaaaacacgggcatgtggacccgtgacgg

SEQ ID NO: 789693 - DNA, 75 bp, synthetic construct
  source 1..75: mol_type = other DNA
aagcgctgggcttacgccgtgaattaaaggcgcgtcacctgacgatgattgccattggcggttccatcggtacag

SEQ ID NO: 789694 - DNA, 75 bp, synthetic construct
  source 1..75: mol_type = other DNA
cgctggactgcctggtgtatgcctacgcggcattacgtgtgtccgtgcaacgctggcagcttgatctggctgtac

SEQ ID NO: 789695 - DNA, 75 bp, synthetic construct
  source 1..75: mol_type = other DNA
acccgcaatcagcggggcgtttatctgtgtgaagtggggacggacaccgcaaaagaaattctctatgcccgtatg

SEQ ID NO: 789696 - DNA, 75 bp, synthetic construct
  source 1..75: mol_type = other DNA
gtattgcagggacacgacattaacgatctgccgtaccgttcaggtttcttcccactggggccgatcttcgcattc

SEQ ID NO: 789697 - DNA, 75 bp, synthetic construct
  source 1..75: mol_type = other DNA
caacatttaccatcatcgcggatatggccaaaaacgtggcgggagatgctgcagaagtctcatccataaccaagc

SEQ ID NO: 789698 - DNA, 75 bp, synthetic construct
  source 1..75: mol_type = other DNA
cctgctgaactacatctcagttcgtggttttggtgaagcggaatactggttctcgctgatcaaagttgcgacagt

SEQ ID NO: 789699 - DNA, 75 bp, synthetic construct
  source 1..75: mol_type = other DNA
aaatcccgggaagaagagacgacccggccaaccctgaaagaactggcagcgaagctgtccggaggagtgaatggt

SEQ ID NO: 789700 - DNA, 75 bp, synthetic construct
  source 1..75: mol_type = other DNA
cgtgacactaccgaaacaccggcgacttctgccagccctcatcagttgccggaagacaatacagtgatacagagc

SEQ ID NO: 789701 - DNA, 75 bp, synthetic construct
  source 1..75: mol_type = other DNA
ctatcgctgttgatctggtggccgcgcagttggtaatgagctggtggttcccggatgtccctggttggatctgga

SEQ ID NO: 789702 - DNA, 75 bp, synthetic construct
  source 1..75: mol_type = other DNA
taatgttcattttttgcggggtgattatcattgcatttatatgggttgggtatatcagcaagagactaaaaaatg

SEQ ID NO: 789703 - DNA, 75 bp, synthetic construct
  source 1..75: mol_type = other DNA
attgctgcaggcgagtccgaagatccggcgaaaaacattccacgcgcggtacgtcaggtgttctggcgaatcctg

SEQ ID NO: 789704 - DNA, 75 bp, synthetic construct
  source 1..75: mol_type = other DNA
agcgtgatgccattaaccactgaaacagcgctggatatcctcattgcgtggctgcaggacaatatcgactgcgaa

SEQ ID NO: 789705 - DNA, 75 bp, synthetic construct
  source 1..75: mol_type = other DNA
actgaatatggggcgaattgtcgttgacattgatggtgttaatctcgctgaactgattaataaggccgctgaaaa

SEQ ID NO: 789706 - DNA, 75 bp, synthetic construct
  source 1..75: mol_type = other DNA
ctttggtgtgctgaatacgcctgctgaacaggcacaatatggactatccgttctggatgccatccagaaagatta

SEQ ID NO: 789707 - DNA, 75 bp, synthetic construct
  source 1..75: mol_type = other DNA
agccttcttttccagcccacggattctgctgctgaagattttatgaaatctcatgtggaacccacgatcagggat

SEQ ID NO: 789708 - DNA, 75 bp, synthetic construct
  source 1..75: mol_type = other DNA
tgggtggtgctgccgccaaaaactaccgtgaaaaatccgtggatgtggtctgctatgacgaactttcctcgttcg

SEQ ID NO: 789709 - DNA, 75 bp, synthetic construct
  source 1..75: mol_type = other DNA
ttacttgatacaactccggttgcggttatgcttatttgtagcggggtgcttatcattacgtttgtatggaatggt

SEQ ID NO: 789710 - DNA, 75 bp, synthetic construct
  source 1..75: mol_type = other DNA
aacctggatccgaaagacggttccgtagttgttctgggttacactgaccgcatcggttctgacgcttataaccag

SEQ ID NO: 789711 - DNA, 75 bp, synthetic construct
  source 1..75: mol_type = other DNA
caatcacaccgaaaagggacgtgacgagaacatcatttcttacgcaggatgcgcaggtttcagatgctccggaag

SEQ ID NO: 789712 - DNA, 75 bp, synthetic construct
  source 1..75: mol_type = other DNA
gaccaatgtcgctgcgtcaacggctgatattgaccatcggcgctattctgctggtttttgagctgattagcgtct

SEQ ID NO: 789713 - DNA, 75 bp, synthetic construct
  source 1..75: mol_type = other DNA
ggcgcagcatgttgatgaaaatattctgaaggactgtacccattttcatattatgggttcatccctgttttcgtt

SEQ ID NO: 789714 - DNA, 75 bp, synthetic construct
  source 1..75: mol_type = other DNA
tggcccaatggagggaacgtctcgccttatggaaatcgaaacgttcatccagcgccatgacatgtccattcggga

SEQ ID NO: 789715 - DNA, 75 bp, synthetic construct
  source 1..75: mol_type = other DNA
actactccgcgaatgagcagtttcatgttgagagctatccggtggaagaagttgacccgaccggtgcgggagact

SEQ ID NO: 789716 - DNA, 75 bp, synthetic construct
  source 1..75: mol_type = other DNA
gttccaggtggtcatggtgctcttattggcttacctgaaagcaaagaagttgctaccgctctgcaatgggcaatt

SEQ ID NO: 789717 - DNA, 75 bp, synthetic construct
  source 1..75: mol_type = other DNA
aaggaccgtaaacttctcaccggcgacagtcctttcgcagcgaatgcgttgggtaaactggcggcgcaggaaatg

SEQ ID NO: 789718 - DNA, 75 bp, synthetic construct
  source 1..75: mol_type = other DNA
gctgattaaaaaagcgctggcagaacagttgccgggcattccgattgcaggcggcgatgactttggctccgtcac

SEQ ID NO: 789719 - DNA, 75 bp, synthetic construct
  source 1..75: mol_type = other DNA
ttcgccatacgcccgggcaaaaagaaccggtactgcatttttcacatgtcgcgccaatcgattgtttaattcaaa

SEQ ID NO: 789720 - DNA, 75 bp, synthetic construct
  source 1..75: mol_type = other DNA
ggcgcgtgaaaaagaccttctttctgaagttcaggatagggtgatcgatttcgtcaaatgctatcccctgcattg

SEQ ID NO: 789721 - DNA, 75 bp, synthetic construct
  source 1..75: mol_type = other DNA
aatgacaatcagcgagaacttaaaaatcttcaaacaattgctacaaaaatgaagcaatataaatttcaggggcaa

SEQ ID NO: 789722 - DNA, 75 bp, synthetic construct
  source 1..75: mol_type = other DNA
atatataattaaagataaaaaactaggtcatttactcaaaaatactaatgatgttgaatatctaagttcggaaat

SEQ ID NO: 789723 - DNA, 75 bp, synthetic construct
  source 1..75: mol_type = other DNA
gtcgaactgaagctgaacgcggaagctgtcgaggcgctgaatgagctggcagagtcgcgcaatatgagccgtagc

SEQ ID NO: 789724 - DNA, 75 bp, synthetic construct
  source 1..75: mol_type = other DNA
tcgtgccggaaagcgtgacgatatatcagcgcattttatcggttcggttgtttatatagagcagggattgtatca

SEQ ID NO: 789725 - DNA, 75 bp, synthetic construct
  source 1..75: mol_type = other DNA
tcaggaaaactccgggcacggtattgcgtgatcagaataataacgtggtatatacgccgccggtgggtgaagact

SEQ ID NO: 789726 - DNA, 75 bp, synthetic construct
  source 1..75: mol_type = other DNA
cacggcttgaccagtcaagttttgtagtcaaacgggccataccaatgctgaaaaccctgcgggcaagacaatttg

SEQ ID NO: 789727 - DNA, 75 bp, synthetic construct
  source 1..75: mol_type = other DNA
cagccacaacagccacaacagccacaacagccacaacagccacaacagccagtgtcttctgtcatcaatgataag

SEQ ID NO: 789728 - DNA, 75 bp, synthetic construct
  source 1..75: mol_type = other DNA
tctgctggaaacaatatcacggctgattttgaagtgactcgactcccagcgatcattgagattcttgagaagaaa

SEQ ID NO: 789729 - DNA, 75 bp, synthetic construct
  source 1..75: mol_type = other DNA
tctggcaggcgtgggtggcaaaaaaagcggggcagatagttgggcgtattaccgcgcaaatagataccttgcacc

SEQ ID NO: 789730 - DNA, 75 bp, synthetic construct
  source 1..75: mol_type = other DNA
cctgcgtgagattttcaactctggctggcagcacaactggggctttgtgccgtttaccgaacgcgaatttgccac

SEQ ID NO: 789731 - DNA, 75 bp, synthetic construct
  source 1..75: mol_type = other DNA
atcatcctcctctgctacatgcaactctggatggaaaaagcacaacaactcagtaaacagctataccccgtcatg

SEQ ID NO: 789732 - DNA, 75 bp, synthetic construct
  source 1..75: mol_type = other DNA
ataccctttcgttgatagaaattgtcaaagcggtaaaaatcaattcggttataccggtggaaagtctgttggcca

SEQ ID NO: 789733 - DNA, 75 bp, synthetic construct
  source 1..75: mol_type = other DNA
gatctggcagcaaatctctcaactggcaggttgcggaaatgtagtgatggcttgggcgaccaataccgagtcagg

SEQ ID NO: 789734 - DNA, 75 bp, synthetic construct
  source 1..75: mol_type = other DNA
aaatgatccctggatttacattcttaacagtaaaaataaaaaaatacataaattggtgaaacataatagttcctg

SEQ ID NO: 789735 - DNA, 75 bp, synthetic construct
  source 1..75: mol_type = other DNA
cctacaaagataaacctctttctgacgagatgtggaaggagatagaagataagttcacccatatgctggatgaat

SEQ ID NO: 789736 - DNA, 75 bp, synthetic construct
  source 1..75: mol_type = other DNA
cggatgactccgccttgtcctctcttgcctcccgtgttgtccgcgaagcagaaaatctgtatatccccggcgtca

SEQ ID NO: 789737 - DNA, 75 bp, synthetic construct
  source 1..75: mol_type = other DNA
ttgaagagtgtgcgcgcaaatatcctaacgacgctctggctctacactcattgtatcgggttattaaggaaacgg

SEQ ID NO: 789738 - DNA, 75 bp, synthetic construct
  source 1..75: mol_type = other DNA
tttttggcagcaaaacaaagcttgccaatgccgcaggagttaggctggcaagcattgctgcatggggggaactgg

SEQ ID NO: 789739 - DNA, 75 bp, synthetic construct
  source 1..75: mol_type = other DNA
tcaaaagtaaaaagattcgtgcgcgcagtgcgctacgcccattggatgttgcaggcttgagccagcttctggtac

SEQ ID NO: 789740 - DNA, 75 bp, synthetic construct
  source 1..75: mol_type = other DNA
tgtaccaatgccagccgcaatcttgctcttctggaagagctcggcgagaaaggctgtaaaacctgcattattctt

SEQ ID NO: 789741 - DNA, 75 bp, synthetic construct
  source 1..75: mol_type = other DNA
agtctgggattactggcgccgtggcaaggcctgaatgccagcttttcacccgtaccgattaaacgcggcaagctg

SEQ ID NO: 789742 - DNA, 75 bp, synthetic construct
  source 1..75: mol_type = other DNA
actacgcgaaacgccggcgttgcccagcaatctgacttccaataccgcagaagcgcatcttctgttgcaacaggc

SEQ ID NO: 789743 - DNA, 75 bp, synthetic construct
  source 1..75: mol_type = other DNA
atggatcctgcctgggatgcagctattcagcgcgccggtttgttgcgagtacaggatacccacgagctgttttcg

SEQ ID NO: 789744 - DNA, 75 bp, synthetic construct
  source 1..75: mol_type = other DNA
gccgcaaatgctattttcgatcgcgtaaaaatggcctggccgcaggcgcgtatccacggcctgctggtacaaagt

SEQ ID NO: 789745 - DNA, 75 bp, synthetic construct
  source 1..75: mol_type = other DNA
catcgatgcccctgaaaagaaacaaccttttggacgctggtcaactagtcagcttaaaactctggttgcaggtaa

SEQ ID NO: 789746 - DNA, 75 bp, synthetic construct
  source 1..75: mol_type = other DNA
atcgttatggtcgtattctcgggcaggtttatgcaccagacggaatgaatattaatcagtttatggttcgggccg

SEQ ID NO: 789747 - DNA, 75 bp, synthetic construct
  source 1..75: mol_type = other DNA
atacatggttggtccgaatggcccggttaatctgcaaatcatcgttagccaactgtatgctgacgtgtcccaggg

SEQ ID NO: 789748 - DNA, 75 bp, synthetic construct
  source 1..75: mol_type = other DNA
aaccggctctgcaggcccctggcgaaatcgtccgggggttggatgatatctggcaggccattcaaatcatcctgc

SEQ ID NO: 789749 - DNA, 75 bp, synthetic construct
  source 1..75: mol_type = other DNA
attaccggctctgcaacgggaagcgcaggaacaaaaacgaggtttatgggctgacagtaatccggttccaccgtg

SEQ ID NO: 789750 - DNA, 75 bp, synthetic construct
  source 1..75: mol_type = other DNA
cccgcaaaaattgttgtgtatgaagttccgattcgagtccgattgataaacatcgatgcccctgaaaagaaacaa

SEQ ID NO: 789751 - DNA, 75 bp, synthetic construct
  source 1..75: mol_type = other DNA
gtatggcatgaacacgctccccacctggattgccagcgatagcaccgaagcggtgcatattgccgaacagattgg

SEQ ID NO: 789752 - DNA, 75 bp, synthetic construct
  source 1..75: mol_type = other DNA
tgcccgctcattgaaagaaatcgccagttgggactggccgtgcaagctggtgctggaacactgcgacgccatgac

SEQ ID NO: 789753 - DNA, 75 bp, synthetic construct
  source 1..75: mol_type = other DNA
gtggcgtactaccgccacctgttcaataaaatcaactcattaccggctaataaagtgctcgcacttgagatccag

SEQ ID NO: 789754 - DNA, 75 bp, synthetic construct
  source 1..75: mol_type = other DNA
gaaaccatgcgtcgccgcagcgaaaacaacggctttggtctcgcctccagcgatgaagaacaacgcaaggcctgc

SEQ ID NO: 789755 - DNA, 75 bp, synthetic construct
  source 1..75: mol_type = other DNA
cagtacgaccccaaagtttatgacgaatatcgtaaggcaaagcgggcggggcggttgaacaatgaaaatcaccac

SEQ ID NO: 789756 - DNA, 75 bp, synthetic construct
  source 1..75: mol_type = other DNA
cttcagtatgatcccaaagtttatgacgaatatcgtaagacgaagcgggcgggggggttgaacaatgaaaatcac

SEQ ID NO: 789757 - DNA, 75 bp, synthetic construct
  source 1..75: mol_type = other DNA
gtctgccgctccccgcaaaggctttttgcctttggaaaatgtgctggaagtcattgccgattatgacatcagcat

SEQ ID NO: 789758 - DNA, 75 bp, synthetic construct
  source 1..75: mol_type = other DNA
gaaacgccggcgctgcccagcaatctgacctctaataccgcagaagcgcatattctgctacagcaagccattgct

SEQ ID NO: 789759 - DNA, 75 bp, synthetic construct
  source 1..75: mol_type = other DNA
aaggtctgaatgccagcttttcgcctgtgccgattaaacgcggcaagctggcgtttatttcgcaatcggctgccg

SEQ ID NO: 789760 - DNA, 75 bp, synthetic construct
  source 1..75: mol_type = other DNA
ttatccggtggcgctgaaattgcgctcgccggatattccgcataaatcggaagttcagggcgtgatgctctattt

SEQ ID NO: 789761 - DNA, 75 bp, synthetic construct
  source 1..75: mol_type = other DNA
cagtacgattcaaatatctatgacaaatatcgtaaggcaaagcgggcgggtaagggtattcatgaaaatcaggca

SEQ ID NO: 789762 - DNA, 75 bp, synthetic construct
  source 1..75: mol_type = other DNA
tatccgcatcagctggaagaatgggtagaattgaaaaacggtgaacgctgcttgttccgcccgattttgccagaa

SEQ ID NO: 789763 - DNA, 75 bp, synthetic construct
  source 1..75: mol_type = other DNA
tccacagccaggattttgatgcgctgatggttattcattcgcccagtgctgctgctcccgccacagaaagcgcac

SEQ ID NO: 789764 - DNA, 75 bp, synthetic construct
  source 1..75: mol_type = other DNA
gaaaagaggcttctagtgaggaatggaagcgactcgccgcattagcgaatacttcagttggctatcttgatcaga

SEQ ID NO: 789765 - DNA, 75 bp, synthetic construct
  source 1..75: mol_type = other DNA
ctttcactttacgagacgaagagaggttgatggtgaaaattggcgtattcgtacctattggcaacaacggctggc

SEQ ID NO: 789766 - DNA, 75 bp, synthetic construct
  source 1..75: mol_type = other DNA
atgattatttctcccgtcgttacgactatctcaccgaatatgtccaggtactgcgcgacctgtggggaacgggaa

SEQ ID NO: 789767 - DNA, 75 bp, synthetic construct
  source 1..75: mol_type = other DNA
ggcattgctattccgcacggtacgtcggcgtatatggggccaattgctgtgctggtcgatgctatcatcgagaaa

SEQ ID NO: 789768 - DNA, 75 bp, synthetic construct
  source 1..75: mol_type = other DNA
ataacttcttgaatgttgatatttttggtagaggtccgcaaaaacataatagctttcaaaaaaaaggaactttga

SEQ ID NO: 789769 - DNA, 75 bp, synthetic construct
  source 1..75: mol_type = other DNA
tgctggttgaaggttttccgccttcacatgccgggaccattaccgtctatgaaggttccagaccaggtacgctga

SEQ ID NO: 789770 - DNA, 75 bp, synthetic construct
  source 1..75: mol_type = other DNA
atttatctggaaggattctgttgatgaaaatcgaagaattacgtgaaatttttagtgaagatggcctctatgctg

SEQ ID NO: 789771 - DNA, 75 bp, synthetic construct
  source 1..75: mol_type = other DNA
atggttaaatttccaggtgaagttatgagttcgtccgctgctgtaaccgttataactggtgtttttgttggtggt

SEQ ID NO: 789772 - DNA, 75 bp, synthetic construct
  source 1..75: mol_type = other DNA
gatagcatcaatacatgaaggtaaaagcaaggaaagtacatatgagcacatagccgagattggacgtatgctcaa

SEQ ID NO: 789773 - DNA, 75 bp, synthetic construct
  source 1..75: mol_type = other DNA
tgcaaaaagcggagcactaccatttcgatttcgccctgtcgatgatcaaactgcgtggctttggcggcaaaactg

SEQ ID NO: 789774 - DNA, 75 bp, synthetic construct
  source 1..75: mol_type = other DNA
gggcgggaatgatgttcttaaacggtgaagagggttttatcgagaagaacaaacaaaaggcgctgcactggttga

SEQ ID NO: 789775 - DNA, 75 bp, synthetic construct
  source 1..75: mol_type = other DNA
atgaaaattgaagaattacgtgaaatttttagtgaaaatggcctctttgctgtgcgcgttgagaatggggaagtt

SEQ ID NO: 789776 - DNA, 75 bp, synthetic construct
  source 1..75: mol_type = other DNA
gcctgacggatacattgatccagcaacgtggatttctgggttttagctatgccgacctggagaaagagattggta

SEQ ID NO: 789777 - DNA, 75 bp, synthetic construct
  source 1..75: mol_type = other DNA
tgcttactatgatggctggtttagctgaccttgaaaaagaccttatcagtgagcgtagaaaggctggtattgaac

SEQ ID NO: 789778 - DNA, 75 bp, synthetic construct
  source 1..75: mol_type = other DNA
cacaaggtaagacgaggttgcagattcaggaagagttaggaatctctagagcaacttattacagacttgctaaat

SEQ ID NO: 789779 - DNA, 75 bp, synthetic construct
  source 1..75: mol_type = other DNA
caatgctgggtattatgtcaacactggcacagcttgaaagaagcttgatagcagagcgtagaaaggctggaatag

SEQ ID NO: 789780 - DNA, 75 bp, synthetic construct
  source 1..75: mol_type = other DNA
gttgtcccctgcgctcgcgcaacgaaattaacgatgaatcgcgagggtatccgtcgcctggcggcagaagagctg

SEQ ID NO: 789781 - DNA, 75 bp, synthetic construct
  source 1..75: mol_type = other DNA
gctggcgaccgctgagagtgttgatgaagcgattgagcgcgcaaagcacgccgcagcacagataaaagtacaagc

SEQ ID NO: 789782 - DNA, 75 bp, synthetic construct
  source 1..75: mol_type = other DNA
aaagaaaaccgctacgctattcgcgctcaggtatctgcgtggatcgccagcgacgatgtacaagtggtattgatt

SEQ ID NO: 789783 - DNA, 75 bp, synthetic construct
  source 1..75: mol_type = other DNA
aacaagataataagtcccgggctcagttggcgtatgtcagtcaggttagcgaaagcaatggcccgtttgtacggt

SEQ ID NO: 789784 - DNA, 75 bp, synthetic construct
  source 1..75: mol_type = other DNA
tctccataatgtttcttcaggtgtacaacgtctcaggacatatcttgatgcatttgctggttgtgctgaaagagg

SEQ ID NO: 789785 - DNA, 75 bp, synthetic construct
  source 1..75: mol_type = other DNA
ggaaatgtgcggtgtttacgccatgctatctgacagtcaccaatttagccctgagctacaaaaggctgtcagcca

SEQ ID NO: 789786 - DNA, 75 bp, synthetic construct
  source 1..75: mol_type = other DNA
tggttcgggtgttaccggaatatgcgcaaagtgctaatatttgggcggtctatcgggaaccgctttatcgcagta

SEQ ID NO: 789787 - DNA, 75 bp, synthetic construct
  source 1..75: mol_type = other DNA
gctgcagattgaaaacgaactgtacgcgccgattcgtccaaaacgcgttacccgcagtggtgagtcgccttctga

SEQ ID NO: 789788 - DNA, 75 bp, synthetic construct
  source 1..75: mol_type = other DNA
tggatattcgccaatggactatttgattaaacgtcggttaggggaggcacaatctttacttaccactgatgaagg

SEQ ID NO: 789789 - DNA, 75 bp, synthetic construct
  source 1..75: mol_type = other DNA
ccatcaacgcctgaaattattagttcggcgcaaaaattgaatttgatagcatcaatacatgaaggtaaaagcaag

SEQ ID NO: 789790 - DNA, 75 bp, synthetic construct
  source 1..75: mol_type = other DNA
gatgagcgcgacttcactctttgcgctgatatgttcaaactccttggcgtcaatgaagtccgtttgttaaccaat

SEQ ID NO: 789791 - DNA, 75 bp, synthetic construct
  source 1..75: mol_type = other DNA
atccctcctttacggtggtttctgagcagataaaggcgcgggccggtgagacatcgctggaaaccgctacacccg

SEQ ID NO: 789792 - DNA, 75 bp, synthetic construct
  source 1..75: mol_type = other DNA
tacagatggagaatgcgcaggacatctgcaaacgtctgtacccgatattgaaggaacttaactcatcatacgcga

SEQ ID NO: 789793 - DNA, 75 bp, synthetic construct
  source 1..75: mol_type = other DNA
aaccgttgaacaaattgctgggaatgaaaatatcagaattgaaagtcacaggaaaagacgttgagaaatatgtgg

SEQ ID NO: 789794 - DNA, 75 bp, synthetic construct
  source 1..75: mol_type = other DNA
accagcagccgcaagaggcgagcattacctttgagcaggtgagctttcattatccgcaagcgcgtactggcgccg

SEQ ID NO: 789795 - DNA, 75 bp, synthetic construct
  source 1..75: mol_type = other DNA
caccccctcagccgtgacccctttgctccagaaatgattataagcaaagacaagtgtcattttaatataacaaaa

SEQ ID NO: 789796 - DNA, 75 bp, synthetic construct
  source 1..75: mol_type = other DNA
attgaaggttttgacacaccaccctgtgcgatgatgccacacggcaaaccgtggtatgccgcgcatattgaacaa

SEQ ID NO: 789797 - DNA, 75 bp, synthetic construct
  source 1..75: mol_type = other DNA
atgatctggcagcctgagttcacagataaaacactctccaggaaaaccggggcggttcatgaaggttttgacaca

SEQ ID NO: 789798 - DNA, 75 bp, synthetic construct
  source 1..75: mol_type = other DNA
agtggtatgcgcactgcgcgagtgccgctaatgggtgtgcgcgacgaatatcagtttagtcgtatcggaccggta

SEQ ID NO: 789799 - DNA, 75 bp, synthetic construct
  source 1..75: mol_type = other DNA
cctgcgtgagattttcaactctggctggcagcacaactggggatttgtgccgtttaccgaacatgagttcgcgac

SEQ ID NO: 789800 - DNA, 75 bp, synthetic construct
  source 1..75: mol_type = other DNA
cgtggttgaagtcacaaggcgcgcgcaacatcagcggacctttcagcctgaatatcaatcaggaaagcggattac

SEQ ID NO: 789801 - DNA, 75 bp, synthetic construct
  source 1..75: mol_type = other DNA
ctctggctggcagcacaactggggatttgtgccgtttaccgaacatgagttcgcgacaatgggcgatcagcttaa

SEQ ID NO: 789802 - DNA, 75 bp, synthetic construct
  source 1..75: mol_type = other DNA
gttccttatgactgcgcggaaattttactggatgtcgacaaggagtttggtaccgacacaaaatcgctgtggggc

SEQ ID NO: 789803 - DNA, 75 bp, synthetic construct
  source 1..75: mol_type = other DNA
tttcggtgtacataagccccgaaatcgtggaggtgctcaagcagcgccacaaaaaaaactatgaggctggcgtag

SEQ ID NO: 789804 - DNA, 75 bp, synthetic construct
  source 1..75: mol_type = other DNA
cagtaattgttacttttaatccagatattgaatcgttgagaaaaaatttatgttctatttctgaacaggttgata

SEQ ID NO: 789805 - DNA, 75 bp, synthetic construct
  source 1..75: mol_type = other DNA
ttccgtattatcgattttgcactgtccaactgtatcaactccggtatccgtcgtatgggcgtgatcacccagtac

SEQ ID NO: 789806 - DNA, 75 bp, synthetic construct
  source 1..75: mol_type = other DNA
attggatttaacaaagctgaatggtttattgattccattgatatagaatggtgctatcgagcaagatatcttggc

SEQ ID NO: 789807 - DNA, 75 bp, synthetic construct
  source 1..75: mol_type = other DNA
atttctttaaaaaatcatgtagataatatcagcaatgtgattttaattcagccaaatgaaaatctcggtattgca

SEQ ID NO: 789808 - DNA, 75 bp, synthetic construct
  source 1..75: mol_type = other DNA
aaatatttgcagtaatagtaacgtataatccaaatatagattctttcattagaaacttatcagcaattttgggac

SEQ ID NO: 789809 - DNA, 75 bp, synthetic construct
  source 1..75: mol_type = other DNA
aaaaagccagaaaggaagctgaagcaaaagcaaataacgagaaagctgttctgacaaaagccagtgaaattatca

SEQ ID NO: 789810 - DNA, 75 bp, synthetic construct
  source 1..75: mol_type = other DNA
tgttcgaaactttacgtgtcggcccagacgagctagttgccgcccgtaggagggggaatagtgttggagggggac

SEQ ID NO: 789811 - DNA, 75 bp, synthetic construct
  source 1..75: mol_type = other DNA
ggtatttttcgctacgcgcaaacgtgagatagaaaactatctgtgcccggatcttatcgaggaaattactggtgt

SEQ ID NO: 789812 - DNA, 75 bp, synthetic construct
  source 1..75: mol_type = other DNA
tatcgttcagaagaaggcatcgtgctggtaacgcgcgaaatgctacggaagttagggcataaacaggagcgataa

SEQ ID NO: 789813 - DNA, 75 bp, synthetic construct
  source 1..75: mol_type = other DNA
ccgaaaggtcaaggagaagcagactatgaagcagcaaaaggcgatgttaatcgccctgatcgtcatctgtttaac

SEQ ID NO: 789814 - DNA, 75 bp, synthetic construct
  source 1..75: mol_type = other DNA
cctgccgtttgctgtgcgatgaaaaaaacctacaacagtggcgctatccaccttctggattcggcatcacctacc

SEQ ID NO: 789815 - DNA, 75 bp, synthetic construct
  source 1..75: mol_type = other DNA
atgtgcattacatgccggagctggatgcacagagacttaaactgacctttccacaggcgataataaaacgtgacg

SEQ ID NO: 789816 - DNA, 75 bp, synthetic construct
  source 1..75: mol_type = other DNA
gttgctgacttatcccgcttcgagaaagggatgacttatcttcctggtagctatgaagtcgaagtttgggtcaat

SEQ ID NO: 789817 - DNA, 75 bp, synthetic construct
  source 1..75: mol_type = other DNA
agcatgaagcccgtggttatattccacctgaggaatgggataatggtatcccggccattcttattaattatgatt

SEQ ID NO: 789818 - DNA, 75 bp, synthetic construct
  source 1..75: mol_type = other DNA
cccgtttgccagcagcgttaacggtctgctcttcgctgattacattgccgccagcggctccacgcaaaaatcgct

SEQ ID NO: 789819 - DNA, 75 bp, synthetic construct
  source 1..75: mol_type = other DNA
gggccgatatacatcactaacttccagttacagaaggtggattacaaccatctcggaaccgatatattcgatccc

SEQ ID NO: 789820 - DNA, 75 bp, synthetic construct
  source 1..75: mol_type = other DNA
ttcccttttgctcaggcctacggcgcgcctaacttcaatacattgctggcattgcactccaccaatatggaagag

SEQ ID NO: 789821 - DNA, 75 bp, synthetic construct
  source 1..75: mol_type = other DNA
ccatatcatcataaccacaataagttttatggtggaactatggagggggcaggtaaaattgatattcaaagaggt

SEQ ID NO: 789822 - DNA, 75 bp, synthetic construct
  source 1..75: mol_type = other DNA
ggactggcggaaatacagcgcattttgtctggattcgtgggaagcggaggaggcacagtacgaagatataccgga

SEQ ID NO: 789823 - DNA, 75 bp, synthetic construct
  source 1..75: mol_type = other DNA
ccgtggaggcttacgacggcacaggctatctggtggactccggcgtggcgtttcctgacagccatgctagccttt

SEQ ID NO: 789824 - DNA, 75 bp, synthetic construct
  source 1..75: mol_type = other DNA
cctgcctgaaccttaagggtgactggctggctgaggcgggatttgataccgggcggagtgttacggtgaagatct

SEQ ID NO: 789825 - DNA, 75 bp, synthetic construct
  source 1..75: mol_type = other DNA
tggctgaaagaggccggatttgataccggaacgggcgtcactgtgaagatctcggaggggtgtattgtgctgatg

SEQ ID NO: 789826 - DNA, 75 bp, synthetic construct
  source 1..75: mol_type = other DNA
ggtgtattagcatttcaaacagatgtagatggtttatataatatccgtcacctggtttcttctaagtttgctttt

SEQ ID NO: 789827 - DNA, 75 bp, synthetic construct
  source 1..75: mol_type = other DNA
aaaacacgaaagacgaagcgttactggatatgaccgctcaagagtgctggcgcaagagcactcgcaaccgcagct

SEQ ID NO: 789828 - DNA, 75 bp, synthetic construct
  source 1..75: mol_type = other DNA
ctgccgtggcccgctttatggcctccttgtttccaccgagcacaatgcaaacttgccgtctactggacgcaggcg

SEQ ID NO: 789829 - DNA, 75 bp, synthetic construct
  source 1..75: mol_type = other DNA
cctggcgggcagatagtggccataatcccacgtagtttctgcaacggaccgtattaccgtccgttccgtaatttc

SEQ ID NO: 789830 - DNA, 75 bp, synthetic construct
  source 1..75: mol_type = other DNA
tacttaatccgccttacaagaagatcaatagccagtcagcccaccggcaggctcttcgcactgtcggtatcgaga

SEQ ID NO: 789831 - DNA, 75 bp, synthetic construct
  source 1..75: mol_type = other DNA
aaattgcctctccagaccacatcgataattaataaaacagatttaagcattatccttttccatataaatattgga

SEQ ID NO: 789832 - DNA, 75 bp, synthetic construct
  source 1..75: mol_type = other DNA
tttaatgttcccggccacagcgagttccatctgcaagttgctgaaccgacctcttatttgtgccgctatctgtaa

SEQ ID NO: 789833 - DNA, 75 bp, synthetic construct
  source 1..75: mol_type = other DNA
ccgggtgggcagatcgttgctatcatcccgcgcagcttttgcaatggcccgtattaccgaccgtttcgtgatttc

SEQ ID NO: 789834 - DNA, 75 bp, synthetic construct
  source 1..75: mol_type = other DNA
tgagtagcggcttccgtaagcagttcgatgagctgcgcgccagtgctaatgacagtggtgacacgctgtactcta

SEQ ID NO: 789835 - DNA, 75 bp, synthetic construct
  source 1..75: mol_type = other DNA
tgacgctggttgttgcgaccggcgcgcaagccgccagtgaaaaagtcgagatgaacctcgtcacatcacagggga

SEQ ID NO: 789836 - DNA, 75 bp, synthetic construct
  source 1..75: mol_type = other DNA
tattcatgccaaaggaagctgccagccagcaatgaaagatggcaaagccagcgccgcagaatccgcaggcgggca

SEQ ID NO: 789837 - DNA, 75 bp, synthetic construct
  source 1..75: mol_type = other DNA
tgagctggcaaccgccgaaggtctacaggatcgaggttatacccatgcaatacttaatccgccttacaagaagat

SEQ ID NO: 789838 - DNA, 75 bp, synthetic construct
  source 1..75: mol_type = other DNA
gacacgctgtactccattgatattaagccgatttatgcggcgaaaggcgataaagaagcgtctggttctctgctg

SEQ ID NO: 789839 - DNA, 75 bp, synthetic construct
  source 1..75: mol_type = other DNA
gccgacccagtgctcgttggtcggtactggcgctggtcgctattgggattgtgattggcattgcgctgattgtat

SEQ ID NO: 789840 - DNA, 75 bp, synthetic construct
  source 1..75: mol_type = other DNA
cacgatattgactacgccgggatttttgacggtgcggataatatgagtcaggggttctgtatctgtgatacgccg

SEQ ID NO: 789841 - DNA, 75 bp, synthetic construct
  source 1..75: mol_type = other DNA
aacgcagaacagaactaaacttaactcaggtcgaagttgcgaaacgagcgggcattagccagcagtcgattgaag

SEQ ID NO: 789842 - DNA, 75 bp, synthetic construct
  source 1..75: mol_type = other DNA
ttgactatttttttctccccggtttttgttgagtttcctgatttaaaacaaacacttgtagatgataaaatcatc

SEQ ID NO: 789843 - DNA, 75 bp, synthetic construct
  source 1..75: mol_type = other DNA
aaggcgtcacggtaatggtcaccacccactttatggatgaagcagaatattgtgaccgcatcggcctggtgtatc

SEQ ID NO: 789844 - DNA, 75 bp, synthetic construct
  source 1..75: mol_type = other DNA
cggatgcgtcatgtggtggatggcgattacaccccgcattcagccgtcgatatttttgttaaggatcttggtctg

SEQ ID NO: 789845 - DNA, 75 bp, synthetic construct
  source 1..75: mol_type = other DNA
acgctcgcgcagtttgccatgactttctggcacgacctggcagcaccgatcctggcggggattattaccgcagcg

SEQ ID NO: 789846 - DNA, 75 bp, synthetic construct
  source 1..75: mol_type = other DNA
cgcctcgatctctattatcgtctgaatgtagtcagtctgaatattccccctcttcgtcagcggcgagaagatatt

SEQ ID NO: 789847 - DNA, 75 bp, synthetic construct
  source 1..75: mol_type = other DNA
tgccgccaccgatcacgtcaactttgccgttaaacgtggggagatttttggtttgctggggccaaacggcgcggg

SEQ ID NO: 789848 - DNA, 75 bp, synthetic construct
  source 1..75: mol_type = other DNA
cggcgtagaccccatctcacggcgcgagctgtggcagatggtgcacgaactggcaggcgaagggatgctgatcct

SEQ ID NO: 789849 - DNA, 75 bp, synthetic construct
  source 1..75: mol_type = other DNA
cgaggcgctcggccccgtgatgtcgcgttataccggcattgatgaaattggccgtaaagaaggtgcaatcggcgt

SEQ ID NO: 789850 - DNA, 75 bp, synthetic construct
  source 1..75: mol_type = other DNA
tgccgccaccgatcacgtcaactttgccgttaaacgaggggagatttttggtctgctcgggccaaacggcgcggg

SEQ ID NO: 789851 - DNA, 75 bp, synthetic construct
  source 1..75: mol_type = other DNA
tgatgaacgaaggcgagttgctgtatcagggggaaccaaaagccctgacacaaaccatggccggacgcagctttc

SEQ ID NO: 789852 - DNA, 75 bp, synthetic construct
  source 1..75: mol_type = other DNA
gatcctcaaaaaagaggccacaccagacgatattcgccacgccgacgggatgccagaaatcgacatcagccaaac

SEQ ID NO: 789853 - DNA, 75 bp, synthetic construct
  source 1..75: mol_type = other DNA
acagtaaaaattatccaccagttgttagctggcgtgcatattgctgccggggccgaagcgatggcgcttgctgcc

SEQ ID NO: 789854 - DNA, 75 bp, synthetic construct
  source 1..75: mol_type = other DNA
aaggtctgatcaccgagcgcggcgacatggtggtttacgtggcagggttcccggccatttatggaaaacagccgt

SEQ ID NO: 789855 - DNA, 75 bp, synthetic construct
  source 1..75: mol_type = other DNA
ccagctgcgtagccgtgagacaggttacgggccggatgaaacaatcacctcgaactgccatgtgcagaacgcata

SEQ ID NO: 789856 - DNA, 75 bp, synthetic construct
  source 1..75: mol_type = other DNA
tggggaatgatgaaggggtttacgttggcgcatgggaagacaaaaacggccagctgcagtatctgcgtcacaacg

SEQ ID NO: 789857 - DNA, 75 bp, synthetic construct
  source 1..75: mol_type = other DNA
aatacaaaatcgactttgtattttctttttcagtgcttacagaagttggaaataacgaatataaagacagtcgtt

SEQ ID NO: 789858 - DNA, 75 bp, synthetic construct
  source 1..75: mol_type = other DNA
attatactaaaatctctgatgatattaaccctggtaatgtaattgctcgtggaatgatgacagtaaaatatcatt

SEQ ID NO: 789859 - DNA, 75 bp, synthetic construct
  source 1..75: mol_type = other DNA
ttatggtactatttatctcgccctggaatattagctatgtatttgctgatgctatttttaataaaaatattaacc

SEQ ID NO: 789860 - DNA, 75 bp, synthetic construct
  source 1..75: mol_type = other DNA
tattaccccaccttcaacctgactggcgctttgggtaccagcagcacttcgctactggcattactgcataatccg

SEQ ID NO: 789861 - DNA, 75 bp, synthetic construct
  source 1..75: mol_type = other DNA
cgcgcagcaaaacctgctcacgcaagagaaccagcttacagggctacaacgagaacattcacagctactcaatca

SEQ ID NO: 789862 - DNA, 75 bp, synthetic construct
  source 1..75: mol_type = other DNA
ttgaaagaggcaggtgcttgcggggtttctgataacgccgcgacgtttgccgaaaaactggacgctctgctggtg

SEQ ID NO: 789863 - DNA, 75 bp, synthetic construct
  source 1..75: mol_type = other DNA
ttggtgatggctgccacggttcagataccaaattcaatctgttcaacagccgccgtatcgatgccatcgatgtaa

SEQ ID NO: 789864 - DNA, 75 bp, synthetic construct
  source 1..75: mol_type = other DNA
ttttctggcacgacctggcggcaccgatcctggcgggaattattaccgcagcgattgtcggctggtggcgtaacc

SEQ ID NO: 789865 - DNA, 75 bp, synthetic construct
  source 1..75: mol_type = other DNA
catcaacgataagaagtcagattcaggtgtgaatgttccggcaggggggatcgagcaggagctgaaaatgaaacc

SEQ ID NO: 789866 - DNA, 75 bp, synthetic construct
  source 1..75: mol_type = other DNA
gtggcagcgtgctgattgtggggaaaagacggatcccggacgcctttatcacccggctggctaacggacgctggc

SEQ ID NO: 789867 - DNA, 75 bp, synthetic construct
  source 1..75: mol_type = other DNA
ttggtttaccagaaagccaggacgtggctgctgctttgcagtgggcaatcaaaaatgaccgttttgttatctccc

SEQ ID NO: 789868 - DNA, 75 bp, synthetic construct
  source 1..75: mol_type = other DNA
ttgcccgtaatcaagctgggtaacgcgcgggttgtcctttcccgccgcagacgtcgtaaaaaggggcagcgttca

SEQ ID NO: 789869 - DNA, 75 bp, synthetic construct
  source 1..75: mol_type = other DNA
cggatctggtttgcgctcgccgcctataatatgggctatgcacatatgctggacgcccgcgccctgacggcaaaa

SEQ ID NO: 789870 - DNA, 75 bp, synthetic construct
  source 1..75: mol_type = other DNA
gtttgagaaatacgccgaagaaattgactggcgtttgctggccgctattgcttatcaggaatcgcactgggatgc

SEQ ID NO: 789871 - DNA, 75 bp, synthetic construct
  source 1..75: mol_type = other DNA
gattacctcggcgtaaaactgaaagtgaccgtgcggcagaatatcagccagctgtttgacgaccttgataatggt

SEQ ID NO: 789872 - DNA, 75 bp, synthetic construct
  source 1..75: mol_type = other DNA
atggaagagagcggcatcaaagtcaaaaacttgcgttacgtgacttcacaaccgtggccgtttccccagtcgctg

SEQ ID NO: 789873 - DNA, 75 bp, synthetic construct
  source 1..75: mol_type = other DNA
gaagatgggtgcatgtgtgttgacgggttcggtgagtatgttggtcactcgctgcctgatggaacgcaccagcta

SEQ ID NO: 789874 - DNA, 75 bp, synthetic construct
  source 1..75: mol_type = other DNA
cttcaataacactggactttcaaaaatccaaggtgtatatgcctctgaatatgtggctaattctggcacgctaac

SEQ ID NO: 789875 - DNA, 75 bp, synthetic construct
  source 1..75: mol_type = other DNA
gcggttgttgctgtttccactgatatcaactccccacaaattccttcgatgaaagccattctcggcgcggcgaaa

SEQ ID NO: 789876 - DNA, 75 bp, synthetic construct
  source 1..75: mol_type = other DNA
ccacaacagccacaacagccacaacagccacaacagccacaacagccagtgtcttctgtcatcaatgataagaag

SEQ ID NO: 789877 - DNA, 75 bp, synthetic construct
  source 1..75: mol_type = other DNA
atggatcgtataattgaaaaattagatcacggctggtgggtcgtcagtcatgaacaaaaattatggttgccgaag

SEQ ID NO: 789878 - DNA, 75 bp, synthetic construct
  source 1..75: mol_type = other DNA
accgctatttgagaaatacgccgaggaaattgactggcgtttgctggcagcgatagcttatcaggaatcgcactg

SEQ ID NO: 789879 - DNA, 75 bp, synthetic construct
  source 1..75: mol_type = other DNA
caggaacaaaaacgcggtttgtgggccgacgcaaatccggttccaccgtgggagtggcgatacaaacataactaa

SEQ ID NO: 789880 - DNA, 75 bp, synthetic construct
  source 1..75: mol_type = other DNA
ttgagcaaaggcgatatcgacgccaacgccttccagcataaaccgtaccttgatcagcaactgaaagatcgtggc

SEQ ID NO: 789881 - DNA, 75 bp, synthetic construct
  source 1..75: mol_type = other DNA
gacacacggacatacgttgttatggaagaagtcaagcagagtaatcgtctggttattaagacgcgctaacacgga

SEQ ID NO: 789882 - DNA, 75 bp, synthetic construct
  source 1..75: mol_type = other DNA
tagttgccctgtttatgcttgcggggtgcgcaacgccgccaacgactatcgatgtctccccgacaatgacgctgc

SEQ ID NO: 789883 - DNA, 75 bp, synthetic construct
  source 1..75: mol_type = other DNA
ttaccggctctgcaacgggaagcacagacacagaagcgcggcctgtgggctgataatcaacctgttcccccttgg

SEQ ID NO: 789884 - DNA, 75 bp, synthetic construct
  source 1..75: mol_type = other DNA
atgaaattgacaaaatacgttttcttttttgtcaccattttttccggttcgctgtgtgcggctgaaatccagggg

SEQ ID NO: 789885 - DNA, 75 bp, synthetic construct
  source 1..75: mol_type = other DNA
ctgcctacatgccccgttacgtatttaccatgcttaacgggccgaaattcgtactcaccgattatcagttatccc

SEQ ID NO: 789886 - DNA, 75 bp, synthetic construct
  source 1..75: mol_type = other DNA
tctctcgtttctttcccagtcgtcatcaaactatttgacccactctccctctctgctgttttccagaaaagggag

SEQ ID NO: 789887 - DNA, 75 bp, synthetic construct
  source 1..75: mol_type = other DNA
ggcatgaagcctacgcttatgtcgaaaatattcgtaagtatcagattagcctggtgggttatctgcaagagaaag

SEQ ID NO: 789888 - DNA, 75 bp, synthetic construct
  source 1..75: mol_type = other DNA
caccacctttaactacccgacgatggcggaagcctatcgggtagccgcgttaaatggcttaaaccgcctctttta

SEQ ID NO: 789889 - DNA, 75 bp, synthetic construct
  source 1..75: mol_type = other DNA
cgtgggtacgctgaaaattttgttccatcgggaaacgaaagaaattctgggtatccactgctttggtgagcgcgc

SEQ ID NO: 789890 - DNA, 75 bp, synthetic construct
  source 1..75: mol_type = other DNA
tgccaacggtcgcaccgggaacaccgattcgctggcattgcaaaacatcggtctgcaaactgacagccgtggaca

SEQ ID NO: 789891 - DNA, 75 bp, synthetic construct
  source 1..75: mol_type = other DNA
ttaagattagtttgactcccgaagaatacgaaattttaaaagagttatctgctcttgaggggaagtctatggctg

SEQ ID NO: 789892 - DNA, 75 bp, synthetic construct
  source 1..75: mol_type = other DNA
agccggtgtctcctgccatcaacgataagaagtcagattcaggtgtgaatgttccggcaggggggatcgagcagg

SEQ ID NO: 789893 - DNA, 75 bp, synthetic construct
  source 1..75: mol_type = other DNA
gataagaagtcagatgcaggtgtgagtgttccggcaggggggatcgagcaggagctgaaaatgaaaccggaagaa

SEQ ID NO: 789894 - DNA, 75 bp, synthetic construct
  source 1..75: mol_type = other DNA
ctggccgctttgcgtttattcccccgtttatgccgggtaagcgtctggcagtaacgacgctggataatctgcata

SEQ ID NO: 789895 - DNA, 75 bp, synthetic construct
  source 1..75: mol_type = other DNA
gtggtttgccatcggcgtgttgatcccttatgcaggcgtaattctgtttatactgtgctgcctgccgccaaaacc

SEQ ID NO: 789896 - DNA, 75 bp, synthetic construct
  source 1..75: mol_type = other DNA
cagggtggaaaaatatctttaattataatggcgttgctacccgatttgagttctggtcgtttatcatcggtagcg

SEQ ID NO: 789897 - DNA, 75 bp, synthetic construct
  source 1..75: mol_type = other DNA
gcgttatctgtctgcttccgcttttatgttggtggttagcggtaacaattaacaatgactatggtgttttcattt

SEQ ID NO: 789898 - DNA, 75 bp, synthetic construct
  source 1..75: mol_type = other DNA
tctgatcctggtgcacgggaacttgcaggtaaacaggtatcagggcaagtacgggcaacagaaagagggctggca

SEQ ID NO: 789899 - DNA, 75 bp, synthetic construct
  source 1..75: mol_type = other DNA
tgattatgcatatgacgatggccgttatacctggtttggcttcagtccgttaaagaaaattcccagcatcactgt

SEQ ID NO: 789900 - DNA, 75 bp, synthetic construct
  source 1..75: mol_type = other DNA
ggagttttacggttgttggcgtaccggttgataagcgttttgttttacgtcttggtgagcaggtggtggggattg

SEQ ID NO: 789901 - DNA, 75 bp, synthetic construct
  source 1..75: mol_type = other DNA
gggcgcattgccgcgcaggcgctggtgaaaggtgaagccaacgcacatctgattgaagatatccctaccggcatt

SEQ ID NO: 789902 - DNA, 75 bp, synthetic construct
  source 1..75: mol_type = other DNA
cgtcagggattttacgaacgtaatcactgcgaaatattgcaggggaacgctcgctttgttgacgagcacacgctg

SEQ ID NO: 789903 - DNA, 75 bp, synthetic construct
  source 1..75: mol_type = other DNA
caggtaaacaggtatcagggcaagtacgggcaacagaaagagggctggcagctgctgacgcaaagcattatcagc

SEQ ID NO: 789904 - DNA, 75 bp, synthetic construct
  source 1..75: mol_type = other DNA
acggcgtcgtgctggaaagcgacgttgatggattaatgcagtcggtaaaactgaacgctgctcaggcaaggcagc

SEQ ID NO: 789905 - DNA, 75 bp, synthetic construct
  source 1..75: mol_type = other DNA
aatatcgcagccggactacatgtaccagcggttgtaatgattatgccgatgcattttgccacgacgctagcgcgc

SEQ ID NO: 789906 - DNA, 75 bp, synthetic construct
  source 1..75: mol_type = other DNA
ttatgtgaaaacatggggttgcggaagttttttgaatgagacgaacatttacagcagaggaaaaagcctctgttt

SEQ ID NO: 789907 - DNA, 75 bp, synthetic construct
  source 1..75: mol_type = other DNA
gtgtcaaaacctataatggcgcattgggtgtcgatattcatgaaaaagatcacccaacgattctggaaatggcaa

SEQ ID NO: 789908 - DNA, 75 bp, synthetic construct
  source 1..75: mol_type = other DNA
attcgcattggtctgtttatgtacgatcatctgggtaaacgcaccagcctgccgggatcaaccggtttgcgtttt

SEQ ID NO: 789909 - DNA, 75 bp, synthetic construct
  source 1..75: mol_type = other DNA
ttccgccagttcaaaactcattcacggtggcctgcgttaccttgaacactatgaattccgtctggtcagcgaggc

SEQ ID NO: 789910 - DNA, 75 bp, synthetic construct
  source 1..75: mol_type = other DNA
aaaactgacgccgtattatcagggcattggcccggcgtggacgaaagagagcgtgctgccgggtggtgccattga

SEQ ID NO: 789911 - DNA, 75 bp, synthetic construct
  source 1..75: mol_type = other DNA
ctgctaaccagggcggcgatcttggctgggctacgccagacattttcgatccggccttccgtgacgcgctgaccc

SEQ ID NO: 789912 - DNA, 75 bp, synthetic construct
  source 1..75: mol_type = other DNA
aagttcatgctcgccatattctgctgaaaccgtcgccgatcatgactgacgaacaggctcgcgtaaaactggagc

SEQ ID NO: 789913 - DNA, 75 bp, synthetic construct
  source 1..75: mol_type = other DNA
gcgctgatttcggtaaactggcgatcgctcactctgccgatcagcaggcgctgaacggcggccagatgggctggg

SEQ ID NO: 789914 - DNA, 75 bp, synthetic construct
  source 1..75: mol_type = other DNA
ctcaggcattaatgaccaaagatggcgcggtgatggtaatgagctacggtaactcggaagaagattcacaagaac

SEQ ID NO: 789915 - DNA, 75 bp, synthetic construct
  source 1..75: mol_type = other DNA
gtgaaacaaagcactattgcactggcactcttaccgttactgtttacccctgtgacaaaagcccggacaccagaa

SEQ ID NO: 789916 - DNA, 75 bp, synthetic construct
  source 1..75: mol_type = other DNA
tgacgctggatcagatgcgcagccgtctggcttacgatggtctgaactacaacacctatcgtaaccagatccgca

SEQ ID NO: 789917 - DNA, 75 bp, synthetic construct
  source 1..75: mol_type = other DNA
caaccagccggagagctggatagcagaattgctggcggcaaaggacagaacgctggcggcagcaacggcaaaagc

SEQ ID NO: 789918 - DNA, 75 bp, synthetic construct
  source 1..75: mol_type = other DNA
ggaagggctgtatctggtcgcggtggattaccctgaccggtatgatcttccaaaaccgccaatgggcccgctatt

SEQ ID NO: 789919 - DNA, 75 bp, synthetic construct
  source 1..75: mol_type = other DNA
ccttgggcgtaaatgcgaatttacctggtgacatcgccgtgcgttgggttaaagctgtacctgatgattttcatg

SEQ ID NO: 789920 - DNA, 75 bp, synthetic construct
  source 1..75: mol_type = other DNA
cgcaacgtgatgcatatcaacgttacgcgtcacggaccttatgtggtggtggatatcaaagcaaatgcctttgta

SEQ ID NO: 789921 - DNA, 75 bp, synthetic construct
  source 1..75: mol_type = other DNA
atgatttcacctcgttccgcgcggtgcaatgtcagtcccgaacgccgtggcgcaacgttatgcatatcaacgtca

SEQ ID NO: 789922 - DNA, 75 bp, synthetic construct
  source 1..75: mol_type = other DNA
aaagctgtacccgatgattttcatgcccgatttagcgccacggctcgccgttatcgctacattatctacaatcat

SEQ ID NO: 789923 - DNA, 75 bp, synthetic construct
  source 1..75: mol_type = other DNA
caaggtatagcgtgttacttagttactcggattaacaatcccaacgtacagagcggcggatttacagagtcagcg

SEQ ID NO: 789924 - DNA, 75 bp, synthetic construct
  source 1..75: mol_type = other DNA
tgtgtcgccgcagacgcaagcgctgagcgacacggaacagatgttgctggcgctgtggatgcgctatttgccgat

SEQ ID NO: 789925 - DNA, 75 bp, synthetic construct
  source 1..75: mol_type = other DNA
tgacggcgtgggtccaatccaggtggacagtgcgttacaacagcggctggtggcgctctggcaggaggtactcgg

SEQ ID NO: 789926 - DNA, 75 bp, synthetic construct
  source 1..75: mol_type = other DNA
acctggggtctgctggagctggtgaactccgtggttggcctgattatcgtgttgttcatcagcatgattgcataa

SEQ ID NO: 789927 - DNA, 75 bp, synthetic construct
  source 1..75: mol_type = other DNA
atgaatatgatgatctcatatcaggaacttgttcgcaccttccctaagagaacgcaacagcgcacttgctttgcc

SEQ ID NO: 789928 - DNA, 75 bp, synthetic construct
  source 1..75: mol_type = other DNA
acatcatggcatggctgatcaccgtactgattcgtctggcgacgggtcagggtgtggtttcagcgatgaccgccg

SEQ ID NO: 789929 - DNA, 75 bp, synthetic construct
  source 1..75: mol_type = other DNA
ggaagggctatatctggtcgcggtggattatccagaccgatttgatcttccaataccaccaatgggcccgctgtt

SEQ ID NO: 789930 - DNA, 75 bp, synthetic construct
  source 1..75: mol_type = other DNA
gtttatacccatgacagctccgggcaccgcagggacgatcgggtatcgcttaacttcagcttacccctgtggttt

SEQ ID NO: 789931 - DNA, 75 bp, synthetic construct
  source 1..75: mol_type = other DNA
atctacgaagatcagcgcctgaaaaactttgtcagcccgcaattctgggataaaggcgttgcggcgctgaattta

SEQ ID NO: 789932 - DNA, 75 bp, synthetic construct
  source 1..75: mol_type = other DNA
tccagcggacaggaaaacccgggaacgatctatcaatttaacgatggttttatcgtcggcagtcgcgaaaaggtc

SEQ ID NO: 789933 - DNA, 75 bp, synthetic construct
  source 1..75: mol_type = other DNA
gcgtggaccgatggccagcaaggcgctgatgcagatgttgcaggaaacactgtggcctgatctggactatctcgt

SEQ ID NO: 789934 - DNA, 75 bp, synthetic construct
  source 1..75: mol_type = other DNA
ggtggagattgatccgaaaggcagtgaggacgatgtcaaattcgatcgcactgtggcccgggttgtgccctggga

SEQ ID NO: 789935 - DNA, 75 bp, synthetic construct
  source 1..75: mol_type = other DNA
agcaccatggctctcattgaagccagggacgcgaagggcgcgatgctgcccggctcacccggcacccgggtggat

SEQ ID NO: 789936 - DNA, 75 bp, synthetic construct
  source 1..75: mol_type = other DNA
gtcggatcctaatgcaatccatacattagaatattggaagagtgttgatgaaaacattacatttattctaattta

SEQ ID NO: 789937 - DNA, 75 bp, synthetic construct
  source 1..75: mol_type = other DNA
atccgagctctaattatcaaattgtagaagaacttttgcatcaaagaggaatgaattctctatgtccatcgaagc

SEQ ID NO: 789938 - DNA, 75 bp, synthetic construct
  source 1..75: mol_type = other DNA
tctttggttgaagcaatgaaagaaccagaacaaaaagaagaaccaattacaattacaattgaagttgtagaagaa

SEQ ID NO: 789939 - DNA, 75 bp, synthetic construct
  source 1..75: mol_type = other DNA
atggttccgtagtagtgttgaagtatctgtaatgggtgctgagcgaagggaaccagttgtcggggaggatttatg

SEQ ID NO: 789940 - DNA, 75 bp, synthetic construct
  source 1..75: mol_type = other DNA
gtagtggctctggtaacgcaacaaatgtccagattcagcttctgaatgctgatggtaccacacagatactacttg

SEQ ID NO: 789941 - DNA, 75 bp, synthetic construct
  source 1..75: mol_type = other DNA
agcttgaatgcaccataaaaaattttgaatcgctgttaaagaaagaacaaaataaaaatgaattgcaacaacaaa

SEQ ID NO: 789942 - DNA, 75 bp, synthetic construct
  source 1..75: mol_type = other DNA
aaattgatcaggcggcaatggttcaagaggttatccaacgtatgtcgcaatctacatcacagaagtcgagggccc

SEQ ID NO: 789943 - DNA, 75 bp, synthetic construct
  source 1..75: mol_type = other DNA
tgcgtacagagcagacgctgtcagatcaggcttatgagcgcctgaagaaagattttgaggagcgtcacaccgggc

SEQ ID NO: 789944 - DNA, 75 bp, synthetic construct
  source 1..75: mol_type = other DNA
gtggcttcctgatcggcggtacttccggtcgtaccaccctgaacggtgaaggtctgcagcacgaagatggtcaca

SEQ ID NO: 789945 - DNA, 75 bp, synthetic construct
  source 1..75: mol_type = other DNA
agtatctgatcgaccaactgcttgctgaagcccgcaaaggcggagtcaacgtagccgcaggcaccggtatcagca

SEQ ID NO: 789946 - DNA, 75 bp, synthetic construct
  source 1..75: mol_type = other DNA
ctgataaaataaaagtgattggttataaacaacattttaaaattccttatgtcggtctgacaggaaactaccgtt

SEQ ID NO: 789947 - DNA, 75 bp, synthetic construct
  source 1..75: mol_type = other DNA
aagtctctgccgattacaatgcgttgtttatcggcgatgaatgtgccgtgccgccatatcgtagcgcatgggttg

SEQ ID NO: 789948 - DNA, 75 bp, synthetic construct
  source 1..75: mol_type = other DNA
ccggactggttcgaaaaagtaagcagggcgtttattacgccaaatttaacgccggggcgttactgcgcggggata

SEQ ID NO: 789949 - DNA, 75 bp, synthetic construct
  source 1..75: mol_type = other DNA
tcaggaagttcacggcaatggcctctcttcctatccgcacccgaaattgatgccggaattctggcagttcccgac

SEQ ID NO: 789950 - DNA, 75 bp, synthetic construct
  source 1..75: mol_type = other DNA
tgacccaggaggatatctggcatgtgcgcacgctgacgctggacggtctggtgggactgaatcccatcgcctatg

SEQ ID NO: 789951 - DNA, 75 bp, synthetic construct
  source 1..75: mol_type = other DNA
aaaatttcagctggaggaaatatgccgcctgttccgggtgccgatgcacatggtgcagaacactgaccgctctac

SEQ ID NO: 789952 - DNA, 75 bp, synthetic construct
  source 1..75: mol_type = other DNA
cgtgctttcctggaaggtcgtctgactcaggagcagctggataacttccgtcaggaggttcacggcaatggcctc

SEQ ID NO: 789953 - DNA, 75 bp, synthetic construct
  source 1..75: mol_type = other DNA
actttcggtatggaaggtctgttccgtcagattggtatttacagcccgaacggtcagcagtacaccccgcaggac

SEQ ID NO: 789954 - DNA, 75 bp, synthetic construct
  source 1..75: mol_type = other DNA
gtcagattggtatttacagccctaacggtcagcagtacaccccgcaggaccgcgagcaggttgcttactataaag

SEQ ID NO: 789955 - DNA, 75 bp, synthetic construct
  source 1..75: mol_type = other DNA
tctgaatacagcaaaaatggtgcaggcatagaaaactataatttcatcactactgctggtcttaagtacaccttt

SEQ ID NO: 789956 - DNA, 75 bp, synthetic construct
  source 1..75: mol_type = other DNA
gtgtttatggcgatgtttatcgacgtccatttactgacccagcttccagcgttgcaaggcgtgttgggtaacgtg

SEQ ID NO: 789957 - DNA, 75 bp, synthetic construct
  source 1..75: mol_type = other DNA
cagtgtggactggacgctgctgctggtgtttatggcgatgtttatcgacgtccatttactaaccaactgccagtt

SEQ ID NO: 789958 - DNA, 75 bp, synthetic construct
  source 1..75: mol_type = other DNA
gcatctgataacgatgagcactatgacccaggaaaaagaatcacttatcgcagtaaagtcaaagaccaaaattac

SEQ ID NO: 789959 - DNA, 75 bp, synthetic construct
  source 1..75: mol_type = other DNA
attggtgagattcgcccttttgctgacgacctggacgctgtccggtttaaccgcaacaaaatcaaccggcggcta

SEQ ID NO: 789960 - DNA, 75 bp, synthetic construct
  source 1..75: mol_type = other DNA
ttcagactacagcaaaaatggtgcaggcatagaaaactataacttcatcactactgctggtcttaagtacatttt

SEQ ID NO: 789961 - DNA, 75 bp, synthetic construct
  source 1..75: mol_type = other DNA
tatctatcggggctgctggctggacaactctcggcagccgaggtggcaatatggtcgatcaggactggatggatt

SEQ ID NO: 789962 - DNA, 75 bp, synthetic construct
  source 1..75: mol_type = other DNA
gcacaccatcatcaccttaagcggcctgatgctgctgaccaaaggtgtggagctaagcggttattttgatgtgct

SEQ ID NO: 789963 - DNA, 75 bp, synthetic construct
  source 1..75: mol_type = other DNA
tggtggtggtttttgtggtctgtaatttgattgtcgatttgctcaacgccgcgctggacccgcgtattcgtcgtc

SEQ ID NO: 789964 - DNA, 75 bp, synthetic construct
  source 1..75: mol_type = other DNA
ttctgctgctgatcccgatggtgctcgccgcctcggtgatcatttttttgatgctgcgcctcggcaccggcgacc

SEQ ID NO: 789965 - DNA, 75 bp, synthetic construct
  source 1..75: mol_type = other DNA
aataaaaaggtaatacttcactttatgatcacaataataacacttcagactacagcaaaaatggagcaggtatag

SEQ ID NO: 789966 - DNA, 75 bp, synthetic construct
  source 1..75: mol_type = other DNA
aaacgtggggggctttggtttattacccggatcgctggcaaatttgattgcgttacggatggcgaacgatcgccg

SEQ ID NO: 789967 - DNA, 75 bp, synthetic construct
  source 1..75: mol_type = other DNA
tggcgcaatgatgctgacactcctgctgttgtgctggtgttgtttccttggaaaggcgctgcaataccatacggg

SEQ ID NO: 789968 - DNA, 75 bp, synthetic construct
  source 1..75: mol_type = other DNA
atgaaacaattacttgcctcaccctcgctgcaattagttacgtgtcccgcgagcgccacggcacagtctgcagaa

SEQ ID NO: 789969 - DNA, 75 bp, synthetic construct
  source 1..75: mol_type = other DNA
atggtatcgaattattaccatgtatgaagatcagcagcccgataactggcgtgtacaggcgatactgtatgcgtg

SEQ ID NO: 789970 - DNA, 75 bp, synthetic construct
  source 1..75: mol_type = other DNA
atggtatcgcattattaccatgtacgaagaccagcagcccgataactggcgtgtacaggcgatactgtatgcatg

SEQ ID NO: 789971 - DNA, 75 bp, synthetic construct
  source 1..75: mol_type = other DNA
ggccgatgtcttcctggcggttaacagcgtggcaggccttggcgaaaaagcgcaacaggcaccggaaaatgatga

SEQ ID NO: 789972 - DNA, 75 bp, synthetic construct
  source 1..75: mol_type = other DNA
gagagcgcaggaaacaatgccttccctgtcagatgatctgctttcaggggaggatcttgacgtgagaggtatact

SEQ ID NO: 789973 - DNA, 75 bp, synthetic construct
  source 1..75: mol_type = other DNA
aggtaattataatattattgattctgtcgatacggagtatattgcaaagacatcagcagtgccaaataatgcatt

SEQ ID NO: 789974 - DNA, 75 bp, synthetic construct
  source 1..75: mol_type = other DNA
cttggcgggcgcgacctcagccgtgaagtgggcggcatcagtgcgctgacggcgctggaaatgctcagtgcagac

SEQ ID NO: 789975 - DNA, 75 bp, synthetic construct
  source 1..75: mol_type = other DNA
tttgcctcctcgctggatgaggccgcacgcctggcttgcctgctttcacgcgttacggcgcgacgtaacgcgata

SEQ ID NO: 789976 - DNA, 75 bp, synthetic construct
  source 1..75: mol_type = other DNA
gcccatatcgttgaacttgttcgccagtgcgcgcagctacatgccgccgggcatcggattgtaattgtgacgtcg

SEQ ID NO: 789977 - DNA, 75 bp, synthetic construct
  source 1..75: mol_type = other DNA
atttttaaagcaaggtcatgagatcattgctaagaatcaactcgctcgtgaaaaattgattatttataatagcga

SEQ ID NO: 789978 - DNA, 75 bp, synthetic construct
  source 1..75: mol_type = other DNA
taaaattcatgtcgatttaaactggcgatatctgaacgagtatcttgatcaaatcggtgatgctgccaacttact

SEQ ID NO: 789979 - DNA, 75 bp, synthetic construct
  source 1..75: mol_type = other DNA
atcctcgacctgggcgatgatttctacactgtcgggcgtccacatccgatgatcgacccaaccttacgcaaccag

SEQ ID NO: 789980 - DNA, 75 bp, synthetic construct
  source 1..75: mol_type = other DNA
ttcaggtggtcataggtaaccatgtggccgatgtcttcctggcggttaacagcgtggcaggccttggcgaaaaag

SEQ ID NO: 789981 - DNA, 75 bp, synthetic construct
  source 1..75: mol_type = other DNA
atgatgcaattgcggaaatgcaaaaagatggcactctgcaagccctttccgaaaaatggtttggtgctgatgtga

SEQ ID NO: 789982 - DNA, 75 bp, synthetic construct
  source 1..75: mol_type = other DNA
gagggtttcgtgagattatgcaaaatactccatcaagaacattgcgaagggagctagtaggaacagcattaagag

SEQ ID NO: 789983 - DNA, 75 bp, synthetic construct
  source 1..75: mol_type = other DNA
ggtcagcggtcagttgaaaactctgtcggtggcgattggcgataaagtaaaaaaagaccagcttttaggggtaat

SEQ ID NO: 789984 - DNA, 75 bp, synthetic construct
  source 1..75: mol_type = other DNA
atccgcagcatcatggtaaaattcgttatacccagattgcaccaacgtcgcgtggtgatgtgcaagcctatcagg

SEQ ID NO: 789985 - DNA, 75 bp, synthetic construct
  source 1..75: mol_type = other DNA
cagctttgtgattatgatttgctgggtttccagacagagaacgatcgtctggcgttcctggattgcctttctaac

SEQ ID NO: 789986 - DNA, 75 bp, synthetic construct
  source 1..75: mol_type = other DNA
cctcagcgaacaggaccttgacgaatactacaaccaattctccaatgccgttctctggcccgcttttcattatcg

SEQ ID NO: 789987 - DNA, 75 bp, synthetic construct
  source 1..75: mol_type = other DNA
taacctgcatatgaatctatttgaagaccaggaagcacgggaactattcaagatctacggagataaatcatggag

SEQ ID NO: 789988 - DNA, 75 bp, synthetic construct
  source 1..75: mol_type = other DNA
aaccatcccgtcaacggggattgatttcaccgtctgggccagcgttattggcggtgtcattgccatcggttgcgc

SEQ ID NO: 789989 - DNA, 75 bp, synthetic construct
  source 1..75: mol_type = other DNA
gttattggcggtgtcattgccatcggttgcgcatttgtcggtacggtgatgcttcatttcatcaccgctaaacgt

SEQ ID NO: 789990 - DNA, 75 bp, synthetic construct
  source 1..75: mol_type = other DNA
tggagaattcttaacgcacccgtgccgacttatcagacgctgattgtgcgccccggtgatttacagcaaagcgtg

SEQ ID NO: 789991 - DNA, 75 bp, synthetic construct
  source 1..75: mol_type = other DNA
agcgttacgttattgcgctggtgatagtcatcgccggactgattacgttatggagaattcttaacgcacccgtgc

SEQ ID NO: 789992 - DNA, 75 bp, synthetic construct
  source 1..75: mol_type = other DNA
gtgagtgcacgttttctggggatgaaccccgaagccaccggcacgctcagcgacacggaccatctgtggaacagc

SEQ ID NO: 789993 - DNA, 75 bp, synthetic construct
  source 1..75: mol_type = other DNA
gatggtcggatggcggaatacccactgcgcgccagccatcgacacccggatgcttatgacatttttcagataagc

SEQ ID NO: 789994 - DNA, 75 bp, synthetic construct
  source 1..75: mol_type = other DNA
tggatgtgcgagacaatcttgagcgccgggcttatgaaattgctctggcatcgctggaagcagtatcggatgaac

SEQ ID NO: 789995 - DNA, 75 bp, synthetic construct
  source 1..75: mol_type = other DNA
attgagcgccgggcttatgaaattgctctggcatcgctggaagcagtatcggatgaacgagcagcctatgaatta

SEQ ID NO: 789996 - DNA, 75 bp, synthetic construct
  source 1..75: mol_type = other DNA
acgataatgagcgaaaatatggtttttatgatgcaaatggtggtgttgttgagttttcagaaacagaaaagttta

SEQ ID NO: 789997 - DNA, 75 bp, synthetic construct
  source 1..75: mol_type = other DNA
atgtgtttgtgttgccaacattctatcgctctgaagctcagcctatttctgttcttgaagcaatgtattttggtt

SEQ ID NO: 789998 - DNA, 75 bp, synthetic construct
  source 1..75: mol_type = other DNA
caatggcacttgcctgtgaatataccaacaaccctgaattatcaattgccaatgttacatcgttagtggagaaca

SEQ ID NO: 789999 - DNA, 75 bp, synthetic construct
  source 1..75: mol_type = other DNA
ctacgggcaatcattattagcacaaacgactcagtccggcgttaatgttgataaatgtctgattgttaatggaga

SEQ ID NO: 790000 - DNA, 75 bp, synthetic construct
  source 1..75: mol_type = other DNA
tctttctataagacttttggcgaatgtaccgggttgtcggaggtaccggccagattatttgcagactgtaccggt

SEQ ID NO: 790001 - DNA, 75 bp, synthetic construct
  source 1..75: mol_type = other DNA
tgcaccagtgcgacaacattttacagggtcttttataactgcagggaactgagcacggtgggtaacagcgtgttt

SEQ ID NO: 790002 - DNA, 75 bp, synthetic construct
  source 1..75: mol_type = other DNA
atgagtcgtttttcacatgatgactacacgcgcgcgatgctgaaccttctgccgtcagggattgcctggagccgt

SEQ ID NO: 790003 - DNA, 75 bp, synthetic construct
  source 1..75: mol_type = other DNA
atcgtcgccgtatagctgttgcagcactccatcgaataaaacgtaaaacaggtggtgaactgcttattgttgacc

SEQ ID NO: 790004 - DNA, 75 bp, synthetic construct
  source 1..75: mol_type = other DNA
tgactgcgatacctccggggctgtttgctgagtgcgccagcgccacgacgttctatcaggcattttacgaatgta

SEQ ID NO: 790005 - DNA, 75 bp, synthetic construct
  source 1..75: mol_type = other DNA
gcattgccggaagggatgtttgacagctgcactgccgtgaccacgttcagtagtgctttttatggctgtacggct

SEQ ID NO: 790006 - DNA, 75 bp, synthetic construct
  source 1..75: mol_type = other DNA
cgtcaggtaagattaccggccaatcacttgcgtttaatataatatttaaaaactattctggaagtaaatatctgg

SEQ ID NO: 790007 - DNA, 75 bp, synthetic construct
  source 1..75: mol_type = other DNA
atcctgcgcaatgcgtcactcccaatgattaccgccgtggggatgcatattggcgaactgatcggcggcaccatg

SEQ ID NO: 790008 - DNA, 75 bp, synthetic construct
  source 1..75: mol_type = other DNA
tggtgttaattctgctcacttccgtgccgctcggtatctgggcggcgcgccatcgcgaccgcctgccggatttcg

SEQ ID NO: 790009 - DNA, 75 bp, synthetic construct
  source 1..75: mol_type = other DNA
ccaactgacggaagagacaacgttgcactggcacgggctggaagtaccgggtgaagtcgacggcggcccgcaggg

SEQ ID NO: 790010 - DNA, 75 bp, synthetic construct
  source 1..75: mol_type = other DNA
tgcgcgccagccaccggcatcccgacgcttatgacatttttcagataagcacagtcaccagcaaagtcaaagttt

SEQ ID NO: 790011 - DNA, 75 bp, synthetic construct
  source 1..75: mol_type = other DNA
tgaacaaaatcacgttctggctgggtaatgaagacgattatacccgacaccagctttatctgtggttttgcgaat

SEQ ID NO: 790012 - DNA, 75 bp, synthetic construct
  source 1..75: mol_type = other DNA
tgggcaaactatttacgcccagttccggccatgacggttattgcctatgaacccaaaaccgatcagttaaaagtc

SEQ ID NO: 790013 - DNA, 75 bp, synthetic construct
  source 1..75: mol_type = other DNA
cgacggcgattctggcaacgctggcggcgctgcgcggcaaagttggcggtacggcgcgcattattgccgtgctgg

SEQ ID NO: 790014 - DNA, 75 bp, synthetic construct
  source 1..75: mol_type = other DNA
atgcgcattcatattttaggaatttgtggcacgtttatgggtggtctggcgatgctggcgcgccagttaggccat

SEQ ID NO: 790015 - DNA, 75 bp, synthetic construct
  source 1..75: mol_type = other DNA
aaaaatggtattattatcgataagaatagtcagcaagccatcgttgatgcgattattttaatggatgcaacaaga

SEQ ID NO: 790016 - DNA, 75 bp, synthetic construct
  source 1..75: mol_type = other DNA
gcgaaaaagtgggcgaagtgaaatggtcgctggtaggcgaacataatatgcacaatggcctgatggcgattgcgg

SEQ ID NO: 790017 - DNA, 75 bp, synthetic construct
  source 1..75: mol_type = other DNA
taggtcgtgccgatgaagtcttcctgctgcaaccggcgcatattccgtggcaggtggcagaagtggcagaagcct

SEQ ID NO: 790018 - DNA, 75 bp, synthetic construct
  source 1..75: mol_type = other DNA
ctttgaggtttcggcgcgtctgggcgaaagcgacttctttgttatcgaagcggatgagtatgactgcgccttctt

SEQ ID NO: 790019 - DNA, 75 bp, synthetic construct
  source 1..75: mol_type = other DNA
gtaccatgcgatttttgccgaaaggatgatccagcaccctgcggtacagcgtatttgcaatacagattactctgc

SEQ ID NO: 790020 - DNA, 75 bp, synthetic construct
  source 1..75: mol_type = other DNA
ataatgagcgaaaatatggtttttatgatgcaaatgttggtgttgttgagttttcagatacagaaaagtttaagg

SEQ ID NO: 790021 - DNA, 75 bp, synthetic construct
  source 1..75: mol_type = other DNA
gccccacagctgatgaaccgtccaccgcaatattcacgttcagaaagagaaaaagataatgacgccaaccattga

SEQ ID NO: 790022 - DNA, 75 bp, synthetic construct
  source 1..75: mol_type = other DNA
tatcgttgaccttatccgcgagtttgggcaaacaaaaattttacgaccggatatcaaaaaaccagtatggcacaa

SEQ ID NO: 790023 - DNA, 75 bp, synthetic construct
  source 1..75: mol_type = other DNA
cggagctatggtaagagcattcttcacaagcccctccctggattctcaaaactcgatgccacacggactctacac

SEQ ID NO: 790024 - DNA, 75 bp, synthetic construct
  source 1..75: mol_type = other DNA
ttaactctcagggcttaaacgttgaaattctgggggagtttgatgatgcggcgttgatgaaagcctttggggcga

SEQ ID NO: 790025 - DNA, 75 bp, synthetic construct
  source 1..75: mol_type = other DNA
ttcaaaagacttagctaacttacgaaaggagtttaataaaactgtaagaaaaaattttcttatcaaacttgcaaa

SEQ ID NO: 790026 - DNA, 75 bp, synthetic construct
  source 1..75: mol_type = other DNA
gtataacattttgtaaattaattgataaaagcactccattacttattaattccattaacaataatgaacaattat

SEQ ID NO: 790027 - DNA, 75 bp, synthetic construct
  source 1..75: mol_type = other DNA
gatgcgctgacggagtcggtcaacgcctacggtcgcaagctgattggcgacggtgcactgctgggcttcagttgc

SEQ ID NO: 790028 - DNA, 75 bp, synthetic construct
  source 1..75: mol_type = other DNA
atgtgcgttgcgcaatgccgtttggcgcaaatgatcattgcgactttgcagcaatgcacgccaccattcatcatc

SEQ ID NO: 790029 - DNA, 75 bp, synthetic construct
  source 1..75: mol_type = other DNA
gcgccagctgtcggcaatgattgacgacccgcagagcgaggtgaacctgctcaacgaacagggcatcaccacggt

SEQ ID NO: 790030 - DNA, 75 bp, synthetic construct
  source 1..75: mol_type = other DNA
aaggctatgatcaaatactaaatgaaaaaaacagcgggcatagcgatagcaacagcatctattcttttaacaaag

SEQ ID NO: 790031 - DNA, 75 bp, synthetic construct
  source 1..75: mol_type = other DNA
gatacttgataaaagtttggcagatacacctgatcttttaacttttataaaacgactggaagaagctgaagtcgg

SEQ ID NO: 790032 - DNA, 75 bp, synthetic construct
  source 1..75: mol_type = other DNA
ttggcagcatcacccgatccgcgatataccgatacggctgctggtcgtgaagatgaatggcttcctattcgcccg

SEQ ID NO: 790033 - DNA, 75 bp, synthetic construct
  source 1..75: mol_type = other DNA
ttccgcaagattcttcatctgcacctgttagcacccgttcctttcacagccagtcattctcctcaggaacaatca

SEQ ID NO: 790034 - DNA, 75 bp, synthetic construct
  source 1..75: mol_type = other DNA
tgttgtgcttctcagacgcagaggaatgtcactgctgcatgccgctatccatccttttcgccggattcttcattt

SEQ ID NO: 790035 - DNA, 75 bp, synthetic construct
  source 1..75: mol_type = other DNA
tggcgttctgctgttagttgcctggcaggatcattctgtgcgtattgaaatcggctacggactggaaggcgttat

SEQ ID NO: 790036 - DNA, 75 bp, synthetic construct
  source 1..75: mol_type = other DNA
tcctcttcatcctcttttgacaatgataatttcagcggcggcggcggttcttcaggaggcggcggttcatccgac

SEQ ID NO: 790037 - DNA, 75 bp, synthetic construct
  source 1..75: mol_type = other DNA
tattgctgggtaagatcatggctccctattcgcccgggcaccgatgccgcgctggttgcgggtattgcctgggta

SEQ ID NO: 790038 - DNA, 75 bp, synthetic construct
  source 1..75: mol_type = other DNA
gattgcactaaacagcttcgcccagatgttcagaaggccgtttggcacaactcacttcgcttacctgatggagaa

SEQ ID NO: 790039 - DNA, 75 bp, synthetic construct
  source 1..75: mol_type = other DNA
agagagaacaggcgagaaatgtgcaaagacgatcatacaagaagctatagatacgctcataaccagcaagatttc

SEQ ID NO: 790040 - DNA, 75 bp, synthetic construct
  source 1..75: mol_type = other DNA
ctttttacaacggctcatagagcttctccgaagctacggtaagagcattcttcacaacaaccctgcaagattctc

SEQ ID NO: 790041 - DNA, 75 bp, synthetic construct
  source 1..75: mol_type = other DNA
tcatcattgctccccttgccgtagatgacagaaaagcttccattgccttcaatgcaaccaacccagaagaaatta

SEQ ID NO: 790042 - DNA, 75 bp, synthetic construct
  source 1..75: mol_type = other DNA
ttcggctacccaccttcctatagacacaccacctctttctgctgctgaaaaaactacaaaaacaaacgtttttag

SEQ ID NO: 790043 - DNA, 75 bp, synthetic construct
  source 1..75: mol_type = other DNA
aacacaacgaagcttttgcgttctgatgtaagtaaacccgtttggcataattctctgcgtcttcctgctggtgaa

SEQ ID NO: 790044 - DNA, 75 bp, synthetic construct
  source 1..75: mol_type = other DNA
ggtcaccgcagccgatattatcggtgccgtaaataccgcaggcgaccgcacggggatgaaactccttcaggacac

SEQ ID NO: 790045 - DNA, 75 bp, synthetic construct
  source 1..75: mol_type = other DNA
atggctgtgcttcgtacgttaccgggcagaatcaaaactctgaaaacccggcgggtgaatatactgaagggtgaa

SEQ ID NO: 790046 - DNA, 75 bp, synthetic construct
  source 1..75: mol_type = other DNA
tggtggtggtagcagaacacttcggagcggatgatgaacggctggcgcgtgcgctgatgctttcgcatttgagcg

SEQ ID NO: 790047 - DNA, 75 bp, synthetic construct
  source 1..75: mol_type = other DNA
tgctgatgatgagcgtctggcgcgcgcgttgatgctttcgcatttgagcgcgatttacatccataaccagttgcc

SEQ ID NO: 790048 - DNA, 75 bp, synthetic construct
  source 1..75: mol_type = other DNA
gttgacccgcccgcacaaccgacaatggaaacgcaggatcgggtagaaactgaaaacacgggggtaaaaccctga

SEQ ID NO: 790049 - DNA, 75 bp, synthetic construct
  source 1..75: mol_type = other DNA
ctacatgcggcgctgctggcagcggcgcaacgtggggttaaagcggaagtcttgctggatggctatggttcgcca

SEQ ID NO: 790050 - DNA, 75 bp, synthetic construct
  source 1..75: mol_type = other DNA
acaagattcagttactggaaaacggcgagcaatattaccctgctgtgtttaaagcgattaacgaagcagagcaac

SEQ ID NO: 790051 - DNA, 75 bp, synthetic construct
  source 1..75: mol_type = other DNA
aacgctttatgcatatgacttttatgccgataaaactgtcgtggaaattggtcgcgtagaaaatgtgatggaaga

SEQ ID NO: 790052 - DNA, 75 bp, synthetic construct
  source 1..75: mol_type = other DNA
agaaggttccgtggttggcgcagcggaggcgctttatttgacaccacaaaccattaccggacagatccgggctct

SEQ ID NO: 790053 - DNA, 75 bp, synthetic construct
  source 1..75: mol_type = other DNA
gccgtgttgagaacgtgatggaagagtaccacgcgatttttgccgaaaggatgattcagcaccctgcagtacagc

SEQ ID NO: 790054 - DNA, 75 bp, synthetic construct
  source 1..75: mol_type = other DNA
taatggcgctggatgataccgctgtgaccggcaatgaagggattgtggcgcatgatgttgagcagtcgattgcca

SEQ ID NO: 790055 - DNA, 75 bp, synthetic construct
  source 1..75: mol_type = other DNA
tgatgaacggctggcgcgtgcgctgatgctttcgcatttgagcgcgatttacatccataaccagttaccgcgttt

SEQ ID NO: 790056 - DNA, 75 bp, synthetic construct
  source 1..75: mol_type = other DNA
accttaagccaggaaatgctggatatcgtgaactatcgcaaagagtccaatttattgtttgacgttggcgtggct

SEQ ID NO: 790057 - DNA, 75 bp, synthetic construct
  source 1..75: mol_type = other DNA
acaatctgaacggcatcatcgccgctgactgccagcaggtagatgaaaccatgctgccaaaacgcacctggtgga

SEQ ID NO: 790058 - DNA, 75 bp, synthetic construct
  source 1..75: mol_type = other DNA
ttatcgcttaaatgtaagcgtaaagccaatgccgtctgtaacacctgctccttgcagactaaattagagctcctt

SEQ ID NO: 790059 - DNA, 75 bp, synthetic construct
  source 1..75: mol_type = other DNA
agcccgtgagatggcgagcggcatgccggacacgacgttgccggaagtgcccggtggtgccgacagacccgacgg

SEQ ID NO: 790060 - DNA, 75 bp, synthetic construct
  source 1..75: mol_type = other DNA
agccagtgaagcggcgagtggtatgccggacccgacgttgccggaagtgtccggaggtcgtggcagggcagacga

SEQ ID NO: 790061 - DNA, 75 bp, synthetic construct
  source 1..75: mol_type = other DNA
gctataaattcaccccgccaccgccgctggaacgtctgacgtttgaaactgaaattacttctgaatatttagtct

SEQ ID NO: 790062 - DNA, 75 bp, synthetic construct
  source 1..75: mol_type = other DNA
gccggtacggtggtggtgattaacgtgctggatccggcaaaacatggctccaacatcagcaatgagagtatcact

SEQ ID NO: 790063 - DNA, 75 bp, synthetic construct
  source 1..75: mol_type = other DNA
atatcctgcttgagataacctcgctgggtaatgactccaacttattgatagtgttttatgttcagataatgcccg

SEQ ID NO: 790064 - DNA, 75 bp, synthetic construct
  source 1..75: mol_type = other DNA
aaaagtctgctcgtgaagcggcgggtggtatgccggacccgacgctgccggaggtgtccggaggtagtggcagag

SEQ ID NO: 790065 - DNA, 75 bp, synthetic construct
  source 1..75: mol_type = other DNA
gctcagggacgccgggcagtgccgtctctgtggtcgtgtggttgacctctgtgacagtgaactcgatcaccgaat

SEQ ID NO: 790066 - DNA, 75 bp, synthetic construct
  source 1..75: mol_type = other DNA
ccggacccgacgctgccggaggtcatggcagggcagacgatatcatcggactgtgacccgccccgggggggggga

SEQ ID NO: 790067 - DNA, 75 bp, synthetic construct
  source 1..75: mol_type = other DNA
ctctgtgggcgtgtggttgacctttgtgacagtgaactcgatcaccgcattgcacttcagttcggtggtggtaat

SEQ ID NO: 790068 - DNA, 75 bp, synthetic construct
  source 1..75: mol_type = other DNA
gcgggtgaatgtcctgaagggtgaacagcgtcgtgtcagtggcagtgcccgggtttccctcaagcgtcgtatctg

SEQ ID NO: 790069 - DNA, 75 bp, synthetic construct
  source 1..75: mol_type = other DNA
atccggcgaaaaaacgatcgccccggacaccgccccccgtctcatgcagagaaaaaattcctgtttcaggccagt

SEQ ID NO: 790070 - DNA, 75 bp, synthetic construct
  source 1..75: mol_type = other DNA
gcatattcgcgtgactttccaggtcgatgccgacggtcttttaagcgtgacggcgatggaaaaatcgaccggcgt

SEQ ID NO: 790071 - DNA, 75 bp, synthetic construct
  source 1..75: mol_type = other DNA
ggtgtgattgccgtttatgacctcggcggcgggacttttgatatttccattctacgtttaagtcgcggcgtgttt

SEQ ID NO: 790072 - DNA, 75 bp, synthetic construct
  source 1..75: mol_type = other DNA
tgaccgttaacgtcgcgggctggcagggcgaaatcagccgtgaacaattcaacgaactgatcgcaccgttggtaa

SEQ ID NO: 790073 - DNA, 75 bp, synthetic construct
  source 1..75: mol_type = other DNA
aatgaactgatcgcgccactggtaaaacggaccttactggcttgtcgtcgcgcgctgaaagatgcgggcgttgag

SEQ ID NO: 790074 - DNA, 75 bp, synthetic construct
  source 1..75: mol_type = other DNA
gcccgtatgctggctgaacaaaaagtcgaagcggcgcgcgtactggaaagtctgaacggcgcgctggctgcggat

SEQ ID NO: 790075 - DNA, 75 bp, synthetic construct
  source 1..75: mol_type = other DNA
gccgcgctgttaagcgccgcagagcgtcaggtcattgacgatgctgccgctcatctgagtgaagtggcgcagggc

SEQ ID NO: 790076 - DNA, 75 bp, synthetic construct
  source 1..75: mol_type = other DNA
aggatgacaagcttgatggtgagcagacggtggaggaggagagcgcaggctccgagcgctttaacagcgtcatca

SEQ ID NO: 790077 - DNA, 75 bp, synthetic construct
  source 1..75: mol_type = other DNA
cttgaaggattttgccaatacctttacgaaaaggtagaaataacccgagtatctgtgcccaaagataccgattta

SEQ ID NO: 790078 - DNA, 75 bp, synthetic construct
  source 1..75: mol_type = other DNA
cggatacctttgcctgcctaattcaaggcgttgcactagaacacttaaaaaccgatgactacaacctcgatgtgg

SEQ ID NO: 790079 - DNA, 75 bp, synthetic construct
  source 1..75: mol_type = other DNA
tagaacagttcgaacttcggttattaaagcagaatgacccggttaaagcggtacagaatttcatctttgcactta

SEQ ID NO: 790080 - DNA, 75 bp, synthetic construct
  source 1..75: mol_type = other DNA
gaaaaacaaagcagccttaacaccctttctcgagtctgggatgcctgcgcaaacatggaacgttatgtccaatac

SEQ ID NO: 790081 - DNA, 75 bp, synthetic construct
  source 1..75: mol_type = other DNA
acgatttgcgggggagtaccttcaatgaaggtttggtgaacggttttgagctgattggcaaggcaatggcggatc

SEQ ID NO: 790082 - DNA, 75 bp, synthetic construct
  source 1..75: mol_type = other DNA
ctggcgcgttttgcgctgcgtggtatcccggcgctaccggctggcggcgcgcatattcgcgtgacgttccaggtc

SEQ ID NO: 790083 - DNA, 75 bp, synthetic construct
  source 1..75: mol_type = other DNA
gtgtggagccgaagctgaacagccagtggcagccggtttatcaggtgacgtttccggatggctccgtggatgtgt

SEQ ID NO: 790084 - DNA, 75 bp, synthetic construct
  source 1..75: mol_type = other DNA
tggaggaaaacgtgcgccagaccagggcggtggtggaactcgccgccagcgcgcagctctgcgtggaaggcgaac

SEQ ID NO: 790085 - DNA, 75 bp, synthetic construct
  source 1..75: mol_type = other DNA
acgatcaacggatccgccacggtggctgttttcccgttgaagatttcattgatgggttctggcggcctgcgcaag

SEQ ID NO: 790086 - DNA, 75 bp, synthetic construct
  source 1..75: mol_type = other DNA
ctcacgccggatgcttacgagcgtctgaagaaagattttgaggagtgtcacacggggcttggcaatgctcaccgc

SEQ ID NO: 790087 - DNA, 75 bp, synthetic construct
  source 1..75: mol_type = other DNA
gactggaaaacggtggcactgaatgccgaggacagccagttcctggaaacccgcaagtttcagctggaagaaatc

SEQ ID NO: 790088 - DNA, 75 bp, synthetic construct
  source 1..75: mol_type = other DNA
cccgcgaggcaatatcgctggcagctgcgaccgaagagcacggggccagactgttcagcaatggcgcggtgacgt

SEQ ID NO: 790089 - DNA, 75 bp, synthetic construct
  source 1..75: mol_type = other DNA
taaacaacgaattaatattaaagctcaatgtgtcttcatggaacatttcatatcagggaagattggtgaaagtgg

SEQ ID NO: 790090 - DNA, 75 bp, synthetic construct
  source 1..75: mol_type = other DNA
tagaagcggcgcgtgtgctggaaagtctgcacggtgcgctggctgctgatgccgcgctgttaagcgccgcagaac

SEQ ID NO: 790091 - DNA, 75 bp, synthetic construct
  source 1..75: mol_type = other DNA
tcccgcgtaataccacgattccggtggcccgcgcccaggatttcaccacctttaaagatggtcagacggcaatgt

SEQ ID NO: 790092 - DNA, 75 bp, synthetic construct
  source 1..75: mol_type = other DNA
tctggcgcaccatggcaccgctaacccgcgatgctattagtgcaatgtgggacgagctggaagactcttctgaag

SEQ ID NO: 790093 - DNA, 75 bp, synthetic construct
  source 1..75: mol_type = other DNA
ctgacggcggtgtattcctgcgtcagggtgctggctgagtctgttggtatgctgccctgcagtctctacaaaatc

SEQ ID NO: 790094 - DNA, 75 bp, synthetic construct
  source 1..75: mol_type = other DNA
catgcggctgacggcggtgtattcctgcgtcagggtgctggcggagtctgttggtatgctgccctgcagcctcta

SEQ ID NO: 790095 - DNA, 75 bp, synthetic construct
  source 1..75: mol_type = other DNA
tcgcgctactcaagtgcaaatatctttttgaccagtacatcattaagcgggaatttagtgatggcaaagataggt

SEQ ID NO: 790096 - DNA, 75 bp, synthetic construct
  source 1..75: mol_type = other DNA
cattaacagaggaggcttaagaggaagacccaccatttacccacctgagacgctcgacagcttcataaaactata

SEQ ID NO: 790097 - DNA, 75 bp, synthetic construct
  source 1..75: mol_type = other DNA
gcatgacacgctgttaccacgattcaccgatgatataagccgtcaatcatgggttagtgaaaaggtcttctgtaa

SEQ ID NO: 790098 - DNA, 75 bp, synthetic construct
  source 1..75: mol_type = other DNA
gccatgaaatccgtattcttcatcgttcagttcgatacctcccaccagcagggcataacgggcttgttgttcgtg

SEQ ID NO: 790099 - DNA, 75 bp, synthetic construct
  source 1..75: mol_type = other DNA
ggtgcttatatatcacatcctttttcggtgcatttgttattacccggtggttatgccggaaaattatctgctttt

SEQ ID NO: 790100 - DNA, 75 bp, synthetic construct
  source 1..75: mol_type = other DNA
ctgtttaactcgctggtcgaactgaccgatgaccagaaaacagaattgtgcgcatgggcaagcagcagtaaaaac

SEQ ID NO: 790101 - DNA, 75 bp, synthetic construct
  source 1..75: mol_type = other DNA
cattgagcgcgacctgaaaggtgtcattttctattatgtcgatggtcagttaatccagtccatcacaatgtcctc

SEQ ID NO: 790102 - DNA, 75 bp, synthetic construct
  source 1..75: mol_type = other DNA
actatacaggcaaggcaaacccattaagtacattgcagatgctctcagaatgcctctaagcaccacttacaggat

SEQ ID NO: 790103 - DNA, 75 bp, synthetic construct
  source 1..75: mol_type = other DNA
agcagtcaaataccttccaccagcaggaaagagaggtgttgtagtgcgctcaccgtttccaagttgcgttttgat

SEQ ID NO: 790104 - DNA, 75 bp, synthetic construct
  source 1..75: mol_type = other DNA
tttgctgccatagtgctggcctttgtgcttcccattgctggatatagcgggagctggggagcgcttatcacatta

SEQ ID NO: 790105 - DNA, 75 bp, synthetic construct
  source 1..75: mol_type = other DNA
ggaaacatcatgggggttctgattgctggagaactccatctttattattcaggaacttacaccgagaatttagtt

SEQ ID NO: 790106 - DNA, 75 bp, synthetic construct
  source 1..75: mol_type = other DNA
atgtcaattgagcatattttaatcgggaagcatcacgggggttctgattactggagaactccatttcttatattc

SEQ ID NO: 790107 - DNA, 75 bp, synthetic construct
  source 1..75: mol_type = other DNA
gggatggtgaacgggtattctgtaacccgccgtacagcgacactaaaacattcctcgcaaaagcgtctgaagcag

SEQ ID NO: 790108 - DNA, 75 bp, synthetic construct
  source 1..75: mol_type = other DNA
gcttctcaaacgtactctgggcgggcaaaccggcgatacgctgggagctgctatagagcttggtgaactggtctt

SEQ ID NO: 790109 - DNA, 75 bp, synthetic construct
  source 1..75: mol_type = other DNA
ggacaatggttcttcatgctggacactgatcaggaaatattagccagggcgctggtggagttggtaagacgactg

SEQ ID NO: 790110 - DNA, 75 bp, synthetic construct
  source 1..75: mol_type = other DNA
ttgatgcgttaagtcctgatggcaacgtgaataactggctaatgaatggcggtcaatggttcttcatgctggacg

SEQ ID NO: 790111 - DNA, 75 bp, synthetic construct
  source 1..75: mol_type = other DNA
cagcattatatcgacacaggtgccgtattttgcggaaacctgacattgatgaaagtgaaaggtgatggtgcagca

SEQ ID NO: 790112 - DNA, 75 bp, synthetic construct
  source 1..75: mol_type = other DNA
tgctgatttgcatcgctttggtaatttgtgcttgattagccatagcaaaaattcaaaattaagtaacttacaacc

SEQ ID NO: 790113 - DNA, 75 bp, synthetic construct
  source 1..75: mol_type = other DNA
acatgctgctcgacatcgccgcagcatgggcgcgggacgattacgagaccaggcgaaagcgccagcaacagggta

SEQ ID NO: 790114 - DNA, 75 bp, synthetic construct
  source 1..75: mol_type = other DNA
taattgatgtcacccctccagcggcaaatgctcttaccgctaatactggttctggctctaccgctggtgacgtgt

SEQ ID NO: 790115 - DNA, 75 bp, synthetic construct
  source 1..75: mol_type = other DNA
tctcatttattacgcgtctgcctgtaccgcgtcgctggtcccagggactggatttcgagcattattctcgcggta

SEQ ID NO: 790116 - DNA, 75 bp, synthetic construct
  source 1..75: mol_type = other DNA
ctggtgttaagcgagctggcattacgtggtgagccgatccttgcatctctggcagcagcgtgtgcggtcagccgc

SEQ ID NO: 790117 - DNA, 75 bp, synthetic construct
  source 1..75: mol_type = other DNA
attacttggtgctattagcggactggtcttcatggtgttgcaggcatggtgtggtgtgccgctggcggcattgtt

SEQ ID NO: 790118 - DNA, 75 bp, synthetic construct
  source 1..75: mol_type = other DNA
atcgcggtactgaaaatgtcgaatgtctggaactattgcagatgccctggttcagggcagtaatggggaaccatg

SEQ ID NO: 790119 - DNA, 75 bp, synthetic construct
  source 1..75: mol_type = other DNA
tctcttttattacacgtctgcctgttcctcgacgctggtcccaggagttggattttgaacattattctcgcggta

SEQ ID NO: 790120 - DNA, 75 bp, synthetic construct
  source 1..75: mol_type = other DNA
gcttctcaaacgtacgctgggcgggcaaaccggcgatacgctgggagctgcaatagagcttggtgaactggtctt

SEQ ID NO: 790121 - DNA, 75 bp, synthetic construct
  source 1..75: mol_type = other DNA
gccgccagtgccggtggccttgccgttggcatactgggggcactgaaagccgcaggtggactgtggtttggctgg

SEQ ID NO: 790122 - DNA, 75 bp, synthetic construct
  source 1..75: mol_type = other DNA
ggtttggcgatacgttgctgaccaacggcgttatctacccacaacacgctgcgccgcgtggctggctgcgtttgc

SEQ ID NO: 790123 - DNA, 75 bp, synthetic construct
  source 1..75: mol_type = other DNA
gtttttgccgccgaacgtccaacactgccgatccccgatctcctcacctctgatgttcgtggccgcataagatta

SEQ ID NO: 790124 - DNA, 75 bp, synthetic construct
  source 1..75: mol_type = other DNA
agaacacgcttatatggcgcactgccatctgttggagcatgaagatacggggatgatgttagggtttacggtata

SEQ ID NO: 790125 - DNA, 75 bp, synthetic construct
  source 1..75: mol_type = other DNA
ctgaaacgggatatcatcaaagccatgaacaaagcagccgcgctggatgaactgataacggggcgcactttgacg

SEQ ID NO: 790126 - DNA, 75 bp, synthetic construct
  source 1..75: mol_type = other DNA
ccaccgacctgcgccagaaagtgtacgaactgatgcaggaaggtaaaagtaagaaagagattgtcgattatatgg

SEQ ID NO: 790127 - DNA, 75 bp, synthetic construct
  source 1..75: mol_type = other DNA
attatgttgggccgcgttggcatggcgctgggtaacgccagtatcgccaccgatgcatacgctactgcgtatcgc

SEQ ID NO: 790128 - DNA, 75 bp, synthetic construct
  source 1..75: mol_type = other DNA
caaccgcctcggcggcgaactgctgcgccagttggtgagaacggaccatagcaatattcgtgtgttaagcatgta

SEQ ID NO: 790129 - DNA, 75 bp, synthetic construct
  source 1..75: mol_type = other DNA
aagcggtaacggttgatatctacaaccaactgacggaagagacaacgttgcactggcacgggctggaagtaccgg

SEQ ID NO: 790130 - DNA, 75 bp, synthetic construct
  source 1..75: mol_type = other DNA
gttgtcaggcaccgatcgggtgctgggcgtctgtttcggcgcattgcgtggtgtgctgattgtcgccgctattct

SEQ ID NO: 790131 - DNA, 75 bp, synthetic construct
  source 1..75: mol_type = other DNA
tctgcctgcaaccgctgctgggctgggtaacggataagctggggccgaaaaaacacctgctgtggctgatcgtta

SEQ ID NO: 790132 - DNA, 75 bp, synthetic construct
  source 1..75: mol_type = other DNA
caagtccgccagcagaaggtcagcgtgtgggagttgtttaaactccgccggttctggtatttcacattatatgta

SEQ ID NO: 790133 - DNA, 75 bp, synthetic construct
  source 1..75: mol_type = other DNA
gtgatgtttatcaagcagtccgccgccattgttttatcaacagtcgcaggtcatttgtacgacacgatcggcttt

SEQ ID NO: 790134 - DNA, 75 bp, synthetic construct
  source 1..75: mol_type = other DNA
cctgtgctgattgcagaaatggtgcctgcgtttaaacctatggctccggcagcaacttcgctggtagcgacggcg

SEQ ID NO: 790135 - DNA, 75 bp, synthetic construct
  source 1..75: mol_type = other DNA
atgagtgacagccagacgctggtggtaaaactcggcaccagtgtgctaacaggcggatcgcgccgtctgaaccgt

SEQ ID NO: 790136 - DNA, 75 bp, synthetic construct
  source 1..75: mol_type = other DNA
caacctgtaaaatttgcagagcaactgacaaagcgtatccgcttaaccaaaccggatacgcctgccttcagaaac

SEQ ID NO: 790137 - DNA, 75 bp, synthetic construct
  source 1..75: mol_type = other DNA
gatatcatcaaagccatgaacaaagcagccgcgctggatgaactgataacggggcgcactttgacggtgaccaga

SEQ ID NO: 790138 - DNA, 75 bp, synthetic construct
  source 1..75: mol_type = other DNA
gggttgtatggatgggaaagatatatacccaaaacgatccaatctaaaagtgttacaaaaatattaaaaataatt

SEQ ID NO: 790139 - DNA, 75 bp, synthetic construct
  source 1..75: mol_type = other DNA
ctcaagaaggacatcattaaggccatgaacaaagcagctgcgctggatgaaatgataccggggttgctgagtgaa

SEQ ID NO: 790140 - DNA, 75 bp, synthetic construct
  source 1..75: mol_type = other DNA
aagcatgtatgcgtttaatgcctttgagcagcagcgatttggcgaagccgttgccgcgtgggagatgatgttgaa

SEQ ID NO: 790141 - DNA, 75 bp, synthetic construct
  source 1..75: mol_type = other DNA
gaaagccggattggctgccctgacgttgtcaggaatgtcgcaagccatcgccaaagaagaaccgttaaaaaccag

SEQ ID NO: 790142 - DNA, 75 bp, synthetic construct
  source 1..75: mol_type = other DNA
gcgcctgaaggcgaagagcaggagtctggacacagcgcagaaggtcattgtgggtgcagcattgctggcaaaggt

SEQ ID NO: 790143 - DNA, 75 bp, synthetic construct
  source 1..75: mol_type = other DNA
gactgatgcaggttgatggtcaggttatgattgcccgttttgctttgcaacagttctgggatactcattttattg

SEQ ID NO: 790144 - DNA, 75 bp, synthetic construct
  source 1..75: mol_type = other DNA
gtgttgttctctcttgccggattgcttaatggtgtgtttgccaaaacgtttgatgacatcagcctggtgccaacc

SEQ ID NO: 790145 - DNA, 75 bp, synthetic construct
  source 1..75: mol_type = other DNA
cactcacttcgcgccgccaggtgctgaaagcaggacttgcagcgctgacgttgtcaggaatgtcgcaagccatcg

SEQ ID NO: 790146 - DNA, 75 bp, synthetic construct
  source 1..75: mol_type = other DNA
tgccggtgcttcagtctttgctctctctaaccgcggcgcaagtagtgcgatggcaaaatatttgtcggaacgcga

SEQ ID NO: 790147 - DNA, 75 bp, synthetic construct
  source 1..75: mol_type = other DNA
atgatttatggcattacccgcggactgttctttgtggccgatcacgtctgtcgctattcccggagttgggaatgg

SEQ ID NO: 790148 - DNA, 75 bp, synthetic construct
  source 1..75: mol_type = other DNA
aaggtcaaccgatatcaacgtacatctaccaacatatgttggtacagatgatggtatttccggttcgataatgct

SEQ ID NO: 790149 - DNA, 75 bp, synthetic construct
  source 1..75: mol_type = other DNA
tcccgctgtttatccacagtaatgttatcagttcacactcagaggctctgtcacaactcgggcagcgattgcagg

SEQ ID NO: 790150 - DNA, 75 bp, synthetic construct
  source 1..75: mol_type = other DNA
tgaaagcgattttacccgcgcagtcgatattcacactgataatattgttgccaccggcattacttatcaattctg

SEQ ID NO: 790151 - DNA, 75 bp, synthetic construct
  source 1..75: mol_type = other DNA
ttgtgactggtttgttagcaggaagcaccgctcatgccgcagaagtttataataaagatggtaataaactggacc

SEQ ID NO: 790152 - DNA, 75 bp, synthetic construct
  source 1..75: mol_type = other DNA
agcactgaaacgccgaagagctacgaaatggacgccgatgtgagaaaacgcatcctgaacgcgatcggtatcccg

SEQ ID NO: 790153 - DNA, 75 bp, synthetic construct
  source 1..75: mol_type = other DNA
aaatatcgcgacattcacaaatcgccttacgttatttttgtcgtaaacctgaagggtggcgtatccaaaacggtt

SEQ ID NO: 790154 - DNA, 75 bp, synthetic construct
  source 1..75: mol_type = other DNA
gaggaaggcgtagaaccgcgtttaagcgccagcattggttttatgtcgaagatgaccggcaagcgagatcacgag

SEQ ID NO: 790155 - DNA, 75 bp, synthetic construct
  source 1..75: mol_type = other DNA
tcgatttttggaggaagtggtcatcgctcattttactatggcatttatagaataactggagtgtttgacgagcca

SEQ ID NO: 790156 - DNA, 75 bp, synthetic construct
  source 1..75: mol_type = other DNA
ctatcatcagtgctaaccctgtttcgtatccaggaagtgcagaggcattgaaaaaagctcgtaccgaagcggaac

SEQ ID NO: 790157 - DNA, 75 bp, synthetic construct
  source 1..75: mol_type = other DNA
ctcgacccgaaaaatagtgatgcggcgctgggttatgctgaagcactgacgcgttcttctgatcccaacgacaac

SEQ ID NO: 790158 - DNA, 75 bp, synthetic construct
  source 1..75: mol_type = other DNA
tattcgtgtgttaagcatgtatgcgtttaacgcctttgagcagcagcgatttggcgaagccgttgccgcgtggga

SEQ ID NO: 790159 - DNA, 75 bp, synthetic construct
  source 1..75: mol_type = other DNA
ctctgccgccgtcataaaatggtatgccgaaaggggtaatgactccaacttattgatagtgttttatgttcagat

SEQ ID NO: 790160 - DNA, 75 bp, synthetic construct
  source 1..75: mol_type = other DNA
gagtgatttacttctcacccctactcccccggcgcaagttgatttccattcaactctcaaatatttgactcgttt

SEQ ID NO: 790161 - DNA, 75 bp, synthetic construct
  source 1..75: mol_type = other DNA
atgctgaaacactgcgagaagcggttatccgacccactatgattcctggcgttgatgtcatccctgcttctattg

SEQ ID NO: 790162 - DNA, 75 bp, synthetic construct
  source 1..75: mol_type = other DNA
tgaacaaagcagccgcgctggatgaactgataaagcgcaggcgctcactatcaacaaggatgaggttaactcaac

SEQ ID NO: 790163 - DNA, 75 bp, synthetic construct
  source 1..75: mol_type = other DNA
tgccatagcctggctaaagaagtgttcggtggggatatgctcgatgtcgtcctccctcgccttgacggttttgaa

SEQ ID NO: 790164 - DNA, 75 bp, synthetic construct
  source 1..75: mol_type = other DNA
cgcttaaatacgttgcccgccttcctgagttggtgaaactcatttcggatgaaggctgcgagtgccagcttgcga

SEQ ID NO: 790165 - DNA, 75 bp, synthetic construct
  source 1..75: mol_type = other DNA
gtgcgagcatagggtttatgtccaaaatgaccagtaagcgcgatcacgaaacttcccatagcctggctcgtgaag

SEQ ID NO: 790166 - DNA, 75 bp, synthetic construct
  source 1..75: mol_type = other DNA
gtatttgttttatttcccgggatgtcaagaaactcctggtaaaaataaccagacaaccatacctgagggggctcc

SEQ ID NO: 790167 - DNA, 75 bp, synthetic construct
  source 1..75: mol_type = other DNA
atggaaataaagctcatcgataatccggtgaagcttgcagaattcctcaacaacccagaaaacacgggaaatatc

SEQ ID NO: 790168 - DNA, 75 bp, synthetic construct
  source 1..75: mol_type = other DNA
gcgactgattcgctatgcaatgggtgattactctttggataatcttgccaacggcgaatggcgagaagcgacaga

SEQ ID NO: 790169 - DNA, 75 bp, synthetic construct
  source 1..75: mol_type = other DNA
aacgcccaaagttttactcatctatctggcgatctttgcgccggttgcaatgtcaacgctggaaggcgtgaagag

SEQ ID NO: 790170 - DNA, 75 bp, synthetic construct
  source 1..75: mol_type = other DNA
gcgatcgccttcggattagaactggggctacgcgcgttacagcgccgcctgacgccctggcatggagaaatacaa

SEQ ID NO: 790171 - DNA, 75 bp, synthetic construct
  source 1..75: mol_type = other DNA
ctggctcgatgcactgaaggatccgaatggcgtcaagacgttcattaacaccacgctcggggagccctatgaaga

SEQ ID NO: 790172 - DNA, 75 bp, synthetic construct
  source 1..75: mol_type = other DNA
taaagagttgaccgaggggctgattgaagatgacaaagttctcctgcaacagttgatttcgaccatctctaactg

SEQ ID NO: 790173 - DNA, 75 bp, synthetic construct
  source 1..75: mol_type = other DNA
gcgcacgttttaccgtggtaggcgatgatgaccagtcgatctactcctggcgcggtgcccgtccgcaaaacctgg

SEQ ID NO: 790174 - DNA, 75 bp, synthetic construct
  source 1..75: mol_type = other DNA
gagtcaacctttgttggggtgagtaacaacgccgtttgttacgacccggcgcagtttgccatgagcggcgtgcgc

SEQ ID NO: 790175 - DNA, 75 bp, synthetic construct
  source 1..75: mol_type = other DNA
gcgactgattcgctatgcgatggggagttacacgctggataatcttgctaatggcgaatggcgagaaaccacaga

SEQ ID NO: 790176 - DNA, 75 bp, synthetic construct
  source 1..75: mol_type = other DNA
cgcaatggcgtaaccttaaatgatggccctaccctgcccgcaggtgtggaactggttgaagaaccggagtggtta

SEQ ID NO: 790177 - DNA, 75 bp, synthetic construct
  source 1..75: mol_type = other DNA
cttccgcagttcaccgatgaagccggacgcaaaacattaaaagaattcatcccggttcagggcgtttatgcagca

SEQ ID NO: 790178 - DNA, 75 bp, synthetic construct
  source 1..75: mol_type = other DNA
cgcgccgcacgcgtctggcgctgcgctggcctttctcgcgccaaatcacgttgagcgtcggtacgctgctgttgc

SEQ ID NO: 790179 - DNA, 75 bp, synthetic construct
  source 1..75: mol_type = other DNA
gcggccaacgagtcggcgcatttcatgcgtttttatgtgccctgcccgcactgtggggaggcgcagtatctgaaa

SEQ ID NO: 790180 - DNA, 75 bp, synthetic construct
  source 1..75: mol_type = other DNA
acagggcaaaatactaccaaaagcaaaccttacctgttggatcagtgtttcagaaacatatctgcgcgcaaaaaa

SEQ ID NO: 790181 - DNA, 75 bp, synthetic construct
  source 1..75: mol_type = other DNA
ataaagagcaatctccagagttctttgcctctaaaaccttgggggaaatgatgtatctgattattacttcagaaa

SEQ ID NO: 790182 - DNA, 75 bp, synthetic construct
  source 1..75: mol_type = other DNA
gctgtacagcaaagtattatcgaagggctggtctgggagcaggcattttctttgtggtatacgcgtttctgggtg

SEQ ID NO: 790183 - DNA, 75 bp, synthetic construct
  source 1..75: mol_type = other DNA
cctgcttccattgatataaatgcagtaaataaattacggcaactttataaaggtgttgttcatgttctaaaaaac

SEQ ID NO: 790184 - DNA, 75 bp, synthetic construct
  source 1..75: mol_type = other DNA
caatactctcacgctgaaacgcttttcatcgggcgtcggtttctggtgcctgggcggcgctgccgaccaaaaact

SEQ ID NO: 790185 - DNA, 75 bp, synthetic construct
  source 1..75: mol_type = other DNA
aaaactaccgtgaaaaatccgtggacgtggtctgctatgacgagctttcctcgttcgaaccggatgttgaaaaag

SEQ ID NO: 790186 - DNA, 75 bp, synthetic construct
  source 1..75: mol_type = other DNA
tgcggcgatcaacaaaaaataccgccatgcggatggcaccgaaatgactatttcccgtgtctgctgggacaccgg

SEQ ID NO: 790187 - DNA, 75 bp, synthetic construct
  source 1..75: mol_type = other DNA
tgtcggtgctggcggggatcgcggtgattgcgattatcgcctttcttttagaactgggtctgcgcgcgttacagc

SEQ ID NO: 790188 - DNA, 75 bp, synthetic construct
  source 1..75: mol_type = other DNA
tatgcctacgcggcattacgtgtgtccgtgcaacgctggcagcttgatctggctgtactggcaaaatcccgggaa

SEQ ID NO: 790189 - DNA, 75 bp, synthetic construct
  source 1..75: mol_type = other DNA
cgattacgttgccatattgttggaaatgtatcttctttgccctacgcttcgtacacctgtcaccaacgaaaaatc

SEQ ID NO: 790190 - DNA, 75 bp, synthetic construct
  source 1..75: mol_type = other DNA
gttcaacaggcacaacgtaatctctgtctggaaagttatgaccgtatagaacaaacgttaagacattgtattgaa

SEQ ID NO: 790191 - DNA, 75 bp, synthetic construct
  source 1..75: mol_type = other DNA
ccactgttcgtcgtgacccggcgcagcacttacagctcacctccgtgatttacctcatgaccgcccagctcgacg

SEQ ID NO: 790192 - DNA, 75 bp, synthetic construct
  source 1..75: mol_type = other DNA
gctggaaaagatctggaggaaagcgatcggctttaccgctacagcgttccgggaagacccgatttaaacagaatg

SEQ ID NO: 790193 - DNA, 75 bp, synthetic construct
  source 1..75: mol_type = other DNA
cattgctcaccagacgggcttgtaggccgcgacaacagcggggccatacttcagtgccaatccggtatctggaca

SEQ ID NO: 790194 - DNA, 75 bp, synthetic construct
  source 1..75: mol_type = other DNA
gtgaaaaaattcagactcgatgacgataaaggttttattctgcttgaaattcttgctggcctgatactaattggt

SEQ ID NO: 790195 - DNA, 75 bp, synthetic construct
  source 1..75: mol_type = other DNA
aaagcatctgggcgaaagagatccatcgctttatgcgtatctgggtgcagacgctggtgccgccagtcatcacca

SEQ ID NO: 790196 - DNA, 75 bp, synthetic construct
  source 1..75: mol_type = other DNA
gacgtcacagatcgtgtgaaagcaggggaactgattggtatggtcgctcagcaggtgggcggcaagggtggtgga

SEQ ID NO: 790197 - DNA, 75 bp, synthetic construct
  source 1..75: mol_type = other DNA
gggttggctttgaatcctaccggtgggaagccctatcccgtggccatctgccactcctccacaaggctatctgtt

SEQ ID NO: 790198 - DNA, 75 bp, synthetic construct
  source 1..75: mol_type = other DNA
attgcatggcagacagaacgctctaaagaagaagattttaaatcaagcattaagccggaagattttgtgaagtga

SEQ ID NO: 790199 - DNA, 75 bp, synthetic construct
  source 1..75: mol_type = other DNA
gcatcatagtggtatgccatactgggcacaggggagtaccacagaaatgcgtcccaaaaatattgcattcaacta

SEQ ID NO: 790200 - DNA, 75 bp, synthetic construct
  source 1..75: mol_type = other DNA
aagcacaacaggaaattttggatcttgatagtccaatgcaagggaaagcgtttgctgcactggataaacttgagg

SEQ ID NO: 790201 - DNA, 75 bp, synthetic construct
  source 1..75: mol_type = other DNA
gcttgtccgttcaatacctgtaaacaataatgcctggtatggctattgcgatacgacagaacacatcattggaaa

SEQ ID NO: 790202 - DNA, 75 bp, synthetic construct
  source 1..75: mol_type = other DNA
gatattgaaatcgtcaaagtaacagcatcaaaactccgctggcctggtgctactgccacctgcccaatgggtaag

SEQ ID NO: 790203 - DNA, 75 bp, synthetic construct
  source 1..75: mol_type = other DNA
tgtatggtatatagcatggcagacagaacgctcgaaagaagaagagtttaaatcaagcataaaaccagaagattt

SEQ ID NO: 790204 - DNA, 75 bp, synthetic construct
  source 1..75: mol_type = other DNA
cgatgacatcagcctggtgccaacctttgtgttaacgccactcacgtatttgggcggggtgttttactccctgac

SEQ ID NO: 790205 - DNA, 75 bp, synthetic construct
  source 1..75: mol_type = other DNA
gccgcatgaccacactttggacaattcatcatatccagatccctacctttgctatcagaatcattgtaatgatac

SEQ ID NO: 790206 - DNA, 75 bp, synthetic construct
  source 1..75: mol_type = other DNA
aggtatggtgacattagcgtgtattccaaccgcggtgttctattttttaccgttggcgatcggcaaatttaatga

SEQ ID NO: 790207 - DNA, 75 bp, synthetic construct
  source 1..75: mol_type = other DNA
aggcattcgtcactctggcagaatccacttcatttaacaatgccgctaaattgcttaatattacgcaacctgcat

SEQ ID NO: 790208 - DNA, 75 bp, synthetic construct
  source 1..75: mol_type = other DNA
gcagttacagctcacctccgtgatttaccttatgaccgcccagctcgacggcatggtcgaacgctgcaatcagca

SEQ ID NO: 790209 - DNA, 75 bp, synthetic construct
  source 1..75: mol_type = other DNA
cgaccgttcgtcgtgatccggtgcagcagttacagctcacctccgtgatttatctcatgaccgcccagctcgacg

SEQ ID NO: 790210 - DNA, 75 bp, synthetic construct
  source 1..75: mol_type = other DNA
atgtgtcagagtcgtaatggtccattccgcattatctatcggctgtttaaaaccgctgaccttcacaggcatttc

SEQ ID NO: 790211 - DNA, 75 bp, synthetic construct
  source 1..75: mol_type = other DNA
ggctgccgcatccgtccatgtaatggagcttgacgaagcaatttatcaacaaaatacacagcctatgttatccca

SEQ ID NO: 790212 - DNA, 75 bp, synthetic construct
  source 1..75: mol_type = other DNA
cccggcagacgctctaccggcacgtgtcgcccaagggcgaactgcggccagacggcgtaaagctgctctccctcg

SEQ ID NO: 790213 - DNA, 75 bp, synthetic construct
  source 1..75: mol_type = other DNA
ctggtcactacctttggtgtactggttgtctttattattgcgttttatctgatctgctggtcgctgattcagcgc

SEQ ID NO: 790214 - DNA, 75 bp, synthetic construct
  source 1..75: mol_type = other DNA
atcaccaatcccggctcacgtccctggctgatgcaggcctggcttgaggatgaaaacggcgtcagagaggggagt

SEQ ID NO: 790215 - DNA, 75 bp, synthetic construct
  source 1..75: mol_type = other DNA
gcaaccgattagtgagtccgaattactacaaggaacacttgaatcaacgaatgaaccgtatgctatagcaaaaat

SEQ ID NO: 790216 - DNA, 75 bp, synthetic construct
  source 1..75: mol_type = other DNA
ttttttgcccaggaaagcattgatgaagtttatctggccgccgctaaagtgggtggtattatggccaataataat

SEQ ID NO: 790217 - DNA, 75 bp, synthetic construct
  source 1..75: mol_type = other DNA
tatggctctgacagtcaggtgcttaaagattccgtacagtggtttaacatcgtcggtaacggctatgttcagtta

SEQ ID NO: 790218 - DNA, 75 bp, synthetic construct
  source 1..75: mol_type = other DNA
gtaactaacctgtttggtctgactgctgaaggtctggttcagggtggcgctgagactgctcgcctgaacgctatt

SEQ ID NO: 790219 - DNA, 75 bp, synthetic construct
  source 1..75: mol_type = other DNA
ccatttatggttctgacagccaggtacttaaagattctgtacagtggtttaacatcgttggtaacggctatgttc

SEQ ID NO: 790220 - DNA, 75 bp, synthetic construct
  source 1..75: mol_type = other DNA
ctggcactctactggcgggcgcaaccgcacagtgcgctacgcagccaggtgcgcgggcgattattcccggtctgt

SEQ ID NO: 790221 - DNA, 75 bp, synthetic construct
  source 1..75: mol_type = other DNA
ataaagaggcgcgctgggcgctggggctgacccttttgtatctggcggtatggttagtatccgcttacttacctg

SEQ ID NO: 790222 - DNA, 75 bp, synthetic construct
  source 1..75: mol_type = other DNA
gctaaacgttagtggctcgatgacagctggcacgctgaccagccagtggctgaagcaaaccgataaagccattct

SEQ ID NO: 790223 - DNA, 75 bp, synthetic construct
  source 1..75: mol_type = other DNA
tgcactgcttaaccatgcgcgtgagattggctttacctccaccaacatcgacctgatttacggcctgccgaaaca

SEQ ID NO: 790224 - DNA, 75 bp, synthetic construct
  source 1..75: mol_type = other DNA
ctgatgaagctgctgcgcgaaaacttccagttcaatgccgatgcggagatttcgatcgaagtcgatccgcgggaa

SEQ ID NO: 790225 - DNA, 75 bp, synthetic construct
  source 1..75: mol_type = other DNA
cacgcctggagtttttccattcacaatccgaaagcgagtattgacggtggcgaacagcctcatgcgcatatcatg

SEQ ID NO: 790226 - DNA, 75 bp, synthetic construct
  source 1..75: mol_type = other DNA
tcccagagttcgtttgtattctggtcagtaacgttaagtgaggattctgttttttgtgataacggtcaggttctg

SEQ ID NO: 790227 - DNA, 75 bp, synthetic construct
  source 1..75: mol_type = other DNA
cgtttttattgaaatattcctctgctgacgtagacaattatcgttctacggtagatctccgcatcggtgattctg

SEQ ID NO: 790228 - DNA, 75 bp, synthetic construct
  source 1..75: mol_type = other DNA
gtctgagcgtctttaactacgcgcatctgccaactatttttgccgcccagcgcaaaatcaaagatgctgacttgc

SEQ ID NO: 790229 - DNA, 75 bp, synthetic construct
  source 1..75: mol_type = other DNA
gcgaagccccggtacaggatgccgcagaaatcgccgctcagaataaacgccagttaaaagccaaacagacctccg

SEQ ID NO: 790230 - DNA, 75 bp, synthetic construct
  source 1..75: mol_type = other DNA
gcaacgtagtagatttcctcagaaagcatcaacaaaaaaccaagagaatcccatcctctgttactgactacaatt

SEQ ID NO: 790231 - DNA, 75 bp, synthetic construct
  source 1..75: mol_type = other DNA
ggcaccaactatgaagagtggctgcgtcagaatgttcagggtgtcgatgtgcgtacctatgatgatgacccgacc

SEQ ID NO: 790232 - DNA, 75 bp, synthetic construct
  source 1..75: mol_type = other DNA
ggttgttatggagtttctcaacctaaaaactcctgttttagcgacaagtagaggtggtataccagatttcataca

SEQ ID NO: 790233 - DNA, 75 bp, synthetic construct
  source 1..75: mol_type = other DNA
tctaagtcgcatcctttctacactggcaaactgagaactgttgcttcagaaggtaacgtggcgcgctttaaccag

SEQ ID NO: 790234 - DNA, 75 bp, synthetic construct
  source 1..75: mol_type = other DNA
tccaaatcgcatccgttctataccggtaaactcagaacggtggcatcagaaggcaatgttgcccgctttactcag

SEQ ID NO: 790235 - DNA, 75 bp, synthetic construct
  source 1..75: mol_type = other DNA
ggagctgattgccgcgacgcgcggtttaggatttatggttcagtcagcgggtgaatttctcgcgactgacgtggt

SEQ ID NO: 790236 - DNA, 75 bp, synthetic construct
  source 1..75: mol_type = other DNA
atggaatttgaagaacgctatttcagggaagaactcgattacctgcgccagttgagcaaactgctggcaacagaa

SEQ ID NO: 790237 - DNA, 75 bp, synthetic construct
  source 1..75: mol_type = other DNA
tctctgctcagtaatgaagtggtttcggtatcgctgactgaaccgccccgggaatcctggagactaaacttcctg

SEQ ID NO: 790238 - DNA, 75 bp, synthetic construct
  source 1..75: mol_type = other DNA
tccggcaatggcggtttacgctggcggtattctggtggcatgggttagtgggtttattttcaccacactctttgg

SEQ ID NO: 790239 - DNA, 75 bp, synthetic construct
  source 1..75: mol_type = other DNA
aaaaccaacgatacgctggcagtaaccggtgaagcattctcccgtcaggagtctggcgtggcgctgcgtaaagga

SEQ ID NO: 790240 - DNA, 75 bp, synthetic construct
  source 1..75: mol_type = other DNA
aaattaatgagcgactcgaaggcgtgttaagccgctggctgctgctgaagaataacgtcatgccagaggcggcaa

SEQ ID NO: 790241 - DNA, 75 bp, synthetic construct
  source 1..75: mol_type = other DNA
tgaacgcctgctggaaggcgtggcttttcttaccggcaatctccgccagaaaattgaggatgaattcccagaact

SEQ ID NO: 790242 - DNA, 75 bp, synthetic construct
  source 1..75: mol_type = other DNA
cgcagatcgcgttgctgcccaaatgtattggcaaggcgaagtaatacctggcgagatcgcattccgcgcagtgtg

SEQ ID NO: 790243 - DNA, 75 bp, synthetic construct
  source 1..75: mol_type = other DNA
cgacggaatcacagtggagaagcctggtgctgaaagccggcggaaaatactggcatgtgtacatgtcgaagaaga

SEQ ID NO: 790244 - DNA, 75 bp, synthetic construct
  source 1..75: mol_type = other DNA
gctgaaacagcacatcccggagaagttttttaagatggtgaggtacttcggattccttgccaaccggatgtgtgg

SEQ ID NO: 790245 - DNA, 75 bp, synthetic construct
  source 1..75: mol_type = other DNA
ttagtctccaggattcccggggcggttcagttttttaagatggtgaggtacttcgggttccttgccaaccgggtg

SEQ ID NO: 790246 - DNA, 75 bp, synthetic construct
  source 1..75: mol_type = other DNA
ccattaaaacggctgatgatctgaaaggcaaaaaagtgggtgtcggtctgggcaccaactatgaagagtggctgc

SEQ ID NO: 790247 - DNA, 75 bp, synthetic construct
  source 1..75: mol_type = other DNA
gtgtttaaatttcttgtattaacattaggcattatctcttgccaggtttacgcagaagatacgcttatagtaaac

SEQ ID NO: 790248 - DNA, 75 bp, synthetic construct
  source 1..75: mol_type = other DNA
aaaaggcttgccagaacgttttctcgcttatgaagcgttgctggaaaaatatcctcaacatcacggtaaaattcg

SEQ ID NO: 790249 - DNA, 75 bp, synthetic construct
  source 1..75: mol_type = other DNA
ggtttctttttgcatattcctttcccgacaccggaaatcttcaacgcgctgccgacatatgacaccttgcttgaa

SEQ ID NO: 790250 - DNA, 75 bp, synthetic construct
  source 1..75: mol_type = other DNA
tcagcgtgggaaggctatttacgcgtgaatgcattgctggcagacaaattactgccgctgctggaagatgatgac

SEQ ID NO: 790251 - DNA, 75 bp, synthetic construct
  source 1..75: mol_type = other DNA
gcgggaggaatacggcgcgctaccagggtcgttatctgaagaagccgccgatagcagcctcccggctgggacatt

SEQ ID NO: 790252 - DNA, 75 bp, synthetic construct
  source 1..75: mol_type = other DNA
aattacatcaaccgtatcattgatcacttagctggtaccggctccccagtgtctcaaacgtacttgagcttatgg

SEQ ID NO: 790253 - DNA, 75 bp, synthetic construct
  source 1..75: mol_type = other DNA
gattatccctaaaggaaagacttataacattttgtcggagcgtgtaattgaggtgggagcctcttgggagggtta

SEQ ID NO: 790254 - DNA, 75 bp, synthetic construct
  source 1..75: mol_type = other DNA
cctgcaccgcgtctggtcgaaaaccagcgataaaccggtgtggatggatcaggccgaaaaggcaactggtgattt

SEQ ID NO: 790255 - DNA, 75 bp, synthetic construct
  source 1..75: mol_type = other DNA
aggaaaccttgtggccggatctcgactatctggtgcttgatatgccgccaggcaccggtgacattcaattgacac

SEQ ID NO: 790256 - DNA, 75 bp, synthetic construct
  source 1..75: mol_type = other DNA
tgctggggcagatgccgttacacatttccttacgtgaggatctcgataaaggcacgccaacggttatcagccgtc

SEQ ID NO: 790257 - DNA, 75 bp, synthetic construct
  source 1..75: mol_type = other DNA
cggaaggggcgaaagtcggcattctggacgccgatatctacggcccatcaattcccaccatgctgggcgcagaaa

SEQ ID NO: 790258 - DNA, 75 bp, synthetic construct
  source 1..75: mol_type = other DNA
actggaaactgtcgcacaatatcgccaccttaaaacgcgtgaagaatcagccgggtattaatggcgtgaagaaca

SEQ ID NO: 790259 - DNA, 75 bp, synthetic construct
  source 1..75: mol_type = other DNA
aatttacggctatttatcgtgacctcgcagatcgcgttgctgcccaaatgtattggcaaggtgaagtaatacctg

SEQ ID NO: 790260 - DNA, 75 bp, synthetic construct
  source 1..75: mol_type = other DNA
cgaggttccggtgctcggtattgtcgagaacatgagcgtgcatatttgcagtaactgtggtcaccatgaaccgat

SEQ ID NO: 790261 - DNA, 75 bp, synthetic construct
  source 1..75: mol_type = other DNA
gaacaacacgacgcgattcatagccggaaagcattactttaaaattgaaaaaaacgaattacgcgagttcaagaa

SEQ ID NO: 790262 - DNA, 75 bp, synthetic construct
  source 1..75: mol_type = other DNA
gaacaacgaccgctggaaggaagcgaccgcgaaataacaatctatcgcatgacaaaagacggatttaccttgctc

SEQ ID NO: 790263 - DNA, 75 bp, synthetic construct
  source 1..75: mol_type = other DNA
ggccgactgtccggaaaacctcgtcccggcctgtgcgccgtgcaacctgctgaaaacaacatattcgctggagat

SEQ ID NO: 790264 - DNA, 75 bp, synthetic construct
  source 1..75: mol_type = other DNA
ggagagtatcgacggtccaggcgtgaaagatatcaagctggcctacattgaagcctttaacgctatcagcagcgt

SEQ ID NO: 790265 - DNA, 75 bp, synthetic construct
  source 1..75: mol_type = other DNA
tcagcgtactggatgcaaacctgccagccaggacactacaggatctgataaaaacatgtgctgataagctggcac

SEQ ID NO: 790266 - DNA, 75 bp, synthetic construct
  source 1..75: mol_type = other DNA
tgaagcctttaacgctatcagcagcgtgttaaaggcagaatacgagcgaatgctatacaaccgactgtatcagga

SEQ ID NO: 790267 - DNA, 75 bp, synthetic construct
  source 1..75: mol_type = other DNA
atccgcgcctttgccgaaagccagagccgcctgccagaagcgatggacggcgaaggtggctggctgctgccgggg

SEQ ID NO: 790268 - DNA, 75 bp, synthetic construct
  source 1..75: mol_type = other DNA
atgagcagccacgacgcgctgatggtggcgagcggcatcaccaccgtactggatgccgtggcaattggcgacgtg

SEQ ID NO: 790269 - DNA, 75 bp, synthetic construct
  source 1..75: mol_type = other DNA
atgcggcgttccgcgtcgccgatgaccagagcaaccgctttacgctgccgcaggcggtgaagctggtgaccaaaa

SEQ ID NO: 790270 - DNA, 75 bp, synthetic construct
  source 1..75: mol_type = other DNA
tggataaattcttcaccccgcgcccgaaagtggactggcccgcccactcggcaatgagtagccacgacgcgctga

SEQ ID NO: 790271 - DNA, 75 bp, synthetic construct
  source 1..75: mol_type = other DNA
ctcgccagccacgatgacgccacgcacgcccacgttgctgaatctcaccagcttggcagcgtgatcgccgaattt

SEQ ID NO: 790272 - DNA, 75 bp, synthetic construct
  source 1..75: mol_type = other DNA
actgatgggcgcgccgaatatcgtgcgcggcggttcgcactccggcaacgtggcggccagtgaactggcacagct

SEQ ID NO: 790273 - DNA, 75 bp, synthetic construct
  source 1..75: mol_type = other DNA
aacgctttcccagcagacagccaaaaacctctttttatgggatggacgtagctggatacgtaaagggctggaagc

SEQ ID NO: 790274 - DNA, 75 bp, synthetic construct
  source 1..75: mol_type = other DNA
tgcttttattaccgggctttttcaccgatttcctcggtttgcttcttttattaccgccggtgcaaaagcatctga

SEQ ID NO: 790275 - DNA, 75 bp, synthetic construct
  source 1..75: mol_type = other DNA
tttggcgccagtgctggcggcggcaatacctttgatggtgagtatcagaggaaggatgatgacctcgaccgcctt

SEQ ID NO: 790276 - DNA, 75 bp, synthetic construct
  source 1..75: mol_type = other DNA
atccgcgcctttgccgaaagccagagccgcctgccagaagcgatggacggcgaaggtggctggctactacccggc

SEQ ID NO: 790277 - DNA, 75 bp, synthetic construct
  source 1..75: mol_type = other DNA
ttagtttcgttcgccgttttcttctacggttaatggttgtcctcgccgttttctggggcgggggcatcgcgttgt

SEQ ID NO: 790278 - DNA, 75 bp, synthetic construct
  source 1..75: mol_type = other DNA
cttccgaacccactacgctttaaagcttccgcaccctcaggctacgtgcgtagccgtcaggcgtggattttacgg

SEQ ID NO: 790279 - DNA, 75 bp, synthetic construct
  source 1..75: mol_type = other DNA
atggctaacgaattaacctggcatgacgtgctggctgaagagaagcaacaaccttattttcttaatacccttcag

SEQ ID NO: 790280 - DNA, 75 bp, synthetic construct
  source 1..75: mol_type = other DNA
ctgcagttgcagtatctgtcctgatggcaatgtctgctcaggcagcagaaatctacaacaaagacggtaacaaac

SEQ ID NO: 790281 - DNA, 75 bp, synthetic construct
  source 1..75: mol_type = other DNA
cgatgctgaacgagcgggtcatgcagttgagtcagcaggtgcagcacttgagcgagcggacagaacgcttgagcc

SEQ ID NO: 790282 - DNA, 75 bp, synthetic construct
  source 1..75: mol_type = other DNA
ggaagacaccatgcgttttgcttcaacgctggagaatatgggcgtcagttttatcaacgctatcatgacgttgat

SEQ ID NO: 790283 - DNA, 75 bp, synthetic construct
  source 1..75: mol_type = other DNA
tgccctggcggataggctttgtacggggagggaaccattctattgccagcggcattctggccggtgagggcgagg

SEQ ID NO: 790284 - DNA, 75 bp, synthetic construct
  source 1..75: mol_type = other DNA
tattataatgaaattggtattggccttgaaatacctgatggttttggtggtacaaagcaggatcaaattattatt

SEQ ID NO: 790285 - DNA, 75 bp, synthetic construct
  source 1..75: mol_type = other DNA
aacctgaaaggctttgccagccaggatctgcttgaatatgttgatcttggcgcgacttattactttaacaaaaac

SEQ ID NO: 790286 - DNA, 75 bp, synthetic construct
  source 1..75: mol_type = other DNA
gtgacagagctggaaatacatttgctgaacgccttagagcagctgcaacaggactatatgcagcggctgagcgaa

SEQ ID NO: 790287 - DNA, 75 bp, synthetic construct
  source 1..75: mol_type = other DNA
tgtcggcgctggcgggggtgaaaagcgcgcagcaggttcgcattcgtgctgcccagtcgctgggggccagccgtg

SEQ ID NO: 790288 - DNA, 75 bp, synthetic construct
  source 1..75: mol_type = other DNA
ttcctggtgtcactttccggtattgcgcttttcttcccaacattgcaatggcttactgaaaccttcggtacaccg

SEQ ID NO: 790289 - DNA, 75 bp, synthetic construct
  source 1..75: mol_type = other DNA
gtacctgattaactcatggaccacactggttgagttgatgtctatctacaaacgtctgcgcagctttgaacatga

SEQ ID NO: 790290 - DNA, 75 bp, synthetic construct
  source 1..75: mol_type = other DNA
ggcctgatgacgcagattaccaacgtttttggtcaggttcgcggtgctttccagtacctgattaactcatggacc

SEQ ID NO: 790291 - DNA, 75 bp, synthetic construct
  source 1..75: mol_type = other DNA
aaaactactcatggaagaggctgattttcaaaagcagctaccgaaagatgccccaccatccgagcgactggaaga

SEQ ID NO: 790292 - DNA, 75 bp, synthetic construct
  source 1..75: mol_type = other DNA
tcaacgtaagtttgtgatgagccgctttgaagaggtatttgagaagatcgaagcgcagcgagataatctggcaac

SEQ ID NO: 790293 - DNA, 75 bp, synthetic construct
  source 1..75: mol_type = other DNA
tgatggtaatgcgtcgggtgcggaaagagcgctcaaccgtgccggaacgctggccgttaatggtgtcaggcgtta

SEQ ID NO: 790294 - DNA, 75 bp, synthetic construct
  source 1..75: mol_type = other DNA
gggctcgtcgggggcgcaagggagcaacactggaacttgcccggcgtgctggctggcgaatctccgggaaccgaa

SEQ ID NO: 790295 - DNA, 75 bp, synthetic construct
  source 1..75: mol_type = other DNA
gctggcgagtcccccggaaccgatctggtgaaaccgctaatcgacaccgggcaatatcgcagagcgattacccat

SEQ ID NO: 790296 - DNA, 75 bp, synthetic construct
  source 1..75: mol_type = other DNA
cagtgctgatgagtactttaaaattggctccactatcaaaacagaccgtgaaattgaactggatggcgtgagtta

SEQ ID NO: 790297 - DNA, 75 bp, synthetic construct
  source 1..75: mol_type = other DNA
aggcagttacaacgatacgaggtaattacagcgagtgtagatccttccgcatcagtttactctatccagttaagg

SEQ ID NO: 790298 - DNA, 75 bp, synthetic construct
  source 1..75: mol_type = other DNA
gtagaagaacagacagtgccgcagctcaaagcagcggcgcaggctgcgcttgatggtaatgcggcgggtgcggaa

SEQ ID NO: 790299 - DNA, 75 bp, synthetic construct
  source 1..75: mol_type = other DNA
caatgagaatgtaaggccgttgattgataccggacagtaccgcagagccattacccatattgtgagggataaaga

SEQ ID NO: 790300 - DNA, 75 bp, synthetic construct
  source 1..75: mol_type = other DNA
cgagggtggataacgctcaggccattctggatgcgctcaaatccatcagtaaaaaagaagtgctggtgggtatcc

SEQ ID NO: 790301 - DNA, 75 bp, synthetic construct
  source 1..75: mol_type = other DNA
cactggtggaacccgttatacgtcggacattggggattattcgccgcaaagatgccgtgctttctccggcagcag

SEQ ID NO: 790302 - DNA, 75 bp, synthetic construct
  source 1..75: mol_type = other DNA
gcacctgatccccggcgttaaatcggtagaagaacagacagtgccgcagctcaaagcagcggcgcaggctgcgct

SEQ ID NO: 790303 - DNA, 75 bp, synthetic construct
  source 1..75: mol_type = other DNA
gcgcacgccgtgggcgcaaaggggcaaaagaggaacttgcgcggcgcgctgctggtgagtctcctggaaccgatc

SEQ ID NO: 790304 - DNA, 75 bp, synthetic construct
  source 1..75: mol_type = other DNA
cttgctgatagcaccgttgaagcacgcgcacgccgtgggcgcaaaggggcaaaagaggaacttgcgcggcgcgct

SEQ ID NO: 790305 - DNA, 75 bp, synthetic construct
  source 1..75: mol_type = other DNA
atcctgacgctatcctgaacggggagatacgtgaccatgcctccgccatcacggcgataaaagccgccatgaccg

SEQ ID NO: 790306 - DNA, 75 bp, synthetic construct
  source 1..75: mol_type = other DNA
gaacgtggtaaagtcatcacggctgcggggctcgttgttgccgcgcgggttatggtcaccaagcgcggcaatcgt

SEQ ID NO: 790307 - DNA, 75 bp, synthetic construct
  source 1..75: mol_type = other DNA
ccgacagaacgtggtaaagtcatcacggctgcggggctcgttgttgccgcgcgggttatggtcaccaagcgcggc

SEQ ID NO: 790308 - DNA, 75 bp, synthetic construct
  source 1..75: mol_type = other DNA
gggcggcctctatgctgtgctccgtctgatcaaggatgacagtcagcaaatcccgaccttcagtatgctgggcta

SEQ ID NO: 790309 - DNA, 75 bp, synthetic construct
  source 1..75: mol_type = other DNA
tttgccatcggtattgataacaccttgccagaagagttcagccgactttacccaggcctggttcgtacaactcgc

SEQ ID NO: 790310 - DNA, 75 bp, synthetic construct
  source 1..75: mol_type = other DNA
atcagcgaaacaggacaagaaatcctccgctatcatcaactcacactcactactggttatgacggcggctaccgg

SEQ ID NO: 790311 - DNA, 75 bp, synthetic construct
  source 1..75: mol_type = other DNA
ctgtactttcagctccccagcgccgctgccagatattgctgacgctatttcagccggggttgcgtgccaccacgg

SEQ ID NO: 790312 - DNA, 75 bp, synthetic construct
  source 1..75: mol_type = other DNA
ggatgcgcgtctttcagaacagtacctgaaactggccggtctgtttggtgcacgctattcccactacccctgcgt

SEQ ID NO: 790313 - DNA, 75 bp, synthetic construct
  source 1..75: mol_type = other DNA
tgtggaagcccgggttcatggcgaactggaagtgctcgatatcctccggaaagaagaaggtctggaattactggg

SEQ ID NO: 790314 - DNA, 75 bp, synthetic construct
  source 1..75: mol_type = other DNA
gtcgggatcgccatggggctaagcccgacggtgcgcggcattctggatccgataatcgagctttatcgtccggtg

SEQ ID NO: 790315 - DNA, 75 bp, synthetic construct
  source 1..75: mol_type = other DNA
ggctgggtggactccatcaaatcagcgttgcgtcttgatcctgacgggatcctgaacggtgaaatccgcgaccac

SEQ ID NO: 790316 - DNA, 75 bp, synthetic construct
  source 1..75: mol_type = other DNA
ggacttcacctatgtggaagcccgggttcacggcgaactggaagtgctcgatatcctccggaaagaagaaggcct

SEQ ID NO: 790317 - DNA, 75 bp, synthetic construct
  source 1..75: mol_type = other DNA
tctcaggccccaccggctcaggaaaatccaccacgctgagaaccgcctctgcggcgtaccttgaacagtacggct

SEQ ID NO: 790318 - DNA, 75 bp, synthetic construct
  source 1..75: mol_type = other DNA
gatcttcaacaaacgtattaccgccaggtaaagaacccgaatccggtgtttacaccccgtgaaggtgcaggaacg

SEQ ID NO: 790319 - DNA, 75 bp, synthetic construct
  source 1..75: mol_type = other DNA
gactttcagaatgaaataatcaaaaggtcaagggcgttatcagccaaaatgcaaatggacttaaacaatgccgtc

SEQ ID NO: 790320 - DNA, 75 bp, synthetic construct
  source 1..75: mol_type = other DNA
acttcgaaagcaagactaacgaagcagggtaacattagtggactaaagaaaaatttggcctctggtcgttacaag

SEQ ID NO: 790321 - DNA, 75 bp, synthetic construct
  source 1..75: mol_type = other DNA
cttctacgcagaagcagaaaagggagtagcagttatcgttagcggcatcaaaggacactttaaactaaagagggg

SEQ ID NO: 790322 - DNA, 75 bp, synthetic construct
  source 1..75: mol_type = other DNA
acttagtgagcgtggtctggtattcagaattaatcatgaaattatgcatcagctcggccttgctgttatgtatga

SEQ ID NO: 790323 - DNA, 75 bp, synthetic construct
  source 1..75: mol_type = other DNA
attccccacatgaaataaaagtgaaattagaaggccattcaacatcatggactgaattatggcgccaaaattcta

SEQ ID NO: 790324 - DNA, 75 bp, synthetic construct
  source 1..75: mol_type = other DNA
gtagtataaggaactatatacaaacgcagggagttagattaaataatcaattccagaatgaaataattaaacgtt

SEQ ID NO: 790325 - DNA, 75 bp, synthetic construct
  source 1..75: mol_type = other DNA
gtggcgcataagtatgtccggcgctggataaatctcaccggtacgccagcaccgaacggcctggtagatttgtgg

SEQ ID NO: 790326 - DNA, 75 bp, synthetic construct
  source 1..75: mol_type = other DNA
ttgaatacacttttcaccccccgcccttatcaagatctcatcatcaatcatcaaatcgaaaccctgcgcggcaac

SEQ ID NO: 790327 - DNA, 75 bp, synthetic construct
  source 1..75: mol_type = other DNA
gctgccgacactatggacgaaatggtgatggagcggcgcaactcaaaacgaacagtgcaggacatcctgctcgat

SEQ ID NO: 790328 - DNA, 75 bp, synthetic construct
  source 1..75: mol_type = other DNA
aaactagtaatttcgtaataaccaaggatgactacgcatacaaatttagtttatgggatgtatttaccgaaggga

SEQ ID NO: 790329 - DNA, 75 bp, synthetic construct
  source 1..75: mol_type = other DNA
acacacttacactagttcctataatgaaagttataacatctcatactgtaacgaaaatgtcatgagcatccttca

SEQ ID NO: 790330 - DNA, 75 bp, synthetic construct
  source 1..75: mol_type = other DNA
agagcaagtaggcatagagttagcatttgaaggtgagggagtaaatgaaaaaggtgttgttgtttcggtcaatgg

SEQ ID NO: 790331 - DNA, 75 bp, synthetic construct
  source 1..75: mol_type = other DNA
atggttgctgtggatgggatgtggaactattcagatgaacagatggagcgtgcacagcaaaacgggtggcctgga

SEQ ID NO: 790332 - DNA, 75 bp, synthetic construct
  source 1..75: mol_type = other DNA
ggctctaacgacatgacgcagttgacgctcggtctggatcgtgactctggcgtggtgtctgaactgttcgatgag

SEQ ID NO: 790333 - DNA, 75 bp, synthetic construct
  source 1..75: mol_type = other DNA
attgttcgtctctctgactttaaatctaatgaatacgccaacctcgtcggcggcgagcgttacgaaccggatgaa

SEQ ID NO: 790334 - DNA, 75 bp, synthetic construct
  source 1..75: mol_type = other DNA
cgaacgaatatgccaacctggtcggtggtgagcgttacgagccagatgaagagaacccgatgctcggcttccgtg

SEQ ID NO: 790335 - DNA, 75 bp, synthetic construct
  source 1..75: mol_type = other DNA
tgataatgagtacactgcaacctttgccggactcggaacccgtgattacagcacgcattcatggtatgccggtgc

SEQ ID NO: 790336 - DNA, 75 bp, synthetic construct
  source 1..75: mol_type = other DNA
catgccccgtcagcatctgccactatgaacaacacctggtggcaactaaccggagattctgcgctgaaaacactg

SEQ ID NO: 790337 - DNA, 75 bp, synthetic construct
  source 1..75: mol_type = other DNA
aggactttgctgcatggttgatggaggaagggatcgatagcttgtccctgaacccggataccgtggtgcaaacat

SEQ ID NO: 790338 - DNA, 75 bp, synthetic construct
  source 1..75: mol_type = other DNA
atgtgcttggcggaaaaggaaaacctggtgatttattttatgacagagggacaggcagataccttattctgaaaa

SEQ ID NO: 790339 - DNA, 75 bp, synthetic construct
  source 1..75: mol_type = other DNA
atagtagccttactggtgggcttatagctgtatcagagttaagtaaaaaagttaaaggaaaaacaggcagaaaat

SEQ ID NO: 790340 - DNA, 75 bp, synthetic construct
  source 1..75: mol_type = other DNA
ttggcagtgtgctgatggggtcactgaaaaacaccagcgaatggcaatttgcaggaacagacctgaatcaggccg

SEQ ID NO: 790341 - DNA, 75 bp, synthetic construct
  source 1..75: mol_type = other DNA
cgggtagctctgtacgacaaaatacttaaagccgaacaggctcttgaccggaatattgcccgtatagaatcaatt

SEQ ID NO: 790342 - DNA, 75 bp, synthetic construct
  source 1..75: mol_type = other DNA
tggtgttcacccgtgcccgcgcactttcagtaacaggaacactgaaaaaaatgttcgccgacctgaaagaggcgg

SEQ ID NO: 790343 - DNA, 75 bp, synthetic construct
  source 1..75: mol_type = other DNA
tccgatatggtgctgttcgatgaactggtgttcacccgtgcccgcgcactttcagtaacaggaacactgaaaaaa

SEQ ID NO: 790344 - DNA, 75 bp, synthetic construct
  source 1..75: mol_type = other DNA
cctaccaagatctcattatcaaccacgaaatcgacatcatgcgctgcaacatctgggcaggtatgggaatgggta

SEQ ID NO: 790345 - DNA, 75 bp, synthetic construct
  source 1..75: mol_type = other DNA
tcaacgatcccgcaggagaaagccagaaacttcgccgcatcgctgacagcactgttatggaaggtgcgaataagc

SEQ ID NO: 790346 - DNA, 75 bp, synthetic construct
  source 1..75: mol_type = other DNA
cccggtattgatggcgtgaataaaactgtgctgcaggccagactgactgctgaactgcaaagactcagggttgaa

SEQ ID NO: 790347 - DNA, 75 bp, synthetic construct
  source 1..75: mol_type = other DNA
ggatctgtccagctacttcgatacagtacatcatcgactgctgatgaaagcagtacgccgcaggatcagggatcc

SEQ ID NO: 790348 - DNA, 75 bp, synthetic construct
  source 1..75: mol_type = other DNA
cgcgccgcaaatgcagagcgttttacgcgaactgcgttttaatcagcttatcctcgagacggctggcgtaccgca

SEQ ID NO: 790349 - DNA, 75 bp, synthetic construct
  source 1..75: mol_type = other DNA
acatcaagagatactcttgaaaaagttattgagattaaccgttacaaactgcctttatcagaatcagaggcattt

SEQ ID NO: 790350 - DNA, 75 bp, synthetic construct
  source 1..75: mol_type = other DNA
cgcagatcatcgccgcgcagaactggtaatgaacaaactctatgacaaggttccttctggtgtctggaagtacgt

SEQ ID NO: 790351 - DNA, 75 bp, synthetic construct
  source 1..75: mol_type = other DNA
gatactggccgtaactctgcagacaatatcggtggcgtgtattacaaacaggctcagatttatattaaggtgatg

SEQ ID NO: 790352 - DNA, 75 bp, synthetic construct
  source 1..75: mol_type = other DNA
ggatgagttacgggcagagattgcatttgctcagaagggcgaaaaaccatggccttatcgttcctgcctgatgcg

SEQ ID NO: 790353 - DNA, 75 bp, synthetic construct
  source 1..75: mol_type = other DNA
ctttcggatgtcgaagacagtgatgaggctgttgaaaacctcggattaaaacccacggtggacaaggcaaaaaat

SEQ ID NO: 790354 - DNA, 75 bp, synthetic construct
  source 1..75: mol_type = other DNA
atggtattgtccgcgtggaagagcacgagttacccgaaattcatcatcaggatgatgtgcgaattaaaattgcca

SEQ ID NO: 790355 - DNA, 75 bp, synthetic construct
  source 1..75: mol_type = other DNA
tgggtgccctggctgaaatggaacgagaactgattgttgaacgaacaaaagctggcctggaagctgctcgcgcac

SEQ ID NO: 790356 - DNA, 75 bp, synthetic construct
  source 1..75: mol_type = other DNA
gcgtccgtggcgctgtgagcattgggtgcaaagtgctgagacggtgtcctgcgggaaacacggaaaatatacacg

SEQ ID NO: 790357 - DNA, 75 bp, synthetic construct
  source 1..75: mol_type = other DNA
gtcgaggcattgggtgtggaatcgctcctgtcccagtcagcagtaaggcagtttcaggggcactgttgcaaatag

SEQ ID NO: 790358 - DNA, 75 bp, synthetic construct
  source 1..75: mol_type = other DNA
ttcgttgaatatagttagattggtacaagaaatacaacctgatgaaatttataacttaggggcacaatcgcacgt

SEQ ID NO: 790359 - DNA, 75 bp, synthetic construct
  source 1..75: mol_type = other DNA
tgaaactttgctcggttatcctgaaaaagccaaaataaaactagggtgggaacctgaaataacgatcgaagaaat

SEQ ID NO: 790360 - DNA, 75 bp, synthetic construct
  source 1..75: mol_type = other DNA
tttattggttgtggtttgaaagaagtaggagttgtgaaagcaattcatggaaatgaagctccttcggttaaaatt

SEQ ID NO: 790361 - DNA, 75 bp, synthetic construct
  source 1..75: mol_type = other DNA
aggcccgtcagcagtatcgtgaaatggaaaaggaaatgttcctcgagctgaatggcgaaggcatcgaagcaccga

SEQ ID NO: 790362 - DNA, 75 bp, synthetic construct
  source 1..75: mol_type = other DNA
tggtttaactcgatacagtttccggggcaaagctggacgaagctggagccgttcgcccattcgcaggacgaaata

SEQ ID NO: 790363 - DNA, 75 bp, synthetic construct
  source 1..75: mol_type = other DNA
gtacgttacgattgttagaagctattcgtatatgtgggcttgagaaaaaaactcgtttttatcaagcctctacct

SEQ ID NO: 790364 - DNA, 75 bp, synthetic construct
  source 1..75: mol_type = other DNA
atgaaaaaagcatttattacaggcattactggtcaggatggctcttacttggctgaattccttcttgataaaggg

SEQ ID NO: 790365 - DNA, 75 bp, synthetic construct
  source 1..75: mol_type = other DNA
tcaatcatgaatccccacgtcgtggggaaacgtttgtaacacgtaaaatcacacgtgctatagctaatatttcgc

SEQ ID NO: 790366 - DNA, 75 bp, synthetic construct
  source 1..75: mol_type = other DNA
tttagggaatatggattcgttacgagattggggacatgcaaaagattatgttagaatgcaatggttgatgttaca

SEQ ID NO: 790367 - DNA, 75 bp, synthetic construct
  source 1..75: mol_type = other DNA
ggtgatgttattgttcgcgttgaccctcgttattttcgaccagcagaagttgaaactcttcttggtgatccaaca

SEQ ID NO: 790368 - DNA, 75 bp, synthetic construct
  source 1..75: mol_type = other DNA
gtattactggtcaagatggttcttaccttgctgaatttcttctcgaaaaaggatatgaggttcatggtataaaac

SEQ ID NO: 790369 - DNA, 75 bp, synthetic construct
  source 1..75: mol_type = other DNA
agctgtatcattcgaatcaccggagtatacagcagatgtggatgctatcggtacgttacgtttgttagaagcgat

SEQ ID NO: 790370 - DNA, 75 bp, synthetic construct
  source 1..75: mol_type = other DNA
ccattaaaggaatcaagaaccattccggatcctctttcgcgggaggaatttatccgtcttatcgatgcgtgcaga

SEQ ID NO: 790371 - DNA, 75 bp, synthetic construct
  source 1..75: mol_type = other DNA
ttggcactgaaagaaactgaagtcgccaaaacatcactcaacacataccgtgccgtcatcaaaaatatcctgagc

SEQ ID NO: 790372 - DNA, 75 bp, synthetic construct
  source 1..75: mol_type = other DNA
aaaaaatcttgcctcgtcgattaataaagaaaaattgctggcggtacgtaaagagttacttactggataccagat

SEQ ID NO: 790373 - DNA, 75 bp, synthetic construct
  source 1..75: mol_type = other DNA
gatattgaattggttaattgtgatattactgcctttaaaggtggtaatggcgccaaaaaagggactgttaagctg

SEQ ID NO: 790374 - DNA, 75 bp, synthetic construct
  source 1..75: mol_type = other DNA
cgagcttgttacgctgtcattacttcagcatgataactaaagctatacatactagcactacggctattgggcata

SEQ ID NO: 790375 - DNA, 75 bp, synthetic construct
  source 1..75: mol_type = other DNA
agaaactgaagtcgcaaaaacatcactcaacacataccgtgccgtcatcaaaaatatcctgagcataatcggtga

SEQ ID NO: 790376 - DNA, 75 bp, synthetic construct
  source 1..75: mol_type = other DNA
ttgcagctatcaagagcggcaaatacgacgccatcatctgtaactacccgaacggcgatatggtcggtcacaccg

SEQ ID NO: 790377 - DNA, 75 bp, synthetic construct
  source 1..75: mol_type = other DNA
tcaacaaacaaaaaacctgtggattctcgctgtatacacgggtattcgtcacggggagctggtatcgctggcatg

SEQ ID NO: 790378 - DNA, 75 bp, synthetic construct
  source 1..75: mol_type = other DNA
tgaagccgaacaggatcgccagatgaacatactgacgggggcttctgcaccggcaagacagaaactgagtgttgg

SEQ ID NO: 790379 - DNA, 75 bp, synthetic construct
  source 1..75: mol_type = other DNA
ccgtgaaatcacccgcgcgttcgttaacgctgatttcgacggtttcgcccgtaagaaagtggttaacgttgattt

SEQ ID NO: 790380 - DNA, 75 bp, synthetic construct
  source 1..75: mol_type = other DNA
gcttatgctcgtgacgaaaacgatgaattcgtgaaagcgactgtcatccgtgccgaaggccagccagatgcagca

SEQ ID NO: 790381 - DNA, 75 bp, synthetic construct
  source 1..75: mol_type = other DNA
ctgttggcggtcaactgctgatcaccgctgaccacggtaacgctgaacagatgcgcgatcctgctactggtcagg

SEQ ID NO: 790382 - DNA, 75 bp, synthetic construct
  source 1..75: mol_type = other DNA
gtgagctgatgttgctgtacggcattgccgatctcgcttttgttggcggttcactggtcgaacgcggcgggcata

SEQ ID NO: 790383 - DNA, 75 bp, synthetic construct
  source 1..75: mol_type = other DNA
gcaccttattcctaccagtgaaggtcagggcgagaatggcgatattggtccacttcgaccgttcactattaatct

SEQ ID NO: 790384 - DNA, 75 bp, synthetic construct
  source 1..75: mol_type = other DNA
tggtgtaaatgctgctccaactactccacaggggcagggtagagtaacctttaacggaactgttgttgatgctcc

SEQ ID NO: 790385 - DNA, 75 bp, synthetic construct
  source 1..75: mol_type = other DNA
gcatctcattcccactcgggaaaatcagggtgaaaatggtgatattggtcctctccgtccgttcaccattaacct

SEQ ID NO: 790386 - DNA, 75 bp, synthetic construct
  source 1..75: mol_type = other DNA
aataaagcgcagcaggtagagctgacagccctcaaaagccagaatgatcacttacaacggaccgtgtctgattta

SEQ ID NO: 790387 - DNA, 75 bp, synthetic construct
  source 1..75: mol_type = other DNA
gccgaaaaggacacggccctgacgctcgtgcggtcggagctgtcaacagctaaaggggagaatgaacaacttcga

SEQ ID NO: 790388 - DNA, 75 bp, synthetic construct
  source 1..75: mol_type = other DNA
agcggtgatttatgcaccgctgatcccggcagctctgacgctgatatcgcctgctttgtcgttgacgcactggca

SEQ ID NO: 790389 - DNA, 75 bp, synthetic construct
  source 1..75: mol_type = other DNA
tcgatatttctgtaacgccgcagttggctgctaaagccgtgacgctgcgccgccagtgggcaccacaccgcccgg

SEQ ID NO: 790390 - DNA, 75 bp, synthetic construct
  source 1..75: mol_type = other DNA
ggctgctaaagccgtgacgctgcgccgccagtgggcaccacaccgcccggtatggattgccaccagcactcacga

SEQ ID NO: 790391 - DNA, 75 bp, synthetic construct
  source 1..75: mol_type = other DNA
accacgtcatccggaacgcttcccggatgcgattaaccttgtccgccaggctggactaagctatatcacacgctc

SEQ ID NO: 790392 - DNA, 75 bp, synthetic construct
  source 1..75: mol_type = other DNA
ggcgctgggtgcaaaaaataatcaggtgaccatcactggtagcctgaaattcgatatctctgtcacgccgcagtt

SEQ ID NO: 790393 - DNA, 75 bp, synthetic construct
  source 1..75: mol_type = other DNA
ccatgacgccaaccggttcggaacgcgtacaatctgctttcggtaaggatgttcagcacgtttatctgccttacg

SEQ ID NO: 790394 - DNA, 75 bp, synthetic construct
  source 1..75: mol_type = other DNA
ggttcactggttgaacgtggtgggcataatccgctggaagctgccgcacacgctattccggtattgatggggccg

SEQ ID NO: 790395 - DNA, 75 bp, synthetic construct
  source 1..75: mol_type = other DNA
ttttcataaacgttggtttgggagaaggttctgcattgccggttggcgtccccattccgtggccgtcagcaacgc

SEQ ID NO: 790396 - DNA, 75 bp, synthetic construct
  source 1..75: mol_type = other DNA
aaatatcaattacccgctcgcaactggcaatgctcctcgataagctggactggcgtcagccaaaaacatcccgcc

SEQ ID NO: 790397 - DNA, 75 bp, synthetic construct
  source 1..75: mol_type = other DNA
cctgtttatctttcgtggccgacggggtgacactgttaaaatactcagggccgatgctgatggtctgtgcctgtt

SEQ ID NO: 790398 - DNA, 75 bp, synthetic construct
  source 1..75: mol_type = other DNA
ggacacggattgtcagggatatcgatatcggatactggtaaaaattcagcggataatgtcaacggcgtgtattac

SEQ ID NO: 790399 - DNA, 75 bp, synthetic construct
  source 1..75: mol_type = other DNA
tgtgacactgttaaaatactctgggccgattctgatggtctgtgccagttcaccaaacacctggaggaaggccag

SEQ ID NO: 790400 - DNA, 75 bp, synthetic construct
  source 1..75: mol_type = other DNA
ggtgacaccgtcaaaattctttgggctgatggtctgtgcctgttcaccaaacgcctggaggaaggccagtttatc

SEQ ID NO: 790401 - DNA, 75 bp, synthetic construct
  source 1..75: mol_type = other DNA
gtttatcttccgtggccgacggggtgacaccgtcaaaattctttgggctgatgctgatggtctgtgcctgttcac

SEQ ID NO: 790402 - DNA, 75 bp, synthetic construct
  source 1..75: mol_type = other DNA
tgaaacgctgctcggcgacccgaccaaagcgcacgaaaaactgggctggaaaccggaaatcaccctcagagagat

SEQ ID NO: 790403 - DNA, 75 bp, synthetic construct
  source 1..75: mol_type = other DNA
tccattacccgctcgcaactggcaatgctcctcgataagctggactggcgtcagccaaaaacatccagccgtaac

SEQ ID NO: 790404 - DNA, 75 bp, synthetic construct
  source 1..75: mol_type = other DNA
tcgatgagttgaatttaatcgttcagcgcgctttacaactccagtcaatgaaaaagagatccgtcatctgcacca

SEQ ID NO: 790405 - DNA, 75 bp, synthetic construct
  source 1..75: mol_type = other DNA
ttgtttcagcactggctggtgatatcaccacgatccagaccgatattccggtaatgcccggtacaggggctaaat

SEQ ID NO: 790406 - DNA, 75 bp, synthetic construct
  source 1..75: mol_type = other DNA
tattttccccgtacgccgtcggtgtcgacgacggggattattgaggtgattaggggtaaatcagccacctactga

SEQ ID NO: 790407 - DNA, 75 bp, synthetic construct
  source 1..75: mol_type = other DNA
taccatcaggatgaccgcatagcgattatcgccgggctggcgtgtgtggatggcgtttttctggaggaatcgctg

SEQ ID NO: 790408 - DNA, 75 bp, synthetic construct
  source 1..75: mol_type = other DNA
tgatatgcgtaaatccttcaacggtctgggagaacaggtacaacatgtgctggatgagaaccccttctccggtca

SEQ ID NO: 790409 - DNA, 75 bp, synthetic construct
  source 1..75: mol_type = other DNA
agccgacgaaaaggctgtgtactacatggctatgctatggattcacaaagcaaaagaggctgcaaatgctcttgg

SEQ ID NO: 790410 - DNA, 75 bp, synthetic construct
  source 1..75: mol_type = other DNA
ggatggcagagcaagatatcacaggagccgacgaaaaggctgtgtactacatggctatgctatggattcacaaag

SEQ ID NO: 790411 - DNA, 75 bp, synthetic construct
  source 1..75: mol_type = other DNA
caatgctgaaggcatacgggctctggtgagtctgctggcaccgaatacccgcgcacttatcagcgaacccgatcc

SEQ ID NO: 790412 - DNA, 75 bp, synthetic construct
  source 1..75: mol_type = other DNA
tatctcgtacatgagtaacggaaataatattgactatggcggcgataaggtgtttgcggggaattaccgtagcga

SEQ ID NO: 790413 - DNA, 75 bp, synthetic construct
  source 1..75: mol_type = other DNA
gaacgcctgctggtaatgggtggcggtatcatcggtctggaaatggggaccgtataccacgcgctgggttcacag

SEQ ID NO: 790414 - DNA, 75 bp, synthetic construct
  source 1..75: mol_type = other DNA
acgatggaaggcaaaaaagcaccggctgaaccgcagcgttacgacgccgtgctggtagcgattggtcgtgtgccg

SEQ ID NO: 790415 - DNA, 75 bp, synthetic construct
  source 1..75: mol_type = other DNA
tggggcgttatcagggattaatacccgctttatccattcgtaacagggagtgtatgactcatgtttcctattcgt

SEQ ID NO: 790416 - DNA, 75 bp, synthetic construct
  source 1..75: mol_type = other DNA
gatggcattaaaacccaggaaatgtatgtcgaagtagacgtcaacagcggcccttgttacgggcgtaccgtctgc

SEQ ID NO: 790417 - DNA, 75 bp, synthetic construct
  source 1..75: mol_type = other DNA
attatgcgtcaacaaatcgttgccgataatattcacggtgaaaccggactggatggcccggtattcgagccgctg

SEQ ID NO: 790418 - DNA, 75 bp, synthetic construct
  source 1..75: mol_type = other DNA
cgacgcaattcgatcttggaacgctctcacacctctatgttttacggagtaacaatgtcgaaaaactggatgcgt

SEQ ID NO: 790419 - DNA, 75 bp, synthetic construct
  source 1..75: mol_type = other DNA
atgcaagccgtagaaatcccactggttgctgacaatcagacttttgccaccacaattaacggttcggtttatcac

SEQ ID NO: 790420 - DNA, 75 bp, synthetic construct
  source 1..75: mol_type = other DNA
cttgccccgctgacgaaagcgacggtggtgcctcacgatccgcagcctgttattctcccggcccctgccggtctg

SEQ ID NO: 790421 - DNA, 75 bp, synthetic construct
  source 1..75: mol_type = other DNA
ccgctggcggatgtggttttgaacaaaacgcaggcggcatcatgtacgcagtggagcgtgaccaacgggggaacg

SEQ ID NO: 790422 - DNA, 75 bp, synthetic construct
  source 1..75: mol_type = other DNA
gtgcaaccagtccggcccctgcagaggtggtgctgactgtcctgagtcgcgaaggcgacggaacagcagaaaaag

SEQ ID NO: 790423 - DNA, 75 bp, synthetic construct
  source 1..75: mol_type = other DNA
ttcatccgaaagatgagcaggaagcagtaatgcgtacgctggagcttgaatctgaacccgtcactaaattgttgc

SEQ ID NO: 790424 - DNA, 75 bp, synthetic construct
  source 1..75: mol_type = other DNA
tgcgggaaggcgaacgggcagcggcggatggcagtatcaccggaacgccacgaaattcccggattgcgtcattct

SEQ ID NO: 790425 - DNA, 75 bp, synthetic construct
  source 1..75: mol_type = other DNA
gacggctcattcctgaaaattggctggccgtcgatcactgtattttcctcttcggattaccgtcgtgtggcgctg

SEQ ID NO: 790426 - DNA, 75 bp, synthetic construct
  source 1..75: mol_type = other DNA
gatgacgatgacttacaagctggctcagaaagaagggcagtcccttgccaagtttggaccccacgatctgaggcg

SEQ ID NO: 790427 - DNA, 75 bp, synthetic construct
  source 1..75: mol_type = other DNA
gatgtgttgaaagtcattcgtgggcaggaaggaacaaccgcgaaaggttggtcccttaatgatgttgtggctaac

SEQ ID NO: 790428 - DNA, 75 bp, synthetic construct
  source 1..75: mol_type = other DNA
gtgcaaccagtccggcgcctgcagaggtggtgctgacggtcctgagtcgtgaaggcgacggaacagcagaaaaag

SEQ ID NO: 790429 - DNA, 75 bp, synthetic construct
  source 1..75: mol_type = other DNA
acggcttcagacgagctgatcgcaacggtcaacgcaaagctatcagacgagagtgtccgccccgttggtgaccgg

SEQ ID NO: 790430 - DNA, 75 bp, synthetic construct
  source 1..75: mol_type = other DNA
cagaagcaaaagccagtctgcagaaatacatcgccagtcagacgcggctgggacgcgatatccgccgcagcgcca

SEQ ID NO: 790431 - DNA, 75 bp, synthetic construct
  source 1..75: mol_type = other DNA
gccattcagtgcgctgtcgcgctgggagcaaagagtgtgacggctatcgacattagctcagaaaaactggcactg

SEQ ID NO: 790432 - DNA, 75 bp, synthetic construct
  source 1..75: mol_type = other DNA
gtagctgaccgggtgaccgtccagtcagccgagattgtgccgtaccagattgacgcgacgatctacgtttacccc

SEQ ID NO: 790433 - DNA, 75 bp, synthetic construct
  source 1..75: mol_type = other DNA
acggctgcaacgttatcagatcgaaaacgtagtactggatactgtcatgctggcaaaaagcggcgatccgctact

SEQ ID NO: 790434 - DNA, 75 bp, synthetic construct
  source 1..75: mol_type = other DNA
tataaactggaactggatgaatctcgatcgcacactatccataaggcaaattccaggattcgggaatgttgttaa

SEQ ID NO: 790435 - DNA, 75 bp, synthetic construct
  source 1..75: mol_type = other DNA
attatggtgacccacgacctgcaactggcggcacgctgcgaccgctgcttacggctggtgaacgggcagttgcag

SEQ ID NO: 790436 - DNA, 75 bp, synthetic construct
  source 1..75: mol_type = other DNA
gaacagcaacgagtggcgctggcgcgagcctttaatggtcgacctgatgtgctgtttgccgacgaacccaccggc

SEQ ID NO: 790437 - DNA, 75 bp, synthetic construct
  source 1..75: mol_type = other DNA
tgaccaggcaaaagattttgccgggacgatggttgtacagcctggcgggtctgccgtgtggaacaacttcaacga

SEQ ID NO: 790438 - DNA, 75 bp, synthetic construct
  source 1..75: mol_type = other DNA
gcgatgcagcaaaacaggcctaccaggacgttctcggtgaacagtatcagaccaatggcacctggcgtatgccga

SEQ ID NO: 790439 - DNA, 75 bp, synthetic construct
  source 1..75: mol_type = other DNA
cgcggcagtcttgagaaaaccgacgcggatagcgccgactcgtcatggaatgaccaatcgaaagattttgctggc

SEQ ID NO: 790440 - DNA, 75 bp, synthetic construct
  source 1..75: mol_type = other DNA
cacgcgcgtaatgaacaggaaatgctggagcaaggacgtgaattattggcgatgggctgtggcgctgtgctaatg

SEQ ID NO: 790441 - DNA, 75 bp, synthetic construct
  source 1..75: mol_type = other DNA
catacaaactgggctgacaccgtacaggaggcaaaaagctggctttcatcggcgttagcccaggccgacacgctg

SEQ ID NO: 790442 - DNA, 75 bp, synthetic construct
  source 1..75: mol_type = other DNA
cgcagtcgattattgccacaggtttcattaataacgccaaacttgcccgaagcagccgccttgctcgacgcgcca

SEQ ID NO: 790443 - DNA, 75 bp, synthetic construct
  source 1..75: mol_type = other DNA
ggggcgaaagcgttgctcgaacagttagggctgggtaaacgtctggatcatcttccggcacagctttctggcggt

SEQ ID NO: 790444 - DNA, 75 bp, synthetic construct
  source 1..75: mol_type = other DNA
aaaaatattcaggccggaaatgttaaaaaattcacgttatccagcgccaacaactccacgaaaaacgcaacgttt

SEQ ID NO: 790445 - DNA, 75 bp, synthetic construct
  source 1..75: mol_type = other DNA
gtcagtgaagattatctcaccacagccggttatctacgccgggttggctttactgcttttagccttgcgttttaa

SEQ ID NO: 790446 - DNA, 75 bp, synthetic construct
  source 1..75: mol_type = other DNA
tcagagcccctgaatgtgatcgctcaggtgattgcgtatcgtgaattgatgttgcgacaggtcattaatgatggc

SEQ ID NO: 790447 - DNA, 75 bp, synthetic construct
  source 1..75: mol_type = other DNA
ccgtgaccagcgcccggacatgccgttctggcgtctgaagggcgatggcttctgggaactacataacgcggaact

SEQ ID NO: 790448 - DNA, 75 bp, synthetic construct
  source 1..75: mol_type = other DNA
tttatccagcagtcgaaaatttcctcgccggaaaaaatccgcaatatggtcagtgtgcagatccccggtattcca

SEQ ID NO: 790449 - DNA, 75 bp, synthetic construct
  source 1..75: mol_type = other DNA
attttgacgggaaaactattgcgttgccgcaggtgcgtagaaattacccttatgaggggtttgtggagtggcatc

SEQ ID NO: 790450 - DNA, 75 bp, synthetic construct
  source 1..75: mol_type = other DNA
ctgattatcaccccggcagatgattcgaccctcccgccgacaccggcagtgatggaatctgacacggattatcgt

SEQ ID NO: 790451 - DNA, 75 bp, synthetic construct
  source 1..75: mol_type = other DNA
ggctgccgcaggtgctgttgcgctgcatgtatccggcagtttcccggatctgaatatgcaactgtgggcgataag

SEQ ID NO: 790452 - DNA, 75 bp, synthetic construct
  source 1..75: mol_type = other DNA
gttaaagaaaattatccgggcgagaagtttgttgaatggcacagaaaagaggtgttcagaggagagggaatctga

SEQ ID NO: 790453 - DNA, 75 bp, synthetic construct
  source 1..75: mol_type = other DNA
atccctcctcacaatggtacatgccataatacattctcttaccctccgggccttcagctttaaatgggacaagaa

SEQ ID NO: 790454 - DNA, 75 bp, synthetic construct
  source 1..75: mol_type = other DNA
ccaccgtacagtcgctggtgaaacgcaccctgcaatcagatgaaccgatgccggtggcccgttacgactgtatcg

SEQ ID NO: 790455 - DNA, 75 bp, synthetic construct
  source 1..75: mol_type = other DNA
ccggcaacttccaccgtcgcggcgggaaggcgatgctgcaaagaacctttgacgataatctcgataccctgctcg

SEQ ID NO: 790456 - DNA, 75 bp, synthetic construct
  source 1..75: mol_type = other DNA
ataaaaaacgtaaaaatagcccgcggattgtccagtctaacgagctgactgaggcggcatatagtctctccaggg

SEQ ID NO: 790457 - DNA, 75 bp, synthetic construct
  source 1..75: mol_type = other DNA
ctcaccgtggcattatcggagagtcgctcacaaggctcggggcgatgttttctggtaaagagtaccagatactgc

SEQ ID NO: 790458 - DNA, 75 bp, synthetic construct
  source 1..75: mol_type = other DNA
gataaatacgattttaacgccagcactcaccgtggcattatcggagagtcgctcacaaggctcggggcgatgttt

SEQ ID NO: 790459 - DNA, 75 bp, synthetic construct
  source 1..75: mol_type = other DNA
gccgacgggcgtgtcgcggatatctctgtcaccagtccttctccggcctgcgtcaccatctctgtgctgtcacgt

SEQ ID NO: 790460 - DNA, 75 bp, synthetic construct
  source 1..75: mol_type = other DNA
tacccgcaccggatgtggtcgaggagctggactttgaaagcattctcgctgaacgcaaggcgacactgatttccc

SEQ ID NO: 790461 - DNA, 75 bp, synthetic construct
  source 1..75: mol_type = other DNA
ccgccggtaatgaccttgatgtgattggtgccaattacaacaccacgcgcctgattatccccccggcagatgatt

SEQ ID NO: 790462 - DNA, 75 bp, synthetic construct
  source 1..75: mol_type = other DNA
gaaggcgatggaactgcagaaaaagacctgctggacgtggtgaaaaaagctctgaacagtgagaacgtccgcccg

SEQ ID NO: 790463 - DNA, 75 bp, synthetic construct
  source 1..75: mol_type = other DNA
gattacggcgcattccagataaacaccatctgggcgaataagctggcgtccgattttggcgtaaaagcggagcag

SEQ ID NO: 790464 - DNA, 75 bp, synthetic construct
  source 1..75: mol_type = other DNA
ggcgcttttgctacaagggagcccttagccaggctgcagtgctgatacaaaaaaacatcccacaccccgagtggg

SEQ ID NO: 790465 - DNA, 75 bp, synthetic construct
  source 1..75: mol_type = other DNA
gtttaagcgtcgccgggtcggtgggagcctatcagtatcatggtcgcagtgccgacgggcgtgtcgcggatatct

SEQ ID NO: 790466 - DNA, 75 bp, synthetic construct
  source 1..75: mol_type = other DNA
atgccggactttcgccgccgtttcctgcaggcaagtgttgatgagatcaacagccggacaccaatgcgcctctct

SEQ ID NO: 790467 - DNA, 75 bp, synthetic construct
  source 1..75: mol_type = other DNA
aggcacactgcccgacggcaccgtcttttctatccccgaccaggacgcactgcccgatccgctgcacccgcaaaa

SEQ ID NO: 790468 - DNA, 75 bp, synthetic construct
  source 1..75: mol_type = other DNA
gggttcagctatttcgaactcgacaagagcgggcaggcctgggccgaaatggctgccgcaggtgctgttgcgctg

SEQ ID NO: 790469 - DNA, 75 bp, synthetic construct
  source 1..75: mol_type = other DNA
agcttatgaatttcatgcccgaagcgccgacggtcgggtggcggatgccagtgcaaccagcccagcacctgcaga

SEQ ID NO: 790470 - DNA, 75 bp, synthetic construct
  source 1..75: mol_type = other DNA
tcagagaataccggaaacatcacaccatcggggcgttatctcagccccgaaaatgctgtatctgcacttttaccc

SEQ ID NO: 790471 - DNA, 75 bp, synthetic construct
  source 1..75: mol_type = other DNA
acagaaccggtttatgcagtttcggcttagtgaaacaaaagaaatcaccaatccgtatgccatgcgtttatacga

SEQ ID NO: 790472 - DNA, 75 bp, synthetic construct
  source 1..75: mol_type = other DNA
taagaacaatattctggtggagtccttcgatgtgccgctgaaaaaaaccggcgcttaccagtctatcgatattcg

SEQ ID NO: 790473 - DNA, 75 bp, synthetic construct
  source 1..75: mol_type = other DNA
ccggtaacattgagcgcgcagcagattgaagagagtcggacgcggttatccgcattgaaaatttatccgcgcgat

SEQ ID NO: 790474 - DNA, 75 bp, synthetic construct
  source 1..75: mol_type = other DNA
cgctggcagtaccaggatgaaacgcgggagtgcgaattttacgagaacgaactggaagatttgtggttgccgctg

SEQ ID NO: 790475 - DNA, 75 bp, synthetic construct
  source 1..75: mol_type = other DNA
tagaagagtttttaagattattagggaatgatttttatttgtttgataatcgcgtggaaattgattttaatggtt

SEQ ID NO: 790476 - DNA, 75 bp, synthetic construct
  source 1..75: mol_type = other DNA
tcctcaaatggggatatcaagtatctcgctgttaaaaaattccgtactactgctcctcacgaagttacacattac

SEQ ID NO: 790477 - DNA, 75 bp, synthetic construct
  source 1..75: mol_type = other DNA
catggttaaaaatttgcctacatgccgccggatttttgccgattatctggctgatatgggcagtcaatcatggtg

SEQ ID NO: 790478 - DNA, 75 bp, synthetic construct
  source 1..75: mol_type = other DNA
tcaaaagtgtggctatagccaatgcccggaacctgtgtcgtgctgcattaacagaactgcaagaaaacaccacgg

SEQ ID NO: 790479 - DNA, 75 bp, synthetic construct
  source 1..75: mol_type = other DNA
atcgtctgaccaccgcgcaacgctgcgatctgattgccgttattgataagggattacttgcggaatacggaaccc

SEQ ID NO: 790480 - DNA, 75 bp, synthetic construct
  source 1..75: mol_type = other DNA
caactattcacgattttattgctgaactacaaactgaatcatttaaaaaccaatacgctgacgtaaaagttaatg

SEQ ID NO: 790481 - DNA, 75 bp, synthetic construct
  source 1..75: mol_type = other DNA
agcgatgaacaacgcaagcatacccgtttagcagcggagttagccgggttaaatgcggtacgcttaattaatgaa

SEQ ID NO: 790482 - DNA, 75 bp, synthetic construct
  source 1..75: mol_type = other DNA
atgacggatgaagtcaaaagtgtggctatagccaatgcccggaacctatgtcgtgctgcattaacagaactgcaa

SEQ ID NO: 790483 - DNA, 75 bp, synthetic construct
  source 1..75: mol_type = other DNA
tggacctcatgcagattgcgccgctgtttgagtgtgaacctttagatgtattcagcaatccagctatctgccagc

SEQ ID NO: 790484 - DNA, 75 bp, synthetic construct
  source 1..75: mol_type = other DNA
gttatcagtcaggcaggtaaactgcttggaactcacattattcaaacaaatcaaacgggctatctggaactactt

SEQ ID NO: 790485 - DNA, 75 bp, synthetic construct
  source 1..75: mol_type = other DNA
atttaacaactcaagaagaaagactaatatatctaaaagcgcttgatgaatggcaatcacgtcattcagcaacgt

SEQ ID NO: 790486 - DNA, 75 bp, synthetic construct
  source 1..75: mol_type = other DNA
aatcaaccggaagaggtcattgttcttaattataaaaatataacatggaagcaccatatcgcgagtacggaatca

SEQ ID NO: 790487 - DNA, 75 bp, synthetic construct
  source 1..75: mol_type = other DNA
taaaattttacaagccaatagataaatcctctcctttattaaatgctgctctttctgaaaatgaagagttatcag

SEQ ID NO: 790488 - DNA, 75 bp, synthetic construct
  source 1..75: mol_type = other DNA
atgaagataatgaattaaatttgcatgaatatgtagtccgcaaccgcccctcaaccttctttgtcagggcggcgg

SEQ ID NO: 790489 - DNA, 75 bp, synthetic construct
  source 1..75: mol_type = other DNA
ccgtatgacccgcgtaccggaaaatgcagtacagcaggcgctggccggtaaaggtcgcaaagtcacgtcactact

SEQ ID NO: 790490 - DNA, 75 bp, synthetic construct
  source 1..75: mol_type = other DNA
taaaattttacaagccaatagataaatcctcccctttattaaatgccgctctttctgaaaatgaagagttatcag

SEQ ID NO: 790491 - DNA, 75 bp, synthetic construct
  source 1..75: mol_type = other DNA
gggattcaagctttccctggggtgtcagctgatgcgttgcgacaactgaccgatattcagcctgaaatggtcagt

SEQ ID NO: 790492 - DNA, 75 bp, synthetic construct
  source 1..75: mol_type = other DNA
gggatcagggcatttcccggtgtatctgctgatgcgctacgtcagttgactgatgttcagcctgaaatggtcagt

SEQ ID NO: 790493 - DNA, 75 bp, synthetic construct
  source 1..75: mol_type = other DNA
agctgtcatgctgttctggcctgtcaccctgccggctgcaactgacattgctgccggcagactgaaaaagcgggg

SEQ ID NO: 790494 - DNA, 75 bp, synthetic construct
  source 1..75: mol_type = other DNA
tgtgactatagtgctaccgccaaatatgacggaagaagtcaaagttgttggaaataaagcctcagaatcatataa

SEQ ID NO: 790495 - DNA, 75 bp, synthetic construct
  source 1..75: mol_type = other DNA
aagcctaatgatatttactttgatccaaaaaatgacatggtctatgtctggggtaccaaaacgactcgacttgta

SEQ ID NO: 790496 - DNA, 75 bp, synthetic construct
  source 1..75: mol_type = other DNA
gcgtcaggtgctggaattacatacagcgccctgattaatcgtgatacaaaacttatccgcattaatactgtttca

SEQ ID NO: 790497 - DNA, 75 bp, synthetic construct
  source 1..75: mol_type = other DNA
gctttaactaaggcgattgaaggctggggtgtatcaggtgtgtccaagacatatggcaatccaggtagcgcactg

SEQ ID NO: 790498 - DNA, 75 bp, synthetic construct
  source 1..75: mol_type = other DNA
agcacgccagcagcaccacagggaaatgcccgtccgcaactgacgggcattcagggggcgcgtggacaccttgag

SEQ ID NO: 790499 - DNA, 75 bp, synthetic construct
  source 1..75: mol_type = other DNA
gacggctgctcatcagcaccctgctgctgatgtccgccggcagcagccacgcggccctgaccgtcggtgacgtcg

SEQ ID NO: 790500 - DNA, 75 bp, synthetic construct
  source 1..75: mol_type = other DNA
gccgcgccacaggaaaatgcccgtccgcaactgacaggcattcagggagctcgcggacaccttgaggcccgtgtg

SEQ ID NO: 790501 - DNA, 75 bp, synthetic construct
  source 1..75: mol_type = other DNA
agctgaacgcaacccatgtagattttgaaaccttcgcggaactgattagatcagagccacaaaaggtgagcgcca

SEQ ID NO: 790502 - DNA, 75 bp, synthetic construct
  source 1..75: mol_type = other DNA
aattacccttgtagtagaacttaaaatcgacatcgctgtctccctcctgattttagaagataataatttcagaaa

SEQ ID NO: 790503 - DNA, 75 bp, synthetic construct
  source 1..75: mol_type = other DNA
taggtgccggatctgttgtaacgagggcgattcctgaaatggttgttgctgctggtgttcctgctcgaataataa

SEQ ID NO: 790504 - DNA, 75 bp, synthetic construct
  source 1..75: mol_type = other DNA
aaaatgcctcacaccatgacgggcaggaagggcagcgccgcaggcgcggccctcctgtatttcaggcaggcgtaa

SEQ ID NO: 790505 - DNA, 75 bp, synthetic construct
  source 1..75: mol_type = other DNA
gtgtggatcactattgcaccgttcgtgacaccgggccgaccggttattccccggaggggcgaaagccccttctgc

SEQ ID NO: 790506 - DNA, 75 bp, synthetic construct
  source 1..75: mol_type = other DNA
ggagtcgggccgacgaccggatgccgccaggcagccgggagccgaagggtgtccccgcctccgggcatcagaaca

SEQ ID NO: 790507 - DNA, 75 bp, synthetic construct
  source 1..75: mol_type = other DNA
gcgaataatacctcaggcaaagatatatggctactacgatcatggattactggttattataatgaggataacaaa

SEQ ID NO: 790508 - DNA, 75 bp, synthetic construct
  source 1..75: mol_type = other DNA
caagataaaattattttaccggccagatagtcttaatgattcgaaaatcatagagaaaatacctgaatccataca

SEQ ID NO: 790509 - DNA, 75 bp, synthetic construct
  source 1..75: mol_type = other DNA
aatacaaacaagagcttgcacagattagtagcttcaatgactttttgagtgttccacgagaatttagtaaaacta

SEQ ID NO: 790510 - DNA, 75 bp, synthetic construct
  source 1..75: mol_type = other DNA
cgaaggatttttgattgtcactgcggcggcagatcaaggtctggtggatattcatgaccgccgcccactggtact

SEQ ID NO: 790511 - DNA, 75 bp, synthetic construct
  source 1..75: mol_type = other DNA
tatcttcagcctgtggcagatgcctcactcctatgccatcgccattttccgctttaaggattatcaggcggcaaa

SEQ ID NO: 790512 - DNA, 75 bp, synthetic construct
  source 1..75: mol_type = other DNA
tgaattctacagtcgattaattcatgaaggcaaagtgggcattatggcggggcatgtctatggaacggaggggga

SEQ ID NO: 790513 - DNA, 75 bp, synthetic construct
  source 1..75: mol_type = other DNA
atcataagttcagaacgatatcgaggtatcgcgattttgtaaactccccatcagtactgaatataattgcaacta

SEQ ID NO: 790514 - DNA, 75 bp, synthetic construct
  source 1..75: mol_type = other DNA
accacgaagaacaacgattttcttaccgttattgagattcagggcgctaaatcatcgtttgacgagaagtcgttt

SEQ ID NO: 790515 - DNA, 75 bp, synthetic construct
  source 1..75: mol_type = other DNA
tccggtgtcgccacaggcgatatgtcgatcatcggcctctgtgccctgctcgccctgtgcctagtcattgtgggc

SEQ ID NO: 790516 - DNA, 75 bp, synthetic construct
  source 1..75: mol_type = other DNA
tgatgctctctcttggcggttacgctggatataaatatctggtggtcgccgcggcggttagcgtctggtggttag

SEQ ID NO: 790517 - DNA, 75 bp, synthetic construct
  source 1..75: mol_type = other DNA
atcccggtaattttgcgacgaatattcaggcgggcgccagcttcggctatcagttactgtgggttgtcgtatggg

SEQ ID NO: 790518 - DNA, 75 bp, synthetic construct
  source 1..75: mol_type = other DNA
aacgcgtaaaacagacaggctgggtgattgtggtgctggtagtggcgctgaatatctggttactggtaggaacgg

SEQ ID NO: 790519 - DNA, 75 bp, synthetic construct
  source 1..75: mol_type = other DNA
tttgagcgtggtgacgaagccgaaggatttttgatcgtcactgctgcggcagatcaaggtctggtagatattcat

SEQ ID NO: 790520 - DNA, 75 bp, synthetic construct
  source 1..75: mol_type = other DNA
gagcatctgggcgtttatgcttgccgtattatcgtgcctggcatgtccgatatttatccggctgaagatttgtgg

SEQ ID NO: 790521 - DNA, 75 bp, synthetic construct
  source 1..75: mol_type = other DNA
ttatattccgatgaatatcattggtaacctgtacgtttctaacggtatgtctgctggcaatacccgtaacgaagc

SEQ ID NO: 790522 - DNA, 75 bp, synthetic construct
  source 1..75: mol_type = other DNA
cctgtgattcatcacccggttaaaaacacgtacagtcagagtaatttgattatgattatttctgaggcaatttat

SEQ ID NO: 790523 - DNA, 75 bp, synthetic construct
  source 1..75: mol_type = other DNA
aaccaggcttgcagcgaccgttccggtcgcgccgcccctgtcgcgccggaaacggcgctccctgcacacctgacg

SEQ ID NO: 790524 - DNA, 75 bp, synthetic construct
  source 1..75: mol_type = other DNA
tcggtttatccccgctggcgcggggaacaccgcgtaaggtgtgccagctataaaaaactcaccggtttatccccg

SEQ ID NO: 790525 - DNA, 75 bp, synthetic construct
  source 1..75: mol_type = other DNA
atccccgctggcgcggggaacaccggtcgtcaggtactaatctaaaggctgttttcggtttatccccgctggcgc

SEQ ID NO: 790526 - DNA, 75 bp, synthetic construct
  source 1..75: mol_type = other DNA
gcgcggtttatccccgctggcgcggggaacactatttctgtaatgctcaaagatatagccggatcggtttatccc

SEQ ID NO: 790527 - DNA, 75 bp, synthetic construct
  source 1..75: mol_type = other DNA
atgagcaaattgttccagttcaaaagttggttgaccatagaggaaaccgcaaacaggttaagcacaacactcggt

SEQ ID NO: 790528 - DNA, 75 bp, synthetic construct
  source 1..75: mol_type = other DNA
tgcgacacagctcgactgtcaggcaggtgtcaaaaaagagattgaacgactggagcgggagctgaaaccgaagcc

SEQ ID NO: 790529 - DNA, 75 bp, synthetic construct
  source 1..75: mol_type = other DNA
gggaacacaaaattcatattgataaacaccgcgtttgtatcggtttatccccgctggcgcggggaacactttact

SEQ ID NO: 790530 - DNA, 75 bp, synthetic construct
  source 1..75: mol_type = other DNA
ggaacaccatcaatacgcgctcagccgagactttacccgcggtttatccccgctggcgcggggaacacactaagc

SEQ ID NO: 790531 - DNA, 75 bp, synthetic construct
  source 1..75: mol_type = other DNA
cggggaacacggtaacgctacggatcgcaatcctgatgttgtgggtttatccccgctggcgcggggaacaccggc

SEQ ID NO: 790532 - DNA, 75 bp, synthetic construct
  source 1..75: mol_type = other DNA
atccccgctggcgcggggaacactggtgtgattccaattgccgcacggaacgccgcggtttatccccgctggcgc

SEQ ID NO: 790533 - DNA, 75 bp, synthetic construct
  source 1..75: mol_type = other DNA
gtgatatccatcatcgcatccagtgcgcccggtttatccccgctgatgcggggaacacacatgaatgtcggttca

SEQ ID NO: 790534 - DNA, 75 bp, synthetic construct
  source 1..75: mol_type = other DNA
ccgctggcgcggggaactctgattttggtggcgggggtgactgggggaatacggtttatccccgctggcgcgggg

SEQ ID NO: 790535 - DNA, 75 bp, synthetic construct
  source 1..75: mol_type = other DNA
gtttatccccgctggcgcggggaacacacggattgcggtatatgcagtgtccagattctcggtttatccccgctg

SEQ ID NO: 790536 - DNA, 75 bp, synthetic construct
  source 1..75: mol_type = other DNA
catcgaaaagtttgagcaagaaaattctggtgatggccaacaatcgctaaaacttgatgagagcctgcatgtaat

SEQ ID NO: 790537 - DNA, 75 bp, synthetic construct
  source 1..75: mol_type = other DNA
cttggggctgagtccaaccgccttgcaaaaggcttgtactgcgcgaaagacaaaacaaacgcgctcgatgcgttc

SEQ ID NO: 790538 - DNA, 75 bp, synthetic construct
  source 1..75: mol_type = other DNA
acaccgccgcaccccgccgtacatgttcaccgaggaggtcgcgctcgcggcaatgcgtgcccacgctgccggtga

SEQ ID NO: 790539 - DNA, 75 bp, synthetic construct
  source 1..75: mol_type = other DNA
gccacccgtgccccgcgtaagacccggagcgtgacaccggcaaaacgtggacgcccgaaaaagaaagccagttaa

SEQ ID NO: 790540 - DNA, 75 bp, synthetic construct
  source 1..75: mol_type = other DNA
cttcgaacgtctgatggaaggcgctaaactgctgaaatgcagcgagtttggtgatgcgatcatcaagaacatgta

SEQ ID NO: 790541 - DNA, 75 bp, synthetic construct
  source 1..75: mol_type = other DNA
gggctggactgaagccgcagacttgattgttaaaggtatggaaggcgcaatcaacgccaagaccgtaacctatga

SEQ ID NO: 790542 - DNA, 75 bp, synthetic construct
  source 1..75: mol_type = other DNA
ccaaatcgctggtggatgattacacctttaaatttatcgtgattcctgctctgggtgctgagtccaaccgcttgg

SEQ ID NO: 790543 - DNA, 75 bp, synthetic construct
  source 1..75: mol_type = other DNA
aattgcgaacgatcgtgactctgtgaccctggtgcacaaaggcaacatcatgaagttcaccgaaggcgcgtttaa

SEQ ID NO: 790544 - DNA, 75 bp, synthetic construct
  source 1..75: mol_type = other DNA
atccgtggatccccgcctgctgacggagacccttgaactgaccgccacggcagacatgcctgatgaagtgcgcgc

SEQ ID NO: 790545 - DNA, 75 bp, synthetic construct
  source 1..75: mol_type = other DNA
gcgaactgctgccgttctggttgccgtgggtgaacggtgtgctggagcagggcaaaggtgcacaggatgacattc

SEQ ID NO: 790546 - DNA, 75 bp, synthetic construct
  source 1..75: mol_type = other DNA
gtacacccgtattcaggaaactggcctctactttaaccacgcgattgttaacccaccgatcgatcgtcatttgcc

SEQ ID NO: 790547 - DNA, 75 bp, synthetic construct
  source 1..75: mol_type = other DNA
cctgcgccagcaacgcgacgccatcgctgagtggtcacgcctgagctatggctggatgggccgtaccccagacta

SEQ ID NO: 790548 - DNA, 75 bp, synthetic construct
  source 1..75: mol_type = other DNA
cagacatgcctgatgaagtgcgcgcaaagctgcacaaaatcaccggtctgtttctgcgtgacgctggtgatgccg

SEQ ID NO: 790549 - DNA, 75 bp, synthetic construct
  source 1..75: mol_type = other DNA
acggaccaaatacccgtccctcaatccacgccgtcggtttatccccgctggcgcggggaacacaattgagacgtt

SEQ ID NO: 790550 - DNA, 75 bp, synthetic construct
  source 1..75: mol_type = other DNA
atatttcggatcaatacagcccgttttacacctgcataatcagtcgggtcagggattcaacccatgttctcgatg

SEQ ID NO: 790551 - DNA, 75 bp, synthetic construct
  source 1..75: mol_type = other DNA
acggtgaattgccggatgtggaaatatctgacaaaggagtaaaaatctcccctctggataattgtgttctgaacc

SEQ ID NO: 790552 - DNA, 75 bp, synthetic construct
  source 1..75: mol_type = other DNA
tcgcccttaggctgggagcacatcaatctgacaggagattatatctggaaaagcaaccggatacccgcttccggt

SEQ ID NO: 790553 - DNA, 75 bp, synthetic construct
  source 1..75: mol_type = other DNA
cagggtttatccctgaaagctggcgaaaactggtgctcacgccttcaggcatcgaccgcaagtactacgagtttt

SEQ ID NO: 790554 - DNA, 75 bp, synthetic construct
  source 1..75: mol_type = other DNA
cagccgcgtgcgggattcaacacacgtacttgatggtctgctgtaccacgaaactgatctggaaattacagagca

SEQ ID NO: 790555 - DNA, 75 bp, synthetic construct
  source 1..75: mol_type = other DNA
tgagggtgagcaaccttcacggctggcctggctgctccagcctccgggaaaaattaatggtaaaaatgtcctgca

SEQ ID NO: 790556 - DNA, 75 bp, synthetic construct
  source 1..75: mol_type = other DNA
ttacgaaaagtcccggcgacagctccgcttgagtttgttcctgaaagctggcgaaaagtggtgataactcccact

SEQ ID NO: 790557 - DNA, 75 bp, synthetic construct
  source 1..75: mol_type = other DNA
aatcaacggtaagaatgtactgcaacacattgatcggctgaacagtattgaatcactggcattgccggaaggtat

SEQ ID NO: 790558 - DNA, 75 bp, synthetic construct
  source 1..75: mol_type = other DNA
ttatgctcgactggttccgcgacccggctctgcgtcggcgggtacaggcggggctgaataaaggcgaagcccgta

SEQ ID NO: 790559 - DNA, 75 bp, synthetic construct
  source 1..75: mol_type = other DNA
acgcgctggcgcgtgcggtattcctgcaccggctgggtgaaatcagggaccgaaaaccggaaaatcagagctatc

SEQ ID NO: 790560 - DNA, 75 bp, synthetic construct
  source 1..75: mol_type = other DNA
attctggggagacgggacaacatcatcatcagatggacagaatttcagaacaggcagcactggccgctacgcagg

SEQ ID NO: 790561 - DNA, 75 bp, synthetic construct
  source 1..75: mol_type = other DNA
tatgactctgcttcagtccagacttgaagaggtcaatgccatggctgcccttggtgaactgcccgatgtggaaat

SEQ ID NO: 790562 - DNA, 75 bp, synthetic construct
  source 1..75: mol_type = other DNA
ccctggcaggagttcatcaacagcctggaagaaacacggtttctgtcccgtaagggcaatttcgacccgcttcac

SEQ ID NO: 790563 - DNA, 75 bp, synthetic construct
  source 1..75: mol_type = other DNA
taaaggcgatggttgtggtcattgtgctgcatgtaatctgcgcgctaacggattgaatcattatctggccgacaa

SEQ ID NO: 790564 - DNA, 75 bp, synthetic construct
  source 1..75: mol_type = other DNA
attacggtcagcgacatcgcgcagaaatcgacgtggcacgcgaactggcgctgaaactgggagcacgcgcgcata

SEQ ID NO: 790565 - DNA, 75 bp, synthetic construct
  source 1..75: mol_type = other DNA
ggaagaaatgctcagctggctacataacaataatgttattttcccttctgttgaagtgatcgaacggacgcttgc

SEQ ID NO: 790566 - DNA, 75 bp, synthetic construct
  source 1..75: mol_type = other DNA
ggcgcggggaacacatcaagttgcgatgcttcttttctgtaaccctcggtttatccccgctggcgcggggaacac

SEQ ID NO: 790567 - DNA, 75 bp, synthetic construct
  source 1..75: mol_type = other DNA
tcagtaagccagcgtggttcgctcggtttatccccgctggcgcggggaacacactaagcatacataactgttttt

SEQ ID NO: 790568 - DNA, 75 bp, synthetic construct
  source 1..75: mol_type = other DNA
aacgggttgaatcattatctggccgataaaccgacggtgatggcagcgatgaagcagaaaaccgggttgaagtaa

SEQ ID NO: 790569 - DNA, 75 bp, synthetic construct
  source 1..75: mol_type = other DNA
ctgggcctgaccaagatggcggagtcttgccccggcacgacctacgccaagctggcttggctgcaagcctggcac

SEQ ID NO: 790570 - DNA, 75 bp, synthetic construct
  source 1..75: mol_type = other DNA
aatacagtacgctgcgtaaatacgccccccggatgctggccgcgttgcagttcattgcttcacccgccgcaatgc

SEQ ID NO: 790571 - DNA, 75 bp, synthetic construct
  source 1..75: mol_type = other DNA
ggacagacagaggctttttgcttgcggaggaaatgctctcctggctccaccttaataaggttattttcccttctg

SEQ ID NO: 790572 - DNA, 75 bp, synthetic construct
  source 1..75: mol_type = other DNA
cggatattgcgctcattaataagcaccgaaggccagcgaatcgcctgggctttgctgtattactctgttatctgc

SEQ ID NO: 790573 - DNA, 75 bp, synthetic construct
  source 1..75: mol_type = other DNA
atgtctggcgtaataatcttaaactgggtacagggaagtaccgaccattacgtagtgtcgatatcgaatcgtaca

SEQ ID NO: 790574 - DNA, 75 bp, synthetic construct
  source 1..75: mol_type = other DNA
ttgggcaggctatcctggatgcacgcaacgcaggcgacgatcctctgtctgctgttgaacagatattaccgtggg

SEQ ID NO: 790575 - DNA, 75 bp, synthetic construct
  source 1..75: mol_type = other DNA
ggcgtcactatttacacgcacacacgcaaagcgccggacacggccaaagctgacagcggtaataaaaatgatggg

SEQ ID NO: 790576 - DNA, 75 bp, synthetic construct
  source 1..75: mol_type = other DNA
ggacactactgtaccgggtcaggtttcctgccgggtttcgcaggacgtgtactcagctgacggactcgtaaggct

SEQ ID NO: 790577 - DNA, 75 bp, synthetic construct
  source 1..75: mol_type = other DNA
cagcagcaaaaacaggctgaaatggcactgaatcagttgattaatcgttatcagatggagctcgcaggcaaaccg

SEQ ID NO: 790578 - DNA, 75 bp, synthetic construct
  source 1..75: mol_type = other DNA
ttggccggtggtggagcagatcttgatgtcagcgtgaaagaggcggacggctcggtaaccacctatctggtgcct

SEQ ID NO: 790579 - DNA, 75 bp, synthetic construct
  source 1..75: mol_type = other DNA
tacgaggttcactatggctcgcatcgaacaggaagtgatgatttttgtcgtggggggtgtaacagtcgtttaacc

SEQ ID NO: 790580 - DNA, 75 bp, synthetic construct
  source 1..75: mol_type = other DNA
tacgaccagcagggcgacgcaatcagtatctacgtcgttcgtgacctcgatttcagtgatatttactcactggca

SEQ ID NO: 790581 - DNA, 75 bp, synthetic construct
  source 1..75: mol_type = other DNA
agcccgtaaccagaatggcagtgaacagcagcaaaaacaggctgaaatggcgctgaatcagttgattaatcgtta

SEQ ID NO: 790582 - DNA, 75 bp, synthetic construct
  source 1..75: mol_type = other DNA
tgtatgttgtttctgaaacaaaaacagagcccacactcttccttcaaaaatccccgctcacgtttttgaaaacgt

SEQ ID NO: 790583 - DNA, 75 bp, synthetic construct
  source 1..75: mol_type = other DNA
cagggtgaagtatcgtcgccggtaacccttccggctcaggcactccggtctgatgctccggatgtacaggaacat

SEQ ID NO: 790584 - DNA, 75 bp, synthetic construct
  source 1..75: mol_type = other DNA
tggactgacctttccgggcaacagataaagcggctggctgaattgccgccagcctataacctgcaacgcagtgcg

SEQ ID NO: 790585 - DNA, 75 bp, synthetic construct
  source 1..75: mol_type = other DNA
tgtatgttgtttctgaaacaaaaacagagcccacaccctcccttcagaaatccccgtccatgtttctgaagccgt

SEQ ID NO: 790586 - DNA, 75 bp, synthetic construct
  source 1..75: mol_type = other DNA
aaagacgtaaacgaagcctttcgaagtaagaagaacggaataaaaaacaatcaaaataactttaagaaaccctcg

SEQ ID NO: 790587 - DNA, 75 bp, synthetic construct
  source 1..75: mol_type = other DNA
tgtcggcagaagcgaccgtggtgcgtggttatatcgactggatggtacaggtgccgtggaatgcgcgtagcaagg

SEQ ID NO: 790588 - DNA, 75 bp, synthetic construct
  source 1..75: mol_type = other DNA
cgaatttgaactgccagaaattaccgataatgaactgttagtgagtgtaatttctgacagcgtctgtttatccac

SEQ ID NO: 790589 - DNA, 75 bp, synthetic construct
  source 1..75: mol_type = other DNA
gaaaccgtactcaatttgccggatattcccggcggcaaaaaactcatttataacggcgtcaccatgccgctgacc

SEQ ID NO: 790590 - DNA, 75 bp, synthetic construct
  source 1..75: mol_type = other DNA
ctatatgattattcccgaaatcgcgattaatttaggctgtgtattaccgtatcacggctcttattttgctgcggc

SEQ ID NO: 790591 - DNA, 75 bp, synthetic construct
  source 1..75: mol_type = other DNA
tgttgcagattttttaccggatcaatttcatattgggatcaatatttcaccagcgcattttctgtccccggggct

SEQ ID NO: 790592 - DNA, 75 bp, synthetic construct
  source 1..75: mol_type = other DNA
tgctattcctgcaatacaattccgctcagggaacattgtcctgtcagccaacgggaaaaatgttacaatgtcctc

SEQ ID NO: 790593 - DNA, 75 bp, synthetic construct
  source 1..75: mol_type = other DNA
atatcgacgacaaacgcctggcgcaggtacagaagctgctgccggtggagctggcggccagcaaaggcattgagc

SEQ ID NO: 790594 - DNA, 75 bp, synthetic construct
  source 1..75: mol_type = other DNA
atggtcaagcattcgggtgagcattcagtggcgtctaatctttcgctggcgcgatggccatgcttacgacattta

SEQ ID NO: 790595 - DNA, 75 bp, synthetic construct
  source 1..75: mol_type = other DNA
aaaccgtgtcggtcaggtaactggtctggcgtggacggaagtgggcggtgacttgctgaccattgaaaccgcgtg

SEQ ID NO: 790596 - DNA, 75 bp, synthetic construct
  source 1..75: mol_type = other DNA
gcgttcagcgaccactatctggaagtggattacgaccttagcgatgtgatgtttgtggcgacgtcgaactccatg

SEQ ID NO: 790597 - DNA, 75 bp, synthetic construct
  source 1..75: mol_type = other DNA
cggctggttgaggaaacgcacggcatctggaatgaacaggccgagaaatatctgctggcacaatttggcgttgat

SEQ ID NO: 790598 - DNA, 75 bp, synthetic construct
  source 1..75: mol_type = other DNA
ttcaacggacgatatgaaagaggcgatagcccttagcgccacggggcagttgcagccgtcgtttatggttaccca

SEQ ID NO: 790599 - DNA, 75 bp, synthetic construct
  source 1..75: mol_type = other DNA
agaacggtgaacttgctacgttctatgtatctggaacacggagcgcacaaataccagccattattgaaaagccgc

SEQ ID NO: 790600 - DNA, 75 bp, synthetic construct
  source 1..75: mol_type = other DNA
cagcccctgccgcactcccgtctggtgtatgttgtttctgaaacaaaagcagggcccacaccctcccttcaaaaa

SEQ ID NO: 790601 - DNA, 75 bp, synthetic construct
  source 1..75: mol_type = other DNA
aggaagcagggttgcaaatgataaagctgttggctggaactggaatagcggcgtttatgatgcagatatcagtgg

SEQ ID NO: 790602 - DNA, 75 bp, synthetic construct
  source 1..75: mol_type = other DNA
tagtaaagattatcaactgagttattccaataactggcggcggataagctataccctcgcggcaagccaggcgta

SEQ ID NO: 790603 - DNA, 75 bp, synthetic construct
  source 1..75: mol_type = other DNA
ggataagctataccctcgcggcaagccaggcgtatgacgagaatcatcatgaagagaaacgttttaatattttta

SEQ ID NO: 790604 - DNA, 75 bp, synthetic construct
  source 1..75: mol_type = other DNA
acagcacgcacgattggcggtgtggcatttgatggctcggccaatatcaatcttccaggtgtaaatacaacaggt

SEQ ID NO: 790605 - DNA, 75 bp, synthetic construct
  source 1..75: mol_type = other DNA
tgacgagaatcatcatgaagagaaacgttttaatatttttatatcgattccctttgattggggtgatgacgttac

SEQ ID NO: 790606 - DNA, 75 bp, synthetic construct
  source 1..75: mol_type = other DNA
cgaaggcgagttattcattggctggagcggcacgagcggtgcccatgcgcccgtacatatccgttcgcggcggga

SEQ ID NO: 790607 - DNA, 75 bp, synthetic construct
  source 1..75: mol_type = other DNA
ttggtgaacgtgggcgcgaagtaaaagattttattgagaatatcctcggtgccgaagggcgtgcacgctccgtgg

SEQ ID NO: 790608 - DNA, 75 bp, synthetic construct
  source 1..75: mol_type = other DNA
acctgtgtgattgaacgccagaacggcactgaaactcacgaagtagaaagcgaagtggttggctttaatggtcaa

SEQ ID NO: 790609 - DNA, 75 bp, synthetic construct
  source 1..75: mol_type = other DNA
acaggttatcgaccatcagactgtacaggcctgggcggacagcctcagtactgacaatccgttaccggtgccacg

SEQ ID NO: 790610 - DNA, 75 bp, synthetic construct
  source 1..75: mol_type = other DNA
aagccctggacgatgtgacatccggacaggtcatcgaccatcaggctgtacaggcctgggcggacagcctcagta

SEQ ID NO: 790611 - DNA, 75 bp, synthetic construct
  source 1..75: mol_type = other DNA
cgtcgctacgggcgattaactcgcgctaccgggctggtgctggaagccaccggattacaattgccgctcggcgca

SEQ ID NO: 790612 - DNA, 75 bp, synthetic construct
  source 1..75: mol_type = other DNA
agttgccactcggtccggcgttattaggtcgcgttctggatggcagcggtaaaccgcttgatggccttccctccc

SEQ ID NO: 790613 - DNA, 75 bp, synthetic construct
  source 1..75: mol_type = other DNA
atgcaaatagtgcatccataccagacagcgaaacaggatgcggcattattccactggctggcgcagttattgagg

SEQ ID NO: 790614 - DNA, 75 bp, synthetic construct
  source 1..75: mol_type = other DNA
tcatgcgtcagactggataacactttcaggtcagcagataacgcgactgacagaactaccgccgacatacaacct

SEQ ID NO: 790615 - DNA, 75 bp, synthetic construct
  source 1..75: mol_type = other DNA
gctgactgtcagcgttgccattccgggatggcagtttctgacacagccatcactggcagagcagcaactgagggt

SEQ ID NO: 790616 - DNA, 75 bp, synthetic construct
  source 1..75: mol_type = other DNA
aaacaggtcagaagataagctagtcatcgcgcctaaacaatggtacatatccggaaatgaatgctctcttaaaaa

SEQ ID NO: 790617 - DNA, 75 bp, synthetic construct
  source 1..75: mol_type = other DNA
aagagcagttacgtgctataatgaagtccgtaaccagaatggcagtgaacagcagcaaaaacaggctgaaatggc

SEQ ID NO: 790618 - DNA, 75 bp, synthetic construct
  source 1..75: mol_type = other DNA
cagcagcagattcagcaggctgagcagcacctgcgggctcaagtctatatgctggcgcaggaaaaacatcgtgag

SEQ ID NO: 790619 - DNA, 75 bp, synthetic construct
  source 1..75: mol_type = other DNA
cagcaactgatggtacttttccccgacaatccccgtgttcaggaaatggtggataactggcagaagagcgtaagg

SEQ ID NO: 790620 - DNA, 75 bp, synthetic construct
  source 1..75: mol_type = other DNA
tacagttccgcgtgaattacaggaacggtggtattttttatcgttcagcgcgtgatggttacggattcgaagctg

SEQ ID NO: 790621 - DNA, 75 bp, synthetic construct
  source 1..75: mol_type = other DNA
tccaccagaaagctacccagtcggcgcaccaatcccgtggccatcagataccgttccgtctggttatgccctgat

SEQ ID NO: 790622 - DNA, 75 bp, synthetic construct
  source 1..75: mol_type = other DNA
aggagatggggagctgcttgtttgtacggtgaatatccctgctggagtatcagccattacccaggagatgattga

SEQ ID NO: 790623 - DNA, 75 bp, synthetic construct
  source 1..75: mol_type = other DNA
atgcgacgctgacgcgtcttatctggcctacaaagggctaacgtgcaggtttttagcttcaggtaatattgcgta

SEQ ID NO: 790624 - DNA, 75 bp, synthetic construct
  source 1..75: mol_type = other DNA
ggttatgtttcatacagttctccacgcaccggacatgtttttcaggacggttcccgcccggagacagtgatgacc

SEQ ID NO: 790625 - DNA, 75 bp, synthetic construct
  source 1..75: mol_type = other DNA
cgacaccgcgacgaaattgaaaacagccataaacattaatggcgtcaggttcgatggttctggtgacattaatat

SEQ ID NO: 790626 - DNA, 75 bp, synthetic construct
  source 1..75: mol_type = other DNA
taaagccccccagacctcccgcacgttcgagcttcagcgcgactggccaactcacccctcgcggggtatgaccat

SEQ ID NO: 790627 - DNA, 75 bp, synthetic construct
  source 1..75: mol_type = other DNA
gcgtggtgctgctcgacgaagtggaaaaggcgcaccgcgacgtaatgaacctgttctatcaggtatttgaccggg

SEQ ID NO: 790628 - DNA, 75 bp, synthetic construct
  source 1..75: mol_type = other DNA
gctggcgctggatgtggacgcccgcgccgtcgccacggtggtggcggactggaccggcatcccgctctcttccct

SEQ ID NO: 790629 - DNA, 75 bp, synthetic construct
  source 1..75: mol_type = other DNA
atttcattacattctatcctggcctgcgcatgagagtccgcgtccggagcagctttttgactgtgtgcgtcatac

SEQ ID NO: 790630 - DNA, 75 bp, synthetic construct
  source 1..75: mol_type = other DNA
tgcccggcttcctcgcctgctggaagcggctgaacgcggcgacctagcggctcaggctgaccttttcgaagatat

SEQ ID NO: 790631 - DNA, 75 bp, synthetic construct
  source 1..75: mol_type = other DNA
gaagaaaagcagatcgccgcgatggtggccagctggttcgctgaccttcaggaaatggaagatattaccctgaac

SEQ ID NO: 790632 - DNA, 75 bp, synthetic construct
  source 1..75: mol_type = other DNA
ccggcagcaaagccgcctgggagcgggcgcgtacagccagccaggcatggtcacagcgagaaaacgacgtcgcct

SEQ ID NO: 790633 - DNA, 75 bp, synthetic construct
  source 1..75: mol_type = other DNA
ggcgcgcacagccagccaggcatggtcacagcgggagaatgacgtcgcctcttccctgcagtcctgcctgtcccg

SEQ ID NO: 790634 - DNA, 75 bp, synthetic construct
  source 1..75: mol_type = other DNA
cttcttgagaaaaaaagtattcgctatcagttaagtgatgcaaatttaaccaatagatatcgtaatgatactagt

SEQ ID NO: 790635 - DNA, 75 bp, synthetic construct
  source 1..75: mol_type = other DNA
acctgctgaaaccggcgctggcaaggggcgaactgcgcaccatcgccgccacaacgtggagcgaatacaaacagt

SEQ ID NO: 790636 - DNA, 75 bp, synthetic construct
  source 1..75: mol_type = other DNA
gacaccttaccccgctcggtccgcgaacgtccgcagctttctgaaccactgacggcgcttatcagacaggcgtgg

SEQ ID NO: 790637 - DNA, 75 bp, synthetic construct
  source 1..75: mol_type = other DNA
gcttaccgccgcctgcctgctgccggataccggggcgcgcaatatcgacagcctcctgaaccagcaaatcctgcc

SEQ ID NO: 790638 - DNA, 75 bp, synthetic construct
  source 1..75: mol_type = other DNA
gttaatgacgctggattacatgcaggatcaggaaggcggatggcagcctgtaccgaaggatatttttacccaggt

SEQ ID NO: 790639 - DNA, 75 bp, synthetic construct
  source 1..75: mol_type = other DNA
gagtacattgcccggcaggcacactatgcaaaagatgacactgatcctgtttttcactacatcctttcctggcag

SEQ ID NO: 790640 - DNA, 75 bp, synthetic construct
  source 1..75: mol_type = other DNA
gggtccatgcgccgggaaatcgtatcgttcgcaaaaccgccgttgaacgtgatcgccagaacgcgtggacacgcg

SEQ ID NO: 790641 - DNA, 75 bp, synthetic construct
  source 1..75: mol_type = other DNA
cccggaaaaaatcgctgaaacagaaagtctgcagcagtatgcctgtcgtcaccttggagaacgtctgccggaaat

SEQ ID NO: 790642 - DNA, 75 bp, synthetic construct
  source 1..75: mol_type = other DNA
gaattactttctaaggacgattccattgaaagacagtttttcatctatgaacgcatccagacgaagattgcgatc

SEQ ID NO: 790643 - DNA, 75 bp, synthetic construct
  source 1..75: mol_type = other DNA
gggtgaatatggtcataaatatgttacaagtaatttcgatattgaaaaatgtgtcgaaaaatatcaggctgtata

SEQ ID NO: 790644 - DNA, 75 bp, synthetic construct
  source 1..75: mol_type = other DNA
ttcttcccaaaatggcaggttctcaaaaattttgccatatgcttctctcaaaaatagaggggtatgaaaaatttg

SEQ ID NO: 790645 - DNA, 75 bp, synthetic construct
  source 1..75: mol_type = other DNA
tttccaaagatgatacagatcctgtttttcactatattctctcctggcctgcgcacgaaagtccgcgttctgagc

SEQ ID NO: 790646 - DNA, 75 bp, synthetic construct
  source 1..75: mol_type = other DNA
tgaggttccgcaccggaatcgcttcagacgtcttgttgattatgcaacacgtctgcgtaatgaaaaatttgtttc

SEQ ID NO: 790647 - DNA, 75 bp, synthetic construct
  source 1..75: mol_type = other DNA
tcaacacgggcatctggtactgcatgatggatttgataaacaacagacaccagtacgtgcagacagtgtgtggcc

SEQ ID NO: 790648 - DNA, 75 bp, synthetic construct
  source 1..75: mol_type = other DNA
gcggggctatcgcaattacatggatagtaacacttacagagatggagctcagccagttcaggatagtgagaatcg

SEQ ID NO: 790649 - DNA, 75 bp, synthetic construct
  source 1..75: mol_type = other DNA
aacaggcggcgcaaggcgacagagctgcagtgtcacagctccgaggctgggattatcgcgatcgtcgctcgcgta

SEQ ID NO: 790650 - DNA, 75 bp, synthetic construct
  source 1..75: mol_type = other DNA
ggaaccaggcttccggcgcgatcctgagattcgtcgtgagcgccgtgaagcccgtgcagctgcgcgggaagattt

SEQ ID NO: 790651 - DNA, 75 bp, synthetic construct
  source 1..75: mol_type = other DNA
ttatgattcgtttattacgcaactggaagctcctgtacagaatgcagaagggcgtgaacgtctgatggcggtaaa

SEQ ID NO: 790652 - DNA, 75 bp, synthetic construct
  source 1..75: mol_type = other DNA
tttgaaggtgtcggcgtaaatgagaagggaatcgttgtttctgttactggtaaggatgccccagccgttaaatcc

SEQ ID NO: 790653 - DNA, 75 bp, synthetic construct
  source 1..75: mol_type = other DNA
gaccttgaagcagcgaaaaaacactctctgctgaaatctcacggctacgacgtggcgatcgcgctggagtcataa

SEQ ID NO: 790654 - DNA, 75 bp, synthetic construct
  source 1..75: mol_type = other DNA
cttagagcgtgtctttaaggacactctttacgcgaatgtgaagcgtgtcgctgactcgtttcctccgaccgttct

SEQ ID NO: 790655 - DNA, 75 bp, synthetic construct
  source 1..75: mol_type = other DNA
ctgctgggataccagttttctccacgcctggctgatgccggtgcttcggttttctggcgaatggaccatgatgcc

SEQ ID NO: 790656 - DNA, 75 bp, synthetic construct
  source 1..75: mol_type = other DNA
ggcatctggaatgagcaggccgagaaatatctgctggcgcaacttggcgttgatatcggggaggccgcgcaatga

SEQ ID NO: 790657 - DNA, 75 bp, synthetic construct
  source 1..75: mol_type = other DNA
ggcgatccgcttcctcggtctggaaaagaaaacccgtttctatcaggcttccacctctgaactgtacggtctggt

SEQ ID NO: 790658 - DNA, 75 bp, synthetic construct
  source 1..75: mol_type = other DNA
actgccgcgcgaactgttcgaagaacaggctaaacgccgcgtagttgttggcctgctgctgggcgaagttatccg

SEQ ID NO: 790659 - DNA, 75 bp, synthetic construct
  source 1..75: mol_type = other DNA
gtcgctctggaagaacaggctgttgaagcgattctggcgaaagcgaaagtgactgaaaaagaaaccactttcaac

SEQ ID NO: 790660 - DNA, 75 bp, synthetic construct
  source 1..75: mol_type = other DNA
taacaatacctttaatcccaatttatccgcaacagtattcctgattggtttccagttatcaaaaggcatatcagg

SEQ ID NO: 790661 - DNA, 75 bp, synthetic construct
  source 1..75: mol_type = other DNA
caacgcaggccgttcatcatgcagccgtgcagctcgccgcgctcgactggctcgaccaggacgcggcgcggcagc

SEQ ID NO: 790662 - DNA, 75 bp, synthetic construct
  source 1..75: mol_type = other DNA
caatatgttcacgatcctgtactaccaggctgaaactggtcgagcgacgccggaggacttccaggaggcgttgaa

SEQ ID NO: 790663 - DNA, 75 bp, synthetic construct
  source 1..75: mol_type = other DNA
agaaaaacccgcagcatatgccagccagcttgaggatcttcgtgagcgtcttgcactcctcgaatggcagattaa

SEQ ID NO: 790664 - DNA, 75 bp, synthetic construct
  source 1..75: mol_type = other DNA
gcctggttactaatgcagtggttctgtggaacacgctctatatggaggaagcgttgagctggatgcgccgtaatg

SEQ ID NO: 790665 - DNA, 75 bp, synthetic construct
  source 1..75: mol_type = other DNA
gcgcattatccgggcatggtgtactgggattataactggcgaaaacagggcggctcttcccgcatgattgaaatc

SEQ ID NO: 790666 - DNA, 75 bp, synthetic construct
  source 1..75: mol_type = other DNA
cagatgtcgatggatttcaatatcatgacacgcctggatgtctgtaaggcgaaagtcagaattgccgaacgtacg

SEQ ID NO: 790667 - DNA, 75 bp, synthetic construct
  source 1..75: mol_type = other DNA
tttagtcgctcttggcggcgtagtgcttggcggtttactggactatctggcgctacgtaaaacacacctgacgta

SEQ ID NO: 790668 - DNA, 75 bp, synthetic construct
  source 1..75: mol_type = other DNA
ggcactcaatctggcgtagcaatgccttcttggcaaaccgttgaagaggcacgtgtgttgctgggggtgaaatga

SEQ ID NO: 790669 - DNA, 75 bp, synthetic construct
  source 1..75: mol_type = other DNA
atttaattcgtaaggatgagaatattcgctttgctgaacaacacggcgtgccgtttattgatgctgattacgaca

SEQ ID NO: 790670 - DNA, 75 bp, synthetic construct
  source 1..75: mol_type = other DNA
gtcgctgattatattccggcactggcaaccgtcgatggttcccgtctggggattgctatctgtaccgttgatggg

SEQ ID NO: 790671 - DNA, 75 bp, synthetic construct
  source 1..75: mol_type = other DNA
tccttcacgctggcagaactggtgaccaaaggtcatctgagaccattaaaagaggcgtcagaggcagaaaacgtt

SEQ ID NO: 790672 - DNA, 75 bp, synthetic construct
  source 1..75: mol_type = other DNA
atgatgcaggtaactcgcttgccggtatcgcagtacttgaacaattgacgaaacaattaggacgctcggtttatt

SEQ ID NO: 790673 - DNA, 75 bp, synthetic construct
  source 1..75: mol_type = other DNA
gggaggtggagaagtggcatcagctgacggcatgcgttttgtcacaccagtgaagactatcaactcaggatctaa

SEQ ID NO: 790674 - DNA, 75 bp, synthetic construct
  source 1..75: mol_type = other DNA
gaatatcgatcttaaaactattggtttcttctctctggtgggccaggcttacgtatttaaattcctctggtcgcc

SEQ ID NO: 790675 - DNA, 75 bp, synthetic construct
  source 1..75: mol_type = other DNA
gctgatggaccgctatactccgccgtttctcgggcgacggcgcggctggctgctcgccacgcaagcgttattgtt

SEQ ID NO: 790676 - DNA, 75 bp, synthetic construct
  source 1..75: mol_type = other DNA
atgatcagtgatctactccctccggtggatttaacggagttgctgctcgaaattaacgcccataccggatttgct

SEQ ID NO: 790677 - DNA, 75 bp, synthetic construct
  source 1..75: mol_type = other DNA
tttttccggctcacggtaacctgcctgactctcccgggctatttttcaccggaattattttactgatatcatgcc

SEQ ID NO: 790678 - DNA, 75 bp, synthetic construct
  source 1..75: mol_type = other DNA
tgtcagaagtcgcggcgaaggatgagtttctgaatatcaaaaatgtcagccgcgatgacatgatggcagcacatc

SEQ ID NO: 790679 - DNA, 75 bp, synthetic construct
  source 1..75: mol_type = other DNA
tacagcgcttcgtgcgctgctgttaagccgcaagaatccgtttggcgatatcaaatcggatggcacggtgaaaac

SEQ ID NO: 790680 - DNA, 75 bp, synthetic construct
  source 1..75: mol_type = other DNA
ctccgcaacgcaatgaaaagcgccaaaggccctggcaacttccgcaatctgtttatgtactcgcctaacggcaaa

SEQ ID NO: 790681 - DNA, 75 bp, synthetic construct
  source 1..75: mol_type = other DNA
ccagtcattgccagaaggctggggttctgtgtcattaagtacgttatggcgagattactgggggcgtagcggcag

SEQ ID NO: 790682 - DNA, 75 bp, synthetic construct
  source 1..75: mol_type = other DNA
ctggaatatcggtgtttttcgtttagatttcagcgttccgcaagcctgggttgatgaactggaaagtggttatgt

SEQ ID NO: 790683 - DNA, 75 bp, synthetic construct
  source 1..75: mol_type = other DNA
ggccagttaatcaagttgctggcatcaccagcaaaatacacccgccgtggggttgatgattcaattttctggttt

SEQ ID NO: 790684 - DNA, 75 bp, synthetic construct
  source 1..75: mol_type = other DNA
cattccgcacccgctgctgtcccgtcaggatttcagccgttttgctctcgactatctggtcttcggcaacgcttt

SEQ ID NO: 790685 - DNA, 75 bp, synthetic construct
  source 1..75: mol_type = other DNA
ttcagggaggtaaatgactggctcggcatggaggtcatcagattcaaagagtacaccctcgacaacccagaataa

SEQ ID NO: 790686 - DNA, 75 bp, synthetic construct
  source 1..75: mol_type = other DNA
tcgatttcagtacaccagtaactcagtaggagatggtgttaattttgttgctgtcagaccgcgaaatattgcatt

SEQ ID NO: 790687 - DNA, 75 bp, synthetic construct
  source 1..75: mol_type = other DNA
cattccgcacccgttattatcccgtcaggatttcagccgctttgcgctcgactatctggtgtttggcaacgcctt

SEQ ID NO: 790688 - DNA, 75 bp, synthetic construct
  source 1..75: mol_type = other DNA
ttcagggaggtaaacgactggctcggtatggaggtcatcaggttcaaagagtacaccctcgacaacccggaataa

SEQ ID NO: 790689 - DNA, 75 bp, synthetic construct
  source 1..75: mol_type = other DNA
ccttcaactcagcaaaagttcgatttattcaacaaagcccatcgatatttatgtcaataagcaatggcgcgggaa

SEQ ID NO: 790690 - DNA, 75 bp, synthetic construct
  source 1..75: mol_type = other DNA
atcggtatctggaactgaaagcctttaatggggcacttcagaaagaatgcatccagcatctgctccctctgtctg

SEQ ID NO: 790691 - DNA, 75 bp, synthetic construct
  source 1..75: mol_type = other DNA
attttggggcgagttgctgccaaattagcacgtgttggaaaggtgatccacactgtacatggtttttcttttcca

SEQ ID NO: 790692 - DNA, 75 bp, synthetic construct
  source 1..75: mol_type = other DNA
gtattctggttgggccggatgcctcgaaagagaagctgaaaggctcgctgggtgagctgaagcaactttctggct

SEQ ID NO: 790693 - DNA, 75 bp, synthetic construct
  source 1..75: mol_type = other DNA
ggatatttcagataaaggtgtaaagatcaccccactggataacagcgttccttcaacagtctctcccctggccga

SEQ ID NO: 790694 - DNA, 75 bp, synthetic construct
  source 1..75: mol_type = other DNA
agcgcttgatgcgctactggtgacaactgaaaaacaaatctcccgtttgacgtggttgcttcagcctccgggaaa

SEQ ID NO: 790695 - DNA, 75 bp, synthetic construct
  source 1..75: mol_type = other DNA
ggcattgaccggcaatactatgaaatttgcgcaatgaatgagctgaaggggacactgcgagcgggtgatatctgg

SEQ ID NO: 790696 - DNA, 75 bp, synthetic construct
  source 1..75: mol_type = other DNA
ggatttggggatgtggaaaaggcgagtaaggtgtttgtccgtaacgaattgataccgctgcaaaagcgaattaaa

SEQ ID NO: 790697 - DNA, 75 bp, synthetic construct
  source 1..75: mol_type = other DNA
gcacaacgccaacagaagctacggcaccgaaaaacacaggcgtaagtgccgaggctttcagctttggcgatccga

SEQ ID NO: 790698 - DNA, 75 bp, synthetic construct
  source 1..75: mol_type = other DNA
atggacagatggtatgaacctccggtgagttttgacggactggcacggacctatcgtgccgccgtgcatcacagc

SEQ ID NO: 790699 - DNA, 75 bp, synthetic construct
  source 1..75: mol_type = other DNA
cggttatcgggtttatacgtcgccatccacgccggtgcagggtaaaattacccgtattctggttgggccagatgc

SEQ ID NO: 790700 - DNA, 75 bp, synthetic construct
  source 1..75: mol_type = other DNA
tgtgcttgaaatacttattttgcattgtgctgatgatgttcgtgattattatctgtcgttatgtgatgaaaaaag

SEQ ID NO: 790701 - DNA, 75 bp, synthetic construct
  source 1..75: mol_type = other DNA
aagggctcggcaattttaagaatctgtttttctacgcaccgcacggtaaaccggatgggattaaaattgtgccgc

SEQ ID NO: 790702 - DNA, 75 bp, synthetic construct
  source 1..75: mol_type = other DNA
ggcaaagagcctgcgctctgccgtgcatcacagctcgccaatttatgttaagcgtaacgtgctcgcgagcaccta

SEQ ID NO: 790703 - DNA, 75 bp, synthetic construct
  source 1..75: mol_type = other DNA
gtctgaattactggcaaccgctattagcggcgatgccgggttaaccatccagggcggcgcatctactactgaaga

SEQ ID NO: 790704 - DNA, 75 bp, synthetic construct
  source 1..75: mol_type = other DNA
gatctggcggaaggtgccgaagcaacggtgatcgaacattttgtcagccttaatgatgctcgtcacttcaccggc

SEQ ID NO: 790705 - DNA, 75 bp, synthetic construct
  source 1..75: mol_type = other DNA
atgcccagcagatgatcatttacgcctttgctgccgaactgacggaagcactgcgtgatgaagggcttaaacagc

SEQ ID NO: 790706 - DNA, 75 bp, synthetic construct
  source 1..75: mol_type = other DNA
aatatccccgtcttgctacagcatatccatcagggaaactacctgatctccgcggtgagtttattcgtggctggg

SEQ ID NO: 790707 - DNA, 75 bp, synthetic construct
  source 1..75: mol_type = other DNA
ccacaatgaccgccagcgcaccgcaaaaaatggaggcgtttacctttggtgagccgtcccccgttctggatcgcc

SEQ ID NO: 790708 - DNA, 75 bp, synthetic construct
  source 1..75: mol_type = other DNA
ttcgagttttaacaacccgcaccagttcgcacccggctcggtgtttcacctgctggagcctgacatcaatcagga

SEQ ID NO: 790709 - DNA, 75 bp, synthetic construct
  source 1..75: mol_type = other DNA
ccgccgagtatgtaaagcgtctgcgtgaagagtgcctgcgggagaataaacccctgcaccgccatacccgcgtca

SEQ ID NO: 790710 - DNA, 75 bp, synthetic construct
  source 1..75: mol_type = other DNA
cacggattcgcgccggataatggctgctttgtgcatgcacccggcaaccgtattgtgcgcaaaacagcgctggta

SEQ ID NO: 790711 - DNA, 75 bp, synthetic construct
  source 1..75: mol_type = other DNA
tgacgtccctcaccgcaaccgtttcagacgccttgtcgactatgcaacacgcctgcgtaacgaaaaatttgtctc

SEQ ID NO: 790712 - DNA, 75 bp, synthetic construct
  source 1..75: mol_type = other DNA
gcaccgaggaggagttccacattgcgggcggcagcacggacaccctgctggcgctggcgcaagtgcgtgccgtga

SEQ ID NO: 790713 - DNA, 75 bp, synthetic construct
  source 1..75: mol_type = other DNA
accgatgccattccacctcggctggatgacggcctgacggtgaccggcgtgtgtgtggaggtgcttaacgtcctt

SEQ ID NO: 790714 - DNA, 75 bp, synthetic construct
  source 1..75: mol_type = other DNA
tcaccgataaagaacgcctcacggcgctggtgctactcggcattaaagaccgggacacctttcctctgatttttt

SEQ ID NO: 790715 - DNA, 75 bp, synthetic construct
  source 1..75: mol_type = other DNA
cccgcagagcggcagcggaaattaaaaagtttgagaaacgtgatctggcacaggcggttattaatgctgcctatc

SEQ ID NO: 790716 - DNA, 75 bp, synthetic construct
  source 1..75: mol_type = other DNA
ggagttcaaccgtatcgccggggaaaactgcctctacttcgaaaccggacaaggctctgcgctatccgctggcgc

SEQ ID NO: 790717 - DNA, 75 bp, synthetic construct
  source 1..75: mol_type = other DNA
aacttaagccgtgtgctggataccgtgtacggcgtgatcgacaaattcaatattccgacccagggctgcgtgctg

SEQ ID NO: 790718 - DNA, 75 bp, synthetic construct
  source 1..75: mol_type = other DNA
cgctggcgctaacttcggcgcagaccaggtgacgatggaagcgcgtaactatgggctggcgcgtcattacgatcc

SEQ ID NO: 790719 - DNA, 75 bp, synthetic construct
  source 1..75: mol_type = other DNA
tggtaagctattatggcatgataaaaaaccagtcatatacccattggcatccttatctgattatacttattataa

SEQ ID NO: 790720 - DNA, 75 bp, synthetic construct
  source 1..75: mol_type = other DNA
ctattatgcttttctccctgcgaagcatcaatatgatataggaactgtagagttcacattggtaaatagtaattg

SEQ ID NO: 790721 - DNA, 75 bp, synthetic construct
  source 1..75: mol_type = other DNA
ttcaaataagaacaaatcaagaaaatataaacattaatggagataaaattaaatctctttattcatcgatgcaat

SEQ ID NO: 790722 - DNA, 75 bp, synthetic construct
  source 1..75: mol_type = other DNA
aacgaaaacctgatgatcctgctcgctaccgcaggctgcaactacatcatggggatgccactgggtgacgacatc

SEQ ID NO: 790723 - DNA, 75 bp, synthetic construct
  source 1..75: mol_type = other DNA
atgaaactaaagaccacattgtttggcaatgtttatcaattcaaggatgtaaaagaggtgctggcgaaggccaac

SEQ ID NO: 790724 - DNA, 75 bp, synthetic construct
  source 1..75: mol_type = other DNA
atgagcaagaaaaaagggaaaacaccgcgacctgcggcaaaaacaatgaccgccagcgccccgaaaatggaggca

SEQ ID NO: 790725 - DNA, 75 bp, synthetic construct
  source 1..75: mol_type = other DNA
aaaagaggtgctggctaaagccaacgaactgtgttcgggggatgtgctggcgggcgtcgcagcggcaagctcaca

SEQ ID NO: 790726 - DNA, 75 bp, synthetic construct
  source 1..75: mol_type = other DNA
aaccgtattgccggggaaaactgcctctacttcgaaaccgggcaaggttctgcgctctccgctggcgcgaacttc

SEQ ID NO: 790727 - DNA, 75 bp, synthetic construct
  source 1..75: mol_type = other DNA
tattccaacccagggctgcgtactggcgcacgtcaccacccagatcgaagcgatccgtcgcggcgcgccgggcgg

SEQ ID NO: 790728 - DNA, 75 bp, synthetic construct
  source 1..75: mol_type = other DNA
atgattggcgcgggcgcgaagattctcggcaatattgaagttgggcgcggcgcgaagattggcgcaggttccgtg

SEQ ID NO: 790729 - DNA, 75 bp, synthetic construct
  source 1..75: mol_type = other DNA
cattactcaagcacgaaaacctcggcagcgcgttaagctatatgctggcgaataaactggcatcgccgattatgc

SEQ ID NO: 790730 - DNA, 75 bp, synthetic construct
  source 1..75: mol_type = other DNA
cgcgcactggcaatctttctgcaaaaccaggtttctgtgacgttccaggttgatattcacccggcagcaaaaatt

SEQ ID NO: 790731 - DNA, 75 bp, synthetic construct
  source 1..75: mol_type = other DNA
ccgaaaacggcgggtatcaagcgcccggtggtgaagatggaaaaaacggcggaaaaaggtagtcgcccggcatca

SEQ ID NO: 790732 - DNA, 75 bp, synthetic construct
  source 1..75: mol_type = other DNA
cgacgctatatttatttctcgccgtgggagtcggctttctcgccagcaggcctatcgcattattcgcgatgccgg

SEQ ID NO: 790733 - DNA, 75 bp, synthetic construct
  source 1..75: mol_type = other DNA
gtgctgcaaccggtgccgccgcataccaccgccgctggcgttccggcacgcattgtcggtaaaccagacagcgat

SEQ ID NO: 790734 - DNA, 75 bp, synthetic construct
  source 1..75: mol_type = other DNA
atgaaaaataataaactggcgaccagtgaattaagaagccttgccaacagcgcaatatctttaaacaacgcagca

SEQ ID NO: 790735 - DNA, 75 bp, synthetic construct
  source 1..75: mol_type = other DNA
atgagaacattagaagaagtaattgcggctcaatcacctgaaagtcaggcgatcatcaaagctatggctgatgag

SEQ ID NO: 790736 - DNA, 75 bp, synthetic construct
  source 1..75: mol_type = other DNA
gataacttcaaagatatgccttatagtgagaaggttaagtttatttctgaagctaactcttatgcaaaaaagata

SEQ ID NO: 790737 - DNA, 75 bp, synthetic construct
  source 1..75: mol_type = other DNA
tcactggttgtggaatcaggggcgtcgcgcattggcaatctttctgcaaaaccaggtttctgtgacgttccaggt

SEQ ID NO: 790738 - DNA, 75 bp, synthetic construct
  source 1..75: mol_type = other DNA
cgcaggcattatgtttattaacgctctgtttttataccgttgtacgttcccaccccatccgggtcgtcgcttacc

SEQ ID NO: 790739 - DNA, 75 bp, synthetic construct
  source 1..75: mol_type = other DNA
cattcgtaaagcgattcacccgacaacattgttgatgctgtacacttttatctcatttattgccctgctcaccgt

SEQ ID NO: 790740 - DNA, 75 bp, synthetic construct
  source 1..75: mol_type = other DNA
gacgatgagttaatcgacctctttaagctcatcgaaaattcctcttccgaggcaaaacctaaagcgaaggccaaa

SEQ ID NO: 790741 - DNA, 75 bp, synthetic construct
  source 1..75: mol_type = other DNA
gcagacggtgtccggtcttcgtaatctttccatcgacgtggagcaaggggctaccggcctggttagcggcagtgt

SEQ ID NO: 790742 - DNA, 75 bp, synthetic construct
  source 1..75: mol_type = other DNA
atgatgatgaactctttctttccggcaatggcgcttatggcgcttatggcgctagtgggttgttctacaccgcca

SEQ ID NO: 790743 - DNA, 75 bp, synthetic construct
  source 1..75: mol_type = other DNA
caccgcatttgaacagttccaggggagctacgaaatgcgcggttataccttccgtaaagagcagtttgtctgttc

SEQ ID NO: 790744 - DNA, 75 bp, synthetic construct
  source 1..75: mol_type = other DNA
atgtgtcgcttcgcagggcgttgtatatgcccgcaatggttagccaccagtaagactgagtggggacgggcgttc

SEQ ID NO: 790745 - DNA, 75 bp, synthetic construct
  source 1..75: mol_type = other DNA
agcctgaccaaacgggataacttcggtgaaatccggatcaacctgaactggcaccggggcagcggcaaatcaggc

SEQ ID NO: 790746 - DNA, 75 bp, synthetic construct
  source 1..75: mol_type = other DNA
gcaccctgtacaccatgaattaagaaaaaacggagagatgtactcttttccgataacgattggcaataatgtctg

SEQ ID NO: 790747 - DNA, 75 bp, synthetic construct
  source 1..75: mol_type = other DNA
tacggcgttagccaataaacgcattcaacgtagcgacctggagaagcaggcgatggaaacggtgattaacgcatt

SEQ ID NO: 790748 - DNA, 75 bp, synthetic construct
  source 1..75: mol_type = other DNA
gtgcgagcatttcggctatgaagtgaaaaagctggaacgcacgcgcatcatgaacgttagcttaagcggcattcc

SEQ ID NO: 790749 - DNA, 75 bp, synthetic construct
  source 1..75: mol_type = other DNA
ggcaaaacccaaagcgaaggccaagccgaaaacggcgggcatcaaacgcccggttgttaagatggaaaaaacagc

SEQ ID NO: 790750 - DNA, 75 bp, synthetic construct
  source 1..75: mol_type = other DNA
acactgacctttgcgccgcgagaaatcgccagtgtgagctggcagcaaggacgcctgcaccttagcctttacagc

SEQ ID NO: 790751 - DNA, 75 bp, synthetic construct
  source 1..75: mol_type = other DNA
acactgacctttgcgccacgggaaatcgccaatgtgagctggcaacaaggacgcctgcaccttagcctttacagc

SEQ ID NO: 790752 - DNA, 75 bp, synthetic construct
  source 1..75: mol_type = other DNA
tacagcattagcaaataaacgtattcagcgtagcgaattggaaaagcaagcgatggaaacagttattaacgcact

SEQ ID NO: 790753 - DNA, 75 bp, synthetic construct
  source 1..75: mol_type = other DNA
ggcgtagagaaacgatttagccaaattcagccattacgttacccaagatggctggtagccttaatggttggcctt

SEQ ID NO: 790754 - DNA, 75 bp, synthetic construct
  source 1..75: mol_type = other DNA
cgtcacgtcagcgctcactcacccgcgagcagttaaccgagcaactcaactgttatctcgatttgatgcgcaacg

SEQ ID NO: 790755 - DNA, 75 bp, synthetic construct
  source 1..75: mol_type = other DNA
cacctattacacgccaaaagaagaatccattaagctgttccacgattatctcgacctgcaccgcagcaacccgaa

SEQ ID NO: 790756 - DNA, 75 bp, synthetic construct
  source 1..75: mol_type = other DNA
aaagagcaaaactatccgtttttacctttcaatggtctttctaatatagaatcatcgaccgaatggttattacct

SEQ ID NO: 790757 - DNA, 75 bp, synthetic construct
  source 1..75: mol_type = other DNA
atcagacgtgcgtttgacgattgagagtgcgacgcagggcgaaggggaatcagagagaattgccggatgcggcga

SEQ ID NO: 790758 - DNA, 75 bp, synthetic construct
  source 1..75: mol_type = other DNA
gaaccggcagagacgatgaaggtgtaccagttgctggcggagttgattacatccgatgtgcgtttgacgattgag

SEQ ID NO: 790759 - DNA, 75 bp, synthetic construct
  source 1..75: mol_type = other DNA
gcaggtgcgcgcgaaacgctgcaacgttatgccatcactttctggctgctgagcgccaacccgtcaatcaaccgc

SEQ ID NO: 790760 - DNA, 75 bp, synthetic construct
  source 1..75: mol_type = other DNA
cgcaggtaaagtggttgctaaagactacattgatgagtctactggtgagctgatctgtgctgcgaacatggagct

SEQ ID NO: 790761 - DNA, 75 bp, synthetic construct
  source 1..75: mol_type = other DNA
agatcactctgtacgacggccgcacaggtgaacagttcgaacgtccggtaaccgtaggttacatgtacatgctga

SEQ ID NO: 790762 - DNA, 75 bp, synthetic construct
  source 1..75: mol_type = other DNA
aactccaacctggatgaagaaggccacttcgtagaagacctggtaacttgccgtagcaaaggcgaatccagcttg

SEQ ID NO: 790763 - DNA, 75 bp, synthetic construct
  source 1..75: mol_type = other DNA
gtatcattcgtatcaacaacgttttgagcagattctaaagactataggggttaaaaataaggtcattcaagatga

SEQ ID NO: 790764 - DNA, 75 bp, synthetic construct
  source 1..75: mol_type = other DNA
atgcctaatgcgcgttattttagcgtggcattacgttttaaaggacaaggttcacttatcattgaacctattaaa

SEQ ID NO: 790765 - DNA, 75 bp, synthetic construct
  source 1..75: mol_type = other DNA
atgaaagagtttttatttttatttcactccacagtcggcgtcatacaaacccgcaaggcgttgcaggcagcgggc

SEQ ID NO: 790766 - DNA, 75 bp, synthetic construct
  source 1..75: mol_type = other DNA
cgtggttattccgttgagtactttgtggaaggcggtcgttcgcgtacaggacgtttgcttgatccgaaaaccggc

SEQ ID NO: 790767 - DNA, 75 bp, synthetic construct
  source 1..75: mol_type = other DNA
atcgaacgtgctggcaacaaaggtgcagaagctgcactgaccgcgcttgaaatgattaatgtattgaaagccatc

SEQ ID NO: 790768 - DNA, 75 bp, synthetic construct
  source 1..75: mol_type = other DNA
gcaacaaaggtgcagaagctgcactgactgcgcttgaaatgattaatgtattgaaagccatcaaggcctgtaatt

SEQ ID NO: 790769 - DNA, 75 bp, synthetic construct
  source 1..75: mol_type = other DNA
gaccactgaaagcattgaacaagcgatcgaacgtgctggcaccaaagctggcaacaaaggtgcagaagctgcact

SEQ ID NO: 790770 - DNA, 75 bp, synthetic construct
  source 1..75: mol_type = other DNA
agcatcagcagtgatgcaggcaatgaagatagagaacaaaacctacagcgccccgctgaagcccggctaccgcag

SEQ ID NO: 790771 - DNA, 75 bp, synthetic construct
  source 1..75: mol_type = other DNA
ttttttctttcgaatcgcaagccgatattcgtgcaatcatcatcgacggcgagccatggtttattgcgttagatg

SEQ ID NO: 790772 - DNA, 75 bp, synthetic construct
  source 1..75: mol_type = other DNA
accgtagcctgattcattcgccgtctggtgttctcggcctgacggagaactcactgctgatgaatctgctgaacc

SEQ ID NO: 790773 - DNA, 75 bp, synthetic construct
  source 1..75: mol_type = other DNA
taaatccgttatcctgaacaccgcagattatttacgcattgcacaaccagagctggtcaaattccgtcgtactac

SEQ ID NO: 790774 - DNA, 75 bp, synthetic construct
  source 1..75: mol_type = other DNA
gccacatcggcgggttacgtgcttcgctggccagcccggcggaagtcgatgaactgacaggctgtgtcttcggtg

SEQ ID NO: 790775 - DNA, 75 bp, synthetic construct
  source 1..75: mol_type = other DNA
tcgagaaagacactatcggcgacatcatcattctgccgcgcgagcaagcggtgctgatgacctactatcgcaaca

SEQ ID NO: 790776 - DNA, 75 bp, synthetic construct
  source 1..75: mol_type = other DNA
atcaatgacagcctgcttgaaggtgccgttgacgcactgaaacgtatcggtcaggtaaaagatgaaaacattacc

SEQ ID NO: 790777 - DNA, 75 bp, synthetic construct
  source 1..75: mol_type = other DNA
gcagaacttcagtcgtgcgctggatgtggcttatggggggagcagctctgcttcctcaagttccggtggtagctc

SEQ ID NO: 790778 - DNA, 75 bp, synthetic construct
  source 1..75: mol_type = other DNA
tgccaacggaaaaagtacaacagaacttcagtcgtgcgctggatgtggcctatggaggaagcagctctgcttcct

SEQ ID NO: 790779 - DNA, 75 bp, synthetic construct
  source 1..75: mol_type = other DNA
gggctatcagggggctgcaatgggggcggcgttaggggcaggtattacggcctataactccaactctgcaggggc

SEQ ID NO: 790780 - DNA, 75 bp, synthetic construct
  source 1..75: mol_type = other DNA
ctgtgacatccgcgccggatagcgcgtattactggatacaggccaatgtcctcaaagccgataaaatggatctgc

SEQ ID NO: 790781 - DNA, 75 bp, synthetic construct
  source 1..75: mol_type = other DNA
ataaatatcagacccgtattgtatcctctgccaataaggttaacctgaaattcgaagaggcaaaacccgtcctcg

SEQ ID NO: 790782 - DNA, 75 bp, synthetic construct
  source 1..75: mol_type = other DNA
ccgccgtcggttttttactggcactatttattggcttacgcagccgtaaagaagcacaacacccatcattaaggg

SEQ ID NO: 790783 - DNA, 75 bp, synthetic construct
  source 1..75: mol_type = other DNA
tgccgatattatgtggttcgataccgccatcgctgccatcggttttttactggcactgtttatcggcttacgcag

SEQ ID NO: 790784 - DNA, 75 bp, synthetic construct
  source 1..75: mol_type = other DNA
caataacatcattatcgcttatgttttgggctttctggcgggaatggcaaacagttttctcgatgcaggcaccta

SEQ ID NO: 790785 - DNA, 75 bp, synthetic construct
  source 1..75: mol_type = other DNA
aaccggaaatcaacataaataccagacccgtgtggtatccaatgccaacaaggttaacctgaaatttgaagaagc

SEQ ID NO: 790786 - DNA, 75 bp, synthetic construct
  source 1..75: mol_type = other DNA
cagggtgtggtgcgatgagcacagcaatcaagaagcgtaaccttgaggtgaagactcagatgagtgagaccatct

SEQ ID NO: 790787 - DNA, 75 bp, synthetic construct
  source 1..75: mol_type = other DNA
ttctgctaataaagtaaacctgaaatttgaagaggcgaagccggtgcttgaggaacagcttgcaaaatctgtagc

SEQ ID NO: 790788 - DNA, 75 bp, synthetic construct
  source 1..75: mol_type = other DNA
aagactgtttatttgcaaatccgtaatacatctgacaaggacatgtctggtctgcaggcacaaattacaaatgaa

SEQ ID NO: 790789 - DNA, 75 bp, synthetic construct
  source 1..75: mol_type = other DNA
acctcgacaaaggttcagacagataacgttgccgtattgcgccaggggacgtccggagcgaaggtacagaccagt

SEQ ID NO: 790790 - DNA, 75 bp, synthetic construct
  source 1..75: mol_type = other DNA
aacgggtaatcagcacaaataccagactcgcgtcgtctctaacgctaataaagttaacctcaagttccctgaagc

SEQ ID NO: 790791 - DNA, 75 bp, synthetic construct
  source 1..75: mol_type = other DNA
agaacggtatacctccagatccgtaatacttccgaccaggatatgtccggcctgcagcctgaaattacccgtgcg

SEQ ID NO: 790792 - DNA, 75 bp, synthetic construct
  source 1..75: mol_type = other DNA
tggctaaatgcccgatggtagtgggatatcgcatgaagcctttcaccttctggctggcgaagcgactggtgaaaa

SEQ ID NO: 790793 - DNA, 75 bp, synthetic construct
  source 1..75: mol_type = other DNA
ctcgagatcgtggtgccgctggtgaatgccaaacgccgcgagcagtttgaacgcatcaaagctgaagttgcgcca

SEQ ID NO: 790794 - DNA, 75 bp, synthetic construct
  source 1..75: mol_type = other DNA
tgtttttgtcggcattgatgcgcctgacttcaatattaccctcgaaggtaatctcaaaaagcagggtatcaaaac

SEQ ID NO: 790795 - DNA, 75 bp, synthetic construct
  source 1..75: mol_type = other DNA
tcttcgaacgccattgtgcttactaccattaaagatgggcaatgcctgacatctacgcgcaaaaatcacgatcgc

SEQ ID NO: 790796 - DNA, 75 bp, synthetic construct
  source 1..75: mol_type = other DNA
catccccctcacccccgtaaaatcgcaggcggctctgccactgtctttattgacggtaaacctgccgccagaacc

SEQ ID NO: 790797 - DNA, 75 bp, synthetic construct
  source 1..75: mol_type = other DNA
aacggataatgttgcagctttgcgtcagggaacatcaggctccaaaattcagacaagcacagaaaccggcaacca

SEQ ID NO: 790798 - DNA, 75 bp, synthetic construct
  source 1..75: mol_type = other DNA
gtaatgctgctcgttttgccggattatgggaaagaaataatctcataaacgaaaaattaaaaagagaagaggttt

SEQ ID NO: 790799 - DNA, 75 bp, synthetic construct
  source 1..75: mol_type = other DNA
aggccgataagatggatctgcgggagtctcagggatggctgaaccgtggttatgaaggcgcagctgttggtgcag

SEQ ID NO: 790800 - DNA, 75 bp, synthetic construct
  source 1..75: mol_type = other DNA
gtatctaatgccaacaaggttaacctgaaatttgaagaggcgaagcctgttctcgaagaccagctggccaaatca

SEQ ID NO: 790801 - DNA, 75 bp, synthetic construct
  source 1..75: mol_type = other DNA
gcgtatcaaagcggaagttgcgccagatctttcggttcatctgctggatgggatgggccgtgaggcgatggtcgc

SEQ ID NO: 790802 - DNA, 75 bp, synthetic construct
  source 1..75: mol_type = other DNA
agcacagcaatcaagaagcgtaaccttgaggtgaagactcagatgagtgagaccatctggcttgaacccgccagc

SEQ ID NO: 790803 - DNA, 75 bp, synthetic construct
  source 1..75: mol_type = other DNA
gcataaataccagacccgggttgtatccagtgccaaccaggttaatctgaagtttgaagaagctaaacctcatct

SEQ ID NO: 790804 - DNA, 75 bp, synthetic construct
  source 1..75: mol_type = other DNA
ccacggtaggggaaaacgcctgggtagaaccacctgtctatttctcttacggttccaacatccatataggccgca

SEQ ID NO: 790805 - DNA, 75 bp, synthetic construct
  source 1..75: mol_type = other DNA
tacgatgataattttcagctgatgcgtgaagagatcaataagatttcaggtaccgattcagcgctgttgtgcgaa

SEQ ID NO: 790806 - DNA, 75 bp, synthetic construct
  source 1..75: mol_type = other DNA
acgaactggatgatgtcagtccgggcggttatcgctggactcaggcagtgctggtggtgctgatgaccttaccgc

SEQ ID NO: 790807 - DNA, 75 bp, synthetic construct
  source 1..75: mol_type = other DNA
gcgggctccgtctctgcagatccccacgccgggcacgacatgtctgccatgcagatgccagcagatgagaatttc

SEQ ID NO: 790808 - DNA, 75 bp, synthetic construct
  source 1..75: mol_type = other DNA
ccttctttgcagatatagtgtaaaatatctttgttaccttcagaatagtatgaaaaaacatccactcaatgtgat

SEQ ID NO: 790809 - DNA, 75 bp, synthetic construct
  source 1..75: mol_type = other DNA
ggcatggaggcactggtcccccagaacagcagcccccgggagcccggtcgtgaatcagctcccccggactcacca

SEQ ID NO: 790810 - DNA, 75 bp, synthetic construct
  source 1..75: mol_type = other DNA
actttcccgctggctgagcgggcagccgcagggctggctggcttctcaccggctgatgaagacggtgcggtggga

SEQ ID NO: 790811 - DNA, 75 bp, synthetic construct
  source 1..75: mol_type = other DNA
cccaacccggttacgctacgccaggtcattattccccaggcactgcgagtgattattccgccgttaaccagccag

SEQ ID NO: 790812 - DNA, 75 bp, synthetic construct
  source 1..75: mol_type = other DNA
tccgcgaccgtctggcggctaatggcaagaaaggaaaggtgattctcggcgcgatgatgcgcaagctggcacagg

SEQ ID NO: 790813 - DNA, 75 bp, synthetic construct
  source 1..75: mol_type = other DNA
ttgcatccgaccttgacgatgcaactcgtaagcagcttgaccacggtcaaaaagtgaccgaactgctgaaacaga

SEQ ID NO: 790814 - DNA, 75 bp, synthetic construct
  source 1..75: mol_type = other DNA
ccatatctgtgcttgtagccggtttgattgcatcacctgtcgcgtttgctgcgggaacgcccgccgacccgcact

SEQ ID NO: 790815 - DNA, 75 bp, synthetic construct
  source 1..75: mol_type = other DNA
ttccgccattgctgcaaatcttcttctggtactttgccgtattgcgcaatttgcccgggccacgccaggcagtga

SEQ ID NO: 790816 - DNA, 75 bp, synthetic construct
  source 1..75: mol_type = other DNA
ttccgcggcgggatggttttaattcctgaactggcagccttaacgctggcactttcggtttatacctctgcattt

SEQ ID NO: 790817 - DNA, 75 bp, synthetic construct
  source 1..75: mol_type = other DNA
gcggtatgttcagccgccggctcattaccggctggcccggcagtttgaactccgttttgaatcccgtttcccggc

SEQ ID NO: 790818 - DNA, 75 bp, synthetic construct
  source 1..75: mol_type = other DNA
tctccgctgaatccggtacgccccctgccgccggtgggcgggaatccggcactgcatggtattgaaccggatgaa

SEQ ID NO: 790819 - DNA, 75 bp, synthetic construct
  source 1..75: mol_type = other DNA
ttaccgtcgcaatctgcgccggctgccccgttatgtgatgagttcccggcaaattccggtcagccgtcagcggct

SEQ ID NO: 790820 - DNA, 75 bp, synthetic construct
  source 1..75: mol_type = other DNA
tcttgaaaatggcattaacgccaatctgttgttcaaatggcgacaacaatggcgcgagggaaagctgctattacc

SEQ ID NO: 790821 - DNA, 75 bp, synthetic construct
  source 1..75: mol_type = other DNA
ctatatgcagcgaaattaccggacaagcgatgcctggtggtcgggcagtgcgttaccgggggattacgatgctgc

SEQ ID NO: 790822 - DNA, 75 bp, synthetic construct
  source 1..75: mol_type = other DNA
ttgctttgctggaaggtggcaggttgtggaagattcggatgccactgccatctgctggcgcggatgcgctgatgc

SEQ ID NO: 790823 - DNA, 75 bp, synthetic construct
  source 1..75: mol_type = other DNA
aagatttttttaaccgcgttgaatccctggaatatctggaaaaagcccgggccttttaccttgaaaaagcggagg

SEQ ID NO: 790824 - DNA, 75 bp, synthetic construct
  source 1..75: mol_type = other DNA
ctcgctaagaatgctatgttctgcgaacgtctggggcattccggcgataagtttccgctggcagtggcgcagcgc

SEQ ID NO: 790825 - DNA, 75 bp, synthetic construct
  source 1..75: mol_type = other DNA
cgggcattttttgacggtgaaggggagtctgtaaaaaacgttgaagtcgtgttacggccccaggtgtggaaccgc

SEQ ID NO: 790826 - DNA, 75 bp, synthetic construct
  source 1..75: mol_type = other DNA
gcggtggtttatatcggcctcgatgcgctcagtgacagtgaggtggccagtgccgtgggaaattcgatgtttgcg

SEQ ID NO: 790827 - DNA, 75 bp, synthetic construct
  source 1..75: mol_type = other DNA
caaacgggatttctggcatcaatggctttggcccgttcccggggcattgatattactgtggtgacggataaaaac

SEQ ID NO: 790828 - DNA, 75 bp, synthetic construct
  source 1..75: mol_type = other DNA
ggggaaccactgtacaaagttgttggtgttgtgacgccattttcggcgcaggttaatgctatcaaaacgtcattg

SEQ ID NO: 790829 - DNA, 75 bp, synthetic construct
  source 1..75: mol_type = other DNA
ttttggccgcagcgcacgagcgatgcacgtcagcccatccacgctctcacggcagattcaacgcctggaagaaga

SEQ ID NO: 790830 - DNA, 75 bp, synthetic construct
  source 1..75: mol_type = other DNA
aacgccgtttgagctgggcgtttgtgcacaaaaaaagcggctgcatgagccgctgattgaggctttctggaagat

SEQ ID NO: 790831 - DNA, 75 bp, synthetic construct
  source 1..75: mol_type = other DNA
gtttatcatggccgatcagggaccggtgcgtcgccgcattgagttgtggttccgacgcaacaaaatcagcaaccc

SEQ ID NO: 790832 - DNA, 75 bp, synthetic construct
  source 1..75: mol_type = other DNA
cgtgagcgcgctggaccgggtggttatcaagttccgtcgcgaaggcacggaagtggagatcaagggtatgaatga

SEQ ID NO: 790833 - DNA, 75 bp, synthetic construct
  source 1..75: mol_type = other DNA
cgcgacccgcaccatcgttgaccgcttcggggttcatgacaagcctgaagaagtggaaaaactgatgggcggcca

SEQ ID NO: 790834 - DNA, 75 bp, synthetic construct
  source 1..75: mol_type = other DNA
ttcgacgtaacaaaatcagtaacccggtgatttacgccacggttggtgggcatgaagcgatggtatcaatggtgg

SEQ ID NO: 790835 - DNA, 75 bp, synthetic construct
  source 1..75: mol_type = other DNA
gcagaacgttcacgaatggtctggcattggcagcgacatatacgcttctgtcgttaaatcgtttgggtactgtga

SEQ ID NO: 790836 - DNA, 75 bp, synthetic construct
  source 1..75: mol_type = other DNA
tcgtggtgaccgtaccacgctctacctggtggatgaggccgcattcctccagcgccctctgctgattgatgcggc

SEQ ID NO: 790837 - DNA, 75 bp, synthetic construct
  source 1..75: mol_type = other DNA
acaccatgaattgagaaaaaacggcgagatgtactcttttccgataacgattggcaataacgtctggatcggaag

SEQ ID NO: 790838 - DNA, 75 bp, synthetic construct
  source 1..75: mol_type = other DNA
cgcccagcaaacgctgttgcagtatcagcaattgcgccacaccatcgaccagcaagggccgtcgctctctggcga

SEQ ID NO: 790839 - DNA, 75 bp, synthetic construct
  source 1..75: mol_type = other DNA
ggagaacggcattaccgaaaagagccgtgaaatggggctcagctggacggcgatcgggctggcctgctcgctctg

SEQ ID NO: 790840 - DNA, 75 bp, synthetic construct
  source 1..75: mol_type = other DNA
caggctgccgttgatgcgcatatcaaactgggtatcggatggtcaggtgatgacagtccggcattcaccagacag

SEQ ID NO: 790841 - DNA, 75 bp, synthetic construct
  source 1..75: mol_type = other DNA
gcaagagcaacgggtatttcaaatggcctgtcgcgcttttgaagttattcgcggttctgatgtgatggacgcgat

SEQ ID NO: 790842 - DNA, 75 bp, synthetic construct
  source 1..75: mol_type = other DNA
aaagccgctgccgatgacggactgttcccaccgatttttgcccgtgtaaataaagcgggcacgccagtggcgggg

SEQ ID NO: 790843 - DNA, 75 bp, synthetic construct
  source 1..75: mol_type = other DNA
gggatgatccctaatgccgcactgcgcgtttctgcctcgccattcggtgatgccgcacggatggcgttgggtgac

SEQ ID NO: 790844 - DNA, 75 bp, synthetic construct
  source 1..75: mol_type = other DNA
tgaccatattccagctcagcagcatttcaccaaacgcgaccaaagagttcggtctggtttcttccgtctcggtca

SEQ ID NO: 790845 - DNA, 75 bp, synthetic construct
  source 1..75: mol_type = other DNA
tatgcgtttctcagttcatccaaaatttgacgagctggaaaacgactttaatcagttcttttctgatattgattt

SEQ ID NO: 790846 - DNA, 75 bp, synthetic construct
  source 1..75: mol_type = other DNA
caaggaaggaagaaatagaaaacgctttacgtttttctgttcatccaaagtttaatgagctggagaatgacttta

SEQ ID NO: 790847 - DNA, 75 bp, synthetic construct
  source 1..75: mol_type = other DNA
tgtgagctggaaaatgacttcacgcagttcttctcggatattgagtactacacacgatatggccagtccggaatg

SEQ ID NO: 790848 - DNA, 75 bp, synthetic construct
  source 1..75: mol_type = other DNA
ccgttggggtgaaattcttcggcatgaaggcaccacatcagggggcaccgattgtcatcgaccaaccgagcagct

SEQ ID NO: 790849 - DNA, 75 bp, synthetic construct
  source 1..75: mol_type = other DNA
cgcgctatagcctgcaccgtctacgccactggatagccctgccaatcggttttgcattgttctggcatgacacct

SEQ ID NO: 790850 - DNA, 75 bp, synthetic construct
  source 1..75: mol_type = other DNA
gtgagcggaaaaagaatgactaacagagagcttgttgatgccgcgattaagcttgctggtgatttttattcaatg

SEQ ID NO: 790851 - DNA, 75 bp, synthetic construct
  source 1..75: mol_type = other DNA
atcgccaccattggtggggtattgattgccgccgtttgctatgtgctctccaccaccgcgattatggggatgatc

SEQ ID NO: 790852 - DNA, 75 bp, synthetic construct
  source 1..75: mol_type = other DNA
gcaggtatctggcctacgtgatatccctagcccgtctatcacagacgtccccgttggggtgaaattcttcggcat

SEQ ID NO: 790853 - DNA, 75 bp, synthetic construct
  source 1..75: mol_type = other DNA
ctgaacttccatccgctgcttaatctggtgtttgccgcatttctgctgatgccgattccgcgctacaacctgcat

SEQ ID NO: 790854 - DNA, 75 bp, synthetic construct
  source 1..75: mol_type = other DNA
cgaccgtcaatactcgccacaccgtttcgaggtagtggcgcggtatttgatccagatgatgaagctgttcgcggg

SEQ ID NO: 790855 - DNA, 75 bp, synthetic construct
  source 1..75: mol_type = other DNA
gtgcgtctggctggcagatgttccgccgcgtcacattgccgaatatccgctgggcgctgctctacggcgtggtgc

SEQ ID NO: 790856 - DNA, 75 bp, synthetic construct
  source 1..75: mol_type = other DNA
cggtctggtctatctgctgttttacggctcgaatggcccgctgggcggttggctcgacgagcataacctgcaaat

SEQ ID NO: 790857 - DNA, 75 bp, synthetic construct
  source 1..75: mol_type = other DNA
atgccagttttacagaatctggccgatccggacatgctgcacgccatctggctgacggtgatgattgcgctgatt

SEQ ID NO: 790858 - DNA, 75 bp, synthetic construct
  source 1..75: mol_type = other DNA
gggcaaatggtttctgattggcatcgggatgctggtttcggcgttcatcctgctggtgccgatgatttacatctt

SEQ ID NO: 790859 - DNA, 75 bp, synthetic construct
  source 1..75: mol_type = other DNA
ggctcgattcgcggcgaaacactttcgctgccgttacagattgaattgctggagcaggactacaacaccgtcggc

SEQ ID NO: 790860 - DNA, 75 bp, synthetic construct
  source 1..75: mol_type = other DNA
ggtgatgttaagccagggcagccaggaagacgaagcggcgattttgcttggcgcgtctggctggcagatgttccg

SEQ ID NO: 790861 - DNA, 75 bp, synthetic construct
  source 1..75: mol_type = other DNA
ttgccaaaaagattcaagacattcgacgtatggagtgatttggacgaattgctaaaggttgtgaaagagcccaaa

SEQ ID NO: 790862 - DNA, 75 bp, synthetic construct
  source 1..75: mol_type = other DNA
gtatttcaaacgcagctccgcgatttcccgaaccggttattccgagtactgggcgggaatgatgttcttaaacgg

SEQ ID NO: 790863 - DNA, 75 bp, synthetic construct
  source 1..75: mol_type = other DNA
cacaatattttcttgccgacagctggtttagctccggcgatttgagcaaagccgaatattgggcacagaaagccg

SEQ ID NO: 790864 - DNA, 75 bp, synthetic construct
  source 1..75: mol_type = other DNA
ctatctgaagatttccgaaggctgtaatcaccgctgtacgttctgcattatcccgtcaatgcgcggcgatctggt

SEQ ID NO: 790865 - DNA, 75 bp, synthetic construct
  source 1..75: mol_type = other DNA
gttgatgtaaaacaccgcactggcttccacaacggcgaaccggtaaaaaccagcatggtcagcctgtgcgaacag

SEQ ID NO: 790866 - DNA, 75 bp, synthetic construct
  source 1..75: mol_type = other DNA
tgacgatgcggacatggtgatcgtcaacacctgcggctttattgacagcgcggtacaagaatcactggaagccat

SEQ ID NO: 790867 - DNA, 75 bp, synthetic construct
  source 1..75: mol_type = other DNA
agagaaccagccggttgaggctggagcgtggaaagatgccgttgagtgggtgctccaggaggattgccaggctgt

SEQ ID NO: 790868 - DNA, 75 bp, synthetic construct
  source 1..75: mol_type = other DNA
gcaccaagtcgccgaacctcgctgacgccgtgatgattaactacgcgccgatggattcctctcttgataattggg

SEQ ID NO: 790869 - DNA, 75 bp, synthetic construct
  source 1..75: mol_type = other DNA
gaatgacgtacaggagtggtcaggtaaggggagtgacatctatgactctgtggttaaggtttttggtctgtgcga

SEQ ID NO: 790870 - DNA, 75 bp, synthetic construct
  source 1..75: mol_type = other DNA
tttcctgaaactggtgccgttatcaaaggcgaggctggcgataatattggtcgtggtgaccgtaccacgctttat

SEQ ID NO: 790871 - DNA, 75 bp, synthetic construct
  source 1..75: mol_type = other DNA
ttcgtggaaacactacctgtagagtttcgcggttcgtggagcgagaagaagcacgcgccatatatgcgtgttgag

SEQ ID NO: 790872 - DNA, 75 bp, synthetic construct
  source 1..75: mol_type = other DNA
atcgttattgataaacagcctgatggaacccggtcgccaaaccttgccgactcggtgatgatcagctacgcgcca

SEQ ID NO: 790873 - DNA, 75 bp, synthetic construct
  source 1..75: mol_type = other DNA
gcgactgggcgcgatggacgtcgccgacgaaggccgggacaaaaacgccttttcgacccgtcacggcttcctcct

SEQ ID NO: 790874 - DNA, 75 bp, synthetic construct
  source 1..75: mol_type = other DNA
atgcctcttccgtttaaattcgatttcagaaaccctgattaccagatggtttttgaatggcggatggaacgcctg

SEQ ID NO: 790875 - DNA, 75 bp, synthetic construct
  source 1..75: mol_type = other DNA
atgtcgatagcaccggcgacccgaaagcgctgttctggaaggcacggaagtttgtcgagctgctgccggttgagt

SEQ ID NO: 790876 - DNA, 75 bp, synthetic construct
  source 1..75: mol_type = other DNA
ccgttgtggcggagcttcctatcctggcttatatgcagcaaaccaccggcaccataacggtaaaagcgaaaattc

SEQ ID NO: 790877 - DNA, 75 bp, synthetic construct
  source 1..75: mol_type = other DNA
agtagcatggcactcaaagataaactcatcatcgagctttcgcagccgacctattccattaatggtgtgggaaaa

SEQ ID NO: 790878 - DNA, 75 bp, synthetic construct
  source 1..75: mol_type = other DNA
cgtgaaatggggctcagttggaccgcgatcggactggcctgctcgctttgtctcttcaacaaagaaatggttatc

SEQ ID NO: 790879 - DNA, 75 bp, synthetic construct
  source 1..75: mol_type = other DNA
tgataacgtattgattgcacccaatgttactctttccgttacgggacaccctgtacaccatgaattgagaaaaaa

SEQ ID NO: 790880 - DNA, 75 bp, synthetic construct
  source 1..75: mol_type = other DNA
ggcgttccctgtcgggttattcgcgaaataaacgagcgtgataaacagtattattacaaagattataaagttgaa

SEQ ID NO: 790881 - DNA, 75 bp, synthetic construct
  source 1..75: mol_type = other DNA
agaaagagtatctggtgacggtcgataaaccgattaccgatgaatttattcgtggtatgggggcgggggtgccgc

SEQ ID NO: 790882 - DNA, 75 bp, synthetic construct
  source 1..75: mol_type = other DNA
tcgcgggtaaaatgaaaattattgaggcacggttaaatgcactcacaaatcaccagacaaagtcactgaagctta

SEQ ID NO: 790883 - DNA, 75 bp, synthetic construct
  source 1..75: mol_type = other DNA
acaagtctttatggcgaagaatgccgactctgccctgaaactggggcaggcacgcggcgtggcgattgtggcggc

SEQ ID NO: 790884 - DNA, 75 bp, synthetic construct
  source 1..75: mol_type = other DNA
cactgccacgtcagtcagaatgcgatgcagatgagcgaatcgcggctgaacctggcgagagggcgactgcgttaa

SEQ ID NO: 790885 - DNA, 75 bp, synthetic construct
  source 1..75: mol_type = other DNA
ggcgtgacggaaatcatcacccagtttcagcccgattatttcgcaatcgaacaagtctttatggcgaagaacgct

SEQ ID NO: 790886 - DNA, 75 bp, synthetic construct
  source 1..75: mol_type = other DNA
cgaaagcctggtgttgctgaaaaaccgtctcgaaacgttaccgctgaaaaaatcggccaccattgcggtggttgg

SEQ ID NO: 790887 - DNA, 75 bp, synthetic construct
  source 1..75: mol_type = other DNA
caatctgatgtggtggtggctgtggtcggtgaagctcaggggatggcgcacgaagcctccagccgtaccgatatc

SEQ ID NO: 790888 - DNA, 75 bp, synthetic construct
  source 1..75: mol_type = other DNA
gaaaattcctcttttctttgcttacgatgtgctgcacggtcagcgcacggtgttcccgattagcctcggtctggc

SEQ ID NO: 790889 - DNA, 75 bp, synthetic construct
  source 1..75: mol_type = other DNA
cgctggttctggtgctgatgaatgggcgtccgctggcgctggtgaaagaagatcagcaggctgatgcgattctgg

SEQ ID NO: 790890 - DNA, 75 bp, synthetic construct
  source 1..75: mol_type = other DNA
gatatgagcccgcagcgtctgtttaatgactatatgccgccgtacaaagcggggctggatgcaggcagcggcgcg

SEQ ID NO: 790891 - DNA, 75 bp, synthetic construct
  source 1..75: mol_type = other DNA
tgttgtttggcgattacaacccgtccggcaagctgccgatgtccttcccgcgttctgtcgggcagatcccggttt

SEQ ID NO: 790892 - DNA, 75 bp, synthetic construct
  source 1..75: mol_type = other DNA
cattgtcacgtcagtcagaatgcaatgcagatgagcgaatcgcggctgaacctggcgagagggcgactgcgttaa

SEQ ID NO: 790893 - DNA, 75 bp, synthetic construct
  source 1..75: mol_type = other DNA
acatgcaacgtcaggccgttccgactctgcgcgctgacaagccgctggttggtactggtatggaacgtgctgttg

SEQ ID NO: 790894 - DNA, 75 bp, synthetic construct
  source 1..75: mol_type = other DNA
cgtagtccgggtgtcttttttgactccgacaaaggtaaaacccactcttcgggtaaagtactgtataacgcgcga

SEQ ID NO: 790895 - DNA, 75 bp, synthetic construct
  source 1..75: mol_type = other DNA
cacaaacgtcgtatctctgcactcggcccaggtggtctgacccgtgaacgtgcaggcttcgaagttcgagacgta

SEQ ID NO: 790896 - DNA, 75 bp, synthetic construct
  source 1..75: mol_type = other DNA
cctgttcgagaacctgttcttctccgaagaccgttatgacctgtctgcggttggtcgtatgaagttcaaccgttc

SEQ ID NO: 790897 - DNA, 75 bp, synthetic construct
  source 1..75: mol_type = other DNA
gaacatcggtctgatcaactctctgtccgtgtacgcacagactaacgaatacggcttcctcgagactccgtatcg

SEQ ID NO: 790898 - DNA, 75 bp, synthetic construct
  source 1..75: mol_type = other DNA
tgctaaacgtggtggtgtcgttcagtacgttgatgcttcccgtatcgttattaaagttaacgaagacgagatgta

SEQ ID NO: 790899 - DNA, 75 bp, synthetic construct
  source 1..75: mol_type = other DNA
taaacctgatgggtgtgaaggcaggtattacacgtagaccaattcatatgccaaacgacgcgatcgttgaagaca

SEQ ID NO: 790900 - DNA, 75 bp, synthetic construct
  source 1..75: mol_type = other DNA
agtcgatttatataattacttcatggccggtgaaatggagaaggcgcaggaagagcgtaataaaatggatgcact

SEQ ID NO: 790901 - DNA, 75 bp, synthetic construct
  source 1..75: mol_type = other DNA
gggcatgccagaatccttcaacgtattgttgaaagagattcgttcgctgggtatcaacatcgaactggaagacga

SEQ ID NO: 790902 - DNA, 75 bp, synthetic construct
  source 1..75: mol_type = other DNA
gcagtgaaagagttcttcggttccagccagctgtctcagtttatggtccagaacaacccgctgtctgagattacg

SEQ ID NO: 790903 - DNA, 75 bp, synthetic construct
  source 1..75: mol_type = other DNA
ttggtaaggtaacgccgaaaggtgaaactcagctgaccccagaagaaaaactgctgcgtgcgatcttcggtgaga

SEQ ID NO: 790904 - DNA, 75 bp, synthetic construct
  source 1..75: mol_type = other DNA
gcctggtgttgctgaaaaaccgtctcgaaacgttaccgctgaaaaaatcggccaccattgcggtggttgggccac

SEQ ID NO: 790905 - DNA, 75 bp, synthetic construct
  source 1..75: mol_type = other DNA
ggttatcccgtatttgtttggcgcttccccggcgatttgttcttctttcctgcaaggtaaaccgacgtcgctacc

SEQ ID NO: 790906 - DNA, 75 bp, synthetic construct
  source 1..75: mol_type = other DNA
gggtcatcctgaagcattaggttccgcactgacgcataaatggatcacgaccgattttgccgaagcgttgctgga

SEQ ID NO: 790907 - DNA, 75 bp, synthetic construct
  source 1..75: mol_type = other DNA
attggttttatgtcccttgtgcttcttcaaaagaacttgagcgtacagggttctttggtttaggtgagcctaaag

SEQ ID NO: 790908 - DNA, 75 bp, synthetic construct
  source 1..75: mol_type = other DNA
cgcaaagcagtggaagaccttgccagccgtgggttcagcattgttaacagccaggggggcgagagccgaaatcct

SEQ ID NO: 790909 - DNA, 75 bp, synthetic construct
  source 1..75: mol_type = other DNA
tctaaacgccgtcagcaggaaatggaagccgcagataccgagtcgttcaaggtgtggctggaaaaacacagctga

SEQ ID NO: 790910 - DNA, 75 bp, synthetic construct
  source 1..75: mol_type = other DNA
agaggctgcaaatcaacagcaacgtgttgcagattgaaaacgaactgtacgcgccgattcgtccaaaacgcgtta

SEQ ID NO: 790911 - DNA, 75 bp, synthetic construct
  source 1..75: mol_type = other DNA
ctgaggccgaacagcagataatcaacctgcacagatatataacagagaaggcagggagcgccattgctgacaatt

SEQ ID NO: 790912 - DNA, 75 bp, synthetic construct
  source 1..75: mol_type = other DNA
cggaacgttaagttttcttgatggagctgatacaccgcgaaatgtcgcaggaacatatgtgatcttttctacaaa

SEQ ID NO: 790913 - DNA, 75 bp, synthetic construct
  source 1..75: mol_type = other DNA
gctgatacaccgcgaaatgtcgcaggaacatatgtgatcttttctacaaactatccaaaaacgcatcgacccacg

SEQ ID NO: 790914 - DNA, 75 bp, synthetic construct
  source 1..75: mol_type = other DNA
ggcgttccctgtcgggttattcgcgaaataaacgaccgggataagcaatattatttcaaagattatgagactgat

SEQ ID NO: 790915 - DNA, 75 bp, synthetic construct
  source 1..75: mol_type = other DNA
atgataccagggtggagcacggcctgcccggactgggcagtacgcctgaaaaaggggctgtcgattattccggct

SEQ ID NO: 790916 - DNA, 75 bp, synthetic construct
  source 1..75: mol_type = other DNA
caacaaggtttccttcatgggaagccgactgttatagagaaaagtttgaatcgagcaaaggtcttaccattatgc

SEQ ID NO: 790917 - DNA, 75 bp, synthetic construct
  source 1..75: mol_type = other DNA
ttctggcgctgctgctgttgctgacggcaatcgcagcggcgctgccgtttatcagttacgcacctaatcgtttag

SEQ ID NO: 790918 - DNA, 75 bp, synthetic construct
  source 1..75: mol_type = other DNA
ggctggtttggctacagcatctccttccagggtatcctgggctacatcttctatccgattgcatgggtgatgggt

SEQ ID NO: 790919 - DNA, 75 bp, synthetic construct
  source 1..75: mol_type = other DNA
ctgaaagcgcgcatggagctgcatcagcagcgccaggaaggcgtgctggcctactcaattgttcatttactttcg

SEQ ID NO: 790920 - DNA, 75 bp, synthetic construct
  source 1..75: mol_type = other DNA
tcgcgctgatagatgcgatgaacgaagctctcgacaagcaacgctggcgacgtcttccggcgctgcatcagcagt

SEQ ID NO: 790921 - DNA, 75 bp, synthetic construct
  source 1..75: mol_type = other DNA
agagtacaacaccgtcgatatgagtccgcagcgcctgtttaatgattatatgccgccgtacaaagcggggctgga

SEQ ID NO: 790922 - DNA, 75 bp, synthetic construct
  source 1..75: mol_type = other DNA
gagtccgcagcgcctgtttaatgattatatgccgccgtacaaagcggggctggacgcaggcagcggcgcggtgat

SEQ ID NO: 790923 - DNA, 75 bp, synthetic construct
  source 1..75: mol_type = other DNA
tgctgaaagatgttctgcgcgatcagtggggttttaaaggcatcaccgtttccgatcatggtgcaatcaaagagc

SEQ ID NO: 790924 - DNA, 75 bp, synthetic construct
  source 1..75: mol_type = other DNA
ggcgcgctatgagttggtgttcctggcggctggcgtcattctcttctcgctgtttgtcggcgtggtgatgttgcc

SEQ ID NO: 790925 - DNA, 75 bp, synthetic construct
  source 1..75: mol_type = other DNA
ccacctgcgcgccacgcgggagatcagtaacgaaacgctgcaaaaattactgcacgatctcgatttgcttgaagc

SEQ ID NO: 790926 - DNA, 75 bp, synthetic construct
  source 1..75: mol_type = other DNA
tttactgtcggcggtgcgacggttgaatttatgaaagtggcgattggcggtattctcgcgggttttgtggtgagt

SEQ ID NO: 790927 - DNA, 75 bp, synthetic construct
  source 1..75: mol_type = other DNA
cgccttccggcactgcatcagcagttgatgcgccagtttcacgattacgcggcggcggaaaccgatgtggcgcag

SEQ ID NO: 790928 - DNA, 75 bp, synthetic construct
  source 1..75: mol_type = other DNA
agattttcggcctcgcgctggcgctggtggtggtcaccgtggtcggcattggcttccttatttactgggtggtgc

SEQ ID NO: 790929 - DNA, 75 bp, synthetic construct
  source 1..75: mol_type = other DNA
aatttatgaaagtggccattggcggtattctcgccggttttgcggtgagctggctgtatggtcgctcgttgcgtt

SEQ ID NO: 790930 - DNA, 75 bp, synthetic construct
  source 1..75: mol_type = other DNA
ataaaggtggctgggatggtgccgtcatcaccttctttgccagcacggtcgcaatgtatatccgtcagctactgg

SEQ ID NO: 790931 - DNA, 75 bp, synthetic construct
  source 1..75: mol_type = other DNA
tactgcataacatccagtccgacattctggaactggaaaaccgtgccgttgctggcgtgaatctggaagagtttt

SEQ ID NO: 790932 - DNA, 75 bp, synthetic construct
  source 1..75: mol_type = other DNA
tactcaattatcatgttgcgaaaatacatgacacctctggcacgttagatgagtatattaaacgatctggtttaa

SEQ ID NO: 790933 - DNA, 75 bp, synthetic construct
  source 1..75: mol_type = other DNA
ataccttcaagtagtcgaatcctgacaaagtctgagcaagaggcgtttgatgtagctattgatgtgttaaaacgt

SEQ ID NO: 790934 - DNA, 75 bp, synthetic construct
  source 1..75: mol_type = other DNA
ggcgattatcgccgaaggtttaggtgcgcagtatggcgacgcggtgccgctgtcactattgcgtgatgaactggc

SEQ ID NO: 790935 - DNA, 75 bp, synthetic construct
  source 1..75: mol_type = other DNA
tggaagagtggttgccggtttgtcgcgacatgctcaatgccttcttcctgccggatgcggaaactgaagcggcga

SEQ ID NO: 790936 - DNA, 75 bp, synthetic construct
  source 1..75: mol_type = other DNA
cgttacccgatagtcgctttgtttcagaggatgtgctggcgctgctggacgttccggtactggccgcacgatttg

SEQ ID NO: 790937 - DNA, 75 bp, synthetic construct
  source 1..75: mol_type = other DNA
aagccggtaaaaaaggcacgctgtctgcctccctgcaggccatcgccgaccagtcaaagcccgtcaccgttgtcg

SEQ ID NO: 790938 - DNA, 75 bp, synthetic construct
  source 1..75: mol_type = other DNA
ttctcggcgtgccgggactggataccaaagaggtggctgttgcactggcatcagtctgtcagaagctgcgcgctt

SEQ ID NO: 790939 - DNA, 75 bp, synthetic construct
  source 1..75: mol_type = other DNA
cggcaggatttgcctggacggatggtgagaacaatgtggtcccggtgacggcggaggaggttattgccctgtcag

SEQ ID NO: 790940 - DNA, 75 bp, synthetic construct
  source 1..75: mol_type = other DNA
cgtgctttgggtgaactggctcgcttaacgctgacgcattggcaatcacaactgttaattcctgtcgcggttaaa

SEQ ID NO: 790941 - DNA, 75 bp, synthetic construct
  source 1..75: mol_type = other DNA
tgacgacgctggtgcgcaaagatggtttccgcttctggggtaaccgcacctgttctgatgacccgcttttcctgt

SEQ ID NO: 790942 - DNA, 75 bp, synthetic construct
  source 1..75: mol_type = other DNA
ttctcggcgtaccgggactggacaccaaagaggtcgccgtcgcactggcatcggtatgccaggaactgaatgcct

SEQ ID NO: 790943 - DNA, 75 bp, synthetic construct
  source 1..75: mol_type = other DNA
acaacgttcgcgagctggaactccccgccaccggtcaacacacctggcggtttggcctgacgcgcatgttgctgg

SEQ ID NO: 790944 - DNA, 75 bp, synthetic construct
  source 1..75: mol_type = other DNA
ttgtgaaaatcacaatgcagcttcctggggatgaacagcgccgtgagattatttgtttggcacttcgcaaacttg

SEQ ID NO: 790945 - DNA, 75 bp, synthetic construct
  source 1..75: mol_type = other DNA
tcaacgggctttccgcaaaagaaacagatagccttgtatggctgtgggattatgccaaccgctcacaggcattgt

SEQ ID NO: 790946 - DNA, 75 bp, synthetic construct
  source 1..75: mol_type = other DNA
aacttgaagaacgcggattatggcgacgagcagctacccgatggggtgacgtactgcttaacgccgaaacagaca

SEQ ID NO: 790947 - DNA, 75 bp, synthetic construct
  source 1..75: mol_type = other DNA
attgaacgtgagttctttaccaaagagctacctgatgaagagcacgaaggcgaaacattcaatgaatgtccactt

SEQ ID NO: 790948 - DNA, 75 bp, synthetic construct
  source 1..75: mol_type = other DNA
gattgtcagactgtcagggtcgcccgtagtctgtcggatgacgttaacgagtacgaggaagaagtcgagagagtg

SEQ ID NO: 790949 - DNA, 75 bp, synthetic construct
  source 1..75: mol_type = other DNA
cgctggatgtcgccgagcaggaagtgcaggccgcgattaacgctgcgaccaacttgttgccgagcgatctgccta

SEQ ID NO: 790950 - DNA, 75 bp, synthetic construct
  source 1..75: mol_type = other DNA
ggcagctctttaacagcgatggtgaacaggatgtcggcaacccgctgctggcctcatggggcaagcttgggcgcg

SEQ ID NO: 790951 - DNA, 75 bp, synthetic construct
  source 1..75: mol_type = other DNA
gccttacgccatttccgaccgtcgggcgcggcagtcgcatccggtactggaagcgtttatcagcctgttatcgtt

SEQ ID NO: 790952 - DNA, 75 bp, synthetic construct
  source 1..75: mol_type = other DNA
ctacagtccgtttattcaggcagtgtttggtagcgcacctgcggatcgttacctgccttacgccatttccgaccg

SEQ ID NO: 790953 - DNA, 75 bp, synthetic construct
  source 1..75: mol_type = other DNA
tttaccttaccggaaaccgtgccgctggaaacgctacaacgattctgggcacatccggtgcgggcatttttccag

SEQ ID NO: 790954 - DNA, 75 bp, synthetic construct
  source 1..75: mol_type = other DNA
acatcaccgaagaagggctgcgttatttacgccagtgggtcaacgaatccggcattcgttgggggatagatgacg

SEQ ID NO: 790955 - DNA, 75 bp, synthetic construct
  source 1..75: mol_type = other DNA
aaactaccaacccggtgagcgacaaagctatgcgcgcgagtggctaccggcagccagccaggcaggcaaggcgca

SEQ ID NO: 790956 - DNA, 75 bp, synthetic construct
  source 1..75: mol_type = other DNA
gtgcagtttgaagatgcggtgaatgaaaaaggagagcaggtatggctgccgtataccgcaacggaaacggataat

SEQ ID NO: 790957 - DNA, 75 bp, synthetic construct
  source 1..75: mol_type = other DNA
gccggttccaccactggaaagcctgaccctgcgccagcgcatcaccgataaatatctggtgaatctggccgaatc

SEQ ID NO: 790958 - DNA, 75 bp, synthetic construct
  source 1..75: mol_type = other DNA
cggtgttaaaccgcgtattctcggcgtgccgggactggataccaaagaggtggctgttgcactggcatcagtctg

SEQ ID NO: 790959 - DNA, 75 bp, synthetic construct
  source 1..75: mol_type = other DNA
ggtgctggccgacacgatggccgaggctcacatgtgggcggtcgataagcccattaccgcatcgctcatccgtga

SEQ ID NO: 790960 - DNA, 75 bp, synthetic construct
  source 1..75: mol_type = other DNA
gtttccaatatcatcggcaccaccgacgaaaacggtcagtacaccggactaaaagccctgctggcggcggagtcg

SEQ ID NO: 790961 - DNA, 75 bp, synthetic construct
  source 1..75: mol_type = other DNA
ctgaggcgcacatgtgggctattgataagcccatcaccgcaacgctgattcgcgacatcattgacggcatcaatg

SEQ ID NO: 790962 - DNA, 75 bp, synthetic construct
  source 1..75: mol_type = other DNA
caccgcgcaggtactggccgacacgatggctgaggcgcacatgtgggctattgataagcccatcaccgcaacgct

SEQ ID NO: 790963 - DNA, 75 bp, synthetic construct
  source 1..75: mol_type = other DNA
atgagtgactatcatcacggcgtgcaggtgctggagattaacgacggcacccgtgtcatttccactgtatccacg

SEQ ID NO: 790964 - DNA, 75 bp, synthetic construct
  source 1..75: mol_type = other DNA
aatcaatatgtttaacgccactgtcatcgaacgtctcgacgagcagcgcgtacgcgccaacgttgaaggccgcga

SEQ ID NO: 790965 - DNA, 75 bp, synthetic construct
  source 1..75: mol_type = other DNA
ctggataacgaggacatcacccacgttccggcggaaaaccgctatgtgaacactgttttccaaagctacgcactt

SEQ ID NO: 790966 - DNA, 75 bp, synthetic construct
  source 1..75: mol_type = other DNA
ttccgaggcgatggcctatcgcgagaatttcagccagcgcgaactgatgcttatctggcctgatttcctcgcatg

SEQ ID NO: 790967 - DNA, 75 bp, synthetic construct
  source 1..75: mol_type = other DNA
agctgatggtcatctggcctgacttcctcgcatgggacaccacaactaacgccaccgcaacagcctacgccaccg

SEQ ID NO: 790968 - DNA, 75 bp, synthetic construct
  source 1..75: mol_type = other DNA
acggtaaatataccggcatcaaggcgctgttgactgccgaagcagtcaccggcgttaagccgcgcattctcggcg

SEQ ID NO: 790969 - DNA, 75 bp, synthetic construct
  source 1..75: mol_type = other DNA
ggtcccgccactcgaacacctgaccttacgccagcgcatcaccgataaatatctggcgaatctcatctcatccgt

SEQ ID NO: 790970 - DNA, 75 bp, synthetic construct
  source 1..75: mol_type = other DNA
ttggtggtgattgctggctggacgagtcggtgaacgataaagacacgctgaaagccgggaagctcaccatcgatt

SEQ ID NO: 790971 - DNA, 75 bp, synthetic construct
  source 1..75: mol_type = other DNA
ggaagacgaaaccacaaccaatatcatcggcgcagtgactgctgaaggtaaaaaaacaggtatgaaagccctgtt

SEQ ID NO: 790972 - DNA, 75 bp, synthetic construct
  source 1..75: mol_type = other DNA
cggcttctgctggtacgacccggagtcgaacgacaccgcgaccctgaaagtggggaaactgtatatcgattacga

SEQ ID NO: 790973 - DNA, 75 bp, synthetic construct
  source 1..75: mol_type = other DNA
tggctgcagcgaaagcggggaaactgccggaggcgtttttctggacggatgcggaaaacaatgatgtgccggtga

SEQ ID NO: 790974 - DNA, 75 bp, synthetic construct
  source 1..75: mol_type = other DNA
atgagtacacttgaacctgctgcccagccaaaaccctttaagctgtggttgtcgcagctgcaaatgaagcatggg

SEQ ID NO: 790975 - DNA, 75 bp, synthetic construct
  source 1..75: mol_type = other DNA
ctgatggcagagaacaaccgtcttccggaaggttttgcctggacggacggggataataatgtggtgccggtaacg

SEQ ID NO: 790976 - DNA, 75 bp, synthetic construct
  source 1..75: mol_type = other DNA
atggctcaggattaccaccacggagtgcgcgttgttgaagtcaacgaaggcactcgatccattactacggtgagc

SEQ ID NO: 790977 - DNA, 75 bp, synthetic construct
  source 1..75: mol_type = other DNA
ttgcactggcatcagtctgtcagaagctgcgcgctttcgggtatatcagcgcatggggctgtaaaaccatttccg

SEQ ID NO: 790978 - DNA, 75 bp, synthetic construct
  source 1..75: mol_type = other DNA
ccggtgttaccacgctgattcgtgccgatggtttccgcttctggggtaaccgtaattgctccgatgacccgctgt

SEQ ID NO: 790979 - DNA, 75 bp, synthetic construct
  source 1..75: mol_type = other DNA
gggcgatggataaacccattaccccgaccctcattcgcgacatcgtttccggtatcaatgccaaattccgcgagc

SEQ ID NO: 790980 - DNA, 75 bp, synthetic construct
  source 1..75: mol_type = other DNA
tggcataaaaccctgtctaacgttggcgttaacggtgtgaccggcgtcagtgcctcagtatcgtgggatttgcag

SEQ ID NO: 790981 - DNA, 75 bp, synthetic construct
  source 1..75: mol_type = other DNA
gtaaagcgggtgagtcaggtacgctggcccgttcgctggatgccatcgctgaccaggcaaaacccgtgaccgttg

SEQ ID NO: 790982 - DNA, 75 bp, synthetic construct
  source 1..75: mol_type = other DNA
cgatgaagcgcgtaaccgctggccgctggggcgcgtcacggtgattcaccgcatcggggaattatggccgggcga

SEQ ID NO: 790983 - DNA, 75 bp, synthetic construct
  source 1..75: mol_type = other DNA
tgtggctaaaaccttagattacttcattgatgatgagggtagagagtttttaacggaggaatttattgatggagt

SEQ ID NO: 790984 - DNA, 75 bp, synthetic construct
  source 1..75: mol_type = other DNA
tttccactatgatagtgtctatggccaaaaaccttttactaatgaaaaggttatattttctaagcatcgtggcgg

SEQ ID NO: 790985 - DNA, 75 bp, synthetic construct
  source 1..75: mol_type = other DNA
gcatatgacagagcgatcagtacggtcacacaatcgctcaccagagtcgcacaggcatcacaaaaagaagctcaa

SEQ ID NO: 790986 - DNA, 75 bp, synthetic construct
  source 1..75: mol_type = other DNA
atgaaacttgccccggaaacccgtgaaattctgcgacaatacaaggcagtgattaatgcccggcgccgtgagaat

SEQ ID NO: 790987 - DNA, 75 bp, synthetic construct
  source 1..75: mol_type = other DNA
accgttctggaagcgcgaagccacgccggaaggtgatcgctgggtcgaagccagggagagcgatcagcaggcggc

SEQ ID NO: 790988 - DNA, 75 bp, synthetic construct
  source 1..75: mol_type = other DNA
ttccgtgccggctgataaatttatatggcatgccgtaacgcgtgccgtcgggaatatgaaaaaccaaggcaacga

SEQ ID NO: 790989 - DNA, 75 bp, synthetic construct
  source 1..75: mol_type = other DNA
aaaaaaagaaagaccggcaacctgtcaaaacgaagccggttaagcgaagttgaccccgatctcattgcaaagtaa

SEQ ID NO: 790990 - DNA, 75 bp, synthetic construct
  source 1..75: mol_type = other DNA
gcgcatcctgattttggcgttgcactggaacgtaccgtgaccgagctgctgcaaggtcgtggcctgaaagatctg

SEQ ID NO: 790991 - DNA, 75 bp, synthetic construct
  source 1..75: mol_type = other DNA
aaacccgtgaagaatatcttgcttacctggccgatgaagccgatcgcgacatagcatatgaccctgagccgattg

SEQ ID NO: 790992 - DNA, 75 bp, synthetic construct
  source 1..75: mol_type = other DNA
atgcgacaggatataggcgggaaggaagccggagagatagcagacgacggggcggtgccggcagataaatttatc

SEQ ID NO: 790993 - DNA, 75 bp, synthetic construct
  source 1..75: mol_type = other DNA
taccgttcgaacgcggagatgatgccgagggattcctgattgtgacgtcagcagctgataagggactggtagaca

SEQ ID NO: 790994 - DNA, 75 bp, synthetic construct
  source 1..75: mol_type = other DNA
gcacggcgacctggaagaagtcttcccgatcggccttcctttttcattttaccttctgcggagggtagggggagc

SEQ ID NO: 790995 - DNA, 75 bp, synthetic construct
  source 1..75: mol_type = other DNA
gcaaaaaaccctacaacgtacccagtaggaacggcaattttctcaaaactcctcagttttctttatggtgatgac

SEQ ID NO: 790996 - DNA, 75 bp, synthetic construct
  source 1..75: mol_type = other DNA
tcaacgcataaatgatgaactcaagggaaaaaaaacatttaccattgatggcctgtgggatgtagagtggattcc

SEQ ID NO: 790997 - DNA, 75 bp, synthetic construct
  source 1..75: mol_type = other DNA
tagatgcaatgcttggaattatttcaagcatcatggctaaaaacccaaccacctacccagtgggaatggctattt

SEQ ID NO: 790998 - DNA, 75 bp, synthetic construct
  source 1..75: mol_type = other DNA
gtgcagattttcggcgagccggtttaccgttatacctaccgtaccgcggttatcgacggttttctgatcgaccag

SEQ ID NO: 790999 - DNA, 75 bp, synthetic construct
  source 1..75: mol_type = other DNA
acaaattacgccgcattggtaaccaggcggtgcacgaatatcataacgatctcgacgatgcccagatgtgtctgc

SEQ ID NO: 791000 - DNA, 75 bp, synthetic construct
  source 1..75: mol_type = other DNA
cgacgctgattaaaatgcgtatgtttggcgaagccacagcgaaacatcttggtctgttactcaacatcccccctt

SEQ ID NO: 791001 - DNA, 75 bp, synthetic construct
  source 1..75: mol_type = other DNA
tgcgggcaaaagctgaaggcaagaagctgggaagaccgtcgaaaatcgccccagaagtccataggctgattattg

SEQ ID NO: 791002 - DNA, 75 bp, synthetic construct
  source 1..75: mol_type = other DNA
acaaaagggccgctggggttagtgttagcgcattggcgcgtgaatacggtgtttcaagagcgacgcttgctgcat

SEQ ID NO: 791003 - DNA, 75 bp, synthetic construct
  source 1..75: mol_type = other DNA
ataaagaggaaagcacaatggaagcattaggaatgatcgaaacccggggcctggttgcactgatagaggcttctg

SEQ ID NO: 791004 - DNA, 75 bp, synthetic construct
  source 1..75: mol_type = other DNA
tttagtcagcaaagatggcttatatagctggcgacgaataacactaattaatcctctgtactacgtgtatttttg

SEQ ID NO: 791005 - DNA, 75 bp, synthetic construct
  source 1..75: mol_type = other DNA
cacgagcaaaagctgaaggcaagaagttggggagaccttctaaaatcgcgtcagaagcccgtagcgcgattgtag

SEQ ID NO: 791006 - DNA, 75 bp, synthetic construct
  source 1..75: mol_type = other DNA
cacgagcaaaagccgaaggtaagaaattgggcaaacctcctaaaatcgcgtcagaagcccgtagagagattttag

SEQ ID NO: 791007 - DNA, 75 bp, synthetic construct
  source 1..75: mol_type = other DNA
ttttaccaacggtaaaggcgcaaccaaaaaagcggcgctggcttctgccctcggtgaatatttcgagcgtctctc

SEQ ID NO: 791008 - DNA, 75 bp, synthetic construct
  source 1..75: mol_type = other DNA
aagggatatttctgattgtagggaatatccatcttatttaaaaataaactttgctgacttcagtttaattaaagg

SEQ ID NO: 791009 - DNA, 75 bp, synthetic construct
  source 1..75: mol_type = other DNA
tgccaagctggctgatttcgatattacctggtttgaagagccgatgtggcatgatgatatcgcaagtcaccgcac

SEQ ID NO: 791010 - DNA, 75 bp, synthetic construct
  source 1..75: mol_type = other DNA
ggtttggcgatgaaacaaaaacgatcattcagggtgatgcattagccgagctaaaaaaaatccccaccgggagca

SEQ ID NO: 791011 - DNA, 75 bp, synthetic construct
  source 1..75: mol_type = other DNA
cggctccatgtacgaacccatcctgatgatggtgaaagacgcaaagaactacacgttcaacggtgatgctattct

SEQ ID NO: 791012 - DNA, 75 bp, synthetic construct
  source 1..75: mol_type = other DNA
ttcaccccagtgatttcgccagaactcaaactgatggacgaaagattatttatcgatgcggcgatgggttttgtc

SEQ ID NO: 791013 - DNA, 75 bp, synthetic construct
  source 1..75: mol_type = other DNA
gtgatttcgccagaactcaaactgatggacgaaagattatttatcgatgcggcgatgggttttgtcctgcctgaa

SEQ ID NO: 791014 - DNA, 75 bp, synthetic construct
  source 1..75: mol_type = other DNA
ctatggcaataacagcattgctgtcgggacctcttcctatgtaaccagtagtgatgccatagccattggtacgaa

SEQ ID NO: 791015 - DNA, 75 bp, synthetic construct
  source 1..75: mol_type = other DNA
atgaacgcaaaagaagaaggcattatcgacacattaaaaaaaatatcagaagcggaagatgaaatggctaaagat

SEQ ID NO: 791016 - DNA, 75 bp, synthetic construct
  source 1..75: mol_type = other DNA
ccggctgtgggcgagtttgtaatcccggagctgctcggcggtccggatagcatcatgatcggacgcgtgctgtgg

SEQ ID NO: 791017 - DNA, 75 bp, synthetic construct
  source 1..75: mol_type = other DNA
tgaaactgacggactcgtatgaagaaggggtaaggctgtcttcgggcacgtttacgcttccggccagattctgcc

SEQ ID NO: 791018 - DNA, 75 bp, synthetic construct
  source 1..75: mol_type = other DNA
gggaaatactgccggacgacgtcaggagtatcaccattattctggaaaaaagcgacgatgagtggtggtacggga

SEQ ID NO: 791019 - DNA, 75 bp, synthetic construct
  source 1..75: mol_type = other DNA
ggcctgcgaacccgccacgctatgtgaagtccgtaatacccgacgccgcatgattgttccggcacccgacgccgc

SEQ ID NO: 791020 - DNA, 75 bp, synthetic construct
  source 1..75: mol_type = other DNA
ttgcaggctgtcatggcgatggtacgtggtggcgatctgggtcagccgttccagttcaaaaacttccgcgattaa

SEQ ID NO: 791021 - DNA, 75 bp, synthetic construct
  source 1..75: mol_type = other DNA
aataccggtcttggcgatgagtgggatgtaggtatttggtcacgtgcgtcttttggcaatgaataccgcaatttg

SEQ ID NO: 791022 - DNA, 75 bp, synthetic construct
  source 1..75: mol_type = other DNA
atcctgtgaataacgttgctgtagaaattgatgagtcacatcacaaacggcaagtaaaaagcgatgcgataagac

SEQ ID NO: 791023 - DNA, 75 bp, synthetic construct
  source 1..75: mol_type = other DNA
ttcggtcattgacgcagccaaagcggttattttcgccctggcgcaaacccgtccggaagcaggacgtgaacgccc

SEQ ID NO: 791024 - DNA, 75 bp, synthetic construct
  source 1..75: mol_type = other DNA
gtccattatcccaacgaaaaatggtttccactaaccgaaaacgacgatgtgccggaaggcctgcttgatgcccgt

SEQ ID NO: 791025 - DNA, 75 bp, synthetic construct
  source 1..75: mol_type = other DNA
tgatgcgctttctgcaatatccgaactgataagagcggcctttttcttacttggcacgaaagaaaataaaacaac

SEQ ID NO: 791026 - DNA, 75 bp, synthetic construct
  source 1..75: mol_type = other DNA
atgataatgttaaagctattggacagccatcaaacagatgctctgttatctatgcaggaaccgggtcaatcaata

SEQ ID NO: 791027 - DNA, 75 bp, synthetic construct
  source 1..75: mol_type = other DNA
gccgcagtcacaagagtcctgccagcagtggctggaagcccactggcgtactctgacaccggcgaatttcaccca

SEQ ID NO: 791028 - DNA, 75 bp, synthetic construct
  source 1..75: mol_type = other DNA
gggggcagatgtgcaccgtcagaatccctggctactgcaatcacaatcccgaaacttctgtgctggcgcattaca

SEQ ID NO: 791029 - DNA, 75 bp, synthetic construct
  source 1..75: mol_type = other DNA
ttacaggctgtcatggcgatggtgcgtggtggcgatctcggtcagccgttccagttcaaaaacttccgcgattaa

SEQ ID NO: 791030 - DNA, 75 bp, synthetic construct
  source 1..75: mol_type = other DNA
gctggatggtcgcgacgtcagtctactgattggcgggcctgaagggttgtcgcctgcctgtaaagcggcggcgga

SEQ ID NO: 791031 - DNA, 75 bp, synthetic construct
  source 1..75: mol_type = other DNA
cccggagctcccccagcaaattgccgccttgtatgagtggttttcagcccgttgtcgctggaaggaaaaggcgtt

SEQ ID NO: 791032 - DNA, 75 bp, synthetic construct
  source 1..75: mol_type = other DNA
aacgctgcatctttacgctggctggtttgttgattggccagcagtagatggtggcgatgaggacgacgatgattt

SEQ ID NO: 791033 - DNA, 75 bp, synthetic construct
  source 1..75: mol_type = other DNA
gtgtttacacccctgacgaattacaggaaacggcaccgcgcgttgagcgagacattactccgcaaacgactactg

SEQ ID NO: 791034 - DNA, 75 bp, synthetic construct
  source 1..75: mol_type = other DNA
ttcagatgatgacgaactgctggaaaaagccaccgacgtttacagcgttcgccgggaagaattaaacgaaacatc

SEQ ID NO: 791035 - DNA, 75 bp, synthetic construct
  source 1..75: mol_type = other DNA
tgctgcggcaatcttcagccccgagggcatgaatcaactggtgcgtttcgcggagttgatgtcacaaagcaaagc

SEQ ID NO: 791036 - DNA, 75 bp, synthetic construct
  source 1..75: mol_type = other DNA
tgccgaacgataaacagtatgtttggtgttgggggaagtcttacggctggactgagtgcgataccttcgaagggt

SEQ ID NO: 791037 - DNA, 75 bp, synthetic construct
  source 1..75: mol_type = other DNA
gcggtcctgaagagattttgcacgcattttccggcgcggcgatgaactacaacacccaggctgacctggacaaag

SEQ ID NO: 791038 - DNA, 75 bp, synthetic construct
  source 1..75: mol_type = other DNA
cgcagcccggcgccactgtaggaaccgccgctgcaatcttcagcccggagggcatgaatcaactggtgcgcttcg

SEQ ID NO: 791039 - DNA, 75 bp, synthetic construct
  source 1..75: mol_type = other DNA
cagggcacatcaggtgcgaaaattcagaccagtactgaaacaggtaaccagcataaataccagacccgtagtggt

SEQ ID NO: 791040 - DNA, 75 bp, synthetic construct
  source 1..75: mol_type = other DNA
gttgtcatagctgtgtatatgatgcgggataaaggcccggagattcctggaaataaaatgttccggggaatataa

SEQ ID NO: 791041 - DNA, 75 bp, synthetic construct
  source 1..75: mol_type = other DNA
gcataatttttatggcacggattccgattacgatgattcgaccaccgacaccgctaccatgcgttttgagcacga

SEQ ID NO: 791042 - DNA, 75 bp, synthetic construct
  source 1..75: mol_type = other DNA
tcaagcacaggtaagaaactccacactttgggccagtgatccgaaacaacaactcgcataccttgcgacaaaacg

SEQ ID NO: 791043 - DNA, 75 bp, synthetic construct
  source 1..75: mol_type = other DNA
agaaggctgcggtgttcgcgtatgggcaaccatgaagggagaggatcaacctcgagtgctcgagttaatgctgtc

SEQ ID NO: 791044 - DNA, 75 bp, synthetic construct
  source 1..75: mol_type = other DNA
cctttcaggatgtggagccatgggcacagcgatcaaaaaacgaaatctggaagtaaaaacccagatgagtgaaac

SEQ ID NO: 791045 - DNA, 75 bp, synthetic construct
  source 1..75: mol_type = other DNA
tccaaaacggctaaggagaccgacaaagctgctgttgcaatgaaagggttgactgcttcatttaatggttttttg

SEQ ID NO: 791046 - DNA, 75 bp, synthetic construct
  source 1..75: mol_type = other DNA
cagcatctgctgtgaggtaacgttccggcacgggacactccgcctcaacggcactgtcagcgaaaagcttctgac

SEQ ID NO: 791047 - DNA, 75 bp, synthetic construct
  source 1..75: mol_type = other DNA
agaaaaatgtgactcccggcaggcgaaaaggctgccctaattatcctcccgaatttaaacagcagctcgttgctg

SEQ ID NO: 791048 - DNA, 75 bp, synthetic construct
  source 1..75: mol_type = other DNA
atgatctggcagcctgagttcacagataaaacactctccaggaaacccggggcggttcaatcagatatgcagaaa

SEQ ID NO: 791049 - DNA, 75 bp, synthetic construct
  source 1..75: mol_type = other DNA
ttgtgattggcgcggcgatggcggcggtggcgggcgtactgctcggtcagttctacggcgtcattaacccctata

SEQ ID NO: 791050 - DNA, 75 bp, synthetic construct
  source 1..75: mol_type = other DNA
cagggcagttagacaaaaatgcaaagataattgttcctagccagtttctgttcgatttctattcggaaaaaatgc

SEQ ID NO: 791051 - DNA, 75 bp, synthetic construct
  source 1..75: mol_type = other DNA
tacacaaaagtaaatgatcactgtgatattcactacattggttttagtcgagtctataaacgacttttccaaaag

SEQ ID NO: 791052 - DNA, 75 bp, synthetic construct
  source 1..75: mol_type = other DNA
caagaaggcaattatctctgtattacacaagagataaacttaacactataaacggtattattacgaaatgggctc

SEQ ID NO: 791053 - DNA, 75 bp, synthetic construct
  source 1..75: mol_type = other DNA
tccatcaggaaaaacaagagcggatagaaacttcaacccattaaatcttagaactaaaggtaatgcaggtaggga

SEQ ID NO: 791054 - DNA, 75 bp, synthetic construct
  source 1..75: mol_type = other DNA
agcggggtcttgattatggtaacccaacgaaaaatagcaatgccgcgtactaccaaacccagcaaagattggcta

SEQ ID NO: 791055 - DNA, 75 bp, synthetic construct
  source 1..75: mol_type = other DNA
tctcgatgcagctgccgaacagccagaatcgctcgcagaggaccggaaaccctcagtatcagctgtgaggtaacg

SEQ ID NO: 791056 - DNA, 75 bp, synthetic construct
  source 1..75: mol_type = other DNA
ttccggcacgggacgctccgcttcaatggctatgtcagcgaaaagctcctgactctgctgatacagaaactgaag

SEQ ID NO: 791057 - DNA, 75 bp, synthetic construct
  source 1..75: mol_type = other DNA
ggcgaaaaggctgccctaattatcctcccgaatttaaacagcagctcgttgctgcctcctgtgaaccaaggatat

SEQ ID NO: 791058 - DNA, 75 bp, synthetic construct
  source 1..75: mol_type = other DNA
acataacttttatggtacggattccgattacgacgattcgaccaccgatactgccaccatgcgttttgagcacga

SEQ ID NO: 791059 - DNA, 75 bp, synthetic construct
  source 1..75: mol_type = other DNA
cagatccgcgctacttccagaagctgctgccacgcagcatatggtatgacccgatcagcggggtttataacctca

SEQ ID NO: 791060 - DNA, 75 bp, synthetic construct
  source 1..75: mol_type = other DNA
caaaaactgcctgacgggcagcgcgaatcattgcaatcaagaatgccgcaggatctgccgccggtactggctgaa

SEQ ID NO: 791061 - DNA, 75 bp, synthetic construct
  source 1..75: mol_type = other DNA
gttgatatagataagaaaacatgtttatccttttttatcgacgtgaataatgagctacctggcaaatttactctt

SEQ ID NO: 791062 - DNA, 75 bp, synthetic construct
  source 1..75: mol_type = other DNA
aatatcgggacggtgagttttttgatgtcgtccgcaatggtgaggaattcttcgaaacgcagagccgcaatgtaa

SEQ ID NO: 791063 - DNA, 75 bp, synthetic construct
  source 1..75: mol_type = other DNA
aacagatgcagaacgagctgaaagcgttacagcgtaagcttggcattacattcgtcttcgtgactcacgaccagg

SEQ ID NO: 791064 - DNA, 75 bp, synthetic construct
  source 1..75: mol_type = other DNA
atcaatatgtttaatgccacggtcatcgaacgtctcgacgagcagcgcgtacgcgccaacgttgaaggccgcgag

SEQ ID NO: 791065 - DNA, 75 bp, synthetic construct
  source 1..75: mol_type = other DNA
cgacggcctgcccgccgccagaaccggcgatgccattgactgcggcggcgtggttattggtggcggtacggtcaa

SEQ ID NO: 791066 - DNA, 75 bp, synthetic construct
  source 1..75: mol_type = other DNA
agaacatcaactgttagattacaaaggcgttgagaaacgttttagccaaatacgtccactgcgctatccacgctg

SEQ ID NO: 791067 - DNA, 75 bp, synthetic construct
  source 1..75: mol_type = other DNA
gcgatgtatatccgccagctgctggcacaacgtcatcttcatccacagatcaacttttgcctcaccgctttcgcc

SEQ ID NO: 791068 - DNA, 75 bp, synthetic construct
  source 1..75: mol_type = other DNA
ttcaggaaaagattatttttcaaagtacaacatacatgaaatttataatgcctatgtactaatcagaaacagaaa

SEQ ID NO: 791069 - DNA, 75 bp, synthetic construct
  source 1..75: mol_type = other DNA
gcgtgatccgccatgtcgcctatatggggccgcagtatgaagtgacggtggaatggcacgggcaggagatattat

SEQ ID NO: 791070 - DNA, 75 bp, synthetic construct
  source 1..75: mol_type = other DNA
aacaaccgagttcgctttcaccgctggtgcaattggcgggaattcgcaaatgctttgatggtaaagaagtcattc

SEQ ID NO: 791071 - DNA, 75 bp, synthetic construct
  source 1..75: mol_type = other DNA
ttctacggcgtcattaacccctatatcggctttatggccgggatgaaagcctttaccgctgcggtgctcggtggg

SEQ ID NO: 791072 - DNA, 75 bp, synthetic construct
  source 1..75: mol_type = other DNA
cggcgcggtgggaacgccagcgtttaccgaaggtactgggtcgccgatgccaaactggggtatcgagttaatcgc

SEQ ID NO: 791073 - DNA, 75 bp, synthetic construct
  source 1..75: mol_type = other DNA
tctgttggcgcgggcgcacgctatatcggcagtatgcataaaggttcagacggcgcggtgggaacgccagcattt

SEQ ID NO: 791074 - DNA, 75 bp, synthetic construct
  source 1..75: mol_type = other DNA
atactacccgcacgatgacggtgatttctgaacaagtgattaaagatcagggcgcaaccaaccttaccgacgcgc

SEQ ID NO: 791075 - DNA, 75 bp, synthetic construct
  source 1..75: mol_type = other DNA
ctcaactatttacacgttacccaacacaatacgccagacggcggcattccgaccattggtttaccgggctattcc

SEQ ID NO: 791076 - DNA, 75 bp, synthetic construct
  source 1..75: mol_type = other DNA
gcgcagtgcgcctgaatgtgatgggcgaaaaaacgcacgatgccgggcgcgataaggttaaaaatgaacgttacg

SEQ ID NO: 791077 - DNA, 75 bp, synthetic construct
  source 1..75: mol_type = other DNA
tacactggttgtcgaggcatcgacgccttcgctttatgcgccacttaaatctgccgatccaaaattctcccgccc

SEQ ID NO: 791078 - DNA, 75 bp, synthetic construct
  source 1..75: mol_type = other DNA
tatgtaaaactgcgcgccggcagcggtggcacacacgtccgcgtgggattcacccggtcaccgggtcgcctgtat

SEQ ID NO: 791079 - DNA, 75 bp, synthetic construct
  source 1..75: mol_type = other DNA
ccggaaatatacgtgccgctatatgctgccccgccagacagcgccgccatgcttcaggctggaaactttcgggaa

SEQ ID NO: 791080 - DNA, 75 bp, synthetic construct
  source 1..75: mol_type = other DNA
gaagcagagcccgtgctttatatgaatcgatttaccggaaagacattctcactggaagagcaacctggtgctgat

SEQ ID NO: 791081 - DNA, 75 bp, synthetic construct
  source 1..75: mol_type = other DNA
gctggacaattatcatactgaatacgacagtgctaccgcctgcggtggcagtggtcgcggtgccgtcacctgccc

SEQ ID NO: 791082 - DNA, 75 bp, synthetic construct
  source 1..75: mol_type = other DNA
caggctgaaccccacccgtggccgcaactgccgctggtgcagaccttcctggatacctgtatcccggcactgcgt

SEQ ID NO: 791083 - DNA, 75 bp, synthetic construct
  source 1..75: mol_type = other DNA
gcaccggtggatattcaggacgtcctgccgtccaccctgccgggccgggcacgtctgcatccggtgaaccaggca

SEQ ID NO: 791084 - DNA, 75 bp, synthetic construct
  source 1..75: mol_type = other DNA
cgcttgtgcgcaaggatggttttcgcttctggggttcccgctgtctgagcgatgatccgctctttgccttcgaaa

SEQ ID NO: 791085 - DNA, 75 bp, synthetic construct
  source 1..75: mol_type = other DNA
atgtgggcggtggataaaccgcttaacccgtcgctggcccgcgacattatcgacggtatccgcgccaaaatgcgc

SEQ ID NO: 791086 - DNA, 75 bp, synthetic construct
  source 1..75: mol_type = other DNA
atgactacacgccagtgccgccacttgaaaacctgatgctgcgtcagcgcatcaccgatcagtacctggtgaatt

SEQ ID NO: 791087 - DNA, 75 bp, synthetic construct
  source 1..75: mol_type = other DNA
agccggcaatgataccaataacgccattacagttaattatttagatagcgtttgtgcgacaaggcattaccattc

SEQ ID NO: 791088 - DNA, 75 bp, synthetic construct
  source 1..75: mol_type = other DNA
ggataatgtcgggaattattcaacaggtgctcgtgattatcgtgaggttgaagcaaacaagtttgctgctgagtt

SEQ ID NO: 791089 - DNA, 75 bp, synthetic construct
  source 1..75: mol_type = other DNA
ttgcggatactttattgactggcctggcattgatggacaaaggaatgctggtgctaatgcccgttatatcgctgc

SEQ ID NO: 791090 - DNA, 75 bp, synthetic construct
  source 1..75: mol_type = other DNA
acggcagcgttaagtccagagtgattaatcacagtccggtaacattgagcgcgcagcagattgaagagagtcgga

SEQ ID NO: 791091 - DNA, 75 bp, synthetic construct
  source 1..75: mol_type = other DNA
taggcagcgacacatttaacgcgccagaactgtcctctttggtattacgctcattaaaagaagatgccgaagaat

SEQ ID NO: 791092 - DNA, 75 bp, synthetic construct
  source 1..75: mol_type = other DNA
gaagcgaacttaatatctcccctgaagagaaaattattttttatgctgggcgtatcgtccctgacaaaggcatat

SEQ ID NO: 791093 - DNA, 75 bp, synthetic construct
  source 1..75: mol_type = other DNA
ggtgctgaatgccgaagcaacggcatacgccaccgcgcgtgcgcttggcctgcgcgccaaaattgacgagcagac

SEQ ID NO: 791094 - DNA, 75 bp, synthetic construct
  source 1..75: mol_type = other DNA
atctgcacaggcacagctcggcgttaaaccgcgcattctcggcgtgccaggtcacgataacaaaaccgttgctac

SEQ ID NO: 791095 - DNA, 75 bp, synthetic construct
  source 1..75: mol_type = other DNA
atcggcgcagtgaccgctgaaggtaaaaaaactggcatgaaagccctgttatctgcacaggcacagctcggcgtt

SEQ ID NO: 791096 - DNA, 75 bp, synthetic construct
  source 1..75: mol_type = other DNA
ttttagagactattttgcggcaagtgcgtccgctgattggtcagggtaaagtcgcggattatattccggcgctgg

SEQ ID NO: 791097 - DNA, 75 bp, synthetic construct
  source 1..75: mol_type = other DNA
gtgggtgtgaacggtgtcaccggaatttctgctgatgtgttctgggatctgcaggacacggcaacagatgcggga

SEQ ID NO: 791098 - DNA, 75 bp, synthetic construct
  source 1..75: mol_type = other DNA
cgtatggctgcaagacagtgcaggaggcgatcacttaccgcgaaaactttagccagcgcgaagggatgctgatct

SEQ ID NO: 791099 - DNA, 75 bp, synthetic construct
  source 1..75: mol_type = other DNA
tggacgagtcggtgaacgacaaagacaccctgaaagccggaaaactcaccatcgattacgactacacgccagtgc

SEQ ID NO: 791100 - DNA, 75 bp, synthetic construct
  source 1..75: mol_type = other DNA
cttctgcggtggcgatcattatgttattgctgctgattgtgccaattatgtggttccacaaatatcagcaaaaaa

SEQ ID NO: 791101 - DNA, 75 bp, synthetic construct
  source 1..75: mol_type = other DNA
aaaacaacggtgtgctgaataattttctgctgtggctgggggttatcgatcaaccgctgaccattctgcatacca

SEQ ID NO: 791102 - DNA, 75 bp, synthetic construct
  source 1..75: mol_type = other DNA
ccccctcaataaacctgtgctgattaccaatgtgcagagcgcaattgcaaaggctggtaaaaaaggcacgctggc

SEQ ID NO: 791103 - DNA, 75 bp, synthetic construct
  source 1..75: mol_type = other DNA
gaccgtcggctggcataaaaccctgtctaacgtcggcgtgcagggtgtcaccggcatcagtgcgtcagtgttttg

SEQ ID NO: 791104 - DNA, 75 bp, synthetic construct
  source 1..75: mol_type = other DNA
cgacgaggaatcgaatgacaaggaaaccctcaaggccgggaaactgtatatcgactacgactatacgccggttcc

SEQ ID NO: 791105 - DNA, 75 bp, synthetic construct
  source 1..75: mol_type = other DNA
gtctgcgccgttacttcgaacagcgagtcgccacacataaagaagctcactggcaggcttattatcaagcccgcc

SEQ ID NO: 791106 - DNA, 75 bp, synthetic construct
  source 1..75: mol_type = other DNA
gtcaccacgcttgtgcgcaaggatggtttccgcttctggggttcccgctgtctgagcgatgatccgctttttgct

SEQ ID NO: 791107 - DNA, 75 bp, synthetic construct
  source 1..75: mol_type = other DNA
accagcccacaaaacgccatcgcgaaagccggtaccaaaggtaccctagcaaaatccttacaggccattgctgac

SEQ ID NO: 791108 - DNA, 75 bp, synthetic construct
  source 1..75: mol_type = other DNA
attcgctggtagaggcggcactggatctcggcgcgcgaccgctgaaaacgttcttcaccgtcattgtgccactga

SEQ ID NO: 791109 - DNA, 75 bp, synthetic construct
  source 1..75: mol_type = other DNA
agccattggggaggttgattgttttactaaagtacccttactctcaaataaggaatcagagtttttaggcattct

SEQ ID NO: 791110 - DNA, 75 bp, synthetic construct
  source 1..75: mol_type = other DNA
agttcctgacattcccggcgtgctggcgatatacgccgaacgccgccaggaccgcaacggaccgtacgcctgcct

SEQ ID NO: 791111 - DNA, 75 bp, synthetic construct
  source 1..75: mol_type = other DNA
gtacgcttttatggctggggaaagagactacttttaccgggccgaaatcctcccaggaagccgggattgggatta

SEQ ID NO: 791112 - DNA, 75 bp, synthetic construct
  source 1..75: mol_type = other DNA
gaatttactcgtgagcaggccacccaggaagtgttaatggctgccgctgtgggcaagctaaatcgcgtgaatcag

SEQ ID NO: 791113 - DNA, 75 bp, synthetic construct
  source 1..75: mol_type = other DNA
caatgaccctgtaccggcaacatcctggctcccgactgtttcgcttcagcacgggcaaatataaatggtcaggca

SEQ ID NO: 791114 - DNA, 75 bp, synthetic construct
  source 1..75: mol_type = other DNA
ggttcaggatatcagcggtgtgctcgcggtcttcgctgaacgccgtcagagccgcaacggcccctatgtcgtatt

SEQ ID NO: 791115 - DNA, 75 bp, synthetic construct
  source 1..75: mol_type = other DNA
tcagtttcggttgtttcgcttctgtaccggaaagaacaaatggagcggcagcatctgccactacgccgggcgtga

SEQ ID NO: 791116 - DNA, 75 bp, synthetic construct
  source 1..75: mol_type = other DNA
cctctccccaggcaacatggcgcggtaactttcgcgaactttctgccagcgtcacgcggatggccacctttgcca

SEQ ID NO: 791117 - DNA, 75 bp, synthetic construct
  source 1..75: mol_type = other DNA
gcttgttgggggtgtcccgcaagatcatccattccatccgtttttactcgctatagctaagcagcttgacccgag

SEQ ID NO: 791118 - DNA, 75 bp, synthetic construct
  source 1..75: mol_type = other DNA
cttggttccttaagctcaatgcttacgcagtttaaggaggatggctacaaaatagctgcagaaataaaacatact

SEQ ID NO: 791119 - DNA, 75 bp, synthetic construct
  source 1..75: mol_type = other DNA
tggtgacacctatccagtgggtaatgatgtccgataccgtcgactacggcgagtggtgtaatggtaaacgcctga

SEQ ID NO: 791120 - DNA, 75 bp, synthetic construct
  source 1..75: mol_type = other DNA
caaagccagcgtcaatgacgcggatcggctacgcaaatacctggcgcgttttggtctgacgtgggaagccgtgca

SEQ ID NO: 791121 - DNA, 75 bp, synthetic construct
  source 1..75: mol_type = other DNA
ggagcgccacgccacactcactggcgacagcgtgcgttttaacaccgaagcgcggcgcgcctggttggcttttgc

SEQ ID NO: 791122 - DNA, 75 bp, synthetic construct
  source 1..75: mol_type = other DNA
ctccgccgtgggggtcggtctggctggatcgcgaatctgtgctgtttggcgattcaacattggcacttcgtcagt

SEQ ID NO: 791123 - DNA, 75 bp, synthetic construct
  source 1..75: mol_type = other DNA
gactatatcaccaagccgttttcgccgaaggagctggtggcgcgaatcaaagcggtaatgcgccgtatttcgcca

SEQ ID NO: 791124 - DNA, 75 bp, synthetic construct
  source 1..75: mol_type = other DNA
taagagagtttatcgacagcagccagccaccgcttagcgaggtaaatcaggagaagtttaacaatatcaagaaag

SEQ ID NO: 791125 - DNA, 75 bp, synthetic construct
  source 1..75: mol_type = other DNA
attgaagctgcacaaaaatcaacgccgacgctcctttcattaatggatgaaggcgtacgttttactaacggctat

SEQ ID NO: 791126 - DNA, 75 bp, synthetic construct
  source 1..75: mol_type = other DNA
aactgattatccagcgcgtgtgtgctatgacaggaatttcttttttcgaatttaaaaacactgtcgatatgatgg

SEQ ID NO: 791127 - DNA, 75 bp, synthetic construct
  source 1..75: mol_type = other DNA
gcgcggccttgaaaccggcgcggatgactatatcaccaagccgttttcgccgaaggagctggtggcgcgaattaa

SEQ ID NO: 791128 - DNA, 75 bp, synthetic construct
  source 1..75: mol_type = other DNA
gactatatcaccaagccgttttcgccgaaggagctggtggcgcgaattaaagcggtgatgcgccgtatttcccct

SEQ ID NO: 791129 - DNA, 75 bp, synthetic construct
  source 1..75: mol_type = other DNA
cggatgaggctattggtgttgtcgatcgtgccaaaacgctcgaccagccgtttatgctttatctggcttataatg

SEQ ID NO: 791130 - DNA, 75 bp, synthetic construct
  source 1..75: mol_type = other DNA
gaatacagcactaaaggtaagccaaatattatcgtattgaccatggatgatctgggctatgggcaactgccattt

SEQ ID NO: 791131 - DNA, 75 bp, synthetic construct
  source 1..75: mol_type = other DNA
tcttggttatggacaacttccttttgataagggatcttttgacccaaaaacaatggaaaatcgtgaagttgtcga

SEQ ID NO: 791132 - DNA, 75 bp, synthetic construct
  source 1..75: mol_type = other DNA
tccagcaaaaagataatcttgcagcagccaatccgcaagttgtcaaagagatgcaaggcgtggtgagtgagttta

SEQ ID NO: 791133 - DNA, 75 bp, synthetic construct
  source 1..75: mol_type = other DNA
tgaatacccacataacccaaacaccgaagatttgagccagttctcttatacggtaagaaataatgattactctct

SEQ ID NO: 791134 - DNA, 75 bp, synthetic construct
  source 1..75: mol_type = other DNA
ataaaaatctgacctggataacctcttattctcactggtttgacgaggaaaatattccattctgggataattacc

SEQ ID NO: 791135 - DNA, 75 bp, synthetic construct
  source 1..75: mol_type = other DNA
ttaaaaacattgcaatctttccgtactgcccaggataacggcgatgtcgattttggtcagaatttaattgcccgt

SEQ ID NO: 791136 - DNA, 75 bp, synthetic construct
  source 1..75: mol_type = other DNA
gctgaaaaaatcagcaatgggtgatgatggcactattctttgctgtagttgtgtaccgaagactgcacttaagct

SEQ ID NO: 791137 - DNA, 75 bp, synthetic construct
  source 1..75: mol_type = other DNA
gatggcgtatatcaaagcggtgaaggcactggatttaagcaccgttactgacgaagccactttttattccatcaa

SEQ ID NO: 791138 - DNA, 75 bp, synthetic construct
  source 1..75: mol_type = other DNA
gtgtgctcacaaatagggcttttagattcaaaatgtctcacatggagcgtggccttacagtggtcaaaactgcac

SEQ ID NO: 791139 - DNA, 75 bp, synthetic construct
  source 1..75: mol_type = other DNA
agcaaaatggcgtaggcctaatcctagcggcaactggggtatcgtatcagcggttcggtgggacaaactgagaaa

SEQ ID NO: 791140 - DNA, 75 bp, synthetic construct
  source 1..75: mol_type = other DNA
attgaggtgctggctaatgctctgagtgttgagccgtggcgactattggtgtctgattcatctgaagatagtgac

SEQ ID NO: 791141 - DNA, 75 bp, synthetic construct
  source 1..75: mol_type = other DNA
atggagctcagaaacgttacgcgttattaccctgaagaaatgccttatggtgaaggcattcagtatttccgtagt

SEQ ID NO: 791142 - DNA, 75 bp, synthetic construct
  source 1..75: mol_type = other DNA
gcgatggatttcagccccatcactgataaaacctcatataacgccattgaatggcccgtctctccggaagcctct

SEQ ID NO: 791143 - DNA, 75 bp, synthetic construct
  source 1..75: mol_type = other DNA
gagaaactattaaaatctgcaatttatatacttagtaagtatccaaatgaatgcaggggagaaaggaaagaaata

SEQ ID NO: 791144 - DNA, 75 bp, synthetic construct
  source 1..75: mol_type = other DNA
caagctgtgcacgcatcctgaaaccggcgttatttattcaatggcggaagacgtatcccggctttatccggcagg

SEQ ID NO: 791145 - DNA, 75 bp, synthetic construct
  source 1..75: mol_type = other DNA
gcgctggatttaagtcaggtcagtgacgaatcctccttttatttaattcagtggccggaaaaacctgacgtgtaa

SEQ ID NO: 791146 - DNA, 75 bp, synthetic construct
  source 1..75: mol_type = other DNA
agtactgccggtgcccgttgattacccacgattatcagaaaaacaacgccagcgtctgctgaatgaagcaaagga

SEQ ID NO: 791147 - DNA, 75 bp, synthetic construct
  source 1..75: mol_type = other DNA
gcgtctttggatgcgattgaggtgctagctaatgctctgagtgttgagccgtggcaactgttggtgtctgattta

SEQ ID NO: 791148 - DNA, 75 bp, synthetic construct
  source 1..75: mol_type = other DNA
gctgaaaaaatcagcaatgggcgatgatggcaccattctttgctgtagctgtgtaccgaagactgcacttaagtt

SEQ ID NO: 791149 - DNA, 75 bp, synthetic construct
  source 1..75: mol_type = other DNA
tctaaagatgacgacccggaactgttggttccatacgcggccgatggctcgtgctttaatcctggacttgcgagt

SEQ ID NO: 791150 - DNA, 75 bp, synthetic construct
  source 1..75: mol_type = other DNA
agtatggagacggcaaaatggcgtaggcccaatgccagtggcaactggggcattgtttcggcagtgcggtgggac

SEQ ID NO: 791151 - DNA, 75 bp, synthetic construct
  source 1..75: mol_type = other DNA
gctgccgtggatcaagctcgaaaagcccgacgcgcgcctgattcgcctctctgaaaagaacaataactggacgtt

SEQ ID NO: 791152 - DNA, 75 bp, synthetic construct
  source 1..75: mol_type = other DNA
atgaaagcgttctttctgaccagatctgccgcgctactgctggcctgtggcgcgatcgtttcaccggtaatggcg

SEQ ID NO: 791153 - DNA, 75 bp, synthetic construct
  source 1..75: mol_type = other DNA
cttcacccgtgcatgatggcttgcatctcaccgcaccagatggcagtagtgcatatgttcgttttgctgatttcg

SEQ ID NO: 791154 - DNA, 75 bp, synthetic construct
  source 1..75: mol_type = other DNA
atgagtcacaagtttttagcgggcgcggggctactggtactggccggatggggtgtcagcggtttagccgttgct

SEQ ID NO: 791155 - DNA, 75 bp, synthetic construct
  source 1..75: mol_type = other DNA
ttggttccatacgcagccgatggttcctgttttcaccccggtttggcgagcacccgtgatggttcgtttggcgta

SEQ ID NO: 791156 - DNA, 75 bp, synthetic construct
  source 1..75: mol_type = other DNA
gaagcgttttggcacgtttgctgaagctcttgagtatcttcgtagcatggagacagcaaaatggcgtaggcctaa

SEQ ID NO: 791157 - DNA, 75 bp, synthetic construct
  source 1..75: mol_type = other DNA
gttctcagcacggatattgcaggtttaggggtgcggatagaaaacgccgccgataattccctgtttgcggtcggt

SEQ ID NO: 791158 - DNA, 75 bp, synthetic construct
  source 1..75: mol_type = other DNA
aactgtggcaataaagtcagcgatgacttacagatgcagcttaaaggcaacacgactgttatcaacggggaaacg

SEQ ID NO: 791159 - DNA, 75 bp, synthetic construct
  source 1..75: mol_type = other DNA
ccgacaggatgcgaaatacaccctcaactgcagcaatagagccagcgacgatttacagatgcagctcaaaggcaa

SEQ ID NO: 791160 - DNA, 75 bp, synthetic construct
  source 1..75: mol_type = other DNA
tcggagctttttatattgacggctggtatgaaataagccgaaacaaaatgtatataactgactatgaatacaatc

SEQ ID NO: 791161 - DNA, 75 bp, synthetic construct
  source 1..75: mol_type = other DNA
cgctgtgatttagatacgacttaccgtttcaatagccgtatcggagaggtggcaaaccgttttattcagcagaat

SEQ ID NO: 791162 - DNA, 75 bp, synthetic construct
  source 1..75: mol_type = other DNA
agcggtgcgcaaatgtcgctcaccaccgctttccatgaaaactttggtgaaggcgatcgctgtgatttagacacg

SEQ ID NO: 791163 - DNA, 75 bp, synthetic construct
  source 1..75: mol_type = other DNA
aaagaaagcgcaggcgaagggctggcggcaatggctgacggaagaaatgcagtggtcagtgccagaaggtaactt

SEQ ID NO: 791164 - DNA, 75 bp, synthetic construct
  source 1..75: mol_type = other DNA
atggaagaggcgctattgccgccagtggaagatttccctgacgccgaagaacggcggttaatgtacgttgcgctg

SEQ ID NO: 791165 - DNA, 75 bp, synthetic construct
  source 1..75: mol_type = other DNA
gggtaaacctgatgcggatgcacggtggtgcacaggctgaaatgattgccagcgcgcccgaggaaattcgtgact

SEQ ID NO: 791166 - DNA, 75 bp, synthetic construct
  source 1..75: mol_type = other DNA
tgattgccacgcgcaccggcgacaataaatggctgacgcgggagcaaacttctggcgtacagcaacaaattcgcc

SEQ ID NO: 791167 - DNA, 75 bp, synthetic construct
  source 1..75: mol_type = other DNA
gactctgagaaacaaatggccgctgttgcaagaaaacgtcttacacacaaagagataaaagtttttgtcaaaaac

SEQ ID NO: 791168 - DNA, 75 bp, synthetic construct
  source 1..75: mol_type = other DNA
ccagcaccgaacagcacaataacagcatcaaccatatctacccgcgcattgcccgcgtgcgtcgcgtggaagaga

SEQ ID NO: 791169 - DNA, 75 bp, synthetic construct
  source 1..75: mol_type = other DNA
ttatgtgggatctcgaccaatatcggtgttgaatccaccgcccgcaatgcctgggaacttggctttaatctggtg

SEQ ID NO: 791170 - DNA, 75 bp, synthetic construct
  source 1..75: mol_type = other DNA
agcagggcagcaaaaaagttccgatagtcagcaaactggaaaatgataccgctgcccgtcatgaactctttattg

SEQ ID NO: 791171 - DNA, 75 bp, synthetic construct
  source 1..75: mol_type = other DNA
acgcgaaaatatggtgaacctttgccaactgtcttttcagaaaaagttaagatccagcgttttctgctctatcgt

SEQ ID NO: 791172 - DNA, 75 bp, synthetic construct
  source 1..75: mol_type = other DNA
atgtcgcagatagaaaatgcagtgacttcctcatctggcgcaaaacgagcatacagaaagggtaaacctttgagt

SEQ ID NO: 791173 - DNA, 75 bp, synthetic construct
  source 1..75: mol_type = other DNA
caggctcgggcagtcgttaatggcgaacattctctgttagtgctggcaggcgcaggaagcggtaaaacatcggtg

SEQ ID NO: 791174 - DNA, 75 bp, synthetic construct
  source 1..75: mol_type = other DNA
actgccgtctgtcttctggtcgtaactatgcaacagagttagaacgccagcttggaatcactctggagcgtatcg

SEQ ID NO: 791175 - DNA, 75 bp, synthetic construct
  source 1..75: mol_type = other DNA
ctgagatggtatgggttataagcgctggtgtactagaacatgtaattactaccgttaggaataagatcctcgact

SEQ ID NO: 791176 - DNA, 75 bp, synthetic construct
  source 1..75: mol_type = other DNA
ttagtggacgctaagatactgactaagaacggcacatttaactctcgatttttctcaaaagaaacagtagctaaa

SEQ ID NO: 791177 - DNA, 75 bp, synthetic construct
  source 1..75: mol_type = other DNA
tcggaactttttatattgacggatggtatgaagtaagccggaacaaaatgtatataactgattatgaattcaatc

SEQ ID NO: 791178 - DNA, 75 bp, synthetic construct
  source 1..75: mol_type = other DNA
aattcctcctgcattcatagataacgatgagcgagagctatcagaatgggatgattgggagatttcagtatgcga

SEQ ID NO: 791179 - DNA, 75 bp, synthetic construct
  source 1..75: mol_type = other DNA
ggatggacagaaaatgacattcttcgctactgccgtctgtcttctggtcgtaactatgcaacagagttagaacgc

SEQ ID NO: 791180 - DNA, 75 bp, synthetic construct
  source 1..75: mol_type = other DNA
aaacgacgttgttcgctgttggtgatgactggcaggcgatttaccgattcagcggtgcgcaaatgtcgcttacca

SEQ ID NO: 791181 - DNA, 75 bp, synthetic construct
  source 1..75: mol_type = other DNA
agcagggcagcaaaaaagtgccgacagtcagcaaactagaaaatgataccgctgcccgtcatgaactctttattg

SEQ ID NO: 791182 - DNA, 75 bp, synthetic construct
  source 1..75: mol_type = other DNA
gcggcattacgcaagcaaaacagccagacgacgttgtttgccgttggcgatgactggcaggcgatttaccgcttc

SEQ ID NO: 791183 - DNA, 75 bp, synthetic construct
  source 1..75: mol_type = other DNA
ggaaggcatcccggcaacagagatgttcaacgtgattccactggcaccgggtcatgcctacgggatgtttatgga

SEQ ID NO: 791184 - DNA, 75 bp, synthetic construct
  source 1..75: mol_type = other DNA
ttagcccaagcactaggaactactgagtcctatctcctatatggagtatcgtctactgaacctacccttgtgcag

SEQ ID NO: 791185 - DNA, 75 bp, synthetic construct
  source 1..75: mol_type = other DNA
taagctaatccgaccaccacaatgtgagtgctgcggatcagaatgtaaaccacaggcgcaccactgcgactacag

SEQ ID NO: 791186 - DNA, 75 bp, synthetic construct
  source 1..75: mol_type = other DNA
atttaagccctctcaatccacgctatcagtcatccttacttacaccagagtgtaaaattgttgccgtagcaaaag

SEQ ID NO: 791187 - DNA, 75 bp, synthetic construct
  source 1..75: mol_type = other DNA
ctgccataacggtgctggcagtgagtaacggatttgcgcatgcgcaaactgaatataaagataaaaatgatgccg

SEQ ID NO: 791188 - DNA, 75 bp, synthetic construct
  source 1..75: mol_type = other DNA
ccatgttctggtccctgcctttagcaacccgaaagaagggcttactgactacaacgatttgcatgtctctgaagg

SEQ ID NO: 791189 - DNA, 75 bp, synthetic construct
  source 1..75: mol_type = other DNA
actacgtggtctaacggcccctcgcgtatttttggatgagatatccaatgtcaacgccgacggcgaagaaggcaa

SEQ ID NO: 791190 - DNA, 75 bp, synthetic construct
  source 1..75: mol_type = other DNA
attgggtagtagtgcttccctccgtcggccttaccgcacctcgcgtttttttggatgagatctcaaacgtagatg

SEQ ID NO: 791191 - DNA, 75 bp, synthetic construct
  source 1..75: mol_type = other DNA
aataaggtgatttccagcgtgataccaggtgctttttcggttgaaaagaaattgcttgaattactggaaaaacaa

SEQ ID NO: 791192 - DNA, 75 bp, synthetic construct
  source 1..75: mol_type = other DNA
aaagtgcagaaaaactcgcgtaccggcagcgtttatattgtgaaaccgaaaatgcacggtccacaggaagtggct

SEQ ID NO: 791193 - DNA, 75 bp, synthetic construct
  source 1..75: mol_type = other DNA
gtttacgcattgacgccgactttaaacgttttgtggatgaagaagttttgccgggcgtagaactggatgctgccg

SEQ ID NO: 791194 - DNA, 75 bp, synthetic construct
  source 1..75: mol_type = other DNA
ttgtgcgtaagctgaatgcagatcgtcaatacactgccgccgatggttctgaaatttctctgcacggacgctcgc

SEQ ID NO: 791195 - DNA, 75 bp, synthetic construct
  source 1..75: mol_type = other DNA
ccggaggaagccgcgccggtggccagcgctcccgcagctgccgaaccggaggaaaccgcaccggtggccagcgcc

SEQ ID NO: 791196 - DNA, 75 bp, synthetic construct
  source 1..75: mol_type = other DNA
caataacatcattatcgcttatgtttttggctttctggcaggaatggcaaacagttttctcgatgcaggcactta

SEQ ID NO: 791197 - DNA, 75 bp, synthetic construct
  source 1..75: mol_type = other DNA
tgctgtttatccgcaacgtggggcatttgatgactatccccgtaatttgggacagcgaaggcaatgaaattccgg

SEQ ID NO: 791198 - DNA, 75 bp, synthetic construct
  source 1..75: mol_type = other DNA
gtagatagttcgaacggcaacgcaactagtaccgtatatcgctattgcagtagttctactatctttaaaccaatc

SEQ ID NO: 791199 - DNA, 75 bp, synthetic construct
  source 1..75: mol_type = other DNA
agaagtggttggtagcgcgctgcaaatgctggaaccgggtttatcatcgcccatcaacctttctctgccagaacc

SEQ ID NO: 791200 - DNA, 75 bp, synthetic construct
  source 1..75: mol_type = other DNA
cgtaccgtgggcggcacatcagcgagtttgatctcgatgccgccctcgcccgccgtccggcactgatcttaatgg

SEQ ID NO: 791201 - DNA, 75 bp, synthetic construct
  source 1..75: mol_type = other DNA
cgaagagaaagtctggcacacacgcgacgcgatcctattatgcatcgggcataacaccggcagtgagaaactggt

SEQ ID NO: 791202 - DNA, 75 bp, synthetic construct
  source 1..75: mol_type = other DNA
ttacgctgttagtcgccaatgcccttgagcggctgacactgaccgccagcgaagaacaggcgcggatggcaagcg

SEQ ID NO: 791203 - DNA, 75 bp, synthetic construct
  source 1..75: mol_type = other DNA
cggacgatctgcgccaacgactgaaagaaggcaaagtctatattgccgggcaggcagaacgcgccattgagcatt

SEQ ID NO: 791204 - DNA, 75 bp, synthetic construct
  source 1..75: mol_type = other DNA
gcgccagttgatgatcccggaacagcagcgcctgctggagacgtttacgctgttagtcgccaatgcccttgagcg

SEQ ID NO: 791205 - DNA, 75 bp, synthetic construct
  source 1..75: mol_type = other DNA
tacgaacaaagtaataaacagaagttttatgtaccgtgtccacactgtaaccactctcacgaattagtttttgaa

SEQ ID NO: 791206 - DNA, 75 bp, synthetic construct
  source 1..75: mol_type = other DNA
gcatgttcggtactaaagaatctagtaagtaataagaatgataagaactttactaataacgataagacacaacaa

SEQ ID NO: 791207 - DNA, 75 bp, synthetic construct
  source 1..75: mol_type = other DNA
gcatgtccggtactaaaaaatctagttagtaataagaatgataagaactttacgaacaacgataagacacaacaa

SEQ ID NO: 791208 - DNA, 75 bp, synthetic construct
  source 1..75: mol_type = other DNA
ttgtcgtccatacaattatcaacaggaattttcaattacggaatactgaatttgctattaaagttattcatggtg

SEQ ID NO: 791209 - DNA, 75 bp, synthetic construct
  source 1..75: mol_type = other DNA
attgtgatgcctttagagacaatgtttaggtttacaatcgataataatatcgacaatgtagaattaataaaaaaa

SEQ ID NO: 791210 - DNA, 75 bp, synthetic construct
  source 1..75: mol_type = other DNA
ccgtgctgtatcagataatgaaaatagtaaggaagtacagattcactttagccattcagtaccagatgattactt

SEQ ID NO: 791211 - DNA, 75 bp, synthetic construct
  source 1..75: mol_type = other DNA
atgagtgaaaccataacccagggccgtttacgcattgacgccaattttaaacgttttgtggatgaagaagtttta

SEQ ID NO: 791212 - DNA, 75 bp, synthetic construct
  source 1..75: mol_type = other DNA
gttgtcattaccagaattggtggcgtgaattataagcgccccattgattacaagcttgtctgtaacaacctggcc

SEQ ID NO: 791213 - DNA, 75 bp, synthetic construct
  source 1..75: mol_type = other DNA
accgccctgttccgtaaaggggagcaacgtggattttggcaatgtctacattagcaaaatcaatggcacaaatta

SEQ ID NO: 791214 - DNA, 75 bp, synthetic construct
  source 1..75: mol_type = other DNA
cgttgcgcgttctggtggatgggccaccgccctgttccgtgaaggggagcaatgttgaatttggcgatgtgtaca

SEQ ID NO: 791215 - DNA, 75 bp, synthetic construct
  source 1..75: mol_type = other DNA
ctatgacgataccgttcgcctgaccatgcaacacgcgcagcagcacggctgggaagtggtgcaagataccgcctg

SEQ ID NO: 791216 - DNA, 75 bp, synthetic construct
  source 1..75: mol_type = other DNA
caccaccgacggcaaccacgggcgcggtgtggcgtgggcagcgcagcaactcggacagaatgcggtgatttacat

SEQ ID NO: 791217 - DNA, 75 bp, synthetic construct
  source 1..75: mol_type = other DNA
gccgtcgagcaaatgcgtgaaatgggcgtaaccccgacgcacgttctgctgcaagccggtgtcggagcaatggcc

SEQ ID NO: 791218 - DNA, 75 bp, synthetic construct
  source 1..75: mol_type = other DNA
gggtgtcagcggtttagccgttgctggcagcgatatcaaacaggtggatctgacgctgcgaatcctggtcgatgg

SEQ ID NO: 791219 - DNA, 75 bp, synthetic construct
  source 1..75: mol_type = other DNA
aaactggaaggtgatgtcgaatcgcggcaattgcggctggcagatttagggccattgattggcgttgattctgga

SEQ ID NO: 791220 - DNA, 75 bp, synthetic construct
  source 1..75: mol_type = other DNA
acattgtcggtgcgatatttggtgacgatgaggtgcgggtgaactgcgcggcggcgaatctgaatattgccaacg

SEQ ID NO: 791221 - DNA, 75 bp, synthetic construct
  source 1..75: mol_type = other DNA
gtaaaacagaacggcgtacagctcgcgccagcggaatttaacgccagtatgaccatggtggtggattaccaatga

SEQ ID NO: 791222 - DNA, 75 bp, synthetic construct
  source 1..75: mol_type = other DNA
tgtggttattgctatgtagtattgtgagcacgcctgtaatggcgggtagcaaatcggttgcgatggtcttgcggg

SEQ ID NO: 791223 - DNA, 75 bp, synthetic construct
  source 1..75: mol_type = other DNA
ctctgtgaagggaagcgcggtggaatttggcgacgtgtacatcagtaagattaatggcacgaattaccgacagga

SEQ ID NO: 791224 - DNA, 75 bp, synthetic construct
  source 1..75: mol_type = other DNA
acatggaagatttgtttggtgaagtcatggtaccaaccgaagaagtggttgaaatccgtggcggtcagcgtcgca

SEQ ID NO: 791225 - DNA, 75 bp, synthetic construct
  source 1..75: mol_type = other DNA
atgaaatgcattcggtgatggaagctggcccgatgctgcgtaaaaaccagatgaaatcgacgccgtggatcaaag

SEQ ID NO: 791226 - DNA, 75 bp, synthetic construct
  source 1..75: mol_type = other DNA
cgttcacgatctggcaccagaaaatcgtcagttgctggcagaacgcgatcgcattcaggcggcgcttgatgagtg

SEQ ID NO: 791227 - DNA, 75 bp, synthetic construct
  source 1..75: mol_type = other DNA
ctgttcggtggtacgtcacgttttgtcattatccggcagaaaacgtacatgacacagaatatgaagatgttctcc

SEQ ID NO: 791228 - DNA, 75 bp, synthetic construct
  source 1..75: mol_type = other DNA
gaaaccacgggcatcgacagcgaaatcaccagtcaggcggggccacagctggtggttccggcgatgaacgcccgc

SEQ ID NO: 791229 - DNA, 75 bp, synthetic construct
  source 1..75: mol_type = other DNA
ggcgtgaaacagccaaacggctataccgaaccgttattacacgcctggcgtttacgcgaaaaagaaagtcattaa

SEQ ID NO: 791230 - DNA, 75 bp, synthetic construct
  source 1..75: mol_type = other DNA
tcgctaactcgtgtgcttttaaagctgccagcgatttaatcttcctcggcgtgaaacagccaaacggctataccg

SEQ ID NO: 791231 - DNA, 75 bp, synthetic construct
  source 1..75: mol_type = other DNA
ctgtaatgattgcttctcctggtgatgtcgctgaagagagacaagtcattcgtgaaatgatccatgagtggaatg

SEQ ID NO: 791232 - DNA, 75 bp, synthetic construct
  source 1..75: mol_type = other DNA
agtttaagcgtgctggcgacagactcaataacagccagaaagcctttaagcgttatctcattcgtgacatggaga

SEQ ID NO: 791233 - DNA, 75 bp, synthetic construct
  source 1..75: mol_type = other DNA
ctgcgtgagcatatcaaattacacaacatggaagagttgtttggcgaagtcatggttccgactgaagaagtcgtt

SEQ ID NO: 791234 - DNA, 75 bp, synthetic construct
  source 1..75: mol_type = other DNA
ggaggaaacagggcggaggaggaacgtctgaaagcgaaaatcagctgtctgggaatgaacgattgcgtgctgatg

SEQ ID NO: 791235 - DNA, 75 bp, synthetic construct
  source 1..75: mol_type = other DNA
ggcgctgcaggctgcgggatgtacaaacaccatccgggtggtttcaccgggatttgattttgatgcaatccggga

SEQ ID NO: 791236 - DNA, 75 bp, synthetic construct
  source 1..75: mol_type = other DNA
atatcatttggacttgtaattggaagaggaagtaaggggcaaatatatgatgttacccataaaggatggactctt

SEQ ID NO: 791237 - DNA, 75 bp, synthetic construct
  source 1..75: mol_type = other DNA
cgttgtccggaacgtcttaaacagcaaacccgcaaaaaacggcatcagcgttggacagaggttatgaccctgcat

SEQ ID NO: 791238 - DNA, 75 bp, synthetic construct
  source 1..75: mol_type = other DNA
aactgtaaatatcacatagtatttgcgccaaaataccgaagacaggtgttctacagagagaagcgtagagcaata

SEQ ID NO: 791239 - DNA, 75 bp, synthetic construct
  source 1..75: mol_type = other DNA
ttatctgccgcgtgctggaacctctgctggcacaaatggggattcatcagcaaaccacgctgttacgccacggtt

SEQ ID NO: 791240 - DNA, 75 bp, synthetic construct
  source 1..75: mol_type = other DNA
atgagcggcgctcgattacacacgctgctgcctgaattaaccacgcgtcagccggttatggtgattggcgcggca

SEQ ID NO: 791241 - DNA, 75 bp, synthetic construct
  source 1..75: mol_type = other DNA
aaagcagtctgatgctttacgagcagtttggtgatttgaaattcaaatacaggaacagggtagttctggtgtcag

SEQ ID NO: 791242 - DNA, 75 bp, synthetic construct
  source 1..75: mol_type = other DNA
acacccgatggaactgtaaatatcacatggtttttgcgccaaaataccgaagacaggtgttctacagagagaagc

SEQ ID NO: 791243 - DNA, 75 bp, synthetic construct
  source 1..75: mol_type = other DNA
aggtgtggcgctgggatcgcagcgcctggtcttccggcccggcaccgtgcgcggcggcgattaccgctttgctat

SEQ ID NO: 791244 - DNA, 75 bp, synthetic construct
  source 1..75: mol_type = other DNA
tgttgaagtgagcggcggtaccgataacccgtcggccccgcctgcggattttatccgccgggtgctggagccgct

SEQ ID NO: 791245 - DNA, 75 bp, synthetic construct
  source 1..75: mol_type = other DNA
cggaaatttgcggagcaaccgtggaaggcgcggagctggggtcgcagcgtctgctcttccggcccggcaccgtgc

SEQ ID NO: 791246 - DNA, 75 bp, synthetic construct
  source 1..75: mol_type = other DNA
cgggagaatttacggtcgcccatccttcatgccatctgctgaccaatatcgcggtggtggagcgtttcttgccgg

SEQ ID NO: 791247 - DNA, 75 bp, synthetic construct
  source 1..75: mol_type = other DNA
gggcgcggagctggggtcgcagcgtctggtcttccggcccggtaccgtgcgcggtggcgactaccgctttgctat

SEQ ID NO: 791248 - DNA, 75 bp, synthetic construct
  source 1..75: mol_type = other DNA
tggagaggtgttattagctggcgtgccgcgccatgtcgctgagcgtgaaatcgctacgctggcggcaagtttttc

SEQ ID NO: 791249 - DNA, 75 bp, synthetic construct
  source 1..75: mol_type = other DNA
aagacgtgacgccgtttatcgattttggcccacgtattggcgatatcccggatgcattactggcgcggatcatgg

SEQ ID NO: 791250 - DNA, 75 bp, synthetic construct
  source 1..75: mol_type = other DNA
atcacccatcttgtagcctggcccgtaagctgggagtgaaggacgagccacttacgctgctgaaaaatgtgcgtg

SEQ ID NO: 791251 - DNA, 75 bp, synthetic construct
  source 1..75: mol_type = other DNA
aacagaactgcgccgtagcaccgtagcccgcgtttgtaccggtcgtgccggtccgcgtccgcgtacccaggcgtt

SEQ ID NO: 791252 - DNA, 75 bp, synthetic construct
  source 1..75: mol_type = other DNA
gtgaactatgaagagattctgccaccgctgatggcgggcctgaaacaggccgggttgaaagtcggcacaccgttc

SEQ ID NO: 791253 - DNA, 75 bp, synthetic construct
  source 1..75: mol_type = other DNA
ggctatgctattgggctgacttcgagctggtttcagcatggtagccagcagcagggggcgtggctggatagctgg

SEQ ID NO: 791254 - DNA, 75 bp, synthetic construct
  source 1..75: mol_type = other DNA
tagcggcgacctgtttagcgggcgatgatggcgaatggacgctgggagccattggtggctacagcgataaccagg

SEQ ID NO: 791255 - DNA, 75 bp, synthetic construct
  source 1..75: mol_type = other DNA
aaacctgattttcttatcggggctgacgccagttgtctgctaaacatcggcggtcggcttagccgtgaagggcat

SEQ ID NO: 791256 - DNA, 75 bp, synthetic construct
  source 1..75: mol_type = other DNA
ggaactggataactacacgcttgccgatttggttgaagagaatcaaccactttataaattattgctggtggagtg

SEQ ID NO: 791257 - DNA, 75 bp, synthetic construct
  source 1..75: mol_type = other DNA
gtggaaaaaatggcggcattcgcctgggtaaaccggcgagtgcgatacgtattggtgatgtggtgcggagctgga

SEQ ID NO: 791258 - DNA, 75 bp, synthetic construct
  source 1..75: mol_type = other DNA
catggcttgtcgaccgctggtgtcgcttaatcgccaggaggctgaaattgctgccgaacgttttcgtttatccgc

SEQ ID NO: 791259 - DNA, 75 bp, synthetic construct
  source 1..75: mol_type = other DNA
gggactgaaagtcggtacgccattctttgttcgttatggtcgcgtgaagattgaagaccagattggcgaacttct

SEQ ID NO: 791260 - DNA, 75 bp, synthetic construct
  source 1..75: mol_type = other DNA
tctctaacattcaccagggcggcacgccgccggttgaagccgcagccgtcattgtggatttggcgaaacgtatgc

SEQ ID NO: 791261 - DNA, 75 bp, synthetic construct
  source 1..75: mol_type = other DNA
tggcctgtcaactgatgccatcaccgtcaactatgaagagatcctgccgccgttgatggcaggtctgcaacaggc

SEQ ID NO: 791262 - DNA, 75 bp, synthetic construct
  source 1..75: mol_type = other DNA
gcggcggcgattaccgctttgctatcggtagtgccggaagcagcacgctggtgctgcaaacggtgctacccgcgc

SEQ ID NO: 791263 - DNA, 75 bp, synthetic construct
  source 1..75: mol_type = other DNA
atgaatattgctgcctgtgcttttatggtctttttactgagtgtttgggggctcacctatataaaattacggact

SEQ ID NO: 791264 - DNA, 75 bp, synthetic construct
  source 1..75: mol_type = other DNA
ggtcatgttttatcgatttagtaaagtgacaggaagaagcgtgcaatcaccttttaccccaatgtttttttttga

SEQ ID NO: 791265 - DNA, 75 bp, synthetic construct
  source 1..75: mol_type = other DNA
catgctggagtcctacattctcaatagcgttgccggacgtcacgatatggacagcctcgcggaacgttggttgaa

SEQ ID NO: 791266 - DNA, 75 bp, synthetic construct
  source 1..75: mol_type = other DNA
ttatgctcgacgaagcccacaagcgtgggatgaaagtacacgcctggtttaacccctatcgcgtatcggttaata

SEQ ID NO: 791267 - DNA, 75 bp, synthetic construct
  source 1..75: mol_type = other DNA
atatgcgccgtctacctgtaacagagcccttgctattctgaaaacgatggggcgttatgcgttgcgacaggatgt

SEQ ID NO: 791268 - DNA, 75 bp, synthetic construct
  source 1..75: mol_type = other DNA
caaatagcccgtcgtcacaaagaagcgattgcgctgggaaatgaccctaaagcggagcgagataactaccgcgcg

SEQ ID NO: 791269 - DNA, 75 bp, synthetic construct
  source 1..75: mol_type = other DNA
aaagaaagcgcatgaaattgcaggtgaggagtttaacctttcttccaccaagcagttacaaaccattctgtttga

SEQ ID NO: 791270 - DNA, 75 bp, synthetic construct
  source 1..75: mol_type = other DNA
ggcaattaacgcaccaatgcagggaaccgccgctgacattattaaacgggcgatgattgccgttgatgcatggct

SEQ ID NO: 791271 - DNA, 75 bp, synthetic construct
  source 1..75: mol_type = other DNA
tatatggagcgcactcgtgctcaggcgaaagaacaaggttatgttgaaacgctggaaggccgtcgtctgtatctg

SEQ ID NO: 791272 - DNA, 75 bp, synthetic construct
  source 1..75: mol_type = other DNA
tatggacagcctcgcggaacgttggttgaagcacaaaaccatcacttttgaagagattgctggtaaaggcaaaaa

SEQ ID NO: 791273 - DNA, 75 bp, synthetic construct
  source 1..75: mol_type = other DNA
aaagaaagcgcatgaaattgcaggtgaggaatttaacctttcgtccaccaagcaattgcaaactatcctttttga

SEQ ID NO: 791274 - DNA, 75 bp, synthetic construct
  source 1..75: mol_type = other DNA
ttgatgaagatacgctgaaagaatggattacgaagctggaaaaagcgccggtatttgcatttgataccgaaactg

SEQ ID NO: 791275 - DNA, 75 bp, synthetic construct
  source 1..75: mol_type = other DNA
cgactggccaccggtttcctcggttaacattagtaaccccaccagccgggcccgtgtacaacaacaggcgatgat

SEQ ID NO: 791276 - DNA, 75 bp, synthetic construct
  source 1..75: mol_type = other DNA
tcctttttcagctttatctgcctgatggcgatgacgttagcgttttcgatcgcgctgatgcgttggcaggctggg

SEQ ID NO: 791277 - DNA, 75 bp, synthetic construct
  source 1..75: mol_type = other DNA
gatttgaaattcaaatacaggaacagagagttctggtgcagagggtactacgtcgatacggtgggtaagaacacg

SEQ ID NO: 791278 - DNA, 75 bp, synthetic construct
  source 1..75: mol_type = other DNA
aggcgattgtcaccccggcggtgatcaaaggggaactgctggcaacctaccgtcagctcgagcgtgcggggatcg

SEQ ID NO: 791279 - DNA, 75 bp, synthetic construct
  source 1..75: mol_type = other DNA
gtggtggagcgtttcttgccggtgcggtttggtttgatagaaacagatggcgtaacgcgggtgagtattgaatga

SEQ ID NO: 791280 - DNA, 75 bp, synthetic construct
  source 1..75: mol_type = other DNA
aggaacagggagttctggtgccgaggggactacgtcgatacggtgggtaagatcacgtcgaagatacaggcttac

SEQ ID NO: 791281 - DNA, 75 bp, synthetic construct
  source 1..75: mol_type = other DNA
tacgtgtttataacagtatcgataccgttccgacctggtatagcatctggacgccgatgggattcttcctgacca

SEQ ID NO: 791282 - DNA, 75 bp, synthetic construct
  source 1..75: mol_type = other DNA
tcgaatttggtgttagcccggcaggcgtgtggcgtaaccgatcacacgatccgctcggttccgatacccgaggcg

SEQ ID NO: 791283 - DNA, 75 bp, synthetic construct
  source 1..75: mol_type = other DNA
atgcgtggcatctggctggccacggtttctcgcctcgactggccaccggtttcctcggttaacattagtaacccc

SEQ ID NO: 791284 - DNA, 75 bp, synthetic construct
  source 1..75: mol_type = other DNA
tggaacctgactggatggttaacggcggcgttcccgaactgaaaaagcagctcgatcttaacgacgcggtgccag

SEQ ID NO: 791285 - DNA, 75 bp, synthetic construct
  source 1..75: mol_type = other DNA
agtcgtctggtcagcctctttagcggtaggtattcacggtctttttgtcgaggcgctgaatgaaaaagcccatac

SEQ ID NO: 791286 - DNA, 75 bp, synthetic construct
  source 1..75: mol_type = other DNA
ttggtcggggaaaacgaaaatgcgttatttttcccaaccaaatccattgaactgctttttacacagagcgattaa

SEQ ID NO: 791287 - DNA, 75 bp, synthetic construct
  source 1..75: mol_type = other DNA
cgataaactcgaccacttgcaacgtctcggtattaatacggtttttttccaggtaaaacctgatggcactgccct

SEQ ID NO: 791288 - DNA, 75 bp, synthetic construct
  source 1..75: mol_type = other DNA
gactggtctgtaataaaaggacagactttatatggtgttctttccgactgggcgcaacagagcggatggactgta

SEQ ID NO: 791289 - DNA, 75 bp, synthetic construct
  source 1..75: mol_type = other DNA
aaaccatcctgccagatgatttaacaccaggaaaatacaacaaaatttatctgtctgggcatggttctgctggtc

SEQ ID NO: 791290 - DNA, 75 bp, synthetic construct
  source 1..75: mol_type = other DNA
tacaccatatggaagggcatctgttagcgccgatgctggaagataacccaccggaatttccgtttgtcgcgctgc

SEQ ID NO: 791291 - DNA, 75 bp, synthetic construct
  source 1..75: mol_type = other DNA
ggtaacgatattgaaacacgcagtaatatacagtgtggttctgtgctgttgccggagatgaaaatcgccgggcag

SEQ ID NO: 791292 - DNA, 75 bp, synthetic construct
  source 1..75: mol_type = other DNA
tgtgctcgccgcactttatcgcgcctgtcaccgcgaaaactctccaccatgaaagcgccagtgatttttgctaat

SEQ ID NO: 791293 - DNA, 75 bp, synthetic construct
  source 1..75: mol_type = other DNA
tggcggattgccggacaagggctaagcttcgaacaaatgctcaaagagatgggcaccgggctggtggtgacggag

SEQ ID NO: 791294 - DNA, 75 bp, synthetic construct
  source 1..75: mol_type = other DNA
atgaccgaccgtccggggttggatttcagcttctctggtttgaaaaccttcgcggcaaataccattcgtgacaac

SEQ ID NO: 791295 - DNA, 75 bp, synthetic construct
  source 1..75: mol_type = other DNA
cggtgattgatcagatgctggaagagggcaccgcctataaatgctattgctccaaagagcgtctggaagcgctgc

SEQ ID NO: 791296 - DNA, 75 bp, synthetic construct
  source 1..75: mol_type = other DNA
gtgtggttgttgatgactgggatatggaaatcacccacgtaatccgtggtgaagaccatatcaacaatacaccgc

SEQ ID NO: 791297 - DNA, 75 bp, synthetic construct
  source 1..75: mol_type = other DNA
tagtcggcgcactgctggttggcgcgaccgtggggcgttctctggcgtttgcctgggacgttccggcgatcccgg

SEQ ID NO: 791298 - DNA, 75 bp, synthetic construct
  source 1..75: mol_type = other DNA
cgaaaatggcggcgcagggtactgccgggcgctttgttttcccgcgtccgatgaccgaccgtccggggctggatt

SEQ ID NO: 791299 - DNA, 75 bp, synthetic construct
  source 1..75: mol_type = other DNA
tacaccatatggaagggcatctgttagcgccgatgcttgaagataatccgccagaattcccgtttgtcgcgttgc

SEQ ID NO: 791300 - DNA, 75 bp, synthetic construct
  source 1..75: mol_type = other DNA
cggtgtcaaagtttttggcaacagccacggcatgttgcagggttactgctcaacgcgtcattcgctctccagctg

SEQ ID NO: 791301 - DNA, 75 bp, synthetic construct
  source 1..75: mol_type = other DNA
gcatcccggcattgtcgacgttgctgttctttctcccgttcccggcactgtcgagctgtatccgctgctcagcac

SEQ ID NO: 791302 - DNA, 75 bp, synthetic construct
  source 1..75: mol_type = other DNA
ttgaacgcgatgccgacaaaatcacggcagaaatgattgcgaagtatgaagcggataccggcaaaacgctgtacc

SEQ ID NO: 791303 - DNA, 75 bp, synthetic construct
  source 1..75: mol_type = other DNA
atttaagccctctcaatccgcgctatcaatcatccttgcttacgccagagtgtaaaattgttgccgtagcaaaag

SEQ ID NO: 791304 - DNA, 75 bp, synthetic construct
  source 1..75: mol_type = other DNA
tttctgggcgaaccggaagacattaccgatcagcttaagaaggaggaagaagaagcgggaagcaaaccgcagata

SEQ ID NO: 791305 - DNA, 75 bp, synthetic construct
  source 1..75: mol_type = other DNA
actgagggtggtggcagaaaacgaatgggcaaactgtacggcaatcactcttaacatgactggagtgtctgatga

SEQ ID NO: 791306 - DNA, 75 bp, synthetic construct
  source 1..75: mol_type = other DNA
tgacctgtgggcctatcgcgaaatgctggtcagggtggcagtacaggaggcggcgaagcagaatctggtcgcttt

SEQ ID NO: 791307 - DNA, 75 bp, synthetic construct
  source 1..75: mol_type = other DNA
ctgctcgactcgctaggtaaacaaattctaccggactggctgaccattgaagaacatccgcatctactgaaagga

SEQ ID NO: 791308 - DNA, 75 bp, synthetic construct
  source 1..75: mol_type = other DNA
cggatgaagccattgaactggcggcccgcgcagaacaggcggcattgcaggcggacaaacgcatcaccaataccg

SEQ ID NO: 791309 - DNA, 75 bp, synthetic construct
  source 1..75: mol_type = other DNA
cgcgaaaactggggctgaaaagcaccggacatgcgggcggtattcacaactggcggattgccggacaagggctaa

SEQ ID NO: 791310 - DNA, 75 bp, synthetic construct
  source 1..75: mol_type = other DNA
ctgctggattcgctgggtaaacaaattctgccggactggctgactattgaagagcatccgcatctgctgaaaggg

SEQ ID NO: 791311 - DNA, 75 bp, synthetic construct
  source 1..75: mol_type = other DNA
tggcgtattgccgggcaaggactcagctttgagcagatgctcaaagaaatgggcaccggcctggtggtgacggaa

SEQ ID NO: 791312 - DNA, 75 bp, synthetic construct
  source 1..75: mol_type = other DNA
cgtgattgccgaagagaacggcgatatggagcgtgattatgcctacaccattggtcgcgcgatgagcgatctaca

SEQ ID NO: 791313 - DNA, 75 bp, synthetic construct
  source 1..75: mol_type = other DNA
caaatctgccagtgcctggatcatctcttttaccgtcagaggacggaaggcattgcgcacctgcggacgattaat

SEQ ID NO: 791314 - DNA, 75 bp, synthetic construct
  source 1..75: mol_type = other DNA
atgccactgctggataagctgcgtgggcagtacggggtcggaccggtatgcagtgaactgcatattgccccgtca

SEQ ID NO: 791315 - DNA, 75 bp, synthetic construct
  source 1..75: mol_type = other DNA
agcgaactgcatattgccccgtcaacgtattaccactgtcagcaacagcgacatcatccggataaacgcagtgcc

SEQ ID NO: 791316 - DNA, 75 bp, synthetic construct
  source 1..75: mol_type = other DNA
tatttctgggagcaaagtggctcactggaggtacagatcgcctatctggaacgccagctcaccagtaaacatgca

SEQ ID NO: 791317 - DNA, 75 bp, synthetic construct
  source 1..75: mol_type = other DNA
ctggcattaggcgcgcataccgtggtggttggaggcgctatcacgcgtccgcagcagataacggcacgatttgtc

SEQ ID NO: 791318 - DNA, 75 bp, synthetic construct
  source 1..75: mol_type = other DNA
aaatgactgtggattcttacgtgaggtcctggcagcggtcagcgttccggttgtggcggaagggaacgtcgatac

SEQ ID NO: 791319 - DNA, 75 bp, synthetic construct
  source 1..75: mol_type = other DNA
aagggctggacacttgttcaggacaccgcctgggaaggatacgaagaaattccaacctggatttctcagggctat

SEQ ID NO: 791320 - DNA, 75 bp, synthetic construct
  source 1..75: mol_type = other DNA
gcgtgtcttccggcagcacaagcgcggggattaataacggaactgatacccttccccctcctccaccagaaatcc

SEQ ID NO: 791321 - DNA, 75 bp, synthetic construct
  source 1..75: mol_type = other DNA
tacaagcctatagaactcaatggccgctacaccattaaaggtaaagtctcacaaatccatcaatacttagattga

SEQ ID NO: 791322 - DNA, 75 bp, synthetic construct
  source 1..75: mol_type = other DNA
ctggttgcatcagtgcagcaattcaggaacagcatgaatgttatgtttgaactggctggcaacaataaaagttaa

SEQ ID NO: 791323 - DNA, 75 bp, synthetic construct
  source 1..75: mol_type = other DNA
ttcagcggcgttcgtttggttccattatagcctgtgctgttggtcctaaagcgggacacgaacatctgaaactac

SEQ ID NO: 791324 - DNA, 75 bp, synthetic construct
  source 1..75: mol_type = other DNA
tggtcgccactattcgtggcagccctttgaccgtggcctgcatctgctggttggtgaacagcaatggcgcggagc

SEQ ID NO: 791325 - DNA, 75 bp, synthetic construct
  source 1..75: mol_type = other DNA
acctggtggttatcgatccgtttagtcatcaacagataatccgggaggatgtggcatacaaatgcgggtggtccc

SEQ ID NO: 791326 - DNA, 75 bp, synthetic construct
  source 1..75: mol_type = other DNA
agtccgtttattatgtcacgtatggcgctggcggcagcacaaggcggtgcggcaggtatccgtgcgaacagcatg

SEQ ID NO: 791327 - DNA, 75 bp, synthetic construct
  source 1..75: mol_type = other DNA
ggtgattccaaaatgtggcttgaagcaaataaagcgatgaaatcagccatcaaccttccgtggtatcgcaggaaa

SEQ ID NO: 791328 - DNA, 75 bp, synthetic construct
  source 1..75: mol_type = other DNA
atgcgcaatgaaatagccatcaatcaccagatgcttcgtgcggcacaaaacaaagcagtaatagcccgatttatt

SEQ ID NO: 791329 - DNA, 75 bp, synthetic construct
  source 1..75: mol_type = other DNA
ccgatcttgagcgttccacgccggaagctatcgaagccattatggatggcatgaactggctgagcctggagtggg

SEQ ID NO: 791330 - DNA, 75 bp, synthetic construct
  source 1..75: mol_type = other DNA
gggcactgcttataaatgctattgctctaaagagcgcctggaagcgctgcgcgaagagcaaatggcgaaaggtga

SEQ ID NO: 791331 - DNA, 75 bp, synthetic construct
  source 1..75: mol_type = other DNA
ctggaaaaactgggttgtcgcgttaatttccccgagaagcaagggtgttgcggtcagccagccatcaacagcggt

SEQ ID NO: 791332 - DNA, 75 bp, synthetic construct
  source 1..75: mol_type = other DNA
atgcgcaatgaaatagccatcaatcaccaggtgcttcgtgcagcacaaaacaaagcagtaatagcccgatttatt

SEQ ID NO: 791333 - DNA, 75 bp, synthetic construct
  source 1..75: mol_type = other DNA
cgggctgaacggtatgtcatttgaacgggcttatgatgcagtcagcgaaggccagtactggtttatctctctgat

SEQ ID NO: 791334 - DNA, 75 bp, synthetic construct
  source 1..75: mol_type = other DNA
taactgatgttatatggtgtgtttccaaaagtgatgaaaaaaaggcaattgagaatattggtataaaagaaccaa

SEQ ID NO: 791335 - DNA, 75 bp, synthetic construct
  source 1..75: mol_type = other DNA
atcttcactcgtgaagagatgattaaatacttcactctgaatgccgtcagcaaatctgccagtgcgttcaacacc

SEQ ID NO: 791336 - DNA, 75 bp, synthetic construct
  source 1..75: mol_type = other DNA
agaaactcagaaaagacaaaggtctgacccaagttgaacttggcaagctttctggcgtaactggggtaacaatag

SEQ ID NO: 791337 - DNA, 75 bp, synthetic construct
  source 1..75: mol_type = other DNA
agggttgaacggtatgtcctttgacgaggcatatgatgctgtctcgggcggacagtactggtttatcacgctgct

SEQ ID NO: 791338 - DNA, 75 bp, synthetic construct
  source 1..75: mol_type = other DNA
gcatacgtcacgacaatgttactgaagacgatatcaccggcctgattatgcgcggtgaactgactgcatccactt

SEQ ID NO: 791339 - DNA, 75 bp, synthetic construct
  source 1..75: mol_type = other DNA
ccagcgaacagtttattgcctccacgtttcatgcccgtagccaggtgttgctgcctgatgacaacggtaaattgc

SEQ ID NO: 791340 - DNA, 75 bp, synthetic construct
  source 1..75: mol_type = other DNA
gcggtgttgatcgtcggcaagccgctcatttcgctggtgtttggcgttaagtatctcgaagcgtatgacctgatt

SEQ ID NO: 791341 - DNA, 75 bp, synthetic construct
  source 1..75: mol_type = other DNA
tgggcaatgtctggatgtggtgttctcgctaattccgaccttaaaggcattttttcagcgccattccttgcttta

SEQ ID NO: 791342 - DNA, 75 bp, synthetic construct
  source 1..75: mol_type = other DNA
atgtttggcgtactggtgattgtgcaatcgtacgccaagtcgatcagcgattttattaagtttcagacatggcag

SEQ ID NO: 791343 - DNA, 75 bp, synthetic construct
  source 1..75: mol_type = other DNA
gtggtaacaacgctgtatatatgtttcgaaatttctacacccaaagaatcattcggtgactattgggagcattat

SEQ ID NO: 791344 - DNA, 75 bp, synthetic construct
  source 1..75: mol_type = other DNA
cggtggcgattgtcggcggcattgccttactgccatttctttcccattcattaggtctggatgaccaaagctttt

SEQ ID NO: 791345 - DNA, 75 bp, synthetic construct
  source 1..75: mol_type = other DNA
tggattgctggctggcgggattggcattctggtggcgctggctgtgttaatcgttggtaagccacttatttcact

SEQ ID NO: 791346 - DNA, 75 bp, synthetic construct
  source 1..75: mol_type = other DNA
ctgaaacagctgggcgacctgaatccgcagcagtttatggccggtggtcaggaagggggcaacgatggcaaataa

SEQ ID NO: 791347 - DNA, 75 bp, synthetic construct
  source 1..75: mol_type = other DNA
tgaatccgcagcagtttatgtccggagacaggaatcagcagggcggggatgccggtaaggagggcggaaatggtg

SEQ ID NO: 791348 - DNA, 75 bp, synthetic construct
  source 1..75: mol_type = other DNA
gtctggaagcctggggggatgtctccagtgagcgtgccattgtacgtacccgcaatatcagctgcctgaaggacg

SEQ ID NO: 791349 - DNA, 75 bp, synthetic construct
  source 1..75: mol_type = other DNA
gcaaggtacacagtccaacctaaacgccggaatggttaaagagtttgaactagacttacccagtataagagaaca

SEQ ID NO: 791350 - DNA, 75 bp, synthetic construct
  source 1..75: mol_type = other DNA
gtgacggaaaagcttctcaccaacagtcagcagcagaaaaaagccctaatgcagcaattgctcaccgggaagaaa

SEQ ID NO: 791351 - DNA, 75 bp, synthetic construct
  source 1..75: mol_type = other DNA
gcccggcccggaaggcgaacctcagccgggtaatgttccggcgacgttcccgccgcagggcagcgttgctgttcc

SEQ ID NO: 791352 - DNA, 75 bp, synthetic construct
  source 1..75: mol_type = other DNA
atagcccaaatcctgtcaacctgggataaggcgatttcggtgacggaaaagcttctcaccaacagtcagcggcag

SEQ ID NO: 791353 - DNA, 75 bp, synthetic construct
  source 1..75: mol_type = other DNA
tggaatgacggcggctggttcccgaaaggcttaagcggcttctttgccggattccagatagcggttttcgctttc

SEQ ID NO: 791354 - DNA, 75 bp, synthetic construct
  source 1..75: mol_type = other DNA
gcgcaggaaggtgtggcaccgaaagcgttcgctaaactctctaagcgcgcagtaccagcgaaagggctgaccttc

SEQ ID NO: 791355 - DNA, 75 bp, synthetic construct
  source 1..75: mol_type = other DNA
ccttgcactgtcaagaacatcgcggcgtctgtctcaggaagtcaccgtgaggtgtactgacaatagcggacacta

SEQ ID NO: 791356 - DNA, 75 bp, synthetic construct
  source 1..75: mol_type = other DNA
gtcagcttcttgaacaaatgcaggctgatatgcgccagcagccaacgcagctggttgaagttccgtggaatgaac

SEQ ID NO: 791357 - DNA, 75 bp, synthetic construct
  source 1..75: mol_type = other DNA
ccctgggcggaaaacgactcgaacgggttccggatactatcatgaacgaagttcttggccgtctgtccactattc

SEQ ID NO: 791358 - DNA, 75 bp, synthetic construct
  source 1..75: mol_type = other DNA
cccgaaatggtaagcggctggaacgtatacccgacgctgtcgtgaatgaagtgctggcccgactggaagccattc

SEQ ID NO: 791359 - DNA, 75 bp, synthetic construct
  source 1..75: mol_type = other DNA
gtaaatttaacatcttcgcaggcaatcttgggtattagaccaaaagattgtttaaattatgagtttttatatttc

SEQ ID NO: 791360 - DNA, 75 bp, synthetic construct
  source 1..75: mol_type = other DNA
tatcgaatgaatattgtgtgcttacagggaagtccggtttttatcttccttatatggaatttctatcggagtctc

SEQ ID NO: 791361 - DNA, 75 bp, synthetic construct
  source 1..75: mol_type = other DNA
gcgatttcggtgacggaaaagcttctcaccaacagtcaacagcagaaaaaagccctgatgcagcagttgcttagc

SEQ ID NO: 791362 - DNA, 75 bp, synthetic construct
  source 1..75: mol_type = other DNA
accggatattgttgtcggagatgtaaaggccttgcactgtcaagaacatcgcggcgtctgtctcaggaagtcacc

SEQ ID NO: 791363 - DNA, 75 bp, synthetic construct
  source 1..75: mol_type = other DNA
ttaagcattggcacgttagcggttttactcactgtatggtggacggtggcggcgctgcaactgattagcccgctg

SEQ ID NO: 791364 - DNA, 75 bp, synthetic construct
  source 1..75: mol_type = other DNA
caaacacaaaaattaagctgtccgaacagggagctaaaaaagccagaattgttccgaagggtagtatattagtta

SEQ ID NO: 791365 - DNA, 75 bp, synthetic construct
  source 1..75: mol_type = other DNA
tggcaaaactgctcaccattgccggaccgcagggatttatggacgccacgctgtggcagcatctggcagccagcc

SEQ ID NO: 791366 - DNA, 75 bp, synthetic construct
  source 1..75: mol_type = other DNA
agacctgattggttcattaatagtgaattgccaataaaaacagaaacaaaaatagcagcaattttaagtaatgct

SEQ ID NO: 791367 - DNA, 75 bp, synthetic construct
  source 1..75: mol_type = other DNA
atgattatcggtaatctcaaccatttgtcgctggcggggcttcctgcctgggtgagaaatattctgctgcgcccg

SEQ ID NO: 791368 - DNA, 75 bp, synthetic construct
  source 1..75: mol_type = other DNA
gccgcagggatttatggacgccacgctgtggcagcatctggcagccagcctgacgcgcattgtgctggcgctact

SEQ ID NO: 791369 - DNA, 75 bp, synthetic construct
  source 1..75: mol_type = other DNA
caaaaaattgaatatgcgccgaaagagacattacaggtagtggaatattatcgtgatgaaactgaccgtgaatat

SEQ ID NO: 791370 - DNA, 75 bp, synthetic construct
  source 1..75: mol_type = other DNA
ggcgattatttcacgctgacagatgatattgaatttgtagaacctcataagatgaatggcaatgaaattgttcat

SEQ ID NO: 791371 - DNA, 75 bp, synthetic construct
  source 1..75: mol_type = other DNA
gtattcaaaaataaaatctctataaacgatttgtggattactgctcaggatataaggcggctccttgactgtggt

SEQ ID NO: 791372 - DNA, 75 bp, synthetic construct
  source 1..75: mol_type = other DNA
ataccgcgctggtacttggggaaaacatcctttcctgtgatacggagaagagtatccgggagcggttttctgttt

SEQ ID NO: 791373 - DNA, 75 bp, synthetic construct
  source 1..75: mol_type = other DNA
caccggatatgtggaggcactaccgcttcgttatgacgccagcagcgtcagcatgggaattgtcgggcgaagcaa

SEQ ID NO: 791374 - DNA, 75 bp, synthetic construct
  source 1..75: mol_type = other DNA
ggacgaccggggcatgacgactgaattacgggttggcccggcagatgcttatctccccgagcctgttaccgccag

SEQ ID NO: 791375 - DNA, 75 bp, synthetic construct
  source 1..75: mol_type = other DNA
cggataactttggcgtggagcctcaatacccggttacgttccggacatgggcgaaggttatccagaccagtgcca

SEQ ID NO: 791376 - DNA, 75 bp, synthetic construct
  source 1..75: mol_type = other DNA
gctttctgctgctggagtgtacggagctgggcgagtttacgcagagtcacggaggcagcaatggcgactcccttt

SEQ ID NO: 791377 - DNA, 75 bp, synthetic construct
  source 1..75: mol_type = other DNA
gcgcaacctacattctgccggaccccggcgaactgaataaacgcgtcctgatccgccagcgggtggatatgcccg

SEQ ID NO: 791378 - DNA, 75 bp, synthetic construct
  source 1..75: mol_type = other DNA
atgaataatcatttcaagtgtattggcattgtgggacacccacggcaccctactgcactgacaacacatgaaatg

SEQ ID NO: 791379 - DNA, 75 bp, synthetic construct
  source 1..75: mol_type = other DNA
ttgaatacatcactggtgctgatggtgtgaaaaggccaatggcttattacaaagcggctgaagagagggcaagaa

SEQ ID NO: 791380 - DNA, 75 bp, synthetic construct
  source 1..75: mol_type = other DNA
ggatgacaagcagaataaatacctgacggaagccggggctgagctggtgaagaccgaagccgacctggcgcaggc

SEQ ID NO: 791381 - DNA, 75 bp, synthetic construct
  source 1..75: mol_type = other DNA
aacaacccgcagaagtgatcaggcagtcggatctgggtctgctgacggatgtacaggctgccctgcagcaggaaa

SEQ ID NO: 791382 - DNA, 75 bp, synthetic construct
  source 1..75: mol_type = other DNA
ttgaagaacaacaaaaaatcgctgccgtcctgtctgctgctgacgctgaaacctccacgctcgagaaaaaactcg

SEQ ID NO: 791383 - DNA, 75 bp, synthetic construct
  source 1..75: mol_type = other DNA
cagccaactgacccgcattttacgcacccacgcagcaatgagcgtgcttgggcatggtttgctgcgcggcgcggg

SEQ ID NO: 791384 - DNA, 75 bp, synthetic construct
  source 1..75: mol_type = other DNA
cagtggcgtagccggcctgataactctcataggggtactgcgttattcccgtttacccatgacatggcacacgca

SEQ ID NO: 791385 - DNA, 75 bp, synthetic construct
  source 1..75: mol_type = other DNA
cgtgcagcaggttcgcgttcgtgccgcgcagtcgctgggcgccagtcgcacgcaggtgctgtggtttgtcattct

SEQ ID NO: 791386 - DNA, 75 bp, synthetic construct
  source 1..75: mol_type = other DNA
atggtatgacgatggagcgtgtggatcgcccgacggcagagtgtgccgctgcgctggataaagcgccgttaccga

SEQ ID NO: 791387 - DNA, 75 bp, synthetic construct
  source 1..75: mol_type = other DNA
tgattgaattcgaagtatatatcgacgagatctttgcgttttcgcagcgttccgatggcctgattatttcgacac

SEQ ID NO: 791388 - DNA, 75 bp, synthetic construct
  source 1..75: mol_type = other DNA
gtcgaactgttacgtatgcagcgtcagtcagcggagctgcagttacagatggatgagaaacagaataaatacctg

SEQ ID NO: 791389 - DNA, 75 bp, synthetic construct
  source 1..75: mol_type = other DNA
gcagatttgagggagagggaaagtactgtttatcgactacgaaagactgaactggcacaaagcatcgctggcctt

SEQ ID NO: 791390 - DNA, 75 bp, synthetic construct
  source 1..75: mol_type = other DNA
aaaggtcaggtactgctgacactggatgatacccgaagctctgccatgctgagggaaagtgaagcccgggtgaat

SEQ ID NO: 791391 - DNA, 75 bp, synthetic construct
  source 1..75: mol_type = other DNA
atggtgacgccgttgccatcgtcgtagcccgcgatgaactcacggcagaaaaagcggcgcaattggtcagcattg

SEQ ID NO: 791392 - DNA, 75 bp, synthetic construct
  source 1..75: mol_type = other DNA
tcgtttacgcaacgccgcccgcgaaggagatgctaatccgctcacgggaaaacgtatttacagcgcagggttgcc

SEQ ID NO: 791393 - DNA, 75 bp, synthetic construct
  source 1..75: mol_type = other DNA
gtgtcttgaaaaaggccggaaaatctttgaatgggaaaaacgccgtgcagagtgccagaaccagcaaggcaattt

SEQ ID NO: 791394 - DNA, 75 bp, synthetic construct
  source 1..75: mol_type = other DNA
gtttgataaccaagaatatctcggtaatgactccaacttattgatagtgttttatgttcagataatgcccgatga

SEQ ID NO: 791395 - DNA, 75 bp, synthetic construct
  source 1..75: mol_type = other DNA
aagaagacctgattaaactggtcgagtttgatggtaatgactccaacttattgatagtgttttatgttcagataa

SEQ ID NO: 791396 - DNA, 75 bp, synthetic construct
  source 1..75: mol_type = other DNA
atcgatgcgaaaagcggcgtggtccgtaaccccaatctgctggattacaaaatgccgaccatgccggatctgcca

SEQ ID NO: 791397 - DNA, 75 bp, synthetic construct
  source 1..75: mol_type = other DNA
agtgggaacgccgcggatttaacatcaaaatggaagacggcgatctggatgtactgcgcgaaggcacctgcgatt

SEQ ID NO: 791398 - DNA, 75 bp, synthetic construct
  source 1..75: mol_type = other DNA
ggtgctggcgatatgtcgcgttcacgtaagaagagctttaactggtaccaagaggtgattgccagcaacggcgag

SEQ ID NO: 791399 - DNA, 75 bp, synthetic construct
  source 1..75: mol_type = other DNA
tcaacattgtcacatggaaagcgtaacatcgctggcgtggatggaggatgactcgcgaattaccatcgtttccag

SEQ ID NO: 791400 - DNA, 75 bp, synthetic construct
  source 1..75: mol_type = other DNA
cgttcgctaaactctctaagcgcgcagtacccgcgaaagggctgaccttctcgtgtatctgtctgctcggcggcg

SEQ ID NO: 791401 - DNA, 75 bp, synthetic construct
  source 1..75: mol_type = other DNA
tcaacattgtcacatggaaagcgtgacatcgctggcatggatggaggatgactcgcgaattaccatcgtttccag

SEQ ID NO: 791402 - DNA, 75 bp, synthetic construct
  source 1..75: mol_type = other DNA
ggtaataaacaggatgtgctggaagagccaatggcggcattcctgaccagcaagcttggcggcattccggtgaaa

SEQ ID NO: 791403 - DNA, 75 bp, synthetic construct
  source 1..75: mol_type = other DNA
atcgcgcgtagagcttggctatagtgcttttttagggaaaatggagctatcgcaagctgaaaaacacagggccgt

SEQ ID NO: 791404 - DNA, 75 bp, synthetic construct
  source 1..75: mol_type = other DNA
gtgcgcttgctgatttgatgtccgggaaagtcagtcagtctttcagaaaacaggctgatgctgctgagcagagtc

SEQ ID NO: 791405 - DNA, 75 bp, synthetic construct
  source 1..75: mol_type = other DNA
ttcccgcctggccgcacgttcacgcctggcatctgtttattattcgtgtcgatgaacaacgttgtggtatcagtc

SEQ ID NO: 791406 - DNA, 75 bp, synthetic construct
  source 1..75: mol_type = other DNA
gtcgtcgagaaattgccctgcaatatcaacaagcactggtggatctacccttccagcctctgaagcttcccacat

SEQ ID NO: 791407 - DNA, 75 bp, synthetic construct
  source 1..75: mol_type = other DNA
gcgcccgcagaagcatcgtcaatggccggtgtggcggtcgccgtcgccaccacgaccccgccggatgcgacagcc

SEQ ID NO: 791408 - DNA, 75 bp, synthetic construct
  source 1..75: mol_type = other DNA
atgttagatatagtcgaactgtcgcgcttacagtttgccttgaccgcgatgtaccacttcctttttgtgccgctg

SEQ ID NO: 791409 - DNA, 75 bp, synthetic construct
  source 1..75: mol_type = other DNA
tggtgatagtcatcgccgggctgattacgttatggagaattcttaacgcacccgtgccgacttatcagacgctga

SEQ ID NO: 791410 - DNA, 75 bp, synthetic construct
  source 1..75: mol_type = other DNA
tccacttcccaaaatcaccgcgtttgtcagatgaaagccggggcacgtccccggatgcgcttaatactacggatg

SEQ ID NO: 791411 - DNA, 75 bp, synthetic construct
  source 1..75: mol_type = other DNA
cggcaaaggctacgttaaaaaccattgccagcggtgcaagggtcgtggcgaagtaccggataaagcagccagcga

SEQ ID NO: 791412 - DNA, 75 bp, synthetic construct
  source 1..75: mol_type = other DNA
gttttcgcgtttcgggattactgccaaagtgcggctaccgaaaaggtttgccctaagtgcggaggtaacgggctt

SEQ ID NO: 791413 - DNA, 75 bp, synthetic construct
  source 1..75: mol_type = other DNA
acggtctgggtgtcgatgcctatgacagacaaacctggggccgtgcaccgcaggctgaagtcttaacgccgggct

SEQ ID NO: 791414 - DNA, 75 bp, synthetic construct
  source 1..75: mol_type = other DNA
aatttttgcctttttcgcgaccagcaatgggcgtggaggaactcgctgcagttaaagaggttctcgaatccggtt

SEQ ID NO: 791415 - DNA, 75 bp, synthetic construct
  source 1..75: mol_type = other DNA
ctaaacaaagagggattttatgtttatgggctttataagccaggggctacagagccatattatgtaggtcatact

SEQ ID NO: 791416 - DNA, 75 bp, synthetic construct
  source 1..75: mol_type = other DNA
tcaaaaccaccactaacccaccggcgtttggctgtacctttgttgatctgacggtcgatattgcgctgtgcaaag

SEQ ID NO: 791417 - DNA, 75 bp, synthetic construct
  source 1..75: mol_type = other DNA
caccaacgggcggaatcgctggattggtctgatagagatgctgtcgtcgcgtatcaggtcggagcgtggcgaatc

SEQ ID NO: 791418 - DNA, 75 bp, synthetic construct
  source 1..75: mol_type = other DNA
acgctgattgcttcagaacggcttgcagatgcagatccggatatgcccgcttttgatcctgccatcattgagtat

SEQ ID NO: 791419 - DNA, 75 bp, synthetic construct
  source 1..75: mol_type = other DNA
agggcacggctttagcgtcaatgcatccgtcaataacctgttcgacaccaaatatgcctacagtgaaggattcat

SEQ ID NO: 791420 - DNA, 75 bp, synthetic construct
  source 1..75: mol_type = other DNA
ttcttgacgccatggaagatgtccagccactgaagcgcgctacagatgtccactggcatccaacgcgtaaccaac

SEQ ID NO: 791421 - DNA, 75 bp, synthetic construct
  source 1..75: mol_type = other DNA
gtaatcttggggttaatagcaagcacaaatgatcaagccctactcttcagggtcttaaaaatttcaggtggatta

SEQ ID NO: 791422 - DNA, 75 bp, synthetic construct
  source 1..75: mol_type = other DNA
aaaacgttaagcaacgcctgctggaattctcgaacgttgacgatatttatagaacatcgccagaccaaaaatcag

SEQ ID NO: 791423 - DNA, 75 bp, synthetic construct
  source 1..75: mol_type = other DNA
ggtcaccgtccccgatggcaaattaagcccgcgactggcggcgctaaaaccgggtgacgaagtgcaggtcgttag

SEQ ID NO: 791424 - DNA, 75 bp, synthetic construct
  source 1..75: mol_type = other DNA
caactgggcaaagatttagatcgcttcaaaaatctggtcctggttcacgccgcacgttatgccgccgacttaagc

SEQ ID NO: 791425 - DNA, 75 bp, synthetic construct
  source 1..75: mol_type = other DNA
cgccctgtttagtctcaccgttcacgcccccgtgcttccgtttaccgccgggcaattcaccaaacttggccttga

SEQ ID NO: 791426 - DNA, 75 bp, synthetic construct
  source 1..75: mol_type = other DNA
aacgaagaacaggtcaaagttcgtggctttgatagtcgtcaggtgccggtctatttcgacggtgtgcccatttat

SEQ ID NO: 791427 - DNA, 75 bp, synthetic construct
  source 1..75: mol_type = other DNA
aaggcttaagtggcttctttgccggattccagatagcggttttcgctttcgtggggattgagctggtaggtacaa

SEQ ID NO: 791428 - DNA, 75 bp, synthetic construct
  source 1..75: mol_type = other DNA
ggataccggcgttgattgaaagtggtgaactggaaaatgcggttggcctgccaatgaacaaagagaccagccatg

SEQ ID NO: 791429 - DNA, 75 bp, synthetic construct
  source 1..75: mol_type = other DNA
aatgagtcagaattaatctcttctataggtattgcaccagttaagcaagagataataaaggatgaaggaatcact

SEQ ID NO: 791430 - DNA, 75 bp, synthetic construct
  source 1..75: mol_type = other DNA
ccatgattcgggccatattcttaacccgctgctggctgaaggtcaggttcacggcggaatgggaatgggcattgg

SEQ ID NO: 791431 - DNA, 75 bp, synthetic construct
  source 1..75: mol_type = other DNA
aagccagaagcctgccgggcgtactggcgatttttacctgggaagatgtaccggatatcccattcgctacggcag

SEQ ID NO: 791432 - DNA, 75 bp, synthetic construct
  source 1..75: mol_type = other DNA
tgacaccaaagggcgtgaagcctggggactggtgccttcggcgctggtggtgagccgtgacgtcgttcagcttaa

SEQ ID NO: 791433 - DNA, 75 bp, synthetic construct
  source 1..75: mol_type = other DNA
gttaaccacgatggtacgctgaaaggctatagtctggatgttctgtccaacacaggtgcttatgcctctcacggc

SEQ ID NO: 791434 - DNA, 75 bp, synthetic construct
  source 1..75: mol_type = other DNA
atcattcctgttgccgcagctattcgtaacgcggtgaagatggctaccggtgttgcaatcaatacactgccgctg

SEQ ID NO: 791435 - DNA, 75 bp, synthetic construct
  source 1..75: mol_type = other DNA
ctgttaacccgccatgttcgtcatcatggtgatgccgttgccatcgtcgtggcccgcgatgagctcacggcagaa

SEQ ID NO: 791436 - DNA, 75 bp, synthetic construct
  source 1..75: mol_type = other DNA
ggaatggggctatagataccattaattgtgttaaaagtttaatgaatttaaattatgatgattataaaattatcg

SEQ ID NO: 791437 - DNA, 75 bp, synthetic construct
  source 1..75: mol_type = other DNA
aatatggttctataaggataacggcaacactcaaaaacttagtaatgttgttttggctagcagggcttttaaata

SEQ ID NO: 791438 - DNA, 75 bp, synthetic construct
  source 1..75: mol_type = other DNA
atgcgtatctttgttttttttatatctgcacttttatcttttaacttggctgcggaagagtgtaagttcagcttt

SEQ ID NO: 791439 - DNA, 75 bp, synthetic construct
  source 1..75: mol_type = other DNA
cgggcaaatccctttgtggttccccgacagcgacttgcagcttccggacgatctggagagcgacgacgggcgtga

SEQ ID NO: 791440 - DNA, 75 bp, synthetic construct
  source 1..75: mol_type = other DNA
tatcgccagttctttgaaaaagggcgctccatcgtccttgctttcccggataacaacgaaaaagcggtcagtggc

SEQ ID NO: 791441 - DNA, 75 bp, synthetic construct
  source 1..75: mol_type = other DNA
atctggagagcgacgacgggcgtgaaaagcgtattgcgctggggtcactgttacgccgccacagcgtgatgcatg

SEQ ID NO: 791442 - DNA, 75 bp, synthetic construct
  source 1..75: mol_type = other DNA
tggatggatttctgaaaggtaaatgcatcccccgagatttaaaggttaacgaaacaaacgctgaatatcttgtcc

SEQ ID NO: 791443 - DNA, 75 bp, synthetic construct
  source 1..75: mol_type = other DNA
ccgtagcctttccaaagaaaatggtgatggtttcggtatgtcaacatcctacgacttcgacttcggtttaagtct

SEQ ID NO: 791444 - DNA, 75 bp, synthetic construct
  source 1..75: mol_type = other DNA
ctttgctttgcaatatcagggtaataatgaagatgatggattattcggtcaggaaggttctggtaacggtaatgg

SEQ ID NO: 791445 - DNA, 75 bp, synthetic construct
  source 1..75: mol_type = other DNA
acctggaactggatgacgccgcaaatcaggtactctgctattgttatgaaggtaacctgttggcgctggcacagg

SEQ ID NO: 791446 - DNA, 75 bp, synthetic construct
  source 1..75: mol_type = other DNA
cacacttttaccattgatcccaacaccgactggaatgcgattttttcgctatgccaggccatgagcttgttcgcc

SEQ ID NO: 791447 - DNA, 75 bp, synthetic construct
  source 1..75: mol_type = other DNA
gagattctctcttttctgatggtgaataccgacatgcagctattgtttccgcagctgtatatttcgctgcagagc

SEQ ID NO: 791448 - DNA, 75 bp, synthetic construct
  source 1..75: mol_type = other DNA
gttcatagcaacacgcgggtgcagtttccgatggtacgtaaaggttttcttacatcgccggaaaaaccacaaggt

SEQ ID NO: 791449 - DNA, 75 bp, synthetic construct
  source 1..75: mol_type = other DNA
tgagatgccggaaaacccggacagtgagcggtttattcgcttcgccgattttcgccgcgatccgcaatccattaa

SEQ ID NO: 791450 - DNA, 75 bp, synthetic construct
  source 1..75: mol_type = other DNA
gagcgtaatgatctcaccatgaccggcgattacagcaatcagcatctggtgccgatgaaacaagtggtgccaccg

SEQ ID NO: 791451 - DNA, 75 bp, synthetic construct
  source 1..75: mol_type = other DNA
gtgctaaatacgacgctaataacgtttacttagcaaccatgtatgctgaaactcgtaatatgactggttacggtg

SEQ ID NO: 791452 - DNA, 75 bp, synthetic construct
  source 1..75: mol_type = other DNA
accgatatgctgccagaatttggtggcgatacctatgctggcgctgacaacttcatgaacggtcgtgctaacagc

SEQ ID NO: 791453 - DNA, 75 bp, synthetic construct
  source 1..75: mol_type = other DNA
tggcgctggcaggtggttacaccgggcatctgggagattattcgacaggtgcggcgcaggccatcatgccgtatg

SEQ ID NO: 791454 - DNA, 75 bp, synthetic construct
  source 1..75: mol_type = other DNA
caactgcgtctggaaggcagcgagccggttattttgttgcgcacattacaacgtgaactgttgttactggttaac

SEQ ID NO: 791455 - DNA, 75 bp, synthetic construct
  source 1..75: mol_type = other DNA
attcagttttcctgaagtaacaatccctgatttttctcctgtatccgctaaaggtgcaacaactgctattggtaa

SEQ ID NO: 791456 - DNA, 75 bp, synthetic construct
  source 1..75: mol_type = other DNA
aatgaaggcaccgttggcgtctatggtattggtatgaaaagagccatttttaaaatgggtagagattgctcaata

SEQ ID NO: 791457 - DNA, 75 bp, synthetic construct
  source 1..75: mol_type = other DNA
cgattcaccaatcagtggaaaggtgagcatcttgaagaagggaaaaaattacttaagtcagctcagtcacatgaa

SEQ ID NO: 791458 - DNA, 75 bp, synthetic construct
  source 1..75: mol_type = other DNA
cgctggtcagtgcaccggccggaacatcaggggatatctttaaggccggcacccgggtgacaggcttcagtcgtg

SEQ ID NO: 791459 - DNA, 75 bp, synthetic construct
  source 1..75: mol_type = other DNA
aacctgcacaaaacaggggccgggacactgaatgtcaatgtggcccaggggaataacctgaaaacaggtgacggt

SEQ ID NO: 791460 - DNA, 75 bp, synthetic construct
  source 1..75: mol_type = other DNA
aacttatcagcagcagaagcactagagcgttatggtattgaattcaatggaaagaaacaaataatcggtttccgc

SEQ ID NO: 791461 - DNA, 75 bp, synthetic construct
  source 1..75: mol_type = other DNA
gtcggtcacggatgcagggcaggccggagttgctgcaatgattatcaacgatgccctgcaccacagcgaaaaccc

SEQ ID NO: 791462 - DNA, 75 bp, synthetic construct
  source 1..75: mol_type = other DNA
tggatggttttctgaaaggtaaatgcatcccacgagatttaaaggttaacgaaacaaacgctgaataccttgtcc

SEQ ID NO: 791463 - DNA, 75 bp, synthetic construct
  source 1..75: mol_type = other DNA
gatttcggctctgtccgaagaccaccagaaagcgattgagtcaattaagcaggctgatgcggctgttaagttggc

SEQ ID NO: 791464 - DNA, 75 bp, synthetic construct
  source 1..75: mol_type = other DNA
ttcgctttaccagtaaaaacccagaaaaattaccaataacaacaacgaaacgaggtgtcgatcttagttctacat

SEQ ID NO: 791465 - DNA, 75 bp, synthetic construct
  source 1..75: mol_type = other DNA
gggattaacctcggagataaggccagcctttctgttaaaaacatgggctatctgagttcggatattcatgcagga

SEQ ID NO: 791466 - DNA, 75 bp, synthetic construct
  source 1..75: mol_type = other DNA
gctgtgcgatcaacaatggtcctttcactgactgagctgatttccagaatcagcttaaaaaaagcctttcaaaag

SEQ ID NO: 791467 - DNA, 75 bp, synthetic construct
  source 1..75: mol_type = other DNA
gcgagaaagacggaatagcgaaaactgccgaatgggcggcggagatttgcggcattccacccgagaagattcgcg

SEQ ID NO: 791468 - DNA, 75 bp, synthetic construct
  source 1..75: mol_type = other DNA
atacagcgtaaggtgtttacccgtaatgagggaaaacagggaccatcactgccgtacattccgtcaggaagtttt

SEQ ID NO: 791469 - DNA, 75 bp, synthetic construct
  source 1..75: mol_type = other DNA
attggtgcgggcaacgaagtgaccgtggtgttccaggacggcttccagctgaaaaccgtggaagagatggcgctg

SEQ ID NO: 791470 - DNA, 75 bp, synthetic construct
  source 1..75: mol_type = other DNA
acccgtaatgagggaaaacagggaccatcgctgccgtacattccgtcaggaagttttgcgaaagccatgctgatt

SEQ ID NO: 791471 - DNA, 75 bp, synthetic construct
  source 1..75: mol_type = other DNA
cctgcgctgggacggcagtctcagcggactgctggatgacgtgacggcgcggatgggcatttcctggcgctggcg

SEQ ID NO: 791472 - DNA, 75 bp, synthetic construct
  source 1..75: mol_type = other DNA
gcgaagcggcgctggcccggctggtggcagtgattaaagatttaacaacagaacaaaaagcccgacgacctacgc

SEQ ID NO: 791473 - DNA, 75 bp, synthetic construct
  source 1..75: mol_type = other DNA
ccgtctgcatgttcctgataaacgcggcgagcgcgatgcactcatcgccgctaccgcgctggtccacgggatgag

SEQ ID NO: 791474 - DNA, 75 bp, synthetic construct
  source 1..75: mol_type = other DNA
gttaaaccttgtagccgctgtattttcaccaccgtcagcccagaaaagggcaaaaacatccggcaggcgaaccat

SEQ ID NO: 791475 - DNA, 75 bp, synthetic construct
  source 1..75: mol_type = other DNA
tgcgcgcctggcgggggcatcctggcgaagagaaagtctggcacacacgcgacgcgatcctattatgcatcgggc

SEQ ID NO: 791476 - DNA, 75 bp, synthetic construct
  source 1..75: mol_type = other DNA
cgatcaagtgttagtcgcacttgatgaaccaccgacccgcaatcttaatcacgcgccggatagccgctcttttaa

SEQ ID NO: 791477 - DNA, 75 bp, synthetic construct
  source 1..75: mol_type = other DNA
ctcccagccggctgtcgggctgggggccactgccgcttacggggccggcgatgtcctgaaaatggggattggtgg

SEQ ID NO: 791478 - DNA, 75 bp, synthetic construct
  source 1..75: mol_type = other DNA
gatgaccagcgtcgtattgaaaaactgggacaggacaatgccgccctggcagagcaggtaaaagccctgggtgct

SEQ ID NO: 791479 - DNA, 75 bp, synthetic construct
  source 1..75: mol_type = other DNA
gccgcagacgatactctcccaacaacgcagcaaatggatgcaaatgtcgatatcgactggcaagggctggcattt

SEQ ID NO: 791480 - DNA, 75 bp, synthetic construct
  source 1..75: mol_type = other DNA
ctgattaaggcactgaaccagcaggctaatatcagttcggccaccaccaccaacacggtgaccacgaacatggtg

SEQ ID NO: 791481 - DNA, 75 bp, synthetic construct
  source 1..75: mol_type = other DNA
tcggaaaccgtcgatttctttggcgataaaatggagtgggtggcaccgcacatgggcaccgatgttgcgctgatg

SEQ ID NO: 791482 - DNA, 75 bp, synthetic construct
  source 1..75: mol_type = other DNA
gcgcctaatccgctgaaatatattgatccactcggattaaaaaaagagctctgtaatggaactactcgtgtgcgg

SEQ ID NO: 791483 - DNA, 75 bp, synthetic construct
  source 1..75: mol_type = other DNA
agtgataacttcgacagccagggtaatcatcattacaccaacaaagatctggttaaatatgttgatattggtatg

SEQ ID NO: 791484 - DNA, 75 bp, synthetic construct
  source 1..75: mol_type = other DNA
ggtaacacggcgctggcgtggctggaaaaatataatggcccgaagctgtcgcttacggcgtttgatccgcctgcc

SEQ ID NO: 791485 - DNA, 75 bp, synthetic construct
  source 1..75: mol_type = other DNA
ctcgcggctggggaatggctgtgcgggtaacacggcgctggcgtggctggaaaaatataatggcccgaagctgtc

SEQ ID NO: 791486 - DNA, 75 bp, synthetic construct
  source 1..75: mol_type = other DNA
tgagatgccggaaaacccagacagtgagcggtttattcgcttcgctgatttctgccgcgatccgcaggctcatcc

SEQ ID NO: 791487 - DNA, 75 bp, synthetic construct
  source 1..75: mol_type = other DNA
tggcgaagtcatttttagcttcaaaaataacagcaatggagttttcagagcggatttgtgttgagcggagaaaat

SEQ ID NO: 791488 - DNA, 75 bp, synthetic construct
  source 1..75: mol_type = other DNA
atcgaccgtcagaacgccattcttgaccgacaggtgaaactgaaggttgatgtctaccgcatcaccttccgcgac

SEQ ID NO: 791489 - DNA, 75 bp, synthetic construct
  source 1..75: mol_type = other DNA
accatacagttgcagatgagtttcagcctgagtgatgacccgaccatcaccacagtcagcgcgaaagacggcagc

SEQ ID NO: 791490 - DNA, 75 bp, synthetic construct
  source 1..75: mol_type = other DNA
tctacggaaaagtagcaggtctgcactacttctctgacaactcgggcgctgatggcgatatgtcatatgctcgta

SEQ ID NO: 791491 - DNA, 75 bp, synthetic construct
  source 1..75: mol_type = other DNA
gttaagtttcggtgctgcttactccaattctgaccgtactgatgagcaaacaaagcctgatttccataatacccg

SEQ ID NO: 791492 - DNA, 75 bp, synthetic construct
  source 1..75: mol_type = other DNA
tcttgattttgcgattcagtaccaaggcaaaaacagcaaccgtagcactaagaaacaaaatggtgacggctatgc

SEQ ID NO: 791493 - DNA, 75 bp, synthetic construct
  source 1..75: mol_type = other DNA
gctcttgacggcgacaacaaaaagattgcgattctttgcctgagtactggagcacgttggggagaagcagctcgc

SEQ ID NO: 791494 - DNA, 75 bp, synthetic construct
  source 1..75: mol_type = other DNA
gatgagtcggatctcggaggaatgtttacactcctggcaaatgccggggaatttcacggagaaaatccactccgc

SEQ ID NO: 791495 - DNA, 75 bp, synthetic construct
  source 1..75: mol_type = other DNA
ctgatgatctcactaacgttaccgtaaaacgtgagctgtacgaggttgagcgtgacggtaacaccattgagtacg

SEQ ID NO: 791496 - DNA, 75 bp, synthetic construct
  source 1..75: mol_type = other DNA
gcgctggtcgatatgacctactacgaaaatgccgtgcatgccatgtggctggcgagtcaggaaaactgcgacaaa

SEQ ID NO: 791497 - DNA, 75 bp, synthetic construct
  source 1..75: mol_type = other DNA
agcggcggagctgattgccgcgacgcgcggtttaggatttatggttcagtcagcgggtgaatttctcgcgactga

SEQ ID NO: 791498 - DNA, 75 bp, synthetic construct
  source 1..75: mol_type = other DNA
cgcgccgaatccgctctcttggatcgatccgctgggactgactgcatgttccaaaaacgcgaaatctttgcgaga

SEQ ID NO: 791499 - DNA, 75 bp, synthetic construct
  source 1..75: mol_type = other DNA
gtatcaggttgattatctgaagttccgggagatccttcaggaggtgaagccggatttaccgaaggggcaggctac

SEQ ID NO: 791500 - DNA, 75 bp, synthetic construct
  source 1..75: mol_type = other DNA
ggagattatcagagctgcttgatatatggtggatgcttgatggccgtaaccaggcttacggtgatacctacagga

SEQ ID NO: 791501 - DNA, 75 bp, synthetic construct
  source 1..75: mol_type = other DNA
tttctttctgatgatgagattgagcggcttcttgaacgactcgaaggtgatgcgcgtcgtgtcgccattctgtgt

SEQ ID NO: 791502 - DNA, 75 bp, synthetic construct
  source 1..75: mol_type = other DNA
gaacaatatgttttgcagaatttccataataacccatggctggctaaacctgctgatcggcggcgattatcagag

SEQ ID NO: 791503 - DNA, 75 bp, synthetic construct
  source 1..75: mol_type = other DNA
actatctggcggatgccataaggtttaacccgatagctaatatggcattcactgaacaaaaagagccagcagagt

SEQ ID NO: 791504 - DNA, 75 bp, synthetic construct
  source 1..75: mol_type = other DNA
tccccgtctggcgcatatgatgcaccactacggcagcattctgttaccccacggcggcagcgcgctggtcgatat

SEQ ID NO: 791505 - DNA, 75 bp, synthetic construct
  source 1..75: mol_type = other DNA
aagccagcctcgaacaggcgcaggcgcaactggcgcaggcggagctgaatttacaggactcaacgttgatagccc

SEQ ID NO: 791506 - DNA, 75 bp, synthetic construct
  source 1..75: mol_type = other DNA
tatcgcctgcgtattgtggtgaccgacgccgatgatgcgttacgccagggaatgccggtgacggtgcaattcggt

SEQ ID NO: 791507 - DNA, 75 bp, synthetic construct
  source 1..75: mol_type = other DNA
accgacgccgatgatgcgttacgccagggaatgccagtgacggtgcaattcggtgacgaggcaggacatgaatga

SEQ ID NO: 791508 - DNA, 75 bp, synthetic construct
  source 1..75: mol_type = other DNA
gggagatgagggtatcaccacgcttcagccgcgcattaaaaacggttcaaaagtggaagtgctgattggtgatga

SEQ ID NO: 791509 - DNA, 75 bp, synthetic construct
  source 1..75: mol_type = other DNA
cttgaccaggcccagccggggcgcaaagtgctgctttataccgatggtcgcccgaacaagccgtatcacgggcag

SEQ ID NO: 791510 - DNA, 75 bp, synthetic construct
  source 1..75: mol_type = other DNA
cccggacaagccgtatcacgggcagattggtttcgtttcgccgactgctgaatttaccccgaaaaccgtcgaaac

SEQ ID NO: 791511 - DNA, 75 bp, synthetic construct
  source 1..75: mol_type = other DNA
ccttccgggcgtgtgtacaacatcaccaacggcgagcatcgcacactgcgcagcatcgtgcagaagctgatcgac

SEQ ID NO: 791512 - DNA, 75 bp, synthetic construct
  source 1..75: mol_type = other DNA
cgcatatgatgcaccactacggcagcattctgttaccgcatggcggcagtgcgctggtggatatgacctactatg

SEQ ID NO: 791513 - DNA, 75 bp, synthetic construct
  source 1..75: mol_type = other DNA
accgcttcgccaacgaatttgcccgcagcaaagccgccagtgaagaggtcatcaatatgctttcgcagacaaatc

SEQ ID NO: 791514 - DNA, 75 bp, synthetic construct
  source 1..75: mol_type = other DNA
gcaactggcgcaggcggagctgaatttgcaggactcgacgttgatagccccctctgatggcactctgttaacccg

SEQ ID NO: 791515 - DNA, 75 bp, synthetic construct
  source 1..75: mol_type = other DNA
tggcaaaactgctcaccattgccgggccgcagggatttatggacgccaccctgtggcagcatctggccgccagcc

SEQ ID NO: 791516 - DNA, 75 bp, synthetic construct
  source 1..75: mol_type = other DNA
aataattttgataatgatgagctggtgatcgcagaagtcacctataaccaggacgaccggggcacgacgaccgaa

SEQ ID NO: 791517 - DNA, 75 bp, synthetic construct
  source 1..75: mol_type = other DNA
cttggatggatgccggatccgcaggggggcgagattgtttatgccggtggcaccctgcttattgagaaggagttt

SEQ ID NO: 791518 - DNA, 75 bp, synthetic construct
  source 1..75: mol_type = other DNA
gccttccgtaccctgacggttaagacactggatgccacgggcagtgattttgtcctgcgcacagacctgaaggac

SEQ ID NO: 791519 - DNA, 75 bp, synthetic construct
  source 1..75: mol_type = other DNA
cagaaaggctccacgctggacatcaacaaccgcttcaccggcgggattgaggctcatgacagtcaggtaaacgtc

SEQ ID NO: 791520 - DNA, 75 bp, synthetic construct
  source 1..75: mol_type = other DNA
cacactgggacacagaaaaatgctgacagcagtctgattattgacggaaacattgatacgcacaatgacatcacc

SEQ ID NO: 791521 - DNA, 75 bp, synthetic construct
  source 1..75: mol_type = other DNA
ggtggcgggtcatgacagtatgctgatgaatctgagtggtgcacacgcaccgttctttacgcgtaatattgtgat

SEQ ID NO: 791522 - DNA, 75 bp, synthetic construct
  source 1..75: mol_type = other DNA
ttctcgctacatttatagtttccgccttgtcttatggtgctgctgaacatgccagtgcagcacagatggataccc

SEQ ID NO: 791523 - DNA, 75 bp, synthetic construct
  source 1..75: mol_type = other DNA
accctgacggttaatacacttgatgccacgggcagtgattttgtcctgcgcactgacctgaaaaatgcagataaa

SEQ ID NO: 791524 - DNA, 75 bp, synthetic construct
  source 1..75: mol_type = other DNA
tatcacgggaaatacgaatatcgaacactctgggacacagaaaagtgctgacagtagcctgattattgatggaaa

SEQ ID NO: 791525 - DNA, 75 bp, synthetic construct
  source 1..75: mol_type = other DNA
tgacgccgacgctgcatgtcgacaccacgggtggcagtacgaagtggattctggatggtttcaggacggaagccg

SEQ ID NO: 791526 - DNA, 75 bp, synthetic construct
  source 1..75: mol_type = other DNA
ttaaccggtgataacgccacgctggacatcagccagcaggcgcatgtttccggggatgttcatgcaaccagttca

SEQ ID NO: 791527 - DNA, 75 bp, synthetic construct
  source 1..75: mol_type = other DNA
ctgagcggcacgccggagaatggcgctgataatacctggatgcctgttctgacatacatgacagaaggctatgat

SEQ ID NO: 791528 - DNA, 75 bp, synthetic construct
  source 1..75: mol_type = other DNA
attacgcagtgcctccatgtttcagttaaactggaacaatatgttagccacgaataatacaggcggattttataa

SEQ ID NO: 791529 - DNA, 75 bp, synthetic construct
  source 1..75: mol_type = other DNA
tcctgaagtaacgatccctgatttttctccggtatccgctaaaggtgcaacaactgctattggtaatgcctacag

SEQ ID NO: 791530 - DNA, 75 bp, synthetic construct
  source 1..75: mol_type = other DNA
gcactggatttggcaggaaggcaatcagcgcctgaccaaagtgatgcgccgcgcgataaatgcactctatcttgt

SEQ ID NO: 791531 - DNA, 75 bp, synthetic construct
  source 1..75: mol_type = other DNA
atcatcgctataggccggttacgtacagatacgaaaacgcaggagtatgtcgcgaaaagagtcgcggaagggcac

SEQ ID NO: 791532 - DNA, 75 bp, synthetic construct
  source 1..75: mol_type = other DNA
ttcttcaggagtctgaaaaacgagtggataccggtgacgggttacatgaacttcagcgatgctgcccatgaaata

SEQ ID NO: 791533 - DNA, 75 bp, synthetic construct
  source 1..75: mol_type = other DNA
ggcgcctgaactgattaaacgtaatgctattggatacgaaagcgcttcgcagttgctgatcacggcaggagacaa

SEQ ID NO: 791534 - DNA, 75 bp, synthetic construct
  source 1..75: mol_type = other DNA
agcaggcacgtataccgttatcacgacgttgttaaatttttcgaatcagtcggaattatttctgatagcgataac

SEQ ID NO: 791535 - DNA, 75 bp, synthetic construct
  source 1..75: mol_type = other DNA
ttattgtaattagttcattgattctatgttcttgcgaaaaaaacgataaagattgtttatcgacgccagataata

SEQ ID NO: 791536 - DNA, 75 bp, synthetic construct
  source 1..75: mol_type = other DNA
gacttaaccggggtggagatcgtgctgcaaatagtgcacttcacatcattgccatcggacgtttgcgaactgacg

SEQ ID NO: 791537 - DNA, 75 bp, synthetic construct
  source 1..75: mol_type = other DNA
tttacccatgtagccgctgctgcaccgggtaaaatcaccgcgattgatacacactggatctggcaggaaggcaat

SEQ ID NO: 791538 - DNA, 75 bp, synthetic construct
  source 1..75: mol_type = other DNA
caccgactggcggcagatgggccatacactctcgttacaatccgttgatatcccgctggcggatccgcatttctg

SEQ ID NO: 791539 - DNA, 75 bp, synthetic construct
  source 1..75: mol_type = other DNA
gtatcagaaacacgggcttggcgcgcgtgacgatgcgatgggaatgcagtacctgatccccggctggacgttcga

SEQ ID NO: 791540 - DNA, 75 bp, synthetic construct
  source 1..75: mol_type = other DNA
agtgaataccgcaatgttaccaacgtttatcgtatttcattaaagtcccttgcccgacgctatctcgagttacat

SEQ ID NO: 791541 - DNA, 75 bp, synthetic construct
  source 1..75: mol_type = other DNA
agccttttgtcttattcaaaggccttacatttcaaaaactctgcttaccaggcgcatttcgcccaggggatcacc

SEQ ID NO: 791542 - DNA, 75 bp, synthetic construct
  source 1..75: mol_type = other DNA
tggcactggcgcaacgcttcccgcaggcgcgtattacgctcgatcctaacggtgcctggtcgctgaacgaagcga

SEQ ID NO: 791543 - DNA, 75 bp, synthetic construct
  source 1..75: mol_type = other DNA
atgtccgggttttatcataagcatttcctgaaattactcgatttcacgccagctgaactcaacagcctgttgcag

SEQ ID NO: 791544 - DNA, 75 bp, synthetic construct
  source 1..75: mol_type = other DNA
tgagttaaaaaataaaagcgatgaagattataaaaagaccattaccgatgatactaagctgattcattatgttgg

SEQ ID NO: 791545 - DNA, 75 bp, synthetic construct
  source 1..75: mol_type = other DNA
ggtgaaatgcgcgtggggtcccgcgtggtatctcaggagatcagcactgcagatgaaggcgatggtggtcaggtt

SEQ ID NO: 791546 - DNA, 75 bp, synthetic construct
  source 1..75: mol_type = other DNA
atggcagcgacgcacacactccgtctggcgtcaccgggcatggcacgcatctgcctttacggggatttgcaacga

SEQ ID NO: 791547 - DNA, 75 bp, synthetic construct
  source 1..75: mol_type = other DNA
tttctctcggtgccagtatgattctggggggtgtggcgcagatgctggccccgaaaccgaaaacgccccgcatgc

SEQ ID NO: 791548 - DNA, 75 bp, synthetic construct
  source 1..75: mol_type = other DNA
gcgtcttgcgggagcaaaaagtggcggtgtgtttcaggcggtgctgggtgcggcgctgattgcagtggcgtggtg

SEQ ID NO: 791549 - DNA, 75 bp, synthetic construct
  source 1..75: mol_type = other DNA
atgttcgggctgttgatgatgggggcgctttcagcaacgtatgtaaaaattaagacgccattgcatattacaacc

SEQ ID NO: 791550 - DNA, 75 bp, synthetic construct
  source 1..75: mol_type = other DNA
gctgccatgtcgctgggtggggtggctcagatgctggccccgaaggcaaaaacaccggattaccggacaacggat

SEQ ID NO: 791551 - DNA, 75 bp, synthetic construct
  source 1..75: mol_type = other DNA
actggcacgcatctgccttcacggggatttacaacgatttggccgccgcctcagcctgtatgtgaacacggcagc

SEQ ID NO: 791552 - DNA, 75 bp, synthetic construct
  source 1..75: mol_type = other DNA
ggtgaaatgcgcgtgggctcccgtgtggtatctcaggagatcagcactgcagaagaaggcgatggtggtcaggtt

SEQ ID NO: 791553 - DNA, 75 bp, synthetic construct
  source 1..75: mol_type = other DNA
ggtgaaatgcgcgtgggttcccgcgtggtatctcaggagatcagcactgcagaggaaggcgatggtggtcaggtt

SEQ ID NO: 791554 - DNA, 75 bp, synthetic construct
  source 1..75: mol_type = other DNA
ggtgaaatgcgcgtgggatcccgtgtggtatctcaggagatcagcactgcagacgaaggcgatggtggtcaggtt

SEQ ID NO: 791555 - DNA, 75 bp, synthetic construct
  source 1..75: mol_type = other DNA
cagtgacattctcttttcaatgggcgcggcgatgacacttggtggtgttgcacagatgctggcaccgaaagccag

SEQ ID NO: 791556 - DNA, 75 bp, synthetic construct
  source 1..75: mol_type = other DNA
ctgccgtcaccgtgcccgcgaatgcggaatgcaccatccggaccattaaatcttacgaccgcccgttttctgccg

SEQ ID NO: 791557 - DNA, 75 bp, synthetic construct
  source 1..75: mol_type = other DNA
cggctaaaggtgtccgctctgaagccctggaagtggcccgtcgtcagtatccggatgacagccgtctgcatcatg

SEQ ID NO: 791558 - DNA, 75 bp, synthetic construct
  source 1..75: mol_type = other DNA
ggtgaatatcagtatttattactacttgcaaatatgcatccggtttataaactggtaaaaaataacttgccatac

SEQ ID NO: 791559 - DNA, 75 bp, synthetic construct
  source 1..75: mol_type = other DNA
caacatgggcaattcgatgctcgaagctgcggcgcttaccggtctggatttgcgtctggtcgcgccacaggcatg

SEQ ID NO: 791560 - DNA, 75 bp, synthetic construct
  source 1..75: mol_type = other DNA
ttggtcataaagagtcgattaaagacactgcccgcgtgcttggtcgcatgtatgacggtattcagtatcgcggct

SEQ ID NO: 791561 - DNA, 75 bp, synthetic construct
  source 1..75: mol_type = other DNA
gggctggaaatcacggcaatgctggtgaagccggagccggggatgccctcccagatggcagcccggctggatgag

SEQ ID NO: 791562 - DNA, 75 bp, synthetic construct
  source 1..75: mol_type = other DNA
ggtggatgcgcacctgaagcgcctgcgtgaactggaagccggtaaggccgccacggcgcagccggtgaaacaggc

SEQ ID NO: 791563 - DNA, 75 bp, synthetic construct
  source 1..75: mol_type = other DNA
gccattgcggtactgacggaagagctgatccgtttttccagtccggctgctgatgcactggtccgtaatgcgctg

SEQ ID NO: 791564 - DNA, 75 bp, synthetic construct
  source 1..75: mol_type = other DNA
tctgcaatggcactgggtggtgtggcccagatgctggccccgaaggcaaagacgccggagtacaaaagtacggat

SEQ ID NO: 791565 - DNA, 75 bp, synthetic construct
  source 1..75: mol_type = other DNA
gaaccctgctattactggattattcctgagttgaataaaatagcatcaatcagattcccccattctttcgctgat

SEQ ID NO: 791566 - DNA, 75 bp, synthetic construct
  source 1..75: mol_type = other DNA
tgtttacccctaccgaagccggggccgttgctgctttctatgcgctgtttgtcgccacagttatttaccgtgaaa

SEQ ID NO: 791567 - DNA, 75 bp, synthetic construct
  source 1..75: mol_type = other DNA
gcgaaaatgaattatctgcccgtcttaatgagtcgctggcaaatggtgccgtgatccacattgtgccgcgtctgg

SEQ ID NO: 791568 - DNA, 75 bp, synthetic construct
  source 1..75: mol_type = other DNA
gcatgatactgggtggtgtggcccagatgctggccccgaaggcaaaaacaccggagtacagagcaacggataacg

SEQ ID NO: 791569 - DNA, 75 bp, synthetic construct
  source 1..75: mol_type = other DNA
cggtgaaatgcgcgtggggtcacgtgttgtctctcaggagatcagcacggcagacgagggggacggtggtcaggt

SEQ ID NO: 791570 - DNA, 75 bp, synthetic construct
  source 1..75: mol_type = other DNA
cgcggctgtatcgggtatgtatgcggcaggggccagtatgatcctgggtggtgtggcgcagatgctggcaccgaa

SEQ ID NO: 791571 - DNA, 75 bp, synthetic construct
  source 1..75: mol_type = other DNA
aacgcctaaagtgtcagccactgataacggtaagcaaaatacctatttttcctcattggataacatggttgccca

SEQ ID NO: 791572 - DNA, 75 bp, synthetic construct
  source 1..75: mol_type = other DNA
ccatccgtgccctgtcgctgcagctgccgggattcaggcagaaactgtatgagggatggtatcagttacgcattg

SEQ ID NO: 791573 - DNA, 75 bp, synthetic construct
  source 1..75: mol_type = other DNA
gctggcgtccctgattcagaccgccgaacaggcactgtggaaacgtgaatgggccgcccgtgattacggcctcgc

SEQ ID NO: 791574 - DNA, 75 bp, synthetic construct
  source 1..75: mol_type = other DNA
aaatggtgcagtgatccacatcgtgccgcgcctggcgggtgccaaaagtggcggtgtgtttcaggcagtgctggg

SEQ ID NO: 791575 - DNA, 75 bp, synthetic construct
  source 1..75: mol_type = other DNA
cttaacgttatttcaggggtggcaaaactcaaattcgatgatgcagtcagaggcgttttcccttacgtcctggtt

SEQ ID NO: 791576 - DNA, 75 bp, synthetic construct
  source 1..75: mol_type = other DNA
acggataacggcaaacagaacacctatttttcttcgctagataatatggttgcacagggtaattcgctgccggtg

SEQ ID NO: 791577 - DNA, 75 bp, synthetic construct
  source 1..75: mol_type = other DNA
cggcgatgacacttggtggtgttgcacagatgctggcaccgaaagccagtgtagcaaaagccagcaccacggata

SEQ ID NO: 791578 - DNA, 75 bp, synthetic construct
  source 1..75: mol_type = other DNA
gcccgtcttaatgagccgctggcaaatggtgccgtgatccacatcgtgccgcgtctggcgggagctaaaagtggt

SEQ ID NO: 791579 - DNA, 75 bp, synthetic construct
  source 1..75: mol_type = other DNA
ggatgccgggtatcggtattgcagccagcaatattatgttttccatgggggctgccatgtcgctgggtggtgtgg

SEQ ID NO: 791580 - DNA, 75 bp, synthetic construct
  source 1..75: mol_type = other DNA
gtgaacacggcagcggaagccatccgggcgctgtcgctgcagctgccgggattccgccgtcagatgaccgaaggc

SEQ ID NO: 791581 - DNA, 75 bp, synthetic construct
  source 1..75: mol_type = other DNA
ggcatggtggaaccctgtgggctggctgggtgccgcggctgtatcgggcatgtatgcggcaggggccagtatgat

SEQ ID NO: 791582 - DNA, 75 bp, synthetic construct
  source 1..75: mol_type = other DNA
tggtatcaggtacgcattgccgggagtgatgcaggtgaaactgaattatcagcccgtcttaatgaaccgctggca

SEQ ID NO: 791583 - DNA, 75 bp, synthetic construct
  source 1..75: mol_type = other DNA
tcggcgtttccagcggattatccatcagtaagctgtttatggcgggcattgccccaggcattatgatgggcgcaa

SEQ ID NO: 791584 - DNA, 75 bp, synthetic construct
  source 1..75: mol_type = other DNA
atgcgcagcgccaactacccggtcaaccgggctgcggggctgattgcctctggcggcattatcgcgccaattatt

SEQ ID NO: 791585 - DNA, 75 bp, synthetic construct
  source 1..75: mol_type = other DNA
taacatgttgccacttattgccgtgttgggtatttatttttacatacaaaaatgtggccctcatttcttacgtat

SEQ ID NO: 791586 - DNA, 75 bp, synthetic construct
  source 1..75: mol_type = other DNA
tgaaaacgggagccgaagccatccgggcactggccacgcagatccccgcatttcgtcagaaactgagcgacggct

SEQ ID NO: 791587 - DNA, 75 bp, synthetic construct
  source 1..75: mol_type = other DNA
tgtggcccagatgctggcaccgaaagcccggacgtccacagcgaccagcacggataacggtaagcagaacaccta

SEQ ID NO: 791588 - DNA, 75 bp, synthetic construct
  source 1..75: mol_type = other DNA
gggcgctggccacacagctccctgcgtttcgccagaaactgagcggcggctggtatcaggtgcggatagcaggga

SEQ ID NO: 791589 - DNA, 75 bp, synthetic construct
  source 1..75: mol_type = other DNA
ctgcctttacggggatttgcaacgatttggccgccgcatcgagcttcgtgtgaaaacgggggcagaagcaatccg

SEQ ID NO: 791590 - DNA, 75 bp, synthetic construct
  source 1..75: mol_type = other DNA
ctgcctttacggggatttgcaacgatttggccgccgcatcgaacttcgtgtgaaaacgggggcagaagcgatccg

SEQ ID NO: 791591 - DNA, 75 bp, synthetic construct
  source 1..75: mol_type = other DNA
cggcgctgattgcggtggcatggtggaaccctgcaggctggctgggtgccgcggctgtatcgggcatgtatgcgg

SEQ ID NO: 791592 - DNA, 75 bp, synthetic construct
  source 1..75: mol_type = other DNA
tgatgcaggtgaaaccgaattatctgcccgtcttaatgagccgctggcaaatggtgccgtgatccacatcgtacc

SEQ ID NO: 791593 - DNA, 75 bp, synthetic construct
  source 1..75: mol_type = other DNA
gtttcgtcagaaactgagcgacggctggtatcaggtacgcattgccgggcgtgatgcaggtgaaactgaattatc

SEQ ID NO: 791594 - DNA, 75 bp, synthetic construct
  source 1..75: mol_type = other DNA
atgatgcggaagcactcgctaccgatttaggtgttggcgttctggcaggcggcgctattaacgctgctggacgtg

SEQ ID NO: 791595 - DNA, 75 bp, synthetic construct
  source 1..75: mol_type = other DNA
gatggtgagcttctatggctggaaccgcgtcgatcgctttatggccgcctggaaaaatgcgggattcagcgttgt

SEQ ID NO: 791596 - DNA, 75 bp, synthetic construct
  source 1..75: mol_type = other DNA
gttgcaaataaagcccctgcctctggtttttggacctgccacggtattcgtatgcatatgggcgttgatatgggg

SEQ ID NO: 791597 - DNA, 75 bp, synthetic construct
  source 1..75: mol_type = other DNA
tgaccgacccgccatatctcgtcggttttcgtgaccgttccgggcgcaccatcgccggcgataaaaccgatgaat

SEQ ID NO: 791598 - DNA, 75 bp, synthetic construct
  source 1..75: mol_type = other DNA
cctggcaaaaggccgtccacgtctgccacaaaacccgctgccggacgtgctgggctggaaatattcaggcaatcg

SEQ ID NO: 791599 - DNA, 75 bp, synthetic construct
  source 1..75: mol_type = other DNA
ttcgtgaccgtcaggggcgtaccattgccggcgataaaaccgatgaatggctgcaaccggcctgtaatgaaatgt

SEQ ID NO: 791600 - DNA, 75 bp, synthetic construct
  source 1..75: mol_type = other DNA
atgaggtttatggtgaccttcctcatccggatgaagtatcgtcagatacaatattgccattgtttacagaacaaa

SEQ ID NO: 791601 - DNA, 75 bp, synthetic construct
  source 1..75: mol_type = other DNA
ggaaacacgccggattcagcgtggcagggcacctcgtgttcaccaaaaactacacatccaaatctgcgtatgtcg

SEQ ID NO: 791602 - DNA, 75 bp, synthetic construct
  source 1..75: mol_type = other DNA
ggatgccggggatcagtatcgcttttagtgacatcctcttttcaatgggcgcggcgatgacgcttggaggtgttg

SEQ ID NO: 791603 - DNA, 75 bp, synthetic construct
  source 1..75: mol_type = other DNA
ttcccgcgtcgggaaaatggcgcagactacagcagaaaatatccctctggctggcacaagcggaatgagagcaac

SEQ ID NO: 791604 - DNA, 75 bp, synthetic construct
  source 1..75: mol_type = other DNA
tgactgacccgccatatctcgtcggtttccgtgaccgttccgggcgcaccatcgccggcgataaaaccgatgaat

SEQ ID NO: 791605 - DNA, 75 bp, synthetic construct
  source 1..75: mol_type = other DNA
ttaccgacccgccatatctcgtcggtttacgtgaccgttccgggcgcaccatcgccggcgataaaaccgatgaat

SEQ ID NO: 791606 - DNA, 75 bp, synthetic construct
  source 1..75: mol_type = other DNA
ttacagacccgccatatctcgtcggtttccgtgaccgttccgggcgcaccatcgccggcgataaaaccgatgaat

SEQ ID NO: 791607 - DNA, 75 bp, synthetic construct
  source 1..75: mol_type = other DNA
ctgcctttacggggattttcaacgatttggccgccgcatcgatcttcgtgtgaaaacgggggcagaagcgatccg

SEQ ID NO: 791608 - DNA, 75 bp, synthetic construct
  source 1..75: mol_type = other DNA
gaaagataaaaatgattctttgggggtgcggacgatttcttggacggtttatacggacatcaatccgaccgcatg

SEQ ID NO: 791609 - DNA, 75 bp, synthetic construct
  source 1..75: mol_type = other DNA
tggctcttcgggtgcgaacccgttcgcctgtatcgcagcaggtatcgcctctctgtgggggccggctcacggtgg

SEQ ID NO: 791610 - DNA, 75 bp, synthetic construct
  source 1..75: mol_type = other DNA
agaacacctatttttcttcactggataatatggttgcccagggcaatgttctgcccgttctgtacggtgaaatgc

SEQ ID NO: 791611 - DNA, 75 bp, synthetic construct
  source 1..75: mol_type = other DNA
gattactcgtctgttccacgccttccgccgcgactctcatccgatggcggtcatgtgcggtattaccggcgcact

SEQ ID NO: 791612 - DNA, 75 bp, synthetic construct
  source 1..75: mol_type = other DNA
aaatcgccgccttccgtctgctgtcgaaaatgccgaccatggcagcgatgtgttacaaatattctatcggccagc

SEQ ID NO: 791613 - DNA, 75 bp, synthetic construct
  source 1..75: mol_type = other DNA
gaaatgcacagtgacggtatgaagattgcccgtccgcgtcagctgtatacaggatatgaaaaacgcgactttaaa

SEQ ID NO: 791614 - DNA, 75 bp, synthetic construct
  source 1..75: mol_type = other DNA
atcccggcatttcgtcagaaactgagcgacggctggtaccaggtacgcattgccgggcgtgatgcaggtgaaacc

SEQ ID NO: 791615 - DNA, 75 bp, synthetic construct
  source 1..75: mol_type = other DNA
ggtgaaatgcgcgttgggtcacgtgtggcatctcaggagatcagcacggcagatgaaggggatggtggtcaggtt

SEQ ID NO: 791616 - DNA, 75 bp, synthetic construct
  source 1..75: mol_type = other DNA
gaaccctgtgggctggctgggggccgcggctgtatcgggcatgtatgcggcaggggccagtatgatcctgggcgg

SEQ ID NO: 791617 - DNA, 75 bp, synthetic construct
  source 1..75: mol_type = other DNA
aatggtgcggttatccacattgttccgcgtctggctggcgctaaaagtggcggcgtgtttcaggcagtgctgggc

SEQ ID NO: 791618 - DNA, 75 bp, synthetic construct
  source 1..75: mol_type = other DNA
ggtgaaatgcgcgtgggatcacgtgtggtatctcaggagatcagcacagcagacgaaggggacggtggtcaggtt

SEQ ID NO: 791619 - DNA, 75 bp, synthetic construct
  source 1..75: mol_type = other DNA
cgggcatgtatgcggcaggggccagtatgatcctgggcggagtggcgcagatgctggcaccgaaagccaggacgc

SEQ ID NO: 791620 - DNA, 75 bp, synthetic construct
  source 1..75: mol_type = other DNA
tccggtgaaattctggcggctggtcctgaacagattgatgcgctcatcgcatatctggaaaaggtgaagccccgc

SEQ ID NO: 791621 - DNA, 75 bp, synthetic construct
  source 1..75: mol_type = other DNA
agcccggacgcccacagcgaccagcacggataacggtaagcagaacacctatttctcgtcactggataacatggt

SEQ ID NO: 791622 - DNA, 75 bp, synthetic construct
  source 1..75: mol_type = other DNA
gctgataacgagactatttcaaaacttcagtcatatcgtgatgagcttgttcgcaatgctggtcctgatggtccg

SEQ ID NO: 791623 - DNA, 75 bp, synthetic construct
  source 1..75: mol_type = other DNA
tgaaatgcgcgtggggtcacgtgtggtatctcaggagatcagcacggcagatgaaggggacggtggtcaggttgt

SEQ ID NO: 791624 - DNA, 75 bp, synthetic construct
  source 1..75: mol_type = other DNA
ttccgccgtcagatgaacgaaggctggtaccagatacgtattgccggtgatgacacggcaccggaggcggtgtac

SEQ ID NO: 791625 - DNA, 75 bp, synthetic construct
  source 1..75: mol_type = other DNA
ggtgtgtttcaggcggtgctgggtgcggcgttgattgctacggcaatctggatgccggggatcagtatcgctttc

SEQ ID NO: 791626 - DNA, 75 bp, synthetic construct
  source 1..75: mol_type = other DNA
gcggctgttatggcggttgctatatggatgccggggggaggaattatggcgagtaatctgctgttttctctcggt

SEQ ID NO: 791627 - DNA, 75 bp, synthetic construct
  source 1..75: mol_type = other DNA
gagtttgtcacttcattacaggcattgaaagagatcggaataaaagctggcttttctgctttttcagaagaataa

SEQ ID NO: 791628 - DNA, 75 bp, synthetic construct
  source 1..75: mol_type = other DNA
tgacatagccgatatcattaaatttgattcggttgtaccaaaggcatttgaaatagcggcgaggcaacccgcaga

SEQ ID NO: 791629 - DNA, 75 bp, synthetic construct
  source 1..75: mol_type = other DNA
cttaaaaacacttggtgttgtgcaaaataatattattgggaaacctatccgtttcagaccattaacatttgagag

SEQ ID NO: 791630 - DNA, 75 bp, synthetic construct
  source 1..75: mol_type = other DNA
catttttgtttcgaaacttctggaggatcagggaccaggagataacatcagtaaaatattcgcgaccatgatcga

SEQ ID NO: 791631 - DNA, 75 bp, synthetic construct
  source 1..75: mol_type = other DNA
catacactaaatcagtaagttggcagcatcacctcagaccattaacatttgagagtaattttacccatggacata

SEQ ID NO: 791632 - DNA, 75 bp, synthetic construct
  source 1..75: mol_type = other DNA
aaattttttgtgaagatggcctctatgctgtgtgcgttgaaaatggaaatattgttagccattaccgcattgtgt

SEQ ID NO: 791633 - DNA, 75 bp, synthetic construct
  source 1..75: mol_type = other DNA
gtgcattttggctttgacgtgcatttgtacaataaccacatggaaagtgtgtgtgagctaatgaaacgacaggct

SEQ ID NO: 791634 - DNA, 75 bp, synthetic construct
  source 1..75: mol_type = other DNA
tacatgcttactggtgggactgtgccgcttatttctggaaaggcggtaaatcttaagccactgcttgtcgaactt

SEQ ID NO: 791635 - DNA, 75 bp, synthetic construct
  source 1..75: mol_type = other DNA
gaaattgaaccaccacaacccgcgccggatatgttaccgcctgccatccctgaacctgaaacgctgggcgatagc

SEQ ID NO: 791636 - DNA, 75 bp, synthetic construct
  source 1..75: mol_type = other DNA
gaaattgaaccaccacaacctgcgccggatatgttaccaccagctatcccggaacctgaattgctaggtgatagt

SEQ ID NO: 791637 - DNA, 75 bp, synthetic construct
  source 1..75: mol_type = other DNA
acggacggatttatcttgcacgacggtgagtttgtcacttcattacaggcattgaaagagatcggaataaaagct

SEQ ID NO: 791638 - DNA, 75 bp, synthetic construct
  source 1..75: mol_type = other DNA
attcacgcttgctccgctatgtcctggaaaccaaaaccgaaaaggttgtgacacagtctcgcttcgatccccttt

SEQ ID NO: 791639 - DNA, 75 bp, synthetic construct
  source 1..75: mol_type = other DNA
ttgtgcgtaacgcatgagatgggatttgcgcgaaccgtcgctgaccgggtgatttttatggatcgcggagagatg

SEQ ID NO: 791640 - DNA, 75 bp, synthetic construct
  source 1..75: mol_type = other DNA
ttgcacgaaccgtcgctgacagggtgatttttatggatcgtggggagatagtggaacaagctgcaccggatgagt

SEQ ID NO: 791641 - DNA, 75 bp, synthetic construct
  source 1..75: mol_type = other DNA
caagctgcacctgatgagttttttgcgcatcctaaatcagagcgtacgagggcatttttatcgcaggtaatccat

SEQ ID NO: 791642 - DNA, 75 bp, synthetic construct
  source 1..75: mol_type = other DNA
tgagctgtgggatgaaacgacctggcatcaacaagtcaaggaggatatcgacgcagagcagttggctaccgacag

SEQ ID NO: 791643 - DNA, 75 bp, synthetic construct
  source 1..75: mol_type = other DNA
tggtttgcaccattgacattcatcacccgtgcctgctgctttaccccctacctgaatgggaaattattgagcaaa

SEQ ID NO: 791644 - DNA, 75 bp, synthetic construct
  source 1..75: mol_type = other DNA
atgtacggaacatgcgaaacgctctgccgggcgctggcagtaaagtatccgggagacacgccgttgatgctggtt

SEQ ID NO: 791645 - DNA, 75 bp, synthetic construct
  source 1..75: mol_type = other DNA
gttaagcaatctgatggaatatctggtcaacgttgttccttctggtgaagtcattgacagcacgcttttgccacc

SEQ ID NO: 791646 - DNA, 75 bp, synthetic construct
  source 1..75: mol_type = other DNA
caatctggtaaataacggcgtgacagagcaaagtgagagcccagaagccagcgaagcacatttggcacttgatga

SEQ ID NO: 791647 - DNA, 75 bp, synthetic construct
  source 1..75: mol_type = other DNA
cacgttgtttcttgatgaaattggcgatatgccattgatgttgcaggctaaattactgcgagctattgaggcgcg

SEQ ID NO: 791648 - DNA, 75 bp, synthetic construct
  source 1..75: mol_type = other DNA
tgcgtcacccgccgtcaggcggtggttaatcaggcccgcatcctgctgaaaaacaacacacacgaaaacgactga

SEQ ID NO: 791649 - DNA, 75 bp, synthetic construct
  source 1..75: mol_type = other DNA
accattaaatcttacgaccgccagttttctgccgcgtccggcaaccggaaaccggtggtgaaaatcgcatcttct

SEQ ID NO: 791650 - DNA, 75 bp, synthetic construct
  source 1..75: mol_type = other DNA
ctattgccgccaaatctgctgaataatggcacaacggagcaaagtgatgtaacagaggtcagtgaggcgcacctg

SEQ ID NO: 791651 - DNA, 75 bp, synthetic construct
  source 1..75: mol_type = other DNA
ttctcactcattttctcgcgaagattacgggtcacatggccggtgcatttgtgcattttggctttgacgtgcatt

SEQ ID NO: 791652 - DNA, 75 bp, synthetic construct
  source 1..75: mol_type = other DNA
gacctttgcgcggcgtttgtcaggcacgcaaaagttgcaggactggatgatgccgataccgtaacgcttaaggaa

SEQ ID NO: 791653 - DNA, 75 bp, synthetic construct
  source 1..75: mol_type = other DNA
atgagcgtgaatcccagtactgtacaacacagtactatgattgccacaagggcatattttgttagcatgtcttgc

SEQ ID NO: 791654 - DNA, 75 bp, synthetic construct
  source 1..75: mol_type = other DNA
tcttgaccattatgattccataaccacaggtcatattagccaggcacttcattatctcaatattggaagattacc

SEQ ID NO: 791655 - DNA, 75 bp, synthetic construct
  source 1..75: mol_type = other DNA
cgaggcggattacaggcgctgcctaaagggcaatatgaagcggcagagtcgctggcattgggttactggaaaact

SEQ ID NO: 791656 - DNA, 75 bp, synthetic construct
  source 1..75: mol_type = other DNA
gaccgactgctcaaccgaagtgaaaaaaggcgaagtggtggtggtttgcggcccgtctggttccggaaaatcaac

SEQ ID NO: 791657 - DNA, 75 bp, synthetic construct
  source 1..75: mol_type = other DNA
ttacagaagaagaatatattggtagcatggcgttaattaccggtcatcaagccacttcaggtaatccctgcgggt

SEQ ID NO: 791658 - DNA, 75 bp, synthetic construct
  source 1..75: mol_type = other DNA
aacaaaagagctaatgaagcagtacccggaggatgaaaaattccgtatgcgtgtacacggctttagcgaaacaat

SEQ ID NO: 791659 - DNA, 75 bp, synthetic construct
  source 1..75: mol_type = other DNA
atggctaaaccagcaaaacgaatcaagaacgccgcagcggcttatgttccacaatcccgcgatgccgtggtatgt

SEQ ID NO: 791660 - DNA, 75 bp, synthetic construct
  source 1..75: mol_type = other DNA
gttgccggaattacagttaaatcaggcattgaagatttttctattattccgtttgaacaggaagccggtatttaa

SEQ ID NO: 791661 - DNA, 75 bp, synthetic construct
  source 1..75: mol_type = other DNA
gtcgcggacaatgacctggagtttatgctgggcagcaaactgatgcgtacccgctatgaccggaccattcactca

SEQ ID NO: 791662 - DNA, 75 bp, synthetic construct
  source 1..75: mol_type = other DNA
acgtaacggccagtaccagtcgcggtaatcaaaagtatcgtgatggctcgctgtatactttctacaaaacctcag

SEQ ID NO: 791663 - DNA, 75 bp, synthetic construct
  source 1..75: mol_type = other DNA
gaaaactcaccgatcaatttggccaaatacattatttactactggagcctgaagaaggaaaaactttcactaaag

SEQ ID NO: 791664 - DNA, 75 bp, synthetic construct
  source 1..75: mol_type = other DNA
ggtatgttttcgccgcactgatctactggatcttctgtttcagcatgtcacgttatagccaacatctggaaaaac

SEQ ID NO: 791665 - DNA, 75 bp, synthetic construct
  source 1..75: mol_type = other DNA
cttgccaagccactacgtgattcgactggcacagggaccaattcagtgatcctcgacggttttattgagcagggc

SEQ ID NO: 791666 - DNA, 75 bp, synthetic construct
  source 1..75: mol_type = other DNA
agggctgggaaaagccgtcgattttactctcgtcagccatgctgcctggttcggtttgccacatttttccactcc

SEQ ID NO: 791667 - DNA, 75 bp, synthetic construct
  source 1..75: mol_type = other DNA
gattttgtcgccgcctacaaacaggctgaagaagagggcagggaggctgctttcatctcctgggcggagtatacc

SEQ ID NO: 791668 - DNA, 75 bp, synthetic construct
  source 1..75: mol_type = other DNA
cgatccccgtcctctgcatgacgataaaggcgcgatcaacggtctgccgctggcaagcgacgtgattggctccac

SEQ ID NO: 791669 - DNA, 75 bp, synthetic construct
  source 1..75: mol_type = other DNA
agcgacctgtcaggcttcgacaagccgggtgagtatccggagtttgatgatgagaaaaccctgtcacagcgcggc

SEQ ID NO: 791670 - DNA, 75 bp, synthetic construct
  source 1..75: mol_type = other DNA
ggaaggcaaaaaagccaaagtctggagcacagcagacggtgcctgtgttggtcgtcgtgctgttgatgagattaa

SEQ ID NO: 791671 - DNA, 75 bp, synthetic construct
  source 1..75: mol_type = other DNA
gaagtttcccggacagatttcaggtggtcagcagcaacgcgttgccatagcacgttcactttgtatgaaaccaaa

SEQ ID NO: 791672 - DNA, 75 bp, synthetic construct
  source 1..75: mol_type = other DNA
ccagggcctggagcagggatctttaccaacttcaccagggattatggcatttatttccaaacagaccggatgctg

SEQ ID NO: 791673 - DNA, 75 bp, synthetic construct
  source 1..75: mol_type = other DNA
aatactcccgtatcgcggtcgctatattgcggtatgggcggtgatttacccactgattgtctggtggctgatgta

SEQ ID NO: 791674 - DNA, 75 bp, synthetic construct
  source 1..75: mol_type = other DNA
acggcagggaagatttttacgaggcctgtcaggcactgcatgccgatgaatgggatgccgagtttatgttccagg

SEQ ID NO: 791675 - DNA, 75 bp, synthetic construct
  source 1..75: mol_type = other DNA
gtggaacaagctgcaccggatgagttttttgcgcatcctaaatcagagcgtacgagggcatttttatcgcaggtg

SEQ ID NO: 791676 - DNA, 75 bp, synthetic construct
  source 1..75: mol_type = other DNA
atggtatggacaattccatgttttgaaaaatataaatttaaccgtgcaaccgtgcaaccgggcgaacggatcgtt

SEQ ID NO: 791677 - DNA, 75 bp, synthetic construct
  source 1..75: mol_type = other DNA
atgtacggaacatgcgaaacgctatgccggaagctggcagcaaagtatgcgggagacacgcccctgatgctggtt

SEQ ID NO: 791678 - DNA, 75 bp, synthetic construct
  source 1..75: mol_type = other DNA
tcatgttccagcaggcggggctgattgccgttacgttgtttattttcggctactccatgtggacgaccattatct

SEQ ID NO: 791679 - DNA, 75 bp, synthetic construct
  source 1..75: mol_type = other DNA
aaacgcttcccccgcgtgagttagcgtcggggctggcagaagtcatcaaatacggcattattcttgacggtgcgt

SEQ ID NO: 791680 - DNA, 75 bp, synthetic construct
  source 1..75: mol_type = other DNA
gcttcattcttaccgctgaaatcgggcgagcaggtcatgttggtcaccaacgaaaccctggctcctctgtatctc

SEQ ID NO: 791681 - DNA, 75 bp, synthetic construct
  source 1..75: mol_type = other DNA
gtttacggcatcaacggcgctatctcagatacttacgcatcaatgatggcaaccatcgagcgtatgggcgacgcc

SEQ ID NO: 791682 - DNA, 75 bp, synthetic construct
  source 1..75: mol_type = other DNA
tcatcattgttatttcactggcttatatgttcttcgccgggcgtgagctacgcgctgaagaagatgcagaaaaac

SEQ ID NO: 791683 - DNA, 75 bp, synthetic construct
  source 1..75: mol_type = other DNA
ctcaggaagtgacggacggctgcggtttctccatcggtcaccagcagcagtttgcatcatggattgcctataaag

SEQ ID NO: 791684 - DNA, 75 bp, synthetic construct
  source 1..75: mol_type = other DNA
cgatgcctatagctgggtgggttacgcggtgttgttagcgctggcgctgaacatctgttacgtgctgctgcgtcg

SEQ ID NO: 791685 - DNA, 75 bp, synthetic construct
  source 1..75: mol_type = other DNA
tgacggacggctgcggtttctccatcggtcaccaacagcagtttgcttcctggcttgcctataaggtcgcgccgt

SEQ ID NO: 791686 - DNA, 75 bp, synthetic construct
  source 1..75: mol_type = other DNA
cctgcctgttctgtacggtgaaatgcgcgtggggtcacgtgtggcatctcaggagatcagcacggcagatgaagg

SEQ ID NO: 791687 - DNA, 75 bp, synthetic construct
  source 1..75: mol_type = other DNA
ggtgtttttcaggcagtgctgggggctgcgctgattgcggtggcatggtggaaccctgtgggctggctgggtgcc

SEQ ID NO: 791688 - DNA, 75 bp, synthetic construct
  source 1..75: mol_type = other DNA
gcggcgctgattgcggtggcatggtggaaccctgcaggttggttgggggctgccgcaattacaggaatgtatggt

SEQ ID NO: 791689 - DNA, 75 bp, synthetic construct
  source 1..75: mol_type = other DNA
ggttattggcaaccttggtgtggccatgatgcttggaggggtggcacagatgctggcccctaaatccagaactcc

SEQ ID NO: 791690 - DNA, 75 bp, synthetic construct
  source 1..75: mol_type = other DNA
tatttcttccgccgctgcgatggagattatcagcaacgtgagcgaaaaccgcctggtgaccgtctctgctgaact

SEQ ID NO: 791691 - DNA, 75 bp, synthetic construct
  source 1..75: mol_type = other DNA
atgtacggaacatgcgaaacgctctgccgggagctggcagcgcagtatccgggggacgcgccgctgatgctggtt

SEQ ID NO: 791692 - DNA, 75 bp, synthetic construct
  source 1..75: mol_type = other DNA
ccatcatcgcactcttcaaagataccagcctggtgatcattatcgggttgttcgatcttttcagtagcgttcagc

SEQ ID NO: 791693 - DNA, 75 bp, synthetic construct
  source 1..75: mol_type = other DNA
ccccgcgcccggcgaaccataacccaagccgcgttatagtttgggcgcgcaaaaatctgttctcaagctggagta

SEQ ID NO: 791694 - DNA, 75 bp, synthetic construct
  source 1..75: mol_type = other DNA
aatcaggaccgtcctggcacgcctggaggacatcccggaagaccagcggattgagtccggtatttcttccgctgc

SEQ ID NO: 791695 - DNA, 75 bp, synthetic construct
  source 1..75: mol_type = other DNA
accccccgcacacagacaacggataacggcaaacagaacacctatttttcttcactggataacatggttgcccag

SEQ ID NO: 791696 - DNA, 75 bp, synthetic construct
  source 1..75: mol_type = other DNA
gcccgtcttaatgaaccgctggcaaatggtgctgtgatccatatcgtgccgcgtctggcgggagccaaaagtggc

SEQ ID NO: 791697 - DNA, 75 bp, synthetic construct
  source 1..75: mol_type = other DNA
atgtacggaacatgcgaaacgctatgccggcagctggcagcaaagtatgcgggagacacgccactgatgctggtt

SEQ ID NO: 791698 - DNA, 75 bp, synthetic construct
  source 1..75: mol_type = other DNA
ggaaatcagaaaaagagctggaggaatggatcatcaaccgtcagaagcagaacgcagcactgacggatctgatgg

SEQ ID NO: 791699 - DNA, 75 bp, synthetic construct
  source 1..75: mol_type = other DNA
atgtacggaacatgcaaaacgctctgccgggagctggcagcaaagtatccgggagacacgccgctaatgctgctt

SEQ ID NO: 791700 - DNA, 75 bp, synthetic construct
  source 1..75: mol_type = other DNA
gattacccgtctgttccatgctttccgtcgcgactcgcatccaatggcagtcatgtgtggtattaccggcgcgct

SEQ ID NO: 791701 - DNA, 75 bp, synthetic construct
  source 1..75: mol_type = other DNA
aagaactctataaatgctaccaaacctggttgactgattttacgaagctgacggtcagatcgggtatgtgtcacc

SEQ ID NO: 791702 - DNA, 75 bp, synthetic construct
  source 1..75: mol_type = other DNA
ggctcaccatcccatgctggaggggattttgctgtcggagtgcgtgcgattaaaacagcgtcctctggcaaataa

SEQ ID NO: 791703 - DNA, 75 bp, synthetic construct
  source 1..75: mol_type = other DNA
agaatatatatcaccatcataccctgacggtcgggagctttacgtttccgggagaaggcgacgttattgcgattg

SEQ ID NO: 791704 - DNA, 75 bp, synthetic construct
  source 1..75: mol_type = other DNA
ttattgcccagccgctgggcgtcgatgacggcgtggattactgccatagcgggcgtatccggcggattgacgaag

SEQ ID NO: 791705 - DNA, 75 bp, synthetic construct
  source 1..75: mol_type = other DNA
cacgccgtatcctggggcgtgtgtcatccgaatatccactacttccataatctgacgcccgggtgggtgtcattc

SEQ ID NO: 791706 - DNA, 75 bp, synthetic construct
  source 1..75: mol_type = other DNA
aactggctatggaatttttacgccgtgaccagagcaatctttctcctgcccaatatctcaaacgactgaaacaat

SEQ ID NO: 791707 - DNA, 75 bp, synthetic construct
  source 1..75: mol_type = other DNA
ctgatgggcttcggtcaccgcgtgtacaaaaattacgacccgcgcgccaccgtaatgcgtgaaacctgccatgaa

SEQ ID NO: 791708 - DNA, 75 bp, synthetic construct
  source 1..75: mol_type = other DNA
gttttaacctgacctcggaagagattgccactcaactcgccatcaagctgaaagccgagaagatgattggttttt

SEQ ID NO: 791709 - DNA, 75 bp, synthetic construct
  source 1..75: mol_type = other DNA
tattgactcactgccggagagcaaaaagcagatgtataactaccagcgtaaatcaaaggtgttgatggcggattt

SEQ ID NO: 791710 - DNA, 75 bp, synthetic construct
  source 1..75: mol_type = other DNA
acgccgcccctggatgatgatctgattgtgaatttatgcaccagtgaacatctgctggttcatcatccgatgctg

SEQ ID NO: 791711 - DNA, 75 bp, synthetic construct
  source 1..75: mol_type = other DNA
agcgcagcactgacggatctgatggatcagtacgtgctcctggcataccgcacaacggttgacgataaccgtaac

SEQ ID NO: 791712 - DNA, 75 bp, synthetic construct
  source 1..75: mol_type = other DNA
tcaagctgatctggttgtgctggtatgacttaatgatcggcaacagcctgaaagactggacagagaatctgaaac

SEQ ID NO: 791713 - DNA, 75 bp, synthetic construct
  source 1..75: mol_type = other DNA
ggagaggaagaggttattgctgttgttccccagtgcctgcacaggattatttatggcagagcagcagccccactg

SEQ ID NO: 791714 - DNA, 75 bp, synthetic construct
  source 1..75: mol_type = other DNA
atgtacggaacatgcgaaacgctatgccgggagctggcagcaaagtatacgggagacacgccgctgatgctggtt

SEQ ID NO: 791715 - DNA, 75 bp, synthetic construct
  source 1..75: mol_type = other DNA
atgtacggaacatgcgaaacgctctgccgggagttggcagcgcagtatccgggagacactccgctgatgctggtt

SEQ ID NO: 791716 - DNA, 75 bp, synthetic construct
  source 1..75: mol_type = other DNA
tctgaccgatcatgaaatcaggaccgtcctggcgcgcatggaggacatcccggaagaccagaggactgaatccgg

SEQ ID NO: 791717 - DNA, 75 bp, synthetic construct
  source 1..75: mol_type = other DNA
gagaacctgaaacggaaatcagaaaaagagctggaggaatggatcatcaaccgtcagaggcagagcgcagcactg

SEQ ID NO: 791718 - DNA, 75 bp, synthetic construct
  source 1..75: mol_type = other DNA
atccgaatatctactacttccataatctgacgcccgggtgggtgtcattcaatggggaaaaaccggagattgcca

SEQ ID NO: 791719 - DNA, 75 bp, synthetic construct
  source 1..75: mol_type = other DNA
accgtgacaccggaaatttcttccgtaatcaatttatgaccattctgctggtatcactgctatgtgcatttatca

SEQ ID NO: 791720 - DNA, 75 bp, synthetic construct
  source 1..75: mol_type = other DNA
aacgtctgaggcagcgttcgctggcaaataaactgatcagcctcttccgtcagtttggtggcacggagttgcgcc

SEQ ID NO: 791721 - DNA, 75 bp, synthetic construct
  source 1..75: mol_type = other DNA
tttctctgaccggtcatgaaatcaggaccgtcctggcacgcctggaggacatcccggaagaccagcggattgagt

SEQ ID NO: 791722 - DNA, 75 bp, synthetic construct
  source 1..75: mol_type = other DNA
tcaaccgtcagaggcagagcgcagcactgacggatctgatggatcagtacgtgctcctggcataccgcacaacgg

SEQ ID NO: 791723 - DNA, 75 bp, synthetic construct
  source 1..75: mol_type = other DNA
tacacatcgaaggccgcatatgtgggctatcgccacgaatgcgcctatatcctggcaaaaggacgtccggcgctg

SEQ ID NO: 791724 - DNA, 75 bp, synthetic construct
  source 1..75: mol_type = other DNA
gagttacgcaccgctgatggcacgcgcgccgaaaacctttaacttcttcattaaccagccgctggtgcgcaaact

SEQ ID NO: 791725 - DNA, 75 bp, synthetic construct
  source 1..75: mol_type = other DNA
attatattgctgaatttcgcgcgctgctcgacagccacggcttaagctacggtatgtttggtcacgtcgatgcag

SEQ ID NO: 791726 - DNA, 75 bp, synthetic construct
  source 1..75: mol_type = other DNA
gcgagttgattaccgatgtgcctgacaaagaaatgctcgggctgaacattgtggaatttgctggtgatgatgaga

SEQ ID NO: 791727 - DNA, 75 bp, synthetic construct
  source 1..75: mol_type = other DNA
gtcgaaaaaacatatcggcatggtcgacttgccgctgctttcggtgccgtcgctgcaacaacaaatggtggggca

SEQ ID NO: 791728 - DNA, 75 bp, synthetic construct
  source 1..75: mol_type = other DNA
ttggctggcaggtgtgccgcgaactggcgggtgtcgaacgtatttatgcgatgcgtaaaaaagccgttgggttat

SEQ ID NO: 791729 - DNA, 75 bp, synthetic construct
  source 1..75: mol_type = other DNA
cacgtactgggcgtgcgggcggtgttgttggggggcgatattctcgatacgcaacctttacccgttgaactggct

SEQ ID NO: 791730 - DNA, 75 bp, synthetic construct
  source 1..75: mol_type = other DNA
gcatcatcgaaattaaccctgaagagggctgggtgcgcgttgaggccggggtgataaaagaccaactcaatcagt

SEQ ID NO: 791731 - DNA, 75 bp, synthetic construct
  source 1..75: mol_type = other DNA
ttcctgccgtagccaggtaaaacgggttgaaggcacgggggtacgccatcctgtgcaggctttactggagattat

SEQ ID NO: 791732 - DNA, 75 bp, synthetic construct
  source 1..75: mol_type = other DNA
aatatgacttctctcacgaagtcaaagaggcgatgtcaggttgtctggcttgtaaagcgtgttcgacccagtgcc

SEQ ID NO: 791733 - DNA, 75 bp, synthetic construct
  source 1..75: mol_type = other DNA
cgctgattgacgagcgagttaatgcactctgtgtgcggcttgatgagctgattgccagccaacaggcaggtgtga

SEQ ID NO: 791734 - DNA, 75 bp, synthetic construct
  source 1..75: mol_type = other DNA
tgtaaagcctgttcaacccagtgccctatcaaaattgatgtgccggagttccgctctcgtttcctgcaactttat

SEQ ID NO: 791735 - DNA, 75 bp, synthetic construct
  source 1..75: mol_type = other DNA
gcgagttgattaccgatgtgcctgacaaagagatgctcgggctgaacattgtggaatttgctggtgatgatgagg

SEQ ID NO: 791736 - DNA, 75 bp, synthetic construct
  source 1..75: mol_type = other DNA
gcaagaccctttcaccagctattacgatgcgcaagtggtggcagattttgtccgtctggtcgagaaattaggttt

SEQ ID NO: 791737 - DNA, 75 bp, synthetic construct
  source 1..75: mol_type = other DNA
atcgtccggtaatccgccgtatcgcgctgatatttatcgtactgattgtactcaacgaaatcgtgccggaggtgt

SEQ ID NO: 791738 - DNA, 75 bp, synthetic construct
  source 1..75: mol_type = other DNA
ttgtcgtcttatcagccacagcaacagcttcagtgcctggcaatgttgattcaatgctcgctggcccgtggtgat

SEQ ID NO: 791739 - DNA, 75 bp, synthetic construct
  source 1..75: mol_type = other DNA
aataatatttatcttcatcgtcaaacctctttatcggatatattaaaagagtatggctataaaagttattttata

SEQ ID NO: 791740 - DNA, 75 bp, synthetic construct
  source 1..75: mol_type = other DNA
cagatcatattcacatgcttctggagatcccgccgaagatgagtgtgtcgagcttcatggggtatctgaagggta

SEQ ID NO: 791741 - DNA, 75 bp, synthetic construct
  source 1..75: mol_type = other DNA
gacgtcttcgtaccgaagggcgacaagcagcgtcgtttgcataaagcgttgttgcgttaccacgatccggcaaac

SEQ ID NO: 791742 - DNA, 75 bp, synthetic construct
  source 1..75: mol_type = other DNA
taagcttcagaatactaggctgaagaatgtgatcatgaaaggcgacctgactgcgtattaccgtgaaggagatcg

SEQ ID NO: 791743 - DNA, 75 bp, synthetic construct
  source 1..75: mol_type = other DNA
taatgaatatcccaggtatgcaacaacttacatcaaccaaatcctttgttggtgatgtagtcggaacctgcaacc

SEQ ID NO: 791744 - DNA, 75 bp, synthetic construct
  source 1..75: mol_type = other DNA
taaggtcgctgataacgagacaatttctaagcttcagtcgtaccgagatgagttaacgcgaaatgctggttcaag

SEQ ID NO: 791745 - DNA, 75 bp, synthetic construct
  source 1..75: mol_type = other DNA
gatttgccgctgttgtcagttccctcgctgcaacaacaaatggtggggcatcgttcggcaaacatgacgctggaa

SEQ ID NO: 791746 - DNA, 75 bp, synthetic construct
  source 1..75: mol_type = other DNA
cactctacaataaattctataactatgattttcagttgggaaaatttgttgagttctttcggcatagttcatttt

SEQ ID NO: 791747 - DNA, 75 bp, synthetic construct
  source 1..75: mol_type = other DNA
tatagtttcattcattacgatgccttcaggtgctctaatcgagcgtattaaatattataaatctaatattctctg

SEQ ID NO: 791748 - DNA, 75 bp, synthetic construct
  source 1..75: mol_type = other DNA
agtttgtaagaaatgttttgtgggggatttatctctctattttaggtgtgcaggcagcgtcgctatttagttcgg

SEQ ID NO: 791749 - DNA, 75 bp, synthetic construct
  source 1..75: mol_type = other DNA
tgatacagaaaaatttataaataaggttttagatgaatctgaaataaacggtaagaaaagagttattggagaaag

SEQ ID NO: 791750 - DNA, 75 bp, synthetic construct
  source 1..75: mol_type = other DNA
cggatgtcgttaaaccgaccaggacccgcctgtatatcggtatcgccttctataaagtaggtgaaccttcaaaga

SEQ ID NO: 791751 - DNA, 75 bp, synthetic construct
  source 1..75: mol_type = other DNA
atatcagcataacggtaaagagcaaacgtatccgaatatcaaaatgatctggtgggcgggtggtggtaactttac

SEQ ID NO: 791752 - DNA, 75 bp, synthetic construct
  source 1..75: mol_type = other DNA
cgatcgcgaagctgttgctgttttagaacgcgctcaaccacttcccagaccaccggctgaaatattagagggagg

SEQ ID NO: 791753 - DNA, 75 bp, synthetic construct
  source 1..75: mol_type = other DNA
cgctggcgggaaattaaaaagcaatttacccatgcttgtggattgaaaaatatctggcaaccacgtttttgggaa

SEQ ID NO: 791754 - DNA, 75 bp, synthetic construct
  source 1..75: mol_type = other DNA
agcttccttttttagagttacctagccatcaagaaaatcttgtgtccttgaggttacaggcagcagaggctgttg

SEQ ID NO: 791755 - DNA, 75 bp, synthetic construct
  source 1..75: mol_type = other DNA
tatcccggaaatgcggcaggtattcaacggtctgaacatgcagtcggttgatatcagctacaaccttaaggtaac

SEQ ID NO: 791756 - DNA, 75 bp, synthetic construct
  source 1..75: mol_type = other DNA
agcaaggccagatggttaccagggctttctctgtaacagagagagagacaggtaaagaaattattttacgtccta

SEQ ID NO: 791757 - DNA, 75 bp, synthetic construct
  source 1..75: mol_type = other DNA
ccgccgcagcggcagagatcaaacgtaattacgatatttatcacaatgcgctggcggagctgatccaactgttag

SEQ ID NO: 791758 - DNA, 75 bp, synthetic construct
  source 1..75: mol_type = other DNA
gaaacatcggctgtggtaaaaaccgtgacgccagctacgccgcgtaaaatggcagtggcagatagcggggagaac

SEQ ID NO: 791759 - DNA, 75 bp, synthetic construct
  source 1..75: mol_type = other DNA
ctgtacgcactgattctatcaaagcgaaaccatccacccgttcaggtactagcaacggcatgattcgggagatta

SEQ ID NO: 791760 - DNA, 75 bp, synthetic construct
  source 1..75: mol_type = other DNA
gaaaaaagagagcgcacaggcgctttacacgttcattgagtcacttccaccaaatccaatcccgatctccttaac

SEQ ID NO: 791761 - DNA, 75 bp, synthetic construct
  source 1..75: mol_type = other DNA
accctgaaaattatcgttcctctaccgcatcccgtaagcgtatcgacgcgtcgttacgcaggctggcatccgtga

SEQ ID NO: 791762 - DNA, 75 bp, synthetic construct
  source 1..75: mol_type = other DNA
atgcaatttgaatccatcaggcagcatttttatgttgaatgctttaaccatgatgtctgggaaagactgcgcttt

SEQ ID NO: 791763 - DNA, 75 bp, synthetic construct
  source 1..75: mol_type = other DNA
gcagcagattttaaacagccgtccggaacatatccgtgaagccgttgaaggatcattacgtcgtctgaagacaga

SEQ ID NO: 791764 - DNA, 75 bp, synthetic construct
  source 1..75: mol_type = other DNA
cgtgttgatccggatgttcctattgaagatgttgcaggaacggtgaaagacctcatcgcagaaggtaaggtcaaa

SEQ ID NO: 791765 - DNA, 75 bp, synthetic construct
  source 1..75: mol_type = other DNA
accaccagaagagggcaaaatgcccgtgggcagactggcgcatacctttgctaccacctttgactggacgccgca

SEQ ID NO: 791766 - DNA, 75 bp, synthetic construct
  source 1..75: mol_type = other DNA
tctccacagcgttaaaaataattgccacggggatcgccttaccccctgataaaatcacctcacaacaactggatg

SEQ ID NO: 791767 - DNA, 75 bp, synthetic construct
  source 1..75: mol_type = other DNA
tgccgtacaagcattgccctgtagcgcaattcatattcttaaagcggctaaaatgccagcgggtgttgccggatt

SEQ ID NO: 791768 - DNA, 75 bp, synthetic construct
  source 1..75: mol_type = other DNA
gaacatatccgtgaagccgttgaaggatcattacgccgccttaagacagatgttattgacctgttgtatcaacac

SEQ ID NO: 791769 - DNA, 75 bp, synthetic construct
  source 1..75: mol_type = other DNA
cttttggctgacgcatcaaaagggcagtttacggcagagtggctactacaggctgcaaaccctgaccgaattaaa

SEQ ID NO: 791770 - DNA, 75 bp, synthetic construct
  source 1..75: mol_type = other DNA
tatgtataaccttctggaaattatctcggtggaatcatttaacaagcgggtctggaataaacatcaggagcagcg

SEQ ID NO: 791771 - DNA, 75 bp, synthetic construct
  source 1..75: mol_type = other DNA
ggatgggtaaggttaatcgcggcctcctgttagagatagcagcagcgcacatgaatccattactgatacaaccgg

SEQ ID NO: 791772 - DNA, 75 bp, synthetic construct
  source 1..75: mol_type = other DNA
ggtacgaaagtctatctggcgaaatcaggcgatcatcggtatgccgacggctgggcattcgccaaaatggcggcg

SEQ ID NO: 791773 - DNA, 75 bp, synthetic construct
  source 1..75: mol_type = other DNA
tcacccatgcttgcggattaaaaaatatctggcaaccgcgtttttgggagcatgccattcgcaatacggtgatgc

SEQ ID NO: 791774 - DNA, 75 bp, synthetic construct
  source 1..75: mol_type = other DNA
cgaaagcgatgatgatttttcctctcgctggcgggagattaaaaagcagttcacccatgcttgtggattgaaaaa

SEQ ID NO: 791775 - DNA, 75 bp, synthetic construct
  source 1..75: mol_type = other DNA
ttctttgatcaggattatttaatgtcagaaaaaaactggctgttaaatggactgacagggaaattatggatgttt

SEQ ID NO: 791776 - DNA, 75 bp, synthetic construct
  source 1..75: mol_type = other DNA
ttatctatattcggttgaagaatataacccagatttgggtggtctggtaatagaatggacccctgaggatgtgta

SEQ ID NO: 791777 - DNA, 75 bp, synthetic construct
  source 1..75: mol_type = other DNA
caataagtagtaatcaacttagttttttttctatattcgatatagatgaagatgaaataacgcaaatagttgatt

SEQ ID NO: 791778 - DNA, 75 bp, synthetic construct
  source 1..75: mol_type = other DNA
cagaaagaacgtggcggcattgtgtcagtgtggaactgtgcgcacaacgttggtggtggtattccgccgctgctg

SEQ ID NO: 791779 - DNA, 75 bp, synthetic construct
  source 1..75: mol_type = other DNA
tttggttcgtaagaactttgcgctcgctatgccttatctggttgagcagggattctcacgcggtgatttaggttt

SEQ ID NO: 791780 - DNA, 75 bp, synthetic construct
  source 1..75: mol_type = other DNA
aaccggatcccttcaatcggtgatcctgaaatcgatgataatacccttactgactggctgaagaagggaggggtt

SEQ ID NO: 791781 - DNA, 75 bp, synthetic construct
  source 1..75: mol_type = other DNA
gcgcagcctgtgagcgtttttctgagatctaccgccgttcacgcggcgtgtttatctcttaccagaaccgccaca

SEQ ID NO: 791782 - DNA, 75 bp, synthetic construct
  source 1..75: mol_type = other DNA
tactcaatacgaagcatccgatagacgtaaattccatatcgattgtcctcattgtggtcgttctcatgaactcgt

SEQ ID NO: 791783 - DNA, 75 bp, synthetic construct
  source 1..75: mol_type = other DNA
tcctcgtgctggggataaagttaaattactgtcatttcagaaaggcatgattgatgctcctttccttgagaagaa

SEQ ID NO: 791784 - DNA, 75 bp, synthetic construct
  source 1..75: mol_type = other DNA
gaaatcatttgagcttacatgtgccactcatggtattgatgctattgagttcaggtcagagcttaaaaaaagctt

SEQ ID NO: 791785 - DNA, 75 bp, synthetic construct
  source 1..75: mol_type = other DNA
ccatcgtgctttttatccgtatggcgctcaatgcactggatggcatgttggcgcgtgagtgcgatcagcaaacac

SEQ ID NO: 791786 - DNA, 75 bp, synthetic construct
  source 1..75: mol_type = other DNA
tatcactgacgacgaatactatgaattcgttgatgaatttatccaggctgtgaaacaacgctggccggacgtgct

SEQ ID NO: 791787 - DNA, 75 bp, synthetic construct
  source 1..75: mol_type = other DNA
cctaatcctatcggaaataactactatatttcagggtatcttaattccatccatggcaaaatcacattgatgaat

SEQ ID NO: 791788 - DNA, 75 bp, synthetic construct
  source 1..75: mol_type = other DNA
ctcgcgtgacaaaggcttgctgaccgcattcgcggaaggaaaagatatccaccgggcaacggcggcagaagtgtt

SEQ ID NO: 791789 - DNA, 75 bp, synthetic construct
  source 1..75: mol_type = other DNA
cgtcggaagaggtactggaagaactggcgctggactatccgttgccaaaagtgattctggagtatcgtggtctgg

SEQ ID NO: 791790 - DNA, 75 bp, synthetic construct
  source 1..75: mol_type = other DNA
aaagaaagcgcatgaaattgcaggtgaagaatttaacctttcttccaccaagcagttacaaaccattctgtttga

SEQ ID NO: 791791 - DNA, 75 bp, synthetic construct
  source 1..75: mol_type = other DNA
accggaagtgaatgcaacgacgatatcctatgacaattatgtcactattctggacgaagacacgctgaaagcgtg

SEQ ID NO: 791792 - DNA, 75 bp, synthetic construct
  source 1..75: mol_type = other DNA
gcgcaggcattgctgcaaggtcttggcggactggatacgctgtatgccgagccagaaaaaattgctgggttgagc

SEQ ID NO: 791793 - DNA, 75 bp, synthetic construct
  source 1..75: mol_type = other DNA
gctggacggacgccgtctgtatctgccggatatcaaatccagcaatggtgctcgtcgtgcagcggctgaacgtgc

SEQ ID NO: 791794 - DNA, 75 bp, synthetic construct
  source 1..75: mol_type = other DNA
atgggaaatggatggcatgaatggccactaatggtctttaccgtattgggccaatgtgttgtgggcgcgctgatt

SEQ ID NO: 791795 - DNA, 75 bp, synthetic construct
  source 1..75: mol_type = other DNA
gccactgcgagcgtttaactcgctgaatcgaatcggagcttctggtctgagtaacgagattgctgccggttccat

SEQ ID NO: 791796 - DNA, 75 bp, synthetic construct
  source 1..75: mol_type = other DNA
ctcaacagaattccatgtcttacgagcatttccggatttaattctgcctgaatttattttttatctcgtctggaa

SEQ ID NO: 791797 - DNA, 75 bp, synthetic construct
  source 1..75: mol_type = other DNA
gcaatgcacttttgttgttgatcaaattgcagtggaacgacgggtaacactggcaaccactgcattttcgttgtt

SEQ ID NO: 791798 - DNA, 75 bp, synthetic construct
  source 1..75: mol_type = other DNA
cgatatggcgattgccggtttccacggtcatgatatcggccaggtgatggagccacggctggcgagcgtgctgac

SEQ ID NO: 791799 - DNA, 75 bp, synthetic construct
  source 1..75: mol_type = other DNA
agccagtcgccgtgtctcgatattgccgtcggttttaataactttgaagcggcacgccagatgaccacagccatc

SEQ ID NO: 791800 - DNA, 75 bp, synthetic construct
  source 1..75: mol_type = other DNA
gcgcagatcggaaagactaccatcctgaacggtatcctgtttaaccagatggctaacgatccatgcaatatgatt

SEQ ID NO: 791801 - DNA, 75 bp, synthetic construct
  source 1..75: mol_type = other DNA
tcggcgctgcatttctatgaaagcaaagggttgattaccagtatccgtaatagcggcaatcagcggcgatataaa

SEQ ID NO: 791802 - DNA, 75 bp, synthetic construct
  source 1..75: mol_type = other DNA
tcatcaaaattgctcagcgtattggcattccgctggcgaccattcgtgaagcgtttggcgtgttgcccgaagggc

SEQ ID NO: 791803 - DNA, 75 bp, synthetic construct
  source 1..75: mol_type = other DNA
cgtgatgtgctgcgatatgttgcaatcatcaagatagctcaacgcattggcattccactggcgactattggcgag

SEQ ID NO: 791804 - DNA, 75 bp, synthetic construct
  source 1..75: mol_type = other DNA
cctgctctggagggaagcggtattgcagtggcgctgcgcacgaagctgaaactgttctatcgtccgaaggcacta

SEQ ID NO: 791805 - DNA, 75 bp, synthetic construct
  source 1..75: mol_type = other DNA
agggcatcagcctgcagagccgcccggatggcaggaccatgctggtgaacaccacgccgtacatttttgcgattg

SEQ ID NO: 791806 - DNA, 75 bp, synthetic construct
  source 1..75: mol_type = other DNA
ttggcaccgcggaacagaaggcgcatctcaatacgttaatggccgaaatggcggcattaaaagagaactttcgcc

SEQ ID NO: 791807 - DNA, 75 bp, synthetic construct
  source 1..75: mol_type = other DNA
catagtatttgcgccaaaataccgaagacaggtgttctacagagagaagcgtagagcaagaggccgtattttgag

SEQ ID NO: 791808 - DNA, 75 bp, synthetic construct
  source 1..75: mol_type = other DNA
catagtatttgcgccaaaataccgaagacaggtgttctacagagagaagcgtagagcaacaggcggtattttgag

SEQ ID NO: 791809 - DNA, 75 bp, synthetic construct
  source 1..75: mol_type = other DNA
gattatgattttgaacaactccagtcactggctgaccgtcggctttatctcgctaaacaggccgggcgtaatcgg

SEQ ID NO: 791810 - DNA, 75 bp, synthetic construct
  source 1..75: mol_type = other DNA
caggcacgcatacaatatttggaatctgacattaacaccctgtaccttgattcatttaaaagtaaaaacaactgc

SEQ ID NO: 791811 - DNA, 75 bp, synthetic construct
  source 1..75: mol_type = other DNA
aattaaccatcgcgattgtgattgtctgtggaatcctttctccgattttagtttcaccacataacaaactgtcca

SEQ ID NO: 791812 - DNA, 75 bp, synthetic construct
  source 1..75: mol_type = other DNA
aaattctcgcggccagcgccgtatcgctgaataacgcagtggatcaggcagtgattcagagtggcgaaaaacctc

SEQ ID NO: 791813 - DNA, 75 bp, synthetic construct
  source 1..75: mol_type = other DNA
gcacagaaactgctgatgttcatgccgggggatgaagtacaggtgaaaggcaatgttgcgaaggtggattcactg

SEQ ID NO: 791814 - DNA, 75 bp, synthetic construct
  source 1..75: mol_type = other DNA
aggctaatgtagttgcaaccgatggtgttaaagccggatcgctaattaaattgcatcccttccaacgtggaatga

SEQ ID NO: 791815 - DNA, 75 bp, synthetic construct
  source 1..75: mol_type = other DNA
atgaaactgatttctaataaggcaaaattaaaaaagattctcagaaatatctctgctgcaattcgcccacctaaa

SEQ ID NO: 791816 - DNA, 75 bp, synthetic construct
  source 1..75: mol_type = other DNA
taaaattgattgcgacggcatcataaagaacattcctgtaaacacatataacaaactaatgtacgtctataataa

SEQ ID NO: 791817 - DNA, 75 bp, synthetic construct
  source 1..75: mol_type = other DNA
ccgaccactaagctgggaccgattaatcaacaatggttatcaagtgatcagcgtaaattctttgttccttgtccg

SEQ ID NO: 791818 - DNA, 75 bp, synthetic construct
  source 1..75: mol_type = other DNA
gtgctgttgctaagggagaatgggtcgccaccgaaccaaatgcggaagtaatcggttttcatgctaaccgcctta

SEQ ID NO: 791819 - DNA, 75 bp, synthetic construct
  source 1..75: mol_type = other DNA
ttaaaggcgatgatcaccgacaaatcagatcgcaatgccgttaacaactcatcgattattcagcttcgtaacgga

SEQ ID NO: 791820 - DNA, 75 bp, synthetic construct
  source 1..75: mol_type = other DNA
cgcccggatggcaggaccatgctggtgaacaccacgccgtacatttttgcgattggcagcctgctggacggaaac

SEQ ID NO: 791821 - DNA, 75 bp, synthetic construct
  source 1..75: mol_type = other DNA
gtgagtaagcgtaacgcaataacgacgtttttcaccaaccgggtgacgaaagcgctggggatgacactggcgctg

SEQ ID NO: 791822 - DNA, 75 bp, synthetic construct
  source 1..75: mol_type = other DNA
ggacgattaatcagaagaaatccacggcagggacgaacgttgatgaaaatgtccaacctcagaaaagtgcagcgt

SEQ ID NO: 791823 - DNA, 75 bp, synthetic construct
  source 1..75: mol_type = other DNA
gcgctgaccatcacggttaccaacaatgacaagacccatacatttggggggcaggcgtgggttgataatattgtt

SEQ ID NO: 791824 - DNA, 75 bp, synthetic construct
  source 1..75: mol_type = other DNA
aatttggaaagcgatccttatggggaatgatgctggttatgttgctgtcatcacaaacggcttttgcatcattgt

SEQ ID NO: 791825 - DNA, 75 bp, synthetic construct
  source 1..75: mol_type = other DNA
gctgttctatcgtccgaaggccctgctggaggggcgcaagggggctgaagaaggcatcagcctgcagagtcgccc

SEQ ID NO: 791826 - DNA, 75 bp, synthetic construct
  source 1..75: mol_type = other DNA
tccaattccgacacaccggaaaccagacgcatttatcggggttaccggatgaactgcatacaggcaccacgaagc

SEQ ID NO: 791827 - DNA, 75 bp, synthetic construct
  source 1..75: mol_type = other DNA
tcctggagcacaacaacaggactgactatctcgctatccgtaacacctttaatgcagagaatcatgcattcctga

SEQ ID NO: 791828 - DNA, 75 bp, synthetic construct
  source 1..75: mol_type = other DNA
gaacgccatccaggcaccacgaagcgttggcgcaagaacccgggaatcagcaccggaggttatcgccaccctgag

SEQ ID NO: 791829 - DNA, 75 bp, synthetic construct
  source 1..75: mol_type = other DNA
cttgcgcagtggtaaacgcgcccgtgttccggccttaaagctgaaatactggcagcagtttatgactgttttcta

SEQ ID NO: 791830 - DNA, 75 bp, synthetic construct
  source 1..75: mol_type = other DNA
cctgcgcagtggtaaacgcgcccgtgttccagccctgaagctgaaatactggcagcagttcatgaccgtggtcta

SEQ ID NO: 791831 - DNA, 75 bp, synthetic construct
  source 1..75: mol_type = other DNA
atgattatcgataaagaatacgcacttgtagatgcaacagcaagacttaacactgacctgagggattatgaacat

SEQ ID NO: 791832 - DNA, 75 bp, synthetic construct
  source 1..75: mol_type = other DNA
gaaaatggcagtgaacaatatgttgaatatttggttgccagaatacgcaccatgctctcagatacaaggatgaga

SEQ ID NO: 791833 - DNA, 75 bp, synthetic construct
  source 1..75: mol_type = other DNA
tactaccaacagatttacagcttagatcaattgtcgagtctggtgataatagacgaatagttattgggcaaagtc

SEQ ID NO: 791834 - DNA, 75 bp, synthetic construct
  source 1..75: mol_type = other DNA
agcttcctgtcctggttaaaatgaaaaatttgacgaaagatcagcaaccccattctgatgaccctgacttctggg

SEQ ID NO: 791835 - DNA, 75 bp, synthetic construct
  source 1..75: mol_type = other DNA
gaacagccagtatgtttttacctacgtcactaaagggcagtgcccctatgcaaagactttcgatactcaggattc

SEQ ID NO: 791836 - DNA, 75 bp, synthetic construct
  source 1..75: mol_type = other DNA
gatttagagatgcatatacagctctagggggagatgaacaagaacttcttccaaaaagcgaagatgcgcctatgc

SEQ ID NO: 791837 - DNA, 75 bp, synthetic construct
  source 1..75: mol_type = other DNA
agaccccaatggcgagtatgtacgtgctttgggaccaactacaaaatttaaaggcagaatttttaaagtcgaagc

SEQ ID NO: 791838 - DNA, 75 bp, synthetic construct
  source 1..75: mol_type = other DNA
aaaagactgcataaagcaaatgtcaaagctatattttgtgagaagacaatatcatacagtctggatgattcgagt

SEQ ID NO: 791839 - DNA, 75 bp, synthetic construct
  source 1..75: mol_type = other DNA
acggtcgtcgcggtcgtgcaatcaccggttctaacaagcgtcctctgaaatctttgaccgacatgatcaaaggta

SEQ ID NO: 791840 - DNA, 75 bp, synthetic construct
  source 1..75: mol_type = other DNA
cggcacagattcgtcagcttgctggtatgcgtggtctgatggcgaagccggatggctccatcatcgaaacgccaa

SEQ ID NO: 791841 - DNA, 75 bp, synthetic construct
  source 1..75: mol_type = other DNA
tgatgtctaccaacaacatcctgtccccggcgaacggcgaaccaatcatcgttccgtctcaggacgttgttctgg

SEQ ID NO: 791842 - DNA, 75 bp, synthetic construct
  source 1..75: mol_type = other DNA
agctggaactgcgtggtcttgctaccaccatcaaagctgcgaagaaaatggttgagcgcgaataagctgtcgttt

SEQ ID NO: 791843 - DNA, 75 bp, synthetic construct
  source 1..75: mol_type = other DNA
ggacctgttcgaagctcgtcgtccgaaagagccagcaatcctggctgaaatcagcggtatcgtttccttcggtaa

SEQ ID NO: 791844 - DNA, 75 bp, synthetic construct
  source 1..75: mol_type = other DNA
atatcgaacgcgtactgtactttgaatcctatgtggttattgaaggcggtatgaccaacctggagcgtcagcaga

SEQ ID NO: 791845 - DNA, 75 bp, synthetic construct
  source 1..75: mol_type = other DNA
gaatgaggctctggctgcgttccccgccggtgcattgccggcattttcttccgttgtttctatgtcagcgcctga

SEQ ID NO: 791846 - DNA, 75 bp, synthetic construct
  source 1..75: mol_type = other DNA
ttattttttaacatcctttaatgcatatctatatcattcagattggattgtatgcttgttagtgcttgtgctgat

SEQ ID NO: 791847 - DNA, 75 bp, synthetic construct
  source 1..75: mol_type = other DNA
gcatcatcagaagatattgcattaaggcgcattgaagttactaaaaatcttagcaatattgctaatacatatatt

SEQ ID NO: 791848 - DNA, 75 bp, synthetic construct
  source 1..75: mol_type = other DNA
taccttgttagttatactgcaactggcatttggtaaaaaagtggcggcaatccgtcgggctgaagaaagtaaata

SEQ ID NO: 791849 - DNA, 75 bp, synthetic construct
  source 1..75: mol_type = other DNA
cctcggttcactggttggacaatatgtgcataaacgcatttcggtcaaagtgttccgtgtgatggtctttttatt

SEQ ID NO: 791850 - DNA, 75 bp, synthetic construct
  source 1..75: mol_type = other DNA
cgatgaaaaaacggtctcagatacgtctcttccgttatctgaggatatgaaatatgcacttgaattatcaggttt

SEQ ID NO: 791851 - DNA, 75 bp, synthetic construct
  source 1..75: mol_type = other DNA
tgccggcgataaaaccgacgaatggctgcaaccggcctgtaatgagatgtaccgcgtgctgaaaaaagacgcgct

SEQ ID NO: 791852 - DNA, 75 bp, synthetic construct
  source 1..75: mol_type = other DNA
atgttatggcccgtatccctgataacgccattgatttcatccacaccgacccgccgtacctcgtcggttttcgtg

SEQ ID NO: 791853 - DNA, 75 bp, synthetic construct
  source 1..75: mol_type = other DNA
gctatcgccacgaatgtgcctacatcctggcaaaaggccgtccacgtctgccacaaaaaccgctgccggacgtgc

SEQ ID NO: 791854 - DNA, 75 bp, synthetic construct
  source 1..75: mol_type = other DNA
tctaccgtcgcggtcgttatgtcgagttcaatctggtctgggatcgcggcacgctgtttggcctgcaaactggcg

SEQ ID NO: 791855 - DNA, 75 bp, synthetic construct
  source 1..75: mol_type = other DNA
atgtcccgttttgtcctcggtaactgcatcgatgttatggcccgtattcctgataacgccattgatttcatcctt

SEQ ID NO: 791856 - DNA, 75 bp, synthetic construct
  source 1..75: mol_type = other DNA
ggacagcaacgactggccgccgtacagcgggccatgcagcagggggccgcaaatgatgactggtttatgccggag

SEQ ID NO: 791857 - DNA, 75 bp, synthetic construct
  source 1..75: mol_type = other DNA
accctcaccgacccgccgtatctcgtcggtttccgtgaccgttccgggcgcaccatcgccggcgataaaaccgat

SEQ ID NO: 791858 - DNA, 75 bp, synthetic construct
  source 1..75: mol_type = other DNA
caggttttattgggtctgcagttgttcgtcatataattaataatacgcaagactctgtcatcaatgttgataaac

SEQ ID NO: 791859 - DNA, 75 bp, synthetic construct
  source 1..75: mol_type = other DNA
ccaccaaacccgctgccggacgtgctgggctggaaatattcgggcaatcgtcatcacccgacggaaaagcccgtt

SEQ ID NO: 791860 - DNA, 75 bp, synthetic construct
  source 1..75: mol_type = other DNA
ggacagcaacgactgaccgccgtgcagcgggccatgcagcagggggccgcaaatgatgactggtttatgccggag

SEQ ID NO: 791861 - DNA, 75 bp, synthetic construct
  source 1..75: mol_type = other DNA
tggtgagcttctacggctggaaccgcgtcgatcgctttatggccgcctggaaaaatgcgggattcggcgttgttg

SEQ ID NO: 791862 - DNA, 75 bp, synthetic construct
  source 1..75: mol_type = other DNA
gcaaccggcctgtaatgaaatgtaccgcgtactcaaaaaagacgcgctgatggtgagcttctacggctggaaccg

SEQ ID NO: 791863 - DNA, 75 bp, synthetic construct
  source 1..75: mol_type = other DNA
tccacctgcgttgccgcgttacaggcggggcgcagatatatcggtatcgagctgatggagcagtaccacaaagcc

SEQ ID NO: 791864 - DNA, 75 bp, synthetic construct
  source 1..75: mol_type = other DNA
aagatagctggcagcgcgaagctggcggcggcgggcgtagccgggtgttgcgtaatggtggtgttttcgaacagg

SEQ ID NO: 791865 - DNA, 75 bp, synthetic construct
  source 1..75: mol_type = other DNA
ccttgcaaaaggccgtccacgtctgccacaaaacccgctgacggacgtgctgggctggaaatacagcggcaaccg

SEQ ID NO: 791866 - DNA, 75 bp, synthetic construct
  source 1..75: mol_type = other DNA
accgttccgggcgcaccatcgccggcgataaaaccgatgaatggctgcaaccggcctgtaatgaaatgtaccgcg

SEQ ID NO: 791867 - DNA, 75 bp, synthetic construct
  source 1..75: mol_type = other DNA
aatgagatgtaccgcgtactcaaaaaagacgcgttaatggtgagcttctatggctggaatcgcgtcgatcgcttt

SEQ ID NO: 791868 - DNA, 75 bp, synthetic construct
  source 1..75: mol_type = other DNA
acagacccgccatatctggtcggcttccgtgaccgttccggccgcagtattgccggtgacaagaccgacgaatgg

SEQ ID NO: 791869 - DNA, 75 bp, synthetic construct
  source 1..75: mol_type = other DNA
gctatcgccacgaatgcgcctacatcctggcaaaaggccggccacgtctgccacaaaacccgctgccggacgtgc

SEQ ID NO: 791870 - DNA, 75 bp, synthetic construct
  source 1..75: mol_type = other DNA
ctgcaaccggcctgtaatgaaatgtaccgcgtgctgaaaaaagacgcgttaatggtgagcttctacggctggaac

SEQ ID NO: 791871 - DNA, 75 bp, synthetic construct
  source 1..75: mol_type = other DNA
agggcacctcgtgttcatcgataggaatttaaatcccaaaaagattaaaaaaacacccaaaaacggatgtttatt

SEQ ID NO: 791872 - DNA, 75 bp, synthetic construct
  source 1..75: mol_type = other DNA
accgcgtactcaaaaaagacgcgctgatggtcagcttctacggctggcaccgtattgaccgctttatggcggtct

SEQ ID NO: 791873 - DNA, 75 bp, synthetic construct
  source 1..75: mol_type = other DNA
atcgcgtactcaaaaaagatgcgctgatggtcagcttctacggctggaaccgcgtcgatcgctttatggccgcct

SEQ ID NO: 791874 - DNA, 75 bp, synthetic construct
  source 1..75: mol_type = other DNA
tgataacgccattgatttcatcctcaccgacccgccgtacctcgtcggttttcgtgaccgtcaggggcgtaccat

SEQ ID NO: 791875 - DNA, 75 bp, synthetic construct
  source 1..75: mol_type = other DNA
tcaacctgcgtggcgccctccagtccggacgtcgttacattggtgttgagttgctcgggcagtaccaccgtgccg

SEQ ID NO: 791876 - DNA, 75 bp, synthetic construct
  source 1..75: mol_type = other DNA
ctgcaacctgcctgcaatgagatgtaccgcgtgctgaaaaaagacgcgctgatggtcagtttttatggctggaac

SEQ ID NO: 791877 - DNA, 75 bp, synthetic construct
  source 1..75: mol_type = other DNA
gcaggccaatgctgaattcatcgccgcagccaatccggctaccgtgctggcactgctgaatgaacgggaaagaaa

SEQ ID NO: 791878 - DNA, 75 bp, synthetic construct
  source 1..75: mol_type = other DNA
caaacaggatgaagaagtcgatgcctttaccaaccagccaaaagtaatggtgatgaaatacgatggactgatcta

SEQ ID NO: 791879 - DNA, 75 bp, synthetic construct
  source 1..75: mol_type = other DNA
atctctggtcgagtacgttgacgatatgcgcgagaagctggaagccgcagagaagcgcattgctgagctggagtt

SEQ ID NO: 791880 - DNA, 75 bp, synthetic construct
  source 1..75: mol_type = other DNA
aatcttaccgccgaacgcgatgctcttcgtgaaggtgagatgggcgacgctaggcatagcaacacacgggccgca

SEQ ID NO: 791881 - DNA, 75 bp, synthetic construct
  source 1..75: mol_type = other DNA
atgagcaatattgactatcagtcactgcgtgaaaaggcagagaaagcaacgtgtggtgtgtggtcgctcgaatat

SEQ ID NO: 791882 - DNA, 75 bp, synthetic construct
  source 1..75: mol_type = other DNA
ctactgtcagccggaatgaagtgttctgggactggctcagccgggaagctgatttaagtgactgccgctggctga

SEQ ID NO: 791883 - DNA, 75 bp, synthetic construct
  source 1..75: mol_type = other DNA
gccattgaagctgcacaaaaatcaacgccgacgctcctttcattaatggatgaaggggtaatgactccaacttat

SEQ ID NO: 791884 - DNA, 75 bp, synthetic construct
  source 1..75: mol_type = other DNA
aatttcaagtttcagcagaaacagatcgggacttacagacctatttttttaagctaccggcgataaaggatatta

SEQ ID NO: 791885 - DNA, 75 bp, synthetic construct
  source 1..75: mol_type = other DNA
tccattttcttccacccaagttgcggaagaaccactattgcaccgttcgtgacagaaaaagaaagttaccgctgg

SEQ ID NO: 791886 - DNA, 75 bp, synthetic construct
  source 1..75: mol_type = other DNA
ttcacgatgattaccaaacggtaatggcatacaaagtttctgaagtcatcgatgcaatccgcgctactggcattc

SEQ ID NO: 791887 - DNA, 75 bp, synthetic construct
  source 1..75: mol_type = other DNA
tattacactgcagcagtaggtaaatggcacttgtcaaaaatcagtaatgtgccggtaccggaagataaacaaacg

SEQ ID NO: 791888 - DNA, 75 bp, synthetic construct
  source 1..75: mol_type = other DNA
tattccaataccgatgctcaggatggtattccgctaacagaaactttcttgcctgaattattccagaatcatggt

SEQ ID NO: 791889 - DNA, 75 bp, synthetic construct
  source 1..75: mol_type = other DNA
cggtagggaagctgcgcgttgagctggaagccgcagagaagcgcattgcagaactggaagcacgggaaatatcgc

SEQ ID NO: 791890 - DNA, 75 bp, synthetic construct
  source 1..75: mol_type = other DNA
aagaccgccttgtcaatctaatggcgcttacaatgcgaactggaattatcagttgcagggtaaagagtcttttgc

SEQ ID NO: 791891 - DNA, 75 bp, synthetic construct
  source 1..75: mol_type = other DNA
tccaactgctgtaatgtattgttgcgatgaagcatatagaaattgggtcgataacggcgctgatatggataatcg

SEQ ID NO: 791892 - DNA, 75 bp, synthetic construct
  source 1..75: mol_type = other DNA
tatggccatcgccgctgccccactggcaggcacccggttgtgtacattgctaccacggtttttatggtcgtacgg

SEQ ID NO: 791893 - DNA, 75 bp, synthetic construct
  source 1..75: mol_type = other DNA
gcaagccatctggcgttaagtgcttccgaaacggcacaacgtggcggtaatgtggtcgatagcgtggtacaaact

SEQ ID NO: 791894 - DNA, 75 bp, synthetic construct
  source 1..75: mol_type = other DNA
cttcacgtgccgcaatcctgacggcgcgagctcctgctcgcttcggtgtatattcaaattctgatgcacaggatg

SEQ ID NO: 791895 - DNA, 75 bp, synthetic construct
  source 1..75: mol_type = other DNA
attatcgggtatggtttactgatggctgtcaccggtgcgctgattgatgaatcgcttgtggaaaaagcgaataag

SEQ ID NO: 791896 - DNA, 75 bp, synthetic construct
  source 1..75: mol_type = other DNA
tgcgtgccaaggcagaaaaagcaacgtgtggtgagtggtcgctcgaatatggagaggagagatttgatgctggtg

SEQ ID NO: 791897 - DNA, 75 bp, synthetic construct
  source 1..75: mol_type = other DNA
tcgcggatggaagtaagcgcatagcagaactggaaagcaacgaagtccgtgaagtcggaaatcagtttcttgttg

SEQ ID NO: 791898 - DNA, 75 bp, synthetic construct
  source 1..75: mol_type = other DNA
gcaggccaatgctgaattcatcgccgcagccaatccggctaccgtgctggcactactggatgaacgggaaagaaa

SEQ ID NO: 791899 - DNA, 75 bp, synthetic construct
  source 1..75: mol_type = other DNA
aatgggggtcgcccgctggatgctatcatcggcgcttacgctggtaatagcccagcgtctggtacgcaaactttg

SEQ ID NO: 791900 - DNA, 75 bp, synthetic construct
  source 1..75: mol_type = other DNA
acgcagtatccttgcattcccggtcatgaaatcggcggcaagatcctgcaaacaggcagccaggttaaacatatt

SEQ ID NO: 791901 - DNA, 75 bp, synthetic construct
  source 1..75: mol_type = other DNA
ggaactggcgcaactaaatgatgagcgtggcccggacgtggtcattgaggcggtgggaaaccagcaaaccattga

SEQ ID NO: 791902 - DNA, 75 bp, synthetic construct
  source 1..75: mol_type = other DNA
cgatgaaaaacgatcatggatccacgccgcgtttttctcagcgtcagttactgtctctctgttctgatattgaca

SEQ ID NO: 791903 - DNA, 75 bp, synthetic construct
  source 1..75: mol_type = other DNA
attatggagcataaatcagggattgcccgttcagtatggacggcccgatttaatggttgtcagataatttggaga

SEQ ID NO: 791904 - DNA, 75 bp, synthetic construct
  source 1..75: mol_type = other DNA
agaagcgcgggatattgtgtgggaacagacactggatctgcatctcaatacagaaactccacaagaatcagagcg

SEQ ID NO: 791905 - DNA, 75 bp, synthetic construct
  source 1..75: mol_type = other DNA
gctggtcgtgcatccgcataacccgtatgttcccaccagccacgcgaatgtgcgcttttttattgccgaaaaacc

SEQ ID NO: 791906 - DNA, 75 bp, synthetic construct
  source 1..75: mol_type = other DNA
ataatggaggagaatctgcaggtactattgcaggggatggttctctgaacataaatgggggaatgcttgatataa

SEQ ID NO: 791907 - DNA, 75 bp, synthetic construct
  source 1..75: mol_type = other DNA
ccatgctgagatggaataatacaaaagggatgggatatggaacctttaatatagaaaaagatgccactctgaaca

SEQ ID NO: 791908 - DNA, 75 bp, synthetic construct
  source 1..75: mol_type = other DNA
cgactgaagtaaagacctggttacaggcgcgcggcagctacgttaatgaatcatatctcggtgttgcacgcccga

SEQ ID NO: 791909 - DNA, 75 bp, synthetic construct
  source 1..75: mol_type = other DNA
ttacgagtgcctgtgcggtaagtacaagcgtctgaaacaccgtggcgtcatctgtgagaagtgcggcgttgaagt

SEQ ID NO: 791910 - DNA, 75 bp, synthetic construct
  source 1..75: mol_type = other DNA
aaccatcaactaccgtacgttcaaaccagaacgtgacggccttttctgcgctcgtatctttgggccggtaaaaga

SEQ ID NO: 791911 - DNA, 75 bp, synthetic construct
  source 1..75: mol_type = other DNA
gttatcaccccggtagacggtagcgatccgtacgaagagatgattccaaaatggcgtcagctcaacgtgttcgaa

SEQ ID NO: 791912 - DNA, 75 bp, synthetic construct
  source 1..75: mol_type = other DNA
cggaaatataagtattgatgaagacgcatctatgaacctgtctgcaggaaatgctaatgttcacgcaaatactat

SEQ ID NO: 791913 - DNA, 75 bp, synthetic construct
  source 1..75: mol_type = other DNA
ggatacgatttgtcagcagctgagcgccgtcgatggcgcagaatttgtcgaagatagctggcagcgcgaagctgg

SEQ ID NO: 791914 - DNA, 75 bp, synthetic construct
  source 1..75: mol_type = other DNA
agaaaccaaaggtaaacgtcgtctggttatcactccggtagacggcagcgaaccttacgaagagatgattccgaa

SEQ ID NO: 791915 - DNA, 75 bp, synthetic construct
  source 1..75: mol_type = other DNA
actccatttttaacggaaatataagtattgatgaagacgcatctatgaacctgtctgtaggaaatgctaatgttc

SEQ ID NO: 791916 - DNA, 75 bp, synthetic construct
  source 1..75: mol_type = other DNA
tgcatgtcgtcttggcaatatgaataaggcccgctcagatgcctatgcggaacaaatcaaggcggggcttagttg

SEQ ID NO: 791917 - DNA, 75 bp, synthetic construct
  source 1..75: mol_type = other DNA
ccggatgctcatcagttacagcgaagtcagcataaaaaatcccgacaacagcgaccaggcgctctcgctcacgta

SEQ ID NO: 791918 - DNA, 75 bp, synthetic construct
  source 1..75: mol_type = other DNA
gcggtaaaccgctgaaatccacaccgcagacggtgacaaacggcgagccgttctggccggaccttgatctggctg

SEQ ID NO: 791919 - DNA, 75 bp, synthetic construct
  source 1..75: mol_type = other DNA
ggaagaacaggaagtagcggcacaacaacaggcacttcagcaacaacaggcagaactccagatgcgcgagatggc

SEQ ID NO: 791920 - DNA, 75 bp, synthetic construct
  source 1..75: mol_type = other DNA
acgaggatgccacccagttgtcagacaacgacctgatggagcagctcgaacgtccggatggcattattaaactga

SEQ ID NO: 791921 - DNA, 75 bp, synthetic construct
  source 1..75: mol_type = other DNA
aacaaatcaaggcggggctcagctgggtggaggtcagacggaacagcgatccgttcgggcctgagtttaaggtgt

SEQ ID NO: 791922 - DNA, 75 bp, synthetic construct
  source 1..75: mol_type = other DNA
aaagccatgataataatttgcgtcctgaggcaggtagctatgttgccagtattgctgctgcaaataatctgtttg

SEQ ID NO: 791923 - DNA, 75 bp, synthetic construct
  source 1..75: mol_type = other DNA
tactttatcgactgtggtatcgaccctgaaactatgaccggcgaagcgacgcaggaacgccttaagttcgctcga

SEQ ID NO: 791924 - DNA, 75 bp, synthetic construct
  source 1..75: mol_type = other DNA
tcggtggtgcaggtgtctacggtgaaaactttacgctaaataataatggtagtgtttggggaggagatggatata

SEQ ID NO: 791925 - DNA, 75 bp, synthetic construct
  source 1..75: mol_type = other DNA
aaagggtttacggtatctctggaagcaggatattcatggaaggctggagagtttaccgacaattacaagggaagt

SEQ ID NO: 791926 - DNA, 75 bp, synthetic construct
  source 1..75: mol_type = other DNA
acgctggggcgtgggcagggaagcaacagtggtaactggtatctgaccagcggtaaaaatacgccggaaccaaca

SEQ ID NO: 791927 - DNA, 75 bp, synthetic construct
  source 1..75: mol_type = other DNA
tgttggcggcaactacaccggtaataacggcacgctgctcatgaacaccgttctgggagatgacagctccgcaac

SEQ ID NO: 791928 - DNA, 75 bp, synthetic construct
  source 1..75: mol_type = other DNA
ccagcctttggtggggctgcactggtgaaagcccgttaccagggcgaagcctggacccgcgccacagagcaggaa

SEQ ID NO: 791929 - DNA, 75 bp, synthetic construct
  source 1..75: mol_type = other DNA
atgaaaaaatttgcgctgccagttctggctggaatgctattggtttctgcatcggcaaatgcgataagcattagc

SEQ ID NO: 791930 - DNA, 75 bp, synthetic construct
  source 1..75: mol_type = other DNA
aactggacacataacgatgacgacggtgacgtcgcgggcgttggtctgggattgaatctgccgctgggtccgcta

SEQ ID NO: 791931 - DNA, 75 bp, synthetic construct
  source 1..75: mol_type = other DNA
gtggggctggggttgaatctgcctctcgggccgttaatggcgaccgttggcggaaaaggcgtttacaccaacccg

SEQ ID NO: 791932 - DNA, 75 bp, synthetic construct
  source 1..75: mol_type = other DNA
ccagattactcatgagctggcggatctgccgccggagttgtgggcgtaccttaaagagcatcgtttcttcgcgat

SEQ ID NO: 791933 - DNA, 75 bp, synthetic construct
  source 1..75: mol_type = other DNA
ctctccagcggtattcaaagttatgaggaagcgaatgctggcgcgcgttacaccattatgcgtccagtcagtatt

SEQ ID NO: 791934 - DNA, 75 bp, synthetic construct
  source 1..75: mol_type = other DNA
ggtcaggcgggaaaagaatataccaatattggcgtcggtttcggtactgaatcgaccggtctggcattaagcggt

SEQ ID NO: 791935 - DNA, 75 bp, synthetic construct
  source 1..75: mol_type = other DNA
ttgccagtggatatttctatgctgtttagaaatgtcagcgaggcgcgcgcagtacaactgacagaaaaaaatatt

SEQ ID NO: 791936 - DNA, 75 bp, synthetic construct
  source 1..75: mol_type = other DNA
gtcattaagcgtagcgagcggcgaattttatgggccagcgccattttgctggggattgcactggtgattggcgca

SEQ ID NO: 791937 - DNA, 75 bp, synthetic construct
  source 1..75: mol_type = other DNA
tatgttgccgcgccgattatggacggctcgcggcttattggcgttttgagcgtaggcaaaccgaacgcggcgatg

SEQ ID NO: 791938 - DNA, 75 bp, synthetic construct
  source 1..75: mol_type = other DNA
tgggctattttttactggtggcggtagcggcctggttcgtgctggcaatttttgtcaaagaagttaaaccgggcg

SEQ ID NO: 791939 - DNA, 75 bp, synthetic construct
  source 1..75: mol_type = other DNA
gttctgactgctgttgatgtggcggcattatttcgccgcgtcagcgaagcgcgcaccgtgcagttggcagaaaaa

SEQ ID NO: 791940 - DNA, 75 bp, synthetic construct
  source 1..75: mol_type = other DNA
atgcgcatcggcatgcgactgttgctgggctattttttactggtagcagtggctgcctggttcgtgctggctatt

SEQ ID NO: 791941 - DNA, 75 bp, synthetic construct
  source 1..75: mol_type = other DNA
aacaaacgctacattacgctcgcaccgattgcgaccgtgcttggtctggcgtttaaactctccgacccggaaaaa

SEQ ID NO: 791942 - DNA, 75 bp, synthetic construct
  source 1..75: mol_type = other DNA
agcccggcatttcgtcagataacggaactggtgaaatcccaatcgcgcgacggcgatccggactttgcggcttat

SEQ ID NO: 791943 - DNA, 75 bp, synthetic construct
  source 1..75: mol_type = other DNA
ttctcactgtttaccctgacagtcgatacccatcacccggatggttttatctcgcgcacctgtaaccgcaaaaaa

SEQ ID NO: 791944 - DNA, 75 bp, synthetic construct
  source 1..75: mol_type = other DNA
tacattctgccgggtatcggcattgtgctggggctgacggcggtgttcggtgcgctgggctggatcctgcgccgt

SEQ ID NO: 791945 - DNA, 75 bp, synthetic construct
  source 1..75: mol_type = other DNA
aaaaacatgatcgcattctcaggaagccacttccgcctgccactgctgttacgcgtgtcagataaacgcgtggag

SEQ ID NO: 791946 - DNA, 75 bp, synthetic construct
  source 1..75: mol_type = other DNA
atacccatcacccggatggttttatctctcgtacctgtaaccgcaaaaaatatgattttgacggtaaaccgaacc

SEQ ID NO: 791947 - DNA, 75 bp, synthetic construct
  source 1..75: mol_type = other DNA
atcaacaaaatcaaagcctctccgtggtttaaagataccgttatagtggtctcttccgaccatctggcgatgaac

SEQ ID NO: 791948 - DNA, 75 bp, synthetic construct
  source 1..75: mol_type = other DNA
ttgtcagaactactctctttcgccctttttctcgcctctgtgctgatttacgcatggaaagcgggacgtaacacc

SEQ ID NO: 791949 - DNA, 75 bp, synthetic construct
  source 1..75: mol_type = other DNA
agtggaaagcgtcctctgagataatggactcagaagagggggcgttgaaagttgcaattctcatttttcgaatag

SEQ ID NO: 791950 - DNA, 75 bp, synthetic construct
  source 1..75: mol_type = other DNA
tgaactctatatgaaaaacctgcgcctcgagcgcgaactggcagaactccgggcacagtccggccagttttcagc

SEQ ID NO: 791951 - DNA, 75 bp, synthetic construct
  source 1..75: mol_type = other DNA
tcgtgcagggcgcaaatctgcgttttgccggtaaagatgtgttcctgaaatcgcacggcttcgaccacttatacg

SEQ ID NO: 791952 - DNA, 75 bp, synthetic construct
  source 1..75: mol_type = other DNA
cgatggataacggcgcgacggtgctggacattctcggtggcgataactatctcggacttggtcgtagcagtttat

SEQ ID NO: 791953 - DNA, 75 bp, synthetic construct
  source 1..75: mol_type = other DNA
tttttctcgcctctgtgctgatttacgcatggaaagcgggacgtaacacctggtggtttgcagccacattaacgg

SEQ ID NO: 791954 - DNA, 75 bp, synthetic construct
  source 1..75: mol_type = other DNA
ataccatgtctatatgactgatgcgcaggggaaggtattgttcgattcggcaaataaagccgtcgggcaagacta

SEQ ID NO: 791955 - DNA, 75 bp, synthetic construct
  source 1..75: mol_type = other DNA
ccttcgcgctgattggctatgcgtttgtttccgcactgctgccggtgtggctgatcctcgcaccacgcgactatc

SEQ ID NO: 791956 - DNA, 75 bp, synthetic construct
  source 1..75: mol_type = other DNA
catcgctctgctttgattggtttctgttttctcgtaattccagataagacgtatttttttgcgtgtaaacatgct

SEQ ID NO: 791957 - DNA, 75 bp, synthetic construct
  source 1..75: mol_type = other DNA
catcaaagaaatgcgcctcaataaaataagcagtatcgaagaagccaatgcttggctggaaacgtttatcgtaaa

SEQ ID NO: 791958 - DNA, 75 bp, synthetic construct
  source 1..75: mol_type = other DNA
ttgcctctgcagtacggccttgtaaagaaaatagattatctttctgacagtgggcataaggttgaagcctcttta

SEQ ID NO: 791959 - DNA, 75 bp, synthetic construct
  source 1..75: mol_type = other DNA
ggattgtatcggccacattgcttcatgggcgaattgagttgtcgctggaggatgcggcaaatgaattaccaactg

SEQ ID NO: 791960 - DNA, 75 bp, synthetic construct
  source 1..75: mol_type = other DNA
ttcctgaaaaaaaccgactctctggttgctggtatcatcggtactgcgggcttgtactgcacccattttgttgga

SEQ ID NO: 791961 - DNA, 75 bp, synthetic construct
  source 1..75: mol_type = other DNA
tcttcatccacttattatctgacacatatagtgctgagaaacaactaaccagggcactatctaaacttagtcgct

SEQ ID NO: 791962 - DNA, 75 bp, synthetic construct
  source 1..75: mol_type = other DNA
tgataaaaatgaagtacgtgatgcagcattgattgctgcagcacaaaaagtagagcactatgaaattgccagtta

SEQ ID NO: 791963 - DNA, 75 bp, synthetic construct
  source 1..75: mol_type = other DNA
cgttatgaaaaactcgcacaatcagcggcaatatcgcaacaaattattgataacgccaggtttgactaccagcag

SEQ ID NO: 791964 - DNA, 75 bp, synthetic construct
  source 1..75: mol_type = other DNA
tcgcgactgtctcggcgaactggttcagatcgatggctctcaccatgactggttcgaaggcagagccccaaaatg

SEQ ID NO: 791965 - DNA, 75 bp, synthetic construct
  source 1..75: mol_type = other DNA
gtggctatacgggttatgacttacttcacaaagagcaaaaattccaaggcgcgtcatcaatactaataaaccatg

SEQ ID NO: 791966 - DNA, 75 bp, synthetic construct
  source 1..75: mol_type = other DNA
gtttcaaaatgcaatgaaagaaaaaaaattagattcagtaaatttgctaataagtaaaataaggaagcttgactg

SEQ ID NO: 791967 - DNA, 75 bp, synthetic construct
  source 1..75: mol_type = other DNA
cgatggctatgcctgcacctcactgctaatttacaatcatcaggatgtcaaacaggcagaacatctgtcctcaca

SEQ ID NO: 791968 - DNA, 75 bp, synthetic construct
  source 1..75: mol_type = other DNA
gcgactggaggcgctggggatcagcgaacgtttgcagcaggaatgcaatgctgttgtgtgggatccggcgaaagg

SEQ ID NO: 791969 - DNA, 75 bp, synthetic construct
  source 1..75: mol_type = other DNA
gggcgtttacagcaggaatgcaatgccgtcgtgtgggatccggcgaaaggtgccgagaatatcgctctggcggag

SEQ ID NO: 791970 - DNA, 75 bp, synthetic construct
  source 1..75: mol_type = other DNA
gtagcgcaactcgcagaaaaattgcatcagaaagcgcaggccggtgaacgaatgccgtcctgcattaacatcatt

SEQ ID NO: 791971 - DNA, 75 bp, synthetic construct
  source 1..75: mol_type = other DNA
ggcggtggcggcctggttcgtactggctatttttgtcaaagaagttaaaccgggcgtgcgaagagcaacggaggg

SEQ ID NO: 791972 - DNA, 75 bp, synthetic construct
  source 1..75: mol_type = other DNA
atgcgtatcggcatgcggttgctgctgggctattttttactggtggcggtggcggcctggttcgtactggctatt

SEQ ID NO: 791973 - DNA, 75 bp, synthetic construct
  source 1..75: mol_type = other DNA
gtgctgggcacgttgattattccgtttaccttcacgctgttatggctctcggtattcggcaatagcgcgctgtat

SEQ ID NO: 791974 - DNA, 75 bp, synthetic construct
  source 1..75: mol_type = other DNA
cgtgagcgggatcctggcgattaccgtcggcgtgccgaactcattaggcccgggcgagctgctgcaacattacgg

SEQ ID NO: 791975 - DNA, 75 bp, synthetic construct
  source 1..75: mol_type = other DNA
ctggccattatcctcgtgccatttaactttgcgccaatgcgtaagtcgatgatttcagcgccggtatttcgcggt

SEQ ID NO: 791976 - DNA, 75 bp, synthetic construct
  source 1..75: mol_type = other DNA
cgcgcggtgagcgcctgatcttgttgagtgacgaattgcctgcacgtgatgagccagcgccggataacgatgtaa

SEQ ID NO: 791977 - DNA, 75 bp, synthetic construct
  source 1..75: mol_type = other DNA
gccgcgcctgaccgctgaagagcaagcgtttctcgatggcccggtagaagaagcctgccggatggcgaatgattt

SEQ ID NO: 791978 - DNA, 75 bp, synthetic construct
  source 1..75: mol_type = other DNA
tacattatcggcggccccaaaatggccggacaaggctggcggatgctggtggagtgtctctcggtaggtcgtggc

SEQ ID NO: 791979 - DNA, 75 bp, synthetic construct
  source 1..75: mol_type = other DNA
gttcgcagcttctggcttggtttgacgcgcggtttaaccagcagcacgccaaccggcgatgcgactaaacgttat

SEQ ID NO: 791980 - DNA, 75 bp, synthetic construct
  source 1..75: mol_type = other DNA
aaatactctgcatgaatgggacgaaggtgaattccagcttgagccaccgctggataccgaagaaggacgcgcagc

SEQ ID NO: 791981 - DNA, 75 bp, synthetic construct
  source 1..75: mol_type = other DNA
agatccgccaggagtggcaggaagagaatacattacatgaatgggacgagggggaatttcagcttgagccaccgc

SEQ ID NO: 791982 - DNA, 75 bp, synthetic construct
  source 1..75: mol_type = other DNA
tctatccaaaaattagttctggtcagaagatagatagcgacataaaaatattgggaacattaaatgctgggataa

SEQ ID NO: 791983 - DNA, 75 bp, synthetic construct
  source 1..75: mol_type = other DNA
ttgcaagggccaataccgaaacgtcaaattacaatgtcgatcagctcattattaaccgccacgatgaagattatc

SEQ ID NO: 791984 - DNA, 75 bp, synthetic construct
  source 1..75: mol_type = other DNA
cgtcgatttgggtggaactacccttgatgtttcaatggtcgccgggcaaatgacggcagtttcccgtgtttttgg

SEQ ID NO: 791985 - DNA, 75 bp, synthetic construct
  source 1..75: mol_type = other DNA
tctcgccagatgttctgccgacgaataacgtggaatggcaatacagcccgcttaacgtcctggctgttcaccatg

SEQ ID NO: 791986 - DNA, 75 bp, synthetic construct
  source 1..75: mol_type = other DNA
cccgatattgcccccgatggcagtaacccgcaacgcgccagctatcatgatgtattcctgacacccgtgttgaac

SEQ ID NO: 791987 - DNA, 75 bp, synthetic construct
  source 1..75: mol_type = other DNA
gtataagtatccgccagataaaactcctggggcggtagagttaattttaaaacaagcggaagttatttcgaatca

SEQ ID NO: 791988 - DNA, 75 bp, synthetic construct
  source 1..75: mol_type = other DNA
gcctgcctgcaaaaaatcaacccgcatctgcctgctgacgtcttcgaacaggtcatctcccgtattactcgcgct

SEQ ID NO: 791989 - DNA, 75 bp, synthetic construct
  source 1..75: mol_type = other DNA
atgttcaacattacaaagagaaagaaaaaagggttttcattattagagttgttattagtgtttgggattatcgca

SEQ ID NO: 791990 - DNA, 75 bp, synthetic construct
  source 1..75: mol_type = other DNA
ggcagattattgatgacctgtgcaggcaaattactaccagagtgatacaggctaacgactggcacgacagcacgc

SEQ ID NO: 791991 - DNA, 75 bp, synthetic construct
  source 1..75: mol_type = other DNA
gcactgattgccgctgcacagaaagtcgagcactatgagatcgccagttacgggaccttagcgacgctggctgaa

SEQ ID NO: 791992 - DNA, 75 bp, synthetic construct
  source 1..75: mol_type = other DNA
tcaagaagtggaaatagttgtcacgttgccactggcagagttttatgacgacgacgcacaatacaacatgaaaaa

SEQ ID NO: 791993 - DNA, 75 bp, synthetic construct
  source 1..75: mol_type = other DNA
accatcggcgagccgaaatcactcacaatactttatgggataaagtcccggcctccgcatggagaaatgtaaaat

SEQ ID NO: 791994 - DNA, 75 bp, synthetic construct
  source 1..75: mol_type = other DNA
gacctcatttctggataaaaacaacaaaaatagttatcttatttcatacgctactattatctatgcaaatagtag

SEQ ID NO: 791995 - DNA, 75 bp, synthetic construct
  source 1..75: mol_type = other DNA
cttctgcccctgccgcaccactgatgccggtttctgatgccgttcaggagcgctttatccgcctgcctgaagtga

SEQ ID NO: 791996 - DNA, 75 bp, synthetic construct
  source 1..75: mol_type = other DNA
tttctctattcttgttaagcatttgcaagacggtatacagcgtagagaaaacaatgaagaacgtatctgtattac

SEQ ID NO: 791997 - DNA, 75 bp, synthetic construct
  source 1..75: mol_type = other DNA
atcaggcatccagatcgcatcacagtacggctaaatcagctaaaagtgccttatcatcagattcaggtgatggta

SEQ ID NO: 791998 - DNA, 75 bp, synthetic construct
  source 1..75: mol_type = other DNA
ccggcccctctgctgcatatgaatattttgcccgcagtgccagcggtcttgttgccgatgcacgggcaaccagtc

SEQ ID NO: 791999 - DNA, 75 bp, synthetic construct
  source 1..75: mol_type = other DNA
cctggatcagcaatttgctgacctgaaagcagatgatgaaatcagcgagcagctggcgcaacttaaagccaaaat

SEQ ID NO: 792000 - DNA, 75 bp, synthetic construct
  source 1..75: mol_type = other DNA
acatcgtgaatgccaacatcaacgctctgttagagaaagcggaagatccacagaaactggttcgtctgatgatcc

SEQ ID NO: 792001 - DNA, 75 bp, synthetic construct
  source 1..75: mol_type = other DNA
ttagattttctctaaaatcgaagcattcaacttcaactaatggtgcgcaaatgagcgaaggactggtcacttttt

SEQ ID NO: 792002 - DNA, 75 bp, synthetic construct
  source 1..75: mol_type = other DNA
atccgttcggcacaaccgttaccgcagagacgttacgcgatactttcgcgccgttgacgcaatgggaagataaat

SEQ ID NO: 792003 - DNA, 75 bp, synthetic construct
  source 1..75: mol_type = other DNA
tcgctttttgcttcttattggtgggattctttttcttcatcttggcctttatctcttaaaggtgttcgtgaacgc

SEQ ID NO: 792004 - DNA, 75 bp, synthetic construct
  source 1..75: mol_type = other DNA
atgcttcattatattgtcctaatccttcttttaggcgtgtttacctgcttcgcaggaataaggcttggtttaggg

SEQ ID NO: 792005 - DNA, 75 bp, synthetic construct
  source 1..75: mol_type = other DNA
atgcttaccgaagacgacttagaacagctttgcctgggctggtttgccgaacaaggttgggaaattcatcacggg

SEQ ID NO: 792006 - DNA, 75 bp, synthetic construct
  source 1..75: mol_type = other DNA
gcttcaacagtgaagagtaccctgatgaagaagcggatatcgagagcgtagagattattggtcgcatgttctgga

SEQ ID NO: 792007 - DNA, 75 bp, synthetic construct
  source 1..75: mol_type = other DNA
aatcgcgattatgacgatgaagaggctgatgaggcagatgtcgagataatcggttttgtgttctggtactcggta

SEQ ID NO: 792008 - DNA, 75 bp, synthetic construct
  source 1..75: mol_type = other DNA
aagcgttctcaaagagactactacaggcattattagatgcaggtgtgggcggacgcggtcaggctaagcggattc

SEQ ID NO: 792009 - DNA, 75 bp, synthetic construct
  source 1..75: mol_type = other DNA
gtactggcgttgttgtggaccggtggtcatccgtcgaaagaagcgcagtctctgctggagcagattcgccatatt

SEQ ID NO: 792010 - DNA, 75 bp, synthetic construct
  source 1..75: mol_type = other DNA
ctgcgcgccatcgcgcccgtactgaacggtattcccaaccgaattagcctctcgggtcataccgatgattttccc

SEQ ID NO: 792011 - DNA, 75 bp, synthetic construct
  source 1..75: mol_type = other DNA
agtccaaaagagctgattcagattgcggagtacttccggactccgctggcgacagcggttacgggcggcgatcgc

SEQ ID NO: 792012 - DNA, 75 bp, synthetic construct
  source 1..75: mol_type = other DNA
gtagcgttttcaagtcttgaaacacgtcttcctatgagcaaatcgcgtattttgctcaatccacgcgatattgac

SEQ ID NO: 792013 - DNA, 75 bp, synthetic construct
  source 1..75: mol_type = other DNA
gcgtaaagaagacgacggcacttataccgttggtattaccgaacatgcccaggagctgttaggcgatatggtgtt

SEQ ID NO: 792014 - DNA, 75 bp, synthetic construct
  source 1..75: mol_type = other DNA
aaagccagcgatgaaagcgaacaggaatcactgctggacgccaccgcatacgaagcattgttagaagacgagtaa

SEQ ID NO: 792015 - DNA, 75 bp, synthetic construct
  source 1..75: mol_type = other DNA
atcttcccgaccggacgtcattatctggcaccttctgacaagctggatcataaagtggcgaagattttacaagtg

SEQ ID NO: 792016 - DNA, 75 bp, synthetic construct
  source 1..75: mol_type = other DNA
ggagtgcctctcggtaggccgcggtatcaccctgccttccaactcaaccggcggcgtgaaatcggtagcgctggc

SEQ ID NO: 792017 - DNA, 75 bp, synthetic construct
  source 1..75: mol_type = other DNA
agatggaagggattgaagagccgctggcgcgtattgccgggaacgcctacgtgatggatgctgcggcatcgctga

SEQ ID NO: 792018 - DNA, 75 bp, synthetic construct
  source 1..75: mol_type = other DNA
gctggaaggcgcagtcgaacgtaaccgcatgggcgagattatcattgatgcgaaatgcgaaaccaacgtcaaagg

SEQ ID NO: 792019 - DNA, 75 bp, synthetic construct
  source 1..75: mol_type = other DNA
acgctctgctggtggattttaaccagcagcaaaacaaccgttttatggtggtcaatcagatgaccatcagcggaa

SEQ ID NO: 792020 - DNA, 75 bp, synthetic construct
  source 1..75: mol_type = other DNA
gctcgactacattcgctacttcatcttgtttgaaagcgacggcaaacgactgattaaaaaaattgccgcctatca

SEQ ID NO: 792021 - DNA, 75 bp, synthetic construct
  source 1..75: mol_type = other DNA
tttatgggctttaccggtacaccgattgcgtctgaagataaagatacccgtgccgtgttcggtgattatgtctcg

SEQ ID NO: 792022 - DNA, 75 bp, synthetic construct
  source 1..75: mol_type = other DNA
gcgcgacgcgctacctaatgcctcgtttctgggatttaccggtacaccggtttcggcagaggatcgcgatactcg

SEQ ID NO: 792023 - DNA, 75 bp, synthetic construct
  source 1..75: mol_type = other DNA
ccgattctcaatggacgcagcaatatcgttgttatttccgatgaagcgcaccgcagccagtacggcatgaaagcc

SEQ ID NO: 792024 - DNA, 75 bp, synthetic construct
  source 1..75: mol_type = other DNA
caatgaaaatgacaagccgttgctggaatggcaactggaaactatggtacggggtttcttcaaccgggaattgct

SEQ ID NO: 792025 - DNA, 75 bp, synthetic construct
  source 1..75: mol_type = other DNA
aaacgttacctcgatgtctcgctggcgatgagcaaagcctggtcactatgtaacacgctggatgaggccgaacct

SEQ ID NO: 792026 - DNA, 75 bp, synthetic construct
  source 1..75: mol_type = other DNA
cactggcgatcgcgtccgccgcctgaaaacacatgctgaatttacgctgcagaaatcgcgctggcgccctcttgt

SEQ ID NO: 792027 - DNA, 75 bp, synthetic construct
  source 1..75: mol_type = other DNA
ccaccattgccgtcgcactgtccggctgtacgcagatggcagccggcagccgcccgcacacagacaccggcacgc

SEQ ID NO: 792028 - DNA, 75 bp, synthetic construct
  source 1..75: mol_type = other DNA
ttttgccaggcgcatgatttactcaagcaaacgccgttacaggccaacgaccgcgacgaactgcgcgagctgctc

SEQ ID NO: 792029 - DNA, 75 bp, synthetic construct
  source 1..75: mol_type = other DNA
gctccggcaaaagtatctccatgtgctgttacgccggaaagctgctgcaacaaacagagatgaataatccgacca

SEQ ID NO: 792030 - DNA, 75 bp, synthetic construct
  source 1..75: mol_type = other DNA
atacaataaccgcgccattgaaactgcgcaggtgattgaagaactgatccagatggcaaaagagtttcaggaagc

SEQ ID NO: 792031 - DNA, 75 bp, synthetic construct
  source 1..75: mol_type = other DNA
ggcggtgctggtggcgctcggcattattattgccgacagccgcctggggatgttcagtcaaatccgtacctatat

SEQ ID NO: 792032 - DNA, 75 bp, synthetic construct
  source 1..75: mol_type = other DNA
atggacagtctcaatcttaataaacatatttctggccagttcaacgccgaactggaaagtatccgcacgcaggtg

SEQ ID NO: 792033 - DNA, 75 bp, synthetic construct
  source 1..75: mol_type = other DNA
cgtattggtgacgtggcggataaaatctgccgcacagcgctggagaaattctcccaacagcatcagccgttgctg

SEQ ID NO: 792034 - DNA, 75 bp, synthetic construct
  source 1..75: mol_type = other DNA
agcgggatcgatcttgccgtttcttactgtatgcaggtggaccacgggttcgcccagccactggagttcctgctc

SEQ ID NO: 792035 - DNA, 75 bp, synthetic construct
  source 1..75: mol_type = other DNA
gtcgccgcttttgccgctatttctgcgtttggcaactggcgtagcgaagggcgttattaccgcccaatcccggag

SEQ ID NO: 792036 - DNA, 75 bp, synthetic construct
  source 1..75: mol_type = other DNA
cccactcgccgctggtagggtatgtcgacccggcgcaagagatacttgatgaggtcaatggcgtgattgccagtg

SEQ ID NO: 792037 - DNA, 75 bp, synthetic construct
  source 1..75: mol_type = other DNA
acgtgcgggcgcggcttctggctgggattactcctcccgctggctgcgtgacgcgggtcgtctggcgagtattcg

SEQ ID NO: 792038 - DNA, 75 bp, synthetic construct
  source 1..75: mol_type = other DNA
ccgttttagcgaaacctactattgggattcctatttcaccatgctggggctggcggaaagtggtcgggaagattt

SEQ ID NO: 792039 - DNA, 75 bp, synthetic construct
  source 1..75: mol_type = other DNA
atctcgaactgttcgaacatgttcagtcggcaaaaattttccccgacagtaaaacctttcccgattgtgcgccga

SEQ ID NO: 792040 - DNA, 75 bp, synthetic construct
  source 1..75: mol_type = other DNA
cgtattggcgacgtggcggacaaaatctgccgtactgcgctggagaaattctcccagcagcatcagccgttgctg

SEQ ID NO: 792041 - DNA, 75 bp, synthetic construct
  source 1..75: mol_type = other DNA
tctctgggatgatgaaaatggtatctaccgcgattacgactggcggcgcgaacagcaggcactcttttccgctgc

SEQ ID NO: 792042 - DNA, 75 bp, synthetic construct
  source 1..75: mol_type = other DNA
gctgaaatgcatggccgataacttcgcctggatgatcgaaaactacggccacatccccaacggcaaccgcaccta

SEQ ID NO: 792043 - DNA, 75 bp, synthetic construct
  source 1..75: mol_type = other DNA
cacgccgctgcccggtttccagcgtacccgcatgttgggggaagccattggacgtttcaccagcactctcaataa

SEQ ID NO: 792044 - DNA, 75 bp, synthetic construct
  source 1..75: mol_type = other DNA
ggcgttttaacgccagccaatcccgacaaagcaacgtgcttttgcgagaaattccacaggccagtgtggacaacg

SEQ ID NO: 792045 - DNA, 75 bp, synthetic construct
  source 1..75: mol_type = other DNA
ggccagtgaaacgcgtttacgcgagatggaacgttatgtcacttccgacaccttcacgctacgtagccgtttccg

SEQ ID NO: 792046 - DNA, 75 bp, synthetic construct
  source 1..75: mol_type = other DNA
gataagattgttattttatacttcggaactcagtatgctgagtcagctaatttatttaaatggatgtcagtcctt

SEQ ID NO: 792047 - DNA, 75 bp, synthetic construct
  source 1..75: mol_type = other DNA
atggaatgaggcaaaatcttatcttcgtcagtcgtatgacgagcaacttaacaatgaaatggctaaggccaagat

SEQ ID NO: 792048 - DNA, 75 bp, synthetic construct
  source 1..75: mol_type = other DNA
actgaaagcgaactggcagagttcaaaaacattcgccagttactttctggtcagcacttgcttaatcgcctgtca

SEQ ID NO: 792049 - DNA, 75 bp, synthetic construct
  source 1..75: mol_type = other DNA
ataaatcaatgttcctagcggcgtataaagatgatgaagtaaacttttacgccgaagctcacttacctaaaatca

SEQ ID NO: 792050 - DNA, 75 bp, synthetic construct
  source 1..75: mol_type = other DNA
actgtccatcttttttggtctggcctttttcacctttgtcgcctacatcgtgctgacgtttgtgttggatccgat

SEQ ID NO: 792051 - DNA, 75 bp, synthetic construct
  source 1..75: mol_type = other DNA
aattatggcgcatcccacaacagggcatggtgcgtggtgtctgcgcagggattgccaattattttgatgtgcccg

SEQ ID NO: 792052 - DNA, 75 bp, synthetic construct
  source 1..75: mol_type = other DNA
ggccagtgaaacacgcttacgtgaaatggagcgctatgtcacttccgacaccttcacactacgaagccgtttccg

SEQ ID NO: 792053 - DNA, 75 bp, synthetic construct
  source 1..75: mol_type = other DNA
aacatcgctcttgaccagaaaggttcaggtaatttttcagcgtgggttattgaagcctgcagaagaagattaatt

SEQ ID NO: 792054 - DNA, 75 bp, synthetic construct
  source 1..75: mol_type = other DNA
tgaagcctgcaggagaaggctggcaacaaatgcaacgcatctgcgcccggtcagcatgacaaataacgagaaatg

SEQ ID NO: 792055 - DNA, 75 bp, synthetic construct
  source 1..75: mol_type = other DNA
tcagatcacctgtttattatgatggctgccgtggtgattgccgtaggcgtgatgatgttcgccgcgcgctcgatt

SEQ ID NO: 792056 - DNA, 75 bp, synthetic construct
  source 1..75: mol_type = other DNA
atgaccatgggcggcatggtggagcggcagctttctgatgcaatcaccgcgatgcataaccaggacagcgatctg

SEQ ID NO: 792057 - DNA, 75 bp, synthetic construct
  source 1..75: mol_type = other DNA
aagcccgctggtctgatgtggtgatccacaacaacacgctctactacactggtgtaccggaaaacctcgacgccg

SEQ ID NO: 792058 - DNA, 75 bp, synthetic construct
  source 1..75: mol_type = other DNA
ctgaacagattttttatcccggctggttgatggtctgccagttgcgcagcgggcaaccggttgagaatggtaagg

SEQ ID NO: 792059 - DNA, 75 bp, synthetic construct
  source 1..75: mol_type = other DNA
atggataaagaaaatagtagtatttctaaaagatggctaatcgcgtctggtgttgcggttattttactgacctta

SEQ ID NO: 792060 - DNA, 75 bp, synthetic construct
  source 1..75: mol_type = other DNA
ccttacaaatgagtgcattcctattaggtagtttttttgacgtgtacgttttattgcagttttattttatcgcaa

SEQ ID NO: 792061 - DNA, 75 bp, synthetic construct
  source 1..75: mol_type = other DNA
tctggaaaagcttatttaagagtgttaacaattatatgtttaattgttcctccgctcatgataatgttatcttta

SEQ ID NO: 792062 - DNA, 75 bp, synthetic construct
  source 1..75: mol_type = other DNA
cgagtattctggatgccacgattttcctggccgataaaaacgacttcgctgcaatgaataaagcctgggacgcct

SEQ ID NO: 792063 - DNA, 75 bp, synthetic construct
  source 1..75: mol_type = other DNA
cgccaattgttgaacctgtacagcagccgcaacaaccgattgcaccgcagcaacaatatcagcagccgcaacaac

SEQ ID NO: 792064 - DNA, 75 bp, synthetic construct
  source 1..75: mol_type = other DNA
caattgttgaacctgtacagcagccgcaacaaccggttgcaccgcagcagcagtatcagcagccacaacagccgg

SEQ ID NO: 792065 - DNA, 75 bp, synthetic construct
  source 1..75: mol_type = other DNA
caaatggcgcgcctggtagaagcgcgtctggctgatttccgtattaaagccgatgttgtcaattactctccgggg

SEQ ID NO: 792066 - DNA, 75 bp, synthetic construct
  source 1..75: mol_type = other DNA
agcaggttattgtacttgtctgtgcttgccctaatcattgcagcaggtatctggcttctcagatttctggataat

SEQ ID NO: 792067 - DNA, 75 bp, synthetic construct
  source 1..75: mol_type = other DNA
ggatttgaacaacttttaacaagactaagctttataaaacaatcaatcctcagcaaacaacaatacagggttaaa

SEQ ID NO: 792068 - DNA, 75 bp, synthetic construct
  source 1..75: mol_type = other DNA
gaaagtgggttaaacatgacccaagctcgatttttaacactcccagtacctgtagcaccatttgctgaacaaaaa

SEQ ID NO: 792069 - DNA, 75 bp, synthetic construct
  source 1..75: mol_type = other DNA
gtgctctctttcatttctggtatatattattgcggtttttccactaagaaatgtatttaaaaataatgtgaaatg

SEQ ID NO: 792070 - DNA, 75 bp, synthetic construct
  source 1..75: mol_type = other DNA
aacagagttcagacaggaaagaagcgcaggtacgttacgtaaatcctaaccaagttttgatatgcgattcgaacg

SEQ ID NO: 792071 - DNA, 75 bp, synthetic construct
  source 1..75: mol_type = other DNA
ttaaggacgccgttcattacaatagctttagggcctaactgggcaataacttctaatattttactttggttggca

SEQ ID NO: 792072 - DNA, 75 bp, synthetic construct
  source 1..75: mol_type = other DNA
tggcagatgaggacgcggccagcgatgaggctgatatcacccggcaactgagcgacctgctgccggtgaaggaga

SEQ ID NO: 792073 - DNA, 75 bp, synthetic construct
  source 1..75: mol_type = other DNA
accacctttgcaataaagaaattcaagaaagcaaaagtattaaaataccacttcatttcatgcgtggagttatcc

SEQ ID NO: 792074 - DNA, 75 bp, synthetic construct
  source 1..75: mol_type = other DNA
ataccaacgacggaaatgaaaaaatattgtagtgaaatctgtgccgaaaaagaccagatggcacacgaactttaa

SEQ ID NO: 792075 - DNA, 75 bp, synthetic construct
  source 1..75: mol_type = other DNA
accacctttgcaataaaggaattaaagaaagcaaaagcattaaaagaccacttcatttcatgcatggagttatcc

SEQ ID NO: 792076 - DNA, 75 bp, synthetic construct
  source 1..75: mol_type = other DNA
ctattgaatgttacagagataattttagccatccgataaaaaaactagatttgagcaatgttgatgatgtggtga

SEQ ID NO: 792077 - DNA, 75 bp, synthetic construct
  source 1..75: mol_type = other DNA
attcaaaatttaatagagttgcctttgttgaagttatctcatcgctaatttcattggcaatagcaataatctttg

SEQ ID NO: 792078 - DNA, 75 bp, synthetic construct
  source 1..75: mol_type = other DNA
atgtattaatgttttttcctaatatgtatctcgctattagagttttaaaaggcaattacctcatttttcttaagg

SEQ ID NO: 792079 - DNA, 75 bp, synthetic construct
  source 1..75: mol_type = other DNA
tatgaacagcgcatccgggagctggaggaggccctgaagctggcccaccagtggcgcttcgggcgtaaaagcgag

SEQ ID NO: 792080 - DNA, 75 bp, synthetic construct
  source 1..75: mol_type = other DNA
gccctgaaacgtgacctgctcaggcaaccggtgctgcaggcggacgagacgccgctgcagatactggatacgcgg

SEQ ID NO: 792081 - DNA, 75 bp, synthetic construct
  source 1..75: mol_type = other DNA
tggctctcggcctgtcactgccggcaatcgcaagtgaaaaagtcatagatatgtacaaatctgaacactgtgggt

SEQ ID NO: 792082 - DNA, 75 bp, synthetic construct
  source 1..75: mol_type = other DNA
cgcggcgggcgcggtgtgcgactggtggggctgcatgtgacgttgcttgacccgcaaatggaaagacaactggtg

SEQ ID NO: 792083 - DNA, 75 bp, synthetic construct
  source 1..75: mol_type = other DNA
aaacgcatcatcagggacatcgctgctaaattatcaatagctccctcaacgattagccgcgagatcaggaggcac

SEQ ID NO: 792084 - DNA, 75 bp, synthetic construct
  source 1..75: mol_type = other DNA
gatttcactctactatcatgcctacaatccaccaggccggtggctaccgtcctcccgtgcgaaagcggcaccggt

SEQ ID NO: 792085 - DNA, 75 bp, synthetic construct
  source 1..75: mol_type = other DNA
ccacaatatcagcagccgcaacaaccggttgcgccacagcagcaatatcagcagccgcaacaaccggttgcgccg

SEQ ID NO: 792086 - DNA, 75 bp, synthetic construct
  source 1..75: mol_type = other DNA
taccgtatccagtaagattgactcacgtaccattcttgatcaggctggtgcggaatcactgctgggtatggggga

SEQ ID NO: 792087 - DNA, 75 bp, synthetic construct
  source 1..75: mol_type = other DNA
ataaatacaagagccaaatacaaaaatatgctctatgctgtgatgattttaatgatggtgtatacaggaaaccga

SEQ ID NO: 792088 - DNA, 75 bp, synthetic construct
  source 1..75: mol_type = other DNA
agatcgaaagtattcaggtgctgaaacttaaaccattcgacagcatgggcaccctaccggagattattaaaaccg

SEQ ID NO: 792089 - DNA, 75 bp, synthetic construct
  source 1..75: mol_type = other DNA
accaggcattcccttagccgtgattgaagcaaaagccaacaaacatgaaattggcaaagggatgcaacagggcat

SEQ ID NO: 792090 - DNA, 75 bp, synthetic construct
  source 1..75: mol_type = other DNA
gctcgatacccagcgcgcttataccgtgattcaggctcgtccgactgcgggtctgcaacgtttgcgttatctgtt

SEQ ID NO: 792091 - DNA, 75 bp, synthetic construct
  source 1..75: mol_type = other DNA
ctccacagcacttccagatcgcaccaggttacgttcagtcgccgtatgtacagtacatcggcaccctgtttggca

SEQ ID NO: 792092 - DNA, 75 bp, synthetic construct
  source 1..75: mol_type = other DNA
ggcaatgtttgagtctgtcgcgcaatcaatgcgtagctctgacggcgtaatgaaagttgctcaatatgctgctct

SEQ ID NO: 792093 - DNA, 75 bp, synthetic construct
  source 1..75: mol_type = other DNA
ccaacagcagcgctgtgacgcgtttatccagtttgccagcgatgttatgttgacgcgctgtgaactgaccagcga

SEQ ID NO: 792094 - DNA, 75 bp, synthetic construct
  source 1..75: mol_type = other DNA
tatgtaggtctggagttaccgaataaaaacgacaaaccgtttatctgcgcgaagttttggataacgccaaattcc

SEQ ID NO: 792095 - DNA, 75 bp, synthetic construct
  source 1..75: mol_type = other DNA
ggatgctgttgccaaatggcgtaaaggctggatcccaccggttactactgccgcaagacttccttcagtgtcccg

SEQ ID NO: 792096 - DNA, 75 bp, synthetic construct
  source 1..75: mol_type = other DNA
agacgctattcgcgtttaccaacagagcgcatcgacagaggtgaaaacgtattttgccttgcagaatgatggctc

SEQ ID NO: 792097 - DNA, 75 bp, synthetic construct
  source 1..75: mol_type = other DNA
acacctttaatattgttattagtcgttattctgctcaccactggcatgatgtcggtgcggcattgcgtgaagtga

SEQ ID NO: 792098 - DNA, 75 bp, synthetic construct
  source 1..75: mol_type = other DNA
cgtgttccggtacggattgcctttgacaggccaacagaattaaagcaactccttcgtccggggttgtcagtcact

SEQ ID NO: 792099 - DNA, 75 bp, synthetic construct
  source 1..75: mol_type = other DNA
gttcaagggctatgttgagagtctcgccccagcgacaggtgccagtttcagtttgatcccgatagaaaatgccac

SEQ ID NO: 792100 - DNA, 75 bp, synthetic construct
  source 1..75: mol_type = other DNA
tgcatttgacgacgcaaaggaattaaagcaacttcttcgcccgggactgtccgtcaccgtcagtgttgatgagag

SEQ ID NO: 792101 - DNA, 75 bp, synthetic construct
  source 1..75: mol_type = other DNA
cccacgttcttgaaacgatcgaacacgacggcaaacagtggttcactgccgcgactttggcttcagcactggagt

SEQ ID NO: 792102 - DNA, 75 bp, synthetic construct
  source 1..75: mol_type = other DNA
ttttcaattcagaaattttctacaatacaatcaataagagcaaagaaaacaagaaaaacgcaaaaaaaattagaa

SEQ ID NO: 792103 - DNA, 75 bp, synthetic construct
  source 1..75: mol_type = other DNA
cggttgcacagcagccgcaatatcagcagccgcaacaaccggttgcaccgcagcagcaatatcagcagccgcaac

SEQ ID NO: 792104 - DNA, 75 bp, synthetic construct
  source 1..75: mol_type = other DNA
agtggcacgtttcagtggtgataatatggaggcagattttgcactacggtttacacctgtaccagagaaatggac

SEQ ID NO: 792105 - DNA, 75 bp, synthetic construct
  source 1..75: mol_type = other DNA
tatatatgtacaatactttatcgacaccttacgatattgatttttcgttaccatatagtatagataagaagtcaa

SEQ ID NO: 792106 - DNA, 75 bp, synthetic construct
  source 1..75: mol_type = other DNA
atcagtagtcgctggagtaatggtgttgtcgaaggtcatgtaaatcgcctgaagatgctgaaacgccagatgtat

SEQ ID NO: 792107 - DNA, 75 bp, synthetic construct
  source 1..75: mol_type = other DNA
aaataaaaaacgcattttgttccttgccgatcgcaatattctggtcgaccaaaccaaaaataatgatttccagcc

SEQ ID NO: 792108 - DNA, 75 bp, synthetic construct
  source 1..75: mol_type = other DNA
tggcagccagcgccagagaagatattgagtaccggtttgatattaacagaacggcacagatcattgtgtctctgg

SEQ ID NO: 792109 - DNA, 75 bp, synthetic construct
  source 1..75: mol_type = other DNA
ggcgtcccgaagaggatgccccgtaattgctcaggtaggaatgttgcgcccggaaaaagggcacgaatttatgtt

SEQ ID NO: 792110 - DNA, 75 bp, synthetic construct
  source 1..75: mol_type = other DNA
tgttgtcggcctgagtcgtcttatatttcgttgccaatttagcattatccgacaaaagacgtatatcacacgaaa

SEQ ID NO: 792111 - DNA, 75 bp, synthetic construct
  source 1..75: mol_type = other DNA
gatggatcgcgaatttgaccgccaaagagaagaggcaagactcaaagcggagcaggaaaagcgagagcatgaaga

SEQ ID NO: 792112 - DNA, 75 bp, synthetic construct
  source 1..75: mol_type = other DNA
tgacagcagctgaagctctcgcaaagcaaattgagtctgaccatgaaatagcgattttgatggatcgcgaatttg

SEQ ID NO: 792113 - DNA, 75 bp, synthetic construct
  source 1..75: mol_type = other DNA
cgtgctggccgatctgaaagccgcaggtgcttcatatacgcgccggaatatcatcgccgatatgttccgccgtct

SEQ ID NO: 792114 - DNA, 75 bp, synthetic construct
  source 1..75: mol_type = other DNA
gctttcggtttatgaaggcattccgcatctgttaacggaagtcgttaccgacatgaaagatgctgccaacgcttt

SEQ ID NO: 792115 - DNA, 75 bp, synthetic construct
  source 1..75: mol_type = other DNA
agccggttgcaccgcagcagcaatatcagcagccgcaacagccggttgcaccacagccgcaatatcagcagccgc

SEQ ID NO: 792116 - DNA, 75 bp, synthetic construct
  source 1..75: mol_type = other DNA
tcaaaatgaagaatttaatgagcggcagaaaaaacgcctcgcattaaatgatttaacaccatctaaacaggataa

SEQ ID NO: 792117 - DNA, 75 bp, synthetic construct
  source 1..75: mol_type = other DNA
ctcgatagccctgtatcggaagttttgccaaaattgttcagagatacggtcatggtcgaaattgacctagcaaac

SEQ ID NO: 792118 - DNA, 75 bp, synthetic construct
  source 1..75: mol_type = other DNA
cctttcccgcctgttgtatacagatgacgatgatgagatcaacactcgcctgaaccaccaaatcagggatacgga

SEQ ID NO: 792119 - DNA, 75 bp, synthetic construct
  source 1..75: mol_type = other DNA
ttgcgccacagcagcaatatcagcagccgcaacaaccggttgcaccgcagcagcaatatcagcagccgcaacaac

SEQ ID NO: 792120 - DNA, 75 bp, synthetic construct
  source 1..75: mol_type = other DNA
tcagctctgacgcaaaggggactggcgaagatgattggctgccatgaatcgaaggtcagtcgtaccgactggcga

SEQ ID NO: 792121 - DNA, 75 bp, synthetic construct
  source 1..75: mol_type = other DNA
atcaacccgaaaaaaccgtacccggttatcgcgaccacttcagagctgatgaccaccggtgtggatgggcactgt

SEQ ID NO: 792122 - DNA, 75 bp, synthetic construct
  source 1..75: mol_type = other DNA
agtggacccagctcgacggcggatattgagcttatcaaggtggttggggtgcatggtccggtgaaggcggtatat

SEQ ID NO: 792123 - DNA, 75 bp, synthetic construct
  source 1..75: mol_type = other DNA
ccgaatatggcctgacggagtccggcggcgtggtgctgttttccgcaccggagcgcgggcgttccctgagcctgt

SEQ ID NO: 792124 - DNA, 75 bp, synthetic construct
  source 1..75: mol_type = other DNA
gagcgtgcggggaacgtccgcaagcgtgattacttcacgaaatattcagaagcagcgcgaaaagtgctcgataat

SEQ ID NO: 792125 - DNA, 75 bp, synthetic construct
  source 1..75: mol_type = other DNA
ccaaattggcttaaccgccacgccaaaagagacgcatgaagtctccagcacggattacttcggtgatccggttta

SEQ ID NO: 792126 - DNA, 75 bp, synthetic construct
  source 1..75: mol_type = other DNA
gcggcacgcaaagcggtaaaatctgctgacatcgtgttgtattacaagccaggtatccccttagccgtggttgaa

SEQ ID NO: 792127 - DNA, 75 bp, synthetic construct
  source 1..75: mol_type = other DNA
gccgggagctggcagcaaagtatccgggagacacgccgttgatgctggttgtctggtccccggaagagattcagg

SEQ ID NO: 792128 - DNA, 75 bp, synthetic construct
  source 1..75: mol_type = other DNA
gcgctccaccgttcttgtctggttacgtaaatatggccggcttgactggagtcctggacttcctgacctggtgaa

SEQ ID NO: 792129 - DNA, 75 bp, synthetic construct
  source 1..75: mol_type = other DNA
cattcaggcacaaacttacttcatcgatttgccttgctgggcgcagagtgaagaagaggacgattcgcctgatac

SEQ ID NO: 792130 - DNA, 75 bp, synthetic construct
  source 1..75: mol_type = other DNA
atgggcggcgtggcgggtatcggttccacgactgaaaagcatcagggggcgcgtggcggaagcaatttttgcgaa

SEQ ID NO: 792131 - DNA, 75 bp, synthetic construct
  source 1..75: mol_type = other DNA
ccctcgctgacggaatggatatttccctgtccgatcatgaaatcaggaccgtcctggcgcacctggaggacatcc

SEQ ID NO: 792132 - DNA, 75 bp, synthetic construct
  source 1..75: mol_type = other DNA
gggagacacgccgttgatgctggttgtctggtccccggaagagattcaggccctcgctgacggaatggatatttc

SEQ ID NO: 792133 - DNA, 75 bp, synthetic construct
  source 1..75: mol_type = other DNA
caccattatcggctccatcattatgggcattctgattaacggcctggtgctgatgaacgtctcggcttactacca

SEQ ID NO: 792134 - DNA, 75 bp, synthetic construct
  source 1..75: mol_type = other DNA
cccgatgtcagcaaagttgttccccgtatcgaaaaagtggcggtgattggcgctgggcctgcagggttagggtgt

SEQ ID NO: 792135 - DNA, 75 bp, synthetic construct
  source 1..75: mol_type = other DNA
aaagtggcggtgattggcgctgggccagcagggttagggtgtgctgatattctggcgcgcgcaggagttcaggtt

SEQ ID NO: 792136 - DNA, 75 bp, synthetic construct
  source 1..75: mol_type = other DNA
gccgcgatattacctttagcgatttaacttctgaatatgatgcagttttcatcggcgtggggacttacgggatga

SEQ ID NO: 792137 - DNA, 75 bp, synthetic construct
  source 1..75: mol_type = other DNA
cgcaatatatcgcttgtgacgaagatgggcgtttaactgcggtgggcctgattcgtaccgccatgggtgagccgg

SEQ ID NO: 792138 - DNA, 75 bp, synthetic construct
  source 1..75: mol_type = other DNA
ctgttcatggcgcggatctggtcgtcactgcaatggccgcaggaagacaggcagcacacgatatgttagccatgt

SEQ ID NO: 792139 - DNA, 75 bp, synthetic construct
  source 1..75: mol_type = other DNA
gtgatgaagtcagtatgcccggctcgcgaaaagaggtggttaatgcgcgagaggaaggtgttgagtttcagttca

SEQ ID NO: 792140 - DNA, 75 bp, synthetic construct
  source 1..75: mol_type = other DNA
gctaataaagggttccgtgaaaaactagctcgttcagttgatgtttattttagttactttgagcgtctggccgca

SEQ ID NO: 792141 - DNA, 75 bp, synthetic construct
  source 1..75: mol_type = other DNA
aataaactggcggtttgcagcagcagtggcgggaaaacaggtattaagttctctggtggtggctctggtgatatc

SEQ ID NO: 792142 - DNA, 75 bp, synthetic construct
  source 1..75: mol_type = other DNA
cggtactggcagtcaatgcccgggaagctggcagcaatgttcgccagggaatagtgcagttgctgttgcaggata

SEQ ID NO: 792143 - DNA, 75 bp, synthetic construct
  source 1..75: mol_type = other DNA
acatgcgatgccgtggttgcagggcagcggaattaaacttgataaatggggcctgattaaaaccggcgacgcggg

SEQ ID NO: 792144 - DNA, 75 bp, synthetic construct
  source 1..75: mol_type = other DNA
gctgatgaccaagtgaatatttggaagaaacaggcagccaaagagggcaaaatcgacctattctttgaggttgag

SEQ ID NO: 792145 - DNA, 75 bp, synthetic construct
  source 1..75: mol_type = other DNA
ttgttggttcacagcataaatggaaagaattctataaattagttctggaaagtcaaaaaataacactaaataata

SEQ ID NO: 792146 - DNA, 75 bp, synthetic construct
  source 1..75: mol_type = other DNA
attcatgcctatactggcacccagtcactggtggatggcccacgtggtaaagatttacgtgcttcacgcgcagcg

SEQ ID NO: 792147 - DNA, 75 bp, synthetic construct
  source 1..75: mol_type = other DNA
gcatttttgtaagtctgcactcgcgcgttttacccagtgggatttcattgatctggtcaataaacacggcatcgc

SEQ ID NO: 792148 - DNA, 75 bp, synthetic construct
  source 1..75: mol_type = other DNA
gtgactgccgaagaggtgaacaacgcgcttaaaaaggcgacaaacaataacgagtcatttggttataccgatgaa

SEQ ID NO: 792149 - DNA, 75 bp, synthetic construct
  source 1..75: mol_type = other DNA
gtgccagtgaaaacaggttcagtgaccgagctggtgtctatcctggggaaaaaagtgactgctgaagaggtgaat

SEQ ID NO: 792150 - DNA, 75 bp, synthetic construct
  source 1..75: mol_type = other DNA
ccttaatgccgtattgttgcaggcgcagtcagccgccagcgccgtcagcggcgtggatgcgctggtggcgcaacg

SEQ ID NO: 792151 - DNA, 75 bp, synthetic construct
  source 1..75: mol_type = other DNA
gctactgaaggaaggttttgtctctgcggaagatgtagaccgcgcgagaaccgcacagcgtgcggcagaagccga

SEQ ID NO: 792152 - DNA, 75 bp, synthetic construct
  source 1..75: mol_type = other DNA
caatctgctaccggatgtggacctcgaaaccttcctgaatgagcagcgtaacgcacatccgaatcaaagcctgaa

SEQ ID NO: 792153 - DNA, 75 bp, synthetic construct
  source 1..75: mol_type = other DNA
atgtcgcaggctgctctgaacacgcgaaacagtgaagaagaaatttcttctcaccgcaataatggaacgcgtctg

SEQ ID NO: 792154 - DNA, 75 bp, synthetic construct
  source 1..75: mol_type = other DNA
ctgggtcgtgttgggctggatggaagatgcgcaacgcctgccgctctcaaagctggtgttgaccggtgaacgcca

SEQ ID NO: 792155 - DNA, 75 bp, synthetic construct
  source 1..75: mol_type = other DNA
attatgagtcaataatagtaaatgcaacaaaatactatgccgataatgcgaaaggcttggctgattatcttgaaa

SEQ ID NO: 792156 - DNA, 75 bp, synthetic construct
  source 1..75: mol_type = other DNA
atctcacttccccaaaaattctcgcctatctgctgaaacatgattcaaactatggtccgttcccctggcgcgttg

SEQ ID NO: 792157 - DNA, 75 bp, synthetic construct
  source 1..75: mol_type = other DNA
atcaacatatggtagacgccgaaggaaacaccttcagcgtgccgccagatcgcaccagcaagcaggtgctcccga

SEQ ID NO: 792158 - DNA, 75 bp, synthetic construct
  source 1..75: mol_type = other DNA
ttacacgcgtaatgacgatatccggcagtcgatcctggcgttgggtgagccgggtacttttatgacccaggatgt

SEQ ID NO: 792159 - DNA, 75 bp, synthetic construct
  source 1..75: mol_type = other DNA
gcaaacgctctgtcacctcataccgccacaggcaaaacacgttgttatactcctgacctttgctgataagatcag

SEQ ID NO: 792160 - DNA, 75 bp, synthetic construct
  source 1..75: mol_type = other DNA
cgcgagttaggtgttatcaatattggcggtgccggtacgattactgtcgatggtcaatgctatgaaatcggtcac

SEQ ID NO: 792161 - DNA, 75 bp, synthetic construct
  source 1..75: mol_type = other DNA
gtcgatccattccggcgtcggaaccaaagcttatacctttatctggggcatggtcggtgaaaaccaggtctttga

SEQ ID NO: 792162 - DNA, 75 bp, synthetic construct
  source 1..75: mol_type = other DNA
tcagggatgcggggatgctgatgtcaatggggcaccgtaacttcattaatgaggtcaacaacctgaacaaacgta

SEQ ID NO: 792163 - DNA, 75 bp, synthetic construct
  source 1..75: mol_type = other DNA
gtaacaagcaacaggctggcgtgacagctggaaaaccaaaactcgacctgacaaacactgactggatttacgggg

SEQ ID NO: 792164 - DNA, 75 bp, synthetic construct
  source 1..75: mol_type = other DNA
agacgaatttattcgttttattgatgcctgtcaccatcaacaaacgaaaaacctgtggtccttagcagtatacac

SEQ ID NO: 792165 - DNA, 75 bp, synthetic construct
  source 1..75: mol_type = other DNA
acaaaagaaaatagaaaagattattcgtcagagaattctggcgaatcctctgacctgaaccgccccgggaatcct

SEQ ID NO: 792166 - DNA, 75 bp, synthetic construct
  source 1..75: mol_type = other DNA
caatgcgacactgacgggagatattgatgctgataatgccaccatggtgctgggaagtgactcgctatatctgga

SEQ ID NO: 792167 - DNA, 75 bp, synthetic construct
  source 1..75: mol_type = other DNA
gtgacggcacgtgccggtcttggctaccagtttgacctgctggcgaacggagaaacggtactgcgtgatgcatcc

SEQ ID NO: 792168 - DNA, 75 bp, synthetic construct
  source 1..75: mol_type = other DNA
ttctgacgcagccggtatcatttacccagaaggactgggagagcaggacgttcagcatcgggcaactgaaactga

SEQ ID NO: 792169 - DNA, 75 bp, synthetic construct
  source 1..75: mol_type = other DNA
cagtgacggatgtaccgaccggagagaatacgggggaatcaggtgagtaccgtgatgagacccggtggctgctga

SEQ ID NO: 792170 - DNA, 75 bp, synthetic construct
  source 1..75: mol_type = other DNA
cttaaccactcagaccagcttcgggtgacagaatcgctgcggggtaagaataacctgttgttggttgattttact

SEQ ID NO: 792171 - DNA, 75 bp, synthetic construct
  source 1..75: mol_type = other DNA
gcggcctggatgatgacgggaaactcatccgtgaagcatcttgagtcatcgggaagtgctctgtatttcagcagg

SEQ ID NO: 792172 - DNA, 75 bp, synthetic construct
  source 1..75: mol_type = other DNA
tttaaggcaccgcaaggcgtatcagtcgagacacacttacgcctgctggtcgctgtctgccggggccaacccgag

SEQ ID NO: 792173 - DNA, 75 bp, synthetic construct
  source 1..75: mol_type = other DNA
atgggaatgccgcactaaagcggatgaactgaattattacgcgttcaccgttaccgtttatccgtcgttgcagga

SEQ ID NO: 792174 - DNA, 75 bp, synthetic construct
  source 1..75: mol_type = other DNA
aaaggttttgcagtggtggcgggggaagtgcgtcatttagccagccgcagcgccaatgctgccaacgatattcgc

SEQ ID NO: 792175 - DNA, 75 bp, synthetic construct
  source 1..75: mol_type = other DNA
caggaaaaaacggcggaatataccaagaagttggcccgcgcggcggtaagaaagacaattttgccaccgtcaagg

SEQ ID NO: 792176 - DNA, 75 bp, synthetic construct
  source 1..75: mol_type = other DNA
attctgaacagtaacgcagaaacagccagagatgaagcggatgcgctgatggatgctcttgatgctccgggcagc

SEQ ID NO: 792177 - DNA, 75 bp, synthetic construct
  source 1..75: mol_type = other DNA
tcgtcatcgaggagcaaaaacaggctggcggacgtcgtctggttaaacgcgagtacccgttacgtgataccggcg

SEQ ID NO: 792178 - DNA, 75 bp, synthetic construct
  source 1..75: mol_type = other DNA
gaactggcaacggctggcccgcaggaatggcagcagcaacccgttatttgttcccggtggtgtcagtactgaggt

SEQ ID NO: 792179 - DNA, 75 bp, synthetic construct
  source 1..75: mol_type = other DNA
ggcatgcgagcgcgcagatggtgttcaatgtttacggtgcatggatggctgacagcagcgcagagcagatcgcaa

SEQ ID NO: 792180 - DNA, 75 bp, synthetic construct
  source 1..75: mol_type = other DNA
acactttggtctgggaaaaagagagataaccgttaaggcactttcggaaaaatggttggaccttaagaaaattga

SEQ ID NO: 792181 - DNA, 75 bp, synthetic construct
  source 1..75: mol_type = other DNA
gccgataatgggtacataaaggcaaatccctttgatggaataaagccattaaaaagggccagggtggagccagat

SEQ ID NO: 792182 - DNA, 75 bp, synthetic construct
  source 1..75: mol_type = other DNA
gagcgattatctggctgttacttggtcaaagcgtaagctatttctttgtactgggcgtgttgctggttagtagta

SEQ ID NO: 792183 - DNA, 75 bp, synthetic construct
  source 1..75: mol_type = other DNA
tcaacctgacactcagtacctgggtcggcggcattggtatgcgctatcgtttgtactcccgactggggttaccgg

SEQ ID NO: 792184 - DNA, 75 bp, synthetic construct
  source 1..75: mol_type = other DNA
aagaagatcctcacctggctgttttttatcgcggtgattgtgttgttggtggtctacgccaaaaaagtggactgg

SEQ ID NO: 792185 - DNA, 75 bp, synthetic construct
  source 1..75: mol_type = other DNA
cgcgggcggcgaagccctgtctgtcgcccgttgcagtctggcaaatgcttcttacacggctactagaaaaacact

SEQ ID NO: 792186 - DNA, 75 bp, synthetic construct
  source 1..75: mol_type = other DNA
cacgggaggcttctccacgtctgtcacccgtggagatttggcagcgacttctgagccacctgctggatcatcact

SEQ ID NO: 792187 - DNA, 75 bp, synthetic construct
  source 1..75: mol_type = other DNA
gtgcgagaagggcaatgtgaccttcagattgcgtagcgaagtgctgagcgtggagaaggatgatacaggtttcac

SEQ ID NO: 792188 - DNA, 75 bp, synthetic construct
  source 1..75: mol_type = other DNA
cagccgcgtatgtgcgttagctcgctgcgtggaaaaagatatcgacgtggcagctgaatctctgaaagtcgccga

SEQ ID NO: 792189 - DNA, 75 bp, synthetic construct
  source 1..75: mol_type = other DNA
tatgcaggacataccatgtccttactccgccagaactgtgcagtacacaaagcaatcaagttttacagtatgggg

SEQ ID NO: 792190 - DNA, 75 bp, synthetic construct
  source 1..75: mol_type = other DNA
gaacatatcgaggcgggtatcacgcttgctgatgcggtgaatttcctggtggaacgttatgaactggtacgcact

SEQ ID NO: 792191 - DNA, 75 bp, synthetic construct
  source 1..75: mol_type = other DNA
tgatgaacctggctacgcacaaatcaataccgaagacgccaaacgtctgggtattgaagatgaggcattggtttg

SEQ ID NO: 792192 - DNA, 75 bp, synthetic construct
  source 1..75: mol_type = other DNA
atgagaacgatgctgtcgctacggcagagattaaagtcggcgataacgataacctttctgcgctggcggcgattc

SEQ ID NO: 792193 - DNA, 75 bp, synthetic construct
  source 1..75: mol_type = other DNA
caaaagaatacttttttcatggtgaattttggcaccaacttgatgataacaaaggaagattttctgcacgaattg

SEQ ID NO: 792194 - DNA, 75 bp, synthetic construct
  source 1..75: mol_type = other DNA
agtgatggacgtcacaggctggctgggaggctataacttccagtgggcgtggtccagcgcgtgggcttgtgcgca

SEQ ID NO: 792195 - DNA, 75 bp, synthetic construct
  source 1..75: mol_type = other DNA
tgaacggttgcaacaacttgggcaaatcccggacgtcccgctaaaacagctcaacgtgcgtgaccaacaggcgct

SEQ ID NO: 792196 - DNA, 75 bp, synthetic construct
  source 1..75: mol_type = other DNA
ctcgaagagttacaggtgctggcgggcgtggcggtgccttccgtgattaccgctgaaaacggcaccgttttccgt

SEQ ID NO: 792197 - DNA, 75 bp, synthetic construct
  source 1..75: mol_type = other DNA
taacatcgacaaagccattatttccgtacatacccacgacgatttgggcctggcggtcggcaactcactggcggc

SEQ ID NO: 792198 - DNA, 75 bp, synthetic construct
  source 1..75: mol_type = other DNA
atggatctcgcgtcattacgcgctcaacaaattgaactggcttcttctgtgatccgcgaggatcgactcgataaa

SEQ ID NO: 792199 - DNA, 75 bp, synthetic construct
  source 1..75: mol_type = other DNA
accggccatcgggtcagcgtggacagcgcgctggcgtgggtacaacgctgcatgaaaggctatcgtctgccggag

SEQ ID NO: 792200 - DNA, 75 bp, synthetic construct
  source 1..75: mol_type = other DNA
cagaagatgatgccgctgtcatcggtagggatctccagtatgcaacaggaagagtattacatcgttttcggggcg

SEQ ID NO: 792201 - DNA, 75 bp, synthetic construct
  source 1..75: mol_type = other DNA
atggatctcgcgtcattacgcgctcaacaaatcgaactggcttcctctgtgatccgtgaggatcgacttgataaa

SEQ ID NO: 792202 - DNA, 75 bp, synthetic construct
  source 1..75: mol_type = other DNA
agaagtgacgcgagcggcgatggtgctgctgaaatacccctcgcttgagctggtggagtataaagtggcccgtat

SEQ ID NO: 792203 - DNA, 75 bp, synthetic construct
  source 1..75: mol_type = other DNA
ccgaccattggcgtggcgaaaaaacgactatgcggtaaattcgaaccgctctccagcgaagcgggtgcgctggcg

SEQ ID NO: 792204 - DNA, 75 bp, synthetic construct
  source 1..75: mol_type = other DNA
caggatggtgtgctgaaaaaccgcgaaaactacgaaatcatgacaccagaatctattggtctgaaccaaatccag

SEQ ID NO: 792205 - DNA, 75 bp, synthetic construct
  source 1..75: mol_type = other DNA
ttgtcgagtcctccgccaaagccatggtgcacgtactgaacaatatctggcgtgccgcagaagtcgaaaagagtt

SEQ ID NO: 792206 - DNA, 75 bp, synthetic construct
  source 1..75: mol_type = other DNA
ggtacacgccggagcgcggcaggtagaaggcgcactgaacgggatcggcgagcgtgccggtaactgttcgctgga

SEQ ID NO: 792207 - DNA, 75 bp, synthetic construct
  source 1..75: mol_type = other DNA
tgaatttaataccttcttattaagaaatcagaagatgatgccgttgtcatcggtagggatctccagcgtgcaaca

SEQ ID NO: 792208 - DNA, 75 bp, synthetic construct
  source 1..75: mol_type = other DNA
gggcttcattcagtggccttgccgcgatacttcagatgccgatcaggggacttcttatctgtttaaagagaagtt

SEQ ID NO: 792209 - DNA, 75 bp, synthetic construct
  source 1..75: mol_type = other DNA
aacggcccggtggatgccgtctatcaggcgattaaccgcatcaccgactataacgtcgagctggtgaaatacagc

SEQ ID NO: 792210 - DNA, 75 bp, synthetic construct
  source 1..75: mol_type = other DNA
caccctcacggttttttcactcaattgaaacatttagaacatccaatatttatcgcaaaaggaaaccattggact

SEQ ID NO: 792211 - DNA, 75 bp, synthetic construct
  source 1..75: mol_type = other DNA
ttcagatacgctttcagccagccaacaggccatcccgttgattgcggcatcgatggccagcagtcagatgaataa

SEQ ID NO: 792212 - DNA, 75 bp, synthetic construct
  source 1..75: mol_type = other DNA
agaaagtatcacgcgtcatctgggcctgtcctctgaaggagtacgggactggtgggttctgccttcagagcctga

SEQ ID NO: 792213 - DNA, 75 bp, synthetic construct
  source 1..75: mol_type = other DNA
caacatctgacactctgggggaaatgggggatgcgattgaagattttctgactgatgcgggctattcacaacttc

SEQ ID NO: 792214 - DNA, 75 bp, synthetic construct
  source 1..75: mol_type = other DNA
ggcacgctggaaaatctgccgttgccgcttgtcccgcaaccgaatgccgcaacggcgctggcggcactgcgtgcc

SEQ ID NO: 792215 - DNA, 75 bp, synthetic construct
  source 1..75: mol_type = other DNA
atacgatgcctgttgctgttcagccaggagcttttctgccatccgcgagccagtgtgacaggtgatgaaggatgt

SEQ ID NO: 792216 - DNA, 75 bp, synthetic construct
  source 1..75: mol_type = other DNA
gcttatcgttgcttttccagtgataaaatttcagccgataaaatcatggctccccataagaaaaatatcatcgaa

SEQ ID NO: 792217 - DNA, 75 bp, synthetic construct
  source 1..75: mol_type = other DNA
cgaactggctaaacgtggcgaaatcgataagaaagtggttgctgacgcaatcgccaaattcaacatcgatgcaga

SEQ ID NO: 792218 - DNA, 75 bp, synthetic construct
  source 1..75: mol_type = other DNA
aatatccctggaggatataccggaggagatattacttataaaacaattaacgattatggtgctctgactgaacag

SEQ ID NO: 792219 - DNA, 75 bp, synthetic construct
  source 1..75: mol_type = other DNA
ttgacgcgcaacagtttggtgccgactcggttaatgccacggtagaaaaagcccgtgccgccgcgaaacaggcca

SEQ ID NO: 792220 - DNA, 75 bp, synthetic construct
  source 1..75: mol_type = other DNA
aaagtgcttatcagcaatgtcgggcaagttatcaattaccgaaaagcgaactggataatgccattagctatgcaa

SEQ ID NO: 792221 - DNA, 75 bp, synthetic construct
  source 1..75: mol_type = other DNA
tgcgacgtcatttgatttaacgcaagccaatagcacgcttgccgatggcagtaaacatcaagggcaatcgtaccg

SEQ ID NO: 792222 - DNA, 75 bp, synthetic construct
  source 1..75: mol_type = other DNA
gcacatgtgagtagtacgttacaacgagtaattattccttttaaaagtgaattaacactaggtgatacctggtct

SEQ ID NO: 792223 - DNA, 75 bp, synthetic construct
  source 1..75: mol_type = other DNA
tgccagcgcaattttgccgggacgtttccagattgtgagcgagtcgccacgcgttatttttgatgtcgcgcataa

SEQ ID NO: 792224 - DNA, 75 bp, synthetic construct
  source 1..75: mol_type = other DNA
ggcgtaggttctgacgtttatagcgtgacttccttcaccgaattggcgcgtgatggtcaggattgtgaacgctgg

SEQ ID NO: 792225 - DNA, 75 bp, synthetic construct
  source 1..75: mol_type = other DNA
aaagttcagctgctgggttccggttctatcctgcgtcacgtccgtgaagcggcagagatcctggcgaaagattac

SEQ ID NO: 792226 - DNA, 75 bp, synthetic construct
  source 1..75: mol_type = other DNA
atgcgcgaagtctataaacgtctgccgaagtggaattatcaggggacagagctggcgctctggcatcgtgatcag

SEQ ID NO: 792227 - DNA, 75 bp, synthetic construct
  source 1..75: mol_type = other DNA
caccctcacggttttttcactcaattgaagcatttagaacatccaatatttatcgcgaaaggaaaccattggact

SEQ ID NO: 792228 - DNA, 75 bp, synthetic construct
  source 1..75: mol_type = other DNA
atacttgggatgaatatgagtatgcagcaatacagtcagtaattgactcaaaaatgtttaccatgggtaaaaagg

SEQ ID NO: 792229 - DNA, 75 bp, synthetic construct
  source 1..75: mol_type = other DNA
acgacccggcttacgcttacgaagttgctgtcatcatgcatgacggtctggagcgtatgtatggtgaaaaacaag

SEQ ID NO: 792230 - DNA, 75 bp, synthetic construct
  source 1..75: mol_type = other DNA
atgtccaatatactatggggcgacctggaaactttctgtgaaatacctatcaataatggcacccatgcgtatgcc

SEQ ID NO: 792231 - DNA, 75 bp, synthetic construct
  source 1..75: mol_type = other DNA
ccgcgcttctctccactaaccccgaatgggcgcccgatatcccactgaacgctggcggttttgaggcgtaccact

SEQ ID NO: 792232 - DNA, 75 bp, synthetic construct
  source 1..75: mol_type = other DNA
cttgatttgcgtatctggtttcccgatgtgcattacatgccggagctggatgcacagagacttaaactgaccttt

SEQ ID NO: 792233 - DNA, 75 bp, synthetic construct
  source 1..75: mol_type = other DNA
agggaaacatcacctatcagggcgttaactcctactcgcgcaaatggcagcggctcaaaacctatggcggaaagc

SEQ ID NO: 792234 - DNA, 75 bp, synthetic construct
  source 1..75: mol_type = other DNA
atgtccaatatactatggggcgacctggaaactttctgtgaaatccctattacgaacggtacccatgcgtatgcc

SEQ ID NO: 792235 - DNA, 75 bp, synthetic construct
  source 1..75: mol_type = other DNA
atgaagggtgtgagcagtgacgggcgtctgcgcggcacgctgcagttctgcggagcatcgcgaaccgggcgctgg

SEQ ID NO: 792236 - DNA, 75 bp, synthetic construct
  source 1..75: mol_type = other DNA
ttaacgatctgtcggcattgtatggtgtatctactgtgacaatccgcaacgatctggcgtttctggaaaaacagg

SEQ ID NO: 792237 - DNA, 75 bp, synthetic construct
  source 1..75: mol_type = other DNA
gggtgatcctcgattccgggactaccacttttgagattgctcgtctgatgcgcaagcacactgacgtaattgcga

SEQ ID NO: 792238 - DNA, 75 bp, synthetic construct
  source 1..75: mol_type = other DNA
tgaccaacggtatgaacgtggctaatgctttgctggaagctgagggcgttgagctactgatgaccggcgggcatt

SEQ ID NO: 792239 - DNA, 75 bp, synthetic construct
  source 1..75: mol_type = other DNA
ggcggtagtggagcaaatcacctggcaagtgcagggtgcggacttaccgaaacagggcattcaggggcagggaag

SEQ ID NO: 792240 - DNA, 75 bp, synthetic construct
  source 1..75: mol_type = other DNA
ctgaatgactgggccgagcggaataaagattcccgcaatggcaaagatgtgaagaagttgctggagaagatgtag

SEQ ID NO: 792241 - DNA, 75 bp, synthetic construct
  source 1..75: mol_type = other DNA
ttcaatcgttccagtttacataagatcattgatactcaacgtatcgacatgatcattgttgatgaaggcattcct

SEQ ID NO: 792242 - DNA, 75 bp, synthetic construct
  source 1..75: mol_type = other DNA
cctgagcgaaaaaatttacgaagccttacttaaaatgtatcccaacaaagctgtagaagatttcgagattcaacg

SEQ ID NO: 792243 - DNA, 75 bp, synthetic construct
  source 1..75: mol_type = other DNA
agaactggtaaaccaatcctacagcaacgatatcatcggtagcaacgccagatgctttcgtgaaatcgctcttat

SEQ ID NO: 792244 - DNA, 75 bp, synthetic construct
  source 1..75: mol_type = other DNA
tccggcgtggaagcggcaatcgacctggcgggtatcgttgagcacgtaactctgctggaatttgcgccagaaatg

SEQ ID NO: 792245 - DNA, 75 bp, synthetic construct
  source 1..75: mol_type = other DNA
gatctggcatttctggaaaagcaggggatcgccgtgcgtgcttatggtggcgcgttgatctgcgatagcacgaca

SEQ ID NO: 792246 - DNA, 75 bp, synthetic construct
  source 1..75: mol_type = other DNA
gaatttcgttttactggcgtagcagacggtgccaaccagacgcttgccaatgaagtggaaggagctgctgatgct

SEQ ID NO: 792247 - DNA, 75 bp, synthetic construct
  source 1..75: mol_type = other DNA
tttggattgatgttgggacagcaatagcaaaaattacaggtgttatgtttattccttttttggttgcgccagcaa

SEQ ID NO: 792248 - DNA, 75 bp, synthetic construct
  source 1..75: mol_type = other DNA
ctgttcagcaagggcaaaatcagtcaatgttgccgcgtcctgtcatttcttcgcgcattcatgaaccgccttatc

SEQ ID NO: 792249 - DNA, 75 bp, synthetic construct
  source 1..75: mol_type = other DNA
gagccacataaatcaaataatagatttttatattcagacgtaatgaggtttatagaatcactaaaagacaaatag

SEQ ID NO: 792250 - DNA, 75 bp, synthetic construct
  source 1..75: mol_type = other DNA
tcaattatctttccattgacgatatcgtttacatcaataggtctctgatcgagactcagacgccaaatgagccaa

SEQ ID NO: 792251 - DNA, 75 bp, synthetic construct
  source 1..75: mol_type = other DNA
cacctgttccgctgcgggtttatggcaactggcagcaactcaattacagtctgcaagtggatcagttgctgcgta

SEQ ID NO: 792252 - DNA, 75 bp, synthetic construct
  source 1..75: mol_type = other DNA
cccgcagataccggtgcggtaaccctttgcctgccgcaggacgtgcagggcgaagcctgggattacccgctgagc

SEQ ID NO: 792253 - DNA, 75 bp, synthetic construct
  source 1..75: mol_type = other DNA
caacgattgcttccgcccggtttcccgctactgggaccgcatcaaccgtcctgaacagcttatgagcgcgatgtt

SEQ ID NO: 792254 - DNA, 75 bp, synthetic construct
  source 1..75: mol_type = other DNA
ccgtcagtcgagccatcagtggaagataaaagcgcactgaacaccgcgatgaaacgcagcgttgcgaaagctgcc

SEQ ID NO: 792255 - DNA, 75 bp, synthetic construct
  source 1..75: mol_type = other DNA
tcgcctgcacgactgggctgagcgcaataaagattcccgcaatggcaaagatgtgaagaagttgctggagaagat

SEQ ID NO: 792256 - DNA, 75 bp, synthetic construct
  source 1..75: mol_type = other DNA
taaacgacatgcaaggtcaatcgccggtgttggcactgacaggggaaggctcgttgaatctggcagagcagacct

SEQ ID NO: 792257 - DNA, 75 bp, synthetic construct
  source 1..75: mol_type = other DNA
taatcgcgatcagcgcgatctcacgatatcccttaacggtacggtggatgcttctgattatccgcatgatttaac

SEQ ID NO: 792258 - DNA, 75 bp, synthetic construct
  source 1..75: mol_type = other DNA
cgtaacggcggtgatgtgaaggctgctgaaaacttcgataatgtgacacggcttgaccgttttacgacggatttg

SEQ ID NO: 792259 - DNA, 75 bp, synthetic construct
  source 1..75: mol_type = other DNA
gctcagtgggcaagcgcaggtcacgctgacagagaagccggaatggttgttaagactgcaattcccgcagcttaa

SEQ ID NO: 792260 - DNA, 75 bp, synthetic construct
  source 1..75: mol_type = other DNA
ctggtcgtttgatatctccagcctgaaggtagctgacagtgtgctggtgttccagcatgaaaatgacgagcaggt

SEQ ID NO: 792261 - DNA, 75 bp, synthetic construct
  source 1..75: mol_type = other DNA
gctgggccatgaatttacctcgctggtactggctctgctgtggaccggtggtcatccgtcgaaagaagcgcagtc

SEQ ID NO: 792262 - DNA, 75 bp, synthetic construct
  source 1..75: mol_type = other DNA
caattgcccctttgcagatggcaccaccagcatgcagcaccggctgaagtaagagaaaaatacccttggctggtc

SEQ ID NO: 792263 - DNA, 75 bp, synthetic construct
  source 1..75: mol_type = other DNA
tggcgctctcccctgcattgcctgctatatgcatggagtaatatctaatgaggtgtctctgcaccatatcgccgg

SEQ ID NO: 792264 - DNA, 75 bp, synthetic construct
  source 1..75: mol_type = other DNA
ccgaacgccactcgctcacgtattggtcgcggtcagtacctgacgccaagcgagcataacccggttggtttactg

SEQ ID NO: 792265 - DNA, 75 bp, synthetic construct
  source 1..75: mol_type = other DNA
ttaaattcgatccggtcagtattacagggaatataagagacaagagaataaggtatcgttctttggttaattctc

SEQ ID NO: 792266 - DNA, 75 bp, synthetic construct
  source 1..75: mol_type = other DNA
gcgttagtggaaaactatgagcaagtggatattgaaactaagctgttggttccactaaagaaaacgtacttgcct

SEQ ID NO: 792267 - DNA, 75 bp, synthetic construct
  source 1..75: mol_type = other DNA
ttgtcggactcataatcccaggtataaccgcagcagtcggtgtttataaattattgaatgatgttagttggtttt

SEQ ID NO: 792268 - DNA, 75 bp, synthetic construct
  source 1..75: mol_type = other DNA
ctgagtcgcaatactatcactttgctttacaaagagacggctcagaaggttgacctggatacattagaaaggctt

SEQ ID NO: 792269 - DNA, 75 bp, synthetic construct
  source 1..75: mol_type = other DNA
gagcaggatttttacgccagtggcccgaaccagaagtgggcgggagacatcacatatttacgtacggatgaaggc

SEQ ID NO: 792270 - DNA, 75 bp, synthetic construct
  source 1..75: mol_type = other DNA
gcaaattatcaccggattaattatcgttctggcggtggcattcgacacctatgccaagagccgtcgcggcgcact

SEQ ID NO: 792271 - DNA, 75 bp, synthetic construct
  source 1..75: mol_type = other DNA
gatcatcaaaaaagagtacggcggcctggagttttcagcttatgcccagtctcgtgtgctgcaaaaactctccgg

SEQ ID NO: 792272 - DNA, 75 bp, synthetic construct
  source 1..75: mol_type = other DNA
ttgttggagtcataatttcagccataactgcaccagtcggtgtttataagttatttaaagatgctagttggtttt

SEQ ID NO: 792273 - DNA, 75 bp, synthetic construct
  source 1..75: mol_type = other DNA
tgatggagcgcatcggcctgataccatccgacaccggccagccaggaggtaagcgcgtcggagagtccatgagcc

SEQ ID NO: 792274 - DNA, 75 bp, synthetic construct
  source 1..75: mol_type = other DNA
actcaaggtgaagatacatcaggtctgcgatctattacgctgttaattgatggtgaccggaatgaattgtcgaat

SEQ ID NO: 792275 - DNA, 75 bp, synthetic construct
  source 1..75: mol_type = other DNA
ttagtggctacgtcacttaataccttctccacctttatggtgcatgacaaaactaactacaacattgatgaaccg

SEQ ID NO: 792276 - DNA, 75 bp, synthetic construct
  source 1..75: mol_type = other DNA
ccaaaaatgagttttatctttctgatttaagatctgaataccttaaatcaggggcgtggcctgaggattcagtgg

SEQ ID NO: 792277 - DNA, 75 bp, synthetic construct
  source 1..75: mol_type = other DNA
tcagataaagagggcaatcctgcctgggttgatattccgccactctcagcagaacaacagattgtccaggctgaa

SEQ ID NO: 792278 - DNA, 75 bp, synthetic construct
  source 1..75: mol_type = other DNA
ttggtctgctgccgaacaccaactggctcgaaggcgcagtcgaacgtaaccgcatgggcgagattatcattgatg

SEQ ID NO: 792279 - DNA, 75 bp, synthetic construct
  source 1..75: mol_type = other DNA
aactgcgcagtctgaaaaacgtcgacatcattctgaatgcgcaaaccactgaagtaaaaggcgacggtagcaaag

SEQ ID NO: 792280 - DNA, 75 bp, synthetic construct
  source 1..75: mol_type = other DNA
tggcgggtattgttgaacacgttaccctgcttgagtttgcgccagaaatgaaagccgaccaggttctgcaggaca

SEQ ID NO: 792281 - DNA, 75 bp, synthetic construct
  source 1..75: mol_type = other DNA
cgacaatgacttccggaaaacagcagaggccgtattccgtattacccgggagaaaaataccggcggtgttcagat

SEQ ID NO: 792282 - DNA, 75 bp, synthetic construct
  source 1..75: mol_type = other DNA
atgccacttctcaatgatctgctcgatttcagtgaccatccgcttatgccaccgccctctgcacaactgtttgca

SEQ ID NO: 792283 - DNA, 75 bp, synthetic construct
  source 1..75: mol_type = other DNA
atttctaagagagacattataaataaaaagaaagaaatggagacacgaaagctaacaggtctaaaagattcaaga

SEQ ID NO: 792284 - DNA, 75 bp, synthetic construct
  source 1..75: mol_type = other DNA
ggattgatatcccgccactctccgctgaacaacagattattcaggctgaacagaaaagaacggtattgcgttcta

SEQ ID NO: 792285 - DNA, 75 bp, synthetic construct
  source 1..75: mol_type = other DNA
atgaatatcgctaagcaaaaaaaattcgcccgcgaaattaatctgacaatcgtttgttttaatcgtcttgcgacc

SEQ ID NO: 792286 - DNA, 75 bp, synthetic construct
  source 1..75: mol_type = other DNA
aagcggcggtagtagtaatcaatatcggagtagctcttatgctggccgtggcattaggtatgcttgtagtgatga

SEQ ID NO: 792287 - DNA, 75 bp, synthetic construct
  source 1..75: mol_type = other DNA
ttggtatgatatcttaggcaagaaggcggaaaaaaatttcgatgaggatcaattaataagtcattctggattcga

SEQ ID NO: 792288 - DNA, 75 bp, synthetic construct
  source 1..75: mol_type = other DNA
tcagaaataaaaccaaagtctttgattaaaactttctatgaactccgcagaggtagagcggaggcttttaaatac

SEQ ID NO: 792289 - DNA, 75 bp, synthetic construct
  source 1..75: mol_type = other DNA
gtgaaacaattttctgtctacaagaacaaatcgcgaaataaacaggcgtacccctattttattgatatacaggca

SEQ ID NO: 792290 - DNA, 75 bp, synthetic construct
  source 1..75: mol_type = other DNA
tgacggttacgctttctggtgttccgatttatgacactacaaccccgcagtacaactctgtaagtcgtcaggtag

SEQ ID NO: 792291 - DNA, 75 bp, synthetic construct
  source 1..75: mol_type = other DNA
tcactgaaattccaggggcgttatactgacagtaactatattaagactctctacgcgcaaggattactgccatcc

SEQ ID NO: 792292 - DNA, 75 bp, synthetic construct
  source 1..75: mol_type = other DNA
gcacctaaggcagaatatcagataaaagttacagggaatgaggaatcccagttagaaatgacaagaaagctcgaa

SEQ ID NO: 792293 - DNA, 75 bp, synthetic construct
  source 1..75: mol_type = other DNA
cgattggtcaccaccttggggttatcgattgcctggaagcggcacttacctgcccgtgggatgaatatctggcat

SEQ ID NO: 792294 - DNA, 75 bp, synthetic construct
  source 1..75: mol_type = other DNA
acggtctgttacccggcaatggaagaagtggcgcaggagctgcggttgcgcggcgcgtacgtggagctaaaaagc

SEQ ID NO: 792295 - DNA, 75 bp, synthetic construct
  source 1..75: mol_type = other DNA
gcgtacgtggagctaaaaagcctgccgccggaagagggacaacagttggggcatctggatttgttggtgcatatg

SEQ ID NO: 792296 - DNA, 75 bp, synthetic construct
  source 1..75: mol_type = other DNA
ataaatcccggaacaaacaggcatacccgtattttattgatgtgcaggcagatatgcttgcacaccttaatactc

SEQ ID NO: 792297 - DNA, 75 bp, synthetic construct
  source 1..75: mol_type = other DNA
acgttaacgccagtaataaacatcaaccaggtagattatgtggttctgactactatgataacgacaacggatgca

SEQ ID NO: 792298 - DNA, 75 bp, synthetic construct
  source 1..75: mol_type = other DNA
ctgccggttgtttgtaccaccagtgataaaccggtagaagctctggggccggattactggatgatgaaactgcgg

SEQ ID NO: 792299 - DNA, 75 bp, synthetic construct
  source 1..75: mol_type = other DNA
gatttatgacactacaaacccgcagtacaactctgtaagtcgtcaggtagcggcaggcgatgccgtatctgtagt

SEQ ID NO: 792300 - DNA, 75 bp, synthetic construct
  source 1..75: mol_type = other DNA
tgcccgtgggatgaatatctggcatggattgccactctggaggcgggcagcgaagcccgccgcaaaatggaaggc

SEQ ID NO: 792301 - DNA, 75 bp, synthetic construct
  source 1..75: mol_type = other DNA
ggtttcttctcatgccgcggataaaaaactggttgtggcgacggataccgctttcgttccgtttgaatttaaaca

SEQ ID NO: 792302 - DNA, 75 bp, synthetic construct
  source 1..75: mol_type = other DNA
actgggtactaaccgcgcagacgccgtcctgcacgatacaccaaacattctttacttcatcaaaaccgctggtaa

SEQ ID NO: 792303 - DNA, 75 bp, synthetic construct
  source 1..75: mol_type = other DNA
gcagacctacagggattttgctgagaacaagggcgcgtttcatgccggtgccacaaatattccgctttatggcag

SEQ ID NO: 792304 - DNA, 75 bp, synthetic construct
  source 1..75: mol_type = other DNA
atcggacagccggatagccgtgagctcagagaatgtgcgtctggaaggggattcccgcctgacgtcttctgcact

SEQ ID NO: 792305 - DNA, 75 bp, synthetic construct
  source 1..75: mol_type = other DNA
atggtgattatacggtcagaccggaagggaatcagacctgggtgggcgggggaatcatcgtgaacgacgggcacc

SEQ ID NO: 792306 - DNA, 75 bp, synthetic construct
  source 1..75: mol_type = other DNA
gaagatgaagcccgtttaaaccgtcggatgtgcgaagttgcggaacggatcatcgtggtcaccgattccagtaag

SEQ ID NO: 792307 - DNA, 75 bp, synthetic construct
  source 1..75: mol_type = other DNA
atatcagcaactggaggaagcgatcaagcttaaccagctggaagaaattctcgcgccggttcgccagcgaatcgt

SEQ ID NO: 792308 - DNA, 75 bp, synthetic construct
  source 1..75: mol_type = other DNA
ctgttgaattcgttaaccgtgaccagtggaatgctaaagctggtaaacatactatgactcttaatgtaggtactt

SEQ ID NO: 792309 - DNA, 75 bp, synthetic construct
  source 1..75: mol_type = other DNA
ttgcagtgaagagcggcactggctccgttgattacgcgaagacgaacatcaaaaccaaagatctgcgacagttcc

SEQ ID NO: 792310 - DNA, 75 bp, synthetic construct
  source 1..75: mol_type = other DNA
tggctgcactgaccctggcttttgcggtttcttctcatgccgcggataaaaaattagttgtcgcgacggataccg

SEQ ID NO: 792311 - DNA, 75 bp, synthetic construct
  source 1..75: mol_type = other DNA
ctaaaaaacaacttacggcagaaagcaactataatgaatttataaagttttgtcgctatcaactgatcggactaa

SEQ ID NO: 792312 - DNA, 75 bp, synthetic construct
  source 1..75: mol_type = other DNA
gcctgctgacgctcggcatgctgatgaccaacgggatatccgcgctgcaaaacaccacggtgattatggggctgc

SEQ ID NO: 792313 - DNA, 75 bp, synthetic construct
  source 1..75: mol_type = other DNA
tgtcccgaagctgttgggcgcgaggcgcaggcaaaagcgctcgctggcgtccccgggatgacggtcgggcaggcg

SEQ ID NO: 792314 - DNA, 75 bp, synthetic construct
  source 1..75: mol_type = other DNA
tgagtattaacagcacgcgcgagcagttcgcgcaaaaagtctcggattataccgggctgaaaaaatccagggtgc

SEQ ID NO: 792315 - DNA, 75 bp, synthetic construct
  source 1..75: mol_type = other DNA
tagttcggatgattattcgggagaatatatgacgaatcctttaattcctgaaaaatacactaacattacaaaaga

SEQ ID NO: 792316 - DNA, 75 bp, synthetic construct
  source 1..75: mol_type = other DNA
aacggcctgagcgttccgccagtccggcgacaactggcggcacccaaacgcccgtcgggaccaacgccaattgag

SEQ ID NO: 792317 - DNA, 75 bp, synthetic construct
  source 1..75: mol_type = other DNA
aacggaagcgacaaatatccgtggcctcagcctgtgctgtatcacatttgcctcgagatgcgttcaaaggggatt

SEQ ID NO: 792318 - DNA, 75 bp, synthetic construct
  source 1..75: mol_type = other DNA
ggcggcaactggcggcaccagaacgctcgtcgggaccaacgccagcggagttgctgaaacaggaatatgagcgcc

SEQ ID NO: 792319 - DNA, 75 bp, synthetic construct
  source 1..75: mol_type = other DNA
tctctggcccacaacaatgcaatatcccccgtttgtgcagtctggggtatctgcgggtgcactaaacgggctgat

SEQ ID NO: 792320 - DNA, 75 bp, synthetic construct
  source 1..75: mol_type = other DNA
tcccctccccctatctattagcacgagatatatttcagcttcagtccgcagctaggcaagttggtattatcagag

SEQ ID NO: 792321 - DNA, 75 bp, synthetic construct
  source 1..75: mol_type = other DNA
aagctggcaaaacctcagcagccggtgtatgccatggtaggcgatggttcgtacatgatgctgcactcagagctg

SEQ ID NO: 792322 - DNA, 75 bp, synthetic construct
  source 1..75: mol_type = other DNA
tatcgccagatgtggtcttaccttgaaggcgaaatctcatacgatgaaatggtttatcgaggtgtttgcgccacg

SEQ ID NO: 792323 - DNA, 75 bp, synthetic construct
  source 1..75: mol_type = other DNA
cttgccttccattcgttgcgtgggttatcgccagatgtggtcttaccttgaaggcgaaatctcatacgatgaaat

SEQ ID NO: 792324 - DNA, 75 bp, synthetic construct
  source 1..75: mol_type = other DNA
cggcagtgccgatgtcgaaccctatatgcgcgacattctgcgcgccatcgcgcctgtactgaacggtattcccaa

SEQ ID NO: 792325 - DNA, 75 bp, synthetic construct
  source 1..75: mol_type = other DNA
gcaaatccatttggcctgacggtggatgccgtgatggaggaataccgtcgctggaggaatgaatcctggcggtac

SEQ ID NO: 792326 - DNA, 75 bp, synthetic construct
  source 1..75: mol_type = other DNA
ctggagaaatgaatcctggcgatacgacgggagtgataaatacccgtggccacagcctgtgctgtaccacatttg

SEQ ID NO: 792327 - DNA, 75 bp, synthetic construct
  source 1..75: mol_type = other DNA
ctggcagcacccaaacgtcctgcgggaccaacgccaattgagttgctgaaacaggaatatgaacgccggaaagcg

SEQ ID NO: 792328 - DNA, 75 bp, synthetic construct
  source 1..75: mol_type = other DNA
tgataagtacccgtggtctcagcctgtgctgtatcacatttgcctcgagatgcgttcaaaggggattgaacgcca

SEQ ID NO: 792329 - DNA, 75 bp, synthetic construct
  source 1..75: mol_type = other DNA
tgttatccggcaatggaagaagtggcgcaggaactgcggttgcgcggtgcgtacgtcgagctaaaaagcctgccg

SEQ ID NO: 792330 - DNA, 75 bp, synthetic construct
  source 1..75: mol_type = other DNA
cgaagagcaaaactttgtctatcagatttggccgcagcaatattcggtgccgggctttacctaccgcgcacgtag

SEQ ID NO: 792331 - DNA, 75 bp, synthetic construct
  source 1..75: mol_type = other DNA
gccggtactgacagcctgttccagactggttttgactttagcgatgcgttggatgatgacggcgttcacctggcg

SEQ ID NO: 792332 - DNA, 75 bp, synthetic construct
  source 1..75: mol_type = other DNA
gtcggtggcgtgatgttggcgttgatttgcggttggatagctgcgtggctggatatgcgcgacaggcgagaaagg

SEQ ID NO: 792333 - DNA, 75 bp, synthetic construct
  source 1..75: mol_type = other DNA
cctgagcgttccgccagtacggcgacaactggcggcaccaaaacgcccgttgggaccaacgccaattgagttgct

SEQ ID NO: 792334 - DNA, 75 bp, synthetic construct
  source 1..75: mol_type = other DNA
atttcggaaagcggggccaatccatttggcctgacggtggatgctgtgatggaggagtatcgccgctggcgtaat

SEQ ID NO: 792335 - DNA, 75 bp, synthetic construct
  source 1..75: mol_type = other DNA
gacgaaatgggcaaagcatgttggtaatggcctcagtgttccgccagtccggcgacaactggcagcacccaaacg

SEQ ID NO: 792336 - DNA, 75 bp, synthetic construct
  source 1..75: mol_type = other DNA
caaagcatgttggtaacgggatgagtgttccgccagtgcgacgacaactggaaggggcgaaacacccgcaagggc

SEQ ID NO: 792337 - DNA, 75 bp, synthetic construct
  source 1..75: mol_type = other DNA
gcggcaccaaaacgcccgttgggaccaacgccaattgagttgctgaaacaggagtatgaacgccggaaagcggct

SEQ ID NO: 792338 - DNA, 75 bp, synthetic construct
  source 1..75: mol_type = other DNA
accgatatcgctcttacccaacatcaactgacaccagcgcaactgaccgatgacgaacgccaacgctttgccacc

SEQ ID NO: 792339 - DNA, 75 bp, synthetic construct
  source 1..75: mol_type = other DNA
cgctttaccgaacaaccggtgatccgcgcccatttcgatcaaacccggacgattaaagatctgccgcagccgctg

SEQ ID NO: 792340 - DNA, 75 bp, synthetic construct
  source 1..75: mol_type = other DNA
attcctgttggtgtttccaaagagtatgttgccagagagcttaatcagactgactacggagatttcccttcggta

SEQ ID NO: 792341 - DNA, 75 bp, synthetic construct
  source 1..75: mol_type = other DNA
atgagtcgtagtgagtcacgaaaaacagatgcacaaatccatttccgctgcacagcagaaattaaagatgcattg

SEQ ID NO: 792342 - DNA, 75 bp, synthetic construct
  source 1..75: mol_type = other DNA
gtgcctttgctttgactggtgcattacgcggtaataattcatcaactgctgataatggtatgccgttactgtcac

SEQ ID NO: 792343 - DNA, 75 bp, synthetic construct
  source 1..75: mol_type = other DNA
agggcatctgaaagaagcaacgcttgcgccgttatttaagcgagtaaaggatgtggcagaaggaagagtcagata

SEQ ID NO: 792344 - DNA, 75 bp, synthetic construct
  source 1..75: mol_type = other DNA
aaagcggaaactgaacgaaaaaattggtgaaggatggcagccttatggagcaatgtctgtttcatctgtaagtgg

SEQ ID NO: 792345 - DNA, 75 bp, synthetic construct
  source 1..75: mol_type = other DNA
cgcttattctgacggatgcgtcgaatacagccacgtatgaaacgtggattgacgcgctgacagtggaagtaaaca

SEQ ID NO: 792346 - DNA, 75 bp, synthetic construct
  source 1..75: mol_type = other DNA
ttgcgggatacggtacgctgaacagtgaatggcacacactggagctggtatatccgggaggaggccagaacacgg

SEQ ID NO: 792347 - DNA, 75 bp, synthetic construct
  source 1..75: mol_type = other DNA
tgttaaacgagtggaaagcgggactggggggccccctctcggccagccaggagctgactcaccaggcccttatcc

SEQ ID NO: 792348 - DNA, 75 bp, synthetic construct
  source 1..75: mol_type = other DNA
ctgatgatgcaagcctgatgagaaagggaacagaacatgacagcacgcagagagaagagacaacgacggttgaag

SEQ ID NO: 792349 - DNA, 75 bp, synthetic construct
  source 1..75: mol_type = other DNA
tggcaataccggttcggattcattcagcattctggaagagcaacccgccgccaaagctgatagccatgataattt

SEQ ID NO: 792350 - DNA, 75 bp, synthetic construct
  source 1..75: mol_type = other DNA
acctatctggaacttgagcggctgataagcgatgccaaaccatgtagccgtcacatgatcggcatgtccatcaac

SEQ ID NO: 792351 - DNA, 75 bp, synthetic construct
  source 1..75: mol_type = other DNA
catcagaataaaggaaccaccagtgccgtgcggcgggtggtggaaccgttcggattcctgatccgcattattgag

SEQ ID NO: 792352 - DNA, 75 bp, synthetic construct
  source 1..75: mol_type = other DNA
tcaatgaaaccatcgtttccggcggcactgcgtaccatagcggcgcggtccacgatatcgacacaatgagagtga

SEQ ID NO: 792353 - DNA, 75 bp, synthetic construct
  source 1..75: mol_type = other DNA
atgaatagtctgctgccactgggttcaacttcactggagcgccgacttgcgcaaacctgtagcgggatttctgat

SEQ ID NO: 792354 - DNA, 69 bp, synthetic construct
  source 1..69: mol_type = other DNA
atgcaggatattcacgaagaaagtctgaacgagtcggttaagtcagagcagtcaccgcgggtggtactc

SEQ ID NO: 792355 - DNA, 75 bp, synthetic construct
  source 1..75: mol_type = other DNA
ccttatcgcctgtggcctgttgtgggaagaagaaaacacaccgcccgcacgaccggaaacacacaacgccggctg

SEQ ID NO: 792356 - DNA, 75 bp, synthetic construct
  source 1..75: mol_type = other DNA
gcaggcctggctgcatcagccgggcaaaatcagccacggcttgctgagcgtcagtaacgatgtcggccaggtgga

SEQ ID NO: 792357 - DNA, 75 bp, synthetic construct
  source 1..75: mol_type = other DNA
gaggattgtcttaatcctgtatcgtttatagaggctttaacatcattttcttcacgttttcctgagcttcaggca

SEQ ID NO: 792358 - DNA, 75 bp, synthetic construct
  source 1..75: mol_type = other DNA
cgggacattcccggctacctgttcgccggtagtgtggcttatgacggcgatgtaattacggtttaccccggataa

SEQ ID NO: 792359 - DNA, 75 bp, synthetic construct
  source 1..75: mol_type = other DNA
taagcgatgccaaaccatgtagccgccacatgatcggcatgtccatcaacctgcagaccagcggcccgcattggg

SEQ ID NO: 792360 - DNA, 75 bp, synthetic construct
  source 1..75: mol_type = other DNA
actcacttgaattacatgccgttgcagaaagtcacgtcacacctctttatcagttaacctgcaaaaataaaaact

SEQ ID NO: 792361 - DNA, 75 bp, synthetic construct
  source 1..75: mol_type = other DNA
atgactgaaacgataaaagtaagcgaatcacttgaattacatgctgttgcggaaagtcacgtcacacctctttat

SEQ ID NO: 792362 - DNA, 75 bp, synthetic construct
  source 1..75: mol_type = other DNA
gctgtacttcgtgtcgttttctgtgccggaggaaggtctgaaacgcatgctgcatgaaacccgccagtatggcat

SEQ ID NO: 792363 - DNA, 75 bp, synthetic construct
  source 1..75: mol_type = other DNA
acatggcattcgcctgactaaccacagtctctatctttacggtcgtcactgtgccgaaggcgattgccgcgaaga

SEQ ID NO: 792364 - DNA, 75 bp, synthetic construct
  source 1..75: mol_type = other DNA
tgtatgttgaaacccctgccctgcatcgcttaccggaaaaaaaacgtcgggcaattctcagcgccttacgtctgg

SEQ ID NO: 792365 - DNA, 75 bp, synthetic construct
  source 1..75: mol_type = other DNA
ctgactattcctctggcagcgttgggcgagccggttggcgataaccgctataaggttaaattactgcgtaatggc

SEQ ID NO: 792366 - DNA, 75 bp, synthetic construct
  source 1..75: mol_type = other DNA
ccggtgatcaccctctcccactttgaaatgccgctgcatctggtgcagcaatacggtagctggaccaaccgtaaa

SEQ ID NO: 792367 - DNA, 75 bp, synthetic construct
  source 1..75: mol_type = other DNA
attgatgcccacgttgaaggcgagaagctacaactggatgtctgggataatggctccggtcttccgccaggccag

SEQ ID NO: 792368 - DNA, 75 bp, synthetic construct
  source 1..75: mol_type = other DNA
ccactgtttgagcgggtgctgattaatctgctggagaatgcggtgaagtacgcgggaacgcaggctgaaattggt

SEQ ID NO: 792369 - DNA, 75 bp, synthetic construct
  source 1..75: mol_type = other DNA
attaatgtggtgagtttcgatctcttttttatcgccccacgcggcacgctcgccgtctctgatgtgcaatatctg

SEQ ID NO: 792370 - DNA, 75 bp, synthetic construct
  source 1..75: mol_type = other DNA
gtgatgaaaggcgggacttatactcccgcacaaaccgtaacgttgggagatgagacgtatcaggtgatgagcgcg

SEQ ID NO: 792371 - DNA, 75 bp, synthetic construct
  source 1..75: mol_type = other DNA
cgtgcaaaccgcatgactgtggctcgcaacgtatcgctgtgatgtggtccgagaaatctaatcagatgacggggc

SEQ ID NO: 792372 - DNA, 75 bp, synthetic construct
  source 1..75: mol_type = other DNA
gcgatgaaaaagaaaggatttcgtatccgaccggcaaagaaagctcaatcccgtttaccgctggatgaccatccg

SEQ ID NO: 792373 - DNA, 75 bp, synthetic construct
  source 1..75: mol_type = other DNA
gcattctcgtcgttgccgatgatttcacgggggccaacgacgcgggggtaagtctggcgcaggcggggcatacgg

SEQ ID NO: 792374 - DNA, 75 bp, synthetic construct
  source 1..75: mol_type = other DNA
tggcgcaatgcgttccatacggtcactttctgggcggtgtctggtcccgttcggtgatgacgaaagccggtgggt

SEQ ID NO: 792375 - DNA, 75 bp, synthetic construct
  source 1..75: mol_type = other DNA
gtgcggataacggaaaccgagtttgccagcgatccgaaaaccccggtattgagcgccctaattgcggacatcatc

SEQ ID NO: 792376 - DNA, 75 bp, synthetic construct
  source 1..75: mol_type = other DNA
cactgctgacagaactgaatacgctgctgcgtggcgaactgacaaagcatggcgttgacccacgtatctctctgg

SEQ ID NO: 792377 - DNA, 75 bp, synthetic construct
  source 1..75: mol_type = other DNA
ggcgtaatgtggtagacaacgtggcgttcggcctgcaactggcaggtgtagagaaagtacagcgcctggaaatcg

SEQ ID NO: 792378 - DNA, 75 bp, synthetic construct
  source 1..75: mol_type = other DNA
cgcaccagatgctgaaaaaagtggggctagaaggcgcagaaaaacgctacatttggcagctttccggcggtcaac

SEQ ID NO: 792379 - DNA, 75 bp, synthetic construct
  source 1..75: mol_type = other DNA
accgggagcagagcgtggcgtagtttttcagaatgaagggctgctaccgtggcgcaatgtacaggacaacgtggc

SEQ ID NO: 792380 - DNA, 75 bp, synthetic construct
  source 1..75: mol_type = other DNA
agcaacatcaccacgatcacctgatctgcctcgactgcggcaaggttatcgaatttagtgatgattccatcgaag

SEQ ID NO: 792381 - DNA, 75 bp, synthetic construct
  source 1..75: mol_type = other DNA
atgaaaaaaacagtattaataacagaccttgacaatacactttttgattggttcagcatttggtacaatagtttt

SEQ ID NO: 792382 - DNA, 75 bp, synthetic construct
  source 1..75: mol_type = other DNA
caagattaggattagatggtgtgattgatgtccttttctctcctgaagatcatgaaatccctgatggtgagaaaa

SEQ ID NO: 792383 - DNA, 75 bp, synthetic construct
  source 1..75: mol_type = other DNA
tatatcaggccatcaaaagaatgcgtcgactggagcgtggaaaatatcaaatgcaactatttaaggacgaacaat

SEQ ID NO: 792384 - DNA, 75 bp, synthetic construct
  source 1..75: mol_type = other DNA
catggtgtacaaaaacgttaaccaggcggcgacgcagtattatccctcaccgcaaatcaccgtttatctgcaaaa

SEQ ID NO: 792385 - DNA, 75 bp, synthetic construct
  source 1..75: mol_type = other DNA
attgacgaagtgcggatggatgacagctggtttgcccgtctggcggcgttgaccgggctggtcgggcgcgtttcg

SEQ ID NO: 792386 - DNA, 75 bp, synthetic construct
  source 1..75: mol_type = other DNA
accgggagcagagcggggcgtggtttttcagaatgaagggctgttgccgtggcgtaatgtggtagacaacgtggc

SEQ ID NO: 792387 - DNA, 75 bp, synthetic construct
  source 1..75: mol_type = other DNA
gcaaactctgctgctgaaactctggcaggagacgggcaagcaggtgctgttgattacccacgatatagaagaagc

SEQ ID NO: 792388 - DNA, 75 bp, synthetic construct
  source 1..75: mol_type = other DNA
tcttgtgattgtggccgaaacagttcttttattatggtctgtgattgcgtgtatttttatgatttattgtgaatg

SEQ ID NO: 792389 - DNA, 75 bp, synthetic construct
  source 1..75: mol_type = other DNA
agaatggttcggctatgggcgacttatttttagtgaggtttccaaaaaacttcacagtctgtacaccacagttac

SEQ ID NO: 792390 - DNA, 75 bp, synthetic construct
  source 1..75: mol_type = other DNA
ccgggcggaatgatgtgtctgaattaatggcagccgctgatttattaatgcatcccgcttatcaggaggctgcag

SEQ ID NO: 792391 - DNA, 75 bp, synthetic construct
  source 1..75: mol_type = other DNA
tttggcatcgttaccagaatcgttacgccataatacgttgttgtttgttgttggccaggataaaccgcgtaaatt

SEQ ID NO: 792392 - DNA, 75 bp, synthetic construct
  source 1..75: mol_type = other DNA
tactcatgcttatttcgccattaagttgggctggaaccatgactttccagttccgtaatccaaactttggtggta

SEQ ID NO: 792393 - DNA, 75 bp, synthetic construct
  source 1..75: mol_type = other DNA
ggaaatatgagcgttatctgttcaatgatatttgcattgtttccctgcttgctctttttggtcttgttcttttcg

SEQ ID NO: 792394 - DNA, 75 bp, synthetic construct
  source 1..75: mol_type = other DNA
gctggacgtttattatgccgctgatgtttgttatgccgagaaagtagcgcaggagaaaggctttttctatcgcct

SEQ ID NO: 792395 - DNA, 75 bp, synthetic construct
  source 1..75: mol_type = other DNA
aaactggcgcagtagaactggaaagcccgttcatcctgttggctgacaagaaaatctccaacatccgcgaaatgc

SEQ ID NO: 792396 - DNA, 75 bp, synthetic construct
  source 1..75: mol_type = other DNA
ctcagatccgtcagcagattgaagaagcaacttctgactacgaccgtgaaaaactgcaggaacgcgtagcgaaac

SEQ ID NO: 792397 - DNA, 75 bp, synthetic construct
  source 1..75: mol_type = other DNA
cttcggcgatcgtcgtaaagctatgctgcaggatatcgcaaccctgactggcggtaccgtaatctctgaagagat

SEQ ID NO: 792398 - DNA, 75 bp, synthetic construct
  source 1..75: mol_type = other DNA
atgtccccgatattgatacgcttcgacggatggcggcagagttaaacgtgccgttgaactactttttttgtgatg

SEQ ID NO: 792399 - DNA, 75 bp, synthetic construct
  source 1..75: mol_type = other DNA
atgtccccgatattgatacgcttcgacggatggcgttagagttaaacgtgccgttaaactactttttttgtgatg

SEQ ID NO: 792400 - DNA, 75 bp, synthetic construct
  source 1..75: mol_type = other DNA
atgaaaatgttcaaaggcctcaccaacgaaccggaaacagcttttcatcacattgcagtactgcttgaagcgggg

SEQ ID NO: 792401 - DNA, 75 bp, synthetic construct
  source 1..75: mol_type = other DNA
aaatagtgcccaggcgcagaactcgtataaagatccgagctatgacgatgactttggtattgaaacgccatcagc

SEQ ID NO: 792402 - DNA, 75 bp, synthetic construct
  source 1..75: mol_type = other DNA
aaaaaaacaagatttcttttcagattcatacctacgaacacgatccggcggaaaccaattttggcgatgaagtgg

SEQ ID NO: 792403 - DNA, 75 bp, synthetic construct
  source 1..75: mol_type = other DNA
ttgccgtggccgttacgccggtcgcaggtcaactggatcttaaaaaagtaagcaaaagcgctgggtgccaagaaa

SEQ ID NO: 792404 - DNA, 75 bp, synthetic construct
  source 1..75: mol_type = other DNA
atttatgtttctggtggtaaacgcgggttagatatcgaactggcagcaggcgatctggcgaagatcctcgatgcg

SEQ ID NO: 792405 - DNA, 75 bp, synthetic construct
  source 1..75: mol_type = other DNA
atcacaatgcggggattcctccggcaccgccattgccttcacaaaccgacggtgcaagtgcttctcagggacagc

SEQ ID NO: 792406 - DNA, 75 bp, synthetic construct
  source 1..75: mol_type = other DNA
atgcacttctgtcacagagtggcggattacaacatgggctgggaggattaacgggtagtggtgatagcagcgccg

SEQ ID NO: 792407 - DNA, 75 bp, synthetic construct
  source 1..75: mol_type = other DNA
caacatcacgcaacaaccggacgcaaatgtagatattgactggcagggacaggcatttcgtggaaataaccaaca

SEQ ID NO: 792408 - DNA, 75 bp, synthetic construct
  source 1..75: mol_type = other DNA
ctttagatccaaatggtggtttcttaaaaaatttctatcgccccggcgatgttattttaaatgcctatgataaac

SEQ ID NO: 792409 - DNA, 75 bp, synthetic construct
  source 1..75: mol_type = other DNA
atacgtctgaaggttgttttgatattggtgttctgctcagtaataaagcgtttactgaggatgccattaatatgc

SEQ ID NO: 792410 - DNA, 75 bp, synthetic construct
  source 1..75: mol_type = other DNA
atgaaaacgttattaccaaacgttaatacgtctgaaggttgttttgaaattggtgtcactatcagtaatcctgta

SEQ ID NO: 792411 - DNA, 75 bp, synthetic construct
  source 1..75: mol_type = other DNA
tgactttatccaaagtagccagaatatcgtgctggtgggtggtcccggtactggtaaaacccatctggcaacagc

SEQ ID NO: 792412 - DNA, 75 bp, synthetic construct
  source 1..75: mol_type = other DNA
gctattgatgccagtccggaatgggctgttgaagccgcaagatggacagaacgactcaaacaatggtccgaaact

SEQ ID NO: 792413 - DNA, 75 bp, synthetic construct
  source 1..75: mol_type = other DNA
tttactgaagatgccattaagatgagaaaatatgaaccttatcttctcaatgataattccatactttccagaatt

SEQ ID NO: 792414 - DNA, 75 bp, synthetic construct
  source 1..75: mol_type = other DNA
tacagaaaagcaattgagcgcgatttttgacgatctgatcagcatggtgccaatggggcagacgctgtttggttc

SEQ ID NO: 792415 - DNA, 75 bp, synthetic construct
  source 1..75: mol_type = other DNA
ggatgtgtttatgcaaaagcaaatccgctggctggcacatctcattaaaaaaggggagaatatgccgctggtgct

SEQ ID NO: 792416 - DNA, 75 bp, synthetic construct
  source 1..75: mol_type = other DNA
ggatcatcaccacgctggaaaacaggaaattgattgtcaggcagaaaaaaacactccgggcgacagacaccggct

SEQ ID NO: 792417 - DNA, 75 bp, synthetic construct
  source 1..75: mol_type = other DNA
cgtctcaggccaaagatattgcccgggtgatcggtgctcatcagcggctggataatttttttcagggaaatggcg

SEQ ID NO: 792418 - DNA, 75 bp, synthetic construct
  source 1..75: mol_type = other DNA
gcaggtacatgcgctgattgaaaaagagggcgtccggttccgggcgggctgggtgcctgttgagcagtactgtga

SEQ ID NO: 792419 - DNA, 75 bp, synthetic construct
  source 1..75: mol_type = other DNA
aggggatatttgcgctgtcaccggttctgaggttaaggatatgaaaaccagtccgcccaaaccgttcacggaggg

SEQ ID NO: 792420 - DNA, 75 bp, synthetic construct
  source 1..75: mol_type = other DNA
aaaggcgtctgaggtggtcattgccaccgatgccgaccgcgagggcgaggtgatcgcgcgtgagttgctggaata

SEQ ID NO: 792421 - DNA, 75 bp, synthetic construct
  source 1..75: mol_type = other DNA
gggtggtgctgggggcgctcaggctccagtcattactcaggatgaaattgatgctctacgggaagcagtgacagc

SEQ ID NO: 792422 - DNA, 75 bp, synthetic construct
  source 1..75: mol_type = other DNA
ctgaccgacaataacggtccgtatatcgaactgatgaccggtatttttgccgataaccagcccgattttacctag

SEQ ID NO: 792423 - DNA, 75 bp, synthetic construct
  source 1..75: mol_type = other DNA
gtcaccgcgggtggtgctctgggaaattgacctgacggtgcagggcggtgagcgctattttttctgcaatgagct

SEQ ID NO: 792424 - DNA, 75 bp, synthetic construct
  source 1..75: mol_type = other DNA
gaatgttgtggcgcagctggcggcgggaggaattgcgtttcaggcgcagtgggtgccagcagaggcgtattgtga

SEQ ID NO: 792425 - DNA, 75 bp, synthetic construct
  source 1..75: mol_type = other DNA
tgaacggggtgaacactgccggattagcggttcagaactcaaggatcggatgacgtcacctccggcccattttac

SEQ ID NO: 792426 - DNA, 75 bp, synthetic construct
  source 1..75: mol_type = other DNA
gcgacccgaaactgaaaaaagtgctgcgcgataatgcgggactgggaaccgaagcgacccgggccggggtgctgg

SEQ ID NO: 792427 - DNA, 75 bp, synthetic construct
  source 1..75: mol_type = other DNA
tcggtatctgtataaccttgaggaaggtttcgcacaaacatctctcgataaaaagcaggggtggcacagggcaaa

SEQ ID NO: 792428 - DNA, 75 bp, synthetic construct
  source 1..75: mol_type = other DNA
aaatacccgcgtgtaaacagcggttgtcgttctttatctgttgcccacaaagaatatattagaatgagagataat

SEQ ID NO: 792429 - DNA, 75 bp, synthetic construct
  source 1..75: mol_type = other DNA
accttactcactaacgaaggtatggctgatcatctatgggatatgttttttgagccaataaaacagcgggctcgt

SEQ ID NO: 792430 - DNA, 75 bp, synthetic construct
  source 1..75: mol_type = other DNA
cttcagccctggctactcaagggataccttgctcactaacgagggtatggctgatcatctatgggatatgttttt

SEQ ID NO: 792431 - DNA, 75 bp, synthetic construct
  source 1..75: mol_type = other DNA
tcagttagagaaaggggacagcttctcttttgaggagacggcgctgtacaagaaagtttatcaacttgccgaagc

SEQ ID NO: 792432 - DNA, 75 bp, synthetic construct
  source 1..75: mol_type = other DNA
atgttgttcgaaacagtattaacgaaactctaagccttgctgataacggccagactcttggttttcgtgctctga

SEQ ID NO: 792433 - DNA, 75 bp, synthetic construct
  source 1..75: mol_type = other DNA
agactgtgcatggcatcagttagaattcggcagcattatggcggcgactatcgacggtaaacccatcactaagtt

SEQ ID NO: 792434 - DNA, 75 bp, synthetic construct
  source 1..75: mol_type = other DNA
agcactattgaattgatcttaagatcttgtgctaatatgttcaatgtcaagccaataattctaatttcattccca

SEQ ID NO: 792435 - DNA, 75 bp, synthetic construct
  source 1..75: mol_type = other DNA
tccattgatattcttcaatgaagcctggtatccgagtcagtatcccaaaactgcaagggatttatttgaactcat

SEQ ID NO: 792436 - DNA, 75 bp, synthetic construct
  source 1..75: mol_type = other DNA
atgaagcgtgctgccgttcagtggggaatcggtcggtatctgtataaccttgaggaaggtttcgcacaaacatct

SEQ ID NO: 792437 - DNA, 75 bp, synthetic construct
  source 1..75: mol_type = other DNA
tgagcttgagaagcatctttcccccctgaagcgcatgggtaagatcacgacatggcatgatcgtcgcatcattcc

SEQ ID NO: 792438 - DNA, 75 bp, synthetic construct
  source 1..75: mol_type = other DNA
tactggaaagaaaatactcgtaaaagaatagcagcatgtgccggagagttccaaccatacggagctatccctttg

SEQ ID NO: 792439 - DNA, 75 bp, synthetic construct
  source 1..75: mol_type = other DNA
ttgcatttgttgaagctcatgcgatggctgggcatgtaatagtcaaccaagtggattctaatgcttttaatagct

SEQ ID NO: 792440 - DNA, 75 bp, synthetic construct
  source 1..75: mol_type = other DNA
atactgtgctccaccaatggagttaaacaccatcgcctcatattaagtgagattgtagcacagtgcgaacattat

SEQ ID NO: 792441 - DNA, 75 bp, synthetic construct
  source 1..75: mol_type = other DNA
attaatcaagatatgctgagttataatgatattaacatatataccaatattatttttaaggaattaaatccactg

SEQ ID NO: 792442 - DNA, 75 bp, synthetic construct
  source 1..75: mol_type = other DNA
catataacccaatatcctcatcgaaaactaaagctccccaaacatgggatactcacaactatctaagaaaactat

SEQ ID NO: 792443 - DNA, 75 bp, synthetic construct
  source 1..75: mol_type = other DNA
ttccagatacttctgtcatgcgaacaattaattcagttgattcagcatataacgatgaaaaagttcggtctgtgg

SEQ ID NO: 792444 - DNA, 75 bp, synthetic construct
  source 1..75: mol_type = other DNA
tatgcgacattgtcgttgagtaatgctttcagtattcctccatatcttgaaagttcttatattcaggaatggctt

SEQ ID NO: 792445 - DNA, 75 bp, synthetic construct
  source 1..75: mol_type = other DNA
ctacggatgtatgtagctacatgcaggatgtaatacgtattggtatggaagcaattccagcagctgaatcgaaat

SEQ ID NO: 792446 - DNA, 75 bp, synthetic construct
  source 1..75: mol_type = other DNA
tgccattgctaaggtcaccgggcgggcacgatatactgacgattatgttatggcgggcatgtgttatgcgaaata

SEQ ID NO: 792447 - DNA, 75 bp, synthetic construct
  source 1..75: mol_type = other DNA
tatttttaaggaattaaatccgctggcaatggcccatcctttaaagtcatttcagtatgcatctgtagggacgga

SEQ ID NO: 792448 - DNA, 75 bp, synthetic construct
  source 1..75: mol_type = other DNA
ggggaaaaaaacaaaaaaaacgcagagcatttgttaaaaaacgctcaactggttattcataacttatcaaaaaat

SEQ ID NO: 792449 - DNA, 75 bp, synthetic construct
  source 1..75: mol_type = other DNA
cggtcagcggcagtgcctatcgcgtgacaattccagccgtactgcaaatcgcctgcctgcgccggatggttagtg

SEQ ID NO: 792450 - DNA, 75 bp, synthetic construct
  source 1..75: mol_type = other DNA
actggaacaatttctgcgtaacacctggaagaaaatggacgaggaacataagcaggagtttctgcacgcggtcga

SEQ ID NO: 792451 - DNA, 75 bp, synthetic construct
  source 1..75: mol_type = other DNA
tcgatggaaggacatcccgagcgacaccgccgcaactggcagctgattgccggagaattacagcattttggtggc

SEQ ID NO: 792452 - DNA, 75 bp, synthetic construct
  source 1..75: mol_type = other DNA
atgttgtcgtgcaatgatgtatttatacaaatggctgcttatggtatgcagtatgaaggcgcaaaaaaatcagtt

SEQ ID NO: 792453 - DNA, 75 bp, synthetic construct
  source 1..75: mol_type = other DNA
cagcttatgtcatctgcgacaggagcctattttggcggactgggaaaaacaacaaacgctgttcgttcaagcgtg

SEQ ID NO: 792454 - DNA, 75 bp, synthetic construct
  source 1..75: mol_type = other DNA
ccccgctggtatatcccggtgaccgatgctgctgatttgtgttatctgctgctgtggctggctgagttaaagtga

SEQ ID NO: 792455 - DNA, 75 bp, synthetic construct
  source 1..75: mol_type = other DNA
atggtgcatttttacaggctggaatatattttgaaaaacatccagaaaaaatgttgtcgtgcaatgatgtattta

SEQ ID NO: 792456 - DNA, 75 bp, synthetic construct
  source 1..75: mol_type = other DNA
gaagcgacaaaccacctggaacaacttggggacagacctctactgctgtggcatggcctcgacgatgacgttgtg

SEQ ID NO: 792457 - DNA, 75 bp, synthetic construct
  source 1..75: mol_type = other DNA
ggataaacagttaacctgttcatggcagccaggcgtgcgccaccgtattacacccgaggcgttagatgccgctgt

SEQ ID NO: 792458 - DNA, 75 bp, synthetic construct
  source 1..75: mol_type = other DNA
ggataaacagttaacctgttcatggcagccaggcgtgcgccaccgtattacacctgaggcgttagataccgccgt

SEQ ID NO: 792459 - DNA, 75 bp, synthetic construct
  source 1..75: mol_type = other DNA
aatttcagcaattccaatcttaaaaatgcatcatttaaaggatcttcatatatacaatatcctccaattttgaac

SEQ ID NO: 792460 - DNA, 75 bp, synthetic construct
  source 1..75: mol_type = other DNA
ttaaatggctgtaattcattaaatgaatcgcaatgtcaattccttgcatatgatgtcagtcaaggccgtgcctgc

SEQ ID NO: 792461 - DNA, 75 bp, synthetic construct
  source 1..75: mol_type = other DNA
ttaattgaagaaattaaaaagagacatcttgcaacaatgaacaccgatctcagtttcgatgccctatctgcaggt

SEQ ID NO: 792462 - DNA, 75 bp, synthetic construct
  source 1..75: mol_type = other DNA
tgagtaatgctttcagtattcctccatatcttgaaagttcttatattcagggatggcttcaggatatatccggtc

SEQ ID NO: 792463 - DNA, 75 bp, synthetic construct
  source 1..75: mol_type = other DNA
cactggcggcgcaaattcaggacggcgcaaccattgccattagcggtaacggcggcggcatggtggaagccgacc

SEQ ID NO: 792464 - DNA, 75 bp, synthetic construct
  source 1..75: mol_type = other DNA
aatcaaataaatcaattttattgactatgaatacatctgatgataagtataaccatgataaagtaagggccgctg

SEQ ID NO: 792465 - DNA, 75 bp, synthetic construct
  source 1..75: mol_type = other DNA
ctaaaaaaatattagaattaaatcacaaaggggaccatgaactatttagcgcaacaagttttgacaacaaaaacc

SEQ ID NO: 792466 - DNA, 75 bp, synthetic construct
  source 1..75: mol_type = other DNA
gaacttaaagcaaaatattctacctactcgtgagcgcgccagtttaatcctgacaaagagtgctaatcacgcggt

SEQ ID NO: 792467 - DNA, 75 bp, synthetic construct
  source 1..75: mol_type = other DNA
aggacatggtcgcgcaggcgaatgcgcaacttaagctgacggctcctgaatccaacctggaagtgagttatcaaa

SEQ ID NO: 792468 - DNA, 75 bp, synthetic construct
  source 1..75: mol_type = other DNA
agcaatggggcagatgttccgtctgaccaccttgcaggacaataccatcaccaccagcctgcaatatgctaacgg

SEQ ID NO: 792469 - DNA, 75 bp, synthetic construct
  source 1..75: mol_type = other DNA
gtggattctggttgcaaacggctggatgcaaaacccaatcgcgtccgatttcaactttgaaactatgcgtatgga

SEQ ID NO: 792470 - DNA, 75 bp, synthetic construct
  source 1..75: mol_type = other DNA
catggtggcgtgtggcttcctgctgctggcaatcatcgcgctctctttctggagtgtcatccgaaaccgcattgg

SEQ ID NO: 792471 - DNA, 75 bp, synthetic construct
  source 1..75: mol_type = other DNA
gttttattggtcacattttatgcgacacgatgaagaaacagccgaacggagggcagattagcacactttttcaac

SEQ ID NO: 792472 - DNA, 75 bp, synthetic construct
  source 1..75: mol_type = other DNA
tgcctttactctgttcggcattcctgatcaggaagaggagacgaacaaatttgcgatccagatcccttacgcgct

SEQ ID NO: 792473 - DNA, 75 bp, synthetic construct
  source 1..75: mol_type = other DNA
gccggaaagctgacctttaacattgacgggctggcacgggttattgcgccgctacgcgacgcctgccactgggcg

SEQ ID NO: 792474 - DNA, 75 bp, synthetic construct
  source 1..75: mol_type = other DNA
gctgactgtggacacaagtgcagacaacgccgccggaaaactgacctttaatattgacgggctggcaaagatgat

SEQ ID NO: 792475 - DNA, 75 bp, synthetic construct
  source 1..75: mol_type = other DNA
gaccatttcagtggaaggcaaagaactggcactgctggaaggcatggagatcagcggtaaatcggatctggtcaa

SEQ ID NO: 792476 - DNA, 75 bp, synthetic construct
  source 1..75: mol_type = other DNA
accaaaaactgtcactggaaaaaatgaccatttcagtggaaggcaaagaactggcactgctggaaggcatggaga

SEQ ID NO: 792477 - DNA, 75 bp, synthetic construct
  source 1..75: mol_type = other DNA
accaacatttcatttattaagaaaatacccggtacagatgatcagataacgataaacatgcacctggtggaatcg

SEQ ID NO: 792478 - DNA, 75 bp, synthetic construct
  source 1..75: mol_type = other DNA
cccggatggattgaccctgagacttttaaactcaatgaacatgctgaaactgtacgcttgattttcaaactgctg

SEQ ID NO: 792479 - DNA, 75 bp, synthetic construct
  source 1..75: mol_type = other DNA
aaatcaccatacctacaaacccgttaccgctaaatgatggaacatcaatctttgaaattgctgataaagagctac

SEQ ID NO: 792480 - DNA, 75 bp, synthetic construct
  source 1..75: mol_type = other DNA
tacaaacccgttaccgctaaatgatgggtcaccaatctttgaaattgctgataaagagctactggatattgacgc

SEQ ID NO: 792481 - DNA, 75 bp, synthetic construct
  source 1..75: mol_type = other DNA
cgattaacatcttcaagggattattccggtgtcagtgtggggctagtgtccatcctaccggaaccaagaataagt

SEQ ID NO: 792482 - DNA, 75 bp, synthetic construct
  source 1..75: mol_type = other DNA
agtaagactatgcaaacaataccaatcaaacattaatgaaaaaataatagattctatatcaaaaaaaataattca

SEQ ID NO: 792483 - DNA, 75 bp, synthetic construct
  source 1..75: mol_type = other DNA
agatgcttcaacgttcaataaagctcaagagattcttactaagaatcgtaaaggccgtacacctgcaagtgataa

SEQ ID NO: 792484 - DNA, 75 bp, synthetic construct
  source 1..75: mol_type = other DNA
tcatcaagagtctaagcagaagtctttccgtgttagccagaagtggaaacaacgtgcaaagcttgcccttgctgg

SEQ ID NO: 792485 - DNA, 75 bp, synthetic construct
  source 1..75: mol_type = other DNA
acgcgaactggcttccagtgcgccgggcagcagcgaaagcggtgacatgcagtttcacctcgccattgccgaagc

SEQ ID NO: 792486 - DNA, 75 bp, synthetic construct
  source 1..75: mol_type = other DNA
attctcgaacgttgacgatatttattttgacggctatctgtttgattcatggccgctggataaagtcgacgcctg

SEQ ID NO: 792487 - DNA, 75 bp, synthetic construct
  source 1..75: mol_type = other DNA
gtccggatgccaacgtctgcaacgatgccggtccttttgagcttttacaggcgcggcagttattggagagcaaca

SEQ ID NO: 792488 - DNA, 75 bp, synthetic construct
  source 1..75: mol_type = other DNA
gattgcagcgttacagcatgaggttgaaattgtcacatctcgaatcaagaaagctaccgccctacttcttgaaat

SEQ ID NO: 792489 - DNA, 75 bp, synthetic construct
  source 1..75: mol_type = other DNA
tgataacccattaacgattaacatcttcaagggattattccggtgtcagtgtggggctagtgttcaccctacagg

SEQ ID NO: 792490 - DNA, 75 bp, synthetic construct
  source 1..75: mol_type = other DNA
tggacaggtttccgccttaccagcctaagcctggcgctgtgctaagccctacaggaaaaggctatattgacgacg

SEQ ID NO: 792491 - DNA, 75 bp, synthetic construct
  source 1..75: mol_type = other DNA
atgccggagccggggtggggaaggatcaccgattcacaccagtggaacaccttgctaagcttgcataacgcgcag

SEQ ID NO: 792492 - DNA, 75 bp, synthetic construct
  source 1..75: mol_type = other DNA
gcgcactggagctcaactggacgcttcccggtcagccggataacacgccgccaggtggtgaactggtgtttgaac

SEQ ID NO: 792493 - DNA, 75 bp, synthetic construct
  source 1..75: mol_type = other DNA
gtgcaaaaccatcatcggtttcggttccccgaacaaagccggtactcacgactcccacggtgcgccgctgggtga

SEQ ID NO: 792494 - DNA, 75 bp, synthetic construct
  source 1..75: mol_type = other DNA
cacagaacgcaaaatcttttagttatacaacgattaatgattatggcggaaaaaaccctattatagatattaaat

SEQ ID NO: 792495 - DNA, 75 bp, synthetic construct
  source 1..75: mol_type = other DNA
aaaaagtaaaagtttcattataactccaattctttacagagtattgcctaatgaaagtattcaattaaaaatcga

SEQ ID NO: 792496 - DNA, 75 bp, synthetic construct
  source 1..75: mol_type = other DNA
attaaaagaaaatttccctaacgacagggagagtatatttcatatcaacgtcatggctattcctccgatcacaga

SEQ ID NO: 792497 - DNA, 75 bp, synthetic construct
  source 1..75: mol_type = other DNA
aaaaccaggaacgttagatgccggtaattatgagggacgcctgaatattgttttgactcaaagtaccaatactta

SEQ ID NO: 792498 - DNA, 75 bp, synthetic construct
  source 1..75: mol_type = other DNA
gcgcgcagacgaaaaccaggccattcgtttacccggtcacgaattcactaccctgctggcagaaaaccgccgtaa

SEQ ID NO: 792499 - DNA, 75 bp, synthetic construct
  source 1..75: mol_type = other DNA
aaatttttattgccattgaagtggacaagcttatcgacggtcccacccgcgatgccaagctgcaacgcatcatgg

SEQ ID NO: 792500 - DNA, 75 bp, synthetic construct
  source 1..75: mol_type = other DNA
ccttcggtgaatctgctcctgcagagcaactgtttgaagagttcggtttcaccgttgacaacgttgttgcgaaag

SEQ ID NO: 792501 - DNA, 75 bp, synthetic construct
  source 1..75: mol_type = other DNA
atggcgattgcagaaaaaacgctggcggcgcagtttaaccgtccgggccacgacattgtcgaccactacacctat

SEQ ID NO: 792502 - DNA, 75 bp, synthetic construct
  source 1..75: mol_type = other DNA
aacgcctagatcgttagatgcgggtcattatgaggggcgcctgaatattgctttgacccaaagcactaatactta

SEQ ID NO: 792503 - DNA, 75 bp, synthetic construct
  source 1..75: mol_type = other DNA
tattacataacactggataatgtaagagttgataatcgggatgttaagtcaatttccgactttatggttgagcct

SEQ ID NO: 792504 - DNA, 75 bp, synthetic construct
  source 1..75: mol_type = other DNA
atgaaaaaaacattactcgccgccgcactggtgatggtttctggttccgctttggctgtagatggtggtcatatt

SEQ ID NO: 792505 - DNA, 75 bp, synthetic construct
  source 1..75: mol_type = other DNA
gagatatatttttcacaaagaaatagttaagctaaataaaaaattgagcgaaattgaaaatagaacatcttccgg

SEQ ID NO: 792506 - DNA, 75 bp, synthetic construct
  source 1..75: mol_type = other DNA
tctcaggcgcgtcgccctttcctgttggcaaatacacgcaatttagaccgtgaaccgatcggtttgatggatatt

SEQ ID NO: 792507 - DNA, 75 bp, synthetic construct
  source 1..75: mol_type = other DNA
tccaaaaagtcatgtatactaatgggtttgaaattattaccttagatagaactgtatgggagttacgcagatact

SEQ ID NO: 792508 - DNA, 75 bp, synthetic construct
  source 1..75: mol_type = other DNA
atgctagaagtagaattacggaaaattgagcactcaaggaatgtaccgccacataaatataaaatcacagatggt

SEQ ID NO: 792509 - DNA, 75 bp, synthetic construct
  source 1..75: mol_type = other DNA
agttaacgcgactgcagttggtttgttgccaaaagaatttatgatttctgtaaattgtgaacctggtaagacaga

SEQ ID NO: 792510 - DNA, 75 bp, synthetic construct
  source 1..75: mol_type = other DNA
tacacactctgccagacacttcccgtcccgacccgttgtttaatccccttaaaaccggtatttgccaactggata

SEQ ID NO: 792511 - DNA, 75 bp, synthetic construct
  source 1..75: mol_type = other DNA
gtttccatgccgtctaccgacgcattcgacaagcaggacgcggcttaccgtgaatccgtactgccgaaagcggtt

SEQ ID NO: 792512 - DNA, 75 bp, synthetic construct
  source 1..75: mol_type = other DNA
tcctgtggcgtgatttcctgaaacacaacccgcagaatccgtcctgggctgaccgtgaccgcttcgtgctgtcca

SEQ ID NO: 792513 - DNA, 75 bp, synthetic construct
  source 1..75: mol_type = other DNA
tctgattcgccattagccgcaggtaaaccattaactcgcgcgacggacaatgcatcggttactgtaaaagaacaa

SEQ ID NO: 792514 - DNA, 75 bp, synthetic construct
  source 1..75: mol_type = other DNA
acaaatgacggtagagaatgttaacactgccgttaaacaatatctttctcatccggtaaatacctataccggagt

SEQ ID NO: 792515 - DNA, 75 bp, synthetic construct
  source 1..75: mol_type = other DNA
acggcctggagaagtaaaactaactcttgccggatgtaaggaaataaacgcgcagggtatgtgttcgctggtggg

SEQ ID NO: 792516 - DNA, 75 bp, synthetic construct
  source 1..75: mol_type = other DNA
attttacgcacccacgcagcaatgagcgtacttgggcatggtttgctgcgcggcgcggggctgggaggccctgta

SEQ ID NO: 792517 - DNA, 75 bp, synthetic construct
  source 1..75: mol_type = other DNA
tgcacctgtgggatacctggcaattgcaaaagtccctgtggcgattaatcagggatatattgccatgaagtgtaa

SEQ ID NO: 792518 - DNA, 75 bp, synthetic construct
  source 1..75: mol_type = other DNA
ttctgcaaacatgccagaaattatatctcgcgcaagtggtaccacctttgctgaaattggtgatgctgccaactt

SEQ ID NO: 792519 - DNA, 75 bp, synthetic construct
  source 1..75: mol_type = other DNA
gcaaaattagatgttttggaatctggtggttcggaagaagaagcattatgtgctgctatggctgttatttctgga

SEQ ID NO: 792520 - DNA, 75 bp, synthetic construct
  source 1..75: mol_type = other DNA
ctcgaaggcgtgttaagccgctggctgctgctgaagaataacgtcatgccagaggcggcaaccggtaccacggcc

SEQ ID NO: 792521 - DNA, 75 bp, synthetic construct
  source 1..75: mol_type = other DNA
acgtataacgggtttgccggatgagcagcctgtgaaatcgtttttccgcagattatctcaggagtgtggttttca

SEQ ID NO: 792522 - DNA, 75 bp, synthetic construct
  source 1..75: mol_type = other DNA
ctgcgggatgttaatccggatgaaagatggattgatctgtgttcggagggaagtaagacacaccatgagtggcgt

SEQ ID NO: 792523 - DNA, 75 bp, synthetic construct
  source 1..75: mol_type = other DNA
aggttttcaacatatcgactatgcgcttggctgcacgggccatgtcgattgtgaagtgcggatgctgcgcgaact

SEQ ID NO: 792524 - DNA, 75 bp, synthetic construct
  source 1..75: mol_type = other DNA
gaagcgacaaaccaccgggaagagctgggaaacagaccactgcttttatggcatggtcttgatgatgatgtcgta

SEQ ID NO: 792525 - DNA, 75 bp, synthetic construct
  source 1..75: mol_type = other DNA
ccgttaccgtgcgtgattttttatcacggctttacttcgtccagtctggtgtatagctattttgccgttgcgctg

SEQ ID NO: 792526 - DNA, 75 bp, synthetic construct
  source 1..75: mol_type = other DNA
gattttccgtcagtacctcgctcccgcgctgggtgtaactcaccgctttgtcggtactgaacccttttgtcgcgt

SEQ ID NO: 792527 - DNA, 75 bp, synthetic construct
  source 1..75: mol_type = other DNA
ctgacgccaatggtacgcagcatattggccttcatccgatcccggatcgttccggcctgtggcgctatctcagca

SEQ ID NO: 792528 - DNA, 75 bp, synthetic construct
  source 1..75: mol_type = other DNA
tgcaccctaaaccggaagatgaatctcgcgtcagtgcctcattacgttcagcgattcaaaaatccggcatggtat

SEQ ID NO: 792529 - DNA, 75 bp, synthetic construct
  source 1..75: mol_type = other DNA
aagccgctggctgttgctgaaaaataccggacaggatatggcaacggacaacagcaccgtgccagtccttccgac

SEQ ID NO: 792530 - DNA, 75 bp, synthetic construct
  source 1..75: mol_type = other DNA
atgcaggatgtcaccccagacgcatggccaacctggccggtaaaactgggttggctgacaccgcgcggtggtgag

SEQ ID NO: 792531 - DNA, 75 bp, synthetic construct
  source 1..75: mol_type = other DNA
ttgacgccccatccaccgcaaaaacaggcgtatggtgtgatattacccacttcagtgctgtttatcgccggacac

SEQ ID NO: 792532 - DNA, 75 bp, synthetic construct
  source 1..75: mol_type = other DNA
cgtctgacttcgacgcgaaagcgaaagagttcattgctaaactgcaggctaatccggctaaaattgccagccgta

SEQ ID NO: 792533 - DNA, 75 bp, synthetic construct
  source 1..75: mol_type = other DNA
atgaatgttgtcgcttctcccgcactccgtttgcgcaaacttaccgtcgccgataatcccgctatcgcccgcgtc

SEQ ID NO: 792534 - DNA, 75 bp, synthetic construct
  source 1..75: mol_type = other DNA
gggatagcgccattaacaggtagtgaagcggacatttgcgaactgcagaaaatgtactttcttcccgccattcgc

SEQ ID NO: 792535 - DNA, 75 bp, synthetic construct
  source 1..75: mol_type = other DNA
aggttttcaacatatcgactatgcacttggctgcacgggccatgtcgattgtgaagtgcggatgctacgcgaact

SEQ ID NO: 792536 - DNA, 75 bp, synthetic construct
  source 1..75: mol_type = other DNA
caggctaaggaggctgcgtggaaccagcagtttgccacatacgcgaaagcgttccccgagctggcagatgaattt

SEQ ID NO: 792537 - DNA, 75 bp, synthetic construct
  source 1..75: mol_type = other DNA
atgggcacgcagcattccaattatcgttatatcagctatagtcctcttactcgttattaataatcgcaacaatac

SEQ ID NO: 792538 - DNA, 75 bp, synthetic construct
  source 1..75: mol_type = other DNA
atataaaaaacgcgcattgggtttgttgatattaacgcttggtattatgggggttggactcagtgatgtgatcat

SEQ ID NO: 792539 - DNA, 75 bp, synthetic construct
  source 1..75: mol_type = other DNA
tggaagaactgaaaaacttccgtcagctgcactctaaaactccgggccacccggaagtgggctacaccgcaggtg

SEQ ID NO: 792540 - DNA, 75 bp, synthetic construct
  source 1..75: mol_type = other DNA
cgaagatggctcaactcaccagccggttgagcaggttgcttctctgcgcgtgaccccgaacatgtctacatggcg

SEQ ID NO: 792541 - DNA, 75 bp, synthetic construct
  source 1..75: mol_type = other DNA
aaccccgcgtgggccaaccgcgaccgttttgtactctccaacggtcacggctcaatgctgctctacagcctgctg

SEQ ID NO: 792542 - DNA, 75 bp, synthetic construct
  source 1..75: mol_type = other DNA
tggacaaaatgtccagcctgtctggagaggatttcagacgattgcgtaagctgattggggttactcaatcgcagt

SEQ ID NO: 792543 - DNA, 75 bp, synthetic construct
  source 1..75: mol_type = other DNA
tgagaaatgggtgacggatacggatgcacagcatagcgtcgcagtagaagcggcagaagcacagcgccagtcact

SEQ ID NO: 792544 - DNA, 75 bp, synthetic construct
  source 1..75: mol_type = other DNA
tgagaaatgggtgacggatacggatgcacagcatagcgacgcagtagaagctgcagaagcacagcgccagtcact

SEQ ID NO: 792545 - DNA, 75 bp, synthetic construct
  source 1..75: mol_type = other DNA
tgagaaatgggtgacggataccgatgcacagcatagcgtcgcagtagaagccgcagaagcacagcgccagtcact

SEQ ID NO: 792546 - DNA, 75 bp, synthetic construct
  source 1..75: mol_type = other DNA
ccgcagaagcacagcgccagtcgctgattgatgctgcaatggcttccattagtctgattcaactgaaattacagg

SEQ ID NO: 792547 - DNA, 75 bp, synthetic construct
  source 1..75: mol_type = other DNA
ctgcagaagcacagcgccagtcgctgattgatcctgcaatggcttccattagtctgattcaactgaaatttcagg

SEQ ID NO: 792548 - DNA, 75 bp, synthetic construct
  source 1..75: mol_type = other DNA
cagcagaagcacagcgccagtcgctgattgatgctgcaatggcttccattagtctgattcaactgaaattccagg

SEQ ID NO: 792549 - DNA, 75 bp, synthetic construct
  source 1..75: mol_type = other DNA
atgcgtcccgcgactatcgcccctttaacgccatacgataaatgggatggtgagaaatgggtgaccgatactgaa

SEQ ID NO: 792550 - DNA, 75 bp, synthetic construct
  source 1..75: mol_type = other DNA
atgcgtcccgcgactatcgccccattatcgccatacgataaatgggatggtgagaaatgggtgaccgatactgaa

SEQ ID NO: 792551 - DNA, 75 bp, synthetic construct
  source 1..75: mol_type = other DNA
agaacgaggcgaagcgtcggttaaatgactgggcggaacgcaataagaatacccagtccggtaaagacgtgaagc

SEQ ID NO: 792552 - DNA, 75 bp, synthetic construct
  source 1..75: mol_type = other DNA
tgagaaatgggtgacggatacagatgcacagcatagcggcgcagtagaagctgcagaagcacagcgccagtcact

SEQ ID NO: 792553 - DNA, 75 bp, synthetic construct
  source 1..75: mol_type = other DNA
tgagaaatgggtgacggatacagatgcacagcatagcgtcgcagtagaagcagcagaagcacagcgccagtcact

SEQ ID NO: 792554 - DNA, 75 bp, synthetic construct
  source 1..75: mol_type = other DNA
atgcgtcccgcgactatcgccccgttagcgccatacgataaatgggatggtgagaaatgggtgactgatactgaa

SEQ ID NO: 792555 - DNA, 75 bp, synthetic construct
  source 1..75: mol_type = other DNA
cggcagaagcacagcgccagtcgctgattgatactgcaatggcttccattagtctgattcaactgaaattgcagg

SEQ ID NO: 792556 - DNA, 75 bp, synthetic construct
  source 1..75: mol_type = other DNA
gtcacttaaaaaactcaggccgaagtcggtaacctcgcgcatacacccgggcagtgatgtgattgtctgcgctga

SEQ ID NO: 792557 - DNA, 75 bp, synthetic construct
  source 1..75: mol_type = other DNA
caatgttgaaactgcaataatgtcccatttaggaacgccccccacggcaacaccactagccgtagaacagccatc

SEQ ID NO: 792558 - DNA, 75 bp, synthetic construct
  source 1..75: mol_type = other DNA
acgctttaccacaccggaacgattttgattcaaggctcacaagcggcaaaaccagaggttgaagccattattaat

SEQ ID NO: 792559 - DNA, 75 bp, synthetic construct
  source 1..75: mol_type = other DNA
cctgatgactgtggtctggtggttattcccggttcacgcggtgattactccaggctggttcagcccgtcaggagt

SEQ ID NO: 792560 - DNA, 75 bp, synthetic construct
  source 1..75: mol_type = other DNA
tcatcaacgctgaactgtttgcactggcaggtctggatgcacaacatctgcaactgttggttcatagcggctcgc

SEQ ID NO: 792561 - DNA, 75 bp, synthetic construct
  source 1..75: mol_type = other DNA
cagcagctcctgggcggcgcaccgtttattatcagcggtgcctgcgggatgttccgtactgatgtattgcgtaag

SEQ ID NO: 792562 - DNA, 75 bp, synthetic construct
  source 1..75: mol_type = other DNA
aatcaccagatatttaaaggtgcaccatttaagaaaatatatcgtggtacgcggcttgtttctcagcgggcttta

SEQ ID NO: 792563 - DNA, 75 bp, synthetic construct
  source 1..75: mol_type = other DNA
cctgacttaaccctgtgctggattacattgacgcggtgacggcaacagataccagcaccgcgccggatgtcatct

SEQ ID NO: 792564 - DNA, 75 bp, synthetic construct
  source 1..75: mol_type = other DNA
ttatggcctttatggggtgctttattagtcggtgaaattattgccatcataggcttaatcatatttttcaaattt

SEQ ID NO: 792565 - DNA, 75 bp, synthetic construct
  source 1..75: mol_type = other DNA
tttattatcagcggtgcctgcgggatgttccgtaccgatgtgctgcgtaaattcggtttttcggaccgtaccaaa

SEQ ID NO: 792566 - DNA, 75 bp, synthetic construct
  source 1..75: mol_type = other DNA
ttatctgggtcggcgtagtttgtgttattggtgcttttagcgcctggtttcatcgttgctggttgttggtgcctt

SEQ ID NO: 792567 - DNA, 75 bp, synthetic construct
  source 1..75: mol_type = other DNA
tctcaaagcggcgttggcggcattcgataacatggatgaagctgagaaaaaccgctggattttggaatccgcgaa

SEQ ID NO: 792568 - DNA, 75 bp, synthetic construct
  source 1..75: mol_type = other DNA
cccggcagtgaaaggtggcgaagggcatcagagcgttttcccgccggatgtaacggcggtgtttgatcacggcaa

SEQ ID NO: 792569 - DNA, 75 bp, synthetic construct
  source 1..75: mol_type = other DNA
gggcgaacaaaaaaccgcacagcaactgtttagtgaaatgaaacagtgggcgcaagagatggctagactggcccc

SEQ ID NO: 792570 - DNA, 75 bp, synthetic construct
  source 1..75: mol_type = other DNA
ctgtttagtgaaatgaaacagtgggcgcaagagatggcgaaaaccagtatcgaagcggatttctttgccgtctcg

SEQ ID NO: 792571 - DNA, 75 bp, synthetic construct
  source 1..75: mol_type = other DNA
ttaaactccagcgtagcgagcgggggattgagtgggggctgtatgccatctctccgttgaacggataccgtctgg

SEQ ID NO: 792572 - DNA, 75 bp, synthetic construct
  source 1..75: mol_type = other DNA
acctgcgcggcgtggcgctggacccgctggattatcgctgtaacctggcgttggcgatgctggaatataaccgcg

SEQ ID NO: 792573 - DNA, 75 bp, synthetic construct
  source 1..75: mol_type = other DNA
gcaggcgatatgcgccaacgcgcagggcgatgaaactgaagcgatgcgttgtttacgtctggcggcgaccggcga

SEQ ID NO: 792574 - DNA, 75 bp, synthetic construct
  source 1..75: mol_type = other DNA
atatcgaactgatgaccggtatttttgccgataaccagcctgattttacctggcttgatgcttacgaagagaagc

SEQ ID NO: 792575 - DNA, 75 bp, synthetic construct
  source 1..75: mol_type = other DNA
cgatccgcgaaatcggcaaatgcaacgcgttacttgatgatgccgtggcactgatgcctgcgaccgccatccagg

SEQ ID NO: 792576 - DNA, 75 bp, synthetic construct
  source 1..75: mol_type = other DNA
acctgcgcggcgtggcgttggatccactcgattatcgctgcaacctggcgctggcgatgctggaatataaccgcg

SEQ ID NO: 792577 - DNA, 75 bp, synthetic construct
  source 1..75: mol_type = other DNA
tgccactcaggcgctgaaacgcgcacatgcgctgaacaaaaatccgcagtgcggacaggcgagtttgattcgcgc

SEQ ID NO: 792578 - DNA, 75 bp, synthetic construct
  source 1..75: mol_type = other DNA
ccagcgaccgccatccagggcgtgttgcacggtatcaatcctgaaaggctgaccattgagctctccgatgccgac

SEQ ID NO: 792579 - DNA, 75 bp, synthetic construct
  source 1..75: mol_type = other DNA
cctgatgaccgccgggcaactgattaactggggaatgcccgccctggcggcagagatgctgaacgcactggactg

SEQ ID NO: 792580 - DNA, 75 bp, synthetic construct
  source 1..75: mol_type = other DNA
tgaaagatttactcttgtttcagaagaaaaccatgagatggaatctcaaagtgaagatgagttaaaagccgatat

SEQ ID NO: 792581 - DNA, 75 bp, synthetic construct
  source 1..75: mol_type = other DNA
tctctggcgtggacatctgcggacccgctgatcgacctgaaatttgcattacgtaaaaaataccgcaaaaacgcg

SEQ ID NO: 792582 - DNA, 75 bp, synthetic construct
  source 1..75: mol_type = other DNA
aggaaatcctggatttttcagaagtggatgtgctgggctggttatcgtctgaaatcgccgacacgttcgccacga

SEQ ID NO: 792583 - DNA, 75 bp, synthetic construct
  source 1..75: mol_type = other DNA
atgaagaaattacttgaattacgccagcagaaaaccgcactcaaaacccagatgcgttccatgctggaaaaagct

SEQ ID NO: 792584 - DNA, 75 bp, synthetic construct
  source 1..75: mol_type = other DNA
attgccctgggtgacttcaaacgcggttactacatcgttgatcacgaaacaggtgttcgcaccagaccggacaac

SEQ ID NO: 792585 - DNA, 75 bp, synthetic construct
  source 1..75: mol_type = other DNA
aaattttcacgcagaaatatttaggcggtggcgtggtggattcgaacgcgatcaagattctggaactgccacagg

SEQ ID NO: 792586 - DNA, 75 bp, synthetic construct
  source 1..75: mol_type = other DNA
catctgcggacccgctgatcgatctgaaatttgcattacgtaaaaaataccgcaagaacgcggtatgggtggtta

SEQ ID NO: 792587 - DNA, 75 bp, synthetic construct
  source 1..75: mol_type = other DNA
cgcacccgaccggacaacattactgaacccggattctacaaggtccacacggataaatatctgggcggtggtgtg

SEQ ID NO: 792588 - DNA, 75 bp, synthetic construct
  source 1..75: mol_type = other DNA
gacacagaaatctcccgcctcgaatctgtggatgatgaagaacgcagcaagccaggaacgggtatccggaaatta

SEQ ID NO: 792589 - DNA, 75 bp, synthetic construct
  source 1..75: mol_type = other DNA
atggcgggacaacagcggttttggtgtccgaaatcgtacaattctgtacatctacgcaagggaatgtacggaagt

SEQ ID NO: 792590 - DNA, 75 bp, synthetic construct
  source 1..75: mol_type = other DNA
aacgctggagaaaatggaagctgctgccgtttcctctgatggattgatcgacctgctgtataagctgaaagccaa

SEQ ID NO: 792591 - DNA, 75 bp, synthetic construct
  source 1..75: mol_type = other DNA
atgaagaaactactcgaattacgccagcagaaagccacactcaaaatccagatgcgttccatgctggacaaagcc

SEQ ID NO: 792592 - DNA, 75 bp, synthetic construct
  source 1..75: mol_type = other DNA
ccgaagaaaccgactttgtgaacggcgacggtgataaaaaatccaaagggttcctgtcctatccgcgtgcggcca

SEQ ID NO: 792593 - DNA, 75 bp, synthetic construct
  source 1..75: mol_type = other DNA
gtgataagaaagacgctgacagccgttctgattgcgctggggctgtattccggaaatgtgctggcagaagacaag

SEQ ID NO: 792594 - DNA, 75 bp, synthetic construct
  source 1..75: mol_type = other DNA
aagaagaaataaaaaaacttggtgataaaccaaaacaaaaagaagtaactgcaataaataaaaaatacaaagaaa

SEQ ID NO: 792595 - DNA, 75 bp, synthetic construct
  source 1..75: mol_type = other DNA
ctcagttagagccggtagcgaagaatttcatggataacatcaatcagtcgcttgagacgattggctgtacggacg

SEQ ID NO: 792596 - DNA, 75 bp, synthetic construct
  source 1..75: mol_type = other DNA
ccacaattaccgctcatgatgcgggatatattaaccagccgctggaaaaaattgttggcctgcaaacggatgcgc

SEQ ID NO: 792597 - DNA, 75 bp, synthetic construct
  source 1..75: mol_type = other DNA
atgaaacggtgcctgtggctgtgtgtggtgtttctgctgtccgggcatgtttccggcgcatccgctgatgcggcc

SEQ ID NO: 792598 - DNA, 75 bp, synthetic construct
  source 1..75: mol_type = other DNA
gcccgctgcagtcctccctgctggtcagtgagcggatggcatttaagctccaccgccagggcatgattatggaaa

SEQ ID NO: 792599 - DNA, 75 bp, synthetic construct
  source 1..75: mol_type = other DNA
gtatcaacatgatgtgcccgtaaacgcagaagatgcagatgctgcggcagaggctgaactggctcgtcagtttgc

SEQ ID NO: 792600 - DNA, 75 bp, synthetic construct
  source 1..75: mol_type = other DNA
acagccgcaacaaccggtagcaccgcagcagcaatatcagcagccacaacagccggttgcacagcagccgcagta

SEQ ID NO: 792601 - DNA, 75 bp, synthetic construct
  source 1..75: mol_type = other DNA
cgccaattgttgaacctgtacagcagccgcaacaaccgattgcaccgcagcaacagtatcagcagccgcagcaac

SEQ ID NO: 792602 - DNA, 75 bp, synthetic construct
  source 1..75: mol_type = other DNA
aaatggaagtgtttctacaggaactggctcttcatcaggatcgggagcaacagtcaacggaaccgatgtctggag

SEQ ID NO: 792603 - DNA, 75 bp, synthetic construct
  source 1..75: mol_type = other DNA
acagtatgttgatggcatcacctccgacagcgaaagcgaaggtggcgcgggcggtttcgatggcgctgaagaact

SEQ ID NO: 792604 - DNA, 75 bp, synthetic construct
  source 1..75: mol_type = other DNA
ttctaacttgtcacgggaccttgcccgttcactttcgacggtggcggtgcgtgtcgttgaagttattcctggcaa

SEQ ID NO: 792605 - DNA, 75 bp, synthetic construct
  source 1..75: mol_type = other DNA
aatgatcgagggttcctgcaaagcgtacaaccgcgaactggacccggaattcgagctcggtacccaaaaaagcct

SEQ ID NO: 792606 - DNA, 75 bp, synthetic construct
  source 1..75: mol_type = other DNA
tagcggccgccgccttctggaggcgttgctgatccttattgtcctgtttgccgtctggttgatggctgccttact

SEQ ID NO: 792607 - DNA, 75 bp, synthetic construct
  source 1..75: mol_type = other DNA
gcggctgaagagatactgacgctggcgaactggtgcctgttgaattattccgggctgaaaacgccagtcgggagt

SEQ ID NO: 792608 - DNA, 75 bp, synthetic construct
  source 1..75: mol_type = other DNA
cgtattggcagtcaggttcaggacgatatttaccagctttggttgcaaagccagcgccgattgctgccgatgctc

SEQ ID NO: 792609 - DNA, 75 bp, synthetic construct
  source 1..75: mol_type = other DNA
ttgcaccgcagcagcagtatcagcagccacaacagccggttgcgccacagcagcaatatcagcagccgcaacagc

SEQ ID NO: 792610 - DNA, 75 bp, synthetic construct
  source 1..75: mol_type = other DNA
gaaccatacattgtggtgttggtggacgaatttgccgacctgatgatgacggtaggtaaaaaagtggaagagctg

SEQ ID NO: 792611 - DNA, 75 bp, synthetic construct
  source 1..75: mol_type = other DNA
tgctgcggcagaggctgaactggctcgtcagtttgcgcaaactcaacaacaacgttattccggcgaacaaccggc

SEQ ID NO: 792612 - DNA, 75 bp, synthetic construct
  source 1..75: mol_type = other DNA
gctctgcgtcacggtggtctttcgccagctcaacggtaaaagaggcgcgattaatatcctggatgctgtccgccg

SEQ ID NO: 792613 - DNA, 75 bp, synthetic construct
  source 1..75: mol_type = other DNA
taactgcgataatggtttttgaaatgacgtatttcaaaacaacttacgcaccgctaccactgattctttgtggaa

SEQ ID NO: 792614 - DNA, 75 bp, synthetic construct
  source 1..75: mol_type = other DNA
gggaaatcttcagcgcgatggggattcacttcgaactcaattgtgaagtgggtaaagatgtctctttggattcgc

SEQ ID NO: 792615 - DNA, 75 bp, synthetic construct
  source 1..75: mol_type = other DNA
gggttcaccaatttttcccacgaacagcgtgagacttatgactgctatcgtttaacgaatggcgtaattgttaac

SEQ ID NO: 792616 - DNA, 75 bp, synthetic construct
  source 1..75: mol_type = other DNA
gattttgccaccgaaagcgtttttgttgaagacagcgatttaccctccgggccgctgttaaccatcgttgattat

SEQ ID NO: 792617 - DNA, 75 bp, synthetic construct
  source 1..75: mol_type = other DNA
ttcgataagccgaatgatatcggtgcggtgctccagactcagactatccagctctgcgtcacggtagttttccgc

SEQ ID NO: 792618 - DNA, 75 bp, synthetic construct
  source 1..75: mol_type = other DNA
cgcagccgcaatatcagcagccgcaacagccagttgcgccgcagccgcagtatcagcagccacaacaatcggctg

SEQ ID NO: 792619 - DNA, 75 bp, synthetic construct
  source 1..75: mol_type = other DNA
atactgaaaatgccgttaccgggaagcgtagtggcatccgtaagtccggatgagctgctgaaaacattgcctaag

SEQ ID NO: 792620 - DNA, 75 bp, synthetic construct
  source 1..75: mol_type = other DNA
gttaacgcccgtaaaggggatatcggcgcgttcgactcccccaagtttatcggcctgccggtcggtgaagtatta

SEQ ID NO: 792621 - DNA, 75 bp, synthetic construct
  source 1..75: mol_type = other DNA
tccgccaggggccggtagaatggttatggcgtcagttaaccttgcgcgctgccggacctgcattatctaaaacat

SEQ ID NO: 792622 - DNA, 75 bp, synthetic construct
  source 1..75: mol_type = other DNA
gcatccgtaagtccggatgagctgctgaaaacattgcctaagcgaaagggtaaacgccagttttctggttactca

SEQ ID NO: 792623 - DNA, 75 bp, synthetic construct
  source 1..75: mol_type = other DNA
catcatcctctgaaccgtaacctcgaccataactggcaacaggcgttaaccaaaacttccagcgagcgtcgggtc

SEQ ID NO: 792624 - DNA, 75 bp, synthetic construct
  source 1..75: mol_type = other DNA
gatcaccaagcactgtctgcgctttgccttcaatctgtgtccgaagcaggcgaaaggcaatatcaaaagctggaa

SEQ ID NO: 792625 - DNA, 75 bp, synthetic construct
  source 1..75: mol_type = other DNA
agggacacccggttattcatgcagggcaaactgtttctgcatcgcagagtgactgggagaacagggagttctcac

SEQ ID NO: 792626 - DNA, 75 bp, synthetic construct
  source 1..75: mol_type = other DNA
gtggggtacaaatcatttttgagtgaggtcaacaacctgaataaacgtatgggtgacctgcgtgacatcaatggt

SEQ ID NO: 792627 - DNA, 75 bp, synthetic construct
  source 1..75: mol_type = other DNA
tcatagcggctcgagggggttggggcagtctattttacagcggcatattgcctcgttttcgcatcatggtttgcc

SEQ ID NO: 792628 - DNA, 75 bp, synthetic construct
  source 1..75: mol_type = other DNA
tacaccgcaggatgcctggagctgggcttttctcgatcttatcggccaggtgaaattcctcacgctttttgcgtt

SEQ ID NO: 792629 - DNA, 75 bp, synthetic construct
  source 1..75: mol_type = other DNA
tgaaattcctcacgctttttgcgttgctgtttggtgctggcctgcaaatgttgctgccccgtggcagacgctgga

SEQ ID NO: 792630 - DNA, 75 bp, synthetic construct
  source 1..75: mol_type = other DNA
tcttgttctcagatgcatcgtcatttataaacagctccctgaatattcataaaggaggtgcgctgaccgctcagg

SEQ ID NO: 792631 - DNA, 75 bp, synthetic construct
  source 1..75: mol_type = other DNA
atggtctggcaaaactggggcaaaccctctattacgcccgcgatgtgcaaattaatttgccggggcgctgtttgt

SEQ ID NO: 792632 - DNA, 75 bp, synthetic construct
  source 1..75: mol_type = other DNA
aacaccaacctcaaaataggtgaaggtctggttattcttggtgctgaaaaaacgttcaacaatatctatgtggcc

SEQ ID NO: 792633 - DNA, 75 bp, synthetic construct
  source 1..75: mol_type = other DNA
tcacctttaaaggtgccggtgttgatacaagaaacggcagcaccgttgagtggaatatccggtatgataataaag

SEQ ID NO: 792634 - DNA, 75 bp, synthetic construct
  source 1..75: mol_type = other DNA
aaaccgtattgcgggatgcatctggtgaaaaacgcatcaaaggtgaaaaagacagccgtatgctgatgtccgttg

SEQ ID NO: 792635 - DNA, 75 bp, synthetic construct
  source 1..75: mol_type = other DNA
ggttgcaccgcagcagcagtatcagcagccacaacagccggttgcgccacagcagcaatatcagcagccgcaaca

SEQ ID NO: 792636 - DNA, 75 bp, synthetic construct
  source 1..75: mol_type = other DNA
ccgtattacgcccctgcgccagaacaaccggtggcaggtaacgcctggcaagccgaagagcagcaatccactttt

SEQ ID NO: 792637 - DNA, 75 bp, synthetic construct
  source 1..75: mol_type = other DNA
ttaaccagagcactgttattatcggcggagatacagtctttactgataaaaatgacggaacaggtaatgatgtca

SEQ ID NO: 792638 - DNA, 75 bp, synthetic construct
  source 1..75: mol_type = other DNA
gcgcagagtctcacgatgcgggcgatatcagctttagcgatatctttcgtggcccggcttccatctttggcggca

SEQ ID NO: 792639 - DNA, 75 bp, synthetic construct
  source 1..75: mol_type = other DNA
tatcagctttagcgatatctttcgtggcccggcctccatctttggcggcattgagtatcaaacgccgtggaatcc

SEQ ID NO: 792640 - DNA, 75 bp, synthetic construct
  source 1..75: mol_type = other DNA
aaatcagtaccgcgtctggccaaatgagatgccagtggagctgcacaaaattcgcccgcaccatccgcttaatcg

SEQ ID NO: 792641 - DNA, 75 bp, synthetic construct
  source 1..75: mol_type = other DNA
tctgaaggattgcagtacaccacggtagcaaaccaacttaccgccctgaagtataacgcgggctttgacgcgcca

SEQ ID NO: 792642 - DNA, 75 bp, synthetic construct
  source 1..75: mol_type = other DNA
atggtgacgactgaaaccgacgttgccagcctgcgtaaacagttggcaggtactgcgccaggtaaaccagaacaa

SEQ ID NO: 792643 - DNA, 75 bp, synthetic construct
  source 1..75: mol_type = other DNA
gtgttcctgactgatgaagaagaattcttatcttttaagtgcctggccattgccgtctccagtgcctgtcatgct

SEQ ID NO: 792644 - DNA, 75 bp, synthetic construct
  source 1..75: mol_type = other DNA
cggtctgatcgcttttatcatttatgataaatcacgcgtgtttaaaggcgaaagattcaaaaagatttatcgtgg

SEQ ID NO: 792645 - DNA, 75 bp, synthetic construct
  source 1..75: mol_type = other DNA
ctagcagtcttgataatctgtctttagcggcggttaaaacagcaggtgcacttatcagctttcaggctgtactat

SEQ ID NO: 792646 - DNA, 75 bp, synthetic construct
  source 1..75: mol_type = other DNA
gggagtggtaaaagtcttggtgaatctcttggtagtctcatgacttctatgtcaagtggtgtggatagcctgacc

SEQ ID NO: 792647 - DNA, 75 bp, synthetic construct
  source 1..75: mol_type = other DNA
tactttaaagccacttagacagccaagacagccacgaattagcggcaacagagcaatcacagcggcttactcagc

SEQ ID NO: 792648 - DNA, 75 bp, synthetic construct
  source 1..75: mol_type = other DNA
aataacacacaatcaactccaccagctatcacaggtgacatggttaatagcaatgctcaattagctatggctgta

SEQ ID NO: 792649 - DNA, 75 bp, synthetic construct
  source 1..75: mol_type = other DNA
agcagcagttagagcagcaggtgcatttatcagctttcaggctgtactatccgcttatcagcgagtactggaagt

SEQ ID NO: 792650 - DNA, 75 bp, synthetic construct
  source 1..75: mol_type = other DNA
gacaaccacgcacttgctttcatattcctgatgaagtatttcaggtgttgtttaaagaagccagaagtaaacgta

SEQ ID NO: 792651 - DNA, 75 bp, synthetic construct
  source 1..75: mol_type = other DNA
gatggcgattggtgaatgggtcgcgccgcagggcgagcagatggcgcgtaactaccgtgcgcaggcgatgtacgg

SEQ ID NO: 792652 - DNA, 75 bp, synthetic construct
  source 1..75: mol_type = other DNA
gccataaaacacttctggctttttgtggctttctttgttgccggattgcttttatggcacgttatgcatgctatt

SEQ ID NO: 792653 - DNA, 75 bp, synthetic construct
  source 1..75: mol_type = other DNA
tcacaggtgacatggttaatagcaatgctcaacttgcaatgactattagtgaactatcacgcaaggttgatgctt

SEQ ID NO: 792654 - DNA, 75 bp, synthetic construct
  source 1..75: mol_type = other DNA
tggttcacagattaattcaagaggtggctggaaagctattcaggactctacgcagacaatgctagggaacttgaa

SEQ ID NO: 792655 - DNA, 75 bp, synthetic construct
  source 1..75: mol_type = other DNA
tcgttcagatgagcagattcaaagagcattaaccgcagtgtcacagatggcttctaagggtcaggtgatggctga

SEQ ID NO: 792656 - DNA, 75 bp, synthetic construct
  source 1..75: mol_type = other DNA
ctttaaagtcaatggaagggaagattaataagacctttgaccgtctggaagctagagcaagaaacacaaaagctt

SEQ ID NO: 792657 - DNA, 75 bp, synthetic construct
  source 1..75: mol_type = other DNA
gtcttcaagatttcacaagaagcctaacaacgcttttaaacagtttaggtgggagtggtaaaagtcttggtgaat

SEQ ID NO: 792658 - DNA, 75 bp, synthetic construct
  source 1..75: mol_type = other DNA
aacggtgacagagcagctaatagtctggatgtattagctacaagtgcaatcaaagcaggtacagccatttatagt

SEQ ID NO: 792659 - DNA, 75 bp, synthetic construct
  source 1..75: mol_type = other DNA
tgctattaatcctccaaaacaatcaaagccaagaagagttactagtgaccgagctattacagcggcttattcagc

SEQ ID NO: 792660 - DNA, 75 bp, synthetic construct
  source 1..75: mol_type = other DNA
atgctcgtctgatgggtcgaagtgaagaagagattaagcgagcactgacagcgctatcgcagatggcttctaagg

SEQ ID NO: 792661 - DNA, 75 bp, synthetic construct
  source 1..75: mol_type = other DNA
tttaaacagtttaggtgggagtggtaaaacattaggtgaaagtcttggtagcttgatgagtgatatgtcacatgg

SEQ ID NO: 792662 - DNA, 75 bp, synthetic construct
  source 1..75: mol_type = other DNA
tcgcatcacgaattgagaagcggctaaataaagcttttaaggttaatcctacgcctttaaatgattctctcaaac

SEQ ID NO: 792663 - DNA, 75 bp, synthetic construct
  source 1..75: mol_type = other DNA
cattcaagatttaactcagattactggtatggacacaaccgaaacacaagcgcaatttgcttcatttggtgcaag

SEQ ID NO: 792664 - DNA, 75 bp, synthetic construct
  source 1..75: mol_type = other DNA
taaaccttgcaaatgctgttacttcattcggtgatgctgttaataaagctaaagctggcaaggctggttcttcag

SEQ ID NO: 792665 - DNA, 75 bp, synthetic construct
  source 1..75: mol_type = other DNA
gttgttggtgtaaccagaagtatttacgggcttatgactgctatcacaagattaggtcaggtcgctgataccaca

SEQ ID NO: 792666 - DNA, 75 bp, synthetic construct
  source 1..75: mol_type = other DNA
aggagcctgtgaaagtttcacctggtggtgaagttgccattaaaccagatgaaaccagctttatgacctttagcg

SEQ ID NO: 792667 - DNA, 75 bp, synthetic construct
  source 1..75: mol_type = other DNA
aacaacgcttttaaatagtttaggtggaagtggtaagagtcttggtgaatctcttggtagcttgatgactgatat

SEQ ID NO: 792668 - DNA, 75 bp, synthetic construct
  source 1..75: mol_type = other DNA
agtttgctaaagaacttggtgcacagattaattcaagaggtggctggaaagctattcaggactctacgcagacaa

SEQ ID NO: 792669 - DNA, 75 bp, synthetic construct
  source 1..75: mol_type = other DNA
ccagtatatgtggaatgttctgatgaaagtcattccgtttacgttatgggcgctggcagcagggtttcttgttac

SEQ ID NO: 792670 - DNA, 75 bp, synthetic construct
  source 1..75: mol_type = other DNA
tgttgagcaaatagcacaacaagctaaagaggctggtgaggtggccagacagcaggctgttgaaagcaatgcaca

SEQ ID NO: 792671 - DNA, 75 bp, synthetic construct
  source 1..75: mol_type = other DNA
ccggagggaataccccagcacaaggtggcactgatgccataagagcggaagacacatctctgaatagacgtgatt

SEQ ID NO: 792672 - DNA, 75 bp, synthetic construct
  source 1..75: mol_type = other DNA
atcgatgagaacggaaatgctattccatcaggagtattaaaagacagcgttgttgaaaaaatagaacagcaggct

SEQ ID NO: 792673 - DNA, 75 bp, synthetic construct
  source 1..75: mol_type = other DNA
gccttgcatcgaacgggtctgatacctccagtacgggcacggtagagaatccgtatgctgacgttggaatgccca

SEQ ID NO: 792674 - DNA, 75 bp, synthetic construct
  source 1..75: mol_type = other DNA
tgataaaggggggcttgatactcttaactctgctattggatcttcgttattccgtgttgaaactcgggatgatgg

SEQ ID NO: 792675 - DNA, 75 bp, synthetic construct
  source 1..75: mol_type = other DNA
atcgatgagaacggaaatgcctttccgtctggggaattaaaagatgatattgttgcgcaaatagcagaacaagct

SEQ ID NO: 792676 - DNA, 75 bp, synthetic construct
  source 1..75: mol_type = other DNA
ttagtggcctggttattcctgtcacaatggattcgcattaccgtttttgtggttgccatactgctatggctgaac

SEQ ID NO: 792677 - DNA, 75 bp, synthetic construct
  source 1..75: mol_type = other DNA
ggccgtaggccggaaaaactggctctgtgtgtcacgaaggagaactgatagcggcaatatgaaaattgcagcata

SEQ ID NO: 792678 - DNA, 75 bp, synthetic construct
  source 1..75: mol_type = other DNA
gttgcgtgaatcagaatcggctgcagcagcagaacgcaggcagcaaaggcagttacgcccagcagatcctcgtct

SEQ ID NO: 792679 - DNA, 75 bp, synthetic construct
  source 1..75: mol_type = other DNA
gaatcctgagaaccagaaagttagcattgatgagatcggaaattctattccgtctggggaattaaaagatgatgt

SEQ ID NO: 792680 - DNA, 75 bp, synthetic construct
  source 1..75: mol_type = other DNA
agcattaggatctcgttcattgttttctcccctgagaaattctgtggctgattctgtcgattccagagatattcc

SEQ ID NO: 792681 - DNA, 75 bp, synthetic construct
  source 1..75: mol_type = other DNA
atgcctattggtaaccttggtaataatgtaaatagcaatcatttaattccccctgcgccgccactaccttcacaa

SEQ ID NO: 792682 - DNA, 75 bp, synthetic construct
  source 1..75: mol_type = other DNA
gccttaaattaactaatttattccgagttcaagccctcggcaatggcggaatcataactctaatcttggcaatga

SEQ ID NO: 792683 - DNA, 75 bp, synthetic construct
  source 1..75: mol_type = other DNA
atgtttaacgaacaaaccgtcacagaaaatggaattatcgaccgtttaaaagggttaagtggggttaagtggaca

SEQ ID NO: 792684 - DNA, 75 bp, synthetic construct
  source 1..75: mol_type = other DNA
ccactgaagtctattttgatattgtcctttatgtgaacggtataccactagttgtaggcgaagttaaaaccgcaa

SEQ ID NO: 792685 - DNA, 75 bp, synthetic construct
  source 1..75: mol_type = other DNA
ccgactggcactgtgatgggatacgcgtcgtgggaccgatcaccctacgaggagactctgaatggcgctcggctg

SEQ ID NO: 792686 - DNA, 75 bp, synthetic construct
  source 1..75: mol_type = other DNA
tttgatttatatgtggaacatcctgatgtatgccattccgtatacgttatatgcgcttgcagccgggtttcttgt

SEQ ID NO: 792687 - DNA, 75 bp, synthetic construct
  source 1..75: mol_type = other DNA
agccgctcatttcgctggtgtttggcgttaagtatctcgaagcgtatgacctgattcaggtgatgctgggcgcaa

SEQ ID NO: 792688 - DNA, 75 bp, synthetic construct
  source 1..75: mol_type = other DNA
acacgcccggaaactacccctaagttaatcggtgatgttgtagagcaaattgataaaatcgtcaaagctacacgc

SEQ ID NO: 792689 - DNA, 75 bp, synthetic construct
  source 1..75: mol_type = other DNA
gatctattaaaggaattcagtcgctttgtagagcattatatgcctgattttatttttgttgaaaacgtgccagga

SEQ ID NO: 792690 - DNA, 75 bp, synthetic construct
  source 1..75: mol_type = other DNA
attaactcggacattaggttaatcgacaacaatgccataaacaagttagtaaaaaaacatcgtaatgattacatt

SEQ ID NO: 792691 - DNA, 75 bp, synthetic construct
  source 1..75: mol_type = other DNA
tttttcacacattatcaagaaatttatcccattttaagaacaggtgctttattctctcctgtattctcgataatt

SEQ ID NO: 792692 - DNA, 75 bp, synthetic construct
  source 1..75: mol_type = other DNA
cggtcggcggcgcgcaatcccggctgatcgacgcggccgatatcgtttccttcggcatcgaatggctcgaggcgc

SEQ ID NO: 792693 - DNA, 75 bp, synthetic construct
  source 1..75: mol_type = other DNA
gtcgggccgctggcggacggaccgcagacacttgtcgatgcgctgatcgaggccgtcggccccaccgggaatatt

SEQ ID NO: 792694 - DNA, 75 bp, synthetic construct
  source 1..75: mol_type = other DNA
tttatcaatggtgatatcaaagatacacacgttgaggaaattaagcatctggtttgtgcgtcaacacaaagcaaa

SEQ ID NO: 792695 - DNA, 75 bp, synthetic construct
  source 1..75: mol_type = other DNA
aaccacccgcaataaaatcaccgatgcggcctctgcggcggcattaatgactgaaatgcctgcaattatcaaacg

SEQ ID NO: 792696 - DNA, 75 bp, synthetic construct
  source 1..75: mol_type = other DNA
ggcggtgtggctggaacgcgatgatgacactggctttcagcaggtgctggaacgtgctgactatctggcgaagga

SEQ ID NO: 792697 - DNA, 75 bp, synthetic construct
  source 1..75: mol_type = other DNA
gctggagcgtgctgactatctggcgaaggagagtaccaaagcttacggcaccggtgagcgcaactttggctgcag

SEQ ID NO: 792698 - DNA, 75 bp, synthetic construct
  source 1..75: mol_type = other DNA
aaacccttctgtctaaccatcgtacatcggttgttatggccgctggtcgcctgggtgaaagaaccctcgaatttg

SEQ ID NO: 792699 - DNA, 75 bp, synthetic construct
  source 1..75: mol_type = other DNA
ttcagcaggtgctggaacgtgctgactatctggcgaaggaacataccaaagctcacgccactggtgagcgtaatt

SEQ ID NO: 792700 - DNA, 75 bp, synthetic construct
  source 1..75: mol_type = other DNA
ttcagcaggagctggagcgtgctgactatctggcgaaggagagtaccaaagcttacggcaccggtgagcgcaatt

SEQ ID NO: 792701 - DNA, 75 bp, synthetic construct
  source 1..75: mol_type = other DNA
aacggacgcagctgtgatatcccgcttcatcaatgccctgaaagcccgaatcaacgcttaccagaagcgtaagct

SEQ ID NO: 792702 - DNA, 75 bp, synthetic construct
  source 1..75: mol_type = other DNA
aacggacgcagctgtgatatcccgcttcatcaatgccctgaaagcccgaatcaacgcttaccagaatcgtaagcg

SEQ ID NO: 792703 - DNA, 75 bp, synthetic construct
  source 1..75: mol_type = other DNA
tccgggctcactggccggaatgatttaacaggcctggtgcagtgccctgggggtggatgccgggccttatgccac

SEQ ID NO: 792704 - DNA, 75 bp, synthetic construct
  source 1..75: mol_type = other DNA
ttggggagtgcaaaggtaaaaaacactatcacctgatgctgctggttaaccgggatacctggtgtcgtgccggtg

SEQ ID NO: 792705 - DNA, 75 bp, synthetic construct
  source 1..75: mol_type = other DNA
caacggacgcagctgtgatatcccgcttcatcaatgccctgaaagcccgaatctacgcttaccagaaacgtaagc

SEQ ID NO: 792706 - DNA, 75 bp, synthetic construct
  source 1..75: mol_type = other DNA
aacggacgcagctgtgatatcccgcttcatcaatgccctgaaagcccgaatctacgcttaccagaaccgtaagcc

SEQ ID NO: 792707 - DNA, 75 bp, synthetic construct
  source 1..75: mol_type = other DNA
atcccttgattacctgccatcattacgtgatgcgttaacaaaaggtcgtaaaaaaggactacgggttgtcaccgg

SEQ ID NO: 792708 - DNA, 75 bp, synthetic construct
  source 1..75: mol_type = other DNA
ccttcgcgctgattggctatgcgtttgtttccgcactgctgccagtgtggctgatcctcgcaccgcgcgactatc

SEQ ID NO: 792709 - DNA, 75 bp, synthetic construct
  source 1..75: mol_type = other DNA
gccacaacagccggttgcgccgcagccacaatatcagcagccgcaacaaccggttgcgccacagcagcaatatca

SEQ ID NO: 792710 - DNA, 75 bp, synthetic construct
  source 1..75: mol_type = other DNA
acgttgttcaccggttggtcatgggtgaccattgctgaaaaactcggcggctggattttaaacattcttaccttc

SEQ ID NO: 792711 - DNA, 75 bp, synthetic construct
  source 1..75: mol_type = other DNA
tggcgtgggcggtttcgatggcgctgaagaactggatccgttgttcgatcaggcggtgcagtttgtcactgaaaa

SEQ ID NO: 792712 - DNA, 75 bp, synthetic construct
  source 1..75: mol_type = other DNA
gccgcaacaaccggttgcaccgcagccgcaatatcagcagccacaacaaccggttgcacagcagccgcagtatca

SEQ ID NO: 792713 - DNA, 75 bp, synthetic construct
  source 1..75: mol_type = other DNA
aataattcgcaacaaagtccgaccgaaagaacagaattaaacctcctgttacaacgcatgaatactcaagattta

SEQ ID NO: 792714 - DNA, 75 bp, synthetic construct
  source 1..75: mol_type = other DNA
ggcggcaaacagacgctgcgttattctccggcaagcggatggatgatgaagacgatgttacctacactgcgcgcg

SEQ ID NO: 792715 - DNA, 75 bp, synthetic construct
  source 1..75: mol_type = other DNA
tatcgctactacagtctgtacatcgcccagaaggtgatgaaactcgaccccacgcgcgcgacgcctgcggttatt

SEQ ID NO: 792716 - DNA, 75 bp, synthetic construct
  source 1..75: mol_type = other DNA
attctgtttgaagctctgtttattctgacggcggtagatgcgggtacgcgtgctgcgcgctttatgttgcaggat

SEQ ID NO: 792717 - DNA, 75 bp, synthetic construct
  source 1..75: mol_type = other DNA
atgggggatatgctctactctgggccgaactccacgttgccggtacgtgtccatggtgcttttgttcgcgatcag

SEQ ID NO: 792718 - DNA, 75 bp, synthetic construct
  source 1..75: mol_type = other DNA
gataacgccaaattccgcgataatccgtcgccattaaccgtggtgctgggtaaagatatcgccggtgagccggtg

SEQ ID NO: 792719 - DNA, 75 bp, synthetic construct
  source 1..75: mol_type = other DNA
gggaccttgcccgttcactttcgacggtggcggtgcgtgtcgttgaagttattcctggcaaaccctatgtaggtc

SEQ ID NO: 792720 - DNA, 75 bp, synthetic construct
  source 1..75: mol_type = other DNA
tccgggatcactggccggcatgatttaacaggcctggtgcagtgccctgggggtggatgccgggccttatgccac

SEQ ID NO: 792721 - DNA, 75 bp, synthetic construct
  source 1..75: mol_type = other DNA
ttgatgaatctgacctgaccaatcccaaacagataaccggttcgcagactgtgagcggtacctggaaaaccaacc

SEQ ID NO: 792722 - DNA, 75 bp, synthetic construct
  source 1..75: mol_type = other DNA
cgctaccgcgaagtttgacccggaacataaagtctggcgtctgtcgcaggttgatgaatctgatctgaccaatcc

SEQ ID NO: 792723 - DNA, 75 bp, synthetic construct
  source 1..75: mol_type = other DNA
aggtgctggaacgtgctgactatctggcgaaggaacataccaaagctcactgcaccggtgagcgcaattttggct

SEQ ID NO: 792724 - DNA, 75 bp, synthetic construct
  source 1..75: mol_type = other DNA
cgcctgatgaacagagcggcaagcagttccattggcgacgttgagctggtgatttttgtggtcgaaggcacccgc

SEQ ID NO: 792725 - DNA, 75 bp, synthetic construct
  source 1..75: mol_type = other DNA
tcgacgcttaccagaagcgtaagcgccgtgaagataaacgcgtacatcccacgaccctgcattacgcctgggccc

SEQ ID NO: 792726 - DNA, 75 bp, synthetic construct
  source 1..75: mol_type = other DNA
gtgagcggcacctggaaaaccaacctcacgcctgacaaactgggcgtggtggcgctggacccggatgcactctct

SEQ ID NO: 792727 - DNA, 75 bp, synthetic construct
  source 1..75: mol_type = other DNA
acaattctttgaagccatgaagaaaggtctaagttcaacgccattcctgttaaaacttacaccccaactacagag

SEQ ID NO: 792728 - DNA, 75 bp, synthetic construct
  source 1..75: mol_type = other DNA
tcaatgcaagctgtaattgaatcatacagaaagattatggaagttggtttacagcgagcttcttctgaacgtgca

SEQ ID NO: 792729 - DNA, 75 bp, synthetic construct
  source 1..75: mol_type = other DNA
atgaggtgacattagcttaccgttcactaaatgacactcagaggaaaattgttgatggtttatctgatgggttaa

SEQ ID NO: 792730 - DNA, 75 bp, synthetic construct
  source 1..75: mol_type = other DNA
gaaacgtaagcatcgggaaggtaaacgcgtgcatcccaccactctgcattacgtctgggcccgggagtttgggga

SEQ ID NO: 792731 - DNA, 75 bp, synthetic construct
  source 1..75: mol_type = other DNA
gggacagttacttcaccatgttaggacttgccgaaagcggtcactgggataaagtcgcgaatatggtggccaatt

SEQ ID NO: 792732 - DNA, 75 bp, synthetic construct
  source 1..75: mol_type = other DNA
acctacagaccaagcattgtctggtgacatgaactctttagccgctgttttatgggctatggttcagggcaaatc

SEQ ID NO: 792733 - DNA, 75 bp, synthetic construct
  source 1..75: mol_type = other DNA
ttgttacgatggtgttaattgtttttacgtatttttttaagcataataataatatattaataattgtttgtagtg

SEQ ID NO: 792734 - DNA, 75 bp, synthetic construct
  source 1..75: mol_type = other DNA
gaaagcgctggaaaaacagtgtctggcacagaacgcacagcacaaagactggcattgtaccgaagagatgatgga

SEQ ID NO: 792735 - DNA, 75 bp, synthetic construct
  source 1..75: mol_type = other DNA
gcatcccgccgattatcggcgcgttgctgccaagcaccagcttcttcttaatcagcctgtggctgttaatgagaa

SEQ ID NO: 792736 - DNA, 75 bp, synthetic construct
  source 1..75: mol_type = other DNA
gggagttcggggagaacaaaggtaaaaaacactatcacctgatactgctggtcaaccgtgatacctggtgtggtg

SEQ ID NO: 792737 - DNA, 75 bp, synthetic construct
  source 1..75: mol_type = other DNA
gctgcgcgcactggatgttcatccccgcctgacggcacttcgggttgacctgcgtctcccggatgtaccggcagc

SEQ ID NO: 792738 - DNA, 75 bp, synthetic construct
  source 1..75: mol_type = other DNA
tgctgactatctggcgaaggagtataccaaagctcactgcaccggtgagcgcaattttggctgtagccggagttg

SEQ ID NO: 792739 - DNA, 75 bp, synthetic construct
  source 1..75: mol_type = other DNA
ggcattgcaccgaagagatgatggaactgacccgtgatggcgaagccctgtacatgcactgcctgccagctgata

SEQ ID NO: 792740 - DNA, 75 bp, synthetic construct
  source 1..75: mol_type = other DNA
acaaccctgcattacgcctgggcccgggaattcggggagcttaaaggcaaaaaacactatcacctgatactgctg

SEQ ID NO: 792741 - DNA, 75 bp, synthetic construct
  source 1..75: mol_type = other DNA
gaacgttggcaaatccacattgttgaacaaactgctggggcagaagatctccatcacctcccgcaaagcgcaaac

SEQ ID NO: 792742 - DNA, 75 bp, synthetic construct
  source 1..75: mol_type = other DNA
gcgttgcttggtcttgggatgctggcgcagcgcagcgaactggtggtgatgcaggcttctggttttacccgtatg

SEQ ID NO: 792743 - DNA, 75 bp, synthetic construct
  source 1..75: mol_type = other DNA
ttttccggcctggccggcggtgtggctggcgcgtaatgatgacaccggctttcagcaggtgctggaacgtgctga

SEQ ID NO: 792744 - DNA, 75 bp, synthetic construct
  source 1..75: mol_type = other DNA
aaaacactatcacctcctgctgctggtcaaccgggatacctggtgtcgtgccggcgattaccgcgctccgggatc

SEQ ID NO: 792745 - DNA, 75 bp, synthetic construct
  source 1..75: mol_type = other DNA
ttcatcaatgccctgaaagcccgaatcgacgcttaccagaaacgtaagcatcgggaaggtaaacgcgtgcattcc

SEQ ID NO: 792746 - DNA, 75 bp, synthetic construct
  source 1..75: mol_type = other DNA
gataccgttatgcccccccgctatccgccgaacagtttattgttgagtgggtatataacgacagaaatggcaaaa

SEQ ID NO: 792747 - DNA, 75 bp, synthetic construct
  source 1..75: mol_type = other DNA
gtggcgcatcacgaaggaaatgaaagcatcgatgaactgtttaaacgcgttgatgatgctttgtatcgagcgaaa

SEQ ID NO: 792748 - DNA, 75 bp, synthetic construct
  source 1..75: mol_type = other DNA
gcgaaagctgacagaagcagaaccggtgattattttcgaaggtatcgaagcaccggcaacgctgggtttaaaagc

SEQ ID NO: 792749 - DNA, 75 bp, synthetic construct
  source 1..75: mol_type = other DNA
ggattggcggtggtactgacgaaattatgatttacgttgcaggtcggcagatcctgaaagattaccagaataaat

SEQ ID NO: 792750 - DNA, 75 bp, synthetic construct
  source 1..75: mol_type = other DNA
ggtggtaaatgttgatatctggaatatctggcatatgaccttcaccgcgcgttgctgcatctggcaaccggttca

SEQ ID NO: 792751 - DNA, 75 bp, synthetic construct
  source 1..75: mol_type = other DNA
ggccaaatcgtcgatgctaacctcgccgcgctcaatttctatggttataaccatgaaacgatgtgccagaaacat

SEQ ID NO: 792752 - DNA, 75 bp, synthetic construct
  source 1..75: mol_type = other DNA
gaactgtttaaacgcgttgatgatgctttgtatcgagcgaaaaatgatggacgcaaccgcgtgctggcggcataa

SEQ ID NO: 792753 - DNA, 75 bp, synthetic construct
  source 1..75: mol_type = other DNA
cggttggtaagcgaacggggaacccgatgggcgacggtacggcaatgatgcccgtcgaaactcaacagggcggta

SEQ ID NO: 792754 - DNA, 75 bp, synthetic construct
  source 1..75: mol_type = other DNA
ttcgtcagcctttgcctctgcaaggattacaattccgtgaactgtttagctggttatccagttcgctgcgttcgg

SEQ ID NO: 792755 - DNA, 75 bp, synthetic construct
  source 1..75: mol_type = other DNA
tagctggttatccagttcgctgcgttcggtttcccgctccacgccgggaacggaagttgtgctggaagcgccaaa

SEQ ID NO: 792756 - DNA, 75 bp, synthetic construct
  source 1..75: mol_type = other DNA
tatcgcttttggtaagccgattgggcataaccagatgatccaggaaaaactggcgctgatggcgattaagatcga

SEQ ID NO: 792757 - DNA, 75 bp, synthetic construct
  source 1..75: mol_type = other DNA
gaaaaagaaccggtgacaaggaatacgcagaagtacttgttgccataaccgaacttacaaatacattgcgtaaac

SEQ ID NO: 792758 - DNA, 75 bp, synthetic construct
  source 1..75: mol_type = other DNA
acgcaggagcaactgaaaacatcgcttaaatctggtcgtatggattacgaaatgttgtggttaatttcacaacag

SEQ ID NO: 792759 - DNA, 75 bp, synthetic construct
  source 1..75: mol_type = other DNA
tgatttatctgtcaccacagggacgcaagcttgatcaagtgggcgtcagcgagctggcaacgaatcaaaaattga

SEQ ID NO: 792760 - DNA, 75 bp, synthetic construct
  source 1..75: mol_type = other DNA
tgccaacagcgatctggatgaactgctgggaacaaacgccagcccgctgaagaatttccttcagtccgcactgac

SEQ ID NO: 792761 - DNA, 75 bp, synthetic construct
  source 1..75: mol_type = other DNA
atggagttcgctttttatatctgtggcttgatagccatacttgcgaccttgcgagtgatcacccataccaatccg

SEQ ID NO: 792762 - DNA, 75 bp, synthetic construct
  source 1..75: mol_type = other DNA
tagcccgtgggaagcggcgctgggtactaaagtcaccgttccaacactgaaagaaagcattttgctgactatccc

SEQ ID NO: 792763 - DNA, 75 bp, synthetic construct
  source 1..75: mol_type = other DNA
cggcgagtgcgaattctgtcgttccggtaaaaccaacctctgtgtcgcggttcgcgaaacccagggcaaaggtct

SEQ ID NO: 792764 - DNA, 75 bp, synthetic construct
  source 1..75: mol_type = other DNA
gtggtacgcacctgggaagttccgctgcaaatcaccatcagtctgttactggatgccagtctggagggtgctgca

SEQ ID NO: 792765 - DNA, 75 bp, synthetic construct
  source 1..75: mol_type = other DNA
aacagcacaccgggcagcattgccgccagccagacatatttcagccgcacgctgcgtgaaatggcgctcgccacg

SEQ ID NO: 792766 - DNA, 75 bp, synthetic construct
  source 1..75: mol_type = other DNA
cctggtacagggcgatgtaggttccggtaaaacgctggtcgccgccctcgccgcgctgcgtgcgattgcccacgg

SEQ ID NO: 792767 - DNA, 75 bp, synthetic construct
  source 1..75: mol_type = other DNA
cgagttacacctgctggttgccactaccgttattgaagtcggcgttgatgtgcctaacgccagcctgatgattat

SEQ ID NO: 792768 - DNA, 75 bp, synthetic construct
  source 1..75: mol_type = other DNA
ctacggtcgctattcctgatacccgccgtaccgacatcattgaccgcgtgcgccacgcctgcatgactgaaggtc

SEQ ID NO: 792769 - DNA, 75 bp, synthetic construct
  source 1..75: mol_type = other DNA
ttgcgcgttaaaggcaaaggtctggtgagcaaaaaaacagaccggcgatctgtatgcggtactgaaaatcgtgat

SEQ ID NO: 792770 - DNA, 75 bp, synthetic construct
  source 1..75: mol_type = other DNA
ccgcgctgtggcagcaactggcagacgcccagtcgtcttttgatccacgtaaagattggggaaagcataatggct

SEQ ID NO: 792771 - DNA, 75 bp, synthetic construct
  source 1..75: mol_type = other DNA
agcttagcgatctcgaaaccgggcagcatccggcacaacgccggctgattctcgaagagttgctggcgcacaacc

SEQ ID NO: 792772 - DNA, 75 bp, synthetic construct
  source 1..75: mol_type = other DNA
tgatgatggtgacagcgctaaaatcgtcagggctgtagatgcggtaatggagttgccacgagaaggacggcgctt

SEQ ID NO: 792773 - DNA, 75 bp, synthetic construct
  source 1..75: mol_type = other DNA
atttgctgcgtgaaattgtccggcagtacgggcgcacctgccgccgctatcgcttccagtcgttaacatccacgc

SEQ ID NO: 792774 - DNA, 75 bp, synthetic construct
  source 1..75: mol_type = other DNA
tccctctcccaacctggatgaacaagggagagccattaacactggcacattcttcacgtcgttactgggagaagg

SEQ ID NO: 792775 - DNA, 75 bp, synthetic construct
  source 1..75: mol_type = other DNA
tcccgctccccacctggatgaataaaggcgagccgttaacgctggcacattcatcgcatcgctactgggaaaagg

SEQ ID NO: 792776 - DNA, 75 bp, synthetic construct
  source 1..75: mol_type = other DNA
atcaccacctccgaagggcaaagttacggtatgttctttgccctggcggctaacgaccgtgtagctttcgataat

SEQ ID NO: 792777 - DNA, 75 bp, synthetic construct
  source 1..75: mol_type = other DNA
cttcctgaatcaaaagctgtatcagggacccatttctgtcctgatggatggggcggatatctcctggattgtcgg

SEQ ID NO: 792778 - DNA, 75 bp, synthetic construct
  source 1..75: mol_type = other DNA
tgacgaacggctggtgttaatcaatccggagcttttagaaaaaagcggcgaaacaggcattgaagaaggttgcct

SEQ ID NO: 792779 - DNA, 75 bp, synthetic construct
  source 1..75: mol_type = other DNA
tggagcgaaaaaaaggcgctgcctgcgttgctctggcagcaccgtatggatgagcccatcggtgtgtacaccgaa

SEQ ID NO: 792780 - DNA, 75 bp, synthetic construct
  source 1..75: mol_type = other DNA
gaaaaactgacggcgctcccttccctttcaggcttccttgcggtcggctatctggcgctgtttggttcgattatc

SEQ ID NO: 792781 - DNA, 75 bp, synthetic construct
  source 1..75: mol_type = other DNA
ggctctcgccaccagctacgcctacgttaacccggtggtcgcggtcttgctgggtacgggactgggcggagaaac

SEQ ID NO: 792782 - DNA, 75 bp, synthetic construct
  source 1..75: mol_type = other DNA
tcgctttaaaggagaacccacggagatctaccgccgccgcatcagttacgccttcatcaatgcacaggaggctgg

SEQ ID NO: 792783 - DNA, 75 bp, synthetic construct
  source 1..75: mol_type = other DNA
aatctgttcatcatgccggtggccgtctgcggcgcgacggcgatgtgggtcgattgctatcgtgcaaaacatgcc

SEQ ID NO: 792784 - DNA, 75 bp, synthetic construct
  source 1..75: mol_type = other DNA
atgcccgttgccgtttgtggcgcgacggcgatgtgggtcgattgctatcgcgataaacacgcgatgtggcggtaa

SEQ ID NO: 792785 - DNA, 75 bp, synthetic construct
  source 1..75: mol_type = other DNA
gtaggcatgatgcctgacagcgatccgcaaaaagcgcggatgctcaaccctgatgaatcccctaatgatttttat

SEQ ID NO: 792786 - DNA, 75 bp, synthetic construct
  source 1..75: mol_type = other DNA
gtgcgctcgttctatcccgccgcgcgcgacatccgctacacgccggaaatgaaaaccgcaatggtgctcaaggcc

SEQ ID NO: 792787 - DNA, 75 bp, synthetic construct
  source 1..75: mol_type = other DNA
atgcaacagcaaaaaccgctggaaggtgcgcaactggtcattatgacgattgcgctatcgctggcgacattcatg

SEQ ID NO: 792788 - DNA, 75 bp, synthetic construct
  source 1..75: mol_type = other DNA
tggtgattggtatcggcagcctgcagattatgctcgaccggggtaaagaactggactggttctcatcacaggaaa

SEQ ID NO: 792789 - DNA, 75 bp, synthetic construct
  source 1..75: mol_type = other DNA
ataaaaatggcaacggatgataacggtatagttgatcaagcctttgccgaacaaattaaggagcgtatacgccag

SEQ ID NO: 792790 - DNA, 75 bp, synthetic construct
  source 1..75: mol_type = other DNA
aaaaaaggtgaagtgctgattaaagtcacccataccggtgtttgccataccgacgcatttaccctctccggcgat

SEQ ID NO: 792791 - DNA, 75 bp, synthetic construct
  source 1..75: mol_type = other DNA
acagcgctgaaaacgaaaacaactcctggacccgtgtggcatctgaaattccaggatgtgggttctttcgactac

SEQ ID NO: 792792 - DNA, 75 bp, synthetic construct
  source 1..75: mol_type = other DNA
gcgtgattcaggggattgtcgccgggccgctgatcccgctttcacaaagtctattgctgaataactacccgccag

SEQ ID NO: 792793 - DNA, 75 bp, synthetic construct
  source 1..75: mol_type = other DNA
atcttgcccagggctcattaaaagaacatttgcccgcctggctatggggcaagaaagagaatgcgaagtgggaag

SEQ ID NO: 792794 - DNA, 75 bp, synthetic construct
  source 1..75: mol_type = other DNA
ccgttttaaaccgatggcaacatttaccgagaaaaatggttatccaccggagaaagttgatgtcgcgacggggaa

SEQ ID NO: 792795 - DNA, 75 bp, synthetic construct
  source 1..75: mol_type = other DNA
atgcaacagcaaaaaccgctggaaggcgcgcaactggttattatgacgattgcgctgtcactggcgacattcatg

SEQ ID NO: 792796 - DNA, 75 bp, synthetic construct
  source 1..75: mol_type = other DNA
tgtcagccgggatattcctcgtcctgctggggctggtgtggtttgctaaaccgccatttggcgcaggtggcggcg

SEQ ID NO: 792797 - DNA, 75 bp, synthetic construct
  source 1..75: mol_type = other DNA
ggcctgcttctttatgccgctgaccaccattacgctgtctggtttgccaccggaacgactggcggcggcatcgag

SEQ ID NO: 792798 - DNA, 75 bp, synthetic construct
  source 1..75: mol_type = other DNA
tttcctctgatccggtccatctgattgactgcaatatcgtgctggagctgaacgcgtgcggtcgggggtttatta

SEQ ID NO: 792799 - DNA, 75 bp, synthetic construct
  source 1..75: mol_type = other DNA
gaaatgagaaaggaggcgcgcagaatgaccggtaataatttgaatgttgaaaaaccagcacctgttgcttcagct

SEQ ID NO: 792800 - DNA, 75 bp, synthetic construct
  source 1..75: mol_type = other DNA
atgagaacgtcattagtcacccgtgaagaaatgattgaggcaattgaacagcacacagcctgtatgccgacacgg

SEQ ID NO: 792801 - DNA, 75 bp, synthetic construct
  source 1..75: mol_type = other DNA
aactaatgccgacgcgttcacccagacggcgacgaaagccgggcagacccggagcaagtatcagaatataattgc

SEQ ID NO: 792802 - DNA, 75 bp, synthetic construct
  source 1..75: mol_type = other DNA
tcaccccaatacgggggccagtgggcaggcggcgcagttcaccgcaacggccaataaaaccggcacattgaaaag

SEQ ID NO: 792803 - DNA, 75 bp, synthetic construct
  source 1..75: mol_type = other DNA
tcagtgttggccggaacgtgaaacgggatgtcgcgggcaatgttacagacgacgtgaaaggggatgtcacgtcaa

SEQ ID NO: 792804 - DNA, 75 bp, synthetic construct
  source 1..75: mol_type = other DNA
ataacaagctcgtttcaaaagtgtttatgtttgacaaaggtaaatggatttataaggaaacacatccatatccag

SEQ ID NO: 792805 - DNA, 75 bp, synthetic construct
  source 1..75: mol_type = other DNA
ttgggatcttacaaaagatagcatcatagaagttagtgagacattaacatggaactggcaacaaggggctttagc

SEQ ID NO: 792806 - DNA, 75 bp, synthetic construct
  source 1..75: mol_type = other DNA
agttgaaactcacaaccacccgacggcgatttctccgtggccgggcgcggcgaccggttccggcggtgaaatccg

SEQ ID NO: 792807 - DNA, 75 bp, synthetic construct
  source 1..75: mol_type = other DNA
cagctacttccggcaaaaagaacagcaaccggttgcaatcccccagacgcttccagaagctctgcgcctggctgc

SEQ ID NO: 792808 - DNA, 75 bp, synthetic construct
  source 1..75: mol_type = other DNA
atatgtaatataatcaataacagtactgaaagatatattttagtacagaacacacaagagcttattaagcagaca

SEQ ID NO: 792809 - DNA, 75 bp, synthetic construct
  source 1..75: mol_type = other DNA
cacacaagaacttattaaacagacagcaaaacaaattaatgattgtaagtatattattacagattcagttccgag

SEQ ID NO: 792810 - DNA, 75 bp, synthetic construct
  source 1..75: mol_type = other DNA
tgccaaaactggccagagtggtggcacccagtgaggctgtgaaaagtggtaattttgccgatccgttccggccgc

SEQ ID NO: 792811 - DNA, 75 bp, synthetic construct
  source 1..75: mol_type = other DNA
gtgcccgcagtgacagaggatacgctggcgaaaatcgaacaacttaccggtgtgcgcgatgcggcaggcgttgcc

SEQ ID NO: 792812 - DNA, 75 bp, synthetic construct
  source 1..75: mol_type = other DNA
tgtatggcaaagttgatggcctgcattatttttctgataatgccaatagtgatggtgatcaaacttatgtgcgtt

SEQ ID NO: 792813 - DNA, 75 bp, synthetic construct
  source 1..75: mol_type = other DNA
attatcccaatccctgccgggatattgatgaaaaaactcagttataaagcagggattattaccggattattttta

SEQ ID NO: 792814 - DNA, 75 bp, synthetic construct
  source 1..75: mol_type = other DNA
gcgggcctgccgggcaaactggcagactgccaggaacgcgacccggcgctttccgaactatacctggtggaaggg

SEQ ID NO: 792815 - DNA, 75 bp, synthetic construct
  source 1..75: mol_type = other DNA
gattctgccgctgaagggtaaaatcctcaacgtcgagaaagcgcgcttcgataagatgctctcttctcaggaagt

SEQ ID NO: 792816 - DNA, 75 bp, synthetic construct
  source 1..75: mol_type = other DNA
atgctaaatctgatcgcactaataatcaggttatctacggtaacaacagcctgaatgcatctggtcaaaatgctg

SEQ ID NO: 792817 - DNA, 75 bp, synthetic construct
  source 1..75: mol_type = other DNA
gatacggaacagcgcgaactggtcagccgtgaaaccacggtgaaagccacggataaaaccacggtactgggaacc

SEQ ID NO: 792818 - DNA, 75 bp, synthetic construct
  source 1..75: mol_type = other DNA
gccgtttatcaggcagacgttgccggatggtaccagcctgccggatgttaaacccggtgagcagctgcaacagca

SEQ ID NO: 792819 - DNA, 75 bp, synthetic construct
  source 1..75: mol_type = other DNA
agagtatcaatgccctgaccatgatgctggacaccattgatttgctggcagaactggcaaggcagtgcgccagtc

SEQ ID NO: 792820 - DNA, 75 bp, synthetic construct
  source 1..75: mol_type = other DNA
tgtgctgaaagagattcgacgcctcaggacagagctgccagagaattgtaaaattcacggcgagattcacggagg

SEQ ID NO: 792821 - DNA, 75 bp, synthetic construct
  source 1..75: mol_type = other DNA
atgcaaatgcagcacctgatggttggctatcctaagtactaccaaacagccgattatgcgttgaggctttcagta

SEQ ID NO: 792822 - DNA, 75 bp, synthetic construct
  source 1..75: mol_type = other DNA
agacttatggccggggctattcagcacatcagcacaggcgattacagccaggcagttaaaaaccgggtggccagc

SEQ ID NO: 792823 - DNA, 75 bp, synthetic construct
  source 1..75: mol_type = other DNA
ttgtcaccgcgctggacatcatgaccgaaggcccgctgggcggtgcggcgtttaacaacgaatttggtcgtccgg

SEQ ID NO: 792824 - DNA, 75 bp, synthetic construct
  source 1..75: mol_type = other DNA
agatcgccattaacgtgcagcaagggctggcaaaactacgccagccgtggatcgatgcgcgcggcgataccgaag

SEQ ID NO: 792825 - DNA, 75 bp, synthetic construct
  source 1..75: mol_type = other DNA
tactttaagtaactcacaaaatttgcaaccatctttaagagggttacaaatttccccgaaaacccgctcccttat

SEQ ID NO: 792826 - DNA, 75 bp, synthetic construct
  source 1..75: mol_type = other DNA
gatctcaatccccgcgtctgggaagaagagatcaagccgttgtgggagaaatacagtaaggaggccgcacaatga

SEQ ID NO: 792827 - DNA, 75 bp, synthetic construct
  source 1..75: mol_type = other DNA
ttcacgtcagggattggcgcggcgatgattggctggtttggttgtgcaatgctctgctacgtaacgccgaaagag

SEQ ID NO: 792828 - DNA, 75 bp, synthetic construct
  source 1..75: mol_type = other DNA
gcgcgtgccgatgcgtgagatccagcttagcccgacgctaatcggcggtagcaaagaacagccgcagtacgaaga

SEQ ID NO: 792829 - DNA, 75 bp, synthetic construct
  source 1..75: mol_type = other DNA
agtttgccgagctgcatacgctgggcgaactgaccaaaatcgcctgggaatatgacgtacaggtgatgattgaag

SEQ ID NO: 792830 - DNA, 75 bp, synthetic construct
  source 1..75: mol_type = other DNA
tgacgcattcgtcagggaagaacgcgaagcgatggacgttgtgttacaggcgctggacggggagaacatgtcatg

SEQ ID NO: 792831 - DNA, 75 bp, synthetic construct
  source 1..75: mol_type = other DNA
actacatgggctgctccacattcagtgaatacaccgtagttgcggaagtttctctggcaaaaattaacccagaag

SEQ ID NO: 792832 - DNA, 75 bp, synthetic construct
  source 1..75: mol_type = other DNA
ttcgcgaaacccagggcaaaggtctgatgccagacggcacaacacgtttttcttacaacgggcaaccgctttatc

SEQ ID NO: 792833 - DNA, 75 bp, synthetic construct
  source 1..75: mol_type = other DNA
agcctgtttgatggcgatggcatgttagggctggatctcggcgtgtatggcgcgccagaaacgttcctcatcgat

SEQ ID NO: 792834 - DNA, 75 bp, synthetic construct
  source 1..75: mol_type = other DNA
tgaacttttgttgtcggccaagattggaatgatgcgaggcgactttgtgacaggtattgagcgttctttcattaa

SEQ ID NO: 792835 - DNA, 75 bp, synthetic construct
  source 1..75: mol_type = other DNA
ggtggaagaactcggaacaaaacgtgggacgccgctcatggttagcgtcaacgtcaatacgccgtatccagagtt

SEQ ID NO: 792836 - DNA, 75 bp, synthetic construct
  source 1..75: mol_type = other DNA
cacgctgctggaacaggccgagcaaggtgtggattacttcactatccatgcgggcgtgctgctgcgctacgtgcc

SEQ ID NO: 792837 - DNA, 75 bp, synthetic construct
  source 1..75: mol_type = other DNA
gtattattcgcaacgagaaccacgaaatctttataacccgccgtgccgcagatgcgcacatggcgaataagttgg

SEQ ID NO: 792838 - DNA, 75 bp, synthetic construct
  source 1..75: mol_type = other DNA
gggtgaaacgccggaacaggcggtggtgcgtgaacttcaggaagaagtcgggattacccccccaacatttttcgc

SEQ ID NO: 792839 - DNA, 75 bp, synthetic construct
  source 1..75: mol_type = other DNA
cgaccagcaacaaacagttgtgctttatgcagcatattatcgaaacgctgcatcccggcggtcgtgcggcggtgg

SEQ ID NO: 792840 - DNA, 75 bp, synthetic construct
  source 1..75: mol_type = other DNA
tcatgcgtggtgacattgtcaacgccacgatgtttgaccgttatggggatgcggacgatttccttgactgcttta

SEQ ID NO: 792841 - DNA, 75 bp, synthetic construct
  source 1..75: mol_type = other DNA
tcgtcatgttggggtccttggtagcgacggtcgtagctgccgccaatggcttgagttttctcacccttatggctg

SEQ ID NO: 792842 - DNA, 75 bp, synthetic construct
  source 1..75: mol_type = other DNA
atgaaaaagctgcaaattgcggtgggtatcattcgcaataaaaacaacgaaatttttattactcgtcgtgccgca

SEQ ID NO: 792843 - DNA, 75 bp, synthetic construct
  source 1..75: mol_type = other DNA
ggtaaaaatgcccgttcccttatcctctggacagaacgtggcgcagcccgccatgccaaaatgctcgaaaccgat

SEQ ID NO: 792844 - DNA, 75 bp, synthetic construct
  source 1..75: mol_type = other DNA
acaaccaccagcaacacacaactcccccaccccaaatgatggatgcgcattactgatccactttgataaacacgg

SEQ ID NO: 792845 - DNA, 75 bp, synthetic construct
  source 1..75: mol_type = other DNA
tctggacagaacgcggagcagcccgtcacgccaaaatgctggaaaccgatcaggcgtgggaagtgttcgaaaaac

SEQ ID NO: 792846 - DNA, 75 bp, synthetic construct
  source 1..75: mol_type = other DNA
agctgtggaagctgtgcgacaacctgcgcgatggcggcgtttcctatcaaaactacgtcaatgaactcgcctcgc

SEQ ID NO: 792847 - DNA, 75 bp, synthetic construct
  source 1..75: mol_type = other DNA
aggcgactgggaattcgacgcagaaaaaagtgaaattgccgacagcgaagagaacaaaaacaccgaccagcatct

SEQ ID NO: 792848 - DNA, 75 bp, synthetic construct
  source 1..75: mol_type = other DNA
actggtcagcaatatggattcgctggactggtacaacggcgcgcacggtaagtcgcgcgatgacttcggcgatat

SEQ ID NO: 792849 - DNA, 75 bp, synthetic construct
  source 1..75: mol_type = other DNA
tgtctgccggatgcgcggtcatggcgatgcaaatggcagccgttgcccaaggatttggcggcatctggcgcagtg

SEQ ID NO: 792850 - DNA, 75 bp, synthetic construct
  source 1..75: mol_type = other DNA
gcgtcaacgtgctgttcaatcaaagacttccgcgttcaacctctggtgtcagaaccaccaagaactggtggacgc

SEQ ID NO: 792851 - DNA, 75 bp, synthetic construct
  source 1..75: mol_type = other DNA
aacccaatggcgatgaatacctgggcgatgtatgcacgctatccgcatatcaaacaggtcgggctgtgccattcg

SEQ ID NO: 792852 - DNA, 75 bp, synthetic construct
  source 1..75: mol_type = other DNA
gaaggggaagggcgcgagcgtttcagcgctgtactggagcagggggcgattgctgccggtagtgataacaaagca

SEQ ID NO: 792853 - DNA, 75 bp, synthetic construct
  source 1..75: mol_type = other DNA
accttggtacgccgcagttgaaagcatctacgtcgataaacgtcccggacccgacgccgtttgtgacttatttct

SEQ ID NO: 792854 - DNA, 75 bp, synthetic construct
  source 1..75: mol_type = other DNA
gtgattgaaggggaagggcgcgagcgtttcagcgccgtactggaacagggggcgattgctgccggtagtgatgac

SEQ ID NO: 792855 - DNA, 75 bp, synthetic construct
  source 1..75: mol_type = other DNA
ctattgtgaaagatccggcgcatgttgaaacagaagaacagttgtgggacaaatttgtgctgatgcttcatgcgg

SEQ ID NO: 792856 - DNA, 75 bp, synthetic construct
  source 1..75: mol_type = other DNA
gaacgccacaacatgattaaccgtctactgcgacttaaccaccggccggacgacgagcgcacacgctttaacaga

SEQ ID NO: 792857 - DNA, 75 bp, synthetic construct
  source 1..75: mol_type = other DNA
aagcctctgtaaatctgacagccgactcatcaaccaccatggcaacacaggctggcgtggcagaaatgataaagc

SEQ ID NO: 792858 - DNA, 75 bp, synthetic construct
  source 1..75: mol_type = other DNA
ggcattgacgaaatatatgctcttgttgacgacctgattgccgcccacggcgactggctgccaggctggttgcac

SEQ ID NO: 792859 - DNA, 75 bp, synthetic construct
  source 1..75: mol_type = other DNA
atgaaatccatcacaggtatcaaccagcaaatcagcaaagtgcagtcagccattatggcgcttatggcgacgaac

SEQ ID NO: 792860 - DNA, 75 bp, synthetic construct
  source 1..75: mol_type = other DNA
cgaatgcccgaatgaggcgatttcaatgggagatcatatctatgagattaacagcgataagtgtaccgaatgcgt

SEQ ID NO: 792861 - DNA, 75 bp, synthetic construct
  source 1..75: mol_type = other DNA
atcgccgtagcgcctcccgcctggctgaacctgcgccaacgggtgaacaactgcaaaacatcctgcgtgcgggta

SEQ ID NO: 792862 - DNA, 75 bp, synthetic construct
  source 1..75: mol_type = other DNA
tatcagcggcggtgaggtcaataaagaggaacttcaggataaaccgaacctgctgcaagggacctactattacgg

SEQ ID NO: 792863 - DNA, 75 bp, synthetic construct
  source 1..75: mol_type = other DNA
aaccgggcctttatcagaggtatagaagataaaggggtattgcgggtgaactggttcgatgagaacagacaagct

SEQ ID NO: 792864 - DNA, 75 bp, synthetic construct
  source 1..75: mol_type = other DNA
accgtcaatgaccggatttgcgcctgttatccgtggtgttgctaacagcaacgctaaggttaccgtaacacaagg

SEQ ID NO: 792865 - DNA, 75 bp, synthetic construct
  source 1..75: mol_type = other DNA
atgaaaatccccgacgatggcaaaagaattcaacgctcgccactcgcttgcctgattgcgtgtagcctgctgccc

SEQ ID NO: 792866 - DNA, 75 bp, synthetic construct
  source 1..75: mol_type = other DNA
ctttggtaacagcaccatcgatcgctttgggtacggcgtgagcagttcactgtcaccgtatcgggaaaatactgt

SEQ ID NO: 792867 - DNA, 75 bp, synthetic construct
  source 1..75: mol_type = other DNA
tcatggaataaatatttcgccccgaccgaaacgtcactcaacattgccgcctatcgctactccactgaaaactat

SEQ ID NO: 792868 - DNA, 75 bp, synthetic construct
  source 1..75: mol_type = other DNA
gcccgtaccgtttgcttccgatgtgacagacagcagcgggcagtccatcggcacagttgggcaagggagccaggc

SEQ ID NO: 792869 - DNA, 75 bp, synthetic construct
  source 1..75: mol_type = other DNA
ttaacctgctgcgcagtgataagcagcccgtaccgtttgcttccgatgtgacagacagcagcgggcagtccatcg

SEQ ID NO: 792870 - DNA, 75 bp, synthetic construct
  source 1..75: mol_type = other DNA
agcagcggctttgactgggccagctacagcgtcagcctgcaacgtacctatgacgaagacaataacaaagatgac

SEQ ID NO: 792871 - DNA, 75 bp, synthetic construct
  source 1..75: mol_type = other DNA
ccatgaccagtttcgaaaccgatcagggccgctcagcgatgatcacgatgcgtcgtagcgatggcgaacctctgc

SEQ ID NO: 792872 - DNA, 75 bp, synthetic construct
  source 1..75: mol_type = other DNA
acacctttaccggctatacgggtatccagttcaccgatgctgactttatggccgtgctgctggggctgggcgtaa

SEQ ID NO: 792873 - DNA, 75 bp, synthetic construct
  source 1..75: mol_type = other DNA
tgtctgccggatgcgcggtcatggcgatgcaaatggcagccgttgcccaggggtttggcggcatctggcgcagtg

SEQ ID NO: 792874 - DNA, 75 bp, synthetic construct
  source 1..75: mol_type = other DNA
ggggagtggccagccaaaattgatataacggccggaaacacccgcccgggcagtaaactcagactgataagcctg

SEQ ID NO: 792875 - DNA, 75 bp, synthetic construct
  source 1..75: mol_type = other DNA
actggtgagcgtactgcctaatggcccggtttatcatccaacggtcaatgcctttatggcaggtggtgtgccgga

SEQ ID NO: 792876 - DNA, 75 bp, synthetic construct
  source 1..75: mol_type = other DNA
cgctgaagaggaaatccccgaattatggcaaggcgaaaaaggcggacgagccagactgcttgcaggatcaggtgg

SEQ ID NO: 792877 - DNA, 75 bp, synthetic construct
  source 1..75: mol_type = other DNA
aaatatgttcgccgcgtcagagataaagtcccgtactctgactgggataaagagcatcttcaggatgcaaacaca

SEQ ID NO: 792878 - DNA, 75 bp, synthetic construct
  source 1..75: mol_type = other DNA
tgaacgcgctcggtgtcagcgccgaagcgtccggacgtaacgatttggtggtgaaaaccgccgaaggcgaccgta

SEQ ID NO: 792879 - DNA, 75 bp, synthetic construct
  source 1..75: mol_type = other DNA
gccatttttaaacaaatattcgataaagtgcgaaataatttaaactatcactggttttattctgaactaaaacgt

SEQ ID NO: 792880 - DNA, 75 bp, synthetic construct
  source 1..75: mol_type = other DNA
cggttaccggcagcacgctgaaagaaaacctcgactggtgggagcactccgaacggcgtcagcggttcaagcaac

SEQ ID NO: 792881 - DNA, 75 bp, synthetic construct
  source 1..75: mol_type = other DNA
ttctggcgctcacagaagaagggaaagcgggtaattgtttcacagtaggtaaagtgtataccggcttactcgaca

SEQ ID NO: 792882 - DNA, 75 bp, synthetic construct
  source 1..75: mol_type = other DNA
aagcggccgtcgaagcggctattgcccgcgttcaggccaaaaaagccgcccagcaaaaggttgtaaacgaggact

SEQ ID NO: 792883 - DNA, 75 bp, synthetic construct
  source 1..75: mol_type = other DNA
cgcaagctggaacagcagcaggctaatgcggaggcacaagaacctgtcgatccgcgcaaagcggcagttgccgcg

SEQ ID NO: 792884 - DNA, 75 bp, synthetic construct
  source 1..75: mol_type = other DNA
ggcaatgaagaaagtgtctgaactggaaacgctggtggcgcaggccaaagaagcggataaaggcggcatgaattt

SEQ ID NO: 792885 - DNA, 75 bp, synthetic construct
  source 1..75: mol_type = other DNA
agctggatggtcgaggactcatatccgaaatcattacaagcttataatgaactggtcggtaactataatcgcctg

SEQ ID NO: 792886 - DNA, 75 bp, synthetic construct
  source 1..75: mol_type = other DNA
cgatgataacggtaacgatcaaacaatcgttttagatggtaattgcgtatttggtgagtgggaactgacaaccga

SEQ ID NO: 792887 - DNA, 75 bp, synthetic construct
  source 1..75: mol_type = other DNA
aacaagagtgcgaagcgctgttggttgacttcccggaacaggaaaaagagctacgggagttgtcgacgtggatag

SEQ ID NO: 792888 - DNA, 75 bp, synthetic construct
  source 1..75: mol_type = other DNA
ctgtgagttgggcgtttggttcggtttatggctcgcgcattaccctaccagtaggaatgatggcgggcgccattg

SEQ ID NO: 792889 - DNA, 75 bp, synthetic construct
  source 1..75: mol_type = other DNA
cccgtcgaatgccacaacacagggagcgaataatgacgattgcagagcgaatttataatgatggatggctgttgg

SEQ ID NO: 792890 - DNA, 75 bp, synthetic construct
  source 1..75: mol_type = other DNA
ctggcgcttatccttgagcgttgtaaatacattccctgcgggagcagggcctgtgcatattgttctaccgctcag

SEQ ID NO: 792891 - DNA, 75 bp, synthetic construct
  source 1..75: mol_type = other DNA
ggttgccatactccccatcacgcagaccggcgatgcctccctgacagagcgaggtattgttcagctaagcagcgc

SEQ ID NO: 792892 - DNA, 75 bp, synthetic construct
  source 1..75: mol_type = other DNA
aaggcgctggcagtaacaagaccaacagccgccctcagcgtggacctggatacactggggagacctgaacatcat

SEQ ID NO: 792893 - DNA, 75 bp, synthetic construct
  source 1..75: mol_type = other DNA
tttggtcgaaaacggtgtggaaattaagcccgacagcgatctcgtcaacgatcttggcctggagtcgatcaaagt

SEQ ID NO: 792894 - DNA, 75 bp, synthetic construct
  source 1..75: mol_type = other DNA
cattcataacatgcagcgattcggcaacgacgaacagttacaaaagaccgccgaagcaggtctgacaggtatccc

SEQ ID NO: 792895 - DNA, 75 bp, synthetic construct
  source 1..75: mol_type = other DNA
ctgactcttacgacccgtggtttaacctggcggtggaagagtgtatttttcgccagatgcccgccacgcagcgcg

SEQ ID NO: 792896 - DNA, 75 bp, synthetic construct
  source 1..75: mol_type = other DNA
caccgtagtgattggtcgcgcgcagaacccgtggaaagagtgtaatacccggcggatggaagaagataacgtccg

SEQ ID NO: 792897 - DNA, 75 bp, synthetic construct
  source 1..75: mol_type = other DNA
gctttaacaccgccagaaagcatctcaatatgaaaaaaaatgaggttaaggcgaaagctaaggctgccgggaaaa

SEQ ID NO: 792898 - DNA, 75 bp, synthetic construct
  source 1..75: mol_type = other DNA
gaagagggtgcagaaaaaacaaaatttacagaaattgacaattcgcagggtgcaggttctttccgaagtatgcca

SEQ ID NO: 792899 - DNA, 75 bp, synthetic construct
  source 1..75: mol_type = other DNA
ggcaccgtcgtacccaacggcgtgcgcgtccccggaactcagttccagctcgaccccgtccaggcggcatttaac

SEQ ID NO: 792900 - DNA, 75 bp, synthetic construct
  source 1..75: mol_type = other DNA
gggcgctggcgcagtcggtccgcaacgatccggcgagacccacccagacgctgccggtatccggtgtgctggccc

SEQ ID NO: 792901 - DNA, 75 bp, synthetic construct
  source 1..75: mol_type = other DNA
tctgctggcagacagaatcaacgccacctccgggctgccggtgacggcctccgtgccccgtgatggcacgaccgt

SEQ ID NO: 792902 - DNA, 75 bp, synthetic construct
  source 1..75: mol_type = other DNA
gataagacctttgattttgtcatcaacccttatgatgacaccgcatcactggatgccatcagagaatttctgaac

SEQ ID NO: 792903 - DNA, 75 bp, synthetic construct
  source 1..75: mol_type = other DNA
ttcttctccggcgaccatctttatgccgacaataccgggattattctttcagaagatccgctggatattgaataa

SEQ ID NO: 792904 - DNA, 75 bp, synthetic construct
  source 1..75: mol_type = other DNA
gtgacatctatcaagaagatgttaacgtcgtggaaccgctgttctccaactttggcggacgggcgtcgtttggcg

SEQ ID NO: 792905 - DNA, 75 bp, synthetic construct
  source 1..75: mol_type = other DNA
actggcagcgattgtaaaagcgtactatcaagcgccgaaaggtaaagccgaaaaagaacaagtattgagtgaaca

SEQ ID NO: 792906 - DNA, 75 bp, synthetic construct
  source 1..75: mol_type = other DNA
aattcttatttctttgttgttagacctggcaaatacacaggtttctctgacatctgatattgaactcgccgctaa

SEQ ID NO: 792907 - DNA, 75 bp, synthetic construct
  source 1..75: mol_type = other DNA
gagaaggcattcgacacaatagacttttccagagatggattaagagagaatgataaagaaattgtttctatgatg

SEQ ID NO: 792908 - DNA, 75 bp, synthetic construct
  source 1..75: mol_type = other DNA
ggacgcggacatcgcgatcgggcgctggcgcagctgctgtgccgtattacgggggcggaagatgcctgtatcgtc

SEQ ID NO: 792909 - DNA, 75 bp, synthetic construct
  source 1..75: mol_type = other DNA
ggactgttggtgacatatattccacgttggaacatggaaaggaatacaccgaatttgaattaagagaaatgatta

SEQ ID NO: 792910 - DNA, 75 bp, synthetic construct
  source 1..75: mol_type = other DNA
tgccgacgcgctggacagactgcacaagccggaagaagctgcagcgatgcgtcgcgacggtttgatgttaacgtt

SEQ ID NO: 792911 - DNA, 75 bp, synthetic construct
  source 1..75: mol_type = other DNA
ggcaatggcggaacatcttattgaatgtgacgatcatgatactgcccagcaaattatcatcgatggcctgaaacg

SEQ ID NO: 792912 - DNA, 75 bp, synthetic construct
  source 1..75: mol_type = other DNA
gcgtcaactttggcggtgtcactttcttctctggcgaccatctctatgccgacaataccgggattattctttctg

SEQ ID NO: 792913 - DNA, 75 bp, synthetic construct
  source 1..75: mol_type = other DNA
cagaagtcgcaggtggaagagcttgagcgcacactgagcttcattggcggcgtgcaggagaaaaagcactggcag

SEQ ID NO: 792914 - DNA, 75 bp, synthetic construct
  source 1..75: mol_type = other DNA
tcctataaagacgctaatggcaacaaacagcagattaatcgcactgatgtgaaagagatggttgaactggctcaa

SEQ ID NO: 792915 - DNA, 75 bp, synthetic construct
  source 1..75: mol_type = other DNA
ccggttcgcactgcgcttcgtgacgggcgattgagcaaagacaaaggcgtatggtacttctctgattcagctctc

SEQ ID NO: 792916 - DNA, 75 bp, synthetic construct
  source 1..75: mol_type = other DNA
ctgcgcgatgttgggctctcacgcacccaggctaaagcattcatggccgggggttatagctcactttcacagcgt

SEQ ID NO: 792917 - DNA, 75 bp, synthetic construct
  source 1..75: mol_type = other DNA
atattccgctacagctaaagtctgtcagcgacagcggggagtttgaaggttatggctctgtttttggcgtaaagg

SEQ ID NO: 792918 - DNA, 75 bp, synthetic construct
  source 1..75: mol_type = other DNA
cttcatttcttcgcgcacaaagaatttattaccatcaaccgcactgctgaggtgctatcagctgcgtatcgggca

SEQ ID NO: 792919 - DNA, 75 bp, synthetic construct
  source 1..75: mol_type = other DNA
tcaacgcctggatatcgacgtcccccaggcatggattatgaagaattatcaaaactatgttgatccctctttgtg

SEQ ID NO: 792920 - DNA, 75 bp, synthetic construct
  source 1..75: mol_type = other DNA
agcattgcttttactgttattgaaggtaaaaagaacgctcaggcctgcattacgcagaaaaatttattgcaattt

SEQ ID NO: 792921 - DNA, 75 bp, synthetic construct
  source 1..75: mol_type = other DNA
gtcctgccagttttaatcgtgaacaactggcatacatttgctacgagttttacaaagctggcaagggtaaagaaa

SEQ ID NO: 792922 - DNA, 75 bp, synthetic construct
  source 1..75: mol_type = other DNA
catcacctcaaactgtaccgggccagtatccgagaccattaagaaaaggtgagcagacaacatcattatggatcg

SEQ ID NO: 792923 - DNA, 75 bp, synthetic construct
  source 1..75: mol_type = other DNA
tggcgtcaacgtttacgtcaccgtcaacatcgccaggtaattatcctcgtccattaagaaaaggggaggagacaa

SEQ ID NO: 792924 - DNA, 75 bp, synthetic construct
  source 1..75: mol_type = other DNA
aatttatttcaagccagctactactatggtttgaataactacctgacaggatataccggtattcagctaactgat

SEQ ID NO: 792925 - DNA, 75 bp, synthetic construct
  source 1..75: mol_type = other DNA
aaatactgcgttgttgatgaaggtacataccagcaattacagcattcagggtttcaccaaagcggtcgatgaagc

SEQ ID NO: 792926 - DNA, 75 bp, synthetic construct
  source 1..75: mol_type = other DNA
ctcacaagtgatcgtgggtgatgcctataccaccggtgaaaccttcgactcagtcaatgtacgtggtatgcgtct

SEQ ID NO: 792927 - DNA, 75 bp, synthetic construct
  source 1..75: mol_type = other DNA
gtcgtctaccgaaaaaaacattactggcagcctgttgtacatttttctatagcggtaactgtgcggccacggaaa

SEQ ID NO: 792928 - DNA, 75 bp, synthetic construct
  source 1..75: mol_type = other DNA
gtgaacaaaaaaacaactacaaattatcactatccctttacgcatatcgccacgttttgcgcactgctttacagc

SEQ ID NO: 792929 - DNA, 75 bp, synthetic construct
  source 1..75: mol_type = other DNA
taaagatgatgcgatgtatttgaacgttagcgttccgctggaaaatattttcggcggtaaacgtaaatcctcagg

SEQ ID NO: 792930 - DNA, 75 bp, synthetic construct
  source 1..75: mol_type = other DNA
tcggtggtaaacgtaaatcctcaggattccgaaatctgaatacccaattcaataccgactttaacggttcgcatc

SEQ ID NO: 792931 - DNA, 75 bp, synthetic construct
  source 1..75: mol_type = other DNA
tacagcgtgacatcccggcaatacgctcacaagtgatcgtgggtgatgcctataccaccggtgaaaccttcgact

SEQ ID NO: 792932 - DNA, 75 bp, synthetic construct
  source 1..75: mol_type = other DNA
ttgtaccagtttactcatcaaaaaagccgtatcccgaaaaaaacgctacttgcggcctgttgcgcccttttttac

SEQ ID NO: 792933 - DNA, 75 bp, synthetic construct
  source 1..75: mol_type = other DNA
tctgccgtgctgaatattaccgctgccaatggcaaatccattccgtttgctgcggaggtttatcaggatgaagtg

SEQ ID NO: 792934 - DNA, 75 bp, synthetic construct
  source 1..75: mol_type = other DNA
ataaaaacgccggcgatttagcctctgttggtggttatctcaactatgaatcagggttaggcggtatttccgctt

SEQ ID NO: 792935 - DNA, 75 bp, synthetic construct
  source 1..75: mol_type = other DNA
actcagttaaatagtgattttaaaggcaataatcagctcaacatcagcagcagtggctttagcgacgcaaatcgc

SEQ ID NO: 792936 - DNA, 75 bp, synthetic construct
  source 1..75: mol_type = other DNA
atccttacgctcccagttaattgtcggcgagtcatataccacgggtgaaaccttcgattcagtcagcattcgggg

SEQ ID NO: 792937 - DNA, 75 bp, synthetic construct
  source 1..75: mol_type = other DNA
agtgtcaacgctggttatagcctcgataaaaactccggcgatttagcctctgttggcggttatctcaactatgag

SEQ ID NO: 792938 - DNA, 75 bp, synthetic construct
  source 1..75: mol_type = other DNA
gtaacggtaaacctattccttttgccgctgaagtttatcaggatgaaattatgatcggtagtatgggtcagggtg

SEQ ID NO: 792939 - DNA, 75 bp, synthetic construct
  source 1..75: mol_type = other DNA
gcgcattcacgattgatgacatcactccatccggcttcggttctgaactgttagtgactattgaggaagctgatg

SEQ ID NO: 792940 - DNA, 75 bp, synthetic construct
  source 1..75: mol_type = other DNA
tttcagaatcgctatctgcagcgcgatcttccctcgctacgttcccagttaattgtcggtgaagcatatactact

SEQ ID NO: 792941 - DNA, 75 bp, synthetic construct
  source 1..75: mol_type = other DNA
atcgacgatgcaaaccacgcccgcgatggtgaaaagtacaatacgatgagcagctacgagcgcatgaagaatcaa

SEQ ID NO: 792942 - DNA, 75 bp, synthetic construct
  source 1..75: mol_type = other DNA
cataccagtaactacagcattcagggattcaccaaagcgatagatgaagcggaactggtggcgctcggcaaagag

SEQ ID NO: 792943 - DNA, 75 bp, synthetic construct
  source 1..75: mol_type = other DNA
gaatatcatgcccgggggcggactgcgacaggcgagcgtatcctgcgggaacggtacgaaaagttccggcaccgc

SEQ ID NO: 792944 - DNA, 75 bp, synthetic construct
  source 1..75: mol_type = other DNA
atgataccggtactggaaccgtgttttcagggagtaccggatatgtggtttttttcgacagttctgtttctgctc

SEQ ID NO: 792945 - DNA, 75 bp, synthetic construct
  source 1..75: mol_type = other DNA
gcaaagctatcgcatctcctggaataagttatttgaagataccagaacctcgctcaatatcgccgcttaccgtta

SEQ ID NO: 792946 - DNA, 75 bp, synthetic construct
  source 1..75: mol_type = other DNA
gttgagctgaaaagtaccagtgctgttgccgtaccacgccaggggtctgttgtctttgctggttttgaaactgtc

SEQ ID NO: 792947 - DNA, 75 bp, synthetic construct
  source 1..75: mol_type = other DNA
ctaccttgcccggcgtgtatgacgtcagtgtttatgtcaacgatcaaccagttatcagccaaaacatctccttta

SEQ ID NO: 792948 - DNA, 75 bp, synthetic construct
  source 1..75: mol_type = other DNA
cccgttacgcattcccggatacgcctgaaacatcctcgccaggatcaacgctgtttttaaataatcttacctgcc

SEQ ID NO: 792949 - DNA, 75 bp, synthetic construct
  source 1..75: mol_type = other DNA
gtacatgagctatgactcccagtatggcggcttctccgcttctgcctcagcagacaccgataacagccgacaata

SEQ ID NO: 792950 - DNA, 75 bp, synthetic construct
  source 1..75: mol_type = other DNA
agacggcgataatgaagatagcatctatctaagctttagtattcctatcgaaaaattactgggtacagaacatcg

SEQ ID NO: 792951 - DNA, 75 bp, synthetic construct
  source 1..75: mol_type = other DNA
ccaaagttagcgccaccggtgacgatgcgcgtgaaggcctgattgcggtcgtttccgtgaaagtgccggacccga

SEQ ID NO: 792952 - DNA, 75 bp, synthetic construct
  source 1..75: mol_type = other DNA
tgacctgacgcgagatgttgacggtttctactgccgtgaaattgtgaaacgaatgtttgaagtgtggtgccactg

SEQ ID NO: 792953 - DNA, 75 bp, synthetic construct
  source 1..75: mol_type = other DNA
gaacgatgggtccaccagcgttacggcaatcgctatgacctgacgcgagatgttgacggcttctactgtcgttaa

SEQ ID NO: 792954 - DNA, 75 bp, synthetic construct
  source 1..75: mol_type = other DNA
cgacctgacgcgagatgttgacggtttctactgtcgtgaaattgtgaaacgaatgtttgaggtctggtgccactg

SEQ ID NO: 792955 - DNA, 75 bp, synthetic construct
  source 1..75: mol_type = other DNA
ctgtgccagaggtagttactcaactactcgaactggagttagcagggtggatcgcagcagtacccggcggctatg

SEQ ID NO: 792956 - DNA, 75 bp, synthetic construct
  source 1..75: mol_type = other DNA
agaaattctggaaaacttgcaatttggattgcactggttgccagacgcccctgaaaattcattttattcaccaga

SEQ ID NO: 792957 - DNA, 75 bp, synthetic construct
  source 1..75: mol_type = other DNA
tgacctgacgcgagatgttgacggcttctactgtcgtgaagttgtgaaacggatgtttgaagtgaaatatggtgc

SEQ ID NO: 792958 - DNA, 75 bp, synthetic construct
  source 1..75: mol_type = other DNA
aggtagtgaaggtggcacaacttatttcggttccctgataactgcaccgggtggtacaggcggtggcgcgggggg

SEQ ID NO: 792959 - DNA, 75 bp, synthetic construct
  source 1..75: mol_type = other DNA
cggcacgcagtgttgcgttccagaaacaaccggataatgccaacgctaaaaccggtaatgcacgctattacgata

SEQ ID NO: 792960 - DNA, 75 bp, synthetic construct
  source 1..75: mol_type = other DNA
cctgctgaagacctcgccgacaaacaaaaagctgtcgctggcgtacaacgcgcagagtcagtcctcaggtacctg

SEQ ID NO: 792961 - DNA, 75 bp, synthetic construct
  source 1..75: mol_type = other DNA
tccaccagcgttacggcaaccgctacgacctgacgcgagatgttgacggtttctactgtcgtgaaattgtgaaac

SEQ ID NO: 792962 - DNA, 75 bp, synthetic construct
  source 1..75: mol_type = other DNA
tgacctgacgcaagatgttgacggcttctactgtcgtgaagttgtgaaacggatgtttgaagtgaaatatagtgc

SEQ ID NO: 792963 - DNA, 75 bp, synthetic construct
  source 1..75: mol_type = other DNA
atgaataaagcgtttgagctatgggtacgccagcgttacggcaatcgctatgacctgacgcgagatgttgacggt

SEQ ID NO: 792964 - DNA, 75 bp, synthetic construct
  source 1..75: mol_type = other DNA
tgacagcacgttgtgcgcttgagcaggggcgagaagtttttgccttgccaggtccaatagggaatccgggaagcg

SEQ ID NO: 792965 - DNA, 75 bp, synthetic construct
  source 1..75: mol_type = other DNA
cgagcggccagttaatgttggatcacccaatgatcgtcgctgatctgaacaatcctcaccaacccaaaacggcac

SEQ ID NO: 792966 - DNA, 75 bp, synthetic construct
  source 1..75: mol_type = other DNA
ggcatctggcgcatgacagcgcgttcgatctgttggcgctgggcgtcgctggttggatgcgttatgttggtggtg

SEQ ID NO: 792967 - DNA, 75 bp, synthetic construct
  source 1..75: mol_type = other DNA
tgtttactgcaaaagtgacggaagcgtacttgtctttattagcgcatggcgcgaaagcgaccgtggcgaaatatt

SEQ ID NO: 792968 - DNA, 75 bp, synthetic construct
  source 1..75: mol_type = other DNA
ccccatctgttagggctacgttatttcgaaaaacccattgccggatactggattaacagcattgggcaatggcta

SEQ ID NO: 792969 - DNA, 75 bp, synthetic construct
  source 1..75: mol_type = other DNA
gcgcttatatcgtttccctggttctgttttgaccgattaccgaatactgaagaattacgccaaaaccctgacagg

SEQ ID NO: 792970 - DNA, 75 bp, synthetic construct
  source 1..75: mol_type = other DNA
tggcgcgtggaatcgatggtgtagcgcataaagcagccttacaggtaaatggcgtcagcattgctgtattgggga

SEQ ID NO: 792971 - DNA, 75 bp, synthetic construct
  source 1..75: mol_type = other DNA
cctcgtcgccatgcccggctggccgccggtttacttgaacatggtggcgctcttgtctcggaatttccccttgat

SEQ ID NO: 792972 - DNA, 75 bp, synthetic construct
  source 1..75: mol_type = other DNA
tccaggcgcgctgtttgttgctggagagctgcacgccttgcaatcgtttcagcttgccgtcgtggggagtcgggc

SEQ ID NO: 792973 - DNA, 75 bp, synthetic construct
  source 1..75: mol_type = other DNA
gtcttcgccaccgctggatgcgcctgcgcttatatcgttttcctggttctgttttgaccgattaccgaatactga

SEQ ID NO: 792974 - DNA, 75 bp, synthetic construct
  source 1..75: mol_type = other DNA
tttcgcgttatggtctgacttttcagggaaatatcctttcagtaaactgtcagtgccggatgttcacccgtgtcc

SEQ ID NO: 792975 - DNA, 75 bp, synthetic construct
  source 1..75: mol_type = other DNA
ccagcggatagcgaattttaccctcctcaacttctcgcaacggttgattatcccggagctctgtttgttgccggg

SEQ ID NO: 792976 - DNA, 75 bp, synthetic construct
  source 1..75: mol_type = other DNA
ccttctgaagacatcaccgacaaataaaaaattgtcgctggcgtataacgcacagagccagtcttctgccacatg

SEQ ID NO: 792977 - DNA, 75 bp, synthetic construct
  source 1..75: mol_type = other DNA
taaatctgccagcaatgatggactcactattttaagagccgtggataaagaatccgcgcaagagtttgtacaaga

SEQ ID NO: 792978 - DNA, 75 bp, synthetic construct
  source 1..75: mol_type = other DNA
gcttattttggtgctggggaagagccacttttttcggatttagatgtcatggcaatcgggtcggtggtggaggac

SEQ ID NO: 792979 - DNA, 75 bp, synthetic construct
  source 1..75: mol_type = other DNA
tggggacggatcaactgggttgatcgtcatgcaaagaaagaaattgttctcaaaaaagaacccgccaccagtttc

SEQ ID NO: 792980 - DNA, 75 bp, synthetic construct
  source 1..75: mol_type = other DNA
aagaaaaaatcagcaaaatgccaaaaggttctgttcctgccctgcaacaagaaatgctgcgacgtgtcagtaaac

SEQ ID NO: 792981 - DNA, 75 bp, synthetic construct
  source 1..75: mol_type = other DNA
atttagctaaaacttttgttcaggaaactctgaaagatacctgggagtctgctgacgagtggtttgtatactccc

SEQ ID NO: 792982 - DNA, 75 bp, synthetic construct
  source 1..75: mol_type = other DNA
atgcgtgttgagatctgtatcgctaaagaaaaaatcagcaaaatgccaaaaggttctgttcctgccctgcagcaa

SEQ ID NO: 792983 - DNA, 75 bp, synthetic construct
  source 1..75: mol_type = other DNA
atgaaaattcaccgcatatccccggagacgcttataacactcatccgcgcacacctggccggaaaagctgacagt

SEQ ID NO: 792984 - DNA, 75 bp, synthetic construct
  source 1..75: mol_type = other DNA
attacaggtttcatggggcaaagataaaaactcaaactgtattgtcgagtacaagcttcctgaagtttctcctgg

SEQ ID NO: 792985 - DNA, 75 bp, synthetic construct
  source 1..75: mol_type = other DNA
ctcttaacgcgaattcccttgcagataatgttgaactggatgaaaccgtggtcactgtcatcccaactcacggtg

SEQ ID NO: 792986 - DNA, 75 bp, synthetic construct
  source 1..75: mol_type = other DNA
tgcccttgtgtttgcaacatccaggactgtgcggcattttccctcttgataaaggtctggatgcgtttgccgcac

SEQ ID NO: 792987 - DNA, 75 bp, synthetic construct
  source 1..75: mol_type = other DNA
atgatgaagaaaacgcccacctctacgaaagactccttactcaacaaggagatgaatgatttgccccggctggcg

SEQ ID NO: 792988 - DNA, 75 bp, synthetic construct
  source 1..75: mol_type = other DNA
acgctggcacaattaatcgataaacgctttattcagagccagtatgatgcggcctggcagctccgtctggatcgg

SEQ ID NO: 792989 - DNA, 75 bp, synthetic construct
  source 1..75: mol_type = other DNA
aaacgttaccaaaagcgccacccaagtatcaatttgaagaaaatggtgaaacgaaatactggtctggtcgtggac

SEQ ID NO: 792990 - DNA, 75 bp, synthetic construct
  source 1..75: mol_type = other DNA
atttagtctgccgccagattcgccggcgctgcatgttattcagcatatacgcgatgaatcgcacgatcatgcaat

SEQ ID NO: 792991 - DNA, 75 bp, synthetic construct
  source 1..75: mol_type = other DNA
gaagcggatggagtgttttgatatcagccataccatgggcgaacaaacagtcgcttcgtgtgtggtgttcgatgc

SEQ ID NO: 792992 - DNA, 75 bp, synthetic construct
  source 1..75: mol_type = other DNA
cgggcacgttacctgaagctggcgcgcaccaatgcggcgactgcgttaaccagcaaactttcgcagcaatctact

SEQ ID NO: 792993 - DNA, 75 bp, synthetic construct
  source 1..75: mol_type = other DNA
aatacggcattatcagccggactatgatgaatattcgttcattgcgtgtatttgctcgtgaggttgattttgagc

SEQ ID NO: 792994 - DNA, 75 bp, synthetic construct
  source 1..75: mol_type = other DNA
cagccagaatctggagtttgaagaagcggcacgtattcgcgaccaaattcaggcggtgcgacgcgtcaccgaaaa

SEQ ID NO: 792995 - DNA, 75 bp, synthetic construct
  source 1..75: mol_type = other DNA
aagagaaaatgactaaactgccaaacggtgctgtggatgcgctaaaggaagaattaacccgacgcatcagtaagc

SEQ ID NO: 792996 - DNA, 75 bp, synthetic construct
  source 1..75: mol_type = other DNA
tctgttacacgcactgcagataaggattctgcaaaaacatttgttcaggagactctgaaagatacctgggagtct

SEQ ID NO: 792997 - DNA, 75 bp, synthetic construct
  source 1..75: mol_type = other DNA
atgcgtattgagatctgcatagccaaagagaaaatgactaaaatgccaaacggtgctgtggatgcgttagtggat

SEQ ID NO: 792998 - DNA, 75 bp, synthetic construct
  source 1..75: mol_type = other DNA
cgtcttgtttattcgtcagggcaaggtgctcggtagccgtagttatttcccgaaagtacctggcggtacggagct

SEQ ID NO: 792999 - DNA, 75 bp, synthetic construct
  source 1..75: mol_type = other DNA
ttgaaatatatgggcggtttgcaaggtttacgtaacgccagcgtcgaggaaattgcaaaagtgccgggtatttcg

SEQ ID NO: 793000 - DNA, 75 bp, synthetic construct
  source 1..75: mol_type = other DNA
aaaagccaccagcaatgatgagctttctgttacacgcaccgcagataaggattctgcaaaaacatttgttcagta

SEQ ID NO: 793001 - DNA, 75 bp, synthetic construct
  source 1..75: mol_type = other DNA
accgtgcaagtgtgaccaagagagaggacggcaagcgctcctcatggcacgtaaaccgctttggacggcttaaac

SEQ ID NO: 793002 - DNA, 75 bp, synthetic construct
  source 1..75: mol_type = other DNA
gaaactgagtctttcaagacgtattcgaagagtgttcctgagcgtattatgaaggagttagcggggtatattgaa

SEQ ID NO: 793003 - DNA, 75 bp, synthetic construct
  source 1..75: mol_type = other DNA
ttacaggtggcctcgttatgggcgttgctttctctgctatggcccatccggaattaaaaagctctgtgccacagg

SEQ ID NO: 793004 - DNA, 75 bp, synthetic construct
  source 1..75: mol_type = other DNA
ttgatcatctccgagagacaaaggcagtccagacagtggctaactacctatcagcaatggcaaacattctcgatc

SEQ ID NO: 793005 - DNA, 75 bp, synthetic construct
  source 1..75: mol_type = other DNA
cccgaaagcatcagcgccaattatctcccaatgcccctctctgaataagatgttggagatttacctcacgcataa

SEQ ID NO: 793006 - DNA, 75 bp, synthetic construct
  source 1..75: mol_type = other DNA
gccgtgatcagtaagctaaacgccgccggagtggatgaatctcgtattgccttgctcgcgggccactcatttgga

SEQ ID NO: 793007 - DNA, 75 bp, synthetic construct
  source 1..75: mol_type = other DNA
tgaatgcccaggcgttaaaagatgccggcgtacaacctggtccgctgttccaggatttgaaaaaaggcaaaacag

SEQ ID NO: 793008 - DNA, 75 bp, synthetic construct
  source 1..75: mol_type = other DNA
cgccagcttgccggcatgggcaataacctgaaccagatagcccgccgtgttaacaccggcggcggtactggccat

SEQ ID NO: 793009 - DNA, 75 bp, synthetic construct
  source 1..75: mol_type = other DNA
gtcgaaaacgagcagaaagcgattctactgattgtgcgccgccttgccgaaaccggcgagatggtgattggcagc

SEQ ID NO: 793010 - DNA, 75 bp, synthetic construct
  source 1..75: mol_type = other DNA
ctgaaacatccgacgcaagccgggctttggttatttgattgtggtgaaggtacacaacaccagatgttgcacacg

SEQ ID NO: 793011 - DNA, 75 bp, synthetic construct
  source 1..75: mol_type = other DNA
gatgacaaaggttgtcagcacctgttacgtgaatgcaggtcaattttcccggcgactgaactggcgaatgatttc

SEQ ID NO: 793012 - DNA, 75 bp, synthetic construct
  source 1..75: mol_type = other DNA
ttttcggcgataccggccctgcgatgccgcacttgacctggctaaaggcgtcgatgtcatggtgcacgaagcgac

SEQ ID NO: 793013 - DNA, 75 bp, synthetic construct
  source 1..75: mol_type = other DNA
ggtgttatgtttcgaggtgacggagggtaagacacgcaatgcggcgcggttggttccacttcatagtgcgattag

SEQ ID NO: 793014 - DNA, 75 bp, synthetic construct
  source 1..75: mol_type = other DNA
gccaggcgaagccatacgccgcgcagccgaaggactggaaaagctgggaatgacgcatttcagagcgttgaaggt

SEQ ID NO: 793015 - DNA, 75 bp, synthetic construct
  source 1..75: mol_type = other DNA
acgcagggcgaacgctatctggagttggcggagaagcgcgaggcgaatgagtcgtttgtctacggctggatgaaa

SEQ ID NO: 793016 - DNA, 75 bp, synthetic construct
  source 1..75: mol_type = other DNA
accactgttacaggctggattgaacacatgaaaaaaaccctttcagaacatacaattgcaaactatatcagccca

SEQ ID NO: 793017 - DNA, 75 bp, synthetic construct
  source 1..75: mol_type = other DNA
ttacgtcaatcacccggatgataaaggcggaccgacaaaatggggtattactgaaaaagttgcccgtgcgcacgg

SEQ ID NO: 793018 - DNA, 75 bp, synthetic construct
  source 1..75: mol_type = other DNA
gtgataccggtgtgaatatggggccgtccgtagcatcgaaaatgctccaacgctggctgaacgttttcaacctgc

SEQ ID NO: 793019 - DNA, 75 bp, synthetic construct
  source 1..75: mol_type = other DNA
gccgggcgaagccatacgccgcgcagccgaagggctggaagcgctgggaatgacgcatttcaaggcgttgaaggt

SEQ ID NO: 793020 - DNA, 75 bp, synthetic construct
  source 1..75: mol_type = other DNA
gtattttatctgacggcactaacactgttgataaagtcaaaatcacctttagctctgccagcgttgacactaccg

SEQ ID NO: 793021 - DNA, 75 bp, synthetic construct
  source 1..75: mol_type = other DNA
tgttcgcaaccgcattgttatcaggcgttgcttttaacgctcttgctgacgatgctaatcagggttccggtaaaa

SEQ ID NO: 793022 - DNA, 75 bp, synthetic construct
  source 1..75: mol_type = other DNA
atgaaatacaagccggatcaatacatcatatctgatagttacggagtttattacgtcaggatttcaattcctgta

SEQ ID NO: 793023 - DNA, 75 bp, synthetic construct
  source 1..75: mol_type = other DNA
aaatctacctgacaattaacagcacgaagaagaagccagccactttagctaaggcaagaaaagcggtagagatgt

SEQ ID NO: 793024 - DNA, 75 bp, synthetic construct
  source 1..75: mol_type = other DNA
cgctcctgtaaacagcacaatagagaacacgctggaactgttacgcagtaaggctaaatacgccaaaacagctac

SEQ ID NO: 793025 - DNA, 75 bp, synthetic construct
  source 1..75: mol_type = other DNA
tcacagagatttacaagagctaaacgaaaggctttaggggaaaagggaacagaaaggaaagtgtttcattctctg

SEQ ID NO: 793026 - DNA, 75 bp, synthetic construct
  source 1..75: mol_type = other DNA
ggtacgcgaattcgacggcgaactggcgcaaaaaattatcgacgaaatgttcctgttcgaaaatctggtggatgt

SEQ ID NO: 793027 - DNA, 75 bp, synthetic construct
  source 1..75: mol_type = other DNA
gccgaaccgctcccaatctggctgaggctggcaatggatttggctgtcgttacagggcagagagtaggcgattta

SEQ ID NO: 793028 - DNA, 75 bp, synthetic construct
  source 1..75: mol_type = other DNA
aatagcagggaatttttgatacttggcgcagctctaggaatagttgatgcggcaacgcttcacctaattactcat

SEQ ID NO: 793029 - DNA, 75 bp, synthetic construct
  source 1..75: mol_type = other DNA
tttgctgtgattgctccgctataccgtgttgcccccgaacaaacagaacaggttgagtcctttgttctgcagctt

SEQ ID NO: 793030 - DNA, 75 bp, synthetic construct
  source 1..75: mol_type = other DNA
gtgtgtcagtgacatggcaacttttgtgcgatgatcatggttttacccgggagcactacaatctgctgaagaagt

SEQ ID NO: 793031 - DNA, 75 bp, synthetic construct
  source 1..75: mol_type = other DNA
gagacagcgaataacaaaaatacttaatgagtccgatacaagacgggtggcagaagagattaaattccggattca

SEQ ID NO: 793032 - DNA, 75 bp, synthetic construct
  source 1..75: mol_type = other DNA
cctgacagggtaatggaatcaaaacatccacagttttttgtcgagatgacgcgagaatcgctacaaccgagtcgc

SEQ ID NO: 793033 - DNA, 75 bp, synthetic construct
  source 1..75: mol_type = other DNA
ttatctcttgccgattaattatcgtctgctctggcaaccagatgaaacgcgttatgcggaaatcagtcgggaaat

SEQ ID NO: 793034 - DNA, 75 bp, synthetic construct
  source 1..75: mol_type = other DNA
ccgctgctgtttttctccgtcgctaaaggcaaattgcccacctatattctttcctgctttgcacctctggcaatg

SEQ ID NO: 793035 - DNA, 75 bp, synthetic construct
  source 1..75: mol_type = other DNA
atgagcttaaaaagctcattggagaagacgccatagaagaaattgcagcattaacaacagctataaagaatatta

SEQ ID NO: 793036 - DNA, 75 bp, synthetic construct
  source 1..75: mol_type = other DNA
ccgctgctgtttttctccgtcgccaaaggcaaattgcccacttatattctctcctgctttgcgcctttagcgatg

SEQ ID NO: 793037 - DNA, 75 bp, synthetic construct
  source 1..75: mol_type = other DNA
ggtttatctctcactgtttattgtctacgccatcggcacttatgcggtgctcgacccattcattgcattctggct

SEQ ID NO: 793038 - DNA, 75 bp, synthetic construct
  source 1..75: mol_type = other DNA
ttcaaatatctggataagcattatgttttcaatgtcgggggcaatgaattacgtgttgtagcaatggtctttttt

SEQ ID NO: 793039 - DNA, 75 bp, synthetic construct
  source 1..75: mol_type = other DNA
tcacgaactgaatcaggaatggagtgaacgccggtctgaattttgtctgatgcagaacatgcgcgaaaagcgtaa

SEQ ID NO: 793040 - DNA, 75 bp, synthetic construct
  source 1..75: mol_type = other DNA
atgtcatttaaatatcgggatagtccgctttattatcggactgcgcgggaggctttgcgccttgagcagtccggc

SEQ ID NO: 793041 - DNA, 75 bp, synthetic construct
  source 1..75: mol_type = other DNA
acacaactgtaagaatcaacgaagacagaaaattggagctaaaacgaagagtgctagaaatcggcaataagaccg

SEQ ID NO: 793042 - DNA, 75 bp, synthetic construct
  source 1..75: mol_type = other DNA
aaaatgaaatcacagagagcaactggatttgcccctatatttccagacacctgttatcacttaacccattactgg

SEQ ID NO: 793043 - DNA, 75 bp, synthetic construct
  source 1..75: mol_type = other DNA
cagcggacaaccagcagttcagcatcgtcctgggtggtgttacctggcggattagcatcatatggcgcgatctgt

SEQ ID NO: 793044 - DNA, 75 bp, synthetic construct
  source 1..75: mol_type = other DNA
ctgataagaatttgcgggatgagtggataatccagaccaaagacagatggatgcgggcatttaaatcaaagagtc

SEQ ID NO: 793045 - DNA, 75 bp, synthetic construct
  source 1..75: mol_type = other DNA
gcacgttcaggtcggggtcgacaaaaaacatgagctggacggactggatttgtttaccggtttcactgtcacaca

SEQ ID NO: 793046 - DNA, 75 bp, synthetic construct
  source 1..75: mol_type = other DNA
tcatcacaacccgggaaaccgatgacaaaataacatggtcactgacaggctataacacggtagcaaacaaggaag

SEQ ID NO: 793047 - DNA, 75 bp, synthetic construct
  source 1..75: mol_type = other DNA
aaagacaatgaattcaaaccctcaatatatctgaatgatgcatcttatctactgactgacgattcagccagactc

SEQ ID NO: 793048 - DNA, 75 bp, synthetic construct
  source 1..75: mol_type = other DNA
aggcctggcatgtggtgatggtggaggctgttcattatatggaagtggactggcgcgacagcgtggtgaaaccgt

SEQ ID NO: 793049 - DNA, 75 bp, synthetic construct
  source 1..75: mol_type = other DNA
cgtggacatccggctgcgccgcgattccctgcgcctgtattgcgcacctgccattaatttatttatcgggcctta

SEQ ID NO: 793050 - DNA, 75 bp, synthetic construct
  source 1..75: mol_type = other DNA
gcgcggtggaagaagcgttattacaaactgtcagcggcttaggacgattattgaattatacgctttgtgaaatga

SEQ ID NO: 793051 - DNA, 75 bp, synthetic construct
  source 1..75: mol_type = other DNA
gcgatgatgaccgtgatcccccgcatctccagcccggcactgaccgcacaggaaattgcagagatggacccggca

SEQ ID NO: 793052 - DNA, 75 bp, synthetic construct
  source 1..75: mol_type = other DNA
aatattcctaaaagaggtctatgtaacactatcataaatataataagtttcttttgttcttctttttattcttta

SEQ ID NO: 793053 - DNA, 75 bp, synthetic construct
  source 1..75: mol_type = other DNA
ttgtagaccaggctaaactggaggaggaaatgggtgacctgctgtttgcgacggtcaatctggcccgccatttag

SEQ ID NO: 793054 - DNA, 75 bp, synthetic construct
  source 1..75: mol_type = other DNA
gatctgttcaaacgcttccgtggtcgtgaaccgcaactggatgcgatgctggagcattacggcattaagggctga

SEQ ID NO: 793055 - DNA, 75 bp, synthetic construct
  source 1..75: mol_type = other DNA
ctggcaaaacgcgcgcgtccgcagggcgaaaaagagctgacacaactgcgtgccttcgccaaagccgaatttggc

SEQ ID NO: 793056 - DNA, 75 bp, synthetic construct
  source 1..75: mol_type = other DNA
aaaacaaagcggttaacggcctgtttgaagtggtaaaacgtatttacggcatcaccgctaaagagcgtaaagatg

SEQ ID NO: 793057 - DNA, 75 bp, synthetic construct
  source 1..75: mol_type = other DNA
ctttctggtagttggtccgattactgggcttccgggcaaaatcgtagcaattactccattggctatagtaacagt

SEQ ID NO: 793058 - DNA, 75 bp, synthetic construct
  source 1..75: mol_type = other DNA
ttactctattggctacagtaacagtacatcctggggcagctacagtgtcagtgcggctttgttgaataaatcaga

SEQ ID NO: 793059 - DNA, 75 bp, synthetic construct
  source 1..75: mol_type = other DNA
tgtcgatgttactcactcaaatgtcagcattccggacgataaaacctatcaaggacaaagctaccgtatttcctg

SEQ ID NO: 793060 - DNA, 75 bp, synthetic construct
  source 1..75: mol_type = other DNA
taacagtcgtcaagtttctctcagcaccgacggtggttttgtattgcatagcggcggcctgaccttcagtaatga

SEQ ID NO: 793061 - DNA, 75 bp, synthetic construct
  source 1..75: mol_type = other DNA
ctcataacctcacgcagatcgctacgctttgtgcgctgctttatagttcctttagcataagtgctgaacacgttg

SEQ ID NO: 793062 - DNA, 75 bp, synthetic construct
  source 1..75: mol_type = other DNA
aatacgacccaaccttcctgatggggcagaatacttccaatattgaccttagtcgatacagtgagggcaacccca

SEQ ID NO: 793063 - DNA, 75 bp, synthetic construct
  source 1..75: mol_type = other DNA
gcgaaaatgtggagcgcgtggtagcgcagggggcaccgtacacctgggaaaatctctgccaaccgctggcggaag

SEQ ID NO: 793064 - DNA, 75 bp, synthetic construct
  source 1..75: mol_type = other DNA
acccacgatccgcaggtcgctgctcaggccgagcgggtgatcgaaattcgcgacggtgaaatcgtgcgcaatccg

SEQ ID NO: 793065 - DNA, 75 bp, synthetic construct
  source 1..75: mol_type = other DNA
cacaatttaatctctctggtggaaatttggtgtcattggagctaggtcttttcctaaagaaaaaaggattagatg

SEQ ID NO: 793066 - DNA, 75 bp, synthetic construct
  source 1..75: mol_type = other DNA
tcctggttcggaagtaactggcatgcgcggcggcattcataactcggtcacccgcgtttgtccgaaaccaacgca

SEQ ID NO: 793067 - DNA, 75 bp, synthetic construct
  source 1..75: mol_type = other DNA
gccgtcagcttttcccgcataaagcggatgtggttggcgaggtgattctggttggtaatatgccagcgagggtca

SEQ ID NO: 793068 - DNA, 75 bp, synthetic construct
  source 1..75: mol_type = other DNA
cacccacgatccgcaggtcgctgctcaggccgagcgggtgatcgaaattcgcgacggcgaaattgtgcgcaatcc

SEQ ID NO: 793069 - DNA, 75 bp, synthetic construct
  source 1..75: mol_type = other DNA
cgatggcgtggcgggcgctggcagcgaataaaatgcgtactttactgaccatgctggggattattatcggtattg

SEQ ID NO: 793070 - DNA, 75 bp, synthetic construct
  source 1..75: mol_type = other DNA
atgagcgataagcagactgaaaagaccattcaactggatacccctatcaagcgcggtaaaacagaaattaccgaa

SEQ ID NO: 793071 - DNA, 75 bp, synthetic construct
  source 1..75: mol_type = other DNA
cagctggagttcggcctgttcgatttccgtctgcacgcggagttccgtcctgaacaaggtgcaaaaatcctcgaa

SEQ ID NO: 793072 - DNA, 75 bp, synthetic construct
  source 1..75: mol_type = other DNA
gaaaactacgccttcaaatcgcttgccactaaaatggcagaaaatccgcagcaggtgcttgatttcttaaccgat

SEQ ID NO: 793073 - DNA, 75 bp, synthetic construct
  source 1..75: mol_type = other DNA
gccaactggctgaacaattgggccgccctggcgcggcgcgtgccgtaggtgcggcaaatggatcgaatcccatca

SEQ ID NO: 793074 - DNA, 75 bp, synthetic construct
  source 1..75: mol_type = other DNA
tatgagcgaatttccgcaaccaatcccggcggtcttagcgacaaacttcgcgactattttgccggtaatcttagc

SEQ ID NO: 793075 - DNA, 75 bp, synthetic construct
  source 1..75: mol_type = other DNA
ttgccacgccactgggtccgctgtgggtgatttgcgatgaacagtttcgcctgcgggcggtggaatgggaggaat

SEQ ID NO: 793076 - DNA, 75 bp, synthetic construct
  source 1..75: mol_type = other DNA
tcagttggtgcattttctttcgatgtgactcattccaatgttcgtatcccggatgataaaacataccaggggcaa

SEQ ID NO: 793077 - DNA, 75 bp, synthetic construct
  source 1..75: mol_type = other DNA
aatcgtcgctatccgaagatgatcctctatcaacatgccgcccgctacctactctgggggcaggcaagctgtctt

SEQ ID NO: 793078 - DNA, 75 bp, synthetic construct
  source 1..75: mol_type = other DNA
atacacctcttctgaccgcaccaatgaccaggttaaccatactgcggcgggtggtgataaagcagacgcgtggac

SEQ ID NO: 793079 - DNA, 75 bp, synthetic construct
  source 1..75: mol_type = other DNA
atggtggaaatggcttcgttgttaatgatataacgtcttcaaataacattatatggtcatcgccaaatggctgga

SEQ ID NO: 793080 - DNA, 75 bp, synthetic construct
  source 1..75: mol_type = other DNA
gattgtctggctgctctggtgtggcggctttttcagccaggcatgcgcagcacaacctccgcaggctgcgctgca

SEQ ID NO: 793081 - DNA, 75 bp, synthetic construct
  source 1..75: mol_type = other DNA
ccttcatctttctgattgcgtttggtctgggtgtgaccgccattaagcatggcgaatcacgcaacgataaataca

SEQ ID NO: 793082 - DNA, 75 bp, synthetic construct
  source 1..75: mol_type = other DNA
gccgggcaattacaccaggagtccgcctggcagccaatggtacgttcccccgttggcgcacaaggtatggcgcaa

SEQ ID NO: 793083 - DNA, 75 bp, synthetic construct
  source 1..75: mol_type = other DNA
tgcgaaaatcgtggttggtaaaattatcgatgctgcccgcgcccgtgaagcggcacgtcgtgcgcgtgaaatgac

SEQ ID NO: 793084 - DNA, 75 bp, synthetic construct
  source 1..75: mol_type = other DNA
cagcttcgagcaggcgctggactggctggtgaaagagtctcgtcgcggtctctccatccagcgttataaaggtct

SEQ ID NO: 793085 - DNA, 75 bp, synthetic construct
  source 1..75: mol_type = other DNA
ataagatgttggcttcccaggaagtggcgacgcttatcaccgcgcttggctgcgggattggtcgtgacgagtaca

SEQ ID NO: 793086 - DNA, 75 bp, synthetic construct
  source 1..75: mol_type = other DNA
gtggtaatggcttcgttattaatgatattacgtcttcgaataacattatatggtcatcgccaaacggctggaaac

SEQ ID NO: 793087 - DNA, 75 bp, synthetic construct
  source 1..75: mol_type = other DNA
aaacccagaactttgaagtcactgcacagtaccagtttgattttggtctgcgtccggcagtctctttcctgatgt

SEQ ID NO: 793088 - DNA, 75 bp, synthetic construct
  source 1..75: mol_type = other DNA
atgaaaaagagtactcgggcattagtggtgatgggcattgtggcatctgcatccgtacaggccgcagaaatatat

SEQ ID NO: 793089 - DNA, 75 bp, synthetic construct
  source 1..75: mol_type = other DNA
tgcctgccactgccgactggataagccagatcgtgcccgccctgcgtagccgtcagccgtttaatccgtcctggg

SEQ ID NO: 793090 - DNA, 75 bp, synthetic construct
  source 1..75: mol_type = other DNA
gccagagatgctgccacacgaaggcgcgtctggcacgctggagcagcatttacaacgcgttattggccatctgaa

SEQ ID NO: 793091 - DNA, 75 bp, synthetic construct
  source 1..75: mol_type = other DNA
gtcgctgtttgccacttgtagcttgctaacgcaactgctgctggaaaaagatatccccctaccctttctgctgac

SEQ ID NO: 793092 - DNA, 75 bp, synthetic construct
  source 1..75: mol_type = other DNA
tctatgcccgtgacttactggccgataaacagcggcgaatgccgttactgccggcgctgaaaagttatctgtcac

SEQ ID NO: 793093 - DNA, 75 bp, synthetic construct
  source 1..75: mol_type = other DNA
tcggcaattgcctcaatttgacggaaattatccctcaggcttctgttcgttatgacgttaacgatcaacgtctgg

SEQ ID NO: 793094 - DNA, 75 bp, synthetic construct
  source 1..75: mol_type = other DNA
tgtttatgtaaacgaccaaccaatcattaaccaaagtattacatttgtcgcaattgaaggaaaaaagaacgccca

SEQ ID NO: 793095 - DNA, 75 bp, synthetic construct
  source 1..75: mol_type = other DNA
gttattaaccaaagcattacatttgtcgcaattgaaggaaaaaagaacgcacaagcctgtatcacacttaaaaat

SEQ ID NO: 793096 - DNA, 75 bp, synthetic construct
  source 1..75: mol_type = other DNA
cgggggggacgccatttcagcgcgaagtctggaaaacactgcgcactatcccctgcgggcaggtaatgcattatg

SEQ ID NO: 793097 - DNA, 75 bp, synthetic construct
  source 1..75: mol_type = other DNA
gtcaggcccgcgctgcccagccaccgcagaccgcgctgcagtatcgcgacgatgtgatccgtaatgcccggcttg

SEQ ID NO: 793098 - DNA, 75 bp, synthetic construct
  source 1..75: mol_type = other DNA
ctcaggttgtctgggccgtgctggtactgctggggctgggcatcgaactggcccgctacgggcaggcccgaacgg

SEQ ID NO: 793099 - DNA, 75 bp, synthetic construct
  source 1..75: mol_type = other DNA
gctactcaccacgctcgccagctatctgatattgcgcaaaaactacggctgggcgacggtcggttttaccattac

SEQ ID NO: 793100 - DNA, 75 bp, synthetic construct
  source 1..75: mol_type = other DNA
tgaaatctccggcgttgcgtaatgccggacgactgagcgtgatgttaagcgttgccagcttgatggggactgctt

SEQ ID NO: 793101 - DNA, 75 bp, synthetic construct
  source 1..75: mol_type = other DNA
gttgccagcctgatgggcaccgcgctgcatctgccgaagtcgtactggatcctgatgacggtattgctggtgaca

SEQ ID NO: 793102 - DNA, 75 bp, synthetic construct
  source 1..75: mol_type = other DNA
ttttcctgacaaactccgcgccaatgttgttgatagatccttcgcgtgatgggcaaatcgtcgatgccaatctgg

SEQ ID NO: 793103 - DNA, 75 bp, synthetic construct
  source 1..75: mol_type = other DNA
gaagccagcctgttcttccggctacaaagtacgggatgcggattgcgacggcttctgttgacgtgtatgacaaca

SEQ ID NO: 793104 - DNA, 75 bp, synthetic construct
  source 1..75: mol_type = other DNA
accacactgaacatcaaaggagaaagctaccggttaaaggtaaccggctcatttaaaccgtctggtctgtttcct

SEQ ID NO: 793105 - DNA, 75 bp, synthetic construct
  source 1..75: mol_type = other DNA
ctgttacatctgtatgggaaaagaatgccgggatttgcgcttcgttaatgacgcaggcggcggaaaatgacgcct

SEQ ID NO: 793106 - DNA, 75 bp, synthetic construct
  source 1..75: mol_type = other DNA
ctgttacatccgtgtgggaaaagaacgctgaaatttgcgcctcgttgatggcgcaggcggcggaaaacgacgtct

SEQ ID NO: 793107 - DNA, 75 bp, synthetic construct
  source 1..75: mol_type = other DNA
gtatcgatgaactgtttaaacgggtcgatgatgcgttgtatcgggcaaaaaatgatggacgcaaccgcgtgctgg

SEQ ID NO: 793108 - DNA, 75 bp, synthetic construct
  source 1..75: mol_type = other DNA
cttcttatttctataaccactccagccagtggcgttatgaaaccgtcacggcggaagagttgctgtcaccgatgg

SEQ ID NO: 793109 - DNA, 75 bp, synthetic construct
  source 1..75: mol_type = other DNA
actgtgaacatgctgcacgccttaaacttgccactgaatttattctgagctttgctgcccgtatccctgtgaaaa

SEQ ID NO: 793110 - DNA, 75 bp, synthetic construct
  source 1..75: mol_type = other DNA
gcggaagagttgctgtcaccgatggcggataaatcccgttataccggacatctgatcgactttaacgtccgtgcg

SEQ ID NO: 793111 - DNA, 75 bp, synthetic construct
  source 1..75: mol_type = other DNA
agagaaacgtaaagctggagtgctgaccaaaaacacaacgccaatcagtgatgatgaaatggtggaaagcggaca

SEQ ID NO: 793112 - DNA, 75 bp, synthetic construct
  source 1..75: mol_type = other DNA
gccgcctgaaaatggagcatctgagttatcacgttgaaagcctgctggaacaggcagctaaaaaagagctgaact

SEQ ID NO: 793113 - DNA, 75 bp, synthetic construct
  source 1..75: mol_type = other DNA
ccagccgatgctcaataccgcaattgatgcggcagagatgatcctgacgctggcaccggaaaccaacggtcaggt

SEQ ID NO: 793114 - DNA, 75 bp, synthetic construct
  source 1..75: mol_type = other DNA
cggtcttatgacctgctatgacttacgctttccggagctggcgctggcacaggctatacagggagcagaaatcct

SEQ ID NO: 793115 - DNA, 75 bp, synthetic construct
  source 1..75: mol_type = other DNA
ccaataatatatggcaaaacgatcgggatcatttacttgcttttacgcttaatgttcccttcagtcattggatgc

SEQ ID NO: 793116 - DNA, 75 bp, synthetic construct
  source 1..75: mol_type = other DNA
ggagaagaggaaaatgctcactgtgtcgccaattatcaactgccaccagagagtcagcagcagttattaacccag

SEQ ID NO: 793117 - DNA, 75 bp, synthetic construct
  source 1..75: mol_type = other DNA
tatccttgttctgggaaaaagggaggtgtctctcactgtacctccgatggaaagttcgtttgcaatgatggaact

SEQ ID NO: 793118 - DNA, 75 bp, synthetic construct
  source 1..75: mol_type = other DNA
atcgggggtttatggcactctgctgccggataataacctgaattatagcgttcaggtcggtaacacccacggagg

SEQ ID NO: 793119 - DNA, 75 bp, synthetic construct
  source 1..75: mol_type = other DNA
tgccacggccataccggcccggatgtgaaaccgggtatgacaaaaaccgatgaagaatgtctggaactgctggaa

SEQ ID NO: 793120 - DNA, 75 bp, synthetic construct
  source 1..75: mol_type = other DNA
gcactctgctgccggataataacctgaattatagcgttcaggtcggtaacacccacggaggtaatacatcgtctg

SEQ ID NO: 793121 - DNA, 75 bp, synthetic construct
  source 1..75: mol_type = other DNA
tgaccaacctatcaggggtttatggcactctgctgccggataataacctgaattatagcgttcaggtcggtaaca

SEQ ID NO: 793122 - DNA, 75 bp, synthetic construct
  source 1..75: mol_type = other DNA
tggcgtgaaagcggtggatgcaggacatcgggtactgtttatgccactggacagactgatcgcgacactgatgaa

SEQ ID NO: 793123 - DNA, 75 bp, synthetic construct
  source 1..75: mol_type = other DNA
gaggcaagcctgttcttcaggctgctgaatcggcgttacgagaaggccagcatcatcctgacgtcgaacaagggg

SEQ ID NO: 793124 - DNA, 75 bp, synthetic construct
  source 1..75: mol_type = other DNA
ctttcgattacgggcgtaattatggtgtaatgtacgacatcgaaggctggaccgatatgctgccggaatttggtg

SEQ ID NO: 793125 - DNA, 75 bp, synthetic construct
  source 1..75: mol_type = other DNA
atgtctaaagggcgtgacctgaacgctgctggtggtgttgataatccagccggtgttgacgataaagatctggtc

SEQ ID NO: 793126 - DNA, 75 bp, synthetic construct
  source 1..75: mol_type = other DNA
taatccctgccctgctcgccgcaggtgctgtacatgcagcagaaatttataataaagacggcaataaattagatc

SEQ ID NO: 793127 - DNA, 75 bp, synthetic construct
  source 1..75: mol_type = other DNA
atgataaacatcaaaaatttcaggcaatacaccccggaaaacccgcccgtggcgtgggcgacatatctcatcagc

SEQ ID NO: 793128 - DNA, 75 bp, synthetic construct
  source 1..75: mol_type = other DNA
ggctatcgctattgctctggcggcgggcgtcggtttgtatggctggggtaaacaacaggccgtcaatcagactgc

SEQ ID NO: 793129 - DNA, 75 bp, synthetic construct
  source 1..75: mol_type = other DNA
aacaacaggccgtcaatcagaccgccaccagcgatgccctggctaaccaactgacggcattgcaaaaagcccagg

SEQ ID NO: 793130 - DNA, 75 bp, synthetic construct
  source 1..75: mol_type = other DNA
cttgagcaggcgaatcgtcagcaagaaacgctggcaaaacagttggatgaagtccaacaaaaggtcgccaccatt

SEQ ID NO: 793131 - DNA, 75 bp, synthetic construct
  source 1..75: mol_type = other DNA
tcaacatgctgattttctgcggctgtgtcggtcagagcggcggtggctgggcgcactatgtaggtcaggaaaaac

SEQ ID NO: 793132 - DNA, 75 bp, synthetic construct
  source 1..75: mol_type = other DNA
tacgctcaatgaaacatttaaatactatacgacagcgacatttatcgcttcggtcgtcgctctggcgggcacatt

SEQ ID NO: 793133 - DNA, 75 bp, synthetic construct
  source 1..75: mol_type = other DNA
agagccaaaaagcagaactggaaggtatcatcaaacaacaggctacgcagttagagcaggcaaaccgtcagcaag

SEQ ID NO: 793134 - DNA, 75 bp, synthetic construct
  source 1..75: mol_type = other DNA
atgaacggcggtcaggtaattcttgccgatgaaccaaccggcgcactggacagccattctggcgaagaggtgatg

SEQ ID NO: 793135 - DNA, 75 bp, synthetic construct
  source 1..75: mol_type = other DNA
tggtgggcggtattggtgtaatgaatattatgctggtgtcagtgaccgagcggacgcgggaaattggcattcgca

SEQ ID NO: 793136 - DNA, 75 bp, synthetic construct
  source 1..75: mol_type = other DNA
aaatgtggttggcgaggttatcttggttggtaatatgccagcgagagtcatcggcgtggcagaggaaaaacagtc

SEQ ID NO: 793137 - DNA, 75 bp, synthetic construct
  source 1..75: mol_type = other DNA
ccgatgctggtaatgctggagcctcgcgacgatggtagctacgttcccgggcgcatgatccgcgcatctgacctg

SEQ ID NO: 793138 - DNA, 75 bp, synthetic construct
  source 1..75: mol_type = other DNA
cgtggtattacaaccactgctgcatgactctccggcagaactctcccagccgtgtgaagtgctcgactggcgcaa

SEQ ID NO: 793139 - DNA, 75 bp, synthetic construct
  source 1..75: mol_type = other DNA
aaacaaatggtgctggcggatattcgttctattggtacgaatactattgatgtctatcccgggaaagattttggc

SEQ ID NO: 793140 - DNA, 75 bp, synthetic construct
  source 1..75: mol_type = other DNA
gagtttatgctcaagtacctgctggggacggagcacggtatccagggcaaagacctggggcagcagggcggcgtg

SEQ ID NO: 793141 - DNA, 75 bp, synthetic construct
  source 1..75: mol_type = other DNA
gagcgatggcgaaaaacaagaagtgttgcgcctttgtcggcaacgacttatgcgtaaattacgtgcaaataagcc

SEQ ID NO: 793142 - DNA, 75 bp, synthetic construct
  source 1..75: mol_type = other DNA
ctgcgcctttgtcggcagcgattaatgcgcaaattacgtgcaaataagccagcgtcatcagacgaaccggagcaa

SEQ ID NO: 793143 - DNA, 75 bp, synthetic construct
  source 1..75: mol_type = other DNA
gtggcggagcaattagagttctttcccgtccagagcccgtgccggggaatttgccagtctgacgaacgcggattt

SEQ ID NO: 793144 - DNA, 75 bp, synthetic construct
  source 1..75: mol_type = other DNA
ctgggacctccgggtgtaggaaaaacgcatctggccatagctcttggcgtgaaagcggtggatgcgggacatcgg

SEQ ID NO: 793145 - DNA, 75 bp, synthetic construct
  source 1..75: mol_type = other DNA
gttcgtggagcgctgcgaaaacgtgatcctgctgggagctcctcgtgtcggaaaaactcatctggccatagctct

SEQ ID NO: 793146 - DNA, 75 bp, synthetic construct
  source 1..75: mol_type = other DNA
ctgcgcctttgtcggcagcggctgatgcgcaaattacgcgcgaataagccagcgtcatcagacgaaccggagcaa

SEQ ID NO: 793147 - DNA, 75 bp, synthetic construct
  source 1..75: mol_type = other DNA
caaagacagcattaattcttttattctctgtttttctggtagctgcagtaacaaaagcaaaaagctcgcttcccg

SEQ ID NO: 793148 - DNA, 75 bp, synthetic construct
  source 1..75: mol_type = other DNA
caaagacagcattcattcttttattttctgttttcctggtagctgcagtgacaaaagcaaaaagctcgcttcccg

SEQ ID NO: 793149 - DNA, 75 bp, synthetic construct
  source 1..75: mol_type = other DNA
aaattcatccccacagatattcaaactatctatttacgagaatcacttgaaaaattcagagacaacgaagagttt

SEQ ID NO: 793150 - DNA, 75 bp, synthetic construct
  source 1..75: mol_type = other DNA
cctgtattttctggcgacagactgtatcgccagcatacgcagcagtggtcagctctctccggccctgaaggactg

SEQ ID NO: 793151 - DNA, 75 bp, synthetic construct
  source 1..75: mol_type = other DNA
tttgcgccgcgattagcgataaattagaacgccgtcatccacatgtttttgctgacggttctgccggaaacagcc

SEQ ID NO: 793152 - DNA, 75 bp, synthetic construct
  source 1..75: mol_type = other DNA
ttcggataaaagcggaatcactattaccggtacagagaaagcacagcaggaaggtattaagttcgcaacaatctt

SEQ ID NO: 793153 - DNA, 75 bp, synthetic construct
  source 1..75: mol_type = other DNA
ctctggattgatcccaatgcctttggtgcggccaagtttagtgggattttaaaaaatatagcgatgaattatgca

SEQ ID NO: 793154 - DNA, 75 bp, synthetic construct
  source 1..75: mol_type = other DNA
atctctcaaagtttgataattaatgagttgttaaatggagttgatagaaataccatcccttttcagaaaataagt

SEQ ID NO: 793155 - DNA, 75 bp, synthetic construct
  source 1..75: mol_type = other DNA
aaattggaaaacatcttttttatgtaatcttgccagactactatatagcatgtttaatggtagcgtctattttcc

SEQ ID NO: 793156 - DNA, 75 bp, synthetic construct
  source 1..75: mol_type = other DNA
cttttatctgagctcatccccgcagtttgatttagtcatgggaatgataaaaatgaaaggtggtgtgactaatga

SEQ ID NO: 793157 - DNA, 75 bp, synthetic construct
  source 1..75: mol_type = other DNA
aaggctgggaacatatcgaaattgttctgccaggagagccggaaacgttgaatgcccgtgcgctggcgttgcttt

SEQ ID NO: 793158 - DNA, 75 bp, synthetic construct
  source 1..75: mol_type = other DNA
atccgacactggcggtcactgatggcagaacaaccattaagtttcatccgtggtccattgaagagattgttgcta

SEQ ID NO: 793159 - DNA, 75 bp, synthetic construct
  source 1..75: mol_type = other DNA
ggcaagtgtaagggagtttgcccggctgcaaatcgccttcgcccactgtttacgcatgacattacgcaaacagcc

SEQ ID NO: 793160 - DNA, 75 bp, synthetic construct
  source 1..75: mol_type = other DNA
taagagagttcactagattgcaaattgcttttgctcactgtttacgtatgacattacgtaaacaaccgcaggcag

SEQ ID NO: 793161 - DNA, 75 bp, synthetic construct
  source 1..75: mol_type = other DNA
aaccgcgagtctgtctggaatattgaaccggtaactcacgatgagaaacccaacaatcccaccgggtgtgacggt

SEQ ID NO: 793162 - DNA, 75 bp, synthetic construct
  source 1..75: mol_type = other DNA
cggaagtgctggctcaatatctcaagacggaagatcttcagcgtgtactggcttcgaactctccagctaaccgta

SEQ ID NO: 793163 - DNA, 75 bp, synthetic construct
  source 1..75: mol_type = other DNA
ttttgctgatgatggggaagtggttagcagttcagcgccggaatgggcaactttctgacattctatttattagtc

SEQ ID NO: 793164 - DNA, 75 bp, synthetic construct
  source 1..75: mol_type = other DNA
gtgtaagggagtttgcccggctgcaaatcgccttcgcccactgtttacgcatgacattacgcaaacagccacagg

SEQ ID NO: 793165 - DNA, 75 bp, synthetic construct
  source 1..75: mol_type = other DNA
cttattaaacgagttaatgatttcatcagccgtttcaccgactatacacatgtaatgtgtgttggtggtggggct

SEQ ID NO: 793166 - DNA, 75 bp, synthetic construct
  source 1..75: mol_type = other DNA
atcaaggcttcttctggtctgaacgaagatgaaatccagaaaatggtacgcgacgcagaagctaacgccgaagct

SEQ ID NO: 793167 - DNA, 75 bp, synthetic construct
  source 1..75: mol_type = other DNA
actcgtgcaaaactggaaagcctggtagaagacctggtgaaccgttccattgagccgctgaaagttgctctgcag

SEQ ID NO: 793168 - DNA, 75 bp, synthetic construct
  source 1..75: mol_type = other DNA
tggatggtatcaacccggcaccgcgcggcatgccacagatcgaagttaccttcgatatcgatgctgacggtatcc

SEQ ID NO: 793169 - DNA, 75 bp, synthetic construct
  source 1..75: mol_type = other DNA
cggtgcatgaagtttgcggatttttgttactggcatgctggctcggctttgtgctgatcaatgccgttgggggta

SEQ ID NO: 793170 - DNA, 75 bp, synthetic construct
  source 1..75: mol_type = other DNA
ctggcatttataagcctctttttttatcttcggtcatctttatctttgcaccacggggcgtacgccacacgaaac

SEQ ID NO: 793171 - DNA, 75 bp, synthetic construct
  source 1..75: mol_type = other DNA
gtactggcaaccgtactatcgcggtttatgacctgggtggtggtactttcgatatttctattattgaaatcgacg

SEQ ID NO: 793172 - DNA, 75 bp, synthetic construct
  source 1..75: mol_type = other DNA
aagagcagaaaattagccaggcgacactggaagcattagaggcagagctttatcggaacctgcaacctctgtatc

SEQ ID NO: 793173 - DNA, 75 bp, synthetic construct
  source 1..75: mol_type = other DNA
gctacgtcaggtaagccctgccggaaatattcgcgatattccgttcgtcgttctggtgggcggttcttcgctgga

SEQ ID NO: 793174 - DNA, 75 bp, synthetic construct
  source 1..75: mol_type = other DNA
agcgaaggtccgcgcaatgcggtagctactgggctcctcatcgcctggcacaaggagtcgattcatggaaagtaa

SEQ ID NO: 793175 - DNA, 75 bp, synthetic construct
  source 1..75: mol_type = other DNA
agcggggtaagacaggctgaagataaggaacgtgtaatggaaattctgcagcaggtctgggaagacgacagctgg

SEQ ID NO: 793176 - DNA, 75 bp, synthetic construct
  source 1..75: mol_type = other DNA
accggactgcaactggacgaagaaagaaaacaagtgctgaaaattatgcagaaggtgtgggaagacgacagctgg

SEQ ID NO: 793177 - DNA, 75 bp, synthetic construct
  source 1..75: mol_type = other DNA
taccgcaatctgcaccccctgtatcccaaaatggtaattcgcattcgcaaaggtagctctaacggtgtggaacta

SEQ ID NO: 793178 - DNA, 75 bp, synthetic construct
  source 1..75: mol_type = other DNA
tgagcaactggcttccctgatttatctgatgacagagcaacttgatggcgtggtacagcgttgccaggatgacct

SEQ ID NO: 793179 - DNA, 75 bp, synthetic construct
  source 1..75: mol_type = other DNA
gtggaagattatgtaccctggcaggcattacagggagcgaaattggtgttgcaggattacgcgtcaggcagccga

SEQ ID NO: 793180 - DNA, 75 bp, synthetic construct
  source 1..75: mol_type = other DNA
cgaataagctgtatcaggtggcgctttttactgctgccaaccgcaaccgctcgatggttaatatccttactgaac

SEQ ID NO: 793181 - DNA, 75 bp, synthetic construct
  source 1..75: mol_type = other DNA
gccatccttatatcaatttgattcaggagagcggtaccccctgcgtcatgctcgatcgtgtggatcctgggctta

SEQ ID NO: 793182 - DNA, 75 bp, synthetic construct
  source 1..75: mol_type = other DNA
accacggaacagtgttgattgatggcaaagaggtcaggatcgctaatcccaaacaggccattgatcatggaattg

SEQ ID NO: 793183 - DNA, 75 bp, synthetic construct
  source 1..75: mol_type = other DNA
cgttatgggacgtggtacgagaccagggcaatgcgctaatggctgggcgggaaggggatccgttgtatcagatat

SEQ ID NO: 793184 - DNA, 75 bp, synthetic construct
  source 1..75: mol_type = other DNA
gcaggagattggacatccggcgacgctgttcccgatggtagccgcaggcatcggcatcagtattcttcccgcact

SEQ ID NO: 793185 - DNA, 75 bp, synthetic construct
  source 1..75: mol_type = other DNA
cagttttgctgacaatattcaacatgcaggagggcatgctatatccctcaactggcagccgccagcacaaggtga

SEQ ID NO: 793186 - DNA, 75 bp, synthetic construct
  source 1..75: mol_type = other DNA
ggttacatctacttcgcgatgttcttctctattgcggttgaaagcctcaacctgattcgcaacaaaaagaatccg

SEQ ID NO: 793187 - DNA, 75 bp, synthetic construct
  source 1..75: mol_type = other DNA
tcttatcaatgcctttctgatcggcctgtatgccatgggatacagcagtggtcatgatgcggcaaagcgtgacgg

SEQ ID NO: 793188 - DNA, 75 bp, synthetic construct
  source 1..75: mol_type = other DNA
cttatcctccgggtgtgctgtgtgttgttcctggtgaaatctggggtggtgctgttctgcgttacttcagcgctc

SEQ ID NO: 793189 - DNA, 75 bp, synthetic construct
  source 1..75: mol_type = other DNA
tcgtccgttcgttcctgaactggtggatggcaagccatggcagtcataccccaccgctgaaattgccaatgacct

SEQ ID NO: 793190 - DNA, 75 bp, synthetic construct
  source 1..75: mol_type = other DNA
aaagtgccaaccaaatcgccatgacacgttatctcgaagcacagcccgtgttggtggatgtcatgctcgctaaag

SEQ ID NO: 793191 - DNA, 75 bp, synthetic construct
  source 1..75: mol_type = other DNA
taaccagcatcctgatggcgtgggtatttactttaccggcggcaatttttctttctggtgggctgtactggatag

SEQ ID NO: 793192 - DNA, 72 bp, synthetic construct
  source 1..72: mol_type = other DNA
gaaggcgaagaagctctcagcttcagtgagtttaaacaggcgctttccagctcggcaaaatctaacggctga

SEQ ID NO: 793193 - DNA, 75 bp, synthetic construct
  source 1..75: mol_type = other DNA
tccacggcggtgaaacgaactatattcgtgccacggtgagcctgtatgtgtcgctgtataacatcttcgtcagcc

SEQ ID NO: 793194 - DNA, 75 bp, synthetic construct
  source 1..75: mol_type = other DNA
ttccttggtgaatgtcccgacgcagatccggaggccgtaaataaaatactgtccaggtacggtaaggtcagagga

SEQ ID NO: 793195 - DNA, 75 bp, synthetic construct
  source 1..75: mol_type = other DNA
taccgccacgtggagcgtgccgtaaaaggtggctctggttatgtcgttcgtgtttgcgctaaagacatgaaggtg

SEQ ID NO: 793196 - DNA, 75 bp, synthetic construct
  source 1..75: mol_type = other DNA
atcgatctgtgggaagtggcctggtctgtttgtccgaccggtacagctcgccgaatcgtcggtaagccaattctg

SEQ ID NO: 793197 - DNA, 75 bp, synthetic construct
  source 1..75: mol_type = other DNA
attaatccagtttcagttgctgctgacgggtccgtttacattgacgactctttaacaacttacagcaaaaacaac

SEQ ID NO: 793198 - DNA, 75 bp, synthetic construct
  source 1..75: mol_type = other DNA
gaaaccgctggcgctggaagactggtcattctatgtttctgggcactataccgggcagaaacgcgccgacagcgc

SEQ ID NO: 793199 - DNA, 75 bp, synthetic construct
  source 1..75: mol_type = other DNA
ataattttaatacagagctaagtcaattatgtatgaatggagaacacttttcacttttaattgaaatatcaccaa

SEQ ID NO: 793200 - DNA, 75 bp, synthetic construct
  source 1..75: mol_type = other DNA
tgaatgcgtccggctatgaaattacccgtacccgcgatgccgttaccaacttcgaacactacctgcaacagcatc

SEQ ID NO: 793201 - DNA, 75 bp, synthetic construct
  source 1..75: mol_type = other DNA
gtgctcaaggattcattttcttccgccagtgtctttatggggctatcactattattgcttgccctggtgctgttc

SEQ ID NO: 793202 - DNA, 75 bp, synthetic construct
  source 1..75: mol_type = other DNA
ggtgcagcgttggcaaccgcaggggtaattatgcaggggctttttcgcaacccaatggctgaccctggattactc

SEQ ID NO: 793203 - DNA, 75 bp, synthetic construct
  source 1..75: mol_type = other DNA
cgcgcgagaaaaaatcaaacattattggtgaaaaagctaaattgtgtttttcagctatttgctataacgcactga

SEQ ID NO: 793204 - DNA, 75 bp, synthetic construct
  source 1..75: mol_type = other DNA
aaatgaaggggagggatggcaatccctgttgaactggtcatttacggttaggaatgtgtcctctagcttatcttt

SEQ ID NO: 793205 - DNA, 75 bp, synthetic construct
  source 1..75: mol_type = other DNA
gaatggtgttaaaaccaaaatcaacctctacgcgctaatgcagcgtggtgacttgcgtcagaacaaactgctgca

SEQ ID NO: 793206 - DNA, 75 bp, synthetic construct
  source 1..75: mol_type = other DNA
gataccggtataaagcaaaacggcgacggcattctggatgtttatgcgaatggtcagcatgtatttcgttttcag

SEQ ID NO: 793207 - DNA, 75 bp, synthetic construct
  source 1..75: mol_type = other DNA
tttagatgttaatagttctggtaaccttgcagaaataatcagtactgatttaactgtaactccatcccggggagc

SEQ ID NO: 793208 - DNA, 75 bp, synthetic construct
  source 1..75: mol_type = other DNA
gtgatattcaatcttcttggtcacatgaatcaaatatacagcagttaatgtatggcgtatctggtggggtagtct

SEQ ID NO: 793209 - DNA, 75 bp, synthetic construct
  source 1..75: mol_type = other DNA
gagtcttccagtgtagttaacacgcagaatacgctatccattaatagcagcttgaacgttgcaggatggcgtgta

SEQ ID NO: 793210 - DNA, 75 bp, synthetic construct
  source 1..75: mol_type = other DNA
gtgaatgtttcagggcgggtaacaccgtcagactacggaaacttcgatgcacgttacgcaaaaacaggggccagt

SEQ ID NO: 793211 - DNA, 75 bp, synthetic construct
  source 1..75: mol_type = other DNA
ggattaaaacccacggtggacaaggcaaaaaatgccgttcagcgtgatggcgacaccatgacaggaaagctgacg

SEQ ID NO: 793212 - DNA, 75 bp, synthetic construct
  source 1..75: mol_type = other DNA
cagataacatcggcggcgtgtattaccgtccgcttcagaaactgatcaacggcacctggtataacgtggcgagtg

SEQ ID NO: 793213 - DNA, 75 bp, synthetic construct
  source 1..75: mol_type = other DNA
cgctggcaagtagcaacattgcagttgcgggaatcgtgtttatcgccagtattctggtaccgtttactaaagtga

SEQ ID NO: 793214 - DNA, 75 bp, synthetic construct
  source 1..75: mol_type = other DNA
ttgttgttacctgccaacctgttgcctatttctatcatttatctgaatggtggccggcaggaagatacgattctt

SEQ ID NO: 793215 - DNA, 75 bp, synthetic construct
  source 1..75: mol_type = other DNA
tcaggtcaatggtgcgctgggtatatcggcgttcagaacgcgctgggcggaaactcaattgctttcggggataac

SEQ ID NO: 793216 - DNA, 75 bp, synthetic construct
  source 1..75: mol_type = other DNA
gtaatcctgttcgtaccgatgtgttggcgttgccactgccgcagcaacgtttggctggtcgtgaaggtccggttc

SEQ ID NO: 793217 - DNA, 75 bp, synthetic construct
  source 1..75: mol_type = other DNA
gatagtgcttcgcaacagcacccttgagatgttcgacaatattgaagatgccatccgtatttatcagaacttata

SEQ ID NO: 793218 - DNA, 75 bp, synthetic construct
  source 1..75: mol_type = other DNA
ttaggagggatggatacgcctaacagggggaaagtaactcgtctctgccgagtatcttggcctctagcactagct

SEQ ID NO: 793219 - DNA, 75 bp, synthetic construct
  source 1..75: mol_type = other DNA
agcgtacaaacctgacgtggtgctcggaatgggcggctacgtatcaggcccaggtggtctggccgcgtggtcgtt

SEQ ID NO: 793220 - DNA, 75 bp, synthetic construct
  source 1..75: mol_type = other DNA
atcagcaaaaggggatgataagtttatcaccaccgactatttgcaacagtgccatcgcgagtgggtcagggtggg

SEQ ID NO: 793221 - DNA, 75 bp, synthetic construct
  source 1..75: mol_type = other DNA
cgatctgaaacacgcactcgttccggcacaatccatcgcggaaggcggtcgtctcgctgtgccattgcggccgga

SEQ ID NO: 793222 - DNA, 75 bp, synthetic construct
  source 1..75: mol_type = other DNA
ttccggaagatatgcgcaccgcgcgtctgacctccagcgaaaaacaccgtattgttgagcgcgtgatccgccgcg

SEQ ID NO: 793223 - DNA, 75 bp, synthetic construct
  source 1..75: mol_type = other DNA
attactggcgtcttggcgctatcttcggggtgatctacatctcaatgctgttgctggttggctggccgattctgg

SEQ ID NO: 793224 - DNA, 75 bp, synthetic construct
  source 1..75: mol_type = other DNA
cgtttaatgcgcaaaaacaggcgctgaaatgggggctggcaggtttctccagcaccaccgtctggctggtgtttg

SEQ ID NO: 793225 - DNA, 75 bp, synthetic construct
  source 1..75: mol_type = other DNA
gcgccgtggctttcctacgtgctgtacaaaccggaaatcacacacagtgaagaagtggcaacctgggcgggtgat

SEQ ID NO: 793226 - DNA, 75 bp, synthetic construct
  source 1..75: mol_type = other DNA
caagcgatcattgagcaaacgttgtgtgagctggtagatgaaatgagttgtcatctggtgctcacaacgggcgga

SEQ ID NO: 793227 - DNA, 75 bp, synthetic construct
  source 1..75: mol_type = other DNA
ggcgcaatcttcggggtgatttacatctctatgctgctgttggttggctggccgattctcgccatgtggaactaa

SEQ ID NO: 793228 - DNA, 75 bp, synthetic construct
  source 1..75: mol_type = other DNA
aaccatgctgccggttattctggccgtcggtaaaggtattccgggcgtaccaatggaacaactgtgtatcctgct

SEQ ID NO: 793229 - DNA, 75 bp, synthetic construct
  source 1..75: mol_type = other DNA
aacaatctgggtgaaaaatcactcacgctctgtgatagcaataccggttttaagtggggcggacgcggtgttatt

SEQ ID NO: 793230 - DNA, 75 bp, synthetic construct
  source 1..75: mol_type = other DNA
accaccatcagtgccgccccggtgacgtttgaaaaccacctggattccgccattgtggtgaacaaaacctccgcc

SEQ ID NO: 793231 - DNA, 75 bp, synthetic construct
  source 1..75: mol_type = other DNA
cagcagcaactggctgtcagcacggataaaaccacggccactgcagatggtgcggacagtgtgcgctataccctg

SEQ ID NO: 793232 - DNA, 75 bp, synthetic construct
  source 1..75: mol_type = other DNA
acgctgggaacacaacggcggcacgctgaatggtgagaacaccacgaacgctgacggtgtggccacagccaccct

SEQ ID NO: 793233 - DNA, 75 bp, synthetic construct
  source 1..75: mol_type = other DNA
caaaaaactgatcaaagatagtgggcaagtgtttttgcaaccacttaacccgcagtttccaatcatcccatgcaa

SEQ ID NO: 793234 - DNA, 75 bp, synthetic construct
  source 1..75: mol_type = other DNA
ggggctgacgacacccgcctgaacctcggtctgacataccgtatcggtgaaccgctggcgcatcaactggacagc

SEQ ID NO: 793235 - DNA, 75 bp, synthetic construct
  source 1..75: mol_type = other DNA
gggagccagacagacggtcaccctgacgctgacggatgccgcaggcaacccggtcagtggcgaacgcgtggactg

SEQ ID NO: 793236 - DNA, 75 bp, synthetic construct
  source 1..75: mol_type = other DNA
agtttcagagccagttggcgaactatgtgccacagttcactcccgaattttggccggtgtggttgatcattgccg

SEQ ID NO: 793237 - DNA, 75 bp, synthetic construct
  source 1..75: mol_type = other DNA
gagatgtgtttcctggcgtaagatactggttattgcaggcgcattttgctctggcatttataagcctctttttta

SEQ ID NO: 793238 - DNA, 75 bp, synthetic construct
  source 1..75: mol_type = other DNA
tatcaaccattttgcactggtcagcgttacggtcgtcaaaagtctggttgcggttcatgaggtttgtgggttttt

SEQ ID NO: 793239 - DNA, 75 bp, synthetic construct
  source 1..75: mol_type = other DNA
ctgacggtgtggccacagccaccctgaccagtcagaccgccggtattatccgggttacggccaccacccgtaacc

SEQ ID NO: 793240 - DNA, 75 bp, synthetic construct
  source 1..75: mol_type = other DNA
gaataccgtaagcagacgctgattaccctgcaactgccaccggatgtgtacggcgcagaactgacgaccgtcacc

SEQ ID NO: 793241 - DNA, 75 bp, synthetic construct
  source 1..75: mol_type = other DNA
ccaaaacagcaattcgtatccgtaagggcagtgccaacggcgttgagctgagcgggttaaaactggatgaagata

SEQ ID NO: 793242 - DNA, 75 bp, synthetic construct
  source 1..75: mol_type = other DNA
atgaaatggtatgaactggctagatccagaatgaaagagctcggcataactcaagagaagttagctgaagagctt

SEQ ID NO: 793243 - DNA, 75 bp, synthetic construct
  source 1..75: mol_type = other DNA
tattccgttttcagaacgggacgttacaaagtaacagggccatgaacacttccggtcgggtaacgccgtcagatt

SEQ ID NO: 793244 - DNA, 75 bp, synthetic construct
  source 1..75: mol_type = other DNA
tcgttaagagttgattatctaaaatcatttaacatttgggggatgcagggatatttgtatccaaaaaccaacatc

SEQ ID NO: 793245 - DNA, 75 bp, synthetic construct
  source 1..75: mol_type = other DNA
gagtaataaaaacgtactgatgacaaatataagtaattttggcatagctctttaccaaggtgacggaacagcaag

SEQ ID NO: 793246 - DNA, 75 bp, synthetic construct
  source 1..75: mol_type = other DNA
tacggttcaggttattgaacttgccgtgaatcctacgtttagtacccactggttaatcccaaatttacatgaatt

SEQ ID NO: 793247 - DNA, 75 bp, synthetic construct
  source 1..75: mol_type = other DNA
caataatgggccgcgtttcgatttgctttcgatgctgattgccgccgtgcgctctaatctcggcgtggcattgct

SEQ ID NO: 793248 - DNA, 75 bp, synthetic construct
  source 1..75: mol_type = other DNA
cacttgcgaaactgacatcaggaggcttacaggatttacgtccacagacgcccgatgaagaacaaagcaatgcgc

SEQ ID NO: 793249 - DNA, 75 bp, synthetic construct
  source 1..75: mol_type = other DNA
gtgaagggaaattacgtttgcgacaacacgcaatctgcgctggagctggcacgaaatcacctggggattgtgttt

SEQ ID NO: 793250 - DNA, 75 bp, synthetic construct
  source 1..75: mol_type = other DNA
gatgggtcagcacaaccaaaaaagccagtgattgtgcgttttggcttgaagttgaaggtaattccatgaccgcgc

SEQ ID NO: 793251 - DNA, 75 bp, synthetic construct
  source 1..75: mol_type = other DNA
tttacgtgagcgctccggtggcaccactgccagccagcctgacttctgatactcctgtaccgtttatacccaatc

SEQ ID NO: 793252 - DNA, 75 bp, synthetic construct
  source 1..75: mol_type = other DNA
gaacccaggaagatatcaaagtggctgttgcggatgatgattgtgcttcacgtcctgtgcctgctgccgctgctg

SEQ ID NO: 793253 - DNA, 75 bp, synthetic construct
  source 1..75: mol_type = other DNA
cacgggtctgggagtttttccaaagtttagggaaaacatttatgttcccagtatcattactcgcttttatgggac

SEQ ID NO: 793254 - DNA, 75 bp, synthetic construct
  source 1..75: mol_type = other DNA
cgccagattgatggtgttccttctgccatcagccagttgcaggaagttgctgcaagagtcgggcacaaagttccg

SEQ ID NO: 793255 - DNA, 75 bp, synthetic construct
  source 1..75: mol_type = other DNA
tgccgcagggctgtcaactgcgccggcccttgccaaaaatatctcatcttcaacggcacatatcatcagtaaaac

SEQ ID NO: 793256 - DNA, 75 bp, synthetic construct
  source 1..75: mol_type = other DNA
ttgggacaatgcaatattgacaaagcggggattcgaagtatcgagatgcgccataacgctttgctggcagcaggc

SEQ ID NO: 793257 - DNA, 75 bp, synthetic construct
  source 1..75: mol_type = other DNA
tacgcggccagaaattaccccgacgccgcggagctggtgcttctggcaccaatgaaaaaagatctaccgccataa

SEQ ID NO: 793258 - DNA, 75 bp, synthetic construct
  source 1..75: mol_type = other DNA
cgctattaatccgcgcgcccgttttcatgatggttcgcccattactgcccgcgatgtagagtttacttttcaaaa

SEQ ID NO: 793259 - DNA, 75 bp, synthetic construct
  source 1..75: mol_type = other DNA
ttttgattatgtgaaccccgccgcgccaaaaggtgggcagataacgttgtcagccctcggcaccttcgataattt

SEQ ID NO: 793260 - DNA, 75 bp, synthetic construct
  source 1..75: mol_type = other DNA
tccgggtgctgtatctgaacaaccagaatcagctgattgccggtgaaaccctctttaccggcaccatcaaccgca

SEQ ID NO: 793261 - DNA, 75 bp, synthetic construct
  source 1..75: mol_type = other DNA
ctcgcaaatcaccaaccgcatgcgcagtcgcgactatgacatgatgccgcgcgtatggcgggcgatgccgtggcc

SEQ ID NO: 793262 - DNA, 75 bp, synthetic construct
  source 1..75: mol_type = other DNA
ggcaaagaagatatgctcagtttgttttcgttaccagtgctgccagagaaatactggaaagatcataagcttagc

SEQ ID NO: 793263 - DNA, 75 bp, synthetic construct
  source 1..75: mol_type = other DNA
atggacgtgagtcagccgaacaactggccgcgtgtggaagagttgttccgccgcaaaatctggcaactgaaagag

SEQ ID NO: 793264 - DNA, 75 bp, synthetic construct
  source 1..75: mol_type = other DNA
gcgcatcataccagcccgatctgcgtgaagcgcaatgtgctggttggtaccttcattcctcatccgttgctaacc

SEQ ID NO: 793265 - DNA, 75 bp, synthetic construct
  source 1..75: mol_type = other DNA
atgagcagaaaaaataaaaaagtgcgcatgagttcacgcattgatctcgctgatgcgctcaggaatgaatcgtcg

SEQ ID NO: 793266 - DNA, 75 bp, synthetic construct
  source 1..75: mol_type = other DNA
aatcaggggctgttttttccgcacgacctaccggaatttagtctgaccgaaattgatgagatgctgaagctggat

SEQ ID NO: 793267 - DNA, 75 bp, synthetic construct
  source 1..75: mol_type = other DNA
ttactcctgaaaatctcgcattagcattaacaggaaagtcagacctgccagtagagctaaagctgcgaaatgttg

SEQ ID NO: 793268 - DNA, 75 bp, synthetic construct
  source 1..75: mol_type = other DNA
cccgcaggaaatcctggaagagcgcgtgcgcgcggcgtttgccttcccggctccggtcgccaatgttgaaagcga

SEQ ID NO: 793269 - DNA, 75 bp, synthetic construct
  source 1..75: mol_type = other DNA
cgccgtcgctactacaagaacggcagtcatgccggtttcatcctctacctgagcgaccctgcccataacgaggcg

SEQ ID NO: 793270 - DNA, 75 bp, synthetic construct
  source 1..75: mol_type = other DNA
gagcaacaacaacgggtaaaaacccgtacggcagagcagagtgccagtattgctgctattgaagctgaacgacgt

SEQ ID NO: 793271 - DNA, 75 bp, synthetic construct
  source 1..75: mol_type = other DNA
accagactgcacgggtacattttaatcctgacaatgcctttgatgctgaaggcctgacccttctgacccaggaaa

SEQ ID NO: 793272 - DNA, 75 bp, synthetic construct
  source 1..75: mol_type = other DNA
tcggcggtcgctttatggcgcaagtgctgacccatattgcgggcgataagccagtgaccattctgactgcgactt

SEQ ID NO: 793273 - DNA, 75 bp, synthetic construct
  source 1..75: mol_type = other DNA
aacgataccgtgccacgtttcctgcacgacggtcagtggtcacccaaagcgactcaggcgacgttatccaacgcg

SEQ ID NO: 793274 - DNA, 75 bp, synthetic construct
  source 1..75: mol_type = other DNA
atgataaaccatctgacatcggtgaagaccgtaacggaagggcttgctcaggcaacagagcagcttgccgttgag

SEQ ID NO: 793275 - DNA, 75 bp, synthetic construct
  source 1..75: mol_type = other DNA
ctaacggacagatagggccggaggcggcaggcagtcttgtgcagctgattgaccagcgggtgcaggcggtgatgc

SEQ ID NO: 793276 - DNA, 75 bp, synthetic construct
  source 1..75: mol_type = other DNA
tggatatccgggtaccggaccatctgataatcggtggcagccaagttttctcctttgcggaacacggtctgcttt

SEQ ID NO: 793277 - DNA, 75 bp, synthetic construct
  source 1..75: mol_type = other DNA
gcgtatccggggattaaagtctcgacggcagaagccagggctattttaccggcgcagtatcgccgccaggattgc

SEQ ID NO: 793278 - DNA, 75 bp, synthetic construct
  source 1..75: mol_type = other DNA
atgcagcagctttcctttctgcccggagagatgacgcccggcgagcgcagcctcattcatcgggccctgaaaacc

SEQ ID NO: 793279 - DNA, 75 bp, synthetic construct
  source 1..75: mol_type = other DNA
caccggcaccatcaaccgcacggaagtccatccccgggaagtgattaaacgcgccctgtatcacaatgccgcagc

SEQ ID NO: 793280 - DNA, 75 bp, synthetic construct
  source 1..75: mol_type = other DNA
accaacgtgaacgataccgtgccacgtttcctgcacgacggtcagtggtcacccaaagcgactcaggcgacgtta

SEQ ID NO: 793281 - DNA, 75 bp, synthetic construct
  source 1..75: mol_type = other DNA
tcacccccagcaaggcagaccgccttatcactgagcgtctggtacaggcactggccctggtggatatccgggtac

SEQ ID NO: 793282 - DNA, 75 bp, synthetic construct
  source 1..75: mol_type = other DNA
gcgtggccttcacctccacccgtgcagcacgggaatggctgattctgaacatggcgggactagagcgtgaagagt

SEQ ID NO: 793283 - DNA, 75 bp, synthetic construct
  source 1..75: mol_type = other DNA
ggcgcaaaatggaccgcagacaaagttgcgcgacacctctatatttctgtatccacattacatcgtcgtctggca

SEQ ID NO: 793284 - DNA, 75 bp, synthetic construct
  source 1..75: mol_type = other DNA
tcagggggccagtctactgtctttattatctctgttgcattactgatggtaggtctgtggaatgcgacattatta

SEQ ID NO: 793285 - DNA, 75 bp, synthetic construct
  source 1..75: mol_type = other DNA
tgtgtcagttaagccagggggaagcgaatgtgaccgagctggaagcggcggtcggtatcactcagccgaccctgt

SEQ ID NO: 793286 - DNA, 75 bp, synthetic construct
  source 1..75: mol_type = other DNA
cgtctggtacaggcgctgggcctggtggatatccgggtgccggaccatctgatagtcggtggcagccaggttttc

SEQ ID NO: 793287 - DNA, 75 bp, synthetic construct
  source 1..75: mol_type = other DNA
gaatcagctgattgccggtgaaacccttttcaccggcaccatcaaccgcacggaagtccatccccgggaagtgat

SEQ ID NO: 793288 - DNA, 75 bp, synthetic construct
  source 1..75: mol_type = other DNA
gagaaaatggttataaatgtccttcacgttttactgaaaggtttcataaccgttttaaaataaccccaagagaac

SEQ ID NO: 793289 - DNA, 75 bp, synthetic construct
  source 1..75: mol_type = other DNA
tggatatccgcgtccctgaccatctgattgtcggcggcaggcaaatctattcgtccgcagaacacggtttgctgt

SEQ ID NO: 793290 - DNA, 75 bp, synthetic construct
  source 1..75: mol_type = other DNA
ccgctgccgtggtactggcacacaatcacccgtccggtgaagtcacacccagtaaggcagaccggcttatcaccg

SEQ ID NO: 793291 - DNA, 75 bp, synthetic construct
  source 1..75: mol_type = other DNA
aaccgcacggaagtccatccccgggaagtgattaaacgcgccctgcaccacaatgccgcagccgtggtgctggca

SEQ ID NO: 793292 - DNA, 75 bp, synthetic construct
  source 1..75: mol_type = other DNA
ctcttcaccggcaccatcaaccgcacggaagttcatccccgggaagtgattaaacgtgccctgtaccacaatgcc

SEQ ID NO: 793293 - DNA, 75 bp, synthetic construct
  source 1..75: mol_type = other DNA
atgcagcagctttcctttctgcccggagagatgacacctggcgagcgcagcctcattctgcgggctctgaaaacc

SEQ ID NO: 793294 - DNA, 75 bp, synthetic construct
  source 1..75: mol_type = other DNA
tccgggtgctgtatctgaataaccagaatcagctgattgccggtgaaaccctcttcaccggcaccatcaaccgca

SEQ ID NO: 793295 - DNA, 75 bp, synthetic construct
  source 1..75: mol_type = other DNA
gccggtgaaaccctcttcaccggcaccatcaaccgcacggaagtccatccccgtgaagtgattaaacgcgccctg

SEQ ID NO: 793296 - DNA, 75 bp, synthetic construct
  source 1..75: mol_type = other DNA
tcacgcgttctatggtttaccgaatgtaaaagtggttatcctctatccgcgcggcaaaatcagcccactgcaaga

SEQ ID NO: 793297 - DNA, 75 bp, synthetic construct
  source 1..75: mol_type = other DNA
ggcacgggaatggctgattctgaacatggcgggactggagcgtgaagagttccgggtgctgtatctgaataacca

SEQ ID NO: 793298 - DNA, 75 bp, synthetic construct
  source 1..75: mol_type = other DNA
acgtctggtacaggcactgggcctggtggatatccgggtgccggaccatctgatagtcggtggcaaccaggtttt

SEQ ID NO: 793299 - DNA, 75 bp, synthetic construct
  source 1..75: mol_type = other DNA
atgcaacagctttcctttctgcccggagagatgacgcccggtgagcgcagcctcattcagcgggccctgaaaacc

SEQ ID NO: 793300 - DNA, 75 bp, synthetic construct
  source 1..75: mol_type = other DNA
taaacgcgccctgcaccacaatgccgctgccgtggtgctggcacacaatcacccgtccggtgaagtcacacctgg

SEQ ID NO: 793301 - DNA, 75 bp, synthetic construct
  source 1..75: mol_type = other DNA
ccaggccgacaaaaccctcacgcagcgactggttcaggtgcttcagctggtggatatccgcgtccctgaccacct

SEQ ID NO: 793302 - DNA, 75 bp, synthetic construct
  source 1..75: mol_type = other DNA
tatgtgggggtcgcctcagaaaacggaatctatggtcactcccgtttttgcaacaccgattttgacgaaaagtag

SEQ ID NO: 793303 - DNA, 75 bp, synthetic construct
  source 1..75: mol_type = other DNA
aagctcttaacatcagcaaaatcgaatcttttgtcgcagtcacaactattttcctcggcaaaatgagatcccggc

SEQ ID NO: 793304 - DNA, 75 bp, synthetic construct
  source 1..75: mol_type = other DNA
aggctgcgttacctgtcgcaaacaaaggcgcagaaacaccttatttactgcaatcatgggtagataatatagatg

SEQ ID NO: 793305 - DNA, 75 bp, synthetic construct
  source 1..75: mol_type = other DNA
tatgtgggggtcgcctcagaaaacggaatctatggtcactcccgtttttgcaacaccgattttgacgagaagtgg

SEQ ID NO: 793306 - DNA, 75 bp, synthetic construct
  source 1..75: mol_type = other DNA
tatgtgggggtcgcctcagaaaacggaatctatggtcactcccgtttttgcaacaccgattttgacgacaagtcg

SEQ ID NO: 793307 - DNA, 75 bp, synthetic construct
  source 1..75: mol_type = other DNA
tatgtgggggtcgcctcagaaaacggaatctatggtcactcccgtttttgcaacaccgattttgacgataagttg

SEQ ID NO: 793308 - DNA, 75 bp, synthetic construct
  source 1..75: mol_type = other DNA
acgcgttctggcggtgggatggcaaaaccggttgccatgttccaaagtggccgcagtgtggttgtatttatggac

SEQ ID NO: 793309 - DNA, 75 bp, synthetic construct
  source 1..75: mol_type = other DNA
aacaacgagatagatgcatcatctgttttttccaaactggaaatagctcaagcagaaggctacgacaacatcaag

SEQ ID NO: 793310 - DNA, 75 bp, synthetic construct
  source 1..75: mol_type = other DNA
tgtcatctactctttcagcaaatatggattatcttccaatactattcagctttcatttcaggaatttgcaaaagc

SEQ ID NO: 793311 - DNA, 75 bp, synthetic construct
  source 1..75: mol_type = other DNA
gtgatcgaggatcgcgtggtaaatcaacggaattattatcaggtaacaatctgcccgcagaaattgtcacgtaaa

SEQ ID NO: 793312 - DNA, 75 bp, synthetic construct
  source 1..75: mol_type = other DNA
ataccaggaaaatctgctaaatgatgtgaatgctgacctgattaacttttacaagactctgcaacgcgaggcgca

SEQ ID NO: 793313 - DNA, 75 bp, synthetic construct
  source 1..75: mol_type = other DNA
cgccgtcttacccctgtcgaatgtgaaaggctgcaaggttttcctgatgggcatacgttgatcccgacggaaaag

SEQ ID NO: 793314 - DNA, 75 bp, synthetic construct
  source 1..75: mol_type = other DNA
aacgaaaagaaacttaacatgatgaatgctgagcaccgcaagctgctggagcaggagatggtcaatttcctgttc

SEQ ID NO: 793315 - DNA, 75 bp, synthetic construct
  source 1..75: mol_type = other DNA
gtgcgttaaccgtcagccccgatcaagtgctgcaactgacgccagaaaaatcgcgatgctgccgcaaggcagtcg

SEQ ID NO: 793316 - DNA, 75 bp, synthetic construct
  source 1..75: mol_type = other DNA
gatcctctggtgagcgatgttctgcgtgcgttaaccgtcagccccgatcaagtgctgcaactgacgccagaaaaa

SEQ ID NO: 793317 - DNA, 75 bp, synthetic construct
  source 1..75: mol_type = other DNA
gactatcagcgtcagggattgggaagggcgctgctggaacatctgatcgacgaactggaaaaacgcggcgtggcg

SEQ ID NO: 793318 - DNA, 75 bp, synthetic construct
  source 1..75: mol_type = other DNA
cggagcaggcaatgcttgagaacgctgcgttgcgagcatgggcaaaacggtatcaggagcaggtggccgccgggc

SEQ ID NO: 793319 - DNA, 75 bp, synthetic construct
  source 1..75: mol_type = other DNA
cattcagactcagttgccgccgctggcacccgctctggcacagcgaccgggcaacctgaaaccactgacacccgg

SEQ ID NO: 793320 - DNA, 75 bp, synthetic construct
  source 1..75: mol_type = other DNA
tgacaacgcatccgtcgacaccggtcattcagactcagttgccgccgctggcacccgctctggcacagcgaccgg

SEQ ID NO: 793321 - DNA, 75 bp, synthetic construct
  source 1..75: mol_type = other DNA
atctaccgccgcctgtaccacgttctgcataaactgcgcggcgatgcccctttcccgctgttacaccaggacaaa

SEQ ID NO: 793322 - DNA, 75 bp, synthetic construct
  source 1..75: mol_type = other DNA
taaacatattttttgtggtggcgttgtcgtgctggcgttgttttacctgttctatctgttgcggctggacagcca

SEQ ID NO: 793323 - DNA, 75 bp, synthetic construct
  source 1..75: mol_type = other DNA
gatgtaacttaccgaacgtccagcttcagaaggtcgtgtcatttatttctggtaacgatcatttcttcctgaatc

SEQ ID NO: 793324 - DNA, 75 bp, synthetic construct
  source 1..75: mol_type = other DNA
cgacaacgcaacacagtgccgcatctggcgaacccagataaatgccctgctggatgaacgggaaggattacaaca

SEQ ID NO: 793325 - DNA, 75 bp, synthetic construct
  source 1..75: mol_type = other DNA
acggcgcggcttacagcgatccgggatcttctttggatcttcctaggttctctttgggatctgtttattggatct

SEQ ID NO: 793326 - DNA, 75 bp, synthetic construct
  source 1..75: mol_type = other DNA
gctactcggtatggtaatgcgcctttcaaccatgaacagccagacgatgccggagcatctttttgctcaggtggt

SEQ ID NO: 793327 - DNA, 75 bp, synthetic construct
  source 1..75: mol_type = other DNA
attgacggctttaatgtgctcaacggcccggattcgctgatccataaagggtttgtcgagggatgttcagcctgt

SEQ ID NO: 793328 - DNA, 75 bp, synthetic construct
  source 1..75: mol_type = other DNA
gccattgtctggcagtgccgtcgtaccgccgagatctgcgagcatctcaaacgcgatggcatggaagagtacatt

SEQ ID NO: 793329 - DNA, 75 bp, synthetic construct
  source 1..75: mol_type = other DNA
aaaacggcctgctgaccaccatcgcctgtggcccaggcggggaagtgaactatgcgctggaaggtgcggtgttta

SEQ ID NO: 793330 - DNA, 75 bp, synthetic construct
  source 1..75: mol_type = other DNA
ggtcagaccaacatcggcggtaaaggcggcacgcgtattccgatcgccgggatcgcgggtgatcagcaggcggcg

SEQ ID NO: 793331 - DNA, 75 bp, synthetic construct
  source 1..75: mol_type = other DNA
ttgctgaaaccagtctctgccgagcatcacgaaaataagggaggattcttcggctggtttaacaccactttcgat

SEQ ID NO: 793332 - DNA, 75 bp, synthetic construct
  source 1..75: mol_type = other DNA
actggacgggtatgtcgtatcaggaacgcttatcgggaaaccaggctcccgctctggtagcaatttcctttgtgg

SEQ ID NO: 793333 - DNA, 75 bp, synthetic construct
  source 1..75: mol_type = other DNA
acaaatatcaattgttcgacctggagcatgtgacgattgcgagatacgaatgattattcgtctggcaatggggaa

SEQ ID NO: 793334 - DNA, 75 bp, synthetic construct
  source 1..75: mol_type = other DNA
acagccaagatcggcaatgtattcgatattctccagcgacaccctggcaagcagctccaccgccggacgcgatcg

SEQ ID NO: 793335 - DNA, 75 bp, synthetic construct
  source 1..75: mol_type = other DNA
atgtacggacaaatatcaatcgttcgaccaggagcatgtgacgatcgcgaaatacgaataattattcgtctggca

SEQ ID NO: 793336 - DNA, 75 bp, synthetic construct
  source 1..75: mol_type = other DNA
ccggcgataccggggcggcagtggctcacgctttctacggtttaccgaatgtaaaagtggttatcctctatccgc

SEQ ID NO: 793337 - DNA, 75 bp, synthetic construct
  source 1..75: mol_type = other DNA
ggcctgctgaccaccatcgcctgcggcccgactggcgaagtgaactatgcgttggaaggtgcggtgtttatggca

SEQ ID NO: 793338 - DNA, 75 bp, synthetic construct
  source 1..75: mol_type = other DNA
gatacgaatgattattcgtctggcgatggggaaaacaataactgctctcattactccagaaaatctcgcattagc

SEQ ID NO: 793339 - DNA, 75 bp, synthetic construct
  source 1..75: mol_type = other DNA
tctgtgctgatttcctacacttttatttcgctggattgtctggcggaagaactggaagatcccttcggtactgaa

SEQ ID NO: 793340 - DNA, 75 bp, synthetic construct
  source 1..75: mol_type = other DNA
ccgtccaggatcagggggagtttgagcggatctaccgccgtctgcaccacgtcctgcatacgttgcgtggcgatg

SEQ ID NO: 793341 - DNA, 75 bp, synthetic construct
  source 1..75: mol_type = other DNA
gacgaaagtaattatattgacgttgccgccattattttatcggtcaatgatgtggaacgtggaaaactcgatgaa

SEQ ID NO: 793342 - DNA, 75 bp, synthetic construct
  source 1..75: mol_type = other DNA
agatgaagataagcataataacgaagtaagtaatatcgaatggacggcacatagtaccaatgtaaaatacagtat

SEQ ID NO: 793343 - DNA, 75 bp, synthetic construct
  source 1..75: mol_type = other DNA
aattctgaacacctatctgtctgccggaatgggtgacgtaatcgctatggcactgggcggaacggcgttagtgtt

SEQ ID NO: 793344 - DNA, 75 bp, synthetic construct
  source 1..75: mol_type = other DNA
gacgcactaagcattcccatgtttctctataacatcccggcccgcaccggcaatacgattcagccggaaaccgcg

SEQ ID NO: 793345 - DNA, 75 bp, synthetic construct
  source 1..75: mol_type = other DNA
cgcgcgaaaccattcgtctgggtcagcagattgaaaaactgggcgttgatgcggtatcggtcattaccccgtact

SEQ ID NO: 793346 - DNA, 75 bp, synthetic construct
  source 1..75: mol_type = other DNA
cgataaaacctatttcgttttaaacggtacttcatcttctaataaagtggtcttaaacgcattgctgacgccggg

SEQ ID NO: 793347 - DNA, 75 bp, synthetic construct
  source 1..75: mol_type = other DNA
atgatgacaaggatcatcaccaggccgtttctttgttccccactaacgttatgcatttcagccgtggcctctgcc

SEQ ID NO: 793348 - DNA, 75 bp, synthetic construct
  source 1..75: mol_type = other DNA
cggagcagaaaacgtcgctacccaccagcagtacaaaagctacagcgcggaatcgctgattgcggctaaccctga

SEQ ID NO: 793349 - DNA, 75 bp, synthetic construct
  source 1..75: mol_type = other DNA
gggcgctggcgaacgcgtggttggtgtcgatgaaacgacatcttatccaccagaaaccgccaaactgccgcatat

SEQ ID NO: 793350 - DNA, 75 bp, synthetic construct
  source 1..75: mol_type = other DNA
caaggttgccattcagcaacaggatgaatttgagcggatctaccagcgcctgcaccatgccctgcacaaactgcg

SEQ ID NO: 793351 - DNA, 75 bp, synthetic construct
  source 1..75: mol_type = other DNA
gcaataaattactgtttaaaggaggttttaagcatatagaaattaaatgccctcgctgtaaacgttacattgtca

SEQ ID NO: 793352 - DNA, 75 bp, synthetic construct
  source 1..75: mol_type = other DNA
caggaggctcactgacggagttgatctacgcgatgggcgctggcgagcgcatagttggcgtcgatgaaacgacat

SEQ ID NO: 793353 - DNA, 75 bp, synthetic construct
  source 1..75: mol_type = other DNA
ctatgggagatcgcggtgctgttccatctgcgcgatgcgttccgctccggagatgtctggcttactaggtcccgg

SEQ ID NO: 793354 - DNA, 75 bp, synthetic construct
  source 1..75: mol_type = other DNA
atctggtcgctgccatgggtgccaatcgggttattggcaatggtcccgatatcccctggaaaatcccaggtgagc

SEQ ID NO: 793355 - DNA, 75 bp, synthetic construct
  source 1..75: mol_type = other DNA
acgctatcactccaaacactgatatcgactaccggcaggaaatgaacgttatccacgaaattgtggccgagtgcg

SEQ ID NO: 793356 - DNA, 75 bp, synthetic construct
  source 1..75: mol_type = other DNA
caggctaaaggtactcacgaaacgcctgagcgcatagaagacgctaagccaattaagttcatagcacaggacgtg

SEQ ID NO: 793357 - DNA, 75 bp, synthetic construct
  source 1..75: mol_type = other DNA
caaccagaaactggtgtatgtcttccaaatgtagctctttacgcagcaggataccggaaatcaaaacaactgacg

SEQ ID NO: 793358 - DNA, 75 bp, synthetic construct
  source 1..75: mol_type = other DNA
gcaatctggagagagcggccattgtgtacgcgaatgagtttggacataagcaaccagaaactggtgtatgtcttc

SEQ ID NO: 793359 - DNA, 75 bp, synthetic construct
  source 1..75: mol_type = other DNA
caaccagaaactggtgtatgtcttccaaacgtagccatttacgcggcaggctaccggaaatcaaaacaactgaca

SEQ ID NO: 793360 - DNA, 75 bp, synthetic construct
  source 1..75: mol_type = other DNA
tgccggatacataccggtatcatctgtctcatcgtattcgccgggtgattgggactgaaaagacatcatcgccat

SEQ ID NO: 793361 - DNA, 75 bp, synthetic construct
  source 1..75: mol_type = other DNA
tgccggatacataccggtatcatctgtctcatcgtattcgccggctgcttgggaatgaaaagacatcatcgccat

SEQ ID NO: 793362 - DNA, 75 bp, synthetic construct
  source 1..75: mol_type = other DNA
tgccggatacataccggtatcatctgtctcatcgtattcgccggatggttgggactgaaaagacatcatcgccat

SEQ ID NO: 793363 - DNA, 75 bp, synthetic construct
  source 1..75: mol_type = other DNA
agcaggttgcccgggaagtgaaagcgccccgtgaacggctgaagtatgcgctggaggcggggttactggtgaccg

SEQ ID NO: 793364 - DNA, 75 bp, synthetic construct
  source 1..75: mol_type = other DNA
cctgttctggtttggcagtcagcgtattgcggctgatgttctgaggctgagaaaggccggaatgccggtggtgac

SEQ ID NO: 793365 - DNA, 75 bp, synthetic construct
  source 1..75: mol_type = other DNA
atgcgtacacgaattgactatctggctgataaatactcttttaccgaacggaatgaatctccacgccttcgccgg

SEQ ID NO: 793366 - DNA, 75 bp, synthetic construct
  source 1..75: mol_type = other DNA
ttatgtatactatggcaggactctatttatttagtggcatcctggttcagtttcttaaagttcctggtgagaaat

SEQ ID NO: 793367 - DNA, 75 bp, synthetic construct
  source 1..75: mol_type = other DNA
tggatatgatgtcgaaattttttctcttaatccaaacaaacacggtcaatataatgtaaagatatatatccctat

SEQ ID NO: 793368 - DNA, 75 bp, synthetic construct
  source 1..75: mol_type = other DNA
atttgatcctggttctcatcgttttatcattatgatgacgttgacagggttggccctggtaatcatcgtgaatgc

SEQ ID NO: 793369 - DNA, 75 bp, synthetic construct
  source 1..75: mol_type = other DNA
ttgtttttaatctctttggtggcgattgtcgttgcgagtttagcgcctgtatctgccattatcgtcgtgttcagc

SEQ ID NO: 793370 - DNA, 75 bp, synthetic construct
  source 1..75: mol_type = other DNA
gattctgcttcagcagggtggtcaggttaaggactcctttggcgggatcatcccgacattccgggcgctgattgg

SEQ ID NO: 793371 - DNA, 75 bp, synthetic construct
  source 1..75: mol_type = other DNA
cggcgtgccggtggaaaaagtcgcagccgcatacggcaagctcactactgaccctacatcaggcctgatcgcgat

SEQ ID NO: 793372 - DNA, 75 bp, synthetic construct
  source 1..75: mol_type = other DNA
agctgcagcgtgccggtgatgaggctggcgcactgcaggcggctaacgaggctgctacagccggattcaacgatc

SEQ ID NO: 793373 - DNA, 75 bp, synthetic construct
  source 1..75: mol_type = other DNA
tgatgcgtaaagacccgccgtttgataccgagtttatctacgcgacctatattctggaacgtgccgaagagaaag

SEQ ID NO: 793374 - DNA, 75 bp, synthetic construct
  source 1..75: mol_type = other DNA
tacattatgcgcaccaacataaaccaaggaagaatccagtcgttggcggtcatgattgtcctgctcattaacaac

SEQ ID NO: 793375 - DNA, 75 bp, synthetic construct
  source 1..75: mol_type = other DNA
ctcttctgcaaaaaccacaagtattactgatggatgaaccttttgcagccctggatgccatcacgcggtcagaac

SEQ ID NO: 793376 - DNA, 75 bp, synthetic construct
  source 1..75: mol_type = other DNA
ggcccatttgggtaataagttgcttaatgattgtgttatggtcaggcattatctcgcatggacgaaataagctcc

SEQ ID NO: 793377 - DNA, 75 bp, synthetic construct
  source 1..75: mol_type = other DNA
cgcgtcgattttccgcgtgaaagaaggcgatccgaacctcggcgtgattgccgaaaccctgactgagcacggtac

SEQ ID NO: 793378 - DNA, 75 bp, synthetic construct
  source 1..75: mol_type = other DNA
gtcgcggtgaacctcgtccgctgacggaaagtgactggaaaatcgcccgtcagattgggccgacgctgaaagaaa

SEQ ID NO: 793379 - DNA, 75 bp, synthetic construct
  source 1..75: mol_type = other DNA
gcatggcaggcactgcgcgtcagtgtgaagagttccaccatgaagatgattaccagctttgcagcgccattgaga

SEQ ID NO: 793380 - DNA, 75 bp, synthetic construct
  source 1..75: mol_type = other DNA
tgcacaacagatttcgcgtctggaagctgccatgtgtcagcgtcgccgctggactgcagaacagttcagcctgtt

SEQ ID NO: 793381 - DNA, 75 bp, synthetic construct
  source 1..75: mol_type = other DNA
tatcaactcgaggctaaaaaatacgttcgccgcatcagagataaagtcccgtactctgactgggataaagagtaa

SEQ ID NO: 793382 - DNA, 75 bp, synthetic construct
  source 1..75: mol_type = other DNA
tgatttcagcgaaacaaattaataacctgatatcgcaagataagtttgatgcagaagcggcaatgaagaaagtgt

SEQ ID NO: 793383 - DNA, 75 bp, synthetic construct
  source 1..75: mol_type = other DNA
cggtgttgaaattggtattcgccgtctggaagcgcgcccgacagccgatctatgcatcgactgcaaaacgctggc

SEQ ID NO: 793384 - DNA, 75 bp, synthetic construct
  source 1..75: mol_type = other DNA
aatacactggtcaccgtcacaactaaaagcggcatgataccaactcagattaaaacaatgcttaacagtggagcg

SEQ ID NO: 793385 - DNA, 75 bp, synthetic construct
  source 1..75: mol_type = other DNA
tcgtgtcttcaatgcaaaataacttcccgctggacccgaacgacaaaaacaatcaggcagcggtagaccgttatt

SEQ ID NO: 793386 - DNA, 75 bp, synthetic construct
  source 1..75: mol_type = other DNA
ttggggtggcgaaagatatcgcgcagagtctggcgcatcttgatgcaatttccgcagccaacgcagtgacggtca

SEQ ID NO: 793387 - DNA, 75 bp, synthetic construct
  source 1..75: mol_type = other DNA
ttcaaatttatcgactcgcatctgctggagacggtcggcctggaaaaaacctttctgatttggggcgcgattgtg

SEQ ID NO: 793388 - DNA, 75 bp, synthetic construct
  source 1..75: mol_type = other DNA
tggcaatatcgtcttctgttgcgggcaaattgcaggaacgttttggtgttaaacgcgtcaccatcgcttccggca

SEQ ID NO: 793389 - DNA, 75 bp, synthetic construct
  source 1..75: mol_type = other DNA
ctgctgattctgtcattggcgctttctacgacaattcgtcagccagagcagaaagtattgcgtgaggcgcatggc

SEQ ID NO: 793390 - DNA, 75 bp, synthetic construct
  source 1..75: mol_type = other DNA
gcgaaagatatcgcccaaagtctggcacaccttgatgtggtttccgcagccaatgcagtcactgttatttccatc

SEQ ID NO: 793391 - DNA, 75 bp, synthetic construct
  source 1..75: mol_type = other DNA
ctgcactggagggataatacaaggtctgatatccgcgttcgctatcggttcttatggtctgggtagcctgggttt

SEQ ID NO: 793392 - DNA, 75 bp, synthetic construct
  source 1..75: mol_type = other DNA
tcgaactgcgtaaccgcgatcgcgagcgtaagctgatcaaaaagatcgagaagacgctgaaaaaagtggaagacg

SEQ ID NO: 793393 - DNA, 75 bp, synthetic construct
  source 1..75: mol_type = other DNA
tggacggcctgttctggtctggcagtcagcgtattgcggctgatgttctgaggctgagaaaggccggaatgccgg

SEQ ID NO: 793394 - DNA, 75 bp, synthetic construct
  source 1..75: mol_type = other DNA
tggcttgtttaaggcgctgagtcctgcgcacaagacaaataagacaaacggtttcagcgagcgtctgataatcgc

SEQ ID NO: 793395 - DNA, 75 bp, synthetic construct
  source 1..75: mol_type = other DNA
aaaatcatgctttgcgaggaaccgcccgccaatggttgtaacttcgcggtgggggaggtgatgcacattgcctat

SEQ ID NO: 793396 - DNA, 75 bp, synthetic construct
  source 1..75: mol_type = other DNA
tttaccttgccacgctcggtggcgcgaaatctctgggacttgacgatctgatcggcaattttataccaggcaaag

SEQ ID NO: 793397 - DNA, 75 bp, synthetic construct
  source 1..75: mol_type = other DNA
atgttacccaggatcagacacaataattttattggtgcggtggagttatttgtaaagtcatcgcatacaaaaaca

SEQ ID NO: 793398 - DNA, 75 bp, synthetic construct
  source 1..75: mol_type = other DNA
aattaaagaatgcgaaggatggtatatttacgaaataataaatggttatcattttgccatagtcatagaatcttt

SEQ ID NO: 793399 - DNA, 75 bp, synthetic construct
  source 1..75: mol_type = other DNA
gctcaatgaaacatttaaatactatacgacagcgacatttatcgcttcagtcgtcgctctggcgggcacattcct

SEQ ID NO: 793400 - DNA, 75 bp, synthetic construct
  source 1..75: mol_type = other DNA
gccggtggtgacaacgtccgtggaagcgagcgataacctgacgggaacaacccgcaaaataccggcataccatct

SEQ ID NO: 793401 - DNA, 75 bp, synthetic construct
  source 1..75: mol_type = other DNA
ccgcacgccacagttgattgctgcgcttcgggaagaatgggatatcagccagaaaaatgtggtgttcaacgataa

SEQ ID NO: 793402 - DNA, 75 bp, synthetic construct
  source 1..75: mol_type = other DNA
tcgggctggtgcatatgcaggagttcgctaaacgcaaaccacatcagctttccggcggtcaacgtcagcgtgtgg

SEQ ID NO: 793403 - DNA, 75 bp, synthetic construct
  source 1..75: mol_type = other DNA
cgtcatcgtaaagggttaccgacctggggcgacgaagtgcgcttgtgctgggaagtggacagctgtgtggtgctt

SEQ ID NO: 793404 - DNA, 75 bp, synthetic construct
  source 1..75: mol_type = other DNA
cagcgcccagctacaaaacgcccatcgctatcgtaaaggattacccacctggggcgatgaagtgcgcttgtgctg

SEQ ID NO: 793405 - DNA, 75 bp, synthetic construct
  source 1..75: mol_type = other DNA
cgacggcgaaatcgtgcgtaaccctcctgctactgaaaatatgaatgtcgtcgccgggacggaatcaatagttaa

SEQ ID NO: 793406 - DNA, 75 bp, synthetic construct
  source 1..75: mol_type = other DNA
aatccaaaattcatttcctattacatgcaaaccgattcgtttatttctgaaaaagcaaagtatgtagccagaaca

SEQ ID NO: 793407 - DNA, 75 bp, synthetic construct
  source 1..75: mol_type = other DNA
ttcatttaaaattccggttcctaacatcaatgaacaacaacgaattgtcgaaatactcgacaaattcgacacact

SEQ ID NO: 793408 - DNA, 75 bp, synthetic construct
  source 1..75: mol_type = other DNA
gcggtatcggtattggctcagtggagcaggttatttccagccagccgggacttgtcgaacaccgtaagcggtgtc

SEQ ID NO: 793409 - DNA, 75 bp, synthetic construct
  source 1..75: mol_type = other DNA
gttaatcgctttcgccttgcagctttttttacccggttgggagattggattttctccgttagcgctgttgctggc

SEQ ID NO: 793410 - DNA, 75 bp, synthetic construct
  source 1..75: mol_type = other DNA
cgaacgcgggaaattggcattcgtatggctgtaggagcgcgtgccagcgatgttctacaacaatttttgattgaa

SEQ ID NO: 793411 - DNA, 75 bp, synthetic construct
  source 1..75: mol_type = other DNA
ccacagaaacttaaaacacccgctgatatcatgccgctctacctctggctgatgggcgatgacagccgccgtaaa

SEQ ID NO: 793412 - DNA, 75 bp, synthetic construct
  source 1..75: mol_type = other DNA
tcagattaaaattagagggttgcgcgttgaattgggagaaatcgaagcccatgcgatgcgtttcccgggggtaca

SEQ ID NO: 793413 - DNA, 75 bp, synthetic construct
  source 1..75: mol_type = other DNA
aatcgatccccagtgcctgccgctggtcgatctgcggcagttggaagggccgggcgagtatgtccctccggcaac

SEQ ID NO: 793414 - DNA, 75 bp, synthetic construct
  source 1..75: mol_type = other DNA
ctcgttacctctgatgttggtctggtgcgcggcagccatgttcctttgcggttggctggcgctgggtaaaaagcc

SEQ ID NO: 793415 - DNA, 75 bp, synthetic construct
  source 1..75: mol_type = other DNA
gttggctggcgctgggcaagaaaccgtatcaaggattattgattggggtgacgctggcaattgttgttggttccc

SEQ ID NO: 793416 - DNA, 75 bp, synthetic construct
  source 1..75: mol_type = other DNA
atgcattaccagccaaaacaagatttactcaatgatcgcattatcctggtgacgggagccagtgatggtattggt

SEQ ID NO: 793417 - DNA, 75 bp, synthetic construct
  source 1..75: mol_type = other DNA
ggctttcttttggttatatctcaacgatcctatctggctggattccgctttaccggagccgatcaaaccagctgg

SEQ ID NO: 793418 - DNA, 75 bp, synthetic construct
  source 1..75: mol_type = other DNA
ttacagcggcgatgaagcggtcaacaacatcaccaaagccattgatgtttatggtaaggcgacggccaaaaccct

SEQ ID NO: 793419 - DNA, 75 bp, synthetic construct
  source 1..75: mol_type = other DNA
gagccgaccccggaaaggaccccggcaccgcagatgaaagacccggtcaaaacgccagagcctaaagctgtgtcg

SEQ ID NO: 793420 - DNA, 75 bp, synthetic construct
  source 1..75: mol_type = other DNA
atggtaaagcgacgaaaaacacgctgaaattcgtcaaagctgccaaggtagaagagcgcatggcagatccgcaga

SEQ ID NO: 793421 - DNA, 75 bp, synthetic construct
  source 1..75: mol_type = other DNA
acaacaggctaatgcggaaccagaagaacaggttgatccacgcaaagcggcagttgctgcggctattgcccgcgt

SEQ ID NO: 793422 - DNA, 75 bp, synthetic construct
  source 1..75: mol_type = other DNA
gttggcagctatttgctgaaagcggagaaacctgtcgggcgcgcgaactggaacagtgcctggaagatttttatg

SEQ ID NO: 793423 - DNA, 75 bp, synthetic construct
  source 1..75: mol_type = other DNA
agaggcatgcgaaatgttcctgcgtgcttttgaagaagaagtgaagcgtacaattgaatcgcctctgcctgaatt

SEQ ID NO: 793424 - DNA, 75 bp, synthetic construct
  source 1..75: mol_type = other DNA
aatgtctattcttatgacggtgatcgttatatttattataacggttgtgaatatgaggccactggcgtcattgtt

SEQ ID NO: 793425 - DNA, 75 bp, synthetic construct
  source 1..75: mol_type = other DNA
gtttattatattgatgcaaccatgcaggcttctgcctgtcagggagctaaagacagtgctcaggttgtttttaat

SEQ ID NO: 793426 - DNA, 75 bp, synthetic construct
  source 1..75: mol_type = other DNA
tccaggccctgataccccatttcctcgccatccccatgactatcgatacctatcccagcttttggatcctcacac

SEQ ID NO: 793427 - DNA, 75 bp, synthetic construct
  source 1..75: mol_type = other DNA
tctgccggaattggttttgtaccacaggcagagaaatttggacgggatatttccgggagccaatacaagctatat

SEQ ID NO: 793428 - DNA, 75 bp, synthetic construct
  source 1..75: mol_type = other DNA
acattggctgaatccgaattaggaatagctaaagattctcatggtgctttatgggaagcattcctgaataaaggt

SEQ ID NO: 793429 - DNA, 75 bp, synthetic construct
  source 1..75: mol_type = other DNA
ggcggtggtaacccaagtggcagttctggcggtggtaatggctcaagtattaccaaaggagatattcagtcagct

SEQ ID NO: 793430 - DNA, 75 bp, synthetic construct
  source 1..75: mol_type = other DNA
gtggataccgagttgaactgggcgacatcgaaagcctactgaaacagcatccggatattgctgatgcgtgggtcg

SEQ ID NO: 793431 - DNA, 75 bp, synthetic construct
  source 1..75: mol_type = other DNA
cccgtgaacgtattcgtctcgaagaccgcgcggttaaaatgtcggtgaagaccgtcggtaaagagaaagtcggcg

SEQ ID NO: 793432 - DNA, 75 bp, synthetic construct
  source 1..75: mol_type = other DNA
ggtggtgctggttgatcgtttcagtgcttcggcttcggaaatctttgctgccgcaatgcaggattatggtcgcgc

SEQ ID NO: 793433 - DNA, 75 bp, synthetic construct
  source 1..75: mol_type = other DNA
cgcttcacccgttctcattatcgccagttcgacctcgatcaggcattttcggccaaaatctttgaccgctacctg

SEQ ID NO: 793434 - DNA, 75 bp, synthetic construct
  source 1..75: mol_type = other DNA
tgaaccggagttgctgaaggaacataatgcgcgtatcgcgaaagatcctgagttccagaacatcatgaaggatat

SEQ ID NO: 793435 - DNA, 75 bp, synthetic construct
  source 1..75: mol_type = other DNA
tggaaaagccgatggattttaccggcaacgacacttataaccttgaccgcagcaaagcgccatggccgaaaaacg

SEQ ID NO: 793436 - DNA, 75 bp, synthetic construct
  source 1..75: mol_type = other DNA
tcaggtccgtgataacaacggtaaagttcgtgaagacagcgataccgacgggcaggttttctataaaggcccgct

SEQ ID NO: 793437 - DNA, 75 bp, synthetic construct
  source 1..75: mol_type = other DNA
ggcggtaagttcagtaaggacaaactttctcaattagtttgtgagctttctgatataattttggaaaatgctaag

SEQ ID NO: 793438 - DNA, 75 bp, synthetic construct
  source 1..75: mol_type = other DNA
tgtgattgaacgagtaatattcgaattgtttttaaaaggtaagaaaaaaaataaatatctcagggaccggagtat

SEQ ID NO: 793439 - DNA, 75 bp, synthetic construct
  source 1..75: mol_type = other DNA
aaaatgctaaatttacttgatttcaaaaatgtttttgaaaaagtagttaagaaatacaatcatgtttattatagc

SEQ ID NO: 793440 - DNA, 75 bp, synthetic construct
  source 1..75: mol_type = other DNA
ttctttattaaacagagaaacgttgcgaatcggaacgtcaaccgcaggatgtgatcccgctggcgattacactca

SEQ ID NO: 793441 - DNA, 75 bp, synthetic construct
  source 1..75: mol_type = other DNA
tacgccgggtatggaaatcacttgtgtcagagtatcaggccgataatatacagtgtgattttggaccagcgggta

SEQ ID NO: 793442 - DNA, 75 bp, synthetic construct
  source 1..75: mol_type = other DNA
tccaccatgcggtgcataacccggaccccgattcactgtttggcgtacagggttgctctaccgatcccactttct

SEQ ID NO: 793443 - DNA, 75 bp, synthetic construct
  source 1..75: mol_type = other DNA
atttgaagataacgcgctgccgtgggatagcattgatgctgcaacctatgtgaaatcaggcgatttaacggcctt

SEQ ID NO: 793444 - DNA, 75 bp, synthetic construct
  source 1..75: mol_type = other DNA
agccgcaagccagcttgcaatggatgatgatgagatagccgcgctgaccgttggcggctcattgttgcagaactc

SEQ ID NO: 793445 - DNA, 75 bp, synthetic construct
  source 1..75: mol_type = other DNA
aagcattccgctgcctgcggttgttgctgtttccactgatatcaactccccacaaattccttcgatgaaagccat

SEQ ID NO: 793446 - DNA, 75 bp, synthetic construct
  source 1..75: mol_type = other DNA
gaaagtgcgcaaagacgtgctatcccgcgggccgcacagcctgtatttggtgcaggatgcgcaacttgaacatgc

SEQ ID NO: 793447 - DNA, 75 bp, synthetic construct
  source 1..75: mol_type = other DNA
tcagtcgcgtctgctagctttgtcggggaggtactgccgctgctcgccgctggcggtaccttagtattggcgcaa

SEQ ID NO: 793448 - DNA, 75 bp, synthetic construct
  source 1..75: mol_type = other DNA
cgcagccgcattgaaaatatactgagcaacagcggcgctgtttgtctgatcggtactgacgatggtgatcgctgg

SEQ ID NO: 793449 - DNA, 75 bp, synthetic construct
  source 1..75: mol_type = other DNA
caggttggtctgctggtaggggaaatcttgcaacttccggtgattaatgcagtgagtgccattgcgcgtcagggc

SEQ ID NO: 793450 - DNA, 75 bp, synthetic construct
  source 1..75: mol_type = other DNA
aaagcagcgaaggagcatcgagttcctctgtctgatgctgctgttgccttgttaaaagctttaccacgctttaag

SEQ ID NO: 793451 - DNA, 75 bp, synthetic construct
  source 1..75: mol_type = other DNA
aaccaaagataaattacaccagagtggttactctctctctggtggtcagcaacaacgtctgtgtattgcgcgtgg

SEQ ID NO: 793452 - DNA, 75 bp, synthetic construct
  source 1..75: mol_type = other DNA
cccacaacatgcagcaggctgcgcgttgttccgaccacacggcgtttatgtacctgggcgaattgattgagttca

SEQ ID NO: 793453 - DNA, 75 bp, synthetic construct
  source 1..75: mol_type = other DNA
gcgttacggactctcagggggagccgtgggttggtgactggaaatatgtaccgacaaaagaggattgcaacgaca

SEQ ID NO: 793454 - DNA, 75 bp, synthetic construct
  source 1..75: mol_type = other DNA
tgaaaatccgccagtcgaaaccggagcatggaaagacgctgttgactgggtgctcaaagaggcttgccaggctgt

SEQ ID NO: 793455 - DNA, 75 bp, synthetic construct
  source 1..75: mol_type = other DNA
acaccatgccgctcttccctataaccagatcggcacctttatgaaagagttgcgtgaacgaagcggcgtttctcc

SEQ ID NO: 793456 - DNA, 75 bp, synthetic construct
  source 1..75: mol_type = other DNA
tcagtttaattatgcaggagcataaagcactgggcatggtgggtaaaatcgaactcccggcgggtttcgataaac

SEQ ID NO: 793457 - DNA, 75 bp, synthetic construct
  source 1..75: mol_type = other DNA
gcccgtttttataccgatcagaacgcctttgaacacgaaaaagagaacgtcttcgccaaaagctggatttgcgtc

SEQ ID NO: 793458 - DNA, 75 bp, synthetic construct
  source 1..75: mol_type = other DNA
taccctgcaaaactacgatatttacttcaccaatgaagagttaaccgacgagcaaaaatcgctgattgagtggta

SEQ ID NO: 793459 - DNA, 75 bp, synthetic construct
  source 1..75: mol_type = other DNA
ggacggcgagacattgctggagctggattatctggcgaatatcttcaaagtgaatggcgtggatcaattaagcac

SEQ ID NO: 793460 - DNA, 75 bp, synthetic construct
  source 1..75: mol_type = other DNA
gcacgtacatcaagcaggtactggatggtgaagagttgctggagctggactatctggccaacatcttccgcgttg

SEQ ID NO: 793461 - DNA, 75 bp, synthetic construct
  source 1..75: mol_type = other DNA
tcagtttaattatgcaagagcataaagcactgggtatggtcggtaaaatcgaactcccggctggtttcgataaac

SEQ ID NO: 793462 - DNA, 75 bp, synthetic construct
  source 1..75: mol_type = other DNA
accggttttcctgggttatcagcgccgctggtttgaggatgaaagccagatttgcatcgctgaaaaatcccgtcg

SEQ ID NO: 793463 - DNA, 75 bp, synthetic construct
  source 1..75: mol_type = other DNA
cgttttttatgtgggttcccgtcaggaaatggcgctggaatacattgccgcctgtgccctgtttgcccgcgcctt

SEQ ID NO: 793464 - DNA, 75 bp, synthetic construct
  source 1..75: mol_type = other DNA
aatcctttcttgctggtctgccggcgcttcagaaagaacttgatgcggatgagtttgcgacgcagctggcgatgc

SEQ ID NO: 793465 - DNA, 75 bp, synthetic construct
  source 1..75: mol_type = other DNA
atgagcaatctgagccctgacttagtactacctgaaaatttttgcgccaacccgcaagaagcatggactattccg

SEQ ID NO: 793466 - DNA, 75 bp, synthetic construct
  source 1..75: mol_type = other DNA
cgttccacggtttctggctgtggccgtgcactatgctgaacgtgacgccaatcaaagggatgatgacggtcattt

SEQ ID NO: 793467 - DNA, 75 bp, synthetic construct
  source 1..75: mol_type = other DNA
cgttctataacgtgtgtccgcaccgtggtcatcagttgttgagcggtgaaggaaaagcaaaaaatgtgattacct

SEQ ID NO: 793468 - DNA, 75 bp, synthetic construct
  source 1..75: mol_type = other DNA
gactatctggccaacatcttccgggtcggtggcgttgaccagctgactgactaccgtatcaatatcgggggctga

SEQ ID NO: 793469 - DNA, 75 bp, synthetic construct
  source 1..75: mol_type = other DNA
ttgtgctgcaacaggaacgccaccagcaggatgatgtgaggccgtatcagtggaagaaaccggacaggccgcgac

SEQ ID NO: 793470 - DNA, 75 bp, synthetic construct
  source 1..75: mol_type = other DNA
ttgtgctgcaacaggaacgccaccagcatgatgttgtgaggccgtatcagtggcggaaaccggacaaaccgagac

SEQ ID NO: 793471 - DNA, 75 bp, synthetic construct
  source 1..75: mol_type = other DNA
atgcaacaagaatgggggcttccctgtaccgtaacaccacgcttcactgctcgactggtacaggaaagacataac

SEQ ID NO: 793472 - DNA, 75 bp, synthetic construct
  source 1..75: mol_type = other DNA
tttaccccactacacagccggcgccattgcggcagcaagccagaaaataaaattcgacctattactctgtggtga

SEQ ID NO: 793473 - DNA, 75 bp, synthetic construct
  source 1..75: mol_type = other DNA
gcaattgacgcactacgccactatgttccgggctttgaaaatgtacggttacgcaattttggtgccacgctgggg

SEQ ID NO: 793474 - DNA, 75 bp, synthetic construct
  source 1..75: mol_type = other DNA
gctttcttcaatatcgttaaaaagaacaagcacggctttttacccaaccacacgaaggatgctaggaaggctttt

SEQ ID NO: 793475 - DNA, 75 bp, synthetic construct
  source 1..75: mol_type = other DNA
atggaagtgattttgaaatcaaaaaatggtgtacacgtacatttagatgctaatgattcaagaggcttattaaat

SEQ ID NO: 793476 - DNA, 75 bp, synthetic construct
  source 1..75: mol_type = other DNA
atgttccatatgaaggagtaggtaatgactccaacttattgatagtgttttatgttcagataatgcccgatgact

SEQ ID NO: 793477 - DNA, 75 bp, synthetic construct
  source 1..75: mol_type = other DNA
cgccgacgtatgaccgtcatttttttggtggtgatgcgacgagttttgacggtattgatcagtcagacctgttca

SEQ ID NO: 793478 - DNA, 75 bp, synthetic construct
  source 1..75: mol_type = other DNA
ttagcgctgatttaatcacctgtattttatgtaaagagccggtaattcactggcaggcttgcagctgtctggaga

SEQ ID NO: 793479 - DNA, 75 bp, synthetic construct
  source 1..75: mol_type = other DNA
agtaattgcaggtgcaatgcaattaatgacattgcttcctatattcataggttttaatacagttgtcgggttact

SEQ ID NO: 793480 - DNA, 75 bp, synthetic construct
  source 1..75: mol_type = other DNA
atggaagtgattttgaaatcaaaaaatggtgtgcacgtacatctagatgctaatgattctagaggcttgttaaat

SEQ ID NO: 793481 - DNA, 75 bp, synthetic construct
  source 1..75: mol_type = other DNA
tactgacggacaggaaccccattgatggtgaagcattgtcaccggggaaatttatcgtccataaaccccgcctga

SEQ ID NO: 793482 - DNA, 75 bp, synthetic construct
  source 1..75: mol_type = other DNA
ctttcgatgtgtttcatgttgggcatataaatatcttagagagagcggctagttatggtgaggagctaattgtag

SEQ ID NO: 793483 - DNA, 75 bp, synthetic construct
  source 1..75: mol_type = other DNA
ggttgaactggtgacggcatcggcaagcgggctggacaataatatcaccccgcaagcggcggtctggcaaatccc

SEQ ID NO: 793484 - DNA, 75 bp, synthetic construct
  source 1..75: mol_type = other DNA
tatagtcaacaagagagatgtcgaattataagctcattaaaatttgttgatgaggtttttctggaggaatccctt

SEQ ID NO: 793485 - DNA, 75 bp, synthetic construct
  source 1..75: mol_type = other DNA
tgctgtgcccgctcatcgattggtcgctggattaactggttcacgctgtccggtgctgaaggcatgaagtcatta

SEQ ID NO: 793486 - DNA, 75 bp, synthetic construct
  source 1..75: mol_type = other DNA
cgaacagctgctggagtggctcaccacctacaccttcccggtggagagccagtttgccgatgcggagtatgccca

SEQ ID NO: 793487 - DNA, 75 bp, synthetic construct
  source 1..75: mol_type = other DNA
gactgggtgaaatcagaatgtgatgtgatatatttacctcgtacgccttcaatttctacaacagaaataatcgaa

SEQ ID NO: 793488 - DNA, 75 bp, synthetic construct
  source 1..75: mol_type = other DNA
aagaactgaataaatattaccagacctggctgacgggttatacccgactgacggtctgccagggaatgtgccatc

SEQ ID NO: 793489 - DNA, 75 bp, synthetic construct
  source 1..75: mol_type = other DNA
cgtttgatgtgttccatgttggtcatgttaatattcttgaacgagcaagggcattaggtgataaattagttgtag

SEQ ID NO: 793490 - DNA, 75 bp, synthetic construct
  source 1..75: mol_type = other DNA
taccccgggcctgaaagcctatagccacgtctccgaccaatatgcgccgttcgcaacccaggtgattcctgcaac

SEQ ID NO: 793491 - DNA, 75 bp, synthetic construct
  source 1..75: mol_type = other DNA
ggagcaatctggcggtcagtaacccggagctggataaactaatagccgcacgcgttactgcattacgagccgcta

SEQ ID NO: 793492 - DNA, 75 bp, synthetic construct
  source 1..75: mol_type = other DNA
atgagtggattacgtccggcattatcgacatttctctttctgttattgattactggcggcgtttacccgctgctg

SEQ ID NO: 793493 - DNA, 75 bp, synthetic construct
  source 1..75: mol_type = other DNA
gacggttggcagccttaagtttccgggagaggaagaggttattgctattgtcccccagtgcctgcaccggattat

SEQ ID NO: 793494 - DNA, 75 bp, synthetic construct
  source 1..75: mol_type = other DNA
aaaaagcgcgttgtcacaccgggccagaatgaaaagtattatcttgccggtgcactgcacagcggtacgggtaaa

SEQ ID NO: 793495 - DNA, 75 bp, synthetic construct
  source 1..75: mol_type = other DNA
cggtctggcccgtctggtggcggtgatgtacatgctgaaatcctttaccgtgcgcgactggtgggcatttgcgga

SEQ ID NO: 793496 - DNA, 75 bp, synthetic construct
  source 1..75: mol_type = other DNA
tcctgaccaacgatgtttcggacaactctggtctgggtcagcacaccaccaccgccgcacggctgtatcacttcc

SEQ ID NO: 793497 - DNA, 75 bp, synthetic construct
  source 1..75: mol_type = other DNA
gatggcggatcaattttctttgtcactacgtacattgcatcgtcagttaaaacagcaaactggtttgacgcccca

SEQ ID NO: 793498 - DNA, 75 bp, synthetic construct
  source 1..75: mol_type = other DNA
tgtgcgctgggacgcgcggcagctggctaacacgctgaatgaatatctggtgcggccctacatcgaggccaacta

SEQ ID NO: 793499 - DNA, 75 bp, synthetic construct
  source 1..75: mol_type = other DNA
tgagcttcaggaaacgctgaacgcggacgactttgccctgcaactggcggaggtgtgctttaaggcgcgtgcgct

SEQ ID NO: 793500 - DNA, 75 bp, synthetic construct
  source 1..75: mol_type = other DNA
ggacgaaggggctgatgttctgcatccggtttctgccggaatgtcaggtgaaatggcgatgaaccgcgagcgcgt

SEQ ID NO: 793501 - DNA, 75 bp, synthetic construct
  source 1..75: mol_type = other DNA
cggcgggcgaaaacaatcacgctgatcgttgataactacattatccataaaagccgcgaaacacagcgctggttg

SEQ ID NO: 793502 - DNA, 75 bp, synthetic construct
  source 1..75: mol_type = other DNA
actggcgaaatgctgtgcggaaaaccccgtgttttacgaagatgaagtggatattcacctcaatcccaaaattgg

SEQ ID NO: 793503 - DNA, 75 bp, synthetic construct
  source 1..75: mol_type = other DNA
gcatgttttgcattgcacacagacctcttcaatcgctctgtaacgagttaagcggactcttcaggtcaactataa

SEQ ID NO: 793504 - DNA, 75 bp, synthetic construct
  source 1..75: mol_type = other DNA
ttgttggcctggctggaagagcattttgccgacgaggtgaattgggaaatgatggcggatcaattttctttgtca

SEQ ID NO: 793505 - DNA, 75 bp, synthetic construct
  source 1..75: mol_type = other DNA
gtttcgtacgcgatcatgatcggcatctgtatgaacataccgataatctgtgtctgaccaatgtgctgtatcgct

SEQ ID NO: 793506 - DNA, 75 bp, synthetic construct
  source 1..75: mol_type = other DNA
tttttccgtctggtcacgcgtccgtggcgatagaaccccggcttccgcaagctgatttccctgagcatcaccatg

SEQ ID NO: 793507 - DNA, 75 bp, synthetic construct
  source 1..75: mol_type = other DNA
cgccgcttggtagctatctggggacaaccatcggttggcgtggggcctttttatgtctggtcccccttgcgatag

SEQ ID NO: 793508 - DNA, 75 bp, synthetic construct
  source 1..75: mol_type = other DNA
atggagaagtgcttttggtttaagtggtttgttacttctgggagcggtagcgatgacatatgccacatcccgtca

SEQ ID NO: 793509 - DNA, 75 bp, synthetic construct
  source 1..75: mol_type = other DNA
tgtttatgacggacaacaatggacggtcacacggcatgaacgctttaacggtaaaccaatgatctttattgagta

SEQ ID NO: 793510 - DNA, 75 bp, synthetic construct
  source 1..75: mol_type = other DNA
atgagtggtcaagggaagcgattaatggtgatggctggcggtactggcggacatgtgttccccgggctggcggtt

SEQ ID NO: 793511 - DNA, 75 bp, synthetic construct
  source 1..75: mol_type = other DNA
ttattaaccatggcagagcgcgcccgtgctgtatctattccagatgccaccgagcgagtggcaaatgaagtgagc

SEQ ID NO: 793512 - DNA, 75 bp, synthetic construct
  source 1..75: mol_type = other DNA
ggtatgggcggctatgtgtcaggtccaggtggtctggccgcgtggtcgttaggcattccggttgtacttcatgaa

SEQ ID NO: 793513 - DNA, 75 bp, synthetic construct
  source 1..75: mol_type = other DNA
aacctacagtgtctatcaggactgctggaaatggctggacacgtacctgacccagacggagacggaaggaacctg

SEQ ID NO: 793514 - DNA, 75 bp, synthetic construct
  source 1..75: mol_type = other DNA
cacgactgatattaaccaatccacaaattactatggaaatatcaacgcgccgttggcaagtgtaacaatgaagga

SEQ ID NO: 793515 - DNA, 75 bp, synthetic construct
  source 1..75: mol_type = other DNA
gcagatacggtgacggtaaaccaggcattgacagggggaataacacactggttgttattcctacgacaaattcag

SEQ ID NO: 793516 - DNA, 75 bp, synthetic construct
  source 1..75: mol_type = other DNA
tggttcgataaaattaatccgtccatcagtgataatgcgaacttcgtcgacactctccagagccttgctgaacca

SEQ ID NO: 793517 - DNA, 75 bp, synthetic construct
  source 1..75: mol_type = other DNA
gttgccggatggacgtggcgaccgttcgggtgatgggcaaacaggcggagattaacggcgtcgtgtacgacgtga

SEQ ID NO: 793518 - DNA, 75 bp, synthetic construct
  source 1..75: mol_type = other DNA
gaggtgatccccggctataccgactcgccgccggaaagcggttattacggtggcgtgacctcttccggtgtggac

SEQ ID NO: 793519 - DNA, 75 bp, synthetic construct
  source 1..75: mol_type = other DNA
atgattttaactattgcagagaaacctgagttagctgaaattattgctaaagcgttcggcggtgaagttaagaaa

SEQ ID NO: 793520 - DNA, 75 bp, synthetic construct
  source 1..75: mol_type = other DNA
ggcaggccagtatcaactcgaggctaaaaaatacgttcgccgcatcagagataaagtcccgtactctgactggga

SEQ ID NO: 793521 - DNA, 75 bp, synthetic construct
  source 1..75: mol_type = other DNA
atggtcgacgactcatttccgcgagcgttacgcgagtacaacgaaatggtcgatgactataatagcctgcgttaa

SEQ ID NO: 793522 - DNA, 75 bp, synthetic construct
  source 1..75: mol_type = other DNA
taccgtctgccggattacatcctgcgttacaggacgcgttaacgttggcattagctgccagaccgcaagaaaaag

SEQ ID NO: 793523 - DNA, 75 bp, synthetic construct
  source 1..75: mol_type = other DNA
tcgcctcactgtttggcggcttctatgtgaccttctacgtgattttcgccctgctgattctgtcactggcgctct

SEQ ID NO: 793524 - DNA, 75 bp, synthetic construct
  source 1..75: mol_type = other DNA
tctttcggcttgttaagtctggggctggcaatttcatcttctgttgcgggcaaattgcaggaacgttttggcgtt

SEQ ID NO: 793525 - DNA, 75 bp, synthetic construct
  source 1..75: mol_type = other DNA
ataaagtcccgtactctgactgggataaagagcaacttcaggacgcaaactcaagctggatggccgaagactcat

SEQ ID NO: 793526 - DNA, 75 bp, synthetic construct
  source 1..75: mol_type = other DNA
gtgctgccgctgtatcccgacatcagcccggaaattattgcgattgctatcggttcaggtgcaattggctgcact

SEQ ID NO: 793527 - DNA, 75 bp, synthetic construct
  source 1..75: mol_type = other DNA
gggaaatatcctttcagtaaactgtctgtgccggatgctcacccgtgtccggcgcacgcactccacctcatccgt

SEQ ID NO: 793528 - DNA, 75 bp, synthetic construct
  source 1..75: mol_type = other DNA
tcaaaaggttttaaccatccgctgttcaaaggcgaatgtgcgatgtggcgcaatattctggtccgtaagtatgcg

SEQ ID NO: 793529 - DNA, 75 bp, synthetic construct
  source 1..75: mol_type = other DNA
aatcactctggtatggcatgggaaaaatgtcgcgctttatgggcgttgcgaatcaaccactgatttaactccatt

SEQ ID NO: 793530 - DNA, 75 bp, synthetic construct
  source 1..75: mol_type = other DNA
ggatgttgcttcatcattggtgatattgaccattccttgccattgtctgatgtgccagaaaggttctctgccaaa

SEQ ID NO: 793531 - DNA, 75 bp, synthetic construct
  source 1..75: mol_type = other DNA
ttcagaacattcagccgtacatttcagcagatattttccccggaaaaatactcagaatcagcggtacgatgaaga

SEQ ID NO: 793532 - DNA, 75 bp, synthetic construct
  source 1..75: mol_type = other DNA
cataaacttaacggggctgatgatggagctatactgactaacagtggctccatggctaatgttaatctggatttc

SEQ ID NO: 793533 - DNA, 75 bp, synthetic construct
  source 1..75: mol_type = other DNA
ttcttccttaccaaacctaccttgatttcgcgcaaaacaaaggcgttttccaagctggtacacaaagtattacct

SEQ ID NO: 793534 - DNA, 75 bp, synthetic construct
  source 1..75: mol_type = other DNA
ataaaagaagacactgacccggaagttaataatacaggaggtcacatagaatggacctttgactctgctgaaggt

SEQ ID NO: 793535 - DNA, 75 bp, synthetic construct
  source 1..75: mol_type = other DNA
taaataaactggtaacagatgtggttcctgtagaggttaccagtgcaggaacagcgcagggaacatataaaaatg

SEQ ID NO: 793536 - DNA, 75 bp, synthetic construct
  source 1..75: mol_type = other DNA
tactggtttcagaagcggaaagtgaaacgctgggaaaagtttgcttcatgacgggtatttcacccctgttaaggg

SEQ ID NO: 793537 - DNA, 75 bp, synthetic construct
  source 1..75: mol_type = other DNA
atgttcgatttggctacagagatgatagctcttatattcttgtcgatcgtaataatagttctgtagatttccata

SEQ ID NO: 793538 - DNA, 75 bp, synthetic construct
  source 1..75: mol_type = other DNA
tatcaacgtggagaaatgattacgacctcctctggacaattatataattcagcaaatggtccgatggcgacatat

SEQ ID NO: 793539 - DNA, 75 bp, synthetic construct
  source 1..75: mol_type = other DNA
catccactggcgcattcaactggcgaaaagtctgaccgagtataatcgggtctatcaatctgcattctcaccgaa

SEQ ID NO: 793540 - DNA, 75 bp, synthetic construct
  source 1..75: mol_type = other DNA
gttggctggcgctgggcaagaaaccgtatcaaggtttattgattggggtgacgctggcaattgttgtgggttccc

SEQ ID NO: 793541 - DNA, 75 bp, synthetic construct
  source 1..75: mol_type = other DNA
gtcacctcagatatcaatgttcctcgcattccatcaatgaaggccattctgagcgcagggaaaaaaagcgtcacg

SEQ ID NO: 793542 - DNA, 75 bp, synthetic construct
  source 1..75: mol_type = other DNA
gaatcaagccgatcagaatctgttcacagcctatggtggcaacctgagtgcgccactggcacgtgtgatgatgac

SEQ ID NO: 793543 - DNA, 75 bp, synthetic construct
  source 1..75: mol_type = other DNA
aatgcgaacccctccaccgtgacgttgggtagtgaagatctctacatcgatattaatgacgggaatggtgtacaa

SEQ ID NO: 793544 - DNA, 75 bp, synthetic construct
  source 1..75: mol_type = other DNA
tgaccgtcacttcggggctggcctctgaccgtggagtgactgctggggcggggtcaacgctttcattgttatccg

SEQ ID NO: 793545 - DNA, 75 bp, synthetic construct
  source 1..75: mol_type = other DNA
agaattatgcagccaaacgcatttggtcttccggcctcactggatcgcaccatcgaggaagggcgtaaggaaatt

SEQ ID NO: 793546 - DNA, 75 bp, synthetic construct
  source 1..75: mol_type = other DNA
gcgtggaccagcctgccagtttcactgaaatcaccacgcaccagtgcctgcgggacacgaagatagaacaatact

SEQ ID NO: 793547 - DNA, 75 bp, synthetic construct
  source 1..75: mol_type = other DNA
ttccggaagatatgcgcaccgcgcgtctgacttccagcgaaaaacatcgtattgttgagcgcgtgatccgccgcg

SEQ ID NO: 793548 - DNA, 75 bp, synthetic construct
  source 1..75: mol_type = other DNA
gcttatgccttcccggaagcggaagtcgacgcggtggatatctctcccgacgcgctggcggttgccgaacagaac

SEQ ID NO: 793549 - DNA, 75 bp, synthetic construct
  source 1..75: mol_type = other DNA
cgtgtgcttccgtcgttagctccactacttcctatcaaacgtatcgtgattttgctgagaataagggagagttcc

SEQ ID NO: 793550 - DNA, 75 bp, synthetic construct
  source 1..75: mol_type = other DNA
tcaacaaaattgttactgaggttacaccgctggatataaccaatgcgggcactgctaatggaacctatcaaaatg

SEQ ID NO: 793551 - DNA, 75 bp, synthetic construct
  source 1..75: mol_type = other DNA
agtggttcgggctcagctactgatggatttaccggaagttatacgcacttgcaaattggggcagacaggaaacat

SEQ ID NO: 793552 - DNA, 75 bp, synthetic construct
  source 1..75: mol_type = other DNA
ttattggcgggcgtgaaaccaatattgttagcgccagagcgttgcataaggcgctgggtgtgaagcgtgatttca

SEQ ID NO: 793553 - DNA, 75 bp, synthetic construct
  source 1..75: mol_type = other DNA
gctgaacatcaccaacaacatcctgacatatcgttgcttgatgcctggctcgatttcgccgccattaaatatcag

SEQ ID NO: 793554 - DNA, 75 bp, synthetic construct
  source 1..75: mol_type = other DNA
tatttgcatcgccagtatctcgcttctgaatgctctgaacgatcttatcagcatatattttgcaaaccagcttcc

SEQ ID NO: 793555 - DNA, 75 bp, synthetic construct
  source 1..75: mol_type = other DNA
attgttgagcgcgtgatccgccgcgtcaacgaacgcattccggtggcctatttgactaacaaagcctggttctgt

SEQ ID NO: 793556 - DNA, 75 bp, synthetic construct
  source 1..75: mol_type = other DNA
tcgacgcggtagatatctctcccgacgcgctggcggttgctgaacagaacatcgaagaacacggtctgatccaca

SEQ ID NO: 793557 - DNA, 75 bp, synthetic construct
  source 1..75: mol_type = other DNA
tcgcattctcggaaacgcggcagattaccttgcggatgatggcgtgttgatttgtgaagtcggcaacagcatggt

SEQ ID NO: 793558 - DNA, 75 bp, synthetic construct
  source 1..75: mol_type = other DNA
gcgatacgggcgtgaacatggggccaactgtggcgtccagaatgcttcaacgctggctgaacgttttcaacctgc

SEQ ID NO: 793559 - DNA, 75 bp, synthetic construct
  source 1..75: mol_type = other DNA
cggtgaccgtcaatcgcttgtgtggttcatccatgcaggcactgcatgacgcagcacggatgattatgactggcg

SEQ ID NO: 793560 - DNA, 75 bp, synthetic construct
  source 1..75: mol_type = other DNA
aggggattagctatgcgctggatagcgcagagattctgcgtgcggtgttactgaagcagccggagaagagcaacg

SEQ ID NO: 793561 - DNA, 75 bp, synthetic construct
  source 1..75: mol_type = other DNA
cagcaaaccttgcggcggtctgctggcaccggacgcgcagcgatcttttattcgcgatggactgacgcttcctgt

SEQ ID NO: 793562 - DNA, 75 bp, synthetic construct
  source 1..75: mol_type = other DNA
tttgatccagtcagcggtacggtgacggcgggtacgtcctctgctctttccgatggtgccgccgccatgctggtg

SEQ ID NO: 793563 - DNA, 75 bp, synthetic construct
  source 1..75: mol_type = other DNA
gaaaaaagcggggctttctgccagcgatatcggcgtgtttgagatgaacgaagcctttgccgcgcagatcctgcc

SEQ ID NO: 793564 - DNA, 75 bp, synthetic construct
  source 1..75: mol_type = other DNA
gcagaagtgccgcactctgtcccggcggttaccgtcaatcgcttgtgtggttcatccatgcaggcactgcatgac

SEQ ID NO: 793565 - DNA, 75 bp, synthetic construct
  source 1..75: mol_type = other DNA
ccccgtgaaggtgccgggacgctgaagttctgcgaaaaactgatggaaaaggccgtgggcttcacctcccgtttt

SEQ ID NO: 793566 - DNA, 75 bp, synthetic construct
  source 1..75: mol_type = other DNA
gtggcggccctgaaccagacctcatttactgaaagcacataccgtcaggtaaagaacccgaatccggtgttcaca

SEQ ID NO: 793567 - DNA, 75 bp, synthetic construct
  source 1..75: mol_type = other DNA
taagtcccacggcatgaaacgtgcccgtgcgcgccgcgatgcaggcaggacccgtcaggacattgtcaccctggt

SEQ ID NO: 793568 - DNA, 75 bp, synthetic construct
  source 1..75: mol_type = other DNA
tagctatgcgctggatagcgcagagattctgcgttcggtattactgaagcagccagagaagctcaataccgctta

SEQ ID NO: 793569 - DNA, 75 bp, synthetic construct
  source 1..75: mol_type = other DNA
gttggcacgaaagttagccggcaaaatgcaggtgatcgcgctggataaaaagcaccagtgtggtactgaaggttt

SEQ ID NO: 793570 - DNA, 75 bp, synthetic construct
  source 1..75: mol_type = other DNA
aaagaacccgaatccggtgttcacaccccgtgaaggtgccggaacgctgaagttctgcgaaaaactgatggaaaa

SEQ ID NO: 793571 - DNA, 75 bp, synthetic construct
  source 1..75: mol_type = other DNA
atgagtgaaagccgcgcccgtgaattaggtcttaagccgcgcgcccgcgtgcgttcgatggcggtcgttggttgt

SEQ ID NO: 793572 - DNA, 75 bp, synthetic construct
  source 1..75: mol_type = other DNA
ccggaaaactctccatcacccgtgccacccgtgccctgacgttcctgtcagagctggggttgattacctaccaga

SEQ ID NO: 793573 - DNA, 75 bp, synthetic construct
  source 1..75: mol_type = other DNA
gcagcggttatctggcctgggaaggtctgatctgcatgcaggaaatcggcaaatgcaccgaagaacatcaggcga

SEQ ID NO: 793574 - DNA, 75 bp, synthetic construct
  source 1..75: mol_type = other DNA
aatcgtgaggcggtaaaacgcgaagtggagcgtcgtgtgaaagagcgcatgattctgtcacgtaaccgtaattac

SEQ ID NO: 793575 - DNA, 75 bp, synthetic construct
  source 1..75: mol_type = other DNA
agcggcctgacctatcacgacgctttcgcgctggcgatgaacgacgtgctggacgaagctgccgttcactggcaa

SEQ ID NO: 793576 - DNA, 75 bp, synthetic construct
  source 1..75: mol_type = other DNA
tgaaatggtggggtgagttccaggtttccgcgccaccagaccaaaaagggatgcttaacgaactggatgaagaac

SEQ ID NO: 793577 - DNA, 75 bp, synthetic construct
  source 1..75: mol_type = other DNA
atgctcaccgagctggatgaagaaccagcacagcgccgtcgtactcgtcgtccgcgcaaacgcgcaccgcgtcgc

SEQ ID NO: 793578 - DNA, 75 bp, synthetic construct
  source 1..75: mol_type = other DNA
gtgtctgacgagagcgacgacaaaacagaagcccccacacctcaccgacttgaaaaagcgcgggaagaggggcag

SEQ ID NO: 793579 - DNA, 75 bp, synthetic construct
  source 1..75: mol_type = other DNA
gtctggcaactgaaacgctggcgtctggctggtggacagcgccctgtacaacctactcatcttccggtgccggaa

SEQ ID NO: 793580 - DNA, 75 bp, synthetic construct
  source 1..75: mol_type = other DNA
ctcattaccgacaggtaaaaattcctttcccacaattcgtagtgccgaagaaaaaaggcagcgatgaagagaaag

SEQ ID NO: 793581 - DNA, 75 bp, synthetic construct
  source 1..75: mol_type = other DNA
tccgaccgacatcacgttcacaccggcactgtttgccgctctcgatgtgtctgaggtggcggtggcttccgcacg

SEQ ID NO: 793582 - DNA, 75 bp, synthetic construct
  source 1..75: mol_type = other DNA
attccaatggtgggatttgacgtctttttccaaatattcagccacctgaaaaagctgcgtatgtcacggcaggat

SEQ ID NO: 793583 - DNA, 75 bp, synthetic construct
  source 1..75: mol_type = other DNA
gtgtgttatctggtttggtggcgcgtctctggctcaccggttgtctgggatgctctccgccgggctgcattttga

SEQ ID NO: 793584 - DNA, 75 bp, synthetic construct
  source 1..75: mol_type = other DNA
cgcgcgcgccgtgatgcgggccggacccgtcaggacattgtcaccctggtgaaacggcagctgacgcgtgaaatt

SEQ ID NO: 793585 - DNA, 75 bp, synthetic construct
  source 1..75: mol_type = other DNA
atgacgaagagttcacattcaaagatttattcaactaagaacggtatcaccgcgggtgatttatctaaaattcct

SEQ ID NO: 793586 - DNA, 75 bp, synthetic construct
  source 1..75: mol_type = other DNA
tgaaggttctactattaaacaggttcaggtcaataatccgggtgatgtttacagcaaaactctggattcaacgtc

SEQ ID NO: 793587 - DNA, 75 bp, synthetic construct
  source 1..75: mol_type = other DNA
ctggcagacattttcgccgtcggccatcttaagccctggggctacaattcgctggaagacattacgttttgtgat

SEQ ID NO: 793588 - DNA, 75 bp, synthetic construct
  source 1..75: mol_type = other DNA
gtgcgtgagcgtttctgcagttaccagacagagcttaagtcccgtggaataaaacgtgcccgtgcgcgtcgtgat

SEQ ID NO: 793589 - DNA, 75 bp, synthetic construct
  source 1..75: mol_type = other DNA
tgcgtaaaaaaatgcacatcgacgaattccatgaattaggattttcggtggcatggcgattcccggaaggtacat

SEQ ID NO: 793590 - DNA, 75 bp, synthetic construct
  source 1..75: mol_type = other DNA
gaggttatcactcgcgaaagccttattgaaaaaatgcaaatgctagttgcgaagactgagcgaaatcactcagac

SEQ ID NO: 793591 - DNA, 75 bp, synthetic construct
  source 1..75: mol_type = other DNA
gcgaaatgcccttgtcgcgcacaaagcaattgcccgtccgggagagggaatactgtcccgcacaacagaagcatt

SEQ ID NO: 793592 - DNA, 75 bp, synthetic construct
  source 1..75: mol_type = other DNA
gccgcgtccatcacgctggttggccttgagaagaccaatggctcaggctggacgctcatcaaaatcaccggtgac

SEQ ID NO: 793593 - DNA, 75 bp, synthetic construct
  source 1..75: mol_type = other DNA
gtggcatttctggtaacggcaagtggattgacgctggtcgggattggttctgcgttttggggattaattgccgga

SEQ ID NO: 793594 - DNA, 75 bp, synthetic construct
  source 1..75: mol_type = other DNA
cgacctgtatgcgaaactccacgctggcacaggatgttgtgttggcggaacgttttggctatgactacattgaaa

SEQ ID NO: 793595 - DNA, 75 bp, synthetic construct
  source 1..75: mol_type = other DNA
ccataacatccccggtgttcatggaagatggaggctatgagctgtttcacatcagcatacttgtccttagccttc

SEQ ID NO: 793596 - DNA, 75 bp, synthetic construct
  source 1..75: mol_type = other DNA
tcaccggtgccagttttgccgaacggcgaaatggtctggtggcaaataaagtcatcgccagacctgccgggggga

SEQ ID NO: 793597 - DNA, 75 bp, synthetic construct
  source 1..75: mol_type = other DNA
agttctggcttgaacattttgagggtataaggcttaaagatatctcggaggcaaagatttactctgctgtaagca

SEQ ID NO: 793598 - DNA, 75 bp, synthetic construct
  source 1..75: mol_type = other DNA
cttcaacccgagcgaggaagatatccttaatcttaaggcggcgattgctgaatctggcctctccgtgagcgagct

SEQ ID NO: 793599 - DNA, 75 bp, synthetic construct
  source 1..75: mol_type = other DNA
ggtggcggaagtttacgccagcagcgatgcccacgagaagtttgttaaagacttcgtggcggcatgggtgaaagt

SEQ ID NO: 793600 - DNA, 75 bp, synthetic construct
  source 1..75: mol_type = other DNA
atcagaccgagtatgacccgcagattggctgcaatatcccgaccgatatcaccttcacgccggcactgttctccg

SEQ ID NO: 793601 - DNA, 75 bp, synthetic construct
  source 1..75: mol_type = other DNA
ctggggcagctacgccggtctgtttattcgtatggcctggcacggcgcggggacttaccgttcaatcgatggacg

SEQ ID NO: 793602 - DNA, 75 bp, synthetic construct
  source 1..75: mol_type = other DNA
gccgacggtttccgtaactatcgtgctgcggcgggtgaggctacaactgaatctctgttgatcgataaagcacag

SEQ ID NO: 793603 - DNA, 75 bp, synthetic construct
  source 1..75: mol_type = other DNA
gatgtttgagctgctcaaacctgttgccgacggtttccgtaactatcgtgctgcggcgggtgaggctacaactga

SEQ ID NO: 793604 - DNA, 75 bp, synthetic construct
  source 1..75: mol_type = other DNA
gctgaagttcctggccgagctggggctgatcacctatcagacggaatatgacccacagatcggctgtaatatccc

SEQ ID NO: 793605 - DNA, 75 bp, synthetic construct
  source 1..75: mol_type = other DNA
atgtcaggcgtatcaggaaaggcagaggaaacactatgcataaatcagaaaatgaaaaaaatagattttattctg

SEQ ID NO: 793606 - DNA, 75 bp, synthetic construct
  source 1..75: mol_type = other DNA
ctggcaaaaatttatcgcaaagcagaaaaccagaaacagcggaaggagctgggactgattgtgacgctcaccttc

SEQ ID NO: 793607 - DNA, 75 bp, synthetic construct
  source 1..75: mol_type = other DNA
gcatcacggcagcgtcatgacatcgagacacgcgtgcgtcagcaactgacccgggagtacgccaccggccgcttc

SEQ ID NO: 793608 - DNA, 75 bp, synthetic construct
  source 1..75: mol_type = other DNA
gtgaagtggagcgtcgtgtgaaggcgcgcatgattctgtcacgtaaccgcaattacagccggctggccacagctt

SEQ ID NO: 793609 - DNA, 75 bp, synthetic construct
  source 1..75: mol_type = other DNA
aacatattcctttaattatttcttcgatcccggatattcctgaccgtaccgatgcattaatgcatcatgggcgtt

SEQ ID NO: 793610 - DNA, 75 bp, synthetic construct
  source 1..75: mol_type = other DNA
ggatacccagggcaacgcctcttttaccctgaaacagttctcgtccggcattaaagcgaatgaaatgtggggcga

SEQ ID NO: 793611 - DNA, 75 bp, synthetic construct
  source 1..75: mol_type = other DNA
gcaggctctgttgtaacgaaagatgtgcctgataatgctttggttttgggtaatccagcaaggatcgtgaaattt

SEQ ID NO: 793612 - DNA, 75 bp, synthetic construct
  source 1..75: mol_type = other DNA
gcggtgcccacttccgctctttaacagacagtattgataccagcactgccatggggcgcttctttttccatgtga

SEQ ID NO: 793613 - DNA, 75 bp, synthetic construct
  source 1..75: mol_type = other DNA
cctgaacctgtgcaccataaaaaagccgcagccagcgaaagcgcgttttctctgctcttgcaacataaagcaacc

SEQ ID NO: 793614 - DNA, 75 bp, synthetic construct
  source 1..75: mol_type = other DNA
ctgtaataatcacagcgcccccaagatccggtggtgctatttaccaaacagttcctcctgaatcgcgttcggtgt

SEQ ID NO: 793615 - DNA, 75 bp, synthetic construct
  source 1..75: mol_type = other DNA
tgacgtctgcctgattgatactgcgcctacggttaacaatgcgcttatcgttgcgctggcgagcgctgattttgt

SEQ ID NO: 793616 - DNA, 75 bp, synthetic construct
  source 1..75: mol_type = other DNA
ctcaaatcagagaaggctcatggcgaaaagaacggcgaaccagctatagccgtgaatttaaggtccgtctggcta

SEQ ID NO: 793617 - DNA, 75 bp, synthetic construct
  source 1..75: mol_type = other DNA
aacaagtctgatgaaagccagaatgacactaccgtagactcaccacagtgtgagctgcatcttaaatcaggtgtg

SEQ ID NO: 793618 - DNA, 75 bp, synthetic construct
  source 1..75: mol_type = other DNA
atctccttccttatattggtgatgaacactggaatgagcacaacataccactagatgataaaaaatacatagtcg

SEQ ID NO: 793619 - DNA, 75 bp, synthetic construct
  source 1..75: mol_type = other DNA
atgaattcccagacaaaaaaagatattccctgcttccgttcttatttgcctgatgctctgcgtttaagatttgaa

SEQ ID NO: 793620 - DNA, 75 bp, synthetic construct
  source 1..75: mol_type = other DNA
tgcggactggcgacggagtctgctgccggaaaactctctatcacccgtgccacccgcgccctgacgttcctcgca

SEQ ID NO: 793621 - DNA, 75 bp, synthetic construct
  source 1..75: mol_type = other DNA
cgtgttgaatgggaaaacagacagcgcaaaaagcaggggctggataccctgggtatggatgaactgatagcgaaa

SEQ ID NO: 793622 - DNA, 75 bp, synthetic construct
  source 1..75: mol_type = other DNA
gattttaatctcccgtgtgatggtgcttctctgtagctggccgtcattctggctgttggtgaattacccaagccc

SEQ ID NO: 793623 - DNA, 75 bp, synthetic construct
  source 1..75: mol_type = other DNA
ctgacggaaagacggccagagtggtcatcgaaagtaagcggctcgtcagaaccgtattgatatttactgagagct

SEQ ID NO: 793624 - DNA, 75 bp, synthetic construct
  source 1..75: mol_type = other DNA
acgacctcattaaaacgaaagattatgcggctgtgtatgatgcaattaaatctttaggaaattgggctttaacaa

SEQ ID NO: 793625 - DNA, 75 bp, synthetic construct
  source 1..75: mol_type = other DNA
ttgtgttgtgtctccagacactcaaaaacaagaagttgttctgggccaggtgaacaagtctgtgtttaccactac

SEQ ID NO: 793626 - DNA, 75 bp, synthetic construct
  source 1..75: mol_type = other DNA
ctggtggcgctggttgcagggatactgtggactgtttcgttaggcgcgattgatgagtgggtggcgtcaccattg

SEQ ID NO: 793627 - DNA, 75 bp, synthetic construct
  source 1..75: mol_type = other DNA
cgtgacggacggctatatacgccggggatatatcaccagccgggcctttctgacagagcaggacctttcaggggc

SEQ ID NO: 793628 - DNA, 75 bp, synthetic construct
  source 1..75: mol_type = other DNA
ttcgtctggcagattcgtttaccccgcacgctggcggtactcctggtcggcgctgccctggcgttgtctggcgca

SEQ ID NO: 793629 - DNA, 75 bp, synthetic construct
  source 1..75: mol_type = other DNA
gttgtcgctttaggtttaagtgcatggctgccctttgcgacaggttcagaaaccgtcatggctgaatggggctgg

SEQ ID NO: 793630 - DNA, 75 bp, synthetic construct
  source 1..75: mol_type = other DNA
gcatcgcgccgacatatgcgacggcgggctattggggaacggcaacgctggtgctggcgcgtctgatccagggcg

SEQ ID NO: 793631 - DNA, 75 bp, synthetic construct
  source 1..75: mol_type = other DNA
ttccctcttttattacggcacctgggcggcgaagtatctggcgatgcctcaacattattctcatgcagcgatgtt

SEQ ID NO: 793632 - DNA, 75 bp, synthetic construct
  source 1..75: mol_type = other DNA
accatcaaaacctttcgaaatcaagctggaagattgtgatatcaccactttgaaaaaggcgaaagtcagctttag

SEQ ID NO: 793633 - DNA, 75 bp, synthetic construct
  source 1..75: mol_type = other DNA
cagcactggcgttaacttctggttccgtatttgcagcggattccggtgatggcactgtgaaatttacaggtgaaa

SEQ ID NO: 793634 - DNA, 75 bp, synthetic construct
  source 1..75: mol_type = other DNA
tgacggctccggcgtggtatctgggcggcggcacgttgctgtcgatgctggcgttgttgtttgtgaaagaaccag

SEQ ID NO: 793635 - DNA, 75 bp, synthetic construct
  source 1..75: mol_type = other DNA
tggtgatgaaaattgggatgagcacaatattccgttagatgataaaaaatatatagtcgaacgcacttattttat

SEQ ID NO: 793636 - DNA, 75 bp, synthetic construct
  source 1..75: mol_type = other DNA
caggaaaactctccatcacccgtgccacccgggccctgacgttcctgtcagagctggggctgattagctaccaga

SEQ ID NO: 793637 - DNA, 75 bp, synthetic construct
  source 1..75: mol_type = other DNA
ctcccgttttgatttcgccattcatgtggcgcatgcccgttcccgtggtctgcgtcggcgcatgccaccggtact

SEQ ID NO: 793638 - DNA, 75 bp, synthetic construct
  source 1..75: mol_type = other DNA
tctgcgaaaaactgatggaaaaggcggtgggcttcacctcccgttttgatttcgccattcatgtggcacatgccc

SEQ ID NO: 793639 - DNA, 75 bp, synthetic construct
  source 1..75: mol_type = other DNA
gtcttacgagaaagcggcgctgcaaaacaccattctgaaaggccgttcccagggcgttgccgcctacggcgcgaa

SEQ ID NO: 793640 - DNA, 75 bp, synthetic construct
  source 1..75: mol_type = other DNA
gcgcatgattctgtcgcgtaaccgcaattactgtcaacgacggatgaaaagtgatccacttatatctccaccaac

SEQ ID NO: 793641 - DNA, 75 bp, synthetic construct
  source 1..75: mol_type = other DNA
gaggcagtaaaacgcgaagtggagcgtcgtgtgaaggagcgcatgattctgtcacgtaaccgtaattacagccgg

SEQ ID NO: 793642 - DNA, 75 bp, synthetic construct
  source 1..75: mol_type = other DNA
ctgaaagacggcgttatccgtctgattggtaacccggaaacgcgctaccgtgaagatccggtacgtatgctgcgc

SEQ ID NO: 793643 - DNA, 75 bp, synthetic construct
  source 1..75: mol_type = other DNA
ttgaacaggtgctgaagaataccgatacgcgtatccataacgatatgcgcgtgaacccggcgttcctgtttgccg

SEQ ID NO: 793644 - DNA, 75 bp, synthetic construct
  source 1..75: mol_type = other DNA
atgctcaacgaactggatgaagaaccgtcaccacgtcgtcgtactcatcgtccgcgcagacgcgcgccacgtcgc

SEQ ID NO: 793645 - DNA, 75 bp, synthetic construct
  source 1..75: mol_type = other DNA
aacgcacagggccagccgttgccctcgttcgccatcacacgcagcagcggcgatcgccatcagttccgcattgct

SEQ ID NO: 793646 - DNA, 75 bp, synthetic construct
  source 1..75: mol_type = other DNA
ggctggataccctgggtatggatgaactgatagcgaaagcctggcgttttgtgcgtgagcgtttccgcagttacc

SEQ ID NO: 793647 - DNA, 75 bp, synthetic construct
  source 1..75: mol_type = other DNA
tatggaaggtgcggaaggcaacgtgtttgtgttacgcaagacttatcagaacgagcaggcagcaagacgcgcagc

SEQ ID NO: 793648 - DNA, 75 bp, synthetic construct
  source 1..75: mol_type = other DNA
gcaccgaaaatgaagacttcatgttcctcaacctcggtccgaaccacccgtcggcgcacggtgctttccgtatcg

SEQ ID NO: 793649 - DNA, 75 bp, synthetic construct
  source 1..75: mol_type = other DNA
cgcgcgccgcagccgtgtggtatgggaaaacaaacaacgcaaaaagcaggggctggataccctgggtatggatga

SEQ ID NO: 793650 - DNA, 75 bp, synthetic construct
  source 1..75: mol_type = other DNA
tggcatcatccgggtttggtgttgattcacgcggagggagttgaaacgcctcagccggaactgaccgaggcggta

SEQ ID NO: 793651 - DNA, 75 bp, synthetic construct
  source 1..75: mol_type = other DNA
aagcttactttctggaaattctggtttttaggttcaattcagtgggcgcgtaaaaccgtcacgccagcgagtttg

SEQ ID NO: 793652 - DNA, 75 bp, synthetic construct
  source 1..75: mol_type = other DNA
acctgttaggtattacgcaaataacttagaaggcacactatgtgttattaaaaactcaataaaatataatgtgaa

SEQ ID NO: 793653 - DNA, 75 bp, synthetic construct
  source 1..75: mol_type = other DNA
acttagaaccatttttatcaggttgttggcgtttcatcaaagaaatagatgataaaaaaaattcgatggctaact

SEQ ID NO: 793654 - DNA, 75 bp, synthetic construct
  source 1..75: mol_type = other DNA
actcttgtaaatagatactgggatgacttagaaccatttttatcaggttgttggcgtttcatcaaagaaatagat

SEQ ID NO: 793655 - DNA, 75 bp, synthetic construct
  source 1..75: mol_type = other DNA
aaatgccatacgtgctggcggtagaaaaactggccgggatcaccgtgccggatcgcgttaacgtaatccgcgtaa

SEQ ID NO: 793656 - DNA, 75 bp, synthetic construct
  source 1..75: mol_type = other DNA
cgcccgtgttcttcgcctttaccgatcggcagaaaatctacgatctggtagaagcgataaccggtttccgtatgc

SEQ ID NO: 793657 - DNA, 75 bp, synthetic construct
  source 1..75: mol_type = other DNA
aaatgccttacgtgctggcggtagagaaactggccgggatcaccgtgccggatcgcgttaacgtcattcgcgtaa

SEQ ID NO: 793658 - DNA, 75 bp, synthetic construct
  source 1..75: mol_type = other DNA
tatctatttcaatggaatgacaacgtgaatattaattaccctgctgaatatgaaattggagatatcgtctttaca

SEQ ID NO: 793659 - DNA, 75 bp, synthetic construct
  source 1..75: mol_type = other DNA
acaggttccctcccggctacgcaaactttaccacaccggttttaaatacgaatcttcgcgccagttctgttcaaa

SEQ ID NO: 793660 - DNA, 75 bp, synthetic construct
  source 1..75: mol_type = other DNA
acaccggcgctgtttgccgccctcgatgtatcagaggaggcggtggcgtccgcgcgccgcagtcgtgtggaatgg

SEQ ID NO: 793661 - DNA, 75 bp, synthetic construct
  source 1..75: mol_type = other DNA
taatgacactatcctctggtgtctcacagtcgttgcttgctgatgttcaatatttcgaactctatagtagtctgg

SEQ ID NO: 793662 - DNA, 75 bp, synthetic construct
  source 1..75: mol_type = other DNA
aaggccggatgctgtttgtcgctaaagaacgacgccctacaggcatgtttgcctatcagctttctccagatctgc

SEQ ID NO: 793663 - DNA, 75 bp, synthetic construct
  source 1..75: mol_type = other DNA
tgccgaaacaattgaacacatacaagggaacatttttgctgcagtagacgaaaagacttctgaactattcttttt

SEQ ID NO: 793664 - DNA, 75 bp, synthetic construct
  source 1..75: mol_type = other DNA
tcgacatgcggagatcggtcaacaaatcccgggtgactcaggaagccgatttttacggctcgatggacggggcaa

SEQ ID NO: 793665 - DNA, 75 bp, synthetic construct
  source 1..75: mol_type = other DNA
ttgcagtatgacgaaaacaaaatgagcgcaccgaaagtggtcgctaaaggtgcagggctggtcgcgctgcgcatt

SEQ ID NO: 793666 - DNA, 75 bp, synthetic construct
  source 1..75: mol_type = other DNA
gctacaccgaaagctgtcaaggctgcatatgacctggctaacgggaagtacacagcccaggatgcaaccacgaca

SEQ ID NO: 793667 - DNA, 75 bp, synthetic construct
  source 1..75: mol_type = other DNA
gggaactgggaggccagtggcaagaaagtaaatcacttttttaccaccggccttctgctttcagacgcttgttaa

SEQ ID NO: 793668 - DNA, 75 bp, synthetic construct
  source 1..75: mol_type = other DNA
tggcctattcaggactactggatgcaagaaacgcgtcgacacactggttgtatgagagtgattttcagtcacggt

SEQ ID NO: 793669 - DNA, 75 bp, synthetic construct
  source 1..75: mol_type = other DNA
tgtagatagtcaagtaattaaattacttgatgatagatatgctctccaatggaatatgatgaagcaaccaacatc

SEQ ID NO: 793670 - DNA, 75 bp, synthetic construct
  source 1..75: mol_type = other DNA
atactggaagaattaacagaattaaaggaaaagaatttaaataaatttaatgatatcataagatctgtaaataat

SEQ ID NO: 793671 - DNA, 75 bp, synthetic construct
  source 1..75: mol_type = other DNA
gtggatgtcaagatcaccaaatccaagatggccccggtgaaatggaatggtgaagagcaattggctctgggcccg

SEQ ID NO: 793672 - DNA, 75 bp, synthetic construct
  source 1..75: mol_type = other DNA
cgtgactatttcggtgcgcatacttataagcgcattgataaagaaggtgtattccacaccgaatggttggattaa

SEQ ID NO: 793673 - DNA, 75 bp, synthetic construct
  source 1..75: mol_type = other DNA
ttgattccctgaaaccatacctcgataaaggcgatatcatcattgatggtggtaatactttcttccaggacacca

SEQ ID NO: 793674 - DNA, 75 bp, synthetic construct
  source 1..75: mol_type = other DNA
ggctcagcgcgattactttggtgcgcacacctataagcgtaccgataaggaaggtgttttccacactgaatggtt

SEQ ID NO: 793675 - DNA, 75 bp, synthetic construct
  source 1..75: mol_type = other DNA
tcgtcgtatcctgttgatggtgaaagcaggcgcgggcaccgatgccgcaattgattccctgaaaccgtatctcga

SEQ ID NO: 793676 - DNA, 75 bp, synthetic construct
  source 1..75: mol_type = other DNA
cgctgaaagggccttccatcatgcctggtggccagaaagaagcctatgaactggttgcgccgatcctgaccaaaa

SEQ ID NO: 793677 - DNA, 75 bp, synthetic construct
  source 1..75: mol_type = other DNA
acctctccaacgaagaactggcgcagacctttaccgagtggaataacggtgaactgagcagctacctgattgaca

SEQ ID NO: 793678 - DNA, 75 bp, synthetic construct
  source 1..75: mol_type = other DNA
agccagctggcgacaaggctgagttcatcgaaaaagttcgccgtgcactgtatctgggcaaaatcgtttcttacg

SEQ ID NO: 793679 - DNA, 75 bp, synthetic construct
  source 1..75: mol_type = other DNA
catcgaaaaagttcgtcgtgctctgtatctgggcaaaatcgtttcttacgcccagggcttctctcagctgcgtgc

SEQ ID NO: 793680 - DNA, 75 bp, synthetic construct
  source 1..75: mol_type = other DNA
gacctcgctgcgctgtacctcaactcctcccgcgctgttggcgcgccgaagaataccccgttcagcatcaaagac

SEQ ID NO: 793681 - DNA, 75 bp, synthetic construct
  source 1..75: mol_type = other DNA
atcgaatatggcgacatgcagttgatttcagaagcctactctctgctgaaaggcggtcttaacctgtctaacgaa

SEQ ID NO: 793682 - DNA, 75 bp, synthetic construct
  source 1..75: mol_type = other DNA
tccgtcgtaaccgtgaactgtctgccgaaggttttaactttatcggtacaggtgtttccggtggtgaagaggggg

SEQ ID NO: 793683 - DNA, 75 bp, synthetic construct
  source 1..75: mol_type = other DNA
ttgctaacctgttgctggctccgtacttcaaaaatatcgctgatgaatatcagcaagcgctgcgtgatgtagtgg

SEQ ID NO: 793684 - DNA, 75 bp, synthetic construct
  source 1..75: mol_type = other DNA
aattgttaattatatacataaaaaacacattcaattatttgaactgtataaagttaagccccttatttatagtaa

SEQ ID NO: 793685 - DNA, 75 bp, synthetic construct
  source 1..75: mol_type = other DNA
cgcaaagttcctgcatcacggcattaagcgccagcaacgttatgtggcggaagccattactgaagagtggcgtat

SEQ ID NO: 793686 - DNA, 75 bp, synthetic construct
  source 1..75: mol_type = other DNA
tgacccagcagaattgctggcgccttatactggtgatatcgccgctgaaggtatcagcaaagccttgcgcggagg

SEQ ID NO: 793687 - DNA, 75 bp, synthetic construct
  source 1..75: mol_type = other DNA
gccagcagcttgccgcgttaatccgcagcggcgagctggaagtgcagggcgatattcaggtagtacagaacttcg

SEQ ID NO: 793688 - DNA, 75 bp, synthetic construct
  source 1..75: mol_type = other DNA
aatgcggacgttatccggttgagattttcatgatgggcgaagaagcaaaactggcaggtcagcaggaatatcacc

SEQ ID NO: 793689 - DNA, 75 bp, synthetic construct
  source 1..75: mol_type = other DNA
ggtaaattctgttgatgcgaaatatcaggaactgcgggcagaactccaggaagcccggaaaaacattccatcaaa

SEQ ID NO: 793690 - DNA, 75 bp, synthetic construct
  source 1..75: mol_type = other DNA
agctgaaacagctcataaataaatatggagtgaatgactccagcgtcaaagccatgatagatgatgaattagacc

SEQ ID NO: 793691 - DNA, 75 bp, synthetic construct
  source 1..75: mol_type = other DNA
gcatccgtctgtggggttctacggcaaccgggaacgtgcggcactggctgcatacacctgggaagtgctggcccg

SEQ ID NO: 793692 - DNA, 75 bp, synthetic construct
  source 1..75: mol_type = other DNA
ctcgtttatagattaactgattttttatgtgatgctacgactaatgtaagtaatgaagctcttgatgtttttatt

SEQ ID NO: 793693 - DNA, 75 bp, synthetic construct
  source 1..75: mol_type = other DNA
taaaatggcagataaattttcagctccgttactgactattaacggtgacgggcatacgctggcgcttgctggcac

SEQ ID NO: 793694 - DNA, 75 bp, synthetic construct
  source 1..75: mol_type = other DNA
cttccacacctggaccaagcacgcgttgctcaacgccattgctcagccggaacagtttgtggaaatcagcgaaac

SEQ ID NO: 793695 - DNA, 75 bp, synthetic construct
  source 1..75: mol_type = other DNA
ccgttcccggaacactacgagccaattgaaacgccgctgggcactaacccgttgcatccgaacgtggtgtctaac

SEQ ID NO: 793696 - DNA, 75 bp, synthetic construct
  source 1..75: mol_type = other DNA
tatgcggggtttcttgaagggcagaacgtcagactgcaccgcccggtcagtgggcaggaacaacagaaactggag

SEQ ID NO: 793697 - DNA, 75 bp, synthetic construct
  source 1..75: mol_type = other DNA
acaactgacagccgtggcgtattcgtatggaactcaaattgcagccttatatgcagaacgttttccctacaacgt

SEQ ID NO: 793698 - DNA, 75 bp, synthetic construct
  source 1..75: mol_type = other DNA
gattggttcttccaccatgccgcataaagttaacccgattgacttcgaaaactccgaagggaatctgggcctttc

SEQ ID NO: 793699 - DNA, 75 bp, synthetic construct
  source 1..75: mol_type = other DNA
cacgactacattgccgaactgtttgattgtattgcacgttttaacaccattctgatcgacttcgaccgtgacgtc

SEQ ID NO: 793700 - DNA, 75 bp, synthetic construct
  source 1..75: mol_type = other DNA
ccatcgagcgtaccactaaccacgacgttaaagcggttgagtatttcctgaaagaaaaagtggcggagatcccgg

SEQ ID NO: 793701 - DNA, 75 bp, synthetic construct
  source 1..75: mol_type = other DNA
ctatcattaataggtttatacaataatcataacgatatcgttgcgagggtaaataagcctctgtttttttatcga

SEQ ID NO: 793702 - DNA, 75 bp, synthetic construct
  source 1..75: mol_type = other DNA
ctggcgctgccagaagaagagaaagcccgcctgaaagcgatgacgccggcaaactacattggccgcgccatcacc

SEQ ID NO: 793703 - DNA, 75 bp, synthetic construct
  source 1..75: mol_type = other DNA
cgttaaagcggttgagtatttcctgaaagaaaaagtggcggatatcccggaactgcacgcggtttctgaattcat

SEQ ID NO: 793704 - DNA, 75 bp, synthetic construct
  source 1..75: mol_type = other DNA
atgctcttgtttccgaggtttctgttacacagaatagcctcggcgctaataatatttccctccagcaaatgtttg

SEQ ID NO: 793705 - DNA, 75 bp, synthetic construct
  source 1..75: mol_type = other DNA
gctcagggaaacagaaaaacaggttcttgccatgcgtgagaatttgcgcacccgactgacacaaaaaggggtaga

SEQ ID NO: 793706 - DNA, 75 bp, synthetic construct
  source 1..75: mol_type = other DNA
tgaattgtggccaatacatagcgacctgaacaaaactcgcctgaaaaatacagttctgccctcgggtttactgtt

SEQ ID NO: 793707 - DNA, 75 bp, synthetic construct
  source 1..75: mol_type = other DNA
ttcagtatcgcgatattccactgttatctcgcacccacgggcagcctgcgacaccgtcaaccatcggtaaagaga

SEQ ID NO: 793708 - DNA, 75 bp, synthetic construct
  source 1..75: mol_type = other DNA
gaagaagatgccgcacgcatcaaaaccatcgagcgtaccactaaccacgacgttaaagcggttgagtatttcctg

SEQ ID NO: 793709 - DNA, 75 bp, synthetic construct
  source 1..75: mol_type = other DNA
tcaagcgtcagtttctgttagccatttctctaaatggacagcgtaacgctgtaaatcttgccaatgatatcgata

SEQ ID NO: 793710 - DNA, 75 bp, synthetic construct
  source 1..75: mol_type = other DNA
acattactggccattttcttcgttcctctgttttttgtactggtgaaacgtttgtttgccggtaaaccgcgccgt

SEQ ID NO: 793711 - DNA, 75 bp, synthetic construct
  source 1..75: mol_type = other DNA
gtttggaatcaaggcaagaggaacaaatctgcccgtgagcattctctgcctttaagcacattaatgcgcacatgc

SEQ ID NO: 793712 - DNA, 75 bp, synthetic construct
  source 1..75: mol_type = other DNA
tattttgatacatgttttaccgcatattgccgatataaaagtaagtgacattaatcggttcatggtgaaccaact

SEQ ID NO: 793713 - DNA, 75 bp, synthetic construct
  source 1..75: mol_type = other DNA
tgttcagctatcaaatggaacatccagacgaacataaaaacgtcagacaattgatcggtaagcttcatgagcgcc

SEQ ID NO: 793714 - DNA, 75 bp, synthetic construct
  source 1..75: mol_type = other DNA
cttttttgtgcacagaaaacccccagctaggctgggggttctggaaagctttcagctttgagccagttattaaaa

SEQ ID NO: 793715 - DNA, 75 bp, synthetic construct
  source 1..75: mol_type = other DNA
atgacaaaaatggaggaactggcaaacagtcttcctgcgggaacaacctgggcctggagtggtttgtcattgcag

SEQ ID NO: 793716 - DNA, 75 bp, synthetic construct
  source 1..75: mol_type = other DNA
gtacaccgctacatacgtggcaactggttagccaggggcgaacatctattgctcataaaggaatgctgctggcgg

SEQ ID NO: 793717 - DNA, 75 bp, synthetic construct
  source 1..75: mol_type = other DNA
gggtatttgatgatgtggatgcggcactcacctggcacccggaagcctttgccggtatgttcaatacccgcacgc

SEQ ID NO: 793718 - DNA, 75 bp, synthetic construct
  source 1..75: mol_type = other DNA
tacattaattccccagtatctggtggctgttaatcttggcgcggaactcccggctttcgcgggtagtcttgtcag

SEQ ID NO: 793719 - DNA, 75 bp, synthetic construct
  source 1..75: mol_type = other DNA
gcgcagcagaaaacacctcaaaagaggcaattgagtatctcgaaagagcatctcaaatgcaggccattatgatct

SEQ ID NO: 793720 - DNA, 75 bp, synthetic construct
  source 1..75: mol_type = other DNA
acgcagcgcccttgatgccgtaacgttgatgaccactggcaccaacttcctcaacgaacatattattgaaaaagc

SEQ ID NO: 793721 - DNA, 75 bp, synthetic construct
  source 1..75: mol_type = other DNA
ggaatggaactccgaagaactggcttttgcgaaacaaattcaggctacgctcacccccaacgatcggcaaaacag

SEQ ID NO: 793722 - DNA, 75 bp, synthetic construct
  source 1..75: mol_type = other DNA
agcaaaacgtgccggtattcctgttaggcgatcgggaaaaatcaatcgccgcgctggatcgcgacctgctggagc

SEQ ID NO: 793723 - DNA, 75 bp, synthetic construct
  source 1..75: mol_type = other DNA
cactccccctttttctggtgacgatggcatcgcaaaacgcaccgggtatcgcagcaatgaaagcagccgggtatt

SEQ ID NO: 793724 - DNA, 75 bp, synthetic construct
  source 1..75: mol_type = other DNA
ccgttctgacggccctgaaacgcagtattacagagcaaataacctggttcgacggcagtccgggatttctggaag

SEQ ID NO: 793725 - DNA, 75 bp, synthetic construct
  source 1..75: mol_type = other DNA
ggcgctgccaagtctactgctggcgctggtgctggtggcaattttcggcccgtcgattggtaacgccgcgctggc

SEQ ID NO: 793726 - DNA, 75 bp, synthetic construct
  source 1..75: mol_type = other DNA
gtttgtatcaggcgctgcataatgagcgtgagcgcgacgcggcggtggtggcatttctggtaacggcaagtggat

SEQ ID NO: 793727 - DNA, 75 bp, synthetic construct
  source 1..75: mol_type = other DNA
gtcaacgcctggcgcggctttgttagtaacaggattgcagggactcacgcttaacgaagccatcggcgtttttat

SEQ ID NO: 793728 - DNA, 75 bp, synthetic construct
  source 1..75: mol_type = other DNA
ccggataaagatcaacgttggctggcagctgccgttgcaggcattttctatttgctcgcaggtctgtttggtagt

SEQ ID NO: 793729 - DNA, 75 bp, synthetic construct
  source 1..75: mol_type = other DNA
gcggcaaactcagttatcccgtatccgccaggaatcccgatgctgctgtctggtgaaaacttcggcgataaaaac

SEQ ID NO: 793730 - DNA, 75 bp, synthetic construct
  source 1..75: mol_type = other DNA
actgttcagcgcgctgatgaaatatagcgacatccatgagtattcctgggccgcgccgggtcaccagggcggtgt

SEQ ID NO: 793731 - DNA, 75 bp, synthetic construct
  source 1..75: mol_type = other DNA
atgtcacaggttactgaaaataaagtgattagcgcaccggtgccgatgaccccgttacaggagttctggcactat

SEQ ID NO: 793732 - DNA, 75 bp, synthetic construct
  source 1..75: mol_type = other DNA
atgaacagagagtacaggctgtttaacttatacggtgtggcgcaacattccagcagcggtaacgacgtaccgctg

SEQ ID NO: 793733 - DNA, 75 bp, synthetic construct
  source 1..75: mol_type = other DNA
atgttgcggaggcaaagcctcccgcaacatatctttttgtgcacagaaaacccccagctaggctgggggttccgg

SEQ ID NO: 793734 - DNA, 75 bp, synthetic construct
  source 1..75: mol_type = other DNA
gaaattgaaaagataaaattctctaatagtgatgttgttttgacgtttctactctattcatactataaatttatt

SEQ ID NO: 793735 - DNA, 75 bp, synthetic construct
  source 1..75: mol_type = other DNA
ttcgtcgtaaccgtgagctgtcaactgaaggcttcaacttcataggtaccggtatttccggtggtgaggaggggg

SEQ ID NO: 793736 - DNA, 75 bp, synthetic construct
  source 1..75: mol_type = other DNA
ctggtcccacattataccgttaaagagtttgttgaatccctcgaaactccacgccgtatcctgttaatggtgaaa

SEQ ID NO: 793737 - DNA, 75 bp, synthetic construct
  source 1..75: mol_type = other DNA
ctgttctgcctgcgaacttgatccaggcgcagcgtgactattttggtgcacatacttataagcgcattgataaag

SEQ ID NO: 793738 - DNA, 75 bp, synthetic construct
  source 1..75: mol_type = other DNA
cagcaagccctgcgtgatgttgttgcttatgcagtgcagaacggcattccagtaccaaccttctctgcagcggtt

SEQ ID NO: 793739 - DNA, 75 bp, synthetic construct
  source 1..75: mol_type = other DNA
gcctactacgacagctaccgttccgcagttctgcccgctaacctgattcaggctcagcgtgattactttggtgcg

SEQ ID NO: 793740 - DNA, 75 bp, synthetic construct
  source 1..75: mol_type = other DNA
agttcgttgaatctcttgaaacgcctcgtcgcatcctgttaatggtgaaagcaggtgcaggcacggatgctgcta

SEQ ID NO: 793741 - DNA, 75 bp, synthetic construct
  source 1..75: mol_type = other DNA
ggttccgacattctctgctgctatttcctactacgacagttatcgttccgcagttctgccagctaacctcatcca

SEQ ID NO: 793742 - DNA, 75 bp, synthetic construct
  source 1..75: mol_type = other DNA
cttcaaacagatcgctgatgactatcaacaggcactgcgtgatgttgtagcctatgccgtacagaatggcatccc

SEQ ID NO: 793743 - DNA, 75 bp, synthetic construct
  source 1..75: mol_type = other DNA
agccagcaggcgacaaggctgagttcatcgaaaaagttcgtcgtgcgctgtatctgggcaaaatcgtttcttacg

SEQ ID NO: 793744 - DNA, 75 bp, synthetic construct
  source 1..75: mol_type = other DNA
ggtgtttccggtggtgaagaaggtgcactgaaaggaccttccatcatgcctggtggccagaaagaagcctatgaa

SEQ ID NO: 793745 - DNA, 75 bp, synthetic construct
  source 1..75: mol_type = other DNA
tggtgggcagaaagaagcctatgagctggttgctccgattctgaagcagatcgccgcggttgctgaagacggtga

SEQ ID NO: 793746 - DNA, 75 bp, synthetic construct
  source 1..75: mol_type = other DNA
acaaaggtaccggtaagtggaccagccagagctcactggatctcggcgaacctctgtctctgataaccgagtccg

SEQ ID NO: 793747 - DNA, 75 bp, synthetic construct
  source 1..75: mol_type = other DNA
atggcagagatcgagattactggcggcctcggttcagcactgatgcatattcttgaggctgaagaaattcagccg

SEQ ID NO: 793748 - DNA, 75 bp, synthetic construct
  source 1..75: mol_type = other DNA
gcgctgatgttaggcatcgcgcataccctggtgacacaaagcaagcacgataaagccttccttgaaaaatacacc

SEQ ID NO: 793749 - DNA, 75 bp, synthetic construct
  source 1..75: mol_type = other DNA
ggcgtggctgaaattcttttatgatgccgctcagaaaagcgcccgtgcgcagcgtgttaccatgccagtgtttaa

SEQ ID NO: 793750 - DNA, 75 bp, synthetic construct
  source 1..75: mol_type = other DNA
gtccatcggctatttttgccggttcctacggctggcgttcttcaggtgtactgcataaagcacaaacgctgatgc

SEQ ID NO: 793751 - DNA, 75 bp, synthetic construct
  source 1..75: mol_type = other DNA
tggagaggtatttaattattctcgataagtttgtgagtaaaatatcagaatctggagtgccgcaacaaaaagtca

SEQ ID NO: 793752 - DNA, 75 bp, synthetic construct
  source 1..75: mol_type = other DNA
gccgaagagcgcggcctgggcggcggaaattaccggtgtgccggaagcgcagatagtcaaactcgccgaactgat

SEQ ID NO: 793753 - DNA, 75 bp, synthetic construct
  source 1..75: mol_type = other DNA
tcagatcctgacaggcgcggtggtgactgacgggatcaaaaaaggcgtggtatgcgtgcatgaaggtgcatggcc

SEQ ID NO: 793754 - DNA, 75 bp, synthetic construct
  source 1..75: mol_type = other DNA
gtggtgactgacgggatcaaaaaaggcgtggtatgcgtgcatgaaggtgcatggccggatctggaaaatggcttg

SEQ ID NO: 793755 - DNA, 75 bp, synthetic construct
  source 1..75: mol_type = other DNA
atgagtaaacaagacgatattttagccggggattttggcctcgccgatgaagatgaagttgcgcctgtcacgaaa

SEQ ID NO: 793756 - DNA, 75 bp, synthetic construct
  source 1..75: mol_type = other DNA
cgggcgaagcgtatttcagcgcgttctttattccctgaaatcctatatcaatacgatggaggcgaatgatctcgt

SEQ ID NO: 793757 - DNA, 75 bp, synthetic construct
  source 1..75: mol_type = other DNA
gtgaaggacggcaaaattgtgtcttccaccggtgcgctggcaaaaaccataccgaactctttgcagtctaccgcg

SEQ ID NO: 793758 - DNA, 75 bp, synthetic construct
  source 1..75: mol_type = other DNA
aacgttatatgaatctggcgggcggttattcaggacatagtggcgattactcgaccggggctgcgcaggtgatca

SEQ ID NO: 793759 - DNA, 75 bp, synthetic construct
  source 1..75: mol_type = other DNA
actgacgggatcaaaaaaggcgtggtatgcgtgcatgaaggtgcatggccagatctggaaaatggcttgtgtaaa

SEQ ID NO: 793760 - DNA, 75 bp, synthetic construct
  source 1..75: mol_type = other DNA
gatgcgccgatgatggatttacccggcgagcaactgatcgactggggcggggcgttacgctggctgaaatcgaca

SEQ ID NO: 793761 - DNA, 75 bp, synthetic construct
  source 1..75: mol_type = other DNA
gagaatccgctgattcaaaaactggcgcttaatatgggcaagcagcaattaatcgcctcgcccgatggcacaaag

SEQ ID NO: 793762 - DNA, 75 bp, synthetic construct
  source 1..75: mol_type = other DNA
ggtgccgccttccagccgcgtacctatcctaaagtcgatattttaaatgtgattctggatggagaagctgagtat

SEQ ID NO: 793763 - DNA, 75 bp, synthetic construct
  source 1..75: mol_type = other DNA
atgattactacccgaactgccaggcagtgtggacaagcagactacggatggttgcaggcccggtatactttttcc

SEQ ID NO: 793764 - DNA, 75 bp, synthetic construct
  source 1..75: mol_type = other DNA
gtgctggttgccgatgtgccagtggaagagtccgctcccttccgccaggccgcgttgcgtcataatgtcgcacct

SEQ ID NO: 793765 - DNA, 75 bp, synthetic construct
  source 1..75: mol_type = other DNA
aagagtccgcgcctttccgccaggccgcgttgcgccataacgtcgcacctatcttcatctgtccgccgaatgccg

SEQ ID NO: 793766 - DNA, 75 bp, synthetic construct
  source 1..75: mol_type = other DNA
ctcttagtgcagggtatagatccgaaaactgaacagaaacaagctcacgccgaaaattcgggggcatatactttc

SEQ ID NO: 793767 - DNA, 75 bp, synthetic construct
  source 1..75: mol_type = other DNA
tacaaatactatctgactctgttctggttggcgacgaggaaaaaacaaaagacgagaaaaaatatggggaaggga

SEQ ID NO: 793768 - DNA, 75 bp, synthetic construct
  source 1..75: mol_type = other DNA
agaccctgaaacagcgtattgacgaggcgctgggtttttcgctcgctgcccgagcgggagtaaagcataaaaacg

SEQ ID NO: 793769 - DNA, 75 bp, synthetic construct
  source 1..75: mol_type = other DNA
gaccgggcagatgagcctggatgtgtttccgtataccctggatggtatgggtgatgcatctttccctgatgccat

SEQ ID NO: 793770 - DNA, 75 bp, synthetic construct
  source 1..75: mol_type = other DNA
tgacactgacaccaaacaataacaacaccgtacaacctgtggcgctgatgcgtctgggcgtttttgtgccgaccc

SEQ ID NO: 793771 - DNA, 75 bp, synthetic construct
  source 1..75: mol_type = other DNA
cgctcaggcgctttatacttttattgaaagtttgccgcctgatccggcaccaatatcactagcccgtttacgcgc

SEQ ID NO: 793772 - DNA, 75 bp, synthetic construct
  source 1..75: mol_type = other DNA
tatgtatttttatcttaataaacccggtattggcatctgaatccccccaatcttttgcgcagaaagattctttgc

SEQ ID NO: 793773 - DNA, 75 bp, synthetic construct
  source 1..75: mol_type = other DNA
gtgctggttgccgatgtgccagttgaagagtccgcgcccttccgccaggccgcgttgcgtcataatgtcgcacct

SEQ ID NO: 793774 - DNA, 75 bp, synthetic construct
  source 1..75: mol_type = other DNA
caggactgacgatggacaagatcatcgccatgatggttgggcgttctcttaaccagcgttttcctgacaaagaaa

SEQ ID NO: 793775 - DNA, 75 bp, synthetic construct
  source 1..75: mol_type = other DNA
gaaatattaatgctcgatgaaccgacgcgcggtattgatgtcggggcgaagtttgaaatttatcagttaattgcc

SEQ ID NO: 793776 - DNA, 75 bp, synthetic construct
  source 1..75: mol_type = other DNA
aaatcgccaaagcgttttcctataacgcgaaaattgtgattatggatgaaccgacttcttcgttaaccgaaaaag

SEQ ID NO: 793777 - DNA, 75 bp, synthetic construct
  source 1..75: mol_type = other DNA
caaagaggcatacatcaacgcctttaaccagatggagaagaatttatctggtgctgacgcggttgatatgtcagc

SEQ ID NO: 793778 - DNA, 75 bp, synthetic construct
  source 1..75: mol_type = other DNA
cgaggctgccattatggctacgatcccaacctttgttcaccctgaaatcacgatcatcaatggtcgtgctgtcac

SEQ ID NO: 793779 - DNA, 75 bp, synthetic construct
  source 1..75: mol_type = other DNA
tccgcgtgcgcgcgttggtacgttgtccgtttcacaaatgcagatgattgaaatcgccaaagcattttcctataa

SEQ ID NO: 793780 - DNA, 75 bp, synthetic construct
  source 1..75: mol_type = other DNA
cgccttaaaaaatgcacaaggtgtagttgttccgtggttgccttctgtaggcgacttactggcatgtgactggtt

SEQ ID NO: 793781 - DNA, 75 bp, synthetic construct
  source 1..75: mol_type = other DNA
gaaaactgcgactgcctgctgcctatgtggtcccctctgacgatgcgccgggggaacaaaaatcacagaccgatt

SEQ ID NO: 793782 - DNA, 75 bp, synthetic construct
  source 1..75: mol_type = other DNA
gcaacatattgatgagccagagaaaatgttggtggcattgaaagcttttatacaaccgatgaaaacggcaacacg

SEQ ID NO: 793783 - DNA, 75 bp, synthetic construct
  source 1..75: mol_type = other DNA
atgacgtgaccgttgagcgtgtggtatctgccatcgcgcaccgttacggactgaaagcacaaatcagcgaaatgc

SEQ ID NO: 793784 - DNA, 75 bp, synthetic construct
  source 1..75: mol_type = other DNA
gccgggattggcgtcctgaaattgtcaacggcgatgtatgacgcgtcagcgtcttttttatcgtccgcatttgct

SEQ ID NO: 793785 - DNA, 75 bp, synthetic construct
  source 1..75: mol_type = other DNA
cgccttaaaaaatgcacaaggtgtagttgttccgtgggtgccttcggtaggcgacttactggcgtgtgactggtt

SEQ ID NO: 793786 - DNA, 75 bp, synthetic construct
  source 1..75: mol_type = other DNA
ttgtggacgaacagacactcaggcagcgtattgatgaggcgctggaatttgcgaatgctgccgttacaggaacag

SEQ ID NO: 793787 - DNA, 75 bp, synthetic construct
  source 1..75: mol_type = other DNA
acgttctttcctggggcgcgactttggccgcagcggtgacctgtcggtggactatcccctgttgcaggagaagaa

SEQ ID NO: 793788 - DNA, 75 bp, synthetic construct
  source 1..75: mol_type = other DNA
aaaaatctggagaagacacttaccgtgaataccggtgcgctgctgacaatgtcagtcagtgtcaacgggggaacg

SEQ ID NO: 793789 - DNA, 75 bp, synthetic construct
  source 1..75: mol_type = other DNA
acggattctgcagaacagccgcagagcattacctctgatgcgtgtacggtaacggttaatggtgcgggcggataa

SEQ ID NO: 793790 - DNA, 75 bp, synthetic construct
  source 1..75: mol_type = other DNA
tggaggcactccccactgatgcccgctctttcctggggcgcgactttggccgtagcggtgatttgtcggtggact

SEQ ID NO: 793791 - DNA, 75 bp, synthetic construct
  source 1..75: mol_type = other DNA
ctatgcggccagtgaaattgaagaaggattctgggaagaggacgacgacgacaaacacatcaggacttacaccat

SEQ ID NO: 793792 - DNA, 75 bp, synthetic construct
  source 1..75: mol_type = other DNA
ctatgcggccagtgaaattgaagaaggattctgggaagaggacgacgacaaacacatcaagacttacaccatcaa

SEQ ID NO: 793793 - DNA, 75 bp, synthetic construct
  source 1..75: mol_type = other DNA
gaataccgtgtacaccaaaataatatcagtattttggcttgtattacttatcagctcatgcatcagcatacgtaa

SEQ ID NO: 793794 - DNA, 75 bp, synthetic construct
  source 1..75: mol_type = other DNA
cgctcccgtaaggcctgaaaccgtggagaaagcggaatacctgcgtctggactgtaccatcaaggaagtccagtt

SEQ ID NO: 793795 - DNA, 75 bp, synthetic construct
  source 1..75: mol_type = other DNA
tattaattctttttattactccgtttgtagcaaaaaatctaagcagtgacaatataaaatatagtcttaatatta

SEQ ID NO: 793796 - DNA, 75 bp, synthetic construct
  source 1..75: mol_type = other DNA
gggtggagcacatcatagatgaaagcggcttcaccacacaactggagctggaagcgaaaatccccgaatggatag

SEQ ID NO: 793797 - DNA, 75 bp, synthetic construct
  source 1..75: mol_type = other DNA
actgtcagtattggttgctttacttcaaaagagaataatctcagtccatctgaaatgttagtcaatgccgataaa

SEQ ID NO: 793798 - DNA, 75 bp, synthetic construct
  source 1..75: mol_type = other DNA
ttttttataaacttgatgatttttattttcttgttgctctactatgtttctaatcaacgggaaagttatctgtta

SEQ ID NO: 793799 - DNA, 75 bp, synthetic construct
  source 1..75: mol_type = other DNA
aagaacttcatatgatgatggggcggagaaaaccgccgaagatacaggctgttcttaacacccgatactggaaaa

SEQ ID NO: 793800 - DNA, 75 bp, synthetic construct
  source 1..75: mol_type = other DNA
tgatgagtctgacgctgacggacaaccggggctttgaagcggaccagcttgatctggagctggatgacgctgacg

SEQ ID NO: 793801 - DNA, 75 bp, synthetic construct
  source 1..75: mol_type = other DNA
aaaggaaataaagttttaattctgattacaagacttaggttacgcaaaattcaaatgaaacttggattttcaata

SEQ ID NO: 793802 - DNA, 75 bp, synthetic construct
  source 1..75: mol_type = other DNA
gaaaaaaatcccggcgcgaagatcatccacgatccacgtctctcctggaataccgttgatgtggtgactgccgct

SEQ ID NO: 793803 - DNA, 75 bp, synthetic construct
  source 1..75: mol_type = other DNA
tgacctccattgaagatacgttacaacgctggaacagcaatagtttctatgaaggtaaattactaattcttttca

SEQ ID NO: 793804 - DNA, 75 bp, synthetic construct
  source 1..75: mol_type = other DNA
gcgccaagtggtgttgaagtcataatgacctccattgaagatacgttacaacgctggaacagcaatagtttctat

SEQ ID NO: 793805 - DNA, 75 bp, synthetic construct
  source 1..75: mol_type = other DNA
agcaacggtttcaccacacaactggagcttgaggctaaaatacctgactggatagcagaatcagaacagagtgga

SEQ ID NO: 793806 - DNA, 75 bp, synthetic construct
  source 1..75: mol_type = other DNA
gtcccgcatgtccgctgatacgccggtattgcgtctgacctgcaaggaaggttatgaactgctgtctgatgaggt

SEQ ID NO: 793807 - DNA, 75 bp, synthetic construct
  source 1..75: mol_type = other DNA
gcgagagccaattgtacaggttgtcctgcttctcagaatatccctcgtttttttgctgactctgaacctgatact

SEQ ID NO: 793808 - DNA, 75 bp, synthetic construct
  source 1..75: mol_type = other DNA
aattatacgtgaatatgtgaacaacgtaacgaaagaatatacgttatgtataccagacatggttaaccggaaggg

SEQ ID NO: 793809 - DNA, 75 bp, synthetic construct
  source 1..75: mol_type = other DNA
tggtcggaggcatccgagcaggcgtggatggcatcggtgtacaaattctacggtgccggtgcatccgaggagctt

SEQ ID NO: 793810 - DNA, 75 bp, synthetic construct
  source 1..75: mol_type = other DNA
cgtttaataccctgattggcgacatccgcgccgggcgtcagggaggctgtattcaccgcattacgttcagagatg

SEQ ID NO: 793811 - DNA, 75 bp, synthetic construct
  source 1..75: mol_type = other DNA
atggtgcctatctggctgaatacgccatgcagcgctacggctccggccgggttcagcaggtgatgccaaccgaag

SEQ ID NO: 793812 - DNA, 75 bp, synthetic construct
  source 1..75: mol_type = other DNA
cctgcctttggtcttgcagtgctggcggccagtgtctgctactcctggtttggtctacagatggtgaagaaaacc

SEQ ID NO: 793813 - DNA, 75 bp, synthetic construct
  source 1..75: mol_type = other DNA
atgcaaaaaaaacacctgacgctccttctgccgtcactcattaccggctgcgccggtttcgcctctccgccggag

SEQ ID NO: 793814 - DNA, 75 bp, synthetic construct
  source 1..75: mol_type = other DNA
gattgctggctgaacagcatctgtgggggcatctggactggaaaaaccgcaccctgaccgtcaccacttcaccgg

SEQ ID NO: 793815 - DNA, 75 bp, synthetic construct
  source 1..75: mol_type = other DNA
actggttcggtaagaagccgatttttccccatattcctaccggtttgctgttgctgattgctggtacgtccctag

SEQ ID NO: 793816 - DNA, 75 bp, synthetic construct
  source 1..75: mol_type = other DNA
gcgacctgttgcacagcaaaggcgtctattacgatggactgatgcatctgggaagcggtgcaccgctggccagca

SEQ ID NO: 793817 - DNA, 75 bp, synthetic construct
  source 1..75: mol_type = other DNA
ggcatcactatgtttctggtgccattgtttgggttgggcgcgtttatgctcgccattattcccatgactgctata

SEQ ID NO: 793818 - DNA, 75 bp, synthetic construct
  source 1..75: mol_type = other DNA
atggtcattgatggtattgaagttcgtcgtgatgcttatgggcgttacagcctgaacgatctgcacagggctgcc

SEQ ID NO: 793819 - DNA, 75 bp, synthetic construct
  source 1..75: mol_type = other DNA
agaacatcaccagtcctgcaaatccgcgcgagacgcagccgcatttcttcgaatcccgattccctgagctgttaa

SEQ ID NO: 793820 - DNA, 75 bp, synthetic construct
  source 1..75: mol_type = other DNA
ccctgacacgcaaccgcacggtcagcgactgggtgaaacagctgcttcccgccggctggcagttccgccaggaga

SEQ ID NO: 793821 - DNA, 75 bp, synthetic construct
  source 1..75: mol_type = other DNA
aaaaccgcccgaaatactggctctccaataagcaaacctgtgaattgattgaacaacttttcaccgagggtggaa

SEQ ID NO: 793822 - DNA, 75 bp, synthetic construct
  source 1..75: mol_type = other DNA
aaccaggggacgtatgtctgcaaagaactggtgtatgcctatgcaatgtggatcagcccgtcattccatctgaag

SEQ ID NO: 793823 - DNA, 75 bp, synthetic construct
  source 1..75: mol_type = other DNA
tatgtctggccctctttgcagaacgactacgagacagtacaggtctacaacgccccacaggtaaacgatgactat

SEQ ID NO: 793824 - DNA, 75 bp, synthetic construct
  source 1..75: mol_type = other DNA
ttgtggtgctgaccgctgccctctccagcctgaactcaggtctgtactgcaccggacgtattctgcgctcaatgg

SEQ ID NO: 793825 - DNA, 75 bp, synthetic construct
  source 1..75: mol_type = other DNA
acatggcctcctccatcggtatctcagtacaggcatttgataaatggggtgttcctcctgttgagcgccggggga

SEQ ID NO: 793826 - DNA, 75 bp, synthetic construct
  source 1..75: mol_type = other DNA
ggaaataaccaggggacgtatgtctgcaaagaactggtgtatgcctatgcaatgtggatcagcccgtcattccat

SEQ ID NO: 793827 - DNA, 75 bp, synthetic construct
  source 1..75: mol_type = other DNA
ggcttcgatgaattcccgatcctggcgccgcgctgggaagttaacggcgaagacgtttacgcatcttcctgccct

SEQ ID NO: 793828 - DNA, 75 bp, synthetic construct
  source 1..75: mol_type = other DNA
aggttaaccactgcattactccaaacgttaaccgtgataccgggaagatggacagcaagaacaagccgttccgct

SEQ ID NO: 793829 - DNA, 75 bp, synthetic construct
  source 1..75: mol_type = other DNA
cgcgtatttgagattgtcctgaacttcgcgtcattgggaattatcgcctcgtgggcgtttatcattgtttgtcag

SEQ ID NO: 793830 - DNA, 75 bp, synthetic construct
  source 1..75: mol_type = other DNA
tggcattctgggcggcatcgggatgctctattttcaggatttgatgcccggtcaggcaggttcagccaccacgct

SEQ ID NO: 793831 - DNA, 75 bp, synthetic construct
  source 1..75: mol_type = other DNA
cctatgcaatgtggatcagcccgtcattccatctgaaggtgatccgtactttcgacatggtaaccagcgcaccgg

SEQ ID NO: 793832 - DNA, 75 bp, synthetic construct
  source 1..75: mol_type = other DNA
tatgtctatccctctctgcaggacgattacgagacagtgcaggtctacaactccccccaggtaaacgatgactat

SEQ ID NO: 793833 - DNA, 75 bp, synthetic construct
  source 1..75: mol_type = other DNA
tccgcgcgagacgcagccgcatttcttcgaatcccgattccctgagctgttaaagctgctcgataccgttcattg

SEQ ID NO: 793834 - DNA, 75 bp, synthetic construct
  source 1..75: mol_type = other DNA
acaggctgctgacaagatgcaggctggcgtgattctgctggactttatgcgccgggagttaaatctgtctaactc

SEQ ID NO: 793835 - DNA, 75 bp, synthetic construct
  source 1..75: mol_type = other DNA
aatcccgcacttttgagcagcaaatgattgagcgggataaacgcgccacaaaagccggttttgttgttggcggta

SEQ ID NO: 793836 - DNA, 75 bp, synthetic construct
  source 1..75: mol_type = other DNA
gttggcttaccgaatctggcaccgcgctatgccattgatgctcctgctgatgcacacgatggctcaagtcgcccg

SEQ ID NO: 793837 - DNA, 75 bp, synthetic construct
  source 1..75: mol_type = other DNA
ctgacgtaaccatcgaaaacggtcgcgctgtaactacatccattgcgatcgcagagttttttggcaagcaacatc

SEQ ID NO: 793838 - DNA, 75 bp, synthetic construct
  source 1..75: mol_type = other DNA
atgattcgctaccagcatattgattctgcaattccgggacgttacactgttccggcaccttataaagcgggggcc

SEQ ID NO: 793839 - DNA, 75 bp, synthetic construct
  source 1..75: mol_type = other DNA
gcactctggattgttcccctgagttttgtgcccgcaattttgcggagacatcgatttcggtaaatcaaccgaacg

SEQ ID NO: 793840 - DNA, 75 bp, synthetic construct
  source 1..75: mol_type = other DNA
ctgagctggctcggtcagttcgatatggtctgtgtcagcggaagcttaccgtcaggcgtcagcccggaagcgttc

SEQ ID NO: 793841 - DNA, 75 bp, synthetic construct
  source 1..75: mol_type = other DNA
atgagcagacgtgttgctacgatcacccttaatccggcttatgaccttgttggtttctgcccggaaattgaacgc

SEQ ID NO: 793842 - DNA, 75 bp, synthetic construct
  source 1..75: mol_type = other DNA
ggccgcaaactcccttgttaccaaatcacccgcgacggttttgcgtttcttgccatgggcttcacgggtaaacgt

SEQ ID NO: 793843 - DNA, 75 bp, synthetic construct
  source 1..75: mol_type = other DNA
atcacatcaacagcgcactggatgcagcggaagataccgttagggtgccagacttcactatcacactggaaggga

SEQ ID NO: 793844 - DNA, 75 bp, synthetic construct
  source 1..75: mol_type = other DNA
cgcgacggttttgcgtttcttgccatgggcttcactggtaaacgtgctgcccagttcaaagaggcatacatcaac

SEQ ID NO: 793845 - DNA, 75 bp, synthetic construct
  source 1..75: mol_type = other DNA
caaataacccgcgatggctttgcgtttcttgctatgggtttcacgggtaaacgtgctgcccagttcaaagaggca

SEQ ID NO: 793846 - DNA, 75 bp, synthetic construct
  source 1..75: mol_type = other DNA
attacaccgattgcacaggccgcaaactaccttgctatcaaatcacccgtgatggcttcgcgttccttgctatgg

SEQ ID NO: 793847 - DNA, 75 bp, synthetic construct
  source 1..75: mol_type = other DNA
gccagaattatggtgggctgggcaggggagccgaaaggctcgccggtttccttgatcgccggtagttccaaccct

SEQ ID NO: 793848 - DNA, 75 bp, synthetic construct
  source 1..75: mol_type = other DNA
ctatgggtttcacggggaaacgtgctgcccagttcaaagaggcatacatcaatgcctttaaccagatggaaaagc

SEQ ID NO: 793849 - DNA, 75 bp, synthetic construct
  source 1..75: mol_type = other DNA
gagctgggcattgccaaccgtttccaggttgtccaggggcgtacccgcattaacgtcaagctgacagaaaaagac

SEQ ID NO: 793850 - DNA, 75 bp, synthetic construct
  source 1..75: mol_type = other DNA
cactgggctcccaaaggcattgaaatcgtctcttatcaggggcaggacaatatttactcagacctgactgccgga

SEQ ID NO: 793851 - DNA, 75 bp, synthetic construct
  source 1..75: mol_type = other DNA
attgccacaaataccatctcgttccgtagcaaaggctctgatgagttttacgtaacgcatcttgtgcaaacggca

SEQ ID NO: 793852 - DNA, 75 bp, synthetic construct
  source 1..75: mol_type = other DNA
ttgagtgtgaaggaccaccagcatattgattctgccatttcgggacgttacactgtctctgcaccttataaagcg

SEQ ID NO: 793853 - DNA, 75 bp, synthetic construct
  source 1..75: mol_type = other DNA
aaattcacaaggtgaattagttggctttgatatcgacctagcgaaggagttgtgcaaacgcatcaatacgcaatg

SEQ ID NO: 793854 - DNA, 75 bp, synthetic construct
  source 1..75: mol_type = other DNA
tctgcaaggaactggtgtatgcctatgcaatgtggatcagcccgtcattccatctgaaggtgatccgtactttcg

SEQ ID NO: 793855 - DNA, 75 bp, synthetic construct
  source 1..75: mol_type = other DNA
tgtgcaaacgcatcaatacgcaatgtacgtttgttgagaatccgctggatgcgttaattccgtcattaaaagcga

SEQ ID NO: 793856 - DNA, 75 bp, synthetic construct
  source 1..75: mol_type = other DNA
caccgcgtatctgggcgatgctggaatgctgcgttataacagcaagctgccgatcgtggtgtatacgccagacaa

SEQ ID NO: 793857 - DNA, 75 bp, synthetic construct
  source 1..75: mol_type = other DNA
cgatcgtggtgtatacgccagacaatgtggatgtgaagtaccgcatctggaaggcggaagagaaaattgacaacg

SEQ ID NO: 793858 - DNA, 75 bp, synthetic construct
  source 1..75: mol_type = other DNA
caatcgtggtgtatacgccagacaatgtggatgtgaagtaccgcatctggaaagcggaagagaaaattaacaaca

SEQ ID NO: 793859 - DNA, 75 bp, synthetic construct
  source 1..75: mol_type = other DNA
ccgcactctggattgttcccctgagttttgtgcccgcaattttgcggagacatcgatttcggtaaatcaaccgaa

SEQ ID NO: 793860 - DNA, 75 bp, synthetic construct
  source 1..75: mol_type = other DNA
tttgcagtagctaattactttactaaacggcatgagcgggttttagatagaattagaaacctcgaatgttccgct

SEQ ID NO: 793861 - DNA, 75 bp, synthetic construct
  source 1..75: mol_type = other DNA
gtcatgacgatgttctgaaaaagattcgcattttggattgttctccagagttttgtgcccgcaattttgcggaga

SEQ ID NO: 793862 - DNA, 75 bp, synthetic construct
  source 1..75: mol_type = other DNA
cgcgggcagaagctggggctggcgctgggctggaaaggtgaggcgctgacggacaagggagccttcatcgttgac

SEQ ID NO: 793863 - DNA, 75 bp, synthetic construct
  source 1..75: mol_type = other DNA
catgcacggatccgcgataaattacgtcaggatattggccgcaaaatgacgtcgattggtgaagacctgcccgtc

SEQ ID NO: 793864 - DNA, 75 bp, synthetic construct
  source 1..75: mol_type = other DNA
aaacgcctttaccgtccagccggtctgcggcccggcgcgttcctgcctgcaaaccgggcgttacccgacgcagaa

SEQ ID NO: 793865 - DNA, 75 bp, synthetic construct
  source 1..75: mol_type = other DNA
gccagttgatattgcagtcagtgttcacaggacaatgcaggagtgtgtgactgcagcaaccgaacagaaaattcc

SEQ ID NO: 793866 - DNA, 75 bp, synthetic construct
  source 1..75: mol_type = other DNA
gaaaacacgaacgggagttattaaataaaatatgcattgtttcaatgctggcccgtttacgtctgatacaaaaag

SEQ ID NO: 793867 - DNA, 75 bp, synthetic construct
  source 1..75: mol_type = other DNA
ctgcagcaaccgaacagaaaattcccggtaactgttaccctgtcgataaagttattcaccaggataataacgaaa

SEQ ID NO: 793868 - DNA, 75 bp, synthetic construct
  source 1..75: mol_type = other DNA
ggaaatatgagccttatcttctgaatgataattccatactttcaagaattgctcttcttcaacttggcatttttg

SEQ ID NO: 793869 - DNA, 75 bp, synthetic construct
  source 1..75: mol_type = other DNA
atacgtctgaaggttgttttaatattggcattcagctcagtaataaagacttcactgatgatgccattaatatga

SEQ ID NO: 793870 - DNA, 75 bp, synthetic construct
  source 1..75: mol_type = other DNA
cgccttcggtctggcgcagaaatatcacggctccgggctgacccgtcaggactttatcgacgatacaccgcaggc

SEQ ID NO: 793871 - DNA, 75 bp, synthetic construct
  source 1..75: mol_type = other DNA
acgaagcaatcagaaataacgccatagacgcaatactctcacttccgatcgacgacaagtcacctcacgaagtcc

SEQ ID NO: 793872 - DNA, 75 bp, synthetic construct
  source 1..75: mol_type = other DNA
cggcgcactgcttttcatcgtgcccggacagggggtgagcgccagcggaaagccgctgccctcattcgccatcac

SEQ ID NO: 793873 - DNA, 75 bp, synthetic construct
  source 1..75: mol_type = other DNA
gaaaacacgaacgggagttattaaataaagtatgcattgtttcaatgctggcccgtttacgtctgatgcaaaaag

SEQ ID NO: 793874 - DNA, 75 bp, synthetic construct
  source 1..75: mol_type = other DNA
agtaaccctgtatttactgaagatgccattaacaagagaaaacacgaacgggagctattaaataaaatatgcatt

SEQ ID NO: 793875 - DNA, 75 bp, synthetic construct
  source 1..75: mol_type = other DNA
gcggttacattggaagtcatacctgtgtgcaattactgcaaaacggtcatgatgtcatcattcttgataacctct

SEQ ID NO: 793876 - DNA, 75 bp, synthetic construct
  source 1..75: mol_type = other DNA
aaactttgatgcagaaattggtcggaagattgcccggcaaaatgctgtaaacaaaatctggatgctcgaaggtta

SEQ ID NO: 793877 - DNA, 75 bp, synthetic construct
  source 1..75: mol_type = other DNA
ctggtaagtccggatactttacgtgaccagaaacggccgggagatttaaaactggatccaaatgaagcatattat

SEQ ID NO: 793878 - DNA, 75 bp, synthetic construct
  source 1..75: mol_type = other DNA
ttctccgcgatcgatcaaacaagaagtggatcgagagctggaaagtttgctggtcgcgcaatatcaattaatgca

SEQ ID NO: 793879 - DNA, 75 bp, synthetic construct
  source 1..75: mol_type = other DNA
ggtaaatggtggtggagtggtacagcgactgttctgggattttgcgggaaaagcgattgcgttgccaccggttaa

SEQ ID NO: 793880 - DNA, 75 bp, synthetic construct
  source 1..75: mol_type = other DNA
acaacctcggtgcaggcgtaggcagcagcgtactggatgtggttaacgccttcagcaaagcgtgcggcaaaccgg

SEQ ID NO: 793881 - DNA, 75 bp, synthetic construct
  source 1..75: mol_type = other DNA
ccggagagccagttgatattgcagtcagtgttcacaggacaatgcaggagtgtatgactgcagcaaccgaacaga

SEQ ID NO: 793882 - DNA, 75 bp, synthetic construct
  source 1..75: mol_type = other DNA
tgacagtttttcttaatactggcgaacctgttgatgtggttactggtatatatggttcaatgaaagaatgtatgg

SEQ ID NO: 793883 - DNA, 75 bp, synthetic construct
  source 1..75: mol_type = other DNA
tgacggtttttcttgtttccggtgaaccggttgacatggttactggcgtatacagctcaatgaaagaatgtagga

SEQ ID NO: 793884 - DNA, 75 bp, synthetic construct
  source 1..75: mol_type = other DNA
agcatttatagtcggctctgtactggccactttcagtcagggtgttgcagtcggaaccttattaaatggattgag

SEQ ID NO: 793885 - DNA, 75 bp, synthetic construct
  source 1..75: mol_type = other DNA
ggtttgtgatcatcgttttcgccacgctaatgtatatcgtgatggatggattcgatttgggtattggcattctgt

SEQ ID NO: 793886 - DNA, 75 bp, synthetic construct
  source 1..75: mol_type = other DNA
caggctgttggcttacctggatttatcgcttatggtgtgtatattggtgaagttgtggcgccagtgcttattatt

SEQ ID NO: 793887 - DNA, 75 bp, synthetic construct
  source 1..75: mol_type = other DNA
taattgccgcctttcgcgacgcggggttttccgatgtcatcattgctgcccgcaaccacgagagcggcccggcgc

SEQ ID NO: 793888 - DNA, 75 bp, synthetic construct
  source 1..75: mol_type = other DNA
cctggcgtcgctggtgggtgcgattctgaatacctggaatcgcttctcgattccggcatttgctccaacgctgct

SEQ ID NO: 793889 - DNA, 75 bp, synthetic construct
  source 1..75: mol_type = other DNA
ctgcagcaaccgaacagaaaattccaggcaactgttatccggtcgataaagttattcaccaggataatatcgaaa

SEQ ID NO: 793890 - DNA, 75 bp, synthetic construct
  source 1..75: mol_type = other DNA
gtgaaaagtgcaatgacaagctctccgctgcgggtcgcgataatcggcgcaggccaggtggcggataaggttcat

SEQ ID NO: 793891 - DNA, 75 bp, synthetic construct
  source 1..75: mol_type = other DNA
ttccggcatttgccccgacgttacttaacatcagcatgattggttttgcgctgtttgccgcgccgtactttaatc

SEQ ID NO: 793892 - DNA, 75 bp, synthetic construct
  source 1..75: mol_type = other DNA
gaccggcgatccttggcgtctctgtgagccagatctccttaatcatcaacaccatttttgcctcgtttcttgctt

SEQ ID NO: 793893 - DNA, 75 bp, synthetic construct
  source 1..75: mol_type = other DNA
ctgttccagtacggtaaatttaccgcgtttgatgcgctgatgacccagcgggcgttaattgcctactcggtgggt

SEQ ID NO: 793894 - DNA, 75 bp, synthetic construct
  source 1..75: mol_type = other DNA
aaaattcccggtaactgttacccggtcgataaagttattcaccaggataatatcgaaatcccggcaggtctttaa

SEQ ID NO: 793895 - DNA, 75 bp, synthetic construct
  source 1..75: mol_type = other DNA
ggcgtatttccttacccaccgatgcgccgatgatggatttacccggcgagcaactgatcgactggggcggcgcgt

SEQ ID NO: 793896 - DNA, 75 bp, synthetic construct
  source 1..75: mol_type = other DNA
tcgacaacgccttgtggctccgccttgaaggcggtgaaggatcggtaaaagcagcgcgtgaactgctgggtggcg

SEQ ID NO: 793897 - DNA, 75 bp, synthetic construct
  source 1..75: mol_type = other DNA
cggctggggtgtctttaccaataaagaattgcagggcggtggcccgctgatcgacatcggcattcatatgctgga

SEQ ID NO: 793898 - DNA, 75 bp, synthetic construct
  source 1..75: mol_type = other DNA
ctgccgcagcggaacagaaaatccccggtaactgttatccggttgataaagttattctcatggataataacgaag

SEQ ID NO: 793899 - DNA, 75 bp, synthetic construct
  source 1..75: mol_type = other DNA
ctgccgcagcagaacaaaaaattcccggtaactgctatccggtcgataaagttattcacatggataataacgaaa

SEQ ID NO: 793900 - DNA, 75 bp, synthetic construct
  source 1..75: mol_type = other DNA
gactgtcgctttccattggtctggcagcttgcctgaatgcctcgctgctttactggcagttgcgtaagcagaaaa

SEQ ID NO: 793901 - DNA, 75 bp, synthetic construct
  source 1..75: mol_type = other DNA
cggcaactgttatccggttgataaagttattcgcatggacaataacgaaatcccggcaggacttaaagcagcacc

SEQ ID NO: 793902 - DNA, 75 bp, synthetic construct
  source 1..75: mol_type = other DNA
gaggtgagcatatcacctctgttcaggtggccaaattcagtgtgccacttcaaaagcaaccgcttcgtacttgat

SEQ ID NO: 793903 - DNA, 75 bp, synthetic construct
  source 1..75: mol_type = other DNA
agtgcctattttcggggcgttaattgcgggtaacttgctgttagcgcgtctgacctcgcgccgcaccgtacgttc

SEQ ID NO: 793904 - DNA, 75 bp, synthetic construct
  source 1..75: mol_type = other DNA
tgacaacggcaagctgatcgggtttaacactgactacatcgcggtgaaaagcctgattattcaccaccagctcaa

SEQ ID NO: 793905 - DNA, 75 bp, synthetic construct
  source 1..75: mol_type = other DNA
gatgtgcgtatttctgtagaaaatgtcagaacaattagccatgaatcagatctggatgtttatcagtgcgctgct

SEQ ID NO: 793906 - DNA, 75 bp, synthetic construct
  source 1..75: mol_type = other DNA
cagcatgagaaatatcaatcccgaggaagcaatacttataaaaccaataggcaagccgctaccatttaaatcaaa

SEQ ID NO: 793907 - DNA, 75 bp, synthetic construct
  source 1..75: mol_type = other DNA
gttgccctgggaagggatgtttgtcctgtttgcggtgctggcggcgatctctttcttcggtctgcaacgtgctat

SEQ ID NO: 793908 - DNA, 75 bp, synthetic construct
  source 1..75: mol_type = other DNA
atgcaaaatagattagcttccggtgccagacttgggcgtcaggcgttacttttccctctctgtctggtgctctac

SEQ ID NO: 793909 - DNA, 75 bp, synthetic construct
  source 1..75: mol_type = other DNA
taccgcctttgatgcgctgatgacccagcgggcgttaattgcctactcggtgggtttgattggcctgattgtagt

SEQ ID NO: 793910 - DNA, 75 bp, synthetic construct
  source 1..75: mol_type = other DNA
cataatcacctgcctggcgatattactggcgcaaaacattgaacaattcacgctgttgcgctttctacaggggat

SEQ ID NO: 793911 - DNA, 75 bp, synthetic construct
  source 1..75: mol_type = other DNA
ctggccgattctgattggtctggttgtcgctgctgcggcaacggtcatctcatcgcatgcatatttatggatgac

SEQ ID NO: 793912 - DNA, 75 bp, synthetic construct
  source 1..75: mol_type = other DNA
ggcgaatgcgggactggtgcgattaaccctgtttgccagcgatatgagtaaaggtacggtttctgcggcgatggg

SEQ ID NO: 793913 - DNA, 75 bp, synthetic construct
  source 1..75: mol_type = other DNA
gatctgcgtgagcaaggttatatggggctgcacacagtcggacgcggttcagaacgttctccggtattgctggcg

SEQ ID NO: 793914 - DNA, 75 bp, synthetic construct
  source 1..75: mol_type = other DNA
ctcttacggtcgtggttacacctatttgctgtcacgagcaggcgtgaccggcgcagaaaaccgcgccgcgttacc

SEQ ID NO: 793915 - DNA, 75 bp, synthetic construct
  source 1..75: mol_type = other DNA
ctcttacggtcgtggttacacctatttgctgtcgcgagcgggcgtgaccggcgcagaaaaccgcgccgcgttacc

SEQ ID NO: 793916 - DNA, 75 bp, synthetic construct
  source 1..75: mol_type = other DNA
tgcgcagaaaccggaactgatcattgatgcggcgaccctcaccggggcggcgaaaaccgcgctgggtaatgatta

SEQ ID NO: 793917 - DNA, 75 bp, synthetic construct
  source 1..75: mol_type = other DNA
gtgcctcacaagagaacgaaccgttctggcgtctgccgctggcggagttccaccgcagccagctgccgtctaact

SEQ ID NO: 793918 - DNA, 75 bp, synthetic construct
  source 1..75: mol_type = other DNA
ccttatccaacgtgcagcgcgcaaaattgacggtctgggcatcaaacatgttcagctaagtggtgaaggctggga

SEQ ID NO: 793919 - DNA, 75 bp, synthetic construct
  source 1..75: mol_type = other DNA
ttgcgcttggtgcggctatgatcctgccgctcggtccgcaaaatgcttttgtgatgaatcagggcattcgccgtc

SEQ ID NO: 793920 - DNA, 75 bp, synthetic construct
  source 1..75: mol_type = other DNA
aggcagatggaaaattatcgccaccatgttggcagtgacctggctgaatccgcatgtttacctggatacttttgt

SEQ ID NO: 793921 - DNA, 75 bp, synthetic construct
  source 1..75: mol_type = other DNA
gccgaagtcctgaagcaaggcagatggaaaattatcgccaccatgttggcagtgacctggctgaatccgcatgtt

SEQ ID NO: 793922 - DNA, 75 bp, synthetic construct
  source 1..75: mol_type = other DNA
ctcctacggtcgtggatacacctatttgctgtcgcgtgcgggcgtgactggcgcagaaaaccgcgccgcgttacc

SEQ ID NO: 793923 - DNA, 75 bp, synthetic construct
  source 1..75: mol_type = other DNA
gttcggccatcgttaaaatcatcgagcaacatattaatgagccagagaaaatgctggcggcactgaaagcttttg

SEQ ID NO: 793924 - DNA, 75 bp, synthetic construct
  source 1..75: mol_type = other DNA
acattattgttggtggcgtaatgtggtttatcgccctacagctggcgagagatggtattgcccatgcacaagcct

SEQ ID NO: 793925 - DNA, 75 bp, synthetic construct
  source 1..75: mol_type = other DNA
ttcagctaagcggtgaaggctgggatgcggatcgctgctgggcattctggcaaggttacaaagccccgaaaggca

SEQ ID NO: 793926 - DNA, 75 bp, synthetic construct
  source 1..75: mol_type = other DNA
atttatcccagccagacggttaattttttctattccacagcagttcagatcaaagactatattcacttttatggt

SEQ ID NO: 793927 - DNA, 75 bp, synthetic construct
  source 1..75: mol_type = other DNA
gtagaagaacggggaaaattatcggcaaaagaattacgcaagcgggtaagtcagtggctaaaaatggtcgaaaaa

SEQ ID NO: 793928 - DNA, 75 bp, synthetic construct
  source 1..75: mol_type = other DNA
tattcgcattcctgccagttacaccattcacggaatagatgtttcgcgctggcaggagcggatcgactggcagcg

SEQ ID NO: 793929 - DNA, 75 bp, synthetic construct
  source 1..75: mol_type = other DNA
gtggagatgcgcatcagtgatgaatggggtgaggttaaatcccgcgcgcagtatgcggatggcgaaaaccagtac

SEQ ID NO: 793930 - DNA, 75 bp, synthetic construct
  source 1..75: mol_type = other DNA
ggatggtatcaatggcgcggtggattttaacgtgtttaatggctcggcggaggaattacaggcttttgtggaagg

SEQ ID NO: 793931 - DNA, 75 bp, synthetic construct
  source 1..75: mol_type = other DNA
ggatggcattaatggcccggtggattttaatgtgtttaatggcacggtggaggagctgcagggattcgtggggag

SEQ ID NO: 793932 - DNA, 75 bp, synthetic construct
  source 1..75: mol_type = other DNA
tcgtcagcggaattagctatgctggataaagcgtatccggcaccaaaaggaaaaactgcgctggatatggtgtga

SEQ ID NO: 793933 - DNA, 75 bp, synthetic construct
  source 1..75: mol_type = other DNA
actggaaaggtggagtatacaaaatataatgatgacgatacctttacagttaaagtgggtgataaagaattattt

SEQ ID NO: 793934 - DNA, 75 bp, synthetic construct
  source 1..75: mol_type = other DNA
attgacggtctgggcattaagcatgtccagttaagtggtgaaggctgggatgtggatcgttgctgggcgttctgg

SEQ ID NO: 793935 - DNA, 75 bp, synthetic construct
  source 1..75: mol_type = other DNA
ttggcactgacattcagggatgaaaccaatgcagctaagaattaccagtcgaaaaaaatcacctctctattatgc

SEQ ID NO: 793936 - DNA, 75 bp, synthetic construct
  source 1..75: mol_type = other DNA
gtatgcaaatggcgaaaaccagtatctgattcactatcaggcggctgatggtcgtgctaccacagagtggttcgg

SEQ ID NO: 793937 - DNA, 75 bp, synthetic construct
  source 1..75: mol_type = other DNA
ccaaaagcggccacgattgcccatgtccaacagaatgcggctgtgcttgaggtcgaactttcgtcagcggaatta

SEQ ID NO: 793938 - DNA, 75 bp, synthetic construct
  source 1..75: mol_type = other DNA
atgcgcgcaacggataagcaacgcggttttacattactggaaattatggtggtgatcgtcattatcggcgtactt

SEQ ID NO: 793939 - DNA, 75 bp, synthetic construct
  source 1..75: mol_type = other DNA
tggtggagtggtttttaacaccgcaggggcagcttgacaatattcacgaagtattttctctacggcgtataaacc

SEQ ID NO: 793940 - DNA, 75 bp, synthetic construct
  source 1..75: mol_type = other DNA
cattaattgagcagatttatctcacctttcgtcgttatccagtgccgcagcaatttgtggtttgttgtgaatatt

SEQ ID NO: 793941 - DNA, 75 bp, synthetic construct
  source 1..75: mol_type = other DNA
atggaagtacagtgtccgacctgtcatcagttcattgaattacacggtgatcgtacatattgtgagcattgccaa

SEQ ID NO: 793942 - DNA, 75 bp, synthetic construct
  source 1..75: mol_type = other DNA
tcgctcattcagaagcacaaaaccggattgcgtgaactgggcatccttccgtttcaaacggagcgattaaaaacc

SEQ ID NO: 793943 - DNA, 75 bp, synthetic construct
  source 1..75: mol_type = other DNA
ttgatgatcttgatattcatgcctaccgctatgttatgaaaccgacgttacctattcgtcgcgatagtccaaaga

SEQ ID NO: 793944 - DNA, 75 bp, synthetic construct
  source 1..75: mol_type = other DNA
atggaactcaactgcccaatctgccataaccctctcgaacgcaatggcgggactgctcactgtgcaacttgtgcc

SEQ ID NO: 793945 - DNA, 75 bp, synthetic construct
  source 1..75: mol_type = other DNA
acgccggtagaaaccgcgcaggacgtccacaagcagctcaaacgcctgcgaagagttatcgcctggaccggggaa

SEQ ID NO: 793946 - DNA, 75 bp, synthetic construct
  source 1..75: mol_type = other DNA
ccgcacagcagaccatgtgatatctgcccgtagcgatgataaacgtcgtcggtactttggtcagttgctggaaga

SEQ ID NO: 793947 - DNA, 75 bp, synthetic construct
  source 1..75: mol_type = other DNA
actggcaatgcgtttgccgaatccacgcatggtggcgatcgactttatctacgggacgctggccgcgctgccgtt

SEQ ID NO: 793948 - DNA, 75 bp, synthetic construct
  source 1..75: mol_type = other DNA
gcaatatcaattaatgcaactctgtatcaagcatggcgatggtgaagttgtcgataaagcctggggcgatctggt

SEQ ID NO: 793949 - DNA, 75 bp, synthetic construct
  source 1..75: mol_type = other DNA
tcgtgctggataacccgatgactttccatttcagtcagtttctcgacagcgcattagggcaaatcgtcggctgtg

SEQ ID NO: 793950 - DNA, 75 bp, synthetic construct
  source 1..75: mol_type = other DNA
ctttttacgcatcatcggcacatttatcggctgtattgccgggctggtgatcattattgcgatgatccgcgcccc

SEQ ID NO: 793951 - DNA, 75 bp, synthetic construct
  source 1..75: mol_type = other DNA
gtttgattacatgtgtcgcattgtgcgcggtcgtgatgatgaacgcatgaaccgcttcaagctggatgttacaaa

SEQ ID NO: 793952 - DNA, 75 bp, synthetic construct
  source 1..75: mol_type = other DNA
cgagcttgcagaacgtttagccaatttttttaagggtgaaatcagcgaaatgcagattctttatccggcacgttt

SEQ ID NO: 793953 - DNA, 75 bp, synthetic construct
  source 1..75: mol_type = other DNA
gcatgttgctgcgggcgttcaggttaatccagcaacgctgagtcgtattgagagactggaacaaattccatctat

SEQ ID NO: 793954 - DNA, 75 bp, synthetic construct
  source 1..75: mol_type = other DNA
gtaaagcgcacggatttactttgcagcatgttgctgcgggcgttcaggtcaatccagcgacgctgagtcgtattg

SEQ ID NO: 793955 - DNA, 75 bp, synthetic construct
  source 1..75: mol_type = other DNA
caaatgggttgtttagtgccagtgatagtaatggccggaaattaaattttcaaataaccagacagtatgggaatt

SEQ ID NO: 793956 - DNA, 75 bp, synthetic construct
  source 1..75: mol_type = other DNA
tatgatcttgatgctactgcgacatttagaattaacgtcaagccttcagcaccgtttcctgtcgggaaggtttca

SEQ ID NO: 793957 - DNA, 75 bp, synthetic construct
  source 1..75: mol_type = other DNA
ggcctgcagggacttctttgggaaaagccagtcttgtggtaaatgatcaatactggatacaaaatacacaaactg

SEQ ID NO: 793958 - DNA, 75 bp, synthetic construct
  source 1..75: mol_type = other DNA
atgtaccccgggctggcaaaggcttatccgaccaataaattaccggatttacggggcgaatttatccgtggctgg

SEQ ID NO: 793959 - DNA, 75 bp, synthetic construct
  source 1..75: mol_type = other DNA
gtgacgctcaatacttctcaggtcagttactatattactcagcgtaagaaaggtataacccagcatatctcggcc

SEQ ID NO: 793960 - DNA, 75 bp, synthetic construct
  source 1..75: mol_type = other DNA
atggcaccgaccgaagcggtgcgggaggttgcccgccgcatggagacgttcgccagcctgataacgtcagcgccg

SEQ ID NO: 793961 - DNA, 75 bp, synthetic construct
  source 1..75: mol_type = other DNA
attttgtctcgctgcatcttccggaggaatatcgtcagttgtgtgatttatcgacgctgcggctggagccctgca

SEQ ID NO: 793962 - DNA, 75 bp, synthetic construct
  source 1..75: mol_type = other DNA
cgattacccgaacgggacttataccatcgctgcgctgccgattattggccttctgctggttgtaggttggtttgg

SEQ ID NO: 793963 - DNA, 75 bp, synthetic construct
  source 1..75: mol_type = other DNA
cacacaattttggatcatgcacactatatggaattatggaccgggaacggacttgccgtggaaagtgcacgggaa

SEQ ID NO: 793964 - DNA, 75 bp, synthetic construct
  source 1..75: mol_type = other DNA
ctttgatagtgatgatatcactttatctgcactcaaagaaacctcaacgccaatatggaaaaggaggcgaatgag

SEQ ID NO: 793965 - DNA, 75 bp, synthetic construct
  source 1..75: mol_type = other DNA
gttatgaaaccactaataacactccggtattatctaacttccgcaaggctaaagacgcaataaatagtattgata

SEQ ID NO: 793966 - DNA, 75 bp, synthetic construct
  source 1..75: mol_type = other DNA
tttggtactatagatctgggtacgcatatgctaaggctaataaatacaggcaatcctgtgaaatgtatataaaag

SEQ ID NO: 793967 - DNA, 75 bp, synthetic construct
  source 1..75: mol_type = other DNA
aaaccggtttagccgtttaccgactacactggcacgacgtcatgtccagaagctggttccagacctgactgatta

SEQ ID NO: 793968 - DNA, 75 bp, synthetic construct
  source 1..75: mol_type = other DNA
agccaattgcactggtgggcagcagtggcggtcagggtcggccttcactctatttcgaaattcgccgccagggtc

SEQ ID NO: 793969 - DNA, 75 bp, synthetic construct
  source 1..75: mol_type = other DNA
ctgaatcaaaggaggcagcacttagtatcgttaaaaacattgaatcacggaaccatcgttactctgtaggactta

SEQ ID NO: 793970 - DNA, 75 bp, synthetic construct
  source 1..75: mol_type = other DNA
attcccggtacactggggtggcgactgttacgctaactacgaatcaatggcggaaagcctgcgcggtggtttgtc

SEQ ID NO: 793971 - DNA, 75 bp, synthetic construct
  source 1..75: mol_type = other DNA
gccattgttgcgacttcatatcaacgtcttataacccatttttataatcatcttatttttgcgttgcccgccggt

SEQ ID NO: 793972 - DNA, 75 bp, synthetic construct
  source 1..75: mol_type = other DNA
gtaatagtgatgagttaccgctggactatcttcaaggacacaaagacggtctggagtgggcggcgcaacaggcag

SEQ ID NO: 793973 - DNA, 75 bp, synthetic construct
  source 1..75: mol_type = other DNA
ttgtgaaagtaaatggtctgcaaggcggttcgcaggctgaaagtgagcaggggctggtggttacgcctcaaggga

SEQ ID NO: 793974 - DNA, 75 bp, synthetic construct
  source 1..75: mol_type = other DNA
catccgctacacgcgtaaacagtgggggaccgcacaagttcgtcgctatattgcaaggctggaacatggtattgc

SEQ ID NO: 793975 - DNA, 75 bp, synthetic construct
  source 1..75: mol_type = other DNA
acgatgaactcgacggtagtcgctggcataaacagcagcacagcttcctgagtctgcccgtttatgtgcgtgata

SEQ ID NO: 793976 - DNA, 75 bp, synthetic construct
  source 1..75: mol_type = other DNA
gataacccgacattgaacaaattgagtgaagaaatccggttacagattattccttacctcgtgagttttgccttt

SEQ ID NO: 793977 - DNA, 75 bp, synthetic construct
  source 1..75: mol_type = other DNA
cgctgttgaaaccatgaggaataagatccgcgaaggtaaagtacccggtgtaaccgatcccgcagaagcgtcccg

SEQ ID NO: 793978 - DNA, 75 bp, synthetic construct
  source 1..75: mol_type = other DNA
atgggtttgccgctgaacggggaaaccatattgtcgacagagtccgtctgaaaaacgcacggatcctcggtgata

SEQ ID NO: 793979 - DNA, 75 bp, synthetic construct
  source 1..75: mol_type = other DNA
tggttggggcgcttctattacctctaactatggtctggcaacagagtttaacgatacttatgcaggcggctctgt

SEQ ID NO: 793980 - DNA, 75 bp, synthetic construct
  source 1..75: mol_type = other DNA
acaaaaacatccttaatgatgtcgttaatactttttttcagtattaccgtttctataactaatccatttcttttt

SEQ ID NO: 793981 - DNA, 75 bp, synthetic construct
  source 1..75: mol_type = other DNA
aaataaaaaatgactatgagcggttagcatttattattttgtcctttagcctgtttatattaaaaacttccagaa

SEQ ID NO: 793982 - DNA, 75 bp, synthetic construct
  source 1..75: mol_type = other DNA
aggatcctcagtttgcgattgaaggtctgctcaattacgcgatggcactggataacccgacattgaataaattga

SEQ ID NO: 793983 - DNA, 75 bp, synthetic construct
  source 1..75: mol_type = other DNA
tggtcttggtttcaacgccgtctacgctcgcgcgaaaattgaacgtttcgcaggcgatctggggcagctggttgc

SEQ ID NO: 793984 - DNA, 75 bp, synthetic construct
  source 1..75: mol_type = other DNA
acccggcttcatggcacacctgtttataagatttgtgggcgttgcaatggaaaacggtttagtcgtttaccaacc

SEQ ID NO: 793985 - DNA, 75 bp, synthetic construct
  source 1..75: mol_type = other DNA
cgcgaagtggtgaaacactccagaagcggtgagtctgttatcaaggaagagtgggtgaaggaattatgtcagcat

SEQ ID NO: 793986 - DNA, 75 bp, synthetic construct
  source 1..75: mol_type = other DNA
tttccattcccgatcaggaccgtttctggctgagcgcaggtacgacttatgcgtttaataaagatgcatccgtcg

SEQ ID NO: 793987 - DNA, 75 bp, synthetic construct
  source 1..75: mol_type = other DNA
acgacacctatgcaggtggttctgtcggtggtacgaccgacctcgaaaccatcaacatgaacctaagcggcgcct

SEQ ID NO: 793988 - DNA, 75 bp, synthetic construct
  source 1..75: mol_type = other DNA
cctcgacgcggataacatcgcgccgacagcatgggttccgaacgctcactttgtggcgccaattaacgatcagtt

SEQ ID NO: 793989 - DNA, 75 bp, synthetic construct
  source 1..75: mol_type = other DNA
tccggcaatggaacgcctgttaatgttgccagttgatgatgatttgttaagtgaacaggaacttaaggattacgg

SEQ ID NO: 793990 - DNA, 75 bp, synthetic construct
  source 1..75: mol_type = other DNA
tgttgagctggaagctgcagagaagcgcattgcagaactggaagccgaacctgtaagtaatagtgatgagttacc

SEQ ID NO: 793991 - DNA, 75 bp, synthetic construct
  source 1..75: mol_type = other DNA
gttttcaattttaacgacgaacagtatgcagagttcatcgatatgctcgatgcaccagtcgaggatgagcctgcc

SEQ ID NO: 793992 - DNA, 75 bp, synthetic construct
  source 1..75: mol_type = other DNA
gtgtttaattttaatgacagacaatatgaagagttcatcgaaatgcttgatgctccggttgctgatgagcctgcc

SEQ ID NO: 793993 - DNA, 75 bp, synthetic construct
  source 1..75: mol_type = other DNA
catgctgagcctgtaagtaatagtgatgagttaccgctggactatctgcaaggccataaagacggtctggagtgg

SEQ ID NO: 793994 - DNA, 75 bp, synthetic construct
  source 1..75: mol_type = other DNA
gatggaaattgatgatgactttgacagcgcgtttgaacacggaaaagctgtcggctggaacgcctatcgcgccgc

SEQ ID NO: 793995 - DNA, 75 bp, synthetic construct
  source 1..75: mol_type = other DNA
ccacttgggatgacggtgatggcgaagacctgtatctcaaagaggtaacccactggatgcctctaccagaaccgc

SEQ ID NO: 793996 - DNA, 75 bp, synthetic construct
  source 1..75: mol_type = other DNA
atggtggaccctaaaactcttcaatgcacgggtctgatcgaccttgggcggctcggaacagcagatcgctatgcc

SEQ ID NO: 793997 - DNA, 75 bp, synthetic construct
  source 1..75: mol_type = other DNA
atgatctcaatatagattatcgcttcgataataaattgaaattatgggatattttattgcgttctccttgcgata

SEQ ID NO: 793998 - DNA, 75 bp, synthetic construct
  source 1..75: mol_type = other DNA
cgcgcgtcgccgaggggaaacaacccatatgtgtcgaatcctgcccgctgcgtgcacttgagttcggtccaattg

SEQ ID NO: 793999 - DNA, 75 bp, synthetic construct
  source 1..75: mol_type = other DNA
cttgccctgctgaaagcagacaaggaaggtaaaacccttagccaaccgcgcgcaggcgtggcgctgatggacgaa

SEQ ID NO: 794000 - DNA, 75 bp, synthetic construct
  source 1..75: mol_type = other DNA
aacatggtcaacgagcagaaattcccgccgtgccctgcggttgaactggaaattgaactgattaagagcgaggtt

SEQ ID NO: 794001 - DNA, 75 bp, synthetic construct
  source 1..75: mol_type = other DNA
tgattgctaacgccgaagagaactgggcagcgccagatgaagcagagcgcgccttcgctgtcctattcaatgtat

SEQ ID NO: 794002 - DNA, 75 bp, synthetic construct
  source 1..75: mol_type = other DNA
ctggcgtccagattgtttcccttaaaaaagccatgaagcacagtgataagcttttcgtcttacgagtcccggacc

SEQ ID NO: 794003 - DNA, 75 bp, synthetic construct
  source 1..75: mol_type = other DNA
ggttgaaccgctaatatgctccgcacgctatacaggaagcacattccggcgaggagaagcaacgattaagccggg

SEQ ID NO: 794004 - DNA, 75 bp, synthetic construct
  source 1..75: mol_type = other DNA
aacgattaagccgggtaatggtattgagcaagcaactcactggatgccgctaccggaaccgccgcaggaggtgaa

SEQ ID NO: 794005 - DNA, 75 bp, synthetic construct
  source 1..75: mol_type = other DNA
tcgacaagctggtggcgcttttaggcattgaaccgttacttgaccgtttacctggcagcctgtccggtggcgaaa

SEQ ID NO: 794006 - DNA, 75 bp, synthetic construct
  source 1..75: mol_type = other DNA
gacggcctggagtgggctgcacaattggcagaagccaatcatccgcaaacaggtgactggttgtacgacgaccca

SEQ ID NO: 794007 - DNA, 75 bp, synthetic construct
  source 1..75: mol_type = other DNA
gcggcaaccatccccaaactaatgaatatgacctgattagcaatgtcacacactggatgccgctaccagagcctc

SEQ ID NO: 794008 - DNA, 75 bp, synthetic construct
  source 1..75: mol_type = other DNA
tttcggcgcggagatgcaacgattaagccgggtaatggtattgagcaagcaacccactggatgccgctaccggaa

SEQ ID NO: 794009 - DNA, 75 bp, synthetic construct
  source 1..75: mol_type = other DNA
tagtgagcgaatgcctgagaacattcccggaagttgtaaagagtatctggtgtttgatgggcttaataataaagt

SEQ ID NO: 794010 - DNA, 75 bp, synthetic construct
  source 1..75: mol_type = other DNA
acgcctgccgcgccgccatgcttcatagtgccgaacctgcaagtaatcatgaagagttgccgcttgattatctcc

SEQ ID NO: 794011 - DNA, 75 bp, synthetic construct
  source 1..75: mol_type = other DNA
tcacgttgcaatctatctgggtgataataacgttgcagaagcgacaggcgctggcgtccagattgtttccctgaa

SEQ ID NO: 794012 - DNA, 75 bp, synthetic construct
  source 1..75: mol_type = other DNA
aggtagaagtggagctggaagtcggcggtaaaacgctgtgggcgcgtatcagcccgtgggccagggatgaactgg

SEQ ID NO: 794013 - DNA, 75 bp, synthetic construct
  source 1..75: mol_type = other DNA
tggtaaaacgctgtgggcgcgtattagcccgtgggccagggatgaactggcaatcagacctggcctgtggctgta

SEQ ID NO: 794014 - DNA, 75 bp, synthetic construct
  source 1..75: mol_type = other DNA
agtacgtggcaatctgcgctatggcatggcgaaaagcatggttagtcagttcgataagctggtggcgcttttggg

SEQ ID NO: 794015 - DNA, 75 bp, synthetic construct
  source 1..75: mol_type = other DNA
gctggaaaatctacgttaaaaatggtctggtgacctgggaaaaccatcagactgactaaccgcgcactcgcccgg

SEQ ID NO: 794016 - DNA, 75 bp, synthetic construct
  source 1..75: mol_type = other DNA
gctggaaaatctacgttaaaaatggtctggtgacctgggaaaaccaacagactgactatccgcgcactcgcccgg

SEQ ID NO: 794017 - DNA, 75 bp, synthetic construct
  source 1..75: mol_type = other DNA
gctggaaaatctacgttaaaaaaggtctggtgacctgggaaaaccagcagactgactaaccgcgcactcgcccgg

SEQ ID NO: 794018 - DNA, 75 bp, synthetic construct
  source 1..75: mol_type = other DNA
cttcaacaaagtggagctggaaaacattctgctgcacaaactgccggtaaaacgcctgcaactggctgatggcag

SEQ ID NO: 794019 - DNA, 75 bp, synthetic construct
  source 1..75: mol_type = other DNA
gctggaaaatctacgttaaaaagggtctggtgacctgggaaaaccaacagactgactaaccgcgcactcgcccgg

SEQ ID NO: 794020 - DNA, 75 bp, synthetic construct
  source 1..75: mol_type = other DNA
gctggaaaatctacgttaaaaacggtctggtgacctgggaaaaccaccagactgactacccgcgcactcgcccgg

SEQ ID NO: 794021 - DNA, 75 bp, synthetic construct
  source 1..75: mol_type = other DNA
agcgagtttaccggtcgtgaccatacgcatctggcgctgaataaagaagacgagaagatccgcttccgtgatatc

SEQ ID NO: 794022 - DNA, 75 bp, synthetic construct
  source 1..75: mol_type = other DNA
tttctcgcagccagattattcgcatcgcccgtgaatttgccgataacgctgataaaacgcacggtcgttcgatga

SEQ ID NO: 794023 - DNA, 75 bp, synthetic construct
  source 1..75: mol_type = other DNA
atggcgctggcgatgggccacgtaatgctgcgtgaattccacctcgacaacccaagccagtatttcaccgactat

SEQ ID NO: 794024 - DNA, 75 bp, synthetic construct
  source 1..75: mol_type = other DNA
gctggaaaatctacgttaaaaaaggtctggtgacctgggaaaaccatcagactgactatccgcgcactcgcccgg

SEQ ID NO: 794025 - DNA, 75 bp, synthetic construct
  source 1..75: mol_type = other DNA
gctggaaaatctacgttaaaaaaggtctggtgacctgggaaaaccaacagactgactagccgcgcactcgcccgg

SEQ ID NO: 794026 - DNA, 75 bp, synthetic construct
  source 1..75: mol_type = other DNA
tggcaccggaaaccaatggtcaggtagccgtgaaagcctgggctgccctgagcgagtttaccggtcgtgaccata

SEQ ID NO: 794027 - DNA, 75 bp, synthetic construct
  source 1..75: mol_type = other DNA
gctacttcaaacagaagggtgatacctttgccgatgggcatggccagcttctcgataccaaccgtgactgggagg

SEQ ID NO: 794028 - DNA, 75 bp, synthetic construct
  source 1..75: mol_type = other DNA
ggtgatcagtgaaaacggcgctaccaccattaatccggataccaacggcgatctctccacgctcgcccagcttct

SEQ ID NO: 794029 - DNA, 75 bp, synthetic construct
  source 1..75: mol_type = other DNA
gcaaaacaggtcagggatgaagtcagaaacgaggtgcagaagctggatgttgcagggctgataggtgagcgcatc

SEQ ID NO: 794030 - DNA, 75 bp, synthetic construct
  source 1..75: mol_type = other DNA
gatggtgcctgaatatgattgctgatgagtttaatatttctgagatctctgtcaggaagcgactagagtctgaag

SEQ ID NO: 794031 - DNA, 75 bp, synthetic construct
  source 1..75: mol_type = other DNA
taaaaatatagaaaagctaattcagattgagcgtaatgtgaaagcgcggatacgcagggcgacaaaacttagccc

SEQ ID NO: 794032 - DNA, 75 bp, synthetic construct
  source 1..75: mol_type = other DNA
gagaaatgtagaaaagctaattcagattgagcgtaacgcgaaagcgcggatacgcagggcggcaaaatcaagaac

SEQ ID NO: 794033 - DNA, 75 bp, synthetic construct
  source 1..75: mol_type = other DNA
gcgaccctggtggcaaaaagtgtcgacattgcgctaagcagtcggcaactgaccgaaccacgccatgtcgatacc

SEQ ID NO: 794034 - DNA, 75 bp, synthetic construct
  source 1..75: mol_type = other DNA
gacattctcacaaattgccgatgtcggtatcagtgggattatcattgacgtgctgacgctgtccagtactttcct

SEQ ID NO: 794035 - DNA, 75 bp, synthetic construct
  source 1..75: mol_type = other DNA
tatgctttcaaatgtggttttttatgaactggatgaattaatttataaattagttcaagaaaatggcggtctata

SEQ ID NO: 794036 - DNA, 75 bp, synthetic construct
  source 1..75: mol_type = other DNA
gcatcgggtgcgcgctatctctcgctgattggcggtacttgcttaagcttctacgactggtactgcgacctgcct

SEQ ID NO: 794037 - DNA, 75 bp, synthetic construct
  source 1..75: mol_type = other DNA
ggcggggtgagcgatggtcactggttgagcctgaaatctggacggcactgaccgccagtatttacagcgtggatg

SEQ ID NO: 794038 - DNA, 75 bp, synthetic construct
  source 1..75: mol_type = other DNA
ctttattaatactttccgccagtattatggcataacaccgcatcagtttgcgcaacagtcaacggggatgctctc

SEQ ID NO: 794039 - DNA, 75 bp, synthetic construct
  source 1..75: mol_type = other DNA
gtttaatgaatcaaatgtccgcaatctggatatagatgaacgcatcatcactcattatttgcacaatattcgcct

SEQ ID NO: 794040 - DNA, 75 bp, synthetic construct
  source 1..75: mol_type = other DNA
agatgaacacgtttcttacaacgccggttacaccaacgttcacgagctaattccgtggcgcacgctctctggtcg

SEQ ID NO: 794041 - DNA, 75 bp, synthetic construct
  source 1..75: mol_type = other DNA
tttcccgacggattgtaccgggtctcctgcataatgacactgtacctggccgataccgaacagacgaagactcag

SEQ ID NO: 794042 - DNA, 75 bp, synthetic construct
  source 1..75: mol_type = other DNA
ctgccgcagagcggggattcagacctggaggtggcgcaacgggcagccggggtcatccggctggctaccctgtgt

SEQ ID NO: 794043 - DNA, 75 bp, synthetic construct
  source 1..75: mol_type = other DNA
ataaataccgcgaccagatcctgttctggggatgggggatgggttttctgtgctttatctactggatgttggtgt

SEQ ID NO: 794044 - DNA, 75 bp, synthetic construct
  source 1..75: mol_type = other DNA
accattgaggccaccagcgaacaggaagcacgccagcaatctccggctggctgcgtgatggtattcgccgcccgt

SEQ ID NO: 794045 - DNA, 75 bp, synthetic construct
  source 1..75: mol_type = other DNA
ggcgtctaaccaccaacgatagcagaagtatcgaggtcgctatgagaaatcataccacacacccgcaagggcggg

SEQ ID NO: 794046 - DNA, 75 bp, synthetic construct
  source 1..75: mol_type = other DNA
aaaatgatattataagatgtgcgatcgaaacagtgaatgcatttgatggtcacgtccatagaattatgggtgatg

SEQ ID NO: 794047 - DNA, 75 bp, synthetic construct
  source 1..75: mol_type = other DNA
aggacaccagcctgcgttatttatcgtcgcgtatagaactgctggaagaacgcgcccgctggcagcaacgccagt

SEQ ID NO: 794048 - DNA, 75 bp, synthetic construct
  source 1..75: mol_type = other DNA
tgccatggtaagggcgaagtcagcacagcgtgcagagggtgtaagggtaaagggattgttctggatgaaaaaaga

SEQ ID NO: 794049 - DNA, 75 bp, synthetic construct
  source 1..75: mol_type = other DNA
cttatatatttatttacactaagatatactttaaaagtgtttttatgtgaaattttcattaaaacagttaatgta

SEQ ID NO: 794050 - DNA, 75 bp, synthetic construct
  source 1..75: mol_type = other DNA
gaataccggctttacaatgaatactggcgtaaacgcctggaggggcgggagtacacaagattaatcattaaatgg

SEQ ID NO: 794051 - DNA, 75 bp, synthetic construct
  source 1..75: mol_type = other DNA
catccgggcgggaaagaaggtggaagaatacaggctttacaatgactattggcgtaaacgcctggaggggcggga

SEQ ID NO: 794052 - DNA, 75 bp, synthetic construct
  source 1..75: mol_type = other DNA
cgcgaacagctcaccgccgaactggccgccggaaattccgttaactaatcctgaaaaacagcttgtcttgcaggc

SEQ ID NO: 794053 - DNA, 75 bp, synthetic construct
  source 1..75: mol_type = other DNA
caaagctgctggcgtatctggctcatcaatttcactatgggaaagcgaccatacagccccgcgcgggcaaaattt

SEQ ID NO: 794054 - DNA, 75 bp, synthetic construct
  source 1..75: mol_type = other DNA
aaggctgctggcgtatctggctcatcaatttcattgtgggaaagtgaccatacagccccgcgcgggcaaaatttg

SEQ ID NO: 794055 - DNA, 75 bp, synthetic construct
  source 1..75: mol_type = other DNA
tacagccccgcgcgggcaaaatttgcatcgcctggctgaggtattgcaatgttcaccaacttggatactgtttgg

SEQ ID NO: 794056 - DNA, 75 bp, synthetic construct
  source 1..75: mol_type = other DNA
ttcgcgctgagtcaggcacttcagtgctcaccgacctggcttctttttggggatgaagataagcaaccaggcgaa

SEQ ID NO: 794057 - DNA, 75 bp, synthetic construct
  source 1..75: mol_type = other DNA
gcacactacgtaggtcaggaaaaactgcgtccgcaaaccggctggcagccgttggcgtttgcccttgactggcag

SEQ ID NO: 794058 - DNA, 75 bp, synthetic construct
  source 1..75: mol_type = other DNA
gccgacatcgcccgcgggacattaaccggaaacgcgcagcgtaacgccgacggcagctggcaagtggaaaatctg

SEQ ID NO: 794059 - DNA, 75 bp, synthetic construct
  source 1..75: mol_type = other DNA
tagtgactatcatctggccttcggggcgatggatcaccgtttttccgcgccatctcatatcgtgctggagaacgt

SEQ ID NO: 794060 - DNA, 75 bp, synthetic construct
  source 1..75: mol_type = other DNA
tgtggcgacccgcagcgtgcaggaactggcgcaagagatggtcgatgaaattgaacagggtatcgatggcaccga

SEQ ID NO: 794061 - DNA, 75 bp, synthetic construct
  source 1..75: mol_type = other DNA
tttgctttagctgatgcgctgaagtgctcgcctgcatggctaatgtttggtgacgaagacaaggcaccagtgcca

SEQ ID NO: 794062 - DNA, 75 bp, synthetic construct
  source 1..75: mol_type = other DNA
cgcaccaacagtgtgattgtcagtggtgacccggccacgcgggacaaaatgcgccgtctgatccgtcgcctggac

SEQ ID NO: 794063 - DNA, 75 bp, synthetic construct
  source 1..75: mol_type = other DNA
aaagccaacggtggttatggctatgactttttattgaccacctttattccgcaattgcgccagtcaggattcagt

SEQ ID NO: 794064 - DNA, 75 bp, synthetic construct
  source 1..75: mol_type = other DNA
cctgatggcccggggcgtgcgtaatgtgattgagatgaccaaccgttacatggggcgcaatgcgcaatttatgct

SEQ ID NO: 794065 - DNA, 75 bp, synthetic construct
  source 1..75: mol_type = other DNA
tgcttaaccgcgtcatgctgtcgatggatatcacgcgtcgctctcatttaaaagccaacggtggttatggctatg

SEQ ID NO: 794066 - DNA, 75 bp, synthetic construct
  source 1..75: mol_type = other DNA
tgtgcacagtgtttgctgaatcagaagtgatcagcctgcgctcagcgggcgtcgcgccagaagcgattctcgccg

SEQ ID NO: 794067 - DNA, 75 bp, synthetic construct
  source 1..75: mol_type = other DNA
atgttgaccactgacgaatggggtagttacgctagagagttaccgaaggagaagcatctgactggtaagattttt

SEQ ID NO: 794068 - DNA, 75 bp, synthetic construct
  source 1..75: mol_type = other DNA
gtgccgaagaataagcatctgaccggcaaaatattcacccaacgcattgagcgtaataatctgacgctacgcacc

SEQ ID NO: 794069 - DNA, 75 bp, synthetic construct
  source 1..75: mol_type = other DNA
ggtatcgattactttacctccgcaaaatctgcagacgtttaacgaactggtccgtgccgtccccgcgcagtcccc

SEQ ID NO: 794070 - DNA, 75 bp, synthetic construct
  source 1..75: mol_type = other DNA
ctgtctgcataatgaccatcatggcctccacgtggggaaaaacacgtgaaatatgcgcacgaaaccaggccattc

SEQ ID NO: 794071 - DNA, 75 bp, synthetic construct
  source 1..75: mol_type = other DNA
tattcaggctgcatttgcaaaagcaggtgagaacgtagcaaacaatactgacgttatgtcgagcctgggcggagc

SEQ ID NO: 794072 - DNA, 75 bp, synthetic construct
  source 1..75: mol_type = other DNA
acgtacgtgattatgaggctatgccggagctgaccgacgcgctggagcagattatcagcggcgaccagccgttcc

SEQ ID NO: 794073 - DNA, 75 bp, synthetic construct
  source 1..75: mol_type = other DNA
gatctgctccaccgccgcctgcgcgaacactggctgggctggctgatgcaaacgcgcgcacgccagccgctcaac

SEQ ID NO: 794074 - DNA, 75 bp, synthetic construct
  source 1..75: mol_type = other DNA
cgatttgaatttgcgcgaccaggttggtcccaccttcgacaacgtgttcgtcgccggtaatgatgaaaaactggt

SEQ ID NO: 794075 - DNA, 75 bp, synthetic construct
  source 1..75: mol_type = other DNA
agtgatcagcctgcgctcagcgggcgtcgcgccagaagcgattctcgccggagtgattaacgcgatggcgcggcg

SEQ ID NO: 794076 - DNA, 75 bp, synthetic construct
  source 1..75: mol_type = other DNA
gtctcagcagttgattgcccggggtgtacccgcttcattaaccaatggtattaatactccggactctcaaattgc

SEQ ID NO: 794077 - DNA, 75 bp, synthetic construct
  source 1..75: mol_type = other DNA
aacccttcaacgaacagcttgccggtaactatccgtttaatccacgcgccccacaggatgcctcactggatgcgt

SEQ ID NO: 794078 - DNA, 75 bp, synthetic construct
  source 1..75: mol_type = other DNA
atgcccgatgaacgtttaggtgaacgttcatgcgcttatgtcgtgctgaaagcgccgcatcattcattatcgctg

SEQ ID NO: 794079 - DNA, 75 bp, synthetic construct
  source 1..75: mol_type = other DNA
cgcctttcaggatgggaagatgttgtggtgccgacagttcccgcagcttaccttctggaactgtcggatgctgtt

SEQ ID NO: 794080 - DNA, 75 bp, synthetic construct
  source 1..75: mol_type = other DNA
actatttatgatgacattgtgcgcaatcatcaataccagaaaacggatcttatcgcctatcttcctccatcaccc

SEQ ID NO: 794081 - DNA, 75 bp, synthetic construct
  source 1..75: mol_type = other DNA
gtgcgagaagaaacagcccggctgctgattgatataactgatcagcctgggcattcagaacatccatttgccaac

SEQ ID NO: 794082 - DNA, 75 bp, synthetic construct
  source 1..75: mol_type = other DNA
tgagcaggccattttaatgggcgtccgggaattcgcatccaaaacaaaatccatcgactacaaatcaccaaacga

SEQ ID NO: 794083 - DNA, 75 bp, synthetic construct
  source 1..75: mol_type = other DNA
agccatataaagaacctataaaaaacggattgtttactttagccatgccagacaaccaacaagtcaatctaaaga

SEQ ID NO: 794084 - DNA, 75 bp, synthetic construct
  source 1..75: mol_type = other DNA
ttggcttggcgaacggctagacgccacttatcttggagatatgatcggtgctcaagccatacgccgtatggcagc

SEQ ID NO: 794085 - DNA, 75 bp, synthetic construct
  source 1..75: mol_type = other DNA
caatgcgtttcttttgcgacatcgtttttccgctgtccaaaactaatctggcggcgctgtttgtgatcaccttta

SEQ ID NO: 794086 - DNA, 75 bp, synthetic construct
  source 1..75: mol_type = other DNA
atggaaaaaactcggttatgaaggagtagataactcagctctaagaatgctggaaaaaataaccattaaacctaa

SEQ ID NO: 794087 - DNA, 75 bp, synthetic construct
  source 1..75: mol_type = other DNA
ggctgttgcacgtattaaggatggtagcatcattgggtatgtttatgaccccatgtctgcgaaactggtgaaggc

SEQ ID NO: 794088 - DNA, 75 bp, synthetic construct
  source 1..75: mol_type = other DNA
taagaccctgtggaaaggtgaaagcctttcacagtgcggctacatcatcattggcggtattttaattggcggagg

SEQ ID NO: 794089 - DNA, 75 bp, synthetic construct
  source 1..75: mol_type = other DNA
gccgttgttgattattaccgacgtggatctcggcaccaccgtggcagggattaaagggatgatcgccacaggcga

SEQ ID NO: 794090 - DNA, 75 bp, synthetic construct
  source 1..75: mol_type = other DNA
gacgctgccggatgagctggtggaagcggcgcggatcgacggtgcgtcaccaatgcgcttcttttgcgacatcgt

SEQ ID NO: 794091 - DNA, 75 bp, synthetic construct
  source 1..75: mol_type = other DNA
cgttgacatatagttatgctaaatactccacattattaactgctaatcagcggtactcagcagtaagaaaaattc

SEQ ID NO: 794092 - DNA, 75 bp, synthetic construct
  source 1..75: mol_type = other DNA
aaaaagtacacctccggcgtcctgtcttttgccgaacaggacttaccgcccggccagcgtgaaaagctgatggcg

SEQ ID NO: 794093 - DNA, 75 bp, synthetic construct
  source 1..75: mol_type = other DNA
gctgtgggttgagcaccgggacaaggggcggctggagctgaacttcctgatcccgaatatggagctgctgaccgg

SEQ ID NO: 794094 - DNA, 75 bp, synthetic construct
  source 1..75: mol_type = other DNA
agcaactgcaacaggactatatgcagcggctgaacgaatgggagagcgccttcgtggaattgcagaaaatgtttt

SEQ ID NO: 794095 - DNA, 75 bp, synthetic construct
  source 1..75: mol_type = other DNA
cgggcatgaggttgctggggatagtctttctcctgtttaccgcgagtggcgggacgctctggtatctcggcggga

SEQ ID NO: 794096 - DNA, 75 bp, synthetic construct
  source 1..75: mol_type = other DNA
acatgtgttatccctggaacgggagcgtcagccggaaatacaggaacgcacgctggatggcccttcgctgggatg

SEQ ID NO: 794097 - DNA, 75 bp, synthetic construct
  source 1..75: mol_type = other DNA
cgcgggatagatgctctttaccatgcaggagagataaaaggccgtcaggatgtgattcaggcgctcacggaagca

SEQ ID NO: 794098 - DNA, 75 bp, synthetic construct
  source 1..75: mol_type = other DNA
gcctgtgtatatgcagcccttttttgaaggaaaaaggacgtttgtcaggagtctacatacaagtaatcttcgtgt

SEQ ID NO: 794099 - DNA, 75 bp, synthetic construct
  source 1..75: mol_type = other DNA
agaaagcgtgatcagattgcagatgaataccattgcttacgggagagtgttgcccctgtaaacagcacaatagaa

SEQ ID NO: 794100 - DNA, 75 bp, synthetic construct
  source 1..75: mol_type = other DNA
tgtacacagggggagcgttatctggcgctggcagagaaacgtgaggctaacgagtcctttgtctatggctggatg

SEQ ID NO: 794101 - DNA, 75 bp, synthetic construct
  source 1..75: mol_type = other DNA
ttgaaattaacagaatggtaggagacataatttttaagggcctttgggcatgtaagccggaaacgtcagggaata

SEQ ID NO: 794102 - DNA, 75 bp, synthetic construct
  source 1..75: mol_type = other DNA
aaccgtggcgtccagaatgcttcaacgctggctgaacgtgttcaatcaacaaggcaagttgtacccggatatgga

SEQ ID NO: 794103 - DNA, 75 bp, synthetic construct
  source 1..75: mol_type = other DNA
atatcgcggcgatatgcgtgacctgacgcgcgggcaggcgctggaaatagtcgaggcggattactggttcgggcc

SEQ ID NO: 794104 - DNA, 75 bp, synthetic construct
  source 1..75: mol_type = other DNA
ttacgggctgcatgacccgaatgccccggagaaccgcaggacgctgacactccctgataacctgccggaaacgaa

SEQ ID NO: 794105 - DNA, 75 bp, synthetic construct
  source 1..75: mol_type = other DNA
gatatcaccgcgtttgccaataaaatcaaagatagcggttataactatcgcggcattgtcgaatttattcccttt

SEQ ID NO: 794106 - DNA, 75 bp, synthetic construct
  source 1..75: mol_type = other DNA
gcgtttaagccagaaacgcagttacagtatgttgggcacctgaagcctgggatttatatcaaggcgggtcgcttt

SEQ ID NO: 794107 - DNA, 75 bp, synthetic construct
  source 1..75: mol_type = other DNA
gctatttaaccgcgtcgcattgaaccgccccggttttcctggagagtgttttatctgtgaactcaggctgccaga

SEQ ID NO: 794108 - DNA, 75 bp, synthetic construct
  source 1..75: mol_type = other DNA
ggctatcattattggattacctggcattattatagggacaatagtatctaacttaatagtaataatgcttgcgaa

SEQ ID NO: 794109 - DNA, 75 bp, synthetic construct
  source 1..75: mol_type = other DNA
tatgttatattcattatgtgtgtttggggtaagctatttattgcgcgatgaaatatattcatttaaagtaaatac

SEQ ID NO: 794110 - DNA, 75 bp, synthetic construct
  source 1..75: mol_type = other DNA
ggctatcattattggattgcctggcattattatagggacaattgtatctaacttaatagtaataatgctcgcgaa

SEQ ID NO: 794111 - DNA, 75 bp, synthetic construct
  source 1..75: mol_type = other DNA
gaaagacatttgctgaacgccttagagcaactgcaacaggactatatgcagcggctgaacgaatgggagagcgcc

SEQ ID NO: 794112 - DNA, 75 bp, synthetic construct
  source 1..75: mol_type = other DNA
gacgtgttaaagctggcagggaatacgggcatgatgttactggggatggtcattttcctgtttaccgtgagtggc

SEQ ID NO: 794113 - DNA, 75 bp, synthetic construct
  source 1..75: mol_type = other DNA
cagggtacaggaagagacattgcggaaactgaacgcgaagacatggggtgtggagtttgttcaggacgggagaag

SEQ ID NO: 794114 - DNA, 75 bp, synthetic construct
  source 1..75: mol_type = other DNA
aaaaagtacacctccggcgtcctgtcttttgctgaacaggatttaccgcccggccagcgtgaaaagctgatggcg

SEQ ID NO: 794115 - DNA, 75 bp, synthetic construct
  source 1..75: mol_type = other DNA
atcctgactatcagagagcaggaaaacacgctggcgaaactcgaggcaaaaacctggggggtgacgttcgtcaat

SEQ ID NO: 794116 - DNA, 75 bp, synthetic construct
  source 1..75: mol_type = other DNA
cgaacaacagctaagggatgaacaggagcgtgcccggtacagacatgaggtacaggaacgcgcggcacgggttcg

SEQ ID NO: 794117 - DNA, 75 bp, synthetic construct
  source 1..75: mol_type = other DNA
acattcccgcactttatcagccagatggaatcgatgctgaccactggtgaactgaatcctcgccatgcccactgt

SEQ ID NO: 794118 - DNA, 75 bp, synthetic construct
  source 1..75: mol_type = other DNA
ccagtatcaccggtaagttcagtgacgttgaatgtctaaggctggatgaagcattcccgcactttgtccgtcaga

SEQ ID NO: 794119 - DNA, 75 bp, synthetic construct
  source 1..75: mol_type = other DNA
gtcaccctgttccacaacggtttcacctgtgaagccgacacccttggcagttgcggttacgtgtacatcgccatt

SEQ ID NO: 794120 - DNA, 75 bp, synthetic construct
  source 1..75: mol_type = other DNA
aacggcaaactgattgcttatccgattgccgttgaagcgttatcgctgatttataacaaagacctgctgccgaac

SEQ ID NO: 794121 - DNA, 75 bp, synthetic construct
  source 1..75: mol_type = other DNA
aacctgcaagaaccatacttcacctggccgctgattgcggctgacgggggttatgcgttcaagtatgaaaacggc

SEQ ID NO: 794122 - DNA, 75 bp, synthetic construct
  source 1..75: mol_type = other DNA
gtcaccctgtatcacaatggttttacctgcgaagccgatacctttggcagttgcggctacgtatacatcgccatt

SEQ ID NO: 794123 - DNA, 75 bp, synthetic construct
  source 1..75: mol_type = other DNA
gtattgtcggtgaagtcgatggtgatgaccccgcagtattcagaccaatacaaaaatacatcaatggaacatggt

SEQ ID NO: 794124 - DNA, 75 bp, synthetic construct
  source 1..75: mol_type = other DNA
atcactcagctccgcttatggtcttcgttctagaggtgaaattacatcactcagtgctaatggtctgcgcattgc

SEQ ID NO: 794125 - DNA, 75 bp, synthetic construct
  source 1..75: mol_type = other DNA
ggctggattcccgtggtgcatttaatcatccgtactggatgtgcaaaggctcctggtcatatgcaaataacaaaa

SEQ ID NO: 794126 - DNA, 75 bp, synthetic construct
  source 1..75: mol_type = other DNA
tgaaatgaactctcgccatgcccactgcgccatcctgtatcacaacggctttacctgcgaagccgatactcttgg

SEQ ID NO: 794127 - DNA, 75 bp, synthetic construct
  source 1..75: mol_type = other DNA
tgcagcgggatatcacgccacgcctgggagctcgtctggtgcaggagggcaaccgactgcactacctgactgacc

SEQ ID NO: 794128 - DNA, 75 bp, synthetic construct
  source 1..75: mol_type = other DNA
aaaaggccttgtccagctcagtagtgccaccaacagcacgtctgaaacgctcgccgcaacaccaaaagcggtaaa

SEQ ID NO: 794129 - DNA, 75 bp, synthetic construct
  source 1..75: mol_type = other DNA
ttataacaaagacctgctgccgaacccgccaaaaacctgggaagaaatcccggcgctggataaagaactgaaagc

SEQ ID NO: 794130 - DNA, 75 bp, synthetic construct
  source 1..75: mol_type = other DNA
tgtggtcgggaagtgaagtttacccttgaggtacttcggggagatagtgttgagaaggcctctcgggtatggtct

SEQ ID NO: 794131 - DNA, 75 bp, synthetic construct
  source 1..75: mol_type = other DNA
gtattctggtcggcgaacttgatgacgagcaaatgtcggctttatcacggctgggtaacgactatcgtcctacca

SEQ ID NO: 794132 - DNA, 75 bp, synthetic construct
  source 1..75: mol_type = other DNA
taaagtgatcctgaatctcgacagaagccggttaccggcagaatgtatagaaaagattgaggctatactgaaaga

SEQ ID NO: 794133 - DNA, 75 bp, synthetic construct
  source 1..75: mol_type = other DNA
tgtccgtacggcgcgccacagtacaatgctgaaaaagggcacatgacgaagtgcgatggttgttattcgcgcgtc

SEQ ID NO: 794134 - DNA, 75 bp, synthetic construct
  source 1..75: mol_type = other DNA
caaaatggtgattaacctggacagatctcgcatacctgctgagtgtatagagaaaatagaaattattcttaaaga

SEQ ID NO: 794135 - DNA, 75 bp, synthetic construct
  source 1..75: mol_type = other DNA
tgtggtcgtgaagtgaaatttattcttgaggtgctccggggagatagtgtagagaaagcctctcgggtatggtca

SEQ ID NO: 794136 - DNA, 75 bp, synthetic construct
  source 1..75: mol_type = other DNA
agcgggatatcacgccgtgcctgggagcacgtctggtgcaggagggcaaccggctgcactatctggctgaccggg

SEQ ID NO: 794137 - DNA, 75 bp, synthetic construct
  source 1..75: mol_type = other DNA
tcgctgtcgaagcgttatcgctgatttataacaaagatctgctgccgaacccgccaaaaacctgggaagagatcc

SEQ ID NO: 794138 - DNA, 75 bp, synthetic construct
  source 1..75: mol_type = other DNA
ggggcagtggcgctgaagtcctatcaggatgagctggcaaaagatcctcgcatcgccgccaccatggataacgcc

SEQ ID NO: 794139 - DNA, 75 bp, synthetic construct
  source 1..75: mol_type = other DNA
gtcatctgcatcaagaactagtttaagctcacgacatcagtttgctcctggagcgacagtattgtataagggcga

SEQ ID NO: 794140 - DNA, 75 bp, synthetic construct
  source 1..75: mol_type = other DNA
cattccttcatttttactgaccggtcagcagactccagctttcggccgccgggtttctgatgtcatagaaattgc

SEQ ID NO: 794141 - DNA, 75 bp, synthetic construct
  source 1..75: mol_type = other DNA
acaccaacaaatggtattacggaaatgctgatacaacttttgagccattaaatcatttgcctgactactgcaatg

SEQ ID NO: 794142 - DNA, 75 bp, synthetic construct
  source 1..75: mol_type = other DNA
tgttaacgggcaggtatcaccatctaactatagtaattttgattcacgctatgtccgggatatccggcttggtgg

SEQ ID NO: 794143 - DNA, 75 bp, synthetic construct
  source 1..75: mol_type = other DNA
caagctgttcgttacgtgcaaagtccccatcaagaacaataacccgactgaaagcgaactccagcagctcgcaca

SEQ ID NO: 794144 - DNA, 75 bp, synthetic construct
  source 1..75: mol_type = other DNA
tggatggtcgcccacataccgatgaagtcgaaagcggtaaatgggtgctgactgccgaactggccgcgcagcttg

SEQ ID NO: 794145 - DNA, 75 bp, synthetic construct
  source 1..75: mol_type = other DNA
gccttttgtcattgattacgaacatcagacgctgcgcgccgtaaacaacggcaagcctgccccggcggcgggctg

SEQ ID NO: 794146 - DNA, 75 bp, synthetic construct
  source 1..75: mol_type = other DNA
ttttttgatttaataattcctaacggtggaaaaaaagatcgttacgtctatacgtcatttaatggcgagaagttt

SEQ ID NO: 794147 - DNA, 75 bp, synthetic construct
  source 1..75: mol_type = other DNA
cctacgggccaatgctcaaattcgtgccggtgttggcggacaaaaaggagagtttcgatactctctatgagtcca

SEQ ID NO: 794148 - DNA, 75 bp, synthetic construct
  source 1..75: mol_type = other DNA
gggaaatacttctctcgcaagaacaacgtcagcttccagaaccagttcactgtactggagctcgatgaactgcaa

SEQ ID NO: 794149 - DNA, 75 bp, synthetic construct
  source 1..75: mol_type = other DNA
tacaaccagcaattcggcaccggcagcctgcgagaagcgctgtttggtggcttaaacagcgctgcccgcacaacg

SEQ ID NO: 794150 - DNA, 75 bp, synthetic construct
  source 1..75: mol_type = other DNA
atacgcaaacgtgcggattttctcgatgggggcacggttcaaccgatagaagaatcgacccagactcaggtacgc

SEQ ID NO: 794151 - DNA, 75 bp, synthetic construct
  source 1..75: mol_type = other DNA
tgcacggcataggtgacgctgaatggaatatctaccgcagcatggacatggcagacagcgaaggccgcaaattca

SEQ ID NO: 794152 - DNA, 75 bp, synthetic construct
  source 1..75: mol_type = other DNA
aacctacacaagtacttgataacttatggagcaaatggcaggaggctatagctttttttgatatttggaattacc

SEQ ID NO: 794153 - DNA, 75 bp, synthetic construct
  source 1..75: mol_type = other DNA
tggggccagcagcatcgaacgctgacagcattatcacgctgctccagcagaccacgagaggggatgcagatttgg

SEQ ID NO: 794154 - DNA, 75 bp, synthetic construct
  source 1..75: mol_type = other DNA
gacggacgccattgctgaagatatcagcaaatccggaagaccggcagcgttggctgactacatgacgaaggtgcg

SEQ ID NO: 794155 - DNA, 75 bp, synthetic construct
  source 1..75: mol_type = other DNA
cgttcaagaggtgaaattacatcgctcagtgctaatggtctgcgcattgcttatggcaattatggattctttatc

SEQ ID NO: 794156 - DNA, 75 bp, synthetic construct
  source 1..75: mol_type = other DNA
aaaaggtcttgtccagctcagtagtgccaccaacagcacgtctgaaacgcttgccgcaacaccaaaagcggtaaa

SEQ ID NO: 794157 - DNA, 75 bp, synthetic construct
  source 1..75: mol_type = other DNA
aatcatttgcctgattactgcaatgatccgagcgcttcatggccgattattgagaaatacaggatttctatctta

SEQ ID NO: 794158 - DNA, 75 bp, synthetic construct
  source 1..75: mol_type = other DNA
gacggcctctggtgataaatttgggacatggaacggtttaaggccgctgactatcaataacgctaatggcggagt

SEQ ID NO: 794159 - DNA, 75 bp, synthetic construct
  source 1..75: mol_type = other DNA
aaaggcggtaaaggcagcatatgacctcgctaacgggaaatataccgcacaggatgccaccaccgcgcgaaaagg

SEQ ID NO: 794160 - DNA, 75 bp, synthetic construct
  source 1..75: mol_type = other DNA
caaacgaaacagtaattatattatcgcagaactggttattccgccggaggtgggcggtttctggatgcgtgagct

SEQ ID NO: 794161 - DNA, 75 bp, synthetic construct
  source 1..75: mol_type = other DNA
ccatcagataccgttccgtctggttatgccctgatgcaagggcagacttttgacaaatctgcatacccgaaactt

SEQ ID NO: 794162 - DNA, 75 bp, synthetic construct
  source 1..75: mol_type = other DNA
atattagacttggtggtgcgtcatcctataaaccagcaaataacggtacaacatggacgcatcaggctccatctg

SEQ ID NO: 794163 - DNA, 75 bp, synthetic construct
  source 1..75: mol_type = other DNA
ctgcctatgacaatgctgaaaaacgtcttaagaaagatcagaacggtgcggatattccgggaaaggataccttca

SEQ ID NO: 794164 - DNA, 75 bp, synthetic construct
  source 1..75: mol_type = other DNA
aacgccgaaagcggtaaaggccgcctatgaccttgctaacgggaaatataccgcacaggacgccaccacagcgcg

SEQ ID NO: 794165 - DNA, 75 bp, synthetic construct
  source 1..75: mol_type = other DNA
gccctgatgcaggggcagacttttgacaaatctgcatacccgaaacttgcagtcgcttatccgtcaggcgtgatc

SEQ ID NO: 794166 - DNA, 75 bp, synthetic construct
  source 1..75: mol_type = other DNA
atatccaacagcgtatggaaatatcattcacctgaaagggatgacagccgttggcgaaggcgaattactcatcgg

SEQ ID NO: 794167 - DNA, 75 bp, synthetic construct
  source 1..75: mol_type = other DNA
aagcaaccggcttttgcattagggaaaacaggaaatacggttgcaaataataaagcagtaggatggaactgggac

SEQ ID NO: 794168 - DNA, 75 bp, synthetic construct
  source 1..75: mol_type = other DNA
gtgaaattaattaccaggcactgcgtgttgcaggcatttgcatcaaaggagagtgacgtggaaataaaaccagaa

SEQ ID NO: 794169 - DNA, 75 bp, synthetic construct
  source 1..75: mol_type = other DNA
cagaccgcttcgggcaggttcattacctgttgctggagccggaggccgggaaagaattcagacgaggagacaaag

SEQ ID NO: 794170 - DNA, 75 bp, synthetic construct
  source 1..75: mol_type = other DNA
catatttcaccttacgctttcactatctgttattagaagtaccgatttattttggtgctgctcacttacggccat

SEQ ID NO: 794171 - DNA, 75 bp, synthetic construct
  source 1..75: mol_type = other DNA
aatgtcttcacgcgattttattcagttgtgcgctgtggctgtaaattttatgagcgagccagactctggcgcgaa

SEQ ID NO: 794172 - DNA, 75 bp, synthetic construct
  source 1..75: mol_type = other DNA
caccattgcgtggcgtgggtggcgggtgcgccggatgattctcaacagctcggtttctctgacgacggggaaccg

SEQ ID NO: 794173 - DNA, 75 bp, synthetic construct
  source 1..75: mol_type = other DNA
aactggcacgaattgcactggtatcgctggaagcagagccggtggcaaagattatagctcattacccattaggag

SEQ ID NO: 794174 - DNA, 75 bp, synthetic construct
  source 1..75: mol_type = other DNA
cacctgtggattcgcacttcgagaggaaaaatggcaaagaggtttcattacccatttcccgccatcatggcgaat

SEQ ID NO: 794175 - DNA, 75 bp, synthetic construct
  source 1..75: mol_type = other DNA
tcttcagcggactcaaatcagcccttcggccagccatgcccaggtttaaagtctccgcgttctggctgctgattc

SEQ ID NO: 794176 - DNA, 75 bp, synthetic construct
  source 1..75: mol_type = other DNA
gcgctggctcatactgactggcatgcagagcgtcaggcgggcgacggtgacgccatcagccgctggacgccatat

SEQ ID NO: 794177 - DNA, 75 bp, synthetic construct
  source 1..75: mol_type = other DNA
atctggcaacggagagccgcacctggctaatgcgttcccgtcgtcgcctgacgatcttctctattacaggcggtg

SEQ ID NO: 794178 - DNA, 75 bp, synthetic construct
  source 1..75: mol_type = other DNA
attgagcaggctggatccctgcgtggtctgtcgctgtctgatgtgctgaatctgaaagcggataccatgtttagg

SEQ ID NO: 794179 - DNA, 75 bp, synthetic construct
  source 1..75: mol_type = other DNA
attgatcaggctggatccctgcgtggtctgtcgctgtctgatgtgctgaatctgaaagcggataccatgttcaag

SEQ ID NO: 794180 - DNA, 75 bp, synthetic construct
  source 1..75: mol_type = other DNA
attgaacaggctggatccctgcgtggtctgtcgctgtctgatgtgctgaatctgaaagcggataccatgttcatg

SEQ ID NO: 794181 - DNA, 75 bp, synthetic construct
  source 1..75: mol_type = other DNA
ttggcgcataccgatggcgttgaggcggcaaaagcgtttgttgaatcggtgcgggcagaacaccccgatgcccgc

SEQ ID NO: 794182 - DNA, 75 bp, synthetic construct
  source 1..75: mol_type = other DNA
ctgccgtcgccctgttggtctgggggacgcatattgttcgaacaggcgtaatgcgcgtcttcggtgcgcgtctgc

SEQ ID NO: 794183 - DNA, 75 bp, synthetic construct
  source 1..75: mol_type = other DNA
gggatcggcgttaccgcactggtgcagagcagtaatgccaccactatgctggtcacctcgttcgtcgcccaggat

SEQ ID NO: 794184 - DNA, 75 bp, synthetic construct
  source 1..75: mol_type = other DNA
ctgccgtcgccctgttggtttggggaacgcatattgttcgaacgggcgtgatgcgcgtctttggcgctcggttgc

SEQ ID NO: 794185 - DNA, 75 bp, synthetic construct
  source 1..75: mol_type = other DNA
atttaggcttgctgggagatatgcagcgtctgaactcgctgttttgttcagtcgcttacagtgtgctggaacaac

SEQ ID NO: 794186 - DNA, 75 bp, synthetic construct
  source 1..75: mol_type = other DNA
ggtgacctcgtttgtcgcccaggatctggttgctctcgcgcctgcgctggtgattgtgctgggtgcagatgtcgg

SEQ ID NO: 794187 - DNA, 75 bp, synthetic construct
  source 1..75: mol_type = other DNA
cctgcgcattggcgacgccatggaacagatgatggaagggctgaataaagtgatgcacggcgagccacggcagga

SEQ ID NO: 794188 - DNA, 75 bp, synthetic construct
  source 1..75: mol_type = other DNA
atacttcacagccggtattgcctgcgcaaaaccaggctttaccgccggaagttcgcgcgttccttaatgccggga

SEQ ID NO: 794189 - DNA, 75 bp, synthetic construct
  source 1..75: mol_type = other DNA
ccaagaagcacgggcgtactttgtcgcccggaaaaatgtcagagagccagttctggttattagctgaaatatctc

SEQ ID NO: 794190 - DNA, 75 bp, synthetic construct
  source 1..75: mol_type = other DNA
catcgtaaactgaagcaagttgctattgctgtaagaggttcctgccgttttgttttagatgacggaaaggaacgc

SEQ ID NO: 794191 - DNA, 75 bp, synthetic construct
  source 1..75: mol_type = other DNA
actgctgaccgccaccctgaccgccgcaggcattatctccttcccggtggcgctctgcctggtcatcggcgctaa

SEQ ID NO: 794192 - DNA, 75 bp, synthetic construct
  source 1..75: mol_type = other DNA
gttacttgctgtatcgcgtggtgaatttgttgaggggattagcgaccctaatgatccgaaatgggtcaaggggat

SEQ ID NO: 794193 - DNA, 75 bp, synthetic construct
  source 1..75: mol_type = other DNA
agcgcaaactgaaaaccaccgtgctggctaacgatggtgagctgatcgtgcttggcggtctgatggacgatcagg

SEQ ID NO: 794194 - DNA, 75 bp, synthetic construct
  source 1..75: mol_type = other DNA
gccgatggctccctgacgttggatgacgattttatcccctcctgccagaatattcaggtcagtaagaaactgcgt

SEQ ID NO: 794195 - DNA, 75 bp, synthetic construct
  source 1..75: mol_type = other DNA
tgctggtggtctgtggtgcgcttagtctggggctgaatcattaccgcgataacgccatcacctacaaagcgcaga

SEQ ID NO: 794196 - DNA, 75 bp, synthetic construct
  source 1..75: mol_type = other DNA
accagcctcgacgtcgtgtttggcgagcgcaaactgaaaaccaccgtgctggctaacgatggtgagctgatcgtg

SEQ ID NO: 794197 - DNA, 75 bp, synthetic construct
  source 1..75: mol_type = other DNA
gggataaatatccatcagcacaaatcatcattgctgcggataacgaccacagcgaaggaagacaaaacacgggga

SEQ ID NO: 794198 - DNA, 75 bp, synthetic construct
  source 1..75: mol_type = other DNA
ttgatgtgtttgaaaccggccttgcggacaaggctttgtcccatgctcaattcctcgcgcaaagctcctccgggc

SEQ ID NO: 794199 - DNA, 75 bp, synthetic construct
  source 1..75: mol_type = other DNA
aattacgatccctccaacgtgattatgctcaccggacgcgcctccgtcgtggagcggctgacggaagtgatccag

SEQ ID NO: 794200 - DNA, 75 bp, synthetic construct
  source 1..75: mol_type = other DNA
tatccctgctgattatggcgaacaggttcatcgtgtaggcgagcggttcgctattctggaggcggcgttggtgct

SEQ ID NO: 794201 - DNA, 75 bp, synthetic construct
  source 1..75: mol_type = other DNA
gttacggtgagtctgttttgttttacgtcctgccggagccatttaaatcgcatgtggcgaagggatttaacaagg

SEQ ID NO: 794202 - DNA, 75 bp, synthetic construct
  source 1..75: mol_type = other DNA
ggcagtggcagcaattgacgcgggcaacctgctacccgttgccgaagtgatgcgccggatatatccagccacgca

SEQ ID NO: 794203 - DNA, 75 bp, synthetic construct
  source 1..75: mol_type = other DNA
aagctggatttgattctggtcgaagggttcaagcatgaagagatcgcaaagattgtgctgtttcgcgatggagcc

SEQ ID NO: 794204 - DNA, 75 bp, synthetic construct
  source 1..75: mol_type = other DNA
tccgtggcaggaacggcggaaagctggcgcgacagtgtggcgcggctggctggtggcaatccgttcatgatgctg

SEQ ID NO: 794205 - DNA, 75 bp, synthetic construct
  source 1..75: mol_type = other DNA
agcccggctgacatgcctatccgggatttagccggataccgtcagaaaggcgagcatgacgaaagccccgtagtg

SEQ ID NO: 794206 - DNA, 75 bp, synthetic construct
  source 1..75: mol_type = other DNA
ggatttatttccgatgcgcgaaaaatggaagactatctggttaataattcaaaagaaaaactcgctgaactcatc

SEQ ID NO: 794207 - DNA, 75 bp, synthetic construct
  source 1..75: mol_type = other DNA
cgctgggtgggcaagctggccgaccaggcctggcatgtggtgatggtggaggccgttcactatatggaaattgac

SEQ ID NO: 794208 - DNA, 75 bp, synthetic construct
  source 1..75: mol_type = other DNA
ctctctgataaagaacgggaggacgcgctggcggagccggactaccgcctgctgacgcgcctcgggcatgaattc

SEQ ID NO: 794209 - DNA, 75 bp, synthetic construct
  source 1..75: mol_type = other DNA
tactcagcggactcaaatcagccctgcgaccggcgatgccccggtttaaagtctccgctttctggctgctgatac

SEQ ID NO: 794210 - DNA, 75 bp, synthetic construct
  source 1..75: mol_type = other DNA
cttgatacctccccggtacagccgctggaaaccgggatgcagatgatgcgtgttgccgacagtcgctggccggaa

SEQ ID NO: 794211 - DNA, 75 bp, synthetic construct
  source 1..75: mol_type = other DNA
ccctggcagagccggattaccagttactcacccgcctcgggcatgaattcgccccggaaaacagtaccctggcag

SEQ ID NO: 794212 - DNA, 75 bp, synthetic construct
  source 1..75: mol_type = other DNA
gaacgccgcgccgccggagagtgaagaaaaactcgcggtgctgcgcgtaatgcgaatgctggaggacaaaagcgg

SEQ ID NO: 794213 - DNA, 75 bp, synthetic construct
  source 1..75: mol_type = other DNA
atattcaggatgggaagttaaagaagtaactctagctgcattatttaataagcggaaaaaaaatgcaatagtgat

SEQ ID NO: 794214 - DNA, 75 bp, synthetic construct
  source 1..75: mol_type = other DNA
agaagaggcggaaggcacggtcggtagcgggcgtgaggttgtctccatcgccgccagcaaacacagtaatgccct

SEQ ID NO: 794215 - DNA, 75 bp, synthetic construct
  source 1..75: mol_type = other DNA
caggtactgtactagctatttttttatctctcagcaacgtatctttggcttccggcctggataaaaacatgcagt

SEQ ID NO: 794216 - DNA, 75 bp, synthetic construct
  source 1..75: mol_type = other DNA
cgtgcgagatgaggtgaacgagttagccaaagaactgaatgcagatgtcgtggttatcggttcgcgtaatccatc

SEQ ID NO: 794217 - DNA, 75 bp, synthetic construct
  source 1..75: mol_type = other DNA
tttgccgctgatgtgcgtcgttttgaagagcatctgcaacatgaagcagaagaacgtctgcaaacgatggtcagc

SEQ ID NO: 794218 - DNA, 75 bp, synthetic construct
  source 1..75: mol_type = other DNA
cgcgtgacatcaccgcgactggatgaagtgacgatcaaaaaaatggcatcccgtgactttattcagttatgtgcg

SEQ ID NO: 794219 - DNA, 75 bp, synthetic construct
  source 1..75: mol_type = other DNA
ccgaaatgggttaaggggatccagactcgcgattctgtgtaccagaaccagccagaaacggaaaaaaccagcccg

SEQ ID NO: 794220 - DNA, 75 bp, synthetic construct
  source 1..75: mol_type = other DNA
attcgcccgaaactggtaacactggaggattggcaaaaacgccagcaagaagaaaatgcaggaaaaacgtttatc

SEQ ID NO: 794221 - DNA, 75 bp, synthetic construct
  source 1..75: mol_type = other DNA
aaaagcgcgacaaaatgaaccagaagcgcaacaggagccggaaaaagtctgcaatgcctgcagtcagactagtgg

SEQ ID NO: 794222 - DNA, 75 bp, synthetic construct
  source 1..75: mol_type = other DNA
actggcaaaaaaagaacgtgctaaatctttgccttacaacatcagtggcacaaaagagcaattaaccgaaatcgc

SEQ ID NO: 794223 - DNA, 75 bp, synthetic construct
  source 1..75: mol_type = other DNA
gaggactggcaaaaacgccagcaagaagaaaacgccgggaaaacgtttatcagtccggatatgtatgaacaggca

SEQ ID NO: 794224 - DNA, 75 bp, synthetic construct
  source 1..75: mol_type = other DNA
tatgctactcccaatttctggccaggaactgcccattcgttggcttgctcaacacggtagcgaaaaaccggtaac

SEQ ID NO: 794225 - DNA, 75 bp, synthetic construct
  source 1..75: mol_type = other DNA
tccgcacaaggagaacgatggcagcgatccgcatcgcgattgcagtgatgaaactggcgaagtcgcagatcccgt

SEQ ID NO: 794226 - DNA, 75 bp, synthetic construct
  source 1..75: mol_type = other DNA
agctggcctcagcgcgagaaaaccatggccttcaatcaggcgctgaatagctggctggacgacgttcgggctaac

SEQ ID NO: 794227 - DNA, 75 bp, synthetic construct
  source 1..75: mol_type = other DNA
tgatcgaccttgaaacaatgggcacaaatcccgatgccccgattatctcaataggtgcaatatttttcgatccgc

SEQ ID NO: 794228 - DNA, 75 bp, synthetic construct
  source 1..75: mol_type = other DNA
caaccctgatccagaaatcgtggatattgcctgtggtcgctcctctgccccgatgccgcagcgtgtaacagaaga

SEQ ID NO: 794229 - DNA, 75 bp, synthetic construct
  source 1..75: mol_type = other DNA
ccgtggtgctgttgcgattgatgatgctggctacgatgaagatgacttcaaaaaacctgttcgcgtcaatttgcc

SEQ ID NO: 794230 - DNA, 75 bp, synthetic construct
  source 1..75: mol_type = other DNA
gcggacgttatccggttgaaattttcatgatgggcgaagaagcaaaactggcaggtcagctggaatatcaccgca

SEQ ID NO: 794231 - DNA, 75 bp, synthetic construct
  source 1..75: mol_type = other DNA
aaatttttctggatcttcgtcaacaaagatgctggctatcactgggtggccatcgtggaagcctcgcaggaactc

SEQ ID NO: 794232 - DNA, 75 bp, synthetic construct
  source 1..75: mol_type = other DNA
ccaatccggggtgtagtggtggagaaatcgccgcagcactgaataccccaaccacagccattaatgcggagttac

SEQ ID NO: 794233 - DNA, 75 bp, synthetic construct
  source 1..75: mol_type = other DNA
attttccagcccgttgctgacaataaatggtgatgggcatacattagctcttaccggagtcaatttatgtgtgga

SEQ ID NO: 794234 - DNA, 75 bp, synthetic construct
  source 1..75: mol_type = other DNA
tgttattatcaccaaagataactcatgcaaatgagaaagtaatatgtcaaaacagtgcatcttttgtgaccaaag

SEQ ID NO: 794235 - DNA, 75 bp, synthetic construct
  source 1..75: mol_type = other DNA
tcctgaacactttaaacttattattattggtgatggtgaattgcgtgacgaaattaatatgcttataaaaaaatt

SEQ ID NO: 794236 - DNA, 75 bp, synthetic construct
  source 1..75: mol_type = other DNA
aaatacgacccaacaacgccctggattaatgctcgcaagatggcagataaattttccagcccgttactgacaata

SEQ ID NO: 794237 - DNA, 75 bp, synthetic construct
  source 1..75: mol_type = other DNA
ctagcgttgacaaaattgccggcaaaaagcaagcataaaggaagcatcctgataataagtggtgggcccgggtta

SEQ ID NO: 794238 - DNA, 75 bp, synthetic construct
  source 1..75: mol_type = other DNA
ctctgaccattcatggccgtacacgcgcctgtttgttcaatggagaagctgagtacgacagtattcgggcagtta

SEQ ID NO: 794239 - DNA, 75 bp, synthetic construct
  source 1..75: mol_type = other DNA
aatctaataataagtgctataatgttaacgaactagtatttgatgttttaatgtattcaactgaaataaaaaaca

SEQ ID NO: 794240 - DNA, 75 bp, synthetic construct
  source 1..75: mol_type = other DNA
cgactgaaagatcggctgcaccgtgaaattattgagcgtgattatcacctcagcgcagcaatgtactgcgatgtg

SEQ ID NO: 794241 - DNA, 75 bp, synthetic construct
  source 1..75: mol_type = other DNA
ttaactttgacaatggacgttccgattcacctgatttttgtgaattatggccaatacatagcaacctgaataaaa

SEQ ID NO: 794242 - DNA, 75 bp, synthetic construct
  source 1..75: mol_type = other DNA
agatagttttaaccttacttttgcccgcaacagtatctgcccagtcgatagagtggcaatcctgtatgaccactc

SEQ ID NO: 794243 - DNA, 75 bp, synthetic construct
  source 1..75: mol_type = other DNA
gggcaccggaacaccgtaactgcgaagagattgcccaactggctgaagactatggcattcaggctctgaccattc

SEQ ID NO: 794244 - DNA, 75 bp, synthetic construct
  source 1..75: mol_type = other DNA
cccggatgtgaaacaacctgagccagtagtgcaacagaaaccggaaatagtctgcaatgcctgcggtcagactgg

SEQ ID NO: 794245 - DNA, 75 bp, synthetic construct
  source 1..75: mol_type = other DNA
tatcagtcctgagatgtatgaacaggcaaaaaatattcacgcggcactgcaaaacaataccgatgcagcaaggct

SEQ ID NO: 794246 - DNA, 75 bp, synthetic construct
  source 1..75: mol_type = other DNA
tgagcgccataatgcacttgatgacgcccgttaccaggcaaaatacgtttcagctatctggcaaaaactgttccc

SEQ ID NO: 794247 - DNA, 75 bp, synthetic construct
  source 1..75: mol_type = other DNA
gcagtgatgggggacgcaacctaccaggagacattcaacgaagaaagccaggatgaagcctgggagaaagatcca

SEQ ID NO: 794248 - DNA, 75 bp, synthetic construct
  source 1..75: mol_type = other DNA
ctgaaaccgctgcgtgaaactgcgcaggctatctccaatgaactgggatttaccgtccgggatgaccagggcgcg

SEQ ID NO: 794249 - DNA, 75 bp, synthetic construct
  source 1..75: mol_type = other DNA
gctaaatatcattcatattgctgcgccgcatcttgagacgctgaacatcgccaccggtgaaacgattaacttctc

SEQ ID NO: 794250 - DNA, 75 bp, synthetic construct
  source 1..75: mol_type = other DNA
tactcaaccacccggatcggaaatctgaaatcagctatttcgggtttgatgaagaaaccgggctggaaatcaggg

SEQ ID NO: 794251 - DNA, 75 bp, synthetic construct
  source 1..75: mol_type = other DNA
gaatttgttgaagggattagcgacccgaatgatccgaaatgggttaaggggatccagacccgcgattctgtgtac

SEQ ID NO: 794252 - DNA, 75 bp, synthetic construct
  source 1..75: mol_type = other DNA
tacaggcatcacccgtacgccttccggtgctaacgctggcggcggaaatcttaccgatcgtggcgaaggctttac

SEQ ID NO: 794253 - DNA, 75 bp, synthetic construct
  source 1..75: mol_type = other DNA
gccgacaaatcgctggcagcaaggcgagcattttcgcttgatggcttgaaggaactggatgcgctctatgagcaa

SEQ ID NO: 794254 - DNA, 75 bp, synthetic construct
  source 1..75: mol_type = other DNA
gaatttgttgaaggaattagtgacccgaatgatccgaaatgggttaagggtatccagacccgcgactctgtgaac

SEQ ID NO: 794255 - DNA, 75 bp, synthetic construct
  source 1..75: mol_type = other DNA
tggcatcacaatggtatttatcgccccgtcaccctctgcgcaggacaaacccgccagcactgacaacaccaatgt

SEQ ID NO: 794256 - DNA, 75 bp, synthetic construct
  source 1..75: mol_type = other DNA
agcaaattgaaactgtagatccagaactggcaaaaaaagaacgtgctaaatctttgccttacaacatcagtggca

SEQ ID NO: 794257 - DNA, 75 bp, synthetic construct
  source 1..75: mol_type = other DNA
ctgaagcaggtcagcggcacgctcacggcggctaaagaagaggcggaaggcacggtcggtagcgggcgtgagatt

SEQ ID NO: 794258 - DNA, 75 bp, synthetic construct
  source 1..75: mol_type = other DNA
cagccagcactgacaataccaacgtcaacggcgaagacatgacagaaattgaggagaacatgctcctgccagttt

SEQ ID NO: 794259 - DNA, 75 bp, synthetic construct
  source 1..75: mol_type = other DNA
gctggcaaaaacgccagcaagaagaaaacgccgggaaaacgtttatcagtccggatatgtatgaacaggcaaaaa

SEQ ID NO: 794260 - DNA, 75 bp, synthetic construct
  source 1..75: mol_type = other DNA
aaatgacgccgctgatggagatggacaagcacaaatgaagaatgaatacattcaggaaaatgctgttgatacaac

SEQ ID NO: 794261 - DNA, 75 bp, synthetic construct
  source 1..75: mol_type = other DNA
attcgatgaagagaatcaggttgaagttcaggaaaatgatccggaggaaatggaaggtgctgaacatccgcacaa

SEQ ID NO: 794262 - DNA, 75 bp, synthetic construct
  source 1..75: mol_type = other DNA
tgcgcctgcaatccctgacatcgcaatgatgattgccaacaagcttgaaaattttggagtgaccagtgatgagcg

SEQ ID NO: 794263 - DNA, 75 bp, synthetic construct
  source 1..75: mol_type = other DNA
cagcgaaccggaggagggaacaccctgcaatcagactggcgaggataactgccctgactgtggcgcggtgatggg

SEQ ID NO: 794264 - DNA, 75 bp, synthetic construct
  source 1..75: mol_type = other DNA
gtcgtcctgtgggcaagcaacgattttgaatcgacctgtgccactctggactacctgatcgttaagtcaggtaaa

SEQ ID NO: 794265 - DNA, 75 bp, synthetic construct
  source 1..75: mol_type = other DNA
tttatcgtagcacctgaatttaaccgccgtacaaacgccggaaaagaagaagagaaagcgtttctgatggaatgc

SEQ ID NO: 794266 - DNA, 75 bp, synthetic construct
  source 1..75: mol_type = other DNA
aacctgagccagtagtgcaacaggaaccggaaatagcctgcaatgcctgcggccagactggcggggataactgcc

SEQ ID NO: 794267 - DNA, 75 bp, synthetic construct
  source 1..75: mol_type = other DNA
cgatgtgtttacgggaaaaaaatcggcccagatccgcgaaattttaatcagcgagtcagcttgggaagaaatgac

SEQ ID NO: 794268 - DNA, 75 bp, synthetic construct
  source 1..75: mol_type = other DNA
tgcgccacaatgcgctggatgatgcccgtcaccaggcaaaatacgtttcagcaatctggcaaaaactgatcccga

SEQ ID NO: 794269 - DNA, 75 bp, synthetic construct
  source 1..75: mol_type = other DNA
caggataatgctcaagaaaccaaagaactggcgggaggccaggaagaaaacgcgcaggcagacgcccatgaggat

SEQ ID NO: 794270 - DNA, 75 bp, synthetic construct
  source 1..75: mol_type = other DNA
agcaaagaccgtttgttaattaaccagtccccgcccatgcctctggtgacggcgatttttgatagtttcaatgaa

SEQ ID NO: 794271 - DNA, 75 bp, synthetic construct
  source 1..75: mol_type = other DNA
agcgatttttgatagttttgctaaatccgctgtaaattctcctatattgagcaatatgctctatctttcctgctt

SEQ ID NO: 794272 - DNA, 75 bp, synthetic construct
  source 1..75: mol_type = other DNA
atcgatgttttctcataagaaagaactgatccccttacttttcaatagtatcagtactgtttcaggaaaagttga

SEQ ID NO: 794273 - DNA, 75 bp, synthetic construct
  source 1..75: mol_type = other DNA
actacagttttctggtgatggattatctcccacctcgcccgctggatgcgcatagcgcatttattcttggtcagc

SEQ ID NO: 794274 - DNA, 75 bp, synthetic construct
  source 1..75: mol_type = other DNA
ctgggcccggaggggccgtatatattcgaccctgcttgttactggggcgacagagagtgcgatctggcgatgttg

SEQ ID NO: 794275 - DNA, 75 bp, synthetic construct
  source 1..75: mol_type = other DNA
gcaagttattcagtaacgaacccttagagcgccttatgtatatgcttattatctttgttttgatattgctcttta

SEQ ID NO: 794276 - DNA, 75 bp, synthetic construct
  source 1..75: mol_type = other DNA
aacaaagagaaagtggtgctgatcgacgcctcgaatttaggtgaaaaggtcaaagacggcaaaaaccagaaaacg

SEQ ID NO: 794277 - DNA, 75 bp, synthetic construct
  source 1..75: mol_type = other DNA
ctggacagcaaggaaaaccagcaacgtttctttgccgggataccgaaaatcaaagccaaagccagggacaaaatg

SEQ ID NO: 794278 - DNA, 75 bp, synthetic construct
  source 1..75: mol_type = other DNA
acgcagaaattcgacttctacgccaccatctttgaatacctgatcaaagactacaacagcaactccggcggcaaa

SEQ ID NO: 794279 - DNA, 75 bp, synthetic construct
  source 1..75: mol_type = other DNA
agtcaccccccattcagctggtgacggcgatttttgatagtttcaatgacccccgggtcaattcgccgatactga

SEQ ID NO: 794280 - DNA, 75 bp, synthetic construct
  source 1..75: mol_type = other DNA
agaaaaatttggcagacgattttgcgttttgttcaccggatacgcgacgactggatatcgatgagctgacagttt

SEQ ID NO: 794281 - DNA, 75 bp, synthetic construct
  source 1..75: mol_type = other DNA
ccaacgttatccagggcaacaccattctgcatcctttccacaaagacggaagcgcgttgaaacgctttgactaca

SEQ ID NO: 794282 - DNA, 75 bp, synthetic construct
  source 1..75: mol_type = other DNA
ggcacagcgtgactatttcggagcacatacttataagcgcattgataaagaaggtgtgttccatactgaatggct

SEQ ID NO: 794283 - DNA, 75 bp, synthetic construct
  source 1..75: mol_type = other DNA
tgatgaagcacgccgcctgattgaacgtgccggacgtgaagtcgaggagatgatcggttacgaaattcccaaacc

SEQ ID NO: 794284 - DNA, 75 bp, synthetic construct
  source 1..75: mol_type = other DNA
cccgcccagttaaaaagcggcgagcgcattaaagtcatgctcaatgccggtttaagcccggaacatgaacaaaaa

SEQ ID NO: 794285 - DNA, 75 bp, synthetic construct
  source 1..75: mol_type = other DNA
cgcattacactcgatcagccggagatcttcttaatccaggtgcgagctatgctgcgtgctaatgctgccacgggc

SEQ ID NO: 794286 - DNA, 75 bp, synthetic construct
  source 1..75: mol_type = other DNA
ttacaacgaaggctggagcggtccgaacaagtatacgtttgaagtttatcagctggagaacgggagttaccgggc

SEQ ID NO: 794287 - DNA, 75 bp, synthetic construct
  source 1..75: mol_type = other DNA
ctatccagacgggaaataagcgaccggccaccggctatgccccgcggttactggttcaggcaatgcagccgggat

SEQ ID NO: 794288 - DNA, 75 bp, synthetic construct
  source 1..75: mol_type = other DNA
ggcgctgccaactcccatgctgcgatcatggtacgtgcgctggggatccctaccgtgatgggcgcggatattcag

SEQ ID NO: 794289 - DNA, 75 bp, synthetic construct
  source 1..75: mol_type = other DNA
atgtcaaagcaacagatcggcgtcgtcggtatggcagtgatgggacgcaaccttgcgctcaacatcgaaagccgt

SEQ ID NO: 794290 - DNA, 75 bp, synthetic construct
  source 1..75: mol_type = other DNA
acaactacgcgggcgatgaaatggtcaccaaagtagtgccggtacgtaatgtgtcggtacgcgagctggcaccga

SEQ ID NO: 794291 - DNA, 75 bp, synthetic construct
  source 1..75: mol_type = other DNA
atggaacgcagcggcaacagccaggttttctatctcaaatacagcaaagccgaagatctggtcgatgtgctgaag

SEQ ID NO: 794292 - DNA, 75 bp, synthetic construct
  source 1..75: mol_type = other DNA
tccgcgcgtttttaggcgtaccaattattcaacgtcgccagttgcttggtgtactggtggtacagcaacgagagt

SEQ ID NO: 794293 - DNA, 75 bp, synthetic construct
  source 1..75: mol_type = other DNA
tctcccacctcgtccgctggatgcgcatagcgcatttattcttggtcagcaaattgcgcgtttacatcaatggag

SEQ ID NO: 794294 - DNA, 75 bp, synthetic construct
  source 1..75: mol_type = other DNA
atgtggcaggcaatcagtcgtcttttgagcgagcagttaggtgaaggcgaaatcgaactgcgtaatgaactgcct

SEQ ID NO: 794295 - DNA, 75 bp, synthetic construct
  source 1..75: mol_type = other DNA
ctgctgcgcctgaacctgatcctcaacaatttggtgcattcgatccctaacgttatccagggcaacaccattctg

SEQ ID NO: 794296 - DNA, 75 bp, synthetic construct
  source 1..75: mol_type = other DNA
acgctaatgcgtgatacgctctattcaatcattatgattgttaccggtgggctggttggcttttcattattgttg

SEQ ID NO: 794297 - DNA, 75 bp, synthetic construct
  source 1..75: mol_type = other DNA
ttgcagtggtaccgggtttatctccaggaatgaggatgtggttaaacatcctggtattttcgacgccgacggtgc

SEQ ID NO: 794298 - DNA, 75 bp, synthetic construct
  source 1..75: mol_type = other DNA
tattatcttaaggatgatggaaatagaaggttttttaatgataataaaacatattcttatgttatttaatcacga

SEQ ID NO: 794299 - DNA, 75 bp, synthetic construct
  source 1..75: mol_type = other DNA
atgacaaatgctcacgaggcggtaaaaacccgccacaaggagacctcgcttattttcccggttctggcgctggtg

SEQ ID NO: 794300 - DNA, 75 bp, synthetic construct
  source 1..75: mol_type = other DNA
tggttgattatccatttaattgcggtgatagcggttaccaaaatgaacgccagtccgctggaaacactgctcacc

SEQ ID NO: 794301 - DNA, 75 bp, synthetic construct
  source 1..75: mol_type = other DNA
ttattttcccggttctggcgctggtagtgctgttcctgtggggaagcagccagacactaccagtggtcattgcca

SEQ ID NO: 794302 - DNA, 75 bp, synthetic construct
  source 1..75: mol_type = other DNA
aaagaccatactgccatcacgcttctgtcagggttgacgaaaaagagcgtaaggtccgctgtaaaatctgcggtg

SEQ ID NO: 794303 - DNA, 75 bp, synthetic construct
  source 1..75: mol_type = other DNA
aaagaccatattgccatcacgcttctgtccgggttgacgaaaaagtgcgtcaggtccgctgtaaaatctgcggtg

SEQ ID NO: 794304 - DNA, 75 bp, synthetic construct
  source 1..75: mol_type = other DNA
gtggaaataaaaccagaagatgagttaagtaatattgttttatttccggcaaaagaggatgaaccccgggataag

SEQ ID NO: 794305 - DNA, 75 bp, synthetic construct
  source 1..75: mol_type = other DNA
cgccgctggaagagaaggtgtttattgccgccgcgctggcacataaccagaccggacgcccgatctccacacata

SEQ ID NO: 794306 - DNA, 75 bp, synthetic construct
  source 1..75: mol_type = other DNA
ttgagcagggtatcgatggcacggagctgaaagccgggatcatcgcggagatcggctccagcgaaggaaagatta

SEQ ID NO: 794307 - DNA, 75 bp, synthetic construct
  source 1..75: mol_type = other DNA
tgaggcaggaggaacgggaaaggcgtaaaaatatagaaaagctaatccagattgagcgtaatgcgaaagcgcgga

SEQ ID NO: 794308 - DNA, 75 bp, synthetic construct
  source 1..75: mol_type = other DNA
ttgtgggttgggagaaaatcccggcatgggatcaccctgccctgtttatccctggcggcaattctccgtatgtta

SEQ ID NO: 794309 - DNA, 75 bp, synthetic construct
  source 1..75: mol_type = other DNA
atgaaccgacacacacaaattcgtcaggccgtattgtcgcgcctgaaaacgacgtgcggggagaagaccgtcctg

SEQ ID NO: 794310 - DNA, 75 bp, synthetic construct
  source 1..75: mol_type = other DNA
aaaagaataccaggtacagctggatatcgcgatgcagtctggtaagccgaaagaaattgcagagaaaatggttga

SEQ ID NO: 794311 - DNA, 75 bp, synthetic construct
  source 1..75: mol_type = other DNA
aagacgtatccgctgaagtggtagagaaagaataccaggtacagctggatatcgcgatgcagtctggtaagccga

SEQ ID NO: 794312 - DNA, 75 bp, synthetic construct
  source 1..75: mol_type = other DNA
gcatctacgaagtgttcaacaataaatggagcgaagaggatttctcggtggtggtcagctatgacgatatcgccg

SEQ ID NO: 794313 - DNA, 75 bp, synthetic construct
  source 1..75: mol_type = other DNA
cttgcactgcatgcaatcgccccgcacagcgaaggagcttccagagtaaacgtgggcgttatgcaggcaggaagc

SEQ ID NO: 794314 - DNA, 75 bp, synthetic construct
  source 1..75: mol_type = other DNA
ggtcgatgcaggtgtagtggatgatgttgattattttactgccgtgcacattggcactggcgtacctgcgggcac

SEQ ID NO: 794315 - DNA, 75 bp, synthetic construct
  source 1..75: mol_type = other DNA
cattgaagtgcattcaccgggcgttggtgcgtgcctggcttctgcgcatgaagagggcttaagcaacctgcgcgt

SEQ ID NO: 794316 - DNA, 75 bp, synthetic construct
  source 1..75: mol_type = other DNA
cattgcgcatggtgcagctctttttccctgacccgtggcacaaagcgcgccataataaacgccgtatcgttcagg

SEQ ID NO: 794317 - DNA, 75 bp, synthetic construct
  source 1..75: mol_type = other DNA
cgactatcacgtacgccgtcatgatgagattttcgcggctatcaacgcagtcagtgaatcggacgcacaaactcg

SEQ ID NO: 794318 - DNA, 75 bp, synthetic construct
  source 1..75: mol_type = other DNA
tgatgtaccggcactttccggactcatcgacaccctgaacccactcggttttaactatcaacgtgataatgagat

SEQ ID NO: 794319 - DNA, 75 bp, synthetic construct
  source 1..75: mol_type = other DNA
ctgttctggacaaactgaagtcaatcaactccggaaaaatattctggtatgacggtcggccagctttcctggctc

SEQ ID NO: 794320 - DNA, 75 bp, synthetic construct
  source 1..75: mol_type = other DNA
tgctgtggttcctgcagggcgacactaacattgcttatctacacgaaaacaatgtcaccatctgggacgaatggg

SEQ ID NO: 794321 - DNA, 75 bp, synthetic construct
  source 1..75: mol_type = other DNA
tcgacatcgttaacggccccggcactcgctgcaccctgtttgtctccgggtgcgtccatgaatgtcctggctgct

SEQ ID NO: 794322 - DNA, 75 bp, synthetic construct
  source 1..75: mol_type = other DNA
agatgtgaagctgaaagtcctgtataaaacgtccccgctcgccggagctatcatggagcttgactcggtcagtta

SEQ ID NO: 794323 - DNA, 75 bp, synthetic construct
  source 1..75: mol_type = other DNA
gagcaaggcttaagcctgatgccgcacaccgcgcagccggtactgccagcgcaaaatcaggccttaccgccggaa

SEQ ID NO: 794324 - DNA, 75 bp, synthetic construct
  source 1..75: mol_type = other DNA
ttattccgggtgaacaacgcatgcctgcacagctctatcagtccccggcagggcatgagcttgagatcatccctt

SEQ ID NO: 794325 - DNA, 75 bp, synthetic construct
  source 1..75: mol_type = other DNA
cttttattcctggtgaacagcagatgccagcacaactctatcagtctccaacagggcatgagcttgaaatcattc

SEQ ID NO: 794326 - DNA, 75 bp, synthetic construct
  source 1..75: mol_type = other DNA
gctatctacaccatgctgggaacgtctctgtatgagcactggtatcagcagccgatgtatctgcttgccggtgcc

SEQ ID NO: 794327 - DNA, 75 bp, synthetic construct
  source 1..75: mol_type = other DNA
aatcgcttttggcgcgttgctgatcgctatctacaccatgctgggaacgtctctgtatgagcactggtatcagca

SEQ ID NO: 794328 - DNA, 75 bp, synthetic construct
  source 1..75: mol_type = other DNA
aggcctgtggtacggggatttattgcagagcaacatgtacgaagtatgtttacagataccagccagatttgctcc

SEQ ID NO: 794329 - DNA, 75 bp, synthetic construct
  source 1..75: mol_type = other DNA
ccaatagcgagtggaatctcagcgcacagcgagtaaatggcggcgtcgttccgtggtcgccggaagccggtaaag

SEQ ID NO: 794330 - DNA, 75 bp, synthetic construct
  source 1..75: mol_type = other DNA
agcttgcgcaacatgaccttcagtaaagatgactggcagacacaggaaggcaaactgtcgatgaacgctagcgag

SEQ ID NO: 794331 - DNA, 75 bp, synthetic construct
  source 1..75: mol_type = other DNA
gtatcgcagcatgatttaaatgccacctcggttttccctggggtaaagaactttgaattgagtctttctttgcag

SEQ ID NO: 794332 - DNA, 75 bp, synthetic construct
  source 1..75: mol_type = other DNA
accgtgccgggcggcggcacgctgcactgcgactggtggttcaccaacgaagcggtgctcattgacactgccggg

SEQ ID NO: 794333 - DNA, 75 bp, synthetic construct
  source 1..75: mol_type = other DNA
gtcgctacggctgcgtttaatgattcgatgtaccagccgcagggggaatgcgtgaaaccacaactacaggccatt

SEQ ID NO: 794334 - DNA, 75 bp, synthetic construct
  source 1..75: mol_type = other DNA
cacagtggcggcaattgacgccgggaacctgatccacgttgccggagtaatgcgccggaaacacccgcagtcgca

SEQ ID NO: 794335 - DNA, 75 bp, synthetic construct
  source 1..75: mol_type = other DNA
caaaagggctgaccgggtttaaatacccgcttatgcccgatggttcgttattgctggagctggtggatgaatccg

SEQ ID NO: 794336 - DNA, 75 bp, synthetic construct
  source 1..75: mol_type = other DNA
tccccgacactttcgataaggatattgctaaggggtttaacaggcagcaggtggcccgcgtcctgaaagaatcgg

SEQ ID NO: 794337 - DNA, 75 bp, synthetic construct
  source 1..75: mol_type = other DNA
gctgggtggcgtggttactggctgggatgatcaaacgtgccgtgatgcgatacagcacagctacaatgcgtggtt

SEQ ID NO: 794338 - DNA, 75 bp, synthetic construct
  source 1..75: mol_type = other DNA
ggtataccgtagcaggaacgccggaaagctggcgcaacagtgtcgcgcggctggcatacggcaactacgcgatga

SEQ ID NO: 794339 - DNA, 75 bp, synthetic construct
  source 1..75: mol_type = other DNA
aatacgcttacgcgctagacggcgagggcaccctcacgcacattggcgctgccctgcgctcacatacttacacct

SEQ ID NO: 794340 - DNA, 75 bp, synthetic construct
  source 1..75: mol_type = other DNA
tctgcgggcattgtgtgaactggaaaacctggagcagttgcttgaggccagtccggttctgccggccaaacttca

SEQ ID NO: 794341 - DNA, 75 bp, synthetic construct
  source 1..75: mol_type = other DNA
atgacattgcttgtaaagctgatgacagacccgacataccagcgccgcagatgggaaatgcggaactttcgttac

SEQ ID NO: 794342 - DNA, 75 bp, synthetic construct
  source 1..75: mol_type = other DNA
ggctgttcagttacatggggcagagaagtttttaaaagatcatcatggacgattgttcttagataaaaaatgcaa

SEQ ID NO: 794343 - DNA, 75 bp, synthetic construct
  source 1..75: mol_type = other DNA
atgagtgctattaatgtattatcacaggaggaaaaatttatacatgttgttgataaatttataacccataatcac

SEQ ID NO: 794344 - DNA, 75 bp, synthetic construct
  source 1..75: mol_type = other DNA
atgtgcaataatattactctttctcaggaagaaaaatttatcaagttgattgataaatatatcactcagcatcgt

SEQ ID NO: 794345 - DNA, 75 bp, synthetic construct
  source 1..75: mol_type = other DNA
tgccgtttgccgaactggtaaaaagcaaactgcagctgggggggtgtattccatatggcgaccgactgggaacct

SEQ ID NO: 794346 - DNA, 75 bp, synthetic construct
  source 1..75: mol_type = other DNA
gcggtgttggtggcattatcggcggcgctgccgttggcttaggaagtatggctgtatctgctggaatggaaaaag

SEQ ID NO: 794347 - DNA, 75 bp, synthetic construct
  source 1..75: mol_type = other DNA
cccgtgaacgtatggaattacagaaaatgtcagatctggtaggtgccgatagcaatcaggtggctgcaatggtta

SEQ ID NO: 794348 - DNA, 75 bp, synthetic construct
  source 1..75: mol_type = other DNA
gtaacgataactacgcgggcgatgaaatggtcactaaagtggtgccggtacgtaatgtgtctgtacgcgaactgg

SEQ ID NO: 794349 - DNA, 75 bp, synthetic construct
  source 1..75: mol_type = other DNA
gtggcattgtgtgatgtgcgacaagttttttcccgggaagaagttctgtgaggcctgtggtgtcagcgccagtga

SEQ ID NO: 794350 - DNA, 75 bp, synthetic construct
  source 1..75: mol_type = other DNA
gtagagtagcttcgtcgaactctgctcaaactcacttaggtgcaacgaattctgctggcgcgcatacccactcag

SEQ ID NO: 794351 - DNA, 75 bp, synthetic construct
  source 1..75: mol_type = other DNA
agatcagagcgaacaacaatcagtttagttcgaatctgattcttagcacgttgtcaggacagagtagcgttaact

SEQ ID NO: 794352 - DNA, 75 bp, synthetic construct
  source 1..75: mol_type = other DNA
ggcacagcgtgactatttcggggcgcatacttataagcgcattgataaagaaggtgtgttccatactgaatggct

SEQ ID NO: 794353 - DNA, 75 bp, synthetic construct
  source 1..75: mol_type = other DNA
aaggggctgaaaaccagattaccatgttgctccagctccctgacaaaggactggcgctgctggacgatacgctga

SEQ ID NO: 794354 - DNA, 75 bp, synthetic construct
  source 1..75: mol_type = other DNA
attagccaggaaatgggcatttctccgtcgctattttctacccaaccgctgtggcaaattgcgatggttctccag

SEQ ID NO: 794355 - DNA, 75 bp, synthetic construct
  source 1..75: mol_type = other DNA
aactggttccttactatacggtgaaagagtttgttgaatctctggaaacgcctcgtcgcatcctgttaatggtga

SEQ ID NO: 794356 - DNA, 75 bp, synthetic construct
  source 1..75: mol_type = other DNA
cagcgcaggctcaggcaacgttgttaattacgatccctccaacgtgattatgctcaccggacgcgcctcagtcgt

SEQ ID NO: 794357 - DNA, 75 bp, synthetic construct
  source 1..75: mol_type = other DNA
aggcctgtggtacggggatttattgcagagcaacatgtacgaagtctgtttacagctaccagccagatttgctcc

SEQ ID NO: 794358 - DNA, 75 bp, synthetic construct
  source 1..75: mol_type = other DNA
ttcactgctctttgcagcaccgatgattcatgcaaccgacactgcaacgaccaaagatggcgaaacaatcactgt

SEQ ID NO: 794359 - DNA, 75 bp, synthetic construct
  source 1..75: mol_type = other DNA
ccttcgccgcatacaaaatgaaattgcagtatccggtcacactgcaattaaacgtcaaaaacctgtttgataaaa

SEQ ID NO: 794360 - DNA, 75 bp, synthetic construct
  source 1..75: mol_type = other DNA
atcacaggtcccattgaaggcactcagctggcgtatcgcctgacgggggaagtgcaggatgaagattactggcga

SEQ ID NO: 794361 - DNA, 75 bp, synthetic construct
  source 1..75: mol_type = other DNA
atcgccccgagcaggacttcctcggcattgaagtgcattcaccgggcgttggtgcgtgcctggcttctgcgcatg

SEQ ID NO: 794362 - DNA, 75 bp, synthetic construct
  source 1..75: mol_type = other DNA
aggaacatgcgctggaaaactactggccggtgatgggcgttgagttcagcgaagatatgctggatttccccgcgc

SEQ ID NO: 794363 - DNA, 75 bp, synthetic construct
  source 1..75: mol_type = other DNA
ggtaaaccattgccgaatgttcctcgtcataccggttcgctattcctgacctatgacattcataacatgcctggc

SEQ ID NO: 794364 - DNA, 75 bp, synthetic construct
  source 1..75: mol_type = other DNA
cagagcggtatgtacgaagtctgtttacagctaccagccagatttgttcctggactgcgaagatgcgatcgctta

SEQ ID NO: 794365 - DNA, 75 bp, synthetic construct
  source 1..75: mol_type = other DNA
gcaggtgcaggcacggatgctgctattgattccctcaaaccatatctcgataaaggcgacatcatcatcgatggt

SEQ ID NO: 794366 - DNA, 75 bp, synthetic construct
  source 1..75: mol_type = other DNA
tggttcacaacggtattgaatacggagatatgcaactgattgctgaagcctattctctgcttaaaggtggcctga

SEQ ID NO: 794367 - DNA, 75 bp, synthetic construct
  source 1..75: mol_type = other DNA
tgttgatgcaactcagggatctacccagcgtatgcattctactcgtgcggatctgcaagggaatgttgatattgc

SEQ ID NO: 794368 - DNA, 75 bp, synthetic construct
  source 1..75: mol_type = other DNA
aacttcggtaaagagcgcagtacatttattgccccgtcactcacctggtttggtgataatgcaacagtaaccatg

SEQ ID NO: 794369 - DNA, 75 bp, synthetic construct
  source 1..75: mol_type = other DNA
caacgacaggaacgctgacacggcgtgttgatgcaactcagggatctacccagcgtatgcatgctactcgtgcgg

SEQ ID NO: 794370 - DNA, 75 bp, synthetic construct
  source 1..75: mol_type = other DNA
gtgaaaggcggttacttcccggttccgccggtagactctgctcaggatatccgttctgaaatgtgtctggtgatg

SEQ ID NO: 794371 - DNA, 75 bp, synthetic construct
  source 1..75: mol_type = other DNA
ttccactggcattgccgacaccgtactgttcggaccagaaccagaatttttcctgttcgatgacatccgtttcgg

SEQ ID NO: 794372 - DNA, 75 bp, synthetic construct
  source 1..75: mol_type = other DNA
aaccgatgttcggtgataacggctccggtatgcactgccacatgtcgctgtctaaaaacggcgttaacctgtttg

SEQ ID NO: 794373 - DNA, 75 bp, synthetic construct
  source 1..75: mol_type = other DNA
cgcacaacagggcggcagctcgattagcctttatatcgaccgcttcgttaaccgcgatatgtttggttataccgt

SEQ ID NO: 794374 - DNA, 75 bp, synthetic construct
  source 1..75: mol_type = other DNA
cctgaatggacttaatcatattgcggagttaagggcgaaagtttttggtcttaatattgagtcagagcttgagcg

SEQ ID NO: 794375 - DNA, 75 bp, synthetic construct
  source 1..75: mol_type = other DNA
aaccgatgttcggtgataacggctccggtatgcactgccacatgtcgctgtctaaaaacggcgtcaacctgttcg

SEQ ID NO: 794376 - DNA, 75 bp, synthetic construct
  source 1..75: mol_type = other DNA
ctttattgccctggctttctttgacattattggtgctattgcgttgtggacgctggtaatgactccaacttactg

SEQ ID NO: 794377 - DNA, 75 bp, synthetic construct
  source 1..75: mol_type = other DNA
tcctgcccaactggggatggctgctggttctgctggtggcaacgcctgcgctgattaccgtgttgttctggaaag

SEQ ID NO: 794378 - DNA, 75 bp, synthetic construct
  source 1..75: mol_type = other DNA
gtgaagtatcggtggatatcccgcatgctgcaaccggggatatcagttttcagacgatcaatgattacggtgcat

SEQ ID NO: 794379 - DNA, 75 bp, synthetic construct
  source 1..75: mol_type = other DNA
aaccaaagaacaatattcatggattgtcagtgcattccagttggcctatacattggggcaaccgataatggggtt

SEQ ID NO: 794380 - DNA, 75 bp, synthetic construct
  source 1..75: mol_type = other DNA
tatattgaatcaggacaagagcagcatcttaaaacaggtaaaaaagaaaaaacgtcaatcaaacatatcctcagc

SEQ ID NO: 794381 - DNA, 75 bp, synthetic construct
  source 1..75: mol_type = other DNA
attattggcgccattgcgctgtggatgcttatcaaagttaaagacgaagaactacaagtacagttagcgacaagc

SEQ ID NO: 794382 - DNA, 75 bp, synthetic construct
  source 1..75: mol_type = other DNA
ctgttccattaagccccggtgaacgcctgaatggacttaatcacattgcagagttaagggcgaaagtttttggcc

SEQ ID NO: 794383 - DNA, 75 bp, synthetic construct
  source 1..75: mol_type = other DNA
caacttgcgctggccgcacggcagtattacggacagcgccttggcgaactgtcacaggccatgagccaggggagc

SEQ ID NO: 794384 - DNA, 75 bp, synthetic construct
  source 1..75: mol_type = other DNA
ataggacaggcagcaagcgcccgtgatgtgtacgtatcggcttatacgctgtttaacggcttcgggaaattacag

SEQ ID NO: 794385 - DNA, 75 bp, synthetic construct
  source 1..75: mol_type = other DNA
cttttattacgcttgttgtgttcgccagtcagtcattcacgatggatgaactggacgtcgggagatactggaaaa

SEQ ID NO: 794386 - DNA, 75 bp, synthetic construct
  source 1..75: mol_type = other DNA
gacgtgctgtgatgccattcagcataactttaatgcctgggtgaaggagttcggcacgggtaacaaggaacacag

SEQ ID NO: 794387 - DNA, 75 bp, synthetic construct
  source 1..75: mol_type = other DNA
aattcggcacgggcaacagggaatttaaacagatggttgaacaggctgaggcgtttttgtcgtcgttcgggttca

SEQ ID NO: 794388 - DNA, 75 bp, synthetic construct
  source 1..75: mol_type = other DNA
gttaaaggatgcctggacagcaaatcacggggcggcaggtcgtgagtggattaaatggctagcagcccaccaaca

SEQ ID NO: 794389 - DNA, 75 bp, synthetic construct
  source 1..75: mol_type = other DNA
atggcaattaatggcgctgcggcgactgttccattaagccccggtgaacgcctgaatggacttaatcacattgcg

SEQ ID NO: 794390 - DNA, 75 bp, synthetic construct
  source 1..75: mol_type = other DNA
gtttggtcgtgaactggcccttaactacgtagaagataaaatagatgcacaattaataatcaatttcttcggtgt

SEQ ID NO: 794391 - DNA, 75 bp, synthetic construct
  source 1..75: mol_type = other DNA
cctgaatggacttaatcatattgcggagttaagagcgaaagtttttggcctgaatattgagtcagagcttgagcg

SEQ ID NO: 794392 - DNA, 75 bp, synthetic construct
  source 1..75: mol_type = other DNA
attattgatttcgctgaactgaaagctatcttcaaaccgactctggatcgcctagatcactattatctaaacgat

SEQ ID NO: 794393 - DNA, 75 bp, synthetic construct
  source 1..75: mol_type = other DNA
caaattacgcgcattgaaattccgggcgtgaccggcgtattaaccggcatctacatgctgctttctggcgcgatc

SEQ ID NO: 794394 - DNA, 75 bp, synthetic construct
  source 1..75: mol_type = other DNA
cctgaatggacttaatcacatagcggaattaagggcgaaagtttttggtttgaatattgagtcagagcttgagcg

SEQ ID NO: 794395 - DNA, 75 bp, synthetic construct
  source 1..75: mol_type = other DNA
ttagtattattggctttgggcctttctttatagcattggctgtttttgacttaattggcgcagctgctttatgga

SEQ ID NO: 794396 - DNA, 75 bp, synthetic construct
  source 1..75: mol_type = other DNA
tgtcgacgctgcggatatgtcggtatccaaagagttcaagaatctggaagacgatagcctgtctctggaagagct

SEQ ID NO: 794397 - DNA, 75 bp, synthetic construct
  source 1..75: mol_type = other DNA
ctggacaacgcgaacggcaatgatgggcgtaccggctacttcatggagaacggctacgacgactttaaggcgaag

SEQ ID NO: 794398 - DNA, 75 bp, synthetic construct
  source 1..75: mol_type = other DNA
cggctttaacccgaatattttgtactttcgtccagaggaaggcgagaagctggaagcaattctggcagaggtagc

SEQ ID NO: 794399 - DNA, 75 bp, synthetic construct
  source 1..75: mol_type = other DNA
cgggtttaaccccaacattctttacttcagacctgaagagggagaacgactagaagcgatattagccgacgtagc

SEQ ID NO: 794400 - DNA, 75 bp, synthetic construct
  source 1..75: mol_type = other DNA
tccttacacccaatgctggacgacatctctcgcgacacaaacggagttctgatttatcaggaacagatcatggct

SEQ ID NO: 794401 - DNA, 75 bp, synthetic construct
  source 1..75: mol_type = other DNA
tatcaatcttgatgccatttctcttgaagatcgcaaggtgctggatggttttgctgctgggtacactcaaggtgt

SEQ ID NO: 794402 - DNA, 75 bp, synthetic construct
  source 1..75: mol_type = other DNA
ttttcggccttgatgccatccacctggataccttattcaaaaaaccagtcgccagttcaacttcatcccgggtct

SEQ ID NO: 794403 - DNA, 75 bp, synthetic construct
  source 1..75: mol_type = other DNA
gccgggtgatccaaagcattcagttgatgaaatcgctgggcggcgggtatcaggcaggtcccgtcgtcgagaaaa

SEQ ID NO: 794404 - DNA, 75 bp, synthetic construct
  source 1..75: mol_type = other DNA
ttttcggcctggattctatccacctggataccttattcaaaaaaccagtcgccagttcaactttatcccaggtct

SEQ ID NO: 794405 - DNA, 75 bp, synthetic construct
  source 1..75: mol_type = other DNA
cttacatcccggggcatcctgacgctaatgatgggtggataatacctggtgcgtcgtggataccatcacactgga

SEQ ID NO: 794406 - DNA, 75 bp, synthetic construct
  source 1..75: mol_type = other DNA
gggcaactatccggtaactccggatagttggataagctgtagtgagcgaatgccggataccaaaacagccgttct

SEQ ID NO: 794407 - DNA, 75 bp, synthetic construct
  source 1..75: mol_type = other DNA
gatttcgatgattttgacggcgacaggcgaggtatcggtgattgtctggatgaggctgagcaagagcttatcgtt

SEQ ID NO: 794408 - DNA, 75 bp, synthetic construct
  source 1..75: mol_type = other DNA
tcaaccctgagcgtctcgacttgccagatgcggacttggacttcagccaggcacgtcgccatgaggtgatcgagt

SEQ ID NO: 794409 - DNA, 75 bp, synthetic construct
  source 1..75: mol_type = other DNA
tgaggctgagcaagagcttatcgttaccattaacaaatatgccagtcagttggcagcagaaccgatagcgactaa

SEQ ID NO: 794410 - DNA, 75 bp, synthetic construct
  source 1..75: mol_type = other DNA
cggtcgatgctgttgccgctattgcagaggtgagaggctggaacgcctgccgcgcggctatgcttcatgccggaa

SEQ ID NO: 794411 - DNA, 75 bp, synthetic construct
  source 1..75: mol_type = other DNA
tgattaaagaaatcaaagagcgcataagcagcctggacgtgcgagacaatattgagcgtcgggcttatgaaattg

SEQ ID NO: 794412 - DNA, 75 bp, synthetic construct
  source 1..75: mol_type = other DNA
attgcggcatttatctggctattcttttataaagatcccaaagatgcaaaacgtctctcaccagaagaacgtgct

SEQ ID NO: 794413 - DNA, 75 bp, synthetic construct
  source 1..75: mol_type = other DNA
gaatatcatgggggcgctgaatctgaaagcactgacgtcaccgctaatcttcgaatataaaaccattaatgaata

SEQ ID NO: 794414 - DNA, 75 bp, synthetic construct
  source 1..75: mol_type = other DNA
acgcggagaggctggcggaggttatccgtcagaacggcaacgtctggtatccactgaagccaggggacgtgcgtc

SEQ ID NO: 794415 - DNA, 75 bp, synthetic construct
  source 1..75: mol_type = other DNA
tcgaccagccgcatcgtctgcgcatcccccaccagcgagataacgctgttaatggtcgtcgccatctccttgaag

SEQ ID NO: 794416 - DNA, 75 bp, synthetic construct
  source 1..75: mol_type = other DNA
ccgggcgatgaaagtggcgagcgcactaaaaatagagccagtggcgttctatcccgcttattacgaagcggtcga

SEQ ID NO: 794417 - DNA, 75 bp, synthetic construct
  source 1..75: mol_type = other DNA
tgtggttacttcctgatggtgcgcgatctgatgaatcatagtcgtgaaactggcattcccgttgggcctggtcgt

SEQ ID NO: 794418 - DNA, 75 bp, synthetic construct
  source 1..75: mol_type = other DNA
gcatgttggacgactatgtctccgtggccaaaggcttcatggctccacattcaattcatccgcgtcttgaggaag

SEQ ID NO: 794419 - DNA, 75 bp, synthetic construct
  source 1..75: mol_type = other DNA
cgtctgggcttctgtggctacttcctgatggtacgcgatctgatgaatcacagccgtgaaacaggaataccggtt

SEQ ID NO: 794420 - DNA, 75 bp, synthetic construct
  source 1..75: mol_type = other DNA
gcatgttggacgactatgtctccgtggccaaaggcttcatggctccacattccttacacccaatgctggacgaca

SEQ ID NO: 794421 - DNA, 75 bp, synthetic construct
  source 1..75: mol_type = other DNA
ccaaaaggttttcgcgacctgtttgataaactgccgcagtttaagcaggtgttgaacatgccgacaaagcgactg

SEQ ID NO: 794422 - DNA, 75 bp, synthetic construct
  source 1..75: mol_type = other DNA
cgtgacgatcaaaaaacagtacgccggacacgcaaagcgcgtcatgatgggcgtctggtcgttcttacgtcagtt

SEQ ID NO: 794423 - DNA, 75 bp, synthetic construct
  source 1..75: mol_type = other DNA
gatacggtgctggttgaaaatacgcctattgattatctggactttgcctcgcctgtttccgggctgggttcaaaa

SEQ ID NO: 794424 - DNA, 75 bp, synthetic construct
  source 1..75: mol_type = other DNA
agatcgaacagctttctttagttaaaccaacgtatctgcctgaaatccgtgaatttggtatcgcatctaaatcat

SEQ ID NO: 794425 - DNA, 75 bp, synthetic construct
  source 1..75: mol_type = other DNA
aagaagtggtagcaatcgagaaaataaaggctgctttttcagataacgtatctaagcctgacaaacctgtacgtg

SEQ ID NO: 794426 - DNA, 75 bp, synthetic construct
  source 1..75: mol_type = other DNA
taccacccgtatggacccggcgcgggacacggtgttggtcgaaaatacgcctattgattatctggattttgcctc

SEQ ID NO: 794427 - DNA, 75 bp, synthetic construct
  source 1..75: mol_type = other DNA
ggattgaacacgggatatatgggagacttaagtgataagtacaatggcaatgttgctattgttaatgaatccagt

SEQ ID NO: 794428 - DNA, 75 bp, synthetic construct
  source 1..75: mol_type = other DNA
ttcaaaacagagttttttttatgttggaagcagtccgttttcaggtgactcattacctgttactgggatcgatga

SEQ ID NO: 794429 - DNA, 75 bp, synthetic construct
  source 1..75: mol_type = other DNA
gccgactggttgcagcaaagcggcactgatcgggaatggattatcacccataccactggctggcatcatggcgca

SEQ ID NO: 794430 - DNA, 75 bp, synthetic construct
  source 1..75: mol_type = other DNA
ctggctgtcgcatcgcggcggcgcgctggattatcaggagtggtgtgcggcgcatccgggcgaacgtttcccggt

SEQ ID NO: 794431 - DNA, 75 bp, synthetic construct
  source 1..75: mol_type = other DNA
tttatatctgcaaatatcattttcggtagactatttttcagcataaaccctgttaatgcgataaaaggaaagatc

SEQ ID NO: 794432 - DNA, 75 bp, synthetic construct
  source 1..75: mol_type = other DNA
cagtaagaaacaaatatttattaatggtgttccgtttaaaattattggtgtccgattaaactcaaaaacggattt

SEQ ID NO: 794433 - DNA, 75 bp, synthetic construct
  source 1..75: mol_type = other DNA
gctatgttccatttgtacatttttttgttgtgatgactggcaatgcggacttcagtgagttaccggaagaacaac

SEQ ID NO: 794434 - DNA, 75 bp, synthetic construct
  source 1..75: mol_type = other DNA
atgatacgcgttattctgtcccgcagagccaatcataatactgtcttagttacggaacgttgcaataacttgtgt

SEQ ID NO: 794435 - DNA, 75 bp, synthetic construct
  source 1..75: mol_type = other DNA
cttcctgcatattttgcagacttcgttgtgagcactgatcttttcaattccatagaagatggtgatatagggatt

SEQ ID NO: 794436 - DNA, 75 bp, synthetic construct
  source 1..75: mol_type = other DNA
ctaaagacctggatgaagaactggtgaaagctaagatgcttgagcgtatgcgcgatgttattgagactgcaatca

SEQ ID NO: 794437 - DNA, 75 bp, synthetic construct
  source 1..75: mol_type = other DNA
tgatgaatgcactcagaagtcttcctgtgctggttatttcagttcttcaacgggccgttttcatcaaccaccgag

SEQ ID NO: 794438 - DNA, 75 bp, synthetic construct
  source 1..75: mol_type = other DNA
tctttcattttacttcaaaaaagaatgtgcccacggggttctatcggttatgcaaacaaaaaccagtgaaccctt

SEQ ID NO: 794439 - DNA, 75 bp, synthetic construct
  source 1..75: mol_type = other DNA
ttttctccaacatcaatcagatttcccttatggggttggaatctatcggttgggcgcgaaaaaactggtcaacaa

SEQ ID NO: 794440 - DNA, 75 bp, synthetic construct
  source 1..75: mol_type = other DNA
gttaaaattgacactgttgacagttatcagggtaaggaaaaccggatcatcatcctgtcactgacgcgttcggat

SEQ ID NO: 794441 - DNA, 75 bp, synthetic construct
  source 1..75: mol_type = other DNA
cttactctgcagacgttgatcctcttggcgcatttagaagtagtgatgacgttgaagccttgcaggtcgatcagg

SEQ ID NO: 794442 - DNA, 75 bp, synthetic construct
  source 1..75: mol_type = other DNA
aagccctgagggttaatggcttcgaagctaaggatatgattttcgaacatcctaaaaaggtgtatcgggaatact

SEQ ID NO: 794443 - DNA, 75 bp, synthetic construct
  source 1..75: mol_type = other DNA
gaactcatcaaagacgtagtgaaacttgataacaaaatagcccgcgacaaatttgttcgtcgcgagcttggatta

SEQ ID NO: 794444 - DNA, 75 bp, synthetic construct
  source 1..75: mol_type = other DNA
cagcgctgattgtgctgtggctgttgtcccgtgtactggaaaacaactttttgctggcaattgcagggctggcaa

SEQ ID NO: 794445 - DNA, 75 bp, synthetic construct
  source 1..75: mol_type = other DNA
agggttatgcgtgctgtattgtgtaacagtagtgatgatgctggtgttacagcgtcatcctgagcaacgctggcg

SEQ ID NO: 794446 - DNA, 75 bp, synthetic construct
  source 1..75: mol_type = other DNA
ggcatgggatgatgtaccgcctgtttatctgggtaaaaggcaacttgcggaactggaacggttaaacattgttga

SEQ ID NO: 794447 - DNA, 75 bp, synthetic construct
  source 1..75: mol_type = other DNA
gcgcgaatatctggcccgtgagcggcagaatctttctgatggtctggttattgagtttccggtaaagaaaaaaga

SEQ ID NO: 794448 - DNA, 75 bp, synthetic construct
  source 1..75: mol_type = other DNA
gatggttgaacaggcagaggcttttttagcgtcgttcggattcagcagataccttccgtggcccaacaccgacga

SEQ ID NO: 794449 - DNA, 75 bp, synthetic construct
  source 1..75: mol_type = other DNA
aacactggcgcacggtggcaatcagcaccggagaaatggacgttgagacattcctcaaaacggaggggataaaag

SEQ ID NO: 794450 - DNA, 75 bp, synthetic construct
  source 1..75: mol_type = other DNA
aaaggatgcctggacagcaaatcacggggcggcgggtcgtgagtgggttaaatggctggcaggccaccagcagga

SEQ ID NO: 794451 - DNA, 75 bp, synthetic construct
  source 1..75: mol_type = other DNA
ggctgtggctggcgtgaagaccgtatacgaatacgcggggataactgacatcagcccggcggatttatccgacca

SEQ ID NO: 794452 - DNA, 75 bp, synthetic construct
  source 1..75: mol_type = other DNA
ttccagcctgaggcagaagattacccccccctgtgtgaggtgaaaagttgcgggttatgcgggttatcctgtgta

SEQ ID NO: 794453 - DNA, 75 bp, synthetic construct
  source 1..75: mol_type = other DNA
gagcgcggggaaagtctggtgttgcctttaaagaaaaaaattacagaaagccagggcgatgatgaattaaagccc

SEQ ID NO: 794454 - DNA, 75 bp, synthetic construct
  source 1..75: mol_type = other DNA
agaaaaaggcgctgggcaagattggaggtaagcagcatgtattttacgtgttgatgttccagccagaagaggagg

SEQ ID NO: 794455 - DNA, 75 bp, synthetic construct
  source 1..75: mol_type = other DNA
ttgaactgcctgtgaagaaaaaaacgccggaccatgcggaagatgaactgaagccccgcgttgaatgccgcgctg

SEQ ID NO: 794456 - DNA, 75 bp, synthetic construct
  source 1..75: mol_type = other DNA
gttgcgggtacgtcggagggctggcgcgactgcgtggcgcggctggctggtggcaatccgtccatgatgctgggt

SEQ ID NO: 794457 - DNA, 75 bp, synthetic construct
  source 1..75: mol_type = other DNA
acccgtcccactttgcccgcgcgttgagtgctgccggaatgctggaagcgggtaacgatcgccgttacaagaaaa

SEQ ID NO: 794458 - DNA, 75 bp, synthetic construct
  source 1..75: mol_type = other DNA
cagttaagcggaagccatgaggaatggcagttaagcacaacaacgggctggcattttggcgcgtacatcatgccg

SEQ ID NO: 794459 - DNA, 75 bp, synthetic construct
  source 1..75: mol_type = other DNA
ttttctgggtaacacccaaagtggacaagcagacaggcgagataatcagacctgaaacgtggttatgttccccgc

SEQ ID NO: 794460 - DNA, 75 bp, synthetic construct
  source 1..75: mol_type = other DNA
atgttgaaaatgccagccaactgcatgaagtatggcaaaaaggggctgatgaaaatgccagcacaatacgattaa

SEQ ID NO: 794461 - DNA, 75 bp, synthetic construct
  source 1..75: mol_type = other DNA
caaagtggataagcagtcaggcgaaattatccggcctgagacgtggttatgttctccgcttgaactactgggaac

SEQ ID NO: 794462 - DNA, 75 bp, synthetic construct
  source 1..75: mol_type = other DNA
tggctttggtgtgcattttttcgaaaactccacagcaggtaagaccacaacacaaagcgtggcatcgagtttatg

SEQ ID NO: 794463 - DNA, 75 bp, synthetic construct
  source 1..75: mol_type = other DNA
actggatcgagagcgaaggtaaaagggcatgggatgatgtaccgcctgtttatctgggtaaaaggcaacttgcgg

SEQ ID NO: 794464 - DNA, 75 bp, synthetic construct
  source 1..75: mol_type = other DNA
ttgctgcggaataggagacactgacggctggcgattactgaaagccaacgggcttaaagtcacgacaaacggaaa

SEQ ID NO: 794465 - DNA, 75 bp, synthetic construct
  source 1..75: mol_type = other DNA
gcagttatggaatgtgcaatgctgctttctgaacatattactggatgggactcattagcgtgtcgagatgcgtta

SEQ ID NO: 794466 - DNA, 75 bp, synthetic construct
  source 1..75: mol_type = other DNA
gaactgatgaccttcacggaggacagccgtcttccctgtccggtggaggtgtacagtcaccgcgatctgacccac

SEQ ID NO: 794467 - DNA, 75 bp, synthetic construct
  source 1..75: mol_type = other DNA
ggtgtggcggtatcgctatctgcaccattaatcgggctggtgggtgctgacggcttcggggttcatctttttgag

SEQ ID NO: 794468 - DNA, 75 bp, synthetic construct
  source 1..75: mol_type = other DNA
aatggcagctaagcactacaacgggctggcattttggtgcgtacatcatgccggatggttcggtcattggtgaat

SEQ ID NO: 794469 - DNA, 75 bp, synthetic construct
  source 1..75: mol_type = other DNA
ttgctgcggaataggcgacagtgacggctggcggttactgaaagccaacgggcttaaagtcacgacaaacggaaa

SEQ ID NO: 794470 - DNA, 75 bp, synthetic construct
  source 1..75: mol_type = other DNA
cggcctgaaacgtggttatgtgcttcggttgaattactgggcgctggtgtcattggtaacgagcattaccgcgtg

SEQ ID NO: 794471 - DNA, 75 bp, synthetic construct
  source 1..75: mol_type = other DNA
gcacaggaaaggcgcacgcagacgcgttaaaggatgcctggacagcaaatcacggggcggcaggtcgtgagtgga

SEQ ID NO: 794472 - DNA, 75 bp, synthetic construct
  source 1..75: mol_type = other DNA
acatcaattcattctattttctcgaaagtcgataaggtctttactaaccaataccctgagtacaaatcgcccttg

SEQ ID NO: 794473 - DNA, 75 bp, synthetic construct
  source 1..75: mol_type = other DNA
cttttggcttcgcgtttacacacccgtttacagctttgccgggagaattatcgaacgcttacatcaaacaaattt

SEQ ID NO: 794474 - DNA, 75 bp, synthetic construct
  source 1..75: mol_type = other DNA
gcatgaaggatatgagcatacagtcaacacgcatatcaaccgtcttcgtgccaaaattgaacaggatgcagcaga

SEQ ID NO: 794475 - DNA, 75 bp, synthetic construct
  source 1..75: mol_type = other DNA
gattgatgacattatgagtgtgcggtatcctgaatataaaacagatgaattcaatgatgccattgaaagcatctc

SEQ ID NO: 794476 - DNA, 75 bp, synthetic construct
  source 1..75: mol_type = other DNA
atcgtgaaaaacttcaaaaaactaaggccgactcactccaggctgtcatggatttttctatcgttggattgatgg

SEQ ID NO: 794477 - DNA, 75 bp, synthetic construct
  source 1..75: mol_type = other DNA
gaaagccctttatcctataatgcagtacatttgattttctctgaggtagataaggttttttcacttaactatcct

SEQ ID NO: 794478 - DNA, 75 bp, synthetic construct
  source 1..75: mol_type = other DNA
ccctgtcgtctgggatcgtaaacgtgcagagcagctttttgattttagctaccggctggaatgctacacgccggc

SEQ ID NO: 794479 - DNA, 75 bp, synthetic construct
  source 1..75: mol_type = other DNA
gtgcactatgcggatgccattcgttataatgctcgaatgcctctgcaaggttctttgctgccgttaacccgtctg

SEQ ID NO: 794480 - DNA, 75 bp, synthetic construct
  source 1..75: mol_type = other DNA
actgggtattccgcgaggttatcccttcaatccgcaaaacgggggggttatggtgttccgtttgccatgctgaat

SEQ ID NO: 794481 - DNA, 75 bp, synthetic construct
  source 1..75: mol_type = other DNA
taactggcagcggcaagactcaccctgaagccagcaaaaaggctaatttcacggcaagtgaaaatgatatttcag

SEQ ID NO: 794482 - DNA, 75 bp, synthetic construct
  source 1..75: mol_type = other DNA
cgacgcgggtgacattagggcgctgtccacaaggtctctttaccgattgccgtacaggctgggaaatagccccct

SEQ ID NO: 794483 - DNA, 75 bp, synthetic construct
  source 1..75: mol_type = other DNA
atcgtagcgcgtagtccctatctggtgcttttcagccgtctggggcgttatcccccgcagtggttggatgagtcg

SEQ ID NO: 794484 - DNA, 75 bp, synthetic construct
  source 1..75: mol_type = other DNA
taagtgaaggggtgaatgttggaaagaagaacataatcgaagcgatatttaatatatccatcggtaatgatgaat

SEQ ID NO: 794485 - DNA, 75 bp, synthetic construct
  source 1..75: mol_type = other DNA
acaggtaagtaaatctgtaaaagtaactttcataactcaattctcaggtgacagaatccatgatctgataaaaaa

SEQ ID NO: 794486 - DNA, 75 bp, synthetic construct
  source 1..75: mol_type = other DNA
ggtatcgtgatggtaatgatattgccggaagtctgaaaaccaagtttgaagaatacgtattggcagaagctaatg

SEQ ID NO: 794487 - DNA, 75 bp, synthetic construct
  source 1..75: mol_type = other DNA
gctataagaacttagtttatcgtcttacagccgtagatgcattcaatgaagatcttgttaaaggtattgatgcat

SEQ ID NO: 794488 - DNA, 75 bp, synthetic construct
  source 1..75: mol_type = other DNA
cgcgtatccgtgacttccgtggcttgtccgctaagtctttcgacggtcgtggtaactacagcatgggtgtccgtg

SEQ ID NO: 794489 - DNA, 75 bp, synthetic construct
  source 1..75: mol_type = other DNA
tatgttgtcaaaacaacagacggtgattacttaaactttatcattgaaacaaaaaatgtagatggtaaagatagt

SEQ ID NO: 794490 - DNA, 75 bp, synthetic construct
  source 1..75: mol_type = other DNA
atccattttcaagtcattcatgctcgaagaaacagaaagatttactaaatcaggcgttcatactcgcattgataa

SEQ ID NO: 794491 - DNA, 75 bp, synthetic construct
  source 1..75: mol_type = other DNA
cgagcttcctgaacgggattgaaacatcactcatggttacgttggcactgttgcaaatagtcggtggtgataaac

SEQ ID NO: 794492 - DNA, 75 bp, synthetic construct
  source 1..75: mol_type = other DNA
ttatgaatcaatcagagcagagaaaaaaaatactggttcttacacctcgctttccctaccctgtcattggagggg

SEQ ID NO: 794493 - DNA, 75 bp, synthetic construct
  source 1..75: mol_type = other DNA
aatatatcgattggtaatgaagagtttttttcttcattcgatccttttaaagactggaatccccatgcgctttat

SEQ ID NO: 794494 - DNA, 75 bp, synthetic construct
  source 1..75: mol_type = other DNA
ttgtgatcaactcagggatgattaactcaaagtctttaactgacacttatgatgttggtttgcttgataatcaat

SEQ ID NO: 794495 - DNA, 75 bp, synthetic construct
  source 1..75: mol_type = other DNA
ttactatctgacacttaccgggctggataaagcagcatgtgttagtcttgcaacgttgaatttaggtacttcagc

SEQ ID NO: 794496 - DNA, 75 bp, synthetic construct
  source 1..75: mol_type = other DNA
cctatatattgggcaaagtggttatgatggtttgtctgcagccgttcttaaaaattcctctgcgatacctgataa

SEQ ID NO: 794497 - DNA, 75 bp, synthetic construct
  source 1..75: mol_type = other DNA
gcagataaaagcgtcttcaacggcaccgtcaacctggataatcagtcagtgctgaatatcaatgagatattcaat

SEQ ID NO: 794498 - DNA, 75 bp, synthetic construct
  source 1..75: mol_type = other DNA
ttgattatcaaaaattacaccggcgatattcttaactttgaaacagcgaccgagttactgcacgatagcggcgta

SEQ ID NO: 794499 - DNA, 75 bp, synthetic construct
  source 1..75: mol_type = other DNA
aagacgtactgaacgaacaactggcagggctggcgaaagcgcatccttcgctgacattgcatcaggatccgctgt

SEQ ID NO: 794500 - DNA, 75 bp, synthetic construct
  source 1..75: mol_type = other DNA
gtggcatgaagatcggtggtgtatgccggagggtaatacaccaacgacgcatatattcaagctaccgctcggact

SEQ ID NO: 794501 - DNA, 75 bp, synthetic construct
  source 1..75: mol_type = other DNA
gaaagtgaaaatatcaccgaacgcttttttgtcgtcggtgaaaagcgcgtcagtgccgaggtggtcgcggcacag

SEQ ID NO: 794502 - DNA, 75 bp, synthetic construct
  source 1..75: mol_type = other DNA
cggatttattttccgtaaattatcgcccactttctgaagctgatatagccactacattgcgtaatactacggcgg

SEQ ID NO: 794503 - DNA, 75 bp, synthetic construct
  source 1..75: mol_type = other DNA
acctgccagaagggaaaaatggtgacgatatgcgtcgaacacagcagcgtttagcaatatggatgaatggaatcc

SEQ ID NO: 794504 - DNA, 75 bp, synthetic construct
  source 1..75: mol_type = other DNA
atctgcattaaggcgcatggagttaagagggcaccttaatgaaatatatgacggtgtaattgttaataagaaaga

SEQ ID NO: 794505 - DNA, 75 bp, synthetic construct
  source 1..75: mol_type = other DNA
gcgctatttactacgtcgtcgcactgcaaatttgggaatattttagcttctatggcatgcgcgccctgctcattc

SEQ ID NO: 794506 - DNA, 75 bp, synthetic construct
  source 1..75: mol_type = other DNA
gcgcatctggggaaaatttgctcttggcctcggcctgatgagcgccggattctgcattctgaccttaagcgcccg

SEQ ID NO: 794507 - DNA, 75 bp, synthetic construct
  source 1..75: mol_type = other DNA
ttcatgacggagatgaacccactgatttatattccgtgaagtatcacccgcttactgaatcagaaattgcggcaa

SEQ ID NO: 794508 - DNA, 75 bp, synthetic construct
  source 1..75: mol_type = other DNA
actatgatgtgttgtcggcatggccggtgatcggtcatgggaacaatcagatatcctggcagaagtgcaaactgg

SEQ ID NO: 794509 - DNA, 75 bp, synthetic construct
  source 1..75: mol_type = other DNA
gccgctgtcattgtcccttccttttactcccgggaaccaggtctggcgtggaaatgtggtacgtgactattttga

SEQ ID NO: 794510 - DNA, 75 bp, synthetic construct
  source 1..75: mol_type = other DNA
gcgcagttagtgcaagaagttaaacgctatcttgcaagcccggcggcggtgggggaatatctcgccgaccagctg

SEQ ID NO: 794511 - DNA, 75 bp, synthetic construct
  source 1..75: mol_type = other DNA
aggcaatcgccaatataaaaatctggcacaagggtgaacagcgcgcgccgcataaaccattgttactgctatacg

SEQ ID NO: 794512 - DNA, 75 bp, synthetic construct
  source 1..75: mol_type = other DNA
ctgcgccgcatcatttcacgtctaaatgaaattttccgttgggctgcgacagaagaacttattgagtttaatcct

SEQ ID NO: 794513 - DNA, 75 bp, synthetic construct
  source 1..75: mol_type = other DNA
gtaagcctaaaaaacagaatatgcctgcattacctccttccgaacttccccgcttcctgattgctctaaccaatg

SEQ ID NO: 794514 - DNA, 75 bp, synthetic construct
  source 1..75: mol_type = other DNA
attttgacgggaaaactattgcgttgccgcaggtgcgtaaaaattacccttatgaggggtttgtgggtgagagat

SEQ ID NO: 794515 - DNA, 75 bp, synthetic construct
  source 1..75: mol_type = other DNA
tgcacgcgatgtggcggtcgagttctttacgctgtcgaaaagctacaacatggcgggctggcgtatcggctttat

SEQ ID NO: 794516 - DNA, 75 bp, synthetic construct
  source 1..75: mol_type = other DNA
attccgcggctacgtcgcgccatttcccgctggtatcaggatcgctacgacgttgaaatcgacccggaatcagaa

SEQ ID NO: 794517 - DNA, 75 bp, synthetic construct
  source 1..75: mol_type = other DNA
aatcagatgaagtactggcacagaaaaaaatggatatgacagactcaacggcggaagatgttcatactcctggcg

SEQ ID NO: 794518 - DNA, 75 bp, synthetic construct
  source 1..75: mol_type = other DNA
ggatttaatgctatagatgacggtccggaatataagattaatgaagacccaatggacaaagttgacaaagcatta

SEQ ID NO: 794519 - DNA, 75 bp, synthetic construct
  source 1..75: mol_type = other DNA
gagcgcattcaacgcggtgaacggcacggagggctgggcagttcaactctcacaacgcccgagtggatcaatgat

SEQ ID NO: 794520 - DNA, 75 bp, synthetic construct
  source 1..75: mol_type = other DNA
tcttaaagcaacatctcgaccctattgagcaacgaggagtcctcgaaaccttacggcgaatcatttcccgattaa

SEQ ID NO: 794521 - DNA, 75 bp, synthetic construct
  source 1..75: mol_type = other DNA
cggaatgcgttctattgcaagaacggcagcggaagagtcaggtaagttcaggacagatgcccttgaagcggccct

SEQ ID NO: 794522 - DNA, 75 bp, synthetic construct
  source 1..75: mol_type = other DNA
cagaaagcgattgagtcaattaagcaggctgatgcagctgttaagttggcacacgagaagttttcggcgctggct

SEQ ID NO: 794523 - DNA, 75 bp, synthetic construct
  source 1..75: mol_type = other DNA
tggactgctttttcgcagcggtggagatgcgtgataatcccaccctgcgcgatatccctgttgctattggcggta

SEQ ID NO: 794524 - DNA, 75 bp, synthetic construct
  source 1..75: mol_type = other DNA
gtgaatcgatcattgagcggctttacccggaactggaacgccgcctggcaaaggtaaaacctgatttactgattg

SEQ ID NO: 794525 - DNA, 75 bp, synthetic construct
  source 1..75: mol_type = other DNA
ggaagcgatggggctgcggacctgcggtgatgtacaaaagtgtgatctggtgatactgcttaaacgctttggcaa

SEQ ID NO: 794526 - DNA, 75 bp, synthetic construct
  source 1..75: mol_type = other DNA
cctgcgcctaagtctcatgaaccgtttaaccggcgggaggctgaacgctacctgcctgatatggcaccccacttc

SEQ ID NO: 794527 - DNA, 75 bp, synthetic construct
  source 1..75: mol_type = other DNA
ggcagaaatgtttacctttattgtccgccgcaattgggtcattaaactgcccgacagcgtacctgcttcagtatc

SEQ ID NO: 794528 - DNA, 75 bp, synthetic construct
  source 1..75: mol_type = other DNA
atgataagtttatcaccaccgactatttgcaacagtgcccgtgcgacaaactttctcctgccgaactggggatgg

SEQ ID NO: 794529 - DNA, 75 bp, synthetic construct
  source 1..75: mol_type = other DNA
agaagggcgtccggccgtttctctgaaaaccagcccggcgctggcggaattattgcgtcagcagcacagcgatgt

SEQ ID NO: 794530 - DNA, 75 bp, synthetic construct
  source 1..75: mol_type = other DNA
acagagcgtgcataacgactggaaagcgacgcagatcaaagtggaagatgtgctgtttgcgatggtgaaagaagt

SEQ ID NO: 794531 - DNA, 75 bp, synthetic construct
  source 1..75: mol_type = other DNA
atgaacaagaagattcattccctggccttgttggtcaatctggggatttatggggtagcgcaggcacaagagccg

SEQ ID NO: 794532 - DNA, 75 bp, synthetic construct
  source 1..75: mol_type = other DNA
ccgacatgaataaacccaacggtcagtttgtgattacgccggcagaagttccggcatttttacaaaccttaccgc

SEQ ID NO: 794533 - DNA, 75 bp, synthetic construct
  source 1..75: mol_type = other DNA
acggctcgttgcctgattcgcaaatttattatctggtggatgcgtcttatcagcaggcagtgaatttgctgccgg

SEQ ID NO: 794534 - DNA, 75 bp, synthetic construct
  source 1..75: mol_type = other DNA
aaaaccagcccggcgctggcggaattattgcgtcagcagcacagcgatgtgcgtcccagtcgccacctgaataaa

SEQ ID NO: 794535 - DNA, 75 bp, synthetic construct
  source 1..75: mol_type = other DNA
gctgagcaggcgctgctgacaggacacgctttccaccctgcgcctaagtctcatgaaccgtttaaccggcgggag

SEQ ID NO: 794536 - DNA, 75 bp, synthetic construct
  source 1..75: mol_type = other DNA
acgcgtggaagcaacgcgcttcacccagcgcgctgccgaggccgcctatcagcgcggcttaaccagccgcttaca

SEQ ID NO: 794537 - DNA, 75 bp, synthetic construct
  source 1..75: mol_type = other DNA
tcgcaaacaagccaaaggcgatgagctgacgacagacgagcgtaaacagtttaaatacatgcgagcgcgctacaa

SEQ ID NO: 794538 - DNA, 75 bp, synthetic construct
  source 1..75: mol_type = other DNA
aggcgagcgagcgtttatttgttgcgattgaggaagatgatgttgttgacgcgcaggtcagtttgccgccgacaa

SEQ ID NO: 794539 - DNA, 75 bp, synthetic construct
  source 1..75: mol_type = other DNA
aacggcacgcgtctgcaaacgctcaacgacgagcgagaaatgcaggctgaacgcgcttcacccagcgcgctgccg

SEQ ID NO: 794540 - DNA, 75 bp, synthetic construct
  source 1..75: mol_type = other DNA
tgcgcgcattgattggcgcgggcgccagcgatatgccggagatcaaaccggtggcattaccgcgagtccagaccg

SEQ ID NO: 794541 - DNA, 75 bp, synthetic construct
  source 1..75: mol_type = other DNA
aaagggcaaatcaccgaaacgcgagaatctctgcgtgcattgattggcgcgggagccagcgatatgccggagatc

SEQ ID NO: 794542 - DNA, 75 bp, synthetic construct
  source 1..75: mol_type = other DNA
acgccgcaacgtcttcgtggggattggtttgcgcctggcagaaaacggcggctcttcgatttatcaggctttagc

SEQ ID NO: 794543 - DNA, 75 bp, synthetic construct
  source 1..75: mol_type = other DNA
gagaaaaagcgaagcggcactgctctttaacaatttatcagacaatctgtgtgggcactcgaagatacggattct

SEQ ID NO: 794544 - DNA, 75 bp, synthetic construct
  source 1..75: mol_type = other DNA
gaaagaagtgaagcgtgggatgcgcctggcacgcctggctcaaaccgacggctggcaatgctacaggtccgcttc

SEQ ID NO: 794545 - DNA, 75 bp, synthetic construct
  source 1..75: mol_type = other DNA
cgtaacggtaagaaaaatattgtgtcgtattacggcaacctgttacggatttatttaagctctccggtctggtcg

SEQ ID NO: 794546 - DNA, 75 bp, synthetic construct
  source 1..75: mol_type = other DNA
aggcgagcgagcgtctatttgttgcgattgaagaagatgatgtcgttgatgcacaggtcagtttgccgccgacta

SEQ ID NO: 794547 - DNA, 75 bp, synthetic construct
  source 1..75: mol_type = other DNA
gtattgccgcctggatgccaattgcgatttacctcagtctgttgaccgttggcacgatcattgcgaccttttttg

SEQ ID NO: 794548 - DNA, 75 bp, synthetic construct
  source 1..75: mol_type = other DNA
agacagcccacgttggtttgccgccaaacgtcgctttgttgatgccgaacgcgtgctgctgcgcctgcgcgacac

SEQ ID NO: 794549 - DNA, 75 bp, synthetic construct
  source 1..75: mol_type = other DNA
gctttagtccttactcgataaaatatgatgttgatgcagatgatcaggatatcagcatttcctggaaatctgaga

SEQ ID NO: 794550 - DNA, 75 bp, synthetic construct
  source 1..75: mol_type = other DNA
aatgagcaataaaacaaaaagaaaaaaggcattgcttgtaacagcaaatcagctttcagggcgcgttgactttca

SEQ ID NO: 794551 - DNA, 75 bp, synthetic construct
  source 1..75: mol_type = other DNA
caacaatactacaacaatataaaaaatgttcaggcgttcaatggtattgcgcactcaaaagataatcacaatgct

SEQ ID NO: 794552 - DNA, 75 bp, synthetic construct
  source 1..75: mol_type = other DNA
aggtcgcctgatgatacgggctgataccgaagaatttcatgacacactggtatttgaggtaaccctgaatgatta

SEQ ID NO: 794553 - DNA, 75 bp, synthetic construct
  source 1..75: mol_type = other DNA
gcgaggaaagccagaagcgtttatggattacagccagcacatatgattttggcggaatatctgcccaggtggatt

SEQ ID NO: 794554 - DNA, 75 bp, synthetic construct
  source 1..75: mol_type = other DNA
agaaaatcgcccagctgtttcgctgaaaaccagcccggagctggcggagctgctacgtcagcagcacagcgatgt

SEQ ID NO: 794555 - DNA, 75 bp, synthetic construct
  source 1..75: mol_type = other DNA
ctattaagatcccggtagctggtggatacacttactcacccgattttgcttatgttgtaaaaacagcagaaggtg

SEQ ID NO: 794556 - DNA, 75 bp, synthetic construct
  source 1..75: mol_type = other DNA
acatccaagcttcaagaggtagggcgcggtttgcgtcttcctgtgaatgaatacatgtgtcgagtgaaagaccgc

SEQ ID NO: 794557 - DNA, 75 bp, synthetic construct
  source 1..75: mol_type = other DNA
ataatcctaatgtctttcagatctgtaagctccgttcgagcggtagtaccacatccaagcttcaagaggtagggc

SEQ ID NO: 794558 - DNA, 75 bp, synthetic construct
  source 1..75: mol_type = other DNA
agtgaaaccaggcaaaataaaaaaagcctctgatggaaaaagacgcactaaaatgcgtgttggtaagttcagtga

SEQ ID NO: 794559 - DNA, 75 bp, synthetic construct
  source 1..75: mol_type = other DNA
taatgccaacctcaggttcgttaaatctgacggaaaagaagccacatttgaactgaacgaaaacaacaataaaaa

SEQ ID NO: 794560 - DNA, 75 bp, synthetic construct
  source 1..75: mol_type = other DNA
tttaataaattcagcctcggatataatttgatttcgggttcaattcatcccacaaagttcacaaatgctgatggt

SEQ ID NO: 794561 - DNA, 75 bp, synthetic construct
  source 1..75: mol_type = other DNA
aaggtaaaacctgatttactgattgctcgccagggggtgaaattaaagttcgacgattttcagcaaaccacccag

SEQ ID NO: 794562 - DNA, 75 bp, synthetic construct
  source 1..75: mol_type = other DNA
gccgcgaacgccggggggtgatcagcaccgccaattatcccgcgcgtaaatttggcgtgcgtagcgcaatgccaa

SEQ ID NO: 794563 - DNA, 75 bp, synthetic construct
  source 1..75: mol_type = other DNA
ttaccgctggcaaaaattcccggcgtcggcaaagtctcggcggcaaaactggaagcgatggggctacgaacctgc

SEQ ID NO: 794564 - DNA, 75 bp, synthetic construct
  source 1..75: mol_type = other DNA
ccccgacggtgcccgctttacgctggtgatggagtcccccttctacatcagcttcctgagcgatctgcccatgac

SEQ ID NO: 794565 - DNA, 75 bp, synthetic construct
  source 1..75: mol_type = other DNA
atgcctgacgctaaaaaacaggggcggtcaaacaaggcaatgacgtttttcgtctgcttccttgccgctctggcg

SEQ ID NO: 794566 - DNA, 75 bp, synthetic construct
  source 1..75: mol_type = other DNA
gtactcgccacctttatcgctatcggccttgttgaccgctggggacgtaaaccaacgctgacgctgggtttcctc

SEQ ID NO: 794567 - DNA, 75 bp, synthetic construct
  source 1..75: mol_type = other DNA
tcaccgatagtgtgcattgccacggctccgcgaccctcatcgcccaggaaatccgccagacgattttcaacgagc

SEQ ID NO: 794568 - DNA, 75 bp, synthetic construct
  source 1..75: mol_type = other DNA
ttaccgctggcaaaaattcccggcgtcggcaaagtctcggcggcaaaactggaagcgatggggctgcggacctgc

SEQ ID NO: 794569 - DNA, 75 bp, synthetic construct
  source 1..75: mol_type = other DNA
gggcgcggtgtgcgactggtggggctgcatgtgacgttgcttgatccgcaaatggaaaggcaactggtgctgagg

SEQ ID NO: 794570 - DNA, 75 bp, synthetic construct
  source 1..75: mol_type = other DNA
tcactggatgaggcttatctcgatgtcaccgatagcgtccattgccacggttctgcgaccctcatcgcccaggaa

SEQ ID NO: 794571 - DNA, 75 bp, synthetic construct
  source 1..75: mol_type = other DNA
gatcccctgtttgtgcgggtgcggcaggggttgcagccgaccaacctctccctgaccctggaggaggagctgaag

SEQ ID NO: 794572 - DNA, 75 bp, synthetic construct
  source 1..75: mol_type = other DNA
cgcctgctggctgaaaaaagcccgacgcttcgcgccgacattatgatgcagatgacactgctgattgaagatgat

SEQ ID NO: 794573 - DNA, 75 bp, synthetic construct
  source 1..75: mol_type = other DNA
ttgatttgcttatcaccggtcgcaatttcacgctgaacagcgccgccgaaccggtgctgtgcaacaacagggaaa

SEQ ID NO: 794574 - DNA, 75 bp, synthetic construct
  source 1..75: mol_type = other DNA
atcaatgcaggaaactcagggattaatatcgaacttagagttattccgacactggctaactatacagaattggat

SEQ ID NO: 794575 - DNA, 75 bp, synthetic construct
  source 1..75: mol_type = other DNA
attcactggtgattaatttccagatccctcatttgcatcaacaagtgttgaaagcggcacccattgtcgcccaac

SEQ ID NO: 794576 - DNA, 75 bp, synthetic construct
  source 1..75: mol_type = other DNA
ctggaatctcggattcaaacaacaccactcgctactggtggctatgttctattcgcccacattacgatgaatcaa

SEQ ID NO: 794577 - DNA, 75 bp, synthetic construct
  source 1..75: mol_type = other DNA
acgtatttatcaggatatatcttggatgacgtaactcactggatgccgctaccagaacctccgcaggaggtgaag

SEQ ID NO: 794578 - DNA, 75 bp, synthetic construct
  source 1..75: mol_type = other DNA
aaaccggctctctcaaaaagggcttataaaggcttgagcggtgtaccgggaaaccggtatgcaccgttcttaggg

SEQ ID NO: 794579 - DNA, 75 bp, synthetic construct
  source 1..75: mol_type = other DNA
ggttcagacaggcattgcgaaaaccgattcgaacggagcagggcgctaacggggcgatacgggaactggaaaaat

SEQ ID NO: 794580 - DNA, 75 bp, synthetic construct
  source 1..75: mol_type = other DNA
ggtgagcagcgccgcgcagagcgcccggagcgcgtcgcgggggtggcactggaagctatggctaaccgtgatgct

SEQ ID NO: 794581 - DNA, 75 bp, synthetic construct
  source 1..75: mol_type = other DNA
gcgcggctttgacggcagcaccgtgttttatccgctaacacacaacctgcatcaggacggcattctgcgtaccag

SEQ ID NO: 794582 - DNA, 75 bp, synthetic construct
  source 1..75: mol_type = other DNA
acgggcagttaggccgtatgttacgccaggcgggcgagccgttagggattgctgtctggcctgtcgggctggacg

SEQ ID NO: 794583 - DNA, 75 bp, synthetic construct
  source 1..75: mol_type = other DNA
tcgcgtctgactgcgacgctggaagccttaatcccgctgctgccgccggaatatgccagcggcgtgatttgggcg

SEQ ID NO: 794584 - DNA, 75 bp, synthetic construct
  source 1..75: mol_type = other DNA
tggcaggacaggtacaaggggaatacgtggagttgagcgacggcactttatcgtggttagggaacgccttgttct

SEQ ID NO: 794585 - DNA, 75 bp, synthetic construct
  source 1..75: mol_type = other DNA
taagactgttttgtgtagactggctggcaactatccggtaactccggatggttggataagctgtagtgagcgaat

SEQ ID NO: 794586 - DNA, 75 bp, synthetic construct
  source 1..75: mol_type = other DNA
gattgttaagcgtcgcactggtggctatgacggtcgcggtcaatggcgtttacgcgccaatgaaaccgaacagtt

SEQ ID NO: 794587 - DNA, 75 bp, synthetic construct
  source 1..75: mol_type = other DNA
atgtcgctgggttcaattcctgatgatatccgcgtcccgcttgtctggatcgatatcgacaattcacaggcgctg

SEQ ID NO: 794588 - DNA, 75 bp, synthetic construct
  source 1..75: mol_type = other DNA
acgctatatgttcgagctgaccttgtgaatggcaactctccggtaactccggatagttggataagctgtagtgat

SEQ ID NO: 794589 - DNA, 75 bp, synthetic construct
  source 1..75: mol_type = other DNA
aaaggtgactggcgaatgaaatgggctacttacatcccggggcatcctgacgctaatgatgggtggataattcct

SEQ ID NO: 794590 - DNA, 75 bp, synthetic construct
  source 1..75: mol_type = other DNA
gtgccaaaagcagaaactgtaaaacgcagcagtagcaaactaagctataaattgcagcgcgaactggagcagcta

SEQ ID NO: 794591 - DNA, 75 bp, synthetic construct
  source 1..75: mol_type = other DNA
agctttcacatatttatcaggaaatatcttggatgacgtaacccactggatgccactacctgaaccgccgcagga

SEQ ID NO: 794592 - DNA, 75 bp, synthetic construct
  source 1..75: mol_type = other DNA
acaagttccggtaattccggatggttggatcagctgtagtgagcgaatgccgaaaaagaatcagaacgtacttat

SEQ ID NO: 794593 - DNA, 75 bp, synthetic construct
  source 1..75: mol_type = other DNA
gcgtatatcattcaggactctgacgctcgtagtcgtggagagaaaggcatccttcgctatttcgcaaatatcagc

SEQ ID NO: 794594 - DNA, 75 bp, synthetic construct
  source 1..75: mol_type = other DNA
cggctaaaaaattcgaaccagaggccatagctctgcctgagtggttgccggaaacactctggcatgagtgggttc

SEQ ID NO: 794595 - DNA, 75 bp, synthetic construct
  source 1..75: mol_type = other DNA
atcgccaatgaataccagggcttgttcgcgccgaaaggtgttaggcctgagacgttgctcagacaggttaacacc

SEQ ID NO: 794596 - DNA, 75 bp, synthetic construct
  source 1..75: mol_type = other DNA
ttacaaaaagtgcaatagatcgcatcacttttatggctggttttgctgatgcgttaattcaggttggatggctgg

SEQ ID NO: 794597 - DNA, 75 bp, synthetic construct
  source 1..75: mol_type = other DNA
gtaaatcaactggagacaataaaagaaaaattaggagggattttactgacagaaataaccactcgccatattgcc

SEQ ID NO: 794598 - DNA, 75 bp, synthetic construct
  source 1..75: mol_type = other DNA
atccagaaacacttataaagtcagagtaaatcaactggaaacaataaaagaaaaactgggagggattttacttac

SEQ ID NO: 794599 - DNA, 75 bp, synthetic construct
  source 1..75: mol_type = other DNA
gcgttaattcaggttggatggctggtcgaaaatgacggtgggctttctctacctaactttgaacgtcataacgga

SEQ ID NO: 794600 - DNA, 75 bp, synthetic construct
  source 1..75: mol_type = other DNA
tcttgattttgtaaaagatgtcaaaggttcgccaacgcatcttacttttcatatctaccaaaaaaatgctttctt

SEQ ID NO: 794601 - DNA, 75 bp, synthetic construct
  source 1..75: mol_type = other DNA
atctcaacaacgacatcggcgtgccaatgacgctgctgcgtttaacgccggaatacgattacgcggtcattgagc

SEQ ID NO: 794602 - DNA, 75 bp, synthetic construct
  source 1..75: mol_type = other DNA
ttaccgatattctcaacggcgagctgaaaggggctgatatcgccctggatgctgtaaccaccgacactcgtaaac

SEQ ID NO: 794603 - DNA, 75 bp, synthetic construct
  source 1..75: mol_type = other DNA
cctgaaaggcgaacgtttcgatgcccatgattttgccgaccaggcgaaagctggcggcgcaggcgcactactggt

SEQ ID NO: 794604 - DNA, 75 bp, synthetic construct
  source 1..75: mol_type = other DNA
attgagggatttaataattccagcactagcatcataccagcaggaagcttactaatggctattattggacaagga

SEQ ID NO: 794605 - DNA, 75 bp, synthetic construct
  source 1..75: mol_type = other DNA
aaattttcagatccaatccgcccagcaaacccaactacaccttgcagatgcactcactgacgcggcgataaacta

SEQ ID NO: 794606 - DNA, 75 bp, synthetic construct
  source 1..75: mol_type = other DNA
taatctcagtgtaggtaaaatcagaggaataacaattccattaccaccccttaatcaacagaacttgattttatc

SEQ ID NO: 794607 - DNA, 75 bp, synthetic construct
  source 1..75: mol_type = other DNA
aatgggtaaacttgtgccgcaggatccgaatgacgaaccagcctctgaactgctcaaacgtattgcgcaggaaaa

SEQ ID NO: 794608 - DNA, 75 bp, synthetic construct
  source 1..75: mol_type = other DNA
aaaattaaaattccgcattcaatccgccaaacaaacccaactgcaccttgcagatgcactgactgacgcggcgat

SEQ ID NO: 794609 - DNA, 75 bp, synthetic construct
  source 1..75: mol_type = other DNA
ttcgaaaatattattacctttaccgccattgagtgaacaactaaaaatcgtctcaagggcaaatgaacttatgtc

SEQ ID NO: 794610 - DNA, 75 bp, synthetic construct
  source 1..75: mol_type = other DNA
ttaaactttgatgcttgttttcccgatagtgtagttggctttactccatatgaaaatgaaatacctgttctttat

SEQ ID NO: 794611 - DNA, 75 bp, synthetic construct
  source 1..75: mol_type = other DNA
gatgcagaggcaagtgggactacatttaaagaagtctctggggcaattgtttcgaaaatattattacctttaccg

SEQ ID NO: 794612 - DNA, 75 bp, synthetic construct
  source 1..75: mol_type = other DNA
ggtaaactggtgccgcaggatccaaatgacgaaccagcgtcggagctgcttagaggaatgaaaaagcagcaagaa

SEQ ID NO: 794613 - DNA, 75 bp, synthetic construct
  source 1..75: mol_type = other DNA
tactgctcaacctaaaatgaatcaagcaaaaatgaataccattttaattggcttaccacctgagcatgagcagtt

SEQ ID NO: 794614 - DNA, 75 bp, synthetic construct
  source 1..75: mol_type = other DNA
gcatcagcgcacagattgcccgacaggtggcgcttgaccgcatcatgatcggtttcaacggcacgtctcacgcgg

SEQ ID NO: 794615 - DNA, 75 bp, synthetic construct
  source 1..75: mol_type = other DNA
ccagcgagcgcgttatgaatgatgtaacgctgacctcccgcaacatggacaacaccgtggcgcacgcgggtaaat

SEQ ID NO: 794616 - DNA, 75 bp, synthetic construct
  source 1..75: mol_type = other DNA
atttactggcagaaaggttcaatgcgtcgtctgatgaaagacgagccggaatacaaccgcatcgccacctaccag

SEQ ID NO: 794617 - DNA, 75 bp, synthetic construct
  source 1..75: mol_type = other DNA
gataaactagagcaatcatcttcatcagatacaatgacgccaccaacacacttgttttctgatataggacgaatt

SEQ ID NO: 794618 - DNA, 75 bp, synthetic construct
  source 1..75: mol_type = other DNA
gtatccgctgagtgacgggcggcgggtggatctgcaggactggaaactggtgctgtttatgcagtcgacctgtca

SEQ ID NO: 794619 - DNA, 75 bp, synthetic construct
  source 1..75: mol_type = other DNA
gcgcaccgtcgccgtatcgtggaagagccggaatataaccgcgtctctacctacagttcgtcaaatgatgcctac

SEQ ID NO: 794620 - DNA, 75 bp, synthetic construct
  source 1..75: mol_type = other DNA
tttatgccgcctccgtaactgaaccgaatatgatgttctgggtgatgttgcttaacgcgatggctttcatgccca

SEQ ID NO: 794621 - DNA, 75 bp, synthetic construct
  source 1..75: mol_type = other DNA
attgacggaagcaaacggattgtctactccctgcatcctaaaatgagattattacagagtagaattaataaacgt

SEQ ID NO: 794622 - DNA, 75 bp, synthetic construct
  source 1..75: mol_type = other DNA
tgggataatatatttcttgatgatattaacgaaatgaaatttgaagataacgagctttccgagtttatcctaaaa

SEQ ID NO: 794623 - DNA, 75 bp, synthetic construct
  source 1..75: mol_type = other DNA
gaaaatctgctgactaacctagtgaatcaggcgcaacagggcggtaaagtgatgctcgacagcgtgccagtggac

SEQ ID NO: 794624 - DNA, 75 bp, synthetic construct
  source 1..75: mol_type = other DNA
gcgctaacactcccgaaaattccggtggcagaacataagccgagtactacactttccagtaaattagggctggat

SEQ ID NO: 794625 - DNA, 75 bp, synthetic construct
  source 1..75: mol_type = other DNA
gaatatgatgttctgggtgatgttgcttaacgcgatggctttcatgcccacgattgcgttatccaacagtgtttc

SEQ ID NO: 794626 - DNA, 75 bp, synthetic construct
  source 1..75: mol_type = other DNA
tatgtctctcgcgtttcagatgtgaacatgtttgatgccatttttatggaggcgttggcctggcgtcttgcggca

SEQ ID NO: 794627 - DNA, 75 bp, synthetic construct
  source 1..75: mol_type = other DNA
gccttatccggcctacggttctgtgctcgggtcttgtaggcctgataagacgcgccagcgtcgcatcaggcactg

SEQ ID NO: 794628 - DNA, 75 bp, synthetic construct
  source 1..75: mol_type = other DNA
cggtggcgatgcagtgtgccgccaccgttcacccttcgacatccctcgatgtggcaagggttgagtccggttata

SEQ ID NO: 794629 - DNA, 75 bp, synthetic construct
  source 1..75: mol_type = other DNA
cgtgtatatggtcatgatgaccataaaggcacagggcatggttctttgcctcatataaatattaaacgttctgat

SEQ ID NO: 794630 - DNA, 75 bp, synthetic construct
  source 1..75: mol_type = other DNA
gtggcgtgggataaaacaacgcatgacttccccagcgtgactggcgatacccgctcgttgcgcccgttaggtcaa

SEQ ID NO: 794631 - DNA, 75 bp, synthetic construct
  source 1..75: mol_type = other DNA
cactggtatgcacgccgacgcggtcacgatccgcgggcaatgttgtacaatgcagttcagcatcagtggctcacg

SEQ ID NO: 794632 - DNA, 75 bp, synthetic construct
  source 1..75: mol_type = other DNA
cacattgggcagtaaaaaataaggatttgaatattgttctggaattacttggtttaaacaaaaaaaatagccatc

SEQ ID NO: 794633 - DNA, 75 bp, synthetic construct
  source 1..75: mol_type = other DNA
caatcaggtgattcaggatggcggcgggctgtgcgtggtacgtaacggccaggtacaaagtcatctaccgttgcc

SEQ ID NO: 794634 - DNA, 75 bp, synthetic construct
  source 1..75: mol_type = other DNA
agactggcacaatccgctccgccatatggcaacaccattgcccgccagcgactttgccctgcaatttacgcccgg

SEQ ID NO: 794635 - DNA, 75 bp, synthetic construct
  source 1..75: mol_type = other DNA
ccggcaatttcagtaccgggcaacagcaggaacccgctttttcaaagacgagttatgtacagcggattggttact

SEQ ID NO: 794636 - DNA, 75 bp, synthetic construct
  source 1..75: mol_type = other DNA
accatcgtcagacgtgcgctgccagtgactcgcctgaaaaagacgaaaacagggcgcatctggacgtatgtccgg

SEQ ID NO: 794637 - DNA, 75 bp, synthetic construct
  source 1..75: mol_type = other DNA
cgccttacggtggaaaagcagcgcatcgaaatgcaggaagtcctgctgcaaattgatggcgatatcatcgaagcc

SEQ ID NO: 794638 - DNA, 75 bp, synthetic construct
  source 1..75: mol_type = other DNA
taaatattgaaggaaataaaaaactcagatctcctcaaattgaggcatatataaaaataaaagaattcttcagtg

SEQ ID NO: 794639 - DNA, 75 bp, synthetic construct
  source 1..75: mol_type = other DNA
acagcccctgtcggtgagcgtaatttaaaagaggaaattaaacgcgtcgaaaaacgcatcattatggaagtgctg

SEQ ID NO: 794640 - DNA, 75 bp, synthetic construct
  source 1..75: mol_type = other DNA
catgatcgtattcgtaaagctaacggaccatcggccatttttgccggatcttacggctggcgctcttctggcgtg

SEQ ID NO: 794641 - DNA, 75 bp, synthetic construct
  source 1..75: mol_type = other DNA
tctttggcgataatgccacctggatcgcaccgaatatgggcaccgatgttagggattgcgcataccctgatgaca

SEQ ID NO: 794642 - DNA, 75 bp, synthetic construct
  source 1..75: mol_type = other DNA
cttaccgggctacgccgccgtccatcccgtgcaacacagcgcgcgggaacaagtcaacgcccaggtgctgaatgc

SEQ ID NO: 794643 - DNA, 75 bp, synthetic construct
  source 1..75: mol_type = other DNA
tggtcgggcgcgatcagccggtgatgattgtttaccagagcgcggggatcaccgcctcgatgcccggcgtggcgc

SEQ ID NO: 794644 - DNA, 75 bp, synthetic construct
  source 1..75: mol_type = other DNA
caattggtttaagcagtaagcacgcgttgcaaccgggcagaccaatcaccaaagaagagctggtttcgccagtgc

SEQ ID NO: 794645 - DNA, 75 bp, synthetic construct
  source 1..75: mol_type = other DNA
ttttcatgatcctattgagcttgagttagaagatgttatagaggctgaaattaatcaatctttagtaaacccatt

SEQ ID NO: 794646 - DNA, 75 bp, synthetic construct
  source 1..75: mol_type = other DNA
gttttacatgtcacaggaaccccttatcgtggtgatgctcaagaaatcccgggagaaataattcatgaaacacca

SEQ ID NO: 794647 - DNA, 75 bp, synthetic construct
  source 1..75: mol_type = other DNA
tggtataaagacagaggcatgacttctgtaatagtacatagtgaaatggaacaaagtgaattagctgatgcgtta

SEQ ID NO: 794648 - DNA, 75 bp, synthetic construct
  source 1..75: mol_type = other DNA
gtattcagcatccgatggtgagaaaaagctatctcgataatccactgcaaccggcgaaaggtcgaggcgaagggt

SEQ ID NO: 794649 - DNA, 75 bp, synthetic construct
  source 1..75: mol_type = other DNA
ccagcaccacacgctgcaatctcgatgaactgcgcatcatccgggaatacatgcacgaacagggatttccgcgca

SEQ ID NO: 794650 - DNA, 75 bp, synthetic construct
  source 1..75: mol_type = other DNA
tacaggggagcttatgtatgactataagtcattcgtatttcctttttttacattagatgaatctaaatcaaagga

SEQ ID NO: 794651 - DNA, 75 bp, synthetic construct
  source 1..75: mol_type = other DNA
gccacgaaagttatcagttggaagaaggacgccggaaattgcaactcggcatgtcattgatgatccgtgaagggt

SEQ ID NO: 794652 - DNA, 75 bp, synthetic construct
  source 1..75: mol_type = other DNA
aaaaataaaatcattaatttggctgcggtcatttttaattgtcaatacagataaaaaccaagtgttgacgcagaa

SEQ ID NO: 794653 - DNA, 75 bp, synthetic construct
  source 1..75: mol_type = other DNA
ttgaaaaactggaagacagctacttccggcaaaaagaacagcaaccggtcacaatcccccaaacattaccagaag

SEQ ID NO: 794654 - DNA, 75 bp, synthetic construct
  source 1..75: mol_type = other DNA
gataaccttggtgattggagttacgtatatcatcgagagccagatgattttgagcgcaaacatttagtgatagag

SEQ ID NO: 794655 - DNA, 75 bp, synthetic construct
  source 1..75: mol_type = other DNA
gctagcccttttacttctaatcctgaactgttattgttagatgccccctataaagggaaaacaagtgttataaaa

SEQ ID NO: 794656 - DNA, 75 bp, synthetic construct
  source 1..75: mol_type = other DNA
taggtaagggggcttctggtaacgtagtttacgtaaatggagccgctgaagcagaatctacttccaagctaatat

SEQ ID NO: 794657 - DNA, 75 bp, synthetic construct
  source 1..75: mol_type = other DNA
atgaatatgaaaaaacatacgatattcgctgtcaccgaaaaatataaccgtgaaggcggtaaagcgcgcgtcgag

SEQ ID NO: 794658 - DNA, 75 bp, synthetic construct
  source 1..75: mol_type = other DNA
attttaatttattcaaagcacggtgagtatatggcaggacaggtgcaaggggaatacgtggagttgagcgacggc

SEQ ID NO: 794659 - DNA, 75 bp, synthetic construct
  source 1..75: mol_type = other DNA
tgctgacaatcaagcagtggcgcgaaacatacggacctggcagcaacgttgtactgccagcagaagaagcggaag

SEQ ID NO: 794660 - DNA, 75 bp, synthetic construct
  source 1..75: mol_type = other DNA
ggatgatggtcagcacgtaattattttatgtgatggcgcattcgttctttatgcgcaatatcgagacggtgagtt

SEQ ID NO: 794661 - DNA, 75 bp, synthetic construct
  source 1..75: mol_type = other DNA
ggaaaaattattgcgcgtgattgagtacggtgaactggagcgcgtaggcggtagtcagccattgcaggtgaatgt

SEQ ID NO: 794662 - DNA, 75 bp, synthetic construct
  source 1..75: mol_type = other DNA
gcaccgctggacaaaccggtgctcatcatcggcgaacgcggcaccggtaaagagctgatcgccagccgcctgcat

SEQ ID NO: 794663 - DNA, 75 bp, synthetic construct
  source 1..75: mol_type = other DNA
cagaagcgcgcggctgaattactggggttaacctatcatcagttccgcgcgttgttgaaaaagcaccagatttag

SEQ ID NO: 794664 - DNA, 75 bp, synthetic construct
  source 1..75: mol_type = other DNA
tcctcaagtgtttattgaatcgttcagcttctgatatcgcgtatgattatcatatagtaagttttaaagatggtg

SEQ ID NO: 794665 - DNA, 75 bp, synthetic construct
  source 1..75: mol_type = other DNA
gttgattacgcactcccgctccagcgtctacagcgaaaatggttttgatcgcgatgatgtgtgctttattgccgt

SEQ ID NO: 794666 - DNA, 75 bp, synthetic construct
  source 1..75: mol_type = other DNA
atggcaataccattgcccgccagcctgtttccgccagcgactttgccctgcaattcacgcccggaaaacgctatc

SEQ ID NO: 794667 - DNA, 75 bp, synthetic construct
  source 1..75: mol_type = other DNA
atttcctggacagataattacataaatatcaattatcaatgcaaccgggaaatgcatccacaagaacgggataaa

SEQ ID NO: 794668 - DNA, 75 bp, synthetic construct
  source 1..75: mol_type = other DNA
tatattgctgcgggtattgaaaactgccacgaaagttatctgctggaagaaggtcgccggaagttacaactcggc

SEQ ID NO: 794669 - DNA, 75 bp, synthetic construct
  source 1..75: mol_type = other DNA
tactggcaccaggcaaacaggccgatatcgttctgctaagtgacgcgcgtaaggtcacagtacagcaggtactgg

SEQ ID NO: 794670 - DNA, 75 bp, synthetic construct
  source 1..75: mol_type = other DNA
aaggtcacggtgcagcaggtactggtgaaaggcgaaccgattgacgcgcaaaccttgcaagcacaagagtcggcg

SEQ ID NO: 794671 - DNA, 75 bp, synthetic construct
  source 1..75: mol_type = other DNA
atgcggcgtgaacgccttatccgaacgacgtccgacaaacaaatttcgtgcgaattaccgctaaaatcgcgtttt

SEQ ID NO: 794672 - DNA, 75 bp, synthetic construct
  source 1..75: mol_type = other DNA
agtcaagaatatttaatggactatcttgcttatatatcttcaaaaaaaagcatttggatattattatctactcac

SEQ ID NO: 794673 - DNA, 75 bp, synthetic construct
  source 1..75: mol_type = other DNA
tataaatataataggaaatatcatcggaagagcctataaaaaaatagatatttacgaagttgaaggtgcattagc

SEQ ID NO: 794674 - DNA, 75 bp, synthetic construct
  source 1..75: mol_type = other DNA
gaatgcgcaaagataattgaacaatggttagctaaggcacaaacaaataccgaatatgcagaattcattaagtat

SEQ ID NO: 794675 - DNA, 75 bp, synthetic construct
  source 1..75: mol_type = other DNA
gagcagcatcgccggattcacagaaatgtacgcagaatcagacggttgggcttcactcaatggcttgaaccgcaa

SEQ ID NO: 794676 - DNA, 75 bp, synthetic construct
  source 1..75: mol_type = other DNA
tcacctatcaaaaagcctgctatgtgtacacatacggcgcttatgatgagacattgtatgaagtgcaccacgtta

SEQ ID NO: 794677 - DNA, 75 bp, synthetic construct
  source 1..75: mol_type = other DNA
tgggagcgtggcttttagctacgctttttgttttcctggcgttcatggctgttatcgttgttattatgctggggg

SEQ ID NO: 794678 - DNA, 75 bp, synthetic construct
  source 1..75: mol_type = other DNA
ttttcaacgttacacatcccgagtgaaaataacatccatgaaaacaacattatccccatcaaaaaaggagcccgt

SEQ ID NO: 794679 - DNA, 75 bp, synthetic construct
  source 1..75: mol_type = other DNA
ctggcgcttgccggtgcgacccctgtttatgctgccctgggcgctgaagtttatttgggcgccgtggatcgagcg

SEQ ID NO: 794680 - DNA, 75 bp, synthetic construct
  source 1..75: mol_type = other DNA
atgagcaccgaccttaaattttcactggtaacaaccattatcgttcttggtttgatcgtggccgtgggtttgact

SEQ ID NO: 794681 - DNA, 75 bp, synthetic construct
  source 1..75: mol_type = other DNA
ctatcaacatcaccgagttaagaaagaacccggcgaaatatttcattgatgagccggttgccgttctctccaaca

SEQ ID NO: 794682 - DNA, 75 bp, synthetic construct
  source 1..75: mol_type = other DNA
tgaatttaacgacattgaaagcattctttttactgtacgcgctttattggctggtagcgcattcatcggtttttg

SEQ ID NO: 794683 - DNA, 75 bp, synthetic construct
  source 1..75: mol_type = other DNA
agcataaaaaaatggagccaaaatcaactcaaagaccaatatgatgggagtgaaaaattagacttcgggggcgtt

SEQ ID NO: 794684 - DNA, 75 bp, synthetic construct
  source 1..75: mol_type = other DNA
gtgtctactgatattgttataaaatctaaatgcaaaaacgctagtgtagttataccattaaagataactacaaga

SEQ ID NO: 794685 - DNA, 75 bp, synthetic construct
  source 1..75: mol_type = other DNA
ttatggctatcagggtctataaaacctgtatgagtagtaaggccgaaagaatgcaaatgttatatcatactcata

SEQ ID NO: 794686 - DNA, 75 bp, synthetic construct
  source 1..75: mol_type = other DNA
gccgaaacaatttttatgctgttcttcatagtactatggcagggactgtttatatggttgttctctcaaatacga

SEQ ID NO: 794687 - DNA, 75 bp, synthetic construct
  source 1..75: mol_type = other DNA
tttgaagtcgaagtcgaagtcgttaacaccctggtagttaaagggaagttaaacgtcacggacagcgtatcggtc

SEQ ID NO: 794688 - DNA, 75 bp, synthetic construct
  source 1..75: mol_type = other DNA
gatttgaccgacataataccggtcaaatctatgggtgatttcttatttgatatttactctttctttagattgcaa

SEQ ID NO: 794689 - DNA, 75 bp, synthetic construct
  source 1..75: mol_type = other DNA
tccatggacagccagatgctcaatgggcatgggatatccatgcaacttcaggggattgatattgccgaaaagcca

SEQ ID NO: 794690 - DNA, 75 bp, synthetic construct
  source 1..75: mol_type = other DNA
cattgcgggcaatgaatatcgcgtttggcattttgtttgtcaccgtctttttctacgccgtgtcgttcacgctgg

SEQ ID NO: 794691 - DNA, 75 bp, synthetic construct
  source 1..75: mol_type = other DNA
agcaaaatggggctgtggatgcagcgaaatttaccttcaccccgccgcaaggcgtcacggtagatgatcaacgta

SEQ ID NO: 794692 - DNA, 75 bp, synthetic construct
  source 1..75: mol_type = other DNA
gatgaaagcattctggtttctgacggtaaaacactgtggttctataacccgttcgttgagcaagctacggcaacc

SEQ ID NO: 794693 - DNA, 75 bp, synthetic construct
  source 1..75: mol_type = other DNA
aacgcaagggatcgtaattggactatcctgcgtcgcaagatgcctgccgagaagattaacgaaaatctcgttcag

SEQ ID NO: 794694 - DNA, 75 bp, synthetic construct
  source 1..75: mol_type = other DNA
ctgctggtgaaaaacgccattattacgctgccgtttaccctgacgtcgattctgtttatccagacgttaagcccg

SEQ ID NO: 794695 - DNA, 75 bp, synthetic construct
  source 1..75: mol_type = other DNA
atggaaattgcaacagataaaggcgttattaaagacgcttcgaccccggcgggtcgtgctggaatgagtgagcgt

SEQ ID NO: 794696 - DNA, 75 bp, synthetic construct
  source 1..75: mol_type = other DNA
atgttcgttgacagacagcggatcgatctgcttaaccggctaatcgacgcaagagttgacctcgccgcatatgtg

SEQ ID NO: 794697 - DNA, 75 bp, synthetic construct
  source 1..75: mol_type = other DNA
atgttcgttgacagacagcgaagcgatctgcttaatcggttgaacgatgctcgagttgacctcgccgcatatgtg

SEQ ID NO: 794698 - DNA, 75 bp, synthetic construct
  source 1..75: mol_type = other DNA
attacacgccgagctgaaaaatatcttaatgatatgacggatgatgatttcaatgacttggtaatgctgccaact

SEQ ID NO: 794699 - DNA, 75 bp, synthetic construct
  source 1..75: mol_type = other DNA
gttttctggaagctgaggaaatggccgggatgactattaatgggaatgagatcccaacttgggccgcccgaaggg

SEQ ID NO: 794700 - DNA, 75 bp, synthetic construct
  source 1..75: mol_type = other DNA
acgcagaagttccggaagagatgaagcgtaaatggcagcgcgcattaggggaatacctggaaaaacgtcagagcc

SEQ ID NO: 794701 - DNA, 75 bp, synthetic construct
  source 1..75: mol_type = other DNA
gtataaaccctgatgtttttgaacaatttcttaccctcctgaatacacactgtaaatcatcagaaactgcacttg

SEQ ID NO: 794702 - DNA, 75 bp, synthetic construct
  source 1..75: mol_type = other DNA
ggatcttaaatcattaggggaagttataaaatcaatggcaacaaataaaggtaaaggtaaaggtaatggcaaaaa

SEQ ID NO: 794703 - DNA, 75 bp, synthetic construct
  source 1..75: mol_type = other DNA
cactacctttcaccgcgtcattcctggctttatgattcagggcggcggtttcaccgagcagatgcagcagaaaaa

SEQ ID NO: 794704 - DNA, 75 bp, synthetic construct
  source 1..75: mol_type = other DNA
atgtgaacagtggtttttataacaacacgacctttcaccgcgtcattcctggctttatgattcagggcggcggtt

SEQ ID NO: 794705 - DNA, 75 bp, synthetic construct
  source 1..75: mol_type = other DNA
catgtggtggtggatgcggacagcaccggcaacagtggccggctgacattcgggacttaccgcaagtccacgggg

SEQ ID NO: 794706 - DNA, 75 bp, synthetic construct
  source 1..75: mol_type = other DNA
ccagcgaggttttagcaaaatggatttgggatcaggttaaaccggttgttccgctgttaagtgcggtgatggtga

SEQ ID NO: 794707 - DNA, 75 bp, synthetic construct
  source 1..75: mol_type = other DNA
cctttatggtgcgactggaaattaccggggaagtcgatccgcatacgggctggattatcgatttcgctgaactga

SEQ ID NO: 794708 - DNA, 75 bp, synthetic construct
  source 1..75: mol_type = other DNA
ctgtactggcaaaatcccgggaagaagagacgacccggccaaccctgaaagaactggcagcgaagctgtccggag

SEQ ID NO: 794709 - DNA, 75 bp, synthetic construct
  source 1..75: mol_type = other DNA
ttgcgaaatacgatattgttgttttgggctgcggcgttcggtgttcattcatcttgtttggcagccgttcagaaa

SEQ ID NO: 794710 - DNA, 75 bp, synthetic construct
  source 1..75: mol_type = other DNA
taaggcagggcaggtcgccaccctggattttggtaacccgggacagctggatgcagggggcgtggtcacccgcgg

SEQ ID NO: 794711 - DNA, 75 bp, synthetic construct
  source 1..75: mol_type = other DNA
cttccagacgctgctggtcagtcgtgcactggagaaattaggttataccgtcaataaacccagcgaagtggatta

SEQ ID NO: 794712 - DNA, 75 bp, synthetic construct
  source 1..75: mol_type = other DNA
caccctggattttggcaacccgggacagctggacgcagggggcgtggtcacccgcggtgccggtgatggtattcg

SEQ ID NO: 794713 - DNA, 75 bp, synthetic construct
  source 1..75: mol_type = other DNA
cgtggatgtgcgggcagtagatacacaggctgattatcgcggacgtctgacacagggcaaccattttgtgaatta

SEQ ID NO: 794714 - DNA, 75 bp, synthetic construct
  source 1..75: mol_type = other DNA
ttctgcttctgaccgggagttgggaggttcaatcagctgttcagaggacaatttttaatgctgatgtagttgcat

SEQ ID NO: 794715 - DNA, 75 bp, synthetic construct
  source 1..75: mol_type = other DNA
atacgctaaccactctgcgcccttcaccactggcgaagggaaacccgcagcacactaatctggtcgagatcgaaa

SEQ ID NO: 794716 - DNA, 75 bp, synthetic construct
  source 1..75: mol_type = other DNA
tctggcaggaagggttgtttgccctgccgcagcattttcagcaacagcagcggaaccaggagtatttgctgaacc

SEQ ID NO: 794717 - DNA, 75 bp, synthetic construct
  source 1..75: mol_type = other DNA
tgatacacgagaatatgaactatggcgtccggcccatcgctttttctccattattctattagtttgcattcattc

SEQ ID NO: 794718 - DNA, 75 bp, synthetic construct
  source 1..75: mol_type = other DNA
cggttgtggttgcggtattactgtttcacaggttgtggggtcagtccccgccccggaagagtcttacaggtagct

SEQ ID NO: 794719 - DNA, 75 bp, synthetic construct
  source 1..75: mol_type = other DNA
aacgcgttgccagtcgggttattggtgcaattattggtgtattcgcgctacgcctgatttacgaaggggtgacgc

SEQ ID NO: 794720 - DNA, 75 bp, synthetic construct
  source 1..75: mol_type = other DNA
gcaatggttacttgtgctgtcgttgcgggtctgccagcgcttgctgtttggttctgggatctcggcggcaactaa

SEQ ID NO: 794721 - DNA, 75 bp, synthetic construct
  source 1..75: mol_type = other DNA
gatctcaaccgcgcagaccgccatttactctctgcttggcgcaggtgcggcggtatatcttttgattaaaggctt

SEQ ID NO: 794722 - DNA, 75 bp, synthetic construct
  source 1..75: mol_type = other DNA
gcaacgccaaaatcggcatcatcaccaacggctttagcgccttgcaacaggtgcgtctggaacgcacgggcctgc

SEQ ID NO: 794723 - DNA, 75 bp, synthetic construct
  source 1..75: mol_type = other DNA
tgcgggtatttaacaataatggagaaatgctgattgccgcaaaagtgactccgcgtattctgcctggcgttaccg

SEQ ID NO: 794724 - DNA, 75 bp, synthetic construct
  source 1..75: mol_type = other DNA
tgtggatcaaccctatagatgcacagaaacgtgggattgccaacggcgatatggtgcgggtgtttaaccatcgtg

SEQ ID NO: 794725 - DNA, 75 bp, synthetic construct
  source 1..75: mol_type = other DNA
cagatggtggggcgtcagctaccgtttatgaccattatcgtgctgttctggatcatggcgattatggacggctgg

SEQ ID NO: 794726 - DNA, 75 bp, synthetic construct
  source 1..75: mol_type = other DNA
aagaatggggtggaaaatgaactccaaaacggctttgatttacaataatcgttatattagcgaagaaactttaaa

SEQ ID NO: 794727 - DNA, 75 bp, synthetic construct
  source 1..75: mol_type = other DNA
gtggcatcaacgccgggcttgcgacctgctggctgaatgcgcacaatcgcgagcaaccagaaggcatcgcgccca

SEQ ID NO: 794728 - DNA, 75 bp, synthetic construct
  source 1..75: mol_type = other DNA
aaaaatatccgtgacggttatttagactacaataactgtgattatatctcagcgattgactacgaaaaatcccgt

SEQ ID NO: 794729 - DNA, 75 bp, synthetic construct
  source 1..75: mol_type = other DNA
atattagaaatggaaaagcagcttgcacatgctcaagtgcaatctgatgagctatcttttgcccagcaacatatc

SEQ ID NO: 794730 - DNA, 75 bp, synthetic construct
  source 1..75: mol_type = other DNA
gacatcagcccggaaattattgcaattgccatcggttcaggtgcgattggctgcacgatcgttacggactcgctt

SEQ ID NO: 794731 - DNA, 75 bp, synthetic construct
  source 1..75: mol_type = other DNA
aatcagatttcatttgatatcagaggatatctccgagaaatacatttccttatgtctaaactatgggtttacttc

SEQ ID NO: 794732 - DNA, 75 bp, synthetic construct
  source 1..75: mol_type = other DNA
ttttatttttaggacttcaatccgcccagcaaacccaactacacgttgcagacgcactcactgacgcggcgataa

SEQ ID NO: 794733 - DNA, 75 bp, synthetic construct
  source 1..75: mol_type = other DNA
ggaaacttaaataaaggaattgtctcatttgatgaatgcaagtatgttcctatagattattatgaacgcttagat

SEQ ID NO: 794734 - DNA, 75 bp, synthetic construct
  source 1..75: mol_type = other DNA
actacagtgaagaggtcaggctggaggtcgaccagcttccattgagtatgcgtgcccgataccagcatcttgttg

SEQ ID NO: 794735 - DNA, 75 bp, synthetic construct
  source 1..75: mol_type = other DNA
gtgacgaggttgaagctgagatcctttctcttcctgagaccttacaagcccggtacattcggtacacggagaaaa

SEQ ID NO: 794736 - DNA, 75 bp, synthetic construct
  source 1..75: mol_type = other DNA
aaggaactggatgctcgggaaatatcgctcccggaacgtagcagcatgcttcatcgaacagattatcacgatgat

SEQ ID NO: 794737 - DNA, 75 bp, synthetic construct
  source 1..75: mol_type = other DNA
acctgagaacgacgatgaggacgggcatgacattgattatcttgagccatctgaagtttactcgcttgggcgaac

SEQ ID NO: 794738 - DNA, 75 bp, synthetic construct
  source 1..75: mol_type = other DNA
gttgaacgtatgaagatatatggcagcaatctcggagaacctcacaccagcgcctttggtgacggacttttcgaa

SEQ ID NO: 794739 - DNA, 75 bp, synthetic construct
  source 1..75: mol_type = other DNA
tgaatgcatataacgattttgttatgttgatacctatgaactacactatcgaatactacagtgaagatgtaaggc

SEQ ID NO: 794740 - DNA, 75 bp, synthetic construct
  source 1..75: mol_type = other DNA
tcgctgttaccactagcggtctatataatctcagtgtaggtaaaatcagaggaataacaattccattaccacccc

SEQ ID NO: 794741 - DNA, 75 bp, synthetic construct
  source 1..75: mol_type = other DNA
ataatccagttatagtttttggtgatcacacaaggaatattaaatttattgattttgattttgttgtcggcgctg

SEQ ID NO: 794742 - DNA, 75 bp, synthetic construct
  source 1..75: mol_type = other DNA
gagtttataaatggcgatcgtggaagtaattaccccaataaaaatgagtatgtttctcaaggtattccttggatc

SEQ ID NO: 794743 - DNA, 75 bp, synthetic construct
  source 1..75: mol_type = other DNA
ctccaattagacgaaaacaaatatataaataatggtgatttaatatacgcttggtccgcatcttttgggccattc

SEQ ID NO: 794744 - DNA, 75 bp, synthetic construct
  source 1..75: mol_type = other DNA
ccagcctctgaactgctcaaacgaattgcgcaggaaaaagctcaactggtgaaagaaggaaaaataaaaaaacaa

SEQ ID NO: 794745 - DNA, 75 bp, synthetic construct
  source 1..75: mol_type = other DNA
ggtgaatcacaaatgactggttctgctggtcagaaacgtgttccaaggtttttttttgaaaataatcctattccc

SEQ ID NO: 794746 - DNA, 75 bp, synthetic construct
  source 1..75: mol_type = other DNA
tgcaatggtcttatttcttatattgggatttatcataaaacccaactgcatcttgcagacgcactcactgacgca

SEQ ID NO: 794747 - DNA, 75 bp, synthetic construct
  source 1..75: mol_type = other DNA
cagaggaataacaattccattaccacctcttaatcaacagaacttgattttatcaagaattagagaatatatttt

SEQ ID NO: 794748 - DNA, 75 bp, synthetic construct
  source 1..75: mol_type = other DNA
atgcctttaaaagtgagtggtttacctctgtcggttttcgtttttttcgggatgctaaaatttctcatggagtta

SEQ ID NO: 794749 - DNA, 75 bp, synthetic construct
  source 1..75: mol_type = other DNA
tctcttgtttattgatccctattccgccagaaaatgagcaagaaaaaataacaaataaaattgaagaattatata

SEQ ID NO: 794750 - DNA, 75 bp, synthetic construct
  source 1..75: mol_type = other DNA
gcagctttctggctgtaccttcaacgtggaagaagaagtcgcgtttgggccagaaaatctgtgtcttgctgaagc

SEQ ID NO: 794751 - DNA, 75 bp, synthetic construct
  source 1..75: mol_type = other DNA
cgtcatcacacacctttcctgaaccactgccagcaagcgtggcaattgcaaaacggagcgctccagccactatgt

SEQ ID NO: 794752 - DNA, 75 bp, synthetic construct
  source 1..75: mol_type = other DNA
caggaataccatttgtcaacgcaggtcatcttgaaaacggaaatatacgacaagaagacatgacattcattacac

SEQ ID NO: 794753 - DNA, 75 bp, synthetic construct
  source 1..75: mol_type = other DNA
gcggccagatatttgcccaataaccggacgtgcatttttcatgtggattgagcatccaacattggggaatgtgcc

SEQ ID NO: 794754 - DNA, 75 bp, synthetic construct
  source 1..75: mol_type = other DNA
atgcggtgtgggaagaggaacaggtgaagtttattgaagataacgccacggcgtgtgacagctcgccgcttaatc

SEQ ID NO: 794755 - DNA, 75 bp, synthetic construct
  source 1..75: mol_type = other DNA
tttgacaccctgttgcaactggcaggaagtacactttcaagtgacagtgtcacaaaacaggtgaacagtgaggag

SEQ ID NO: 794756 - DNA, 75 bp, synthetic construct
  source 1..75: mol_type = other DNA
gcgttatttgacgccctgttgcaactggcaggaagccctctgtcaagtgacagtgtcacaaaacagattcgcagt

SEQ ID NO: 794757 - DNA, 75 bp, synthetic construct
  source 1..75: mol_type = other DNA
gcagccaatccggctaccgtcttggcgctgctggatgagctggaaagaaaacagcaatacatcaaacgccgtgac

SEQ ID NO: 794758 - DNA, 75 bp, synthetic construct
  source 1..75: mol_type = other DNA
cgatgcttacggatttcacccgcaacctgcttaacgcgccgctgctggataaacaggccgaatggtgcgaagtgt

SEQ ID NO: 794759 - DNA, 75 bp, synthetic construct
  source 1..75: mol_type = other DNA
tgttgatggagtatccggacgagctgttgtgggaatgtaaggaggacgcgctggcgttgatccgccgcgacgcac

SEQ ID NO: 794760 - DNA, 75 bp, synthetic construct
  source 1..75: mol_type = other DNA
tactgctgcatcagtgatcagcggcatcgccgaaggttgcctgcaatcgggctgttcgctggtggggggcgaaac

SEQ ID NO: 794761 - DNA, 75 bp, synthetic construct
  source 1..75: mol_type = other DNA
gggcggcttcggtgcgttgtgtgcgctgccgcaaaaatatcgcgaacccgtgttggtttccggcactgacggcgt

SEQ ID NO: 794762 - DNA, 75 bp, synthetic construct
  source 1..75: mol_type = other DNA
aacgcaagggatcgtaattgaactatcctgcgtcgcaagatacctgccgagaagattaacgaaaatctcgttcag

SEQ ID NO: 794763 - DNA, 75 bp, synthetic construct
  source 1..75: mol_type = other DNA
gctgcaacagctggcggttgggtactgacgaaccgctatcactggaaggcgctcaggtggcatcaccggcgttca

SEQ ID NO: 794764 - DNA, 75 bp, synthetic construct
  source 1..75: mol_type = other DNA
tgccgacgtatggtggcccattagacagttacaccattccaacaaaggacggtgacggtgagttttcatgtgagc

SEQ ID NO: 794765 - DNA, 75 bp, synthetic construct
  source 1..75: mol_type = other DNA
aaaagcgagcggtcaatcgctttatgctgctgttgtctacactatattctcttgacgcccaggcgtttgccgaag

SEQ ID NO: 794766 - DNA, 75 bp, synthetic construct
  source 1..75: mol_type = other DNA
atgcagatcctcaaagtgatcggcctgttgatggagtacccggacgagctgttgtgggagtgtaaggacgacgcg

SEQ ID NO: 794767 - DNA, 75 bp, synthetic construct
  source 1..75: mol_type = other DNA
actggaggcccgtacccggatgcataacgcttccacactagccggtatcgccttcagccaggcaggactgggaat

SEQ ID NO: 794768 - DNA, 75 bp, synthetic construct
  source 1..75: mol_type = other DNA
tacaccattccaacaaaggacggtgacggtgagttttcatgtgagcattacgatcatgattttggcggttgggta

SEQ ID NO: 794769 - DNA, 75 bp, synthetic construct
  source 1..75: mol_type = other DNA
tttgcccaataaccggacgtgcatttttcatgtggattgagcatccgaaattgggaaatgtaccgacgtatggtg

SEQ ID NO: 794770 - DNA, 75 bp, synthetic construct
  source 1..75: mol_type = other DNA
agttgagcttgaggaagtaaaacaacacgctgaagaattatccgaaaccaaggctgttcgtaaccaatggcggcc

SEQ ID NO: 794771 - DNA, 75 bp, synthetic construct
  source 1..75: mol_type = other DNA
gtaaccaatggcggccagatatttgcccaataaccggacgtgcatttttcatgtggattgagcatccaacattgg

SEQ ID NO: 794772 - DNA, 75 bp, synthetic construct
  source 1..75: mol_type = other DNA
ggcgctggatgcggcaaaagcgattgtctggttcagtcgccagtctggcatagaaattgaaacctgtgttgccat

SEQ ID NO: 794773 - DNA, 75 bp, synthetic construct
  source 1..75: mol_type = other DNA
atgcgtttttaccggcctttggggcgcatctcggcgctcacctttgacctggatgacaccctttacgataaccgt

SEQ ID NO: 794774 - DNA, 75 bp, synthetic construct
  source 1..75: mol_type = other DNA
aactcacgacaccttaaaacagctggcgaagaaatggccgctggtggcgatcactaacggcaatgcacagccgga

SEQ ID NO: 794775 - DNA, 75 bp, synthetic construct
  source 1..75: mol_type = other DNA
acgggcgctcaaaaccgttcagcgatatgtactttctggctgcggaaaaactcaacgtgccgatcggcgagatct

SEQ ID NO: 794776 - DNA, 75 bp, synthetic construct
  source 1..75: mol_type = other DNA
cggttgggaagctgcgtgttgagcttgaggaagtaaaacaacacgctgaagaattatccgaaaccaaggctgttc

SEQ ID NO: 794777 - DNA, 75 bp, synthetic construct
  source 1..75: mol_type = other DNA
cggaaaatagcgacctgatgcaaacctgggacagtcgtttactgccgcatatagaaatttcccggttggcatctc

SEQ ID NO: 794778 - DNA, 75 bp, synthetic construct
  source 1..75: mol_type = other DNA
acgggcgctcgaaaccgttcagcgatatgtactttctggcggcagaaaaactcaatgtgccgatcggcgagatct

SEQ ID NO: 794779 - DNA, 75 bp, synthetic construct
  source 1..75: mol_type = other DNA
ctggcatacaaccgggccatccgcgacgaggccagagaaaagtttcctgcaaacgttgactgcaaaacgtcccac

SEQ ID NO: 794780 - DNA, 75 bp, synthetic construct
  source 1..75: mol_type = other DNA
agctcgggatgccgaatctgtctcgtcggtacaccaccattctttttgatgaggcccaagacgccaaccccgtca

SEQ ID NO: 794781 - DNA, 75 bp, synthetic construct
  source 1..75: mol_type = other DNA
cgtgtaaaaaacaagaagctgcttgatgaatatgaagactactttgagtatcaagaagtagcgaaggccaccaaa

SEQ ID NO: 794782 - DNA, 75 bp, synthetic construct
  source 1..75: mol_type = other DNA
caagggcaaggttgaacgcatggtcgaatacctcaaatacaacttcttcgtccgttacacgcagttcgacagctt

SEQ ID NO: 794783 - DNA, 75 bp, synthetic construct
  source 1..75: mol_type = other DNA
ggtaccgcaggttcgacagcttcactcatgttaatcaacaactggagcaatggatagccgatgtggctgacaaac

SEQ ID NO: 794784 - DNA, 75 bp, synthetic construct
  source 1..75: mol_type = other DNA
ggtgaaacggcaacgttcatttatgttgggcgtatgaaattcgagggccagaagcgggttaaagacctccttgat

SEQ ID NO: 794785 - DNA, 75 bp, synthetic construct
  source 1..75: mol_type = other DNA
aatggcaagcagatttgtttgccgaggtggttttgcgcgaattaggattttatatggatcaactatcatttgact

SEQ ID NO: 794786 - DNA, 75 bp, synthetic construct
  source 1..75: mol_type = other DNA
accgcaagcaaccgtgaaaacggaaccgaagccggtagcacagacgccgaagcgtactgaaccagctgctcctgt

SEQ ID NO: 794787 - DNA, 75 bp, synthetic construct
  source 1..75: mol_type = other DNA
gcatattgcgccacttcaggatgctgtagatctggaaatcgcaacggaggaagaaacctcattgctggaagcctg

SEQ ID NO: 794788 - DNA, 75 bp, synthetic construct
  source 1..75: mol_type = other DNA
gaaaaagtatcgggtgttgctgaaccgtattgatacatcaactgcacctgatattgagtggcctacgaaccctgt

SEQ ID NO: 794789 - DNA, 75 bp, synthetic construct
  source 1..75: mol_type = other DNA
agcagggtgcgtatattgttgatattgccactcaggttggttgctctgagcgaactgtcagacggtacctgaaat

SEQ ID NO: 794790 - DNA, 75 bp, synthetic construct
  source 1..75: mol_type = other DNA
aacaattgctgcgtaccggactgccgacacgtaaacatgaaaactggaaatatacgccgctggaagggctgacca

SEQ ID NO: 794791 - DNA, 75 bp, synthetic construct
  source 1..75: mol_type = other DNA
aatacctcaaggagaacttcttcgtccggtaccgcaggttcgacagcttcactcatgttggagcaatggatagcc

SEQ ID NO: 794792 - DNA, 75 bp, synthetic construct
  source 1..75: mol_type = other DNA
atcgttacagcgttcccgaagcgctgtgtggtcagccggtatcgatacgaatatcgctggatgacgagttgcgga

SEQ ID NO: 794793 - DNA, 75 bp, synthetic construct
  source 1..75: mol_type = other DNA
atggagatgaaattattttttccgatgctcactttcccgcccattcgatggggaccgcaggtgatccgcgctgat

SEQ ID NO: 794794 - DNA, 75 bp, synthetic construct
  source 1..75: mol_type = other DNA
gcgcggttgaccatcaacgtggcggcgaacgctcatttgcagcatatcaagctggcgtttgaaaacccggtcagt

SEQ ID NO: 794795 - DNA, 75 bp, synthetic construct
  source 1..75: mol_type = other DNA
gacgcgtaaacatgagcactggaaatatacgccgctggaagggctgaccaatagccagtttgtcagcattgcggg

SEQ ID NO: 794796 - DNA, 75 bp, synthetic construct
  source 1..75: mol_type = other DNA
acttcgacatccgccatgtgtcctgggacagccatatcgaggttggtggtaatcgttacagcgttcccgaagcgc

SEQ ID NO: 794797 - DNA, 75 bp, synthetic construct
  source 1..75: mol_type = other DNA
attacatcgacatgcgcctggcagagaatgtctggaatagcgaggttatcttcgcggagattaaggcaatgggct

SEQ ID NO: 794798 - DNA, 75 bp, synthetic construct
  source 1..75: mol_type = other DNA
tcgacaggcgagaacttcgccagttcaggcagacaccggaacagcgcttcacggggtttgagatccaaccgtacg

SEQ ID NO: 794799 - DNA, 75 bp, synthetic construct
  source 1..75: mol_type = other DNA
cagagaatgtctggaatagcgaggttatcttcgcggagattaaggcaatgggttatacgggcggacgttccatgc

SEQ ID NO: 794800 - DNA, 75 bp, synthetic construct
  source 1..75: mol_type = other DNA
gctggcagaccgtgccggagcatcacgccccgctctggcagcaggtcagtcaggtggaacatcggccactgagaa

SEQ ID NO: 794801 - DNA, 75 bp, synthetic construct
  source 1..75: mol_type = other DNA
ctgagcatacctacgaatcactggttcgcgccttccgctacttcggtggttgtgtgaaaacggtgctggttgata

SEQ ID NO: 794802 - DNA, 75 bp, synthetic construct
  source 1..75: mol_type = other DNA
ggatgccgtagatttggatattgcaacggaggaagaggcatcgttactggctgcatggaagacataccgggtatt

SEQ ID NO: 794803 - DNA, 75 bp, synthetic construct
  source 1..75: mol_type = other DNA
cggtttcaatggcgaagaaaacctcgttcgtggtcgtggtagtgattgcgctactgactatttacggcgcgttgg

SEQ ID NO: 794804 - DNA, 75 bp, synthetic construct
  source 1..75: mol_type = other DNA
cacatattgcaatttttattctcttttaaaatatattccacgggcgtcattagtgcgagcgccttgtggggtctt

SEQ ID NO: 794805 - DNA, 75 bp, synthetic construct
  source 1..75: mol_type = other DNA
ttattgaatagcgaatcaatacagattaattcaatacttgaaatgaatagcaatcgagaactgctcggtatgttt

SEQ ID NO: 794806 - DNA, 75 bp, synthetic construct
  source 1..75: mol_type = other DNA
aacctctgaaaaaagcgctgttcagggagacagtatgacaatgatggatatgagcggacacgatcaggctgcaat

SEQ ID NO: 794807 - DNA, 75 bp, synthetic construct
  source 1..75: mol_type = other DNA
tgttaatttttgagcgtctgtttaagttaggcgagtactggcagcttgatcatcgtgttgaggcgttttttcggc

SEQ ID NO: 794808 - DNA, 75 bp, synthetic construct
  source 1..75: mol_type = other DNA
cagtttcaatggcgaagaaaacctcgtttgtggtcgtggtagtgattgcgctactgacgatttacgggacattgg

SEQ ID NO: 794809 - DNA, 75 bp, synthetic construct
  source 1..75: mol_type = other DNA
cgcagaacgctttcattgagcgttttaacaggacataccgtacagaaatactcgatttttatctgttcagaacgc

SEQ ID NO: 794810 - DNA, 75 bp, synthetic construct
  source 1..75: mol_type = other DNA
gccgaccacatctatccgcagcagacagacactgccattgttttcgtatgttccccgatcaagaaagtcatcaat

SEQ ID NO: 794811 - DNA, 75 bp, synthetic construct
  source 1..75: mol_type = other DNA
tacaactacaacactacatgggcatggtatcagtgcaacttctctgatatgcagcagacctgcacatcatctgga

SEQ ID NO: 794812 - DNA, 75 bp, synthetic construct
  source 1..75: mol_type = other DNA
tgcttcatggagaggagcaatttgtctcagccgatgccggctactgtcaacgacggatgaaaagtgatccactta

SEQ ID NO: 794813 - DNA, 75 bp, synthetic construct
  source 1..75: mol_type = other DNA
cattgagcgctttaaccggacataccgaacagaaatactcgatttttatctgttcagaacgctgaatgaagtacg

SEQ ID NO: 794814 - DNA, 75 bp, synthetic construct
  source 1..75: mol_type = other DNA
gataaagcactggagaaacaaggcaccatgcaggtgttgcgccaaggcttttccattgccggttgcggcctgatc

SEQ ID NO: 794815 - DNA, 75 bp, synthetic construct
  source 1..75: mol_type = other DNA
tacggatatcagagttttagcctttgttgcacttggagcaggatttgtcgtgtctcttatcatccctgttgcggc

SEQ ID NO: 794816 - DNA, 75 bp, synthetic construct
  source 1..75: mol_type = other DNA
gtttgataattactaccttgctattaatgcgttaaaacatggagatggtgcaagttacaggcaacttgtaaccaa

SEQ ID NO: 794817 - DNA, 75 bp, synthetic construct
  source 1..75: mol_type = other DNA
gtacaacgccccgttgccattacgattgtagtggtggtgatgctgatcgcactaaccgcgctggtcggcgtactg

SEQ ID NO: 794818 - DNA, 75 bp, synthetic construct
  source 1..75: mol_type = other DNA
gtatcgatacgaatatcgctggatgacgagttacggctctacagtaatgagaaactggtggcctcacatcgcctc

SEQ ID NO: 794819 - DNA, 75 bp, synthetic construct
  source 1..75: mol_type = other DNA
cgaaagaccctaaccaaccagtgtcagatgacaatcttcctgaatcgttccacctctacacccaacgtcaggcca

SEQ ID NO: 794820 - DNA, 75 bp, synthetic construct
  source 1..75: mol_type = other DNA
tccacgggcaggatttgcgctttgcctttgaccgcccggaataccgagtgatgttggtggccgacaagttccaga

SEQ ID NO: 794821 - DNA, 75 bp, synthetic construct
  source 1..75: mol_type = other DNA
gttggccggaaccaatgaatttattggtgaaggtgatgcatatattccacctcatacagggctgccagcttattc

SEQ ID NO: 794822 - DNA, 75 bp, synthetic construct
  source 1..75: mol_type = other DNA
ccggctggtttcgtggctgttttcaacagtgaagaggagtcatggcatctcgttgaagatcatcggggtaaaacg

SEQ ID NO: 794823 - DNA, 75 bp, synthetic construct
  source 1..75: mol_type = other DNA
gcgccacttcaggatgccgtagatttggatattgcaacggaggaagaggcatcgttactggctgcatggaagaca

SEQ ID NO: 794824 - DNA, 75 bp, synthetic construct
  source 1..75: mol_type = other DNA
atggcgatttttcagtcaaccaaaagactgctttttacaaaattggaacgagattttgaaaatgtaatgataatc

SEQ ID NO: 794825 - DNA, 75 bp, synthetic construct
  source 1..75: mol_type = other DNA
aaaaccatacctactctcatccccagaggctaaaagaattacgaactttgttactcaagacaacaatctatattt

SEQ ID NO: 794826 - DNA, 75 bp, synthetic construct
  source 1..75: mol_type = other DNA
tgtgctgatttcatggtctacattatttcaattaggctggggaaatgcctcatggaaaggaacatgtctggatga

SEQ ID NO: 794827 - DNA, 75 bp, synthetic construct
  source 1..75: mol_type = other DNA
cctggcgcgataccgaaccgctacgccgcaccagccgtgaacattacccacaagcgttccgtatgacacaaaaag

SEQ ID NO: 794828 - DNA, 75 bp, synthetic construct
  source 1..75: mol_type = other DNA
aacagattgaagtgatggcgaaatcgccggtgaaagatgtctggacggtctaccagtgccagcattgcctttata

SEQ ID NO: 794829 - DNA, 75 bp, synthetic construct
  source 1..75: mol_type = other DNA
gcgttccgccagtccggcgacaactggcggcacccaaacgcccgtcggggccaacgccaattgagttgctgaaac

SEQ ID NO: 794830 - DNA, 75 bp, synthetic construct
  source 1..75: mol_type = other DNA
atacgggaagcggaagagaaaaaggcaaggttgatccaggaagcaacagataacatcgcaattctgcaggatgca

SEQ ID NO: 794831 - DNA, 75 bp, synthetic construct
  source 1..75: mol_type = other DNA
caatttctttgcggcacgatgacgagggagagaagaataaacttaatccaacaatggctgatgaagaacaggctt

SEQ ID NO: 794832 - DNA, 75 bp, synthetic construct
  source 1..75: mol_type = other DNA
atgggagttgagcagaataatttcaggcacatgctgaccggttatctgtccggcccgccgcagacgcagcatatg

SEQ ID NO: 794833 - DNA, 75 bp, synthetic construct
  source 1..75: mol_type = other DNA
ttttgtgtatccccggcggcccgggtcgcgcacacgggtctggcaggcgaagaacggctgaaagccttcccgctg

SEQ ID NO: 794834 - DNA, 75 bp, synthetic construct
  source 1..75: mol_type = other DNA
aaaatcatgagtaaaactcgcgatggcgattatcaattctcaagtgtaaacagtgatcacaggcccatcacctta

SEQ ID NO: 794835 - DNA, 75 bp, synthetic construct
  source 1..75: mol_type = other DNA
cccaattggtatggcttgcgaaggtgatatgttccgcgccactgcgggcgtaaacacgcataaaggcagcatttt

SEQ ID NO: 794836 - DNA, 75 bp, synthetic construct
  source 1..75: mol_type = other DNA
cggcccgccgcagacgcagcatgtgtttggtgtattcccggcggtccgggtcacgtacgcgggtctggcaggcga

SEQ ID NO: 794837 - DNA, 75 bp, synthetic construct
  source 1..75: mol_type = other DNA
agaatggctggaagccttcccgctgcagactttccagcacggtgatggtggggatgtacgtatagttctggcttc

SEQ ID NO: 794838 - DNA, 75 bp, synthetic construct
  source 1..75: mol_type = other DNA
tggagtatgtggctggtattctgaagcagtcacgccatctggatgacatcgaggcaagggagtggctgaaaagtt

SEQ ID NO: 794839 - DNA, 75 bp, synthetic construct
  source 1..75: mol_type = other DNA
ctctgattttgaaaaatgtcaggcatatggtagggaactaaatattgatgatcgaattatctggcatggctggca

SEQ ID NO: 794840 - DNA, 75 bp, synthetic construct
  source 1..75: mol_type = other DNA
tatgctgataggcaatataatcaataaacctgaagaggctaaagcgttaatcaaggccactgaaaatggtcgcag

SEQ ID NO: 794841 - DNA, 75 bp, synthetic construct
  source 1..75: mol_type = other DNA
ttcgtgtgaaaggagacagcatgtggcctagaataaaatcaggagaatatgtactcattgagcctaacaccaaag

SEQ ID NO: 794842 - DNA, 75 bp, synthetic construct
  source 1..75: mol_type = other DNA
aacataggggataaactagcaagaaaatttgaagccgcacttgggttacctaatgggtggcttgatttggtacat

SEQ ID NO: 794843 - DNA, 75 bp, synthetic construct
  source 1..75: mol_type = other DNA
aagaattcgcccagcggctagcgcaagcctgtaaagaagctggtcttgatgaacatggtagggggatggccatag

SEQ ID NO: 794844 - DNA, 75 bp, synthetic construct
  source 1..75: mol_type = other DNA
gcaggaccaaaacgtcctgcgggaccaacgccaattgagttgctgaaacaggagtatgaacgccggaaagcggct

SEQ ID NO: 794845 - DNA, 75 bp, synthetic construct
  source 1..75: mol_type = other DNA
agaaacctcattgctggaagcctggaaaaagtatcgggtgttgctaaaccgtgtggacacttccgtagcaccaga

SEQ ID NO: 794846 - DNA, 75 bp, synthetic construct
  source 1..75: mol_type = other DNA
tcactgtatgttattggcgtttcctgcacctacgatgtttttgaccaacagtttgctaatttctttacttcgttt

SEQ ID NO: 794847 - DNA, 75 bp, synthetic construct
  source 1..75: mol_type = other DNA
gttaccggaaaatgtcacctggttgtcgccggatggggaatatcagaagtggaacggcacaacctgggtgaaaga

SEQ ID NO: 794848 - DNA, 75 bp, synthetic construct
  source 1..75: mol_type = other DNA
tgcagaagcagaaaaactgtttcgggtaagggaggcagaagaaacaaaaaacagcctgatgcaggtagccagtga

SEQ ID NO: 794849 - DNA, 75 bp, synthetic construct
  source 1..75: mol_type = other DNA
cagtaatgagaaactggtggcctcacatcgcctctgttcagcatcgtctggctggcagacagtgccggagcatca

SEQ ID NO: 794850 - DNA, 75 bp, synthetic construct
  source 1..75: mol_type = other DNA
acgtcgcgcgaagcatattcatgctttaagcaaatggcttcagaattatcagccagatgttgttatttgtattga

SEQ ID NO: 794851 - DNA, 75 bp, synthetic construct
  source 1..75: mol_type = other DNA
taagtacccgtggtctcagcctgtgctgtatcacatttgcctcgagatgcgttcaaaggggattgagcggcagat

SEQ ID NO: 794852 - DNA, 75 bp, synthetic construct
  source 1..75: mol_type = other DNA
agaagtatcgggtgttgctgagccgtgttaatacaacaactgcaccggatattgaatggccaacagtacccatta

SEQ ID NO: 794853 - DNA, 75 bp, synthetic construct
  source 1..75: mol_type = other DNA
gccaacccatttggtctgactgtggatgccgtgatggaagaataccgccgctggcgcaatgagtcatggcgatac

SEQ ID NO: 794854 - DNA, 75 bp, synthetic construct
  source 1..75: mol_type = other DNA
cgttcaaaggggattgagcgccagatgaccgaaggggagttaaaacggcttgtggaaaggcagctgacgaaatgg

SEQ ID NO: 794855 - DNA, 75 bp, synthetic construct
  source 1..75: mol_type = other DNA
cgaagctctggattgcacagattggcgcgatgactgagcagcaaatccggcaggtctgccgccagtgcatggact

SEQ ID NO: 794856 - DNA, 75 bp, synthetic construct
  source 1..75: mol_type = other DNA
aaaaagtatcgggtattgctgaaccgtgttgatacgtcaactgcacaggatattgaatggccagcactgccgtag

SEQ ID NO: 794857 - DNA, 75 bp, synthetic construct
  source 1..75: mol_type = other DNA
tataatctgctggccggaaccagtgaatttattggtgaaggtgatgcatacattccgcctcataccggtctgcct

SEQ ID NO: 794858 - DNA, 75 bp, synthetic construct
  source 1..75: mol_type = other DNA
gcaaccaaatgggttgctgacgttaccaaatccattaccgcagtgaccagagagatgcgtacgctggggaaggta

SEQ ID NO: 794859 - DNA, 75 bp, synthetic construct
  source 1..75: mol_type = other DNA
gcgacaaagtgggtcaccgatgtcactaaatcaatcagcattgtgacgaaggatatgcgcacactcggcaaggtc

SEQ ID NO: 794860 - DNA, 75 bp, synthetic construct
  source 1..75: mol_type = other DNA
tttgtgattcatcaaactaccggtggcaagtatacccgtgatggttttaactctcgttggcgtgatgtcaaagcg

SEQ ID NO: 794861 - DNA, 75 bp, synthetic construct
  source 1..75: mol_type = other DNA
tgaatccatcttcttccatgacacagcacagcgagctgaaagtcacgttcgagaatgctccgccaggtatgaaga

SEQ ID NO: 794862 - DNA, 75 bp, synthetic construct
  source 1..75: mol_type = other DNA
cccgctcatgagggcctccctggacggcctgagagacaacggggaacccgtcgagctgaaaagcccgagtgcgac

SEQ ID NO: 794863 - DNA, 75 bp, synthetic construct
  source 1..75: mol_type = other DNA
cggatatgcagaaagacgcccgtggggccatgctgcacgtactggattctctggcgaaagtgccgaaagaaaaac

SEQ ID NO: 794864 - DNA, 75 bp, synthetic construct
  source 1..75: mol_type = other DNA
aacctatgacttcgaacgtctgatggatggcgctaaactgctgaaatgttcagagtttggtgacgcgatcatcga

SEQ ID NO: 794865 - DNA, 75 bp, synthetic construct
  source 1..75: mol_type = other DNA
aacctatgacttcgaacgtctgatggaaggcgctaacctgctgaaatgttcagagtttggtgatgcgatcatcga

SEQ ID NO: 794866 - DNA, 75 bp, synthetic construct
  source 1..75: mol_type = other DNA
cttcgagcgtctgatggaaggcgctaatctgctgaaatgttcagagtttggtgacgcgatcatcaagaacatgta

SEQ ID NO: 794867 - DNA, 75 bp, synthetic construct
  source 1..75: mol_type = other DNA
acatggccagtccggcatcgccgctggtattacgctggttgcgggaacaacatggaggagcaacaattcgatgcc

SEQ ID NO: 794868 - DNA, 75 bp, synthetic construct
  source 1..75: mol_type = other DNA
aacctatgacttcgaacgtctgatggacggcgctaaactgctgaaatgttcagagtttggtgatgcgatcatcga

SEQ ID NO: 794869 - DNA, 75 bp, synthetic construct
  source 1..75: mol_type = other DNA
aacctatgacttcgaacgtctgatggatggcgctaacctgctgaaatgttcagagtttggtgaagcgatcatcga

SEQ ID NO: 794870 - DNA, 75 bp, synthetic construct
  source 1..75: mol_type = other DNA
gattaccgtgctggacggcttcagagcagaaaaaacctcaccgctttactttgaaaaggcggtcaacggttacac

SEQ ID NO: 794871 - DNA, 75 bp, synthetic construct
  source 1..75: mol_type = other DNA
ggcaagaatttgatctggataacgctatttgggaaattcctgctgaaaggatgaaaatgcgtaggccacatcttg

SEQ ID NO: 794872 - DNA, 75 bp, synthetic construct
  source 1..75: mol_type = other DNA
cattgaattacgtgcagctttatggtcggaatttgatctggataacgctatttgggaaataccagcagaaaggat

SEQ ID NO: 794873 - DNA, 75 bp, synthetic construct
  source 1..75: mol_type = other DNA
ggagcaagagctggcggtttcgctatcgctatgccggtaaacccaaaatgatctcgcttggtgtttacccaacga

SEQ ID NO: 794874 - DNA, 75 bp, synthetic construct
  source 1..75: mol_type = other DNA
ttttcatccgtcgttgacagtatgtggggcatagcagagctacgctgggttgtgacgctcgccgccgggcttgag

SEQ ID NO: 794875 - DNA, 75 bp, synthetic construct
  source 1..75: mol_type = other DNA
gccacatggatccgcgaaatgattcgccatttccaatatgacggccaggtaatagggacattatccattgcgtaa

SEQ ID NO: 794876 - DNA, 75 bp, synthetic construct
  source 1..75: mol_type = other DNA
aatcaaaccattagaactgcttgaagtattgcgacgaatagagaaacgaggagcactagagaagaccagaaaagt

SEQ ID NO: 794877 - DNA, 75 bp, synthetic construct
  source 1..75: mol_type = other DNA
ttcaagcgccctcaatgtacaccaatcaaatcatttcccgttcttaaaggctaatgagatacctgattttcttcg

SEQ ID NO: 794878 - DNA, 75 bp, synthetic construct
  source 1..75: mol_type = other DNA
gggcggaatgatccgaacaagcctatgagtgaggcgagcattaaccaacttattaaacggattggttatggaggg

SEQ ID NO: 794879 - DNA, 75 bp, synthetic construct
  source 1..75: mol_type = other DNA
caacttgtcgttattgctacgaagttattgatgatcacgggagtaagaaccatcgaattacgtaccgcattatgg

SEQ ID NO: 794880 - DNA, 75 bp, synthetic construct
  source 1..75: mol_type = other DNA
caagaatttgatctggataacgctatttgggaaattcctgctgaaaggatgaaaatgcgcaggccgcatcttgtg

SEQ ID NO: 794881 - DNA, 75 bp, synthetic construct
  source 1..75: mol_type = other DNA
aaaatagcattcgaggaacttacaatcatgctctatacattgagaaaaggagagaaatgcttcaatggtatgcac

SEQ ID NO: 794882 - DNA, 75 bp, synthetic construct
  source 1..75: mol_type = other DNA
aagttaacggggcatggatttagacatactttatctacgatattacatgaaagtggatttgaaagtgctttaatt

SEQ ID NO: 794883 - DNA, 75 bp, synthetic construct
  source 1..75: mol_type = other DNA
ccgctgagatgatgctgcgccagatgggttggacggaagcggctgacttaattgttaaaggtatggaaggcgcaa

SEQ ID NO: 794884 - DNA, 75 bp, synthetic construct
  source 1..75: mol_type = other DNA
ctgattttcccttgttgtggctcatctgtaccggggggctggggggcattactggcagttttcttaacgtcgtga

SEQ ID NO: 794885 - DNA, 75 bp, synthetic construct
  source 1..75: mol_type = other DNA
gaagcagaacatttgcttctgaataactgtaacgcagatactcagcatgaattaagcaatctgctgctgaaacgc

SEQ ID NO: 794886 - DNA, 75 bp, synthetic construct
  source 1..75: mol_type = other DNA
gagttcagaccttattttcaacccatcatttccgctaaaaatcaccagctgaccggctgcgaagtactgattcgc

SEQ ID NO: 794887 - DNA, 75 bp, synthetic construct
  source 1..75: mol_type = other DNA
aacgcttgatgtatatgccgcgggcactctggcaacaggaagtgggggtaatctgacatcatatatgaatgctac

SEQ ID NO: 794888 - DNA, 75 bp, synthetic construct
  source 1..75: mol_type = other DNA
gccatgcaaatagcgggtattgatagcggaatgaccagaactacatcaaatgcttttggttatggtggtcaatgg

SEQ ID NO: 794889 - DNA, 75 bp, synthetic construct
  source 1..75: mol_type = other DNA
atcatatgtatgggcttctggaaatattaattctaattacattcattcaaacgggagtattaatgctgatggaag

SEQ ID NO: 794890 - DNA, 75 bp, synthetic construct
  source 1..75: mol_type = other DNA
aagtctatctcgataactccttgtaagagaaacccattggttttttacagtcaacatactcacactgttagtcaa

SEQ ID NO: 794891 - DNA, 75 bp, synthetic construct
  source 1..75: mol_type = other DNA
ggacgacagcggcatacaaaaagaaattcattcaaaaaaatatccgttctccctgatttatatcatcccggtaaa

SEQ ID NO: 794892 - DNA, 75 bp, synthetic construct
  source 1..75: mol_type = other DNA
gaagcagaacatttgcttctgaataactgtaacgcagatactcagcgtgaattaagcaatctgctgctgaagcgc

SEQ ID NO: 794893 - DNA, 75 bp, synthetic construct
  source 1..75: mol_type = other DNA
atagaaaaccttctcgatcagaacaacagcatcagctcggaagcagaacatttacttctgaataactgtaacgca

SEQ ID NO: 794894 - DNA, 75 bp, synthetic construct
  source 1..75: mol_type = other DNA
ttggctatatagaaaacattctcaatcagaacaacagcatcagcccggaagcagaacatttgcttctgaataact

SEQ ID NO: 794895 - DNA, 75 bp, synthetic construct
  source 1..75: mol_type = other DNA
tttatagtcagcaccttcatactgtaagtaagctggattatcaagttgtgcattatcctgtatcattacatcata

SEQ ID NO: 794896 - DNA, 75 bp, synthetic construct
  source 1..75: mol_type = other DNA
atggtcttataacgacatcgacggcatggattgaaggcggaaaaacacgttatgatttattagggaaagccatgc

SEQ ID NO: 794897 - DNA, 75 bp, synthetic construct
  source 1..75: mol_type = other DNA
ccgctgagatgatgctgcgccaaatgggttggacggaagcggctgacttgattgttaaaggtatggaaggcgcaa

SEQ ID NO: 794898 - DNA, 75 bp, synthetic construct
  source 1..75: mol_type = other DNA
ttattgcagagtataatgaggagcgttgtagtggtagtaagaatacacattgttatagtaatttaagaaggttgt

SEQ ID NO: 794899 - DNA, 75 bp, synthetic construct
  source 1..75: mol_type = other DNA
cctcagtttggttatatatctggaacccttattgcagaatataatgaggagcgttgtagtggtggtaggaataca

SEQ ID NO: 794900 - DNA, 75 bp, synthetic construct
  source 1..75: mol_type = other DNA
ccgctgagatgatgctgcgccatatgggttggacggaagcggctgacgtgattgttaaaggtatggaaggcgcaa

SEQ ID NO: 794901 - DNA, 75 bp, synthetic construct
  source 1..75: mol_type = other DNA
ccgctgagatgatgctgcgccatatgggttggacggaagcggctgacctcattgttaaaggtatggaaggcgcaa

SEQ ID NO: 794902 - DNA, 75 bp, synthetic construct
  source 1..75: mol_type = other DNA
ccgctgagatgatgctgcgccatatgggttggacggaagcggctgacataattgttaaaggtatggaaggcgcaa

SEQ ID NO: 794903 - DNA, 75 bp, synthetic construct
  source 1..75: mol_type = other DNA
gcgccgtgaagccgagggagatgtggaaataaccacacttccgaaaaataacaacaaaaccagagggaaaaaata

SEQ ID NO: 794904 - DNA, 75 bp, synthetic construct
  source 1..75: mol_type = other DNA
cccggagctgttgcttattgcgctggttcagaaaaagttgtaggtggaggcggtcaatgtaatacagcagaagga

SEQ ID NO: 794905 - DNA, 75 bp, synthetic construct
  source 1..75: mol_type = other DNA
cctaccgatgacaggtgatttgaatatgggaggaaataatatcaacaatgctaaaaatataacagcatcaggaac

SEQ ID NO: 794906 - DNA, 75 bp, synthetic construct
  source 1..75: mol_type = other DNA
gttggggttggaaccgggaaaacagttaaagcctatatgaacaatgtgggtaatatttacgcgtcaggtaatcta

SEQ ID NO: 794907 - DNA, 75 bp, synthetic construct
  source 1..75: mol_type = other DNA
ttaaagcttacatgaacaatgcgggtaatatttatgcgtcaggtaatcttactgccggaacgataaaatccaacg

SEQ ID NO: 794908 - DNA, 75 bp, synthetic construct
  source 1..75: mol_type = other DNA
gttggtgttggaaccgggaaaacagttaaagcttatatgaacaatgcgggtaatatttatgcgtcgggtaatcta

SEQ ID NO: 794909 - DNA, 75 bp, synthetic construct
  source 1..75: mol_type = other DNA
atactgatgcgttccgcgaaaaagtacgcgcccgtttccacggtccgattatcggcgcaggtgcatacacagtag

SEQ ID NO: 794910 - DNA, 75 bp, synthetic construct
  source 1..75: mol_type = other DNA
ggtcgcccgcttgcagcgcaaagctgagcttaacccacagcgtgccgaaagtttctacggtggcggcgcggaagg

SEQ ID NO: 794911 - DNA, 75 bp, synthetic construct
  source 1..75: mol_type = other DNA
cggaaacgctgatcggcaaagggttaattgatgcggtggcatttggtcgcgactggattgcgaatccggatctgg

SEQ ID NO: 794912 - DNA, 75 bp, synthetic construct
  source 1..75: mol_type = other DNA
ctggctattcgcacattgcccgtcgcgcaatatcctgacgttgcgccaccgaccattaaaatttcagccacttat

SEQ ID NO: 794913 - DNA, 75 bp, synthetic construct
  source 1..75: mol_type = other DNA
ccgtatcgatacgtccatgccgcgtgcactggaactggaagaaattcctggcatcgttaatgatttccgccaggc

SEQ ID NO: 794914 - DNA, 75 bp, synthetic construct
  source 1..75: mol_type = other DNA
aggctatgccggtgcgccaggcattcatagcccggagcaagttaccgcatggcagaaaatcaccgctggcgtcca

SEQ ID NO: 794915 - DNA, 75 bp, synthetic construct
  source 1..75: mol_type = other DNA
tcaagacggaaattaccgacttgctactggtgacactgattctcagggtgaaatgtacctttcgacttcgggttg

SEQ ID NO: 794916 - DNA, 75 bp, synthetic construct
  source 1..75: mol_type = other DNA
tgctctggaactatacgggggcaaacggagtcgagttggctgccgatggcaatgtgcgcattaatgcgaagggta

SEQ ID NO: 794917 - DNA, 75 bp, synthetic construct
  source 1..75: mol_type = other DNA
aatggtgttaagtttgatggctcaggcgatatcaacattaatacattggtatctcgtggccgagttacggcgtta

SEQ ID NO: 794918 - DNA, 75 bp, synthetic construct
  source 1..75: mol_type = other DNA
gtcactcctggcggggcgctggatccgcgtgtatgggtccaccacatattgcaatttttattctcttttaaaata

SEQ ID NO: 794919 - DNA, 75 bp, synthetic construct
  source 1..75: mol_type = other DNA
tgttacctgccctggagcagttccgtaatgcccgcacgcactttgcttttgtggtggatgagtttggctcggtgg

SEQ ID NO: 794920 - DNA, 75 bp, synthetic construct
  source 1..75: mol_type = other DNA
ccgcattcggtaacttcggtttctttatccgaaatgatggaacgaacacttatttccttttgacagcttcaggtg

SEQ ID NO: 794921 - DNA, 75 bp, synthetic construct
  source 1..75: mol_type = other DNA
ttactctatttcagctcaaccagcagctctgatggttcggtcagtattaatgtgacctttgaacaaggtaccgat

SEQ ID NO: 794922 - DNA, 75 bp, synthetic construct
  source 1..75: mol_type = other DNA
gcgttttaccaccccaggaacagactataccgccaatatcacgcttaacgttcttgaccctaaccatattgatat

SEQ ID NO: 794923 - DNA, 75 bp, synthetic construct
  source 1..75: mol_type = other DNA
cattactggccatcttcttcgttcctctgttttttgtgctggttaaacgtttgtttgccggtaaaccgcgccgtc

SEQ ID NO: 794924 - DNA, 75 bp, synthetic construct
  source 1..75: mol_type = other DNA
taccctgacgttatttgcaatggtactggcgatcggcctgttggtggacgatgccattgtggtggtggagaacgt

SEQ ID NO: 794925 - DNA, 75 bp, synthetic construct
  source 1..75: mol_type = other DNA
atgatgccaacaggaaacagctcacactctacatcgaacaggcggaaatgaaaaagttgccaattggtggcgtgt

SEQ ID NO: 794926 - DNA, 75 bp, synthetic construct
  source 1..75: mol_type = other DNA
atgttgcaactttgtgcaaccatgttaaatgtgacctgcgtagcaagcttaaaaatgaatgaaatgttaataaaa

SEQ ID NO: 794927 - DNA, 75 bp, synthetic construct
  source 1..75: mol_type = other DNA
acggtaacggtcttagctatgaaattttgctaaaagatgagggaaaaacggcggcaggacgcagtaatggtgcgt

SEQ ID NO: 794928 - DNA, 75 bp, synthetic construct
  source 1..75: mol_type = other DNA
gattccggcgttagctgtccccgtcgttttgctgggcacattcggcgttcttgcgttgtttggctattcgattaa

SEQ ID NO: 794929 - DNA, 75 bp, synthetic construct
  source 1..75: mol_type = other DNA
ctggccattcgcacattacccgtcgcgcaatatcctgacgttgcaccgccgactattagaatttcagccacttat

SEQ ID NO: 794930 - DNA, 75 bp, synthetic construct
  source 1..75: mol_type = other DNA
gcgcctacccagcgaagtgcagcaaacgggtgttacggtggagaaatcacaaagcaactttttgctgattgctgc

SEQ ID NO: 794931 - DNA, 75 bp, synthetic construct
  source 1..75: mol_type = other DNA
tcgcgttgagatgggtagcgaagattataacgccatcagtaagttgaacggtcatccggccgcaggggtagccgt

SEQ ID NO: 794932 - DNA, 75 bp, synthetic construct
  source 1..75: mol_type = other DNA
aacgcgactggctttagttccggcgatgcaatgacaaaaatggaggaactggcaaacagtcttcctgcgggaaca

SEQ ID NO: 794933 - DNA, 75 bp, synthetic construct
  source 1..75: mol_type = other DNA
aagcgcaaaacgtgcaggttactgccgggaaaataggggcattgccttcaccggatactcagcaactgaccgcaa

SEQ ID NO: 794934 - DNA, 75 bp, synthetic construct
  source 1..75: mol_type = other DNA
ttacaattaataataccagcggtgctgtatcaattggtaatggactaaatgtgactggtggcgtaaatggtagtt

SEQ ID NO: 794935 - DNA, 75 bp, synthetic construct
  source 1..75: mol_type = other DNA
ttcaaaattgatgattttagccaacaactattctgtgtatcatttcttaagaatgaatttgattctaaggacttc

SEQ ID NO: 794936 - DNA, 75 bp, synthetic construct
  source 1..75: mol_type = other DNA
tagagcaaagatagagagcgggaagaatcgtctggttgttaaccagaccccggatgcagtatatcttgctgcaaa

SEQ ID NO: 794937 - DNA, 75 bp, synthetic construct
  source 1..75: mol_type = other DNA
tcgtcagaggttgctgatagtctggcaactatattatcctcaaatgcaagtttgtctattgcatatcaagagaga

SEQ ID NO: 794938 - DNA, 75 bp, synthetic construct
  source 1..75: mol_type = other DNA
attcaataactggctggatgacactaaggatatcagtgagcagataaatcaaccacgactcagatgtttgatggg

SEQ ID NO: 794939 - DNA, 75 bp, synthetic construct
  source 1..75: mol_type = other DNA
aaggcggtcagctaaaagatatgttcggtggtattggcccggcgatcaaaggtgttggttcttatgtaatggggt

SEQ ID NO: 794940 - DNA, 75 bp, synthetic construct
  source 1..75: mol_type = other DNA
tgccgcaattgatactgtcggtcgacgctattctgaattaaagaaatttttcgataaagggcttattgataaaga

SEQ ID NO: 794941 - DNA, 75 bp, synthetic construct
  source 1..75: mol_type = other DNA
gggatcctaatttgtctgcactgaaccgccccgggtttcctggagagtgttttatctgtgaactcaggctgccag

SEQ ID NO: 794942 - DNA, 75 bp, synthetic construct
  source 1..75: mol_type = other DNA
ggtcttcccgatccggtgaaagcgatggggcgtcttctggtggagaacattaataccgaccccaggctggcgctg

SEQ ID NO: 794943 - DNA, 75 bp, synthetic construct
  source 1..75: mol_type = other DNA
tacgagcaggcagttccggcagttattgtggcgataccagatcacgcagagtatgagccggcgcggaaactgctg

SEQ ID NO: 794944 - DNA, 75 bp, synthetic construct
  source 1..75: mol_type = other DNA
ttgttattccccaacaacaaggattcggttaatctggttatccccaacaacgcaaaaggaaaagaaatgtccggt

SEQ ID NO: 794945 - DNA, 75 bp, synthetic construct
  source 1..75: mol_type = other DNA
acaaatcccactgtgaaaatgttggaaagtatcggggcattgaaatcagtgggatagtgtcatcagtcgaaataa

SEQ ID NO: 794946 - DNA, 75 bp, synthetic construct
  source 1..75: mol_type = other DNA
cacttaccagaaatatagaaagaaataatattgataatatttgcggtgctcatttctgtctgttaattgaattat

SEQ ID NO: 794947 - DNA, 75 bp, synthetic construct
  source 1..75: mol_type = other DNA
tgccgttgccgggtttcgtcatgcgatgctgctactggagtggttgttcctcaataatgactcgggcagtctggt

SEQ ID NO: 794948 - DNA, 75 bp, synthetic construct
  source 1..75: mol_type = other DNA
aggccatcgcaaaacaatcagaaggtgttttgcaggaactgacaggggctaatatccttgatatatcggtgcatg

SEQ ID NO: 794949 - DNA, 75 bp, synthetic construct
  source 1..75: mol_type = other DNA
cgacggttttgctaaggtactgacacagcgttttgcccaacctgtagaacacattcgattgcagcgtcctgtcgg

SEQ ID NO: 794950 - DNA, 75 bp, synthetic construct
  source 1..75: mol_type = other DNA
tatgaacaggaattatcgcgcaggaatattccttatctttctgtttcgggttcgctgcaagagcgactggggcaa

SEQ ID NO: 794951 - DNA, 75 bp, synthetic construct
  source 1..75: mol_type = other DNA
ggtgcagttgcgatggaagatgcaagccttaccaccaaaggtgttgtgaaacttagcagtgctgtcgacagcacc

SEQ ID NO: 794952 - DNA, 75 bp, synthetic construct
  source 1..75: mol_type = other DNA
tataggcacgatcaactcagcaacaatgtcttttagtggtggtgccggatggttcaagctggcaactgtaaccat

SEQ ID NO: 794953 - DNA, 75 bp, synthetic construct
  source 1..75: mol_type = other DNA
tgctggcattcaaatgtatgaggcgtacaacaatagctacccgaccacgtatggcaacgtattgcacatgaaagg

SEQ ID NO: 794954 - DNA, 75 bp, synthetic construct
  source 1..75: mol_type = other DNA
ggcgctacatgtaattttcccggcaggctgcgcggtgctggcggcaacccaggtggaagagattgaagaagtgca

SEQ ID NO: 794955 - DNA, 75 bp, synthetic construct
  source 1..75: mol_type = other DNA
tgcctgcgtaattgcgtcggtaatttcgcggacgttacaccgtgactctatctaccgccagcacactgcgaagca

SEQ ID NO: 794956 - DNA, 75 bp, synthetic construct
  source 1..75: mol_type = other DNA
atgcatcatctacacatctatcctgatctgcgcactatgttccgccgtctgcttatcgcaacagtcgtcggtatt

SEQ ID NO: 794957 - DNA, 75 bp, synthetic construct
  source 1..75: mol_type = other DNA
ttgttaagccagaaatacgcccatttccaccactaccaatagaaccagataggcattcagcaggaggcgaacaat

SEQ ID NO: 794958 - DNA, 75 bp, synthetic construct
  source 1..75: mol_type = other DNA
agaacaaatagagaagatttatccaattgtgaagagtttaccttcctggccgaatccagattcgatagctgaaat

SEQ ID NO: 794959 - DNA, 75 bp, synthetic construct
  source 1..75: mol_type = other DNA
tgccatcgacaaaacgaaaatgtcgtggcaaaacaaaatgtttattcgaattgttgcgttaactggttgtcgtgg

SEQ ID NO: 794960 - DNA, 75 bp, synthetic construct
  source 1..75: mol_type = other DNA
ggagtgtatcgaacgaaatctcagtccaggcggcagtgccgatttgctaattgtcacctggtttttagcgtccct

SEQ ID NO: 794961 - DNA, 75 bp, synthetic construct
  source 1..75: mol_type = other DNA
gatgctgaactggatactcatcgggaatggatattagtcaggctgaccagcgactgggaggtcggcggtaagcgt

SEQ ID NO: 794962 - DNA, 75 bp, synthetic construct
  source 1..75: mol_type = other DNA
gaagagctgcagggtgataaatcactacaatggatccagaaggaaaatcagcgcaccatagcgcgtttcacccga

SEQ ID NO: 794963 - DNA, 75 bp, synthetic construct
  source 1..75: mol_type = other DNA
atgacagcattatctgacagcatcccccaggcgatggctggtaattcagcctccgacgatgaattcctgtggctg

SEQ ID NO: 794964 - DNA, 75 bp, synthetic construct
  source 1..75: mol_type = other DNA
aatgtcggcgcacaaatagccgccatgacaccgggcgagctggcatcatggcttgcggagaatcttcagtcatga

SEQ ID NO: 794965 - DNA, 75 bp, synthetic construct
  source 1..75: mol_type = other DNA
gcagttacccggcattcgtacccatctggtggcgtttgacaccagcgtggttgatctcacggcagacgttgccga

SEQ ID NO: 794966 - DNA, 75 bp, synthetic construct
  source 1..75: mol_type = other DNA
gaaaatatggaagtctccggtgcgaccttcgtgaacggtttactacacattgacctgattcgtaatgagcctgaa

SEQ ID NO: 794967 - DNA, 75 bp, synthetic construct
  source 1..75: mol_type = other DNA
aaaaaactgaaaaccacctgcaaaagaaaatccgctttaaagactcaatcatcactcaaagggagtttatcgaag

SEQ ID NO: 794968 - DNA, 75 bp, synthetic construct
  source 1..75: mol_type = other DNA
cgtggcggtcgctaacaaaaatgcgagaataatctggtcgatgctgagaaatgagaccgagtatcaggtagtgtg

SEQ ID NO: 794969 - DNA, 75 bp, synthetic construct
  source 1..75: mol_type = other DNA
gctggaaaatggctcataccatcgcactttgcgtttctgggattatcaacaaggcagctggcaggaagaaccaca

SEQ ID NO: 794970 - DNA, 75 bp, synthetic construct
  source 1..75: mol_type = other DNA
atacgaaaggggggcacaatgctgccgcagacaaacaacaagcagcatttatcagcgcactggtgagcgagttta

SEQ ID NO: 794971 - DNA, 75 bp, synthetic construct
  source 1..75: mol_type = other DNA
ctggaagtactgatgccacagaagaacggctggctgcgtcgcccactggccagccccgtgactatgagtattatt

SEQ ID NO: 794972 - DNA, 75 bp, synthetic construct
  source 1..75: mol_type = other DNA
actttctgacaggtaagcgtgaattacagttgttgtttgctccctctgccgggagcgtgttaagcgattacggta

SEQ ID NO: 794973 - DNA, 75 bp, synthetic construct
  source 1..75: mol_type = other DNA
ctggtaaaacaccaggtgttttggctataggtgctcatcccgatgatattgagttaggatgtggagcaacgctct

SEQ ID NO: 794974 - DNA, 75 bp, synthetic construct
  source 1..75: mol_type = other DNA
ggagacagccagcttgacgaactggcagaccttaaaatcatcgacgatggtcgctattgtgtccggctgtacaag

SEQ ID NO: 794975 - DNA, 75 bp, synthetic construct
  source 1..75: mol_type = other DNA
aagatgccagggaacgcgcgttagtggttggcttttcgctgattatcatgccggatatgacccgctacgctggtg

SEQ ID NO: 794976 - DNA, 75 bp, synthetic construct
  source 1..75: mol_type = other DNA
cgaacgatcacaaatgttctgttagataaagatgctgatggatggttaccagcagcggcaggcattaacgacaga

SEQ ID NO: 794977 - DNA, 75 bp, synthetic construct
  source 1..75: mol_type = other DNA
gcgcatctggggaaaatttgctcttggtcttggcctgatgagcgccggattctgcattctgaccttaagcgcccg

SEQ ID NO: 794978 - DNA, 75 bp, synthetic construct
  source 1..75: mol_type = other DNA
aatgcctcgacgcttgccggaatggcctttagccaggctgggcttgggttaaatcatgcaattgcccatcaactc

SEQ ID NO: 794979 - DNA, 75 bp, synthetic construct
  source 1..75: mol_type = other DNA
aaaagcgtgatggcggagatttgcaccatgctggcgggtaaggccaacacggtatcggcaagcatgaaggcgctg

SEQ ID NO: 794980 - DNA, 75 bp, synthetic construct
  source 1..75: mol_type = other DNA
acgctgcacgagtttgatttacctgaacatctggtggtggatttcagccacggtaactgccagaagcagcaccgt

SEQ ID NO: 794981 - DNA, 75 bp, synthetic construct
  source 1..75: mol_type = other DNA
ttaaaaatggtactgatggcaacacgcgtattgccgtggacgcgattcgcgcggcgcgcgccagccatatgttcc

SEQ ID NO: 794982 - DNA, 75 bp, synthetic construct
  source 1..75: mol_type = other DNA
cggtaatgtgcgatggcctgttagtgggtaatgctgaaattattccgttcagcccgcgcaggtatctctatcacg

SEQ ID NO: 794983 - DNA, 75 bp, synthetic construct
  source 1..75: mol_type = other DNA
cagaccgtgacctcagcggtgacggccagaaaaaagccgccgcagccgcagatgcgtgtgagggcgttgttgccc

SEQ ID NO: 794984 - DNA, 75 bp, synthetic construct
  source 1..75: mol_type = other DNA
ccctgccgcagaccagcggcatgtatatggggaacgccagtatcatcccgcgtaattaccgtaaatacctctatc

SEQ ID NO: 794985 - DNA, 75 bp, synthetic construct
  source 1..75: mol_type = other DNA
cacttacggtcaatccattaccgacccgtgtctgggctgggaagataccgaacgcctggtcgaaaaacttgcctc

SEQ ID NO: 794986 - DNA, 75 bp, synthetic construct
  source 1..75: mol_type = other DNA
ggcggcggcagcggtcacgaacctatgcactgcggttatatcggtcagggtatgctgtccggggcctgtccaggt

SEQ ID NO: 794987 - DNA, 75 bp, synthetic construct
  source 1..75: mol_type = other DNA
atggttgatttatattcgcctacacagcttgtgcaggtggctaatgctgaagatgtgcaaaaaaaattaaatgcg

SEQ ID NO: 794988 - DNA, 75 bp, synthetic construct
  source 1..75: mol_type = other DNA
atgaaatcgactggaaaataccggaaaaaaacatcatagagcaggccgacggcaaaaaatggtccgagcatgata

SEQ ID NO: 794989 - DNA, 75 bp, synthetic construct
  source 1..75: mol_type = other DNA
acaggatatgcctttatcgcttaatgattactgttctttcattcctgaatatattgagcgattcgggcaggaaga

SEQ ID NO: 794990 - DNA, 75 bp, synthetic construct
  source 1..75: mol_type = other DNA
actctaataagggtttgtttatacttgaacacttggcagaattaacaagttatataaacgacaactatcttaaca

SEQ ID NO: 794991 - DNA, 75 bp, synthetic construct
  source 1..75: mol_type = other DNA
gtttaccaattttcttcacgtcaaagagctttcgcctatggggcacaatgtggaaaaataaaagatgcagttctg

SEQ ID NO: 794992 - DNA, 75 bp, synthetic construct
  source 1..75: mol_type = other DNA
agcttgtacaggtagttaatgctgtagatgtacaaaaacaactaaatgcgttgtttaccagtttgttttttactc

SEQ ID NO: 794993 - DNA, 75 bp, synthetic construct
  source 1..75: mol_type = other DNA
ctgactgtgagggttagccgcagcagtaccatcaatgtgaagcacgtcgtctacagcgtaccttcccggcttgta

SEQ ID NO: 794994 - DNA, 75 bp, synthetic construct
  source 1..75: mol_type = other DNA
acgccatgctctgctggggcgaggatgaggataagccggagccagatcctttggccgctctggaggatgctctgt

SEQ ID NO: 794995 - DNA, 75 bp, synthetic construct
  source 1..75: mol_type = other DNA
acttcgaactggaaaaaggcaccccagcctggcaggacgtgataaaagcgggcgcactggcgctgcatatctccg

SEQ ID NO: 794996 - DNA, 75 bp, synthetic construct
  source 1..75: mol_type = other DNA
tttttcttcccggatgtggtcgccacccgcctgaccgaagcgctcaaaaaggataaaagcgtggcgtggggcaat

SEQ ID NO: 794997 - DNA, 75 bp, synthetic construct
  source 1..75: mol_type = other DNA
gcgatgtcgccagaaaatacgcagagtacatcacgtccgttcctttgcgtcggtttgtcgctgaaaaagtgcggg

SEQ ID NO: 794998 - DNA, 75 bp, synthetic construct
  source 1..75: mol_type = other DNA
ggaaaaggcgttgccggtagtcaatgtgaaacagcataacctgagcagttatgagcaactactgcgtggcaaggg

SEQ ID NO: 794999 - DNA, 75 bp, synthetic construct
  source 1..75: mol_type = other DNA
agaatatttatgggagttaacagattttataacccaacaatatgataataagggaatatatatttataaatgctt

SEQ ID NO: 795000 - DNA, 75 bp, synthetic construct
  source 1..75: mol_type = other DNA
aatgatcgagggttcctgcaaagcgtacaaccgcgaactggacccgatgatcaaaaaaatcttcactgaataccg

SEQ ID NO: 795001 - DNA, 75 bp, synthetic construct
  source 1..75: mol_type = other DNA
ggccgtaaatggtcagagcaggataaagacatacacgacccaatctatgacatagaactttatgctgatcaggct

SEQ ID NO: 795002 - DNA, 75 bp, synthetic construct
  source 1..75: mol_type = other DNA
cgcatggctggagaagatccggcacagcttaacgaccctacctaccgccgtatgcgcctgattactggcaacatg

SEQ ID NO: 795003 - DNA, 75 bp, synthetic construct
  source 1..75: mol_type = other DNA
aggtaacgtactgggcattatgcagaagggttatacgctgaacggtcgtacgattcgtgcggcgatggttactgt

SEQ ID NO: 795004 - DNA, 75 bp, synthetic construct
  source 1..75: mol_type = other DNA
tttggcgttgaagtgatcgccgaaactaacgtgccgctggacccgaatgtgcatcaggccatcgcaatggtggaa

SEQ ID NO: 795005 - DNA, 75 bp, synthetic construct
  source 1..75: mol_type = other DNA
tccgttgctaaactgccgttcgcttacgctaaagatggtatctcttacaccttctctatcgttccgaacgcactg

SEQ ID NO: 795006 - DNA, 75 bp, synthetic construct
  source 1..75: mol_type = other DNA
caggaagcggtaagaacgggcgcaacgcaaaacatgtactacccgaaaaactggattgaggacggcgatccggcg

SEQ ID NO: 795007 - DNA, 75 bp, synthetic construct
  source 1..75: mol_type = other DNA
cttaaccaggtcaaaaacgatctcgtatttattaagaaaaggtgattatattataacagtattaaatatcgatga

SEQ ID NO: 795008 - DNA, 75 bp, synthetic construct
  source 1..75: mol_type = other DNA
gcttatcaattttcctcacgtcagagagctttctcttacggaactcaatgtggaaaaataaaagatgcagtccta

SEQ ID NO: 795009 - DNA, 75 bp, synthetic construct
  source 1..75: mol_type = other DNA
acactaaccagcttttcgcgtacctgaatcgcggggatatttctgaatttaaattcagtccgctgtttacgtcgc

SEQ ID NO: 795010 - DNA, 75 bp, synthetic construct
  source 1..75: mol_type = other DNA
ggttgccccgcaaacgtcatgattatgggcgctgaggtatggcgcacgttacgcagctttaaaaaattccgtgag

SEQ ID NO: 795011 - DNA, 75 bp, synthetic construct
  source 1..75: mol_type = other DNA
atgacagacaaagcgcaggcgcttaacacgcatcagctttttacatatctgaatcgccaggatattccagatttt

SEQ ID NO: 795012 - DNA, 75 bp, synthetic construct
  source 1..75: mol_type = other DNA
caaaaacttgtttttgcgtggggtgtggtgcttttggtggtgagaaccaccaacctgttgagcctttttgtggag

SEQ ID NO: 795013 - DNA, 75 bp, synthetic construct
  source 1..75: mol_type = other DNA
ttatctggcaatagcgtttaaaaaatggggcgtcacctgggaggccgttggtgcatacaatgccggattcaggaa

SEQ ID NO: 795014 - DNA, 75 bp, synthetic construct
  source 1..75: mol_type = other DNA
ttatctggcaatagcctttaaaaaatggggcgtcacctgggaggccgttggtgcatacaatgcgggattcaggaa

SEQ ID NO: 795015 - DNA, 75 bp, synthetic construct
  source 1..75: mol_type = other DNA
caatgccggattcaggaagaccgaacgccagaaccagagacgtcttgcctacgcatcagaggtttaccggattta

SEQ ID NO: 795016 - DNA, 75 bp, synthetic construct
  source 1..75: mol_type = other DNA
cgccagaaccagagacgtcttgcctacgcatcagaggtttaccggatttatacctggataaaaagcagtaaaggt

SEQ ID NO: 795017 - DNA, 75 bp, synthetic construct
  source 1..75: mol_type = other DNA
gcctgatgtttataaatgtgacctgcaaggctggtgattgctttgatctggctggcagagattataaaattgacc

SEQ ID NO: 795018 - DNA, 75 bp, synthetic construct
  source 1..75: mol_type = other DNA
gaacgaagcaactgtaggtgcagccgttgactacctgatcaatattctggctgaaattcagcagggaggtgctta

SEQ ID NO: 795019 - DNA, 75 bp, synthetic construct
  source 1..75: mol_type = other DNA
ctgaattagcacctgtagttgagccagaatcacacccacaaacagcaccagagcaacagccaacgccggaagacg

SEQ ID NO: 795020 - DNA, 75 bp, synthetic construct
  source 1..75: mol_type = other DNA
attgtattggtggtgcgattatcggtcgtgtacgtcgggtagctaatatccctgttttgaccgcgcagataccgc

SEQ ID NO: 795021 - DNA, 75 bp, synthetic construct
  source 1..75: mol_type = other DNA
acatgtgataatttgttattagatgaaaaaaaacacttttttattaatcagttatgggcaattgaggatgaaaaa

SEQ ID NO: 795022 - DNA, 75 bp, synthetic construct
  source 1..75: mol_type = other DNA
tggactacttaggtggttcatgtccttttgaaattaatacgaatcctgaacggtggaatactattaaaccaggtc

SEQ ID NO: 795023 - DNA, 75 bp, synthetic construct
  source 1..75: mol_type = other DNA
catgtgcaggaagctgcaaacgctcttatcagtgctggtcgatatgacgagaacgaagcaacggttggcgcagca

SEQ ID NO: 795024 - DNA, 75 bp, synthetic construct
  source 1..75: mol_type = other DNA
atgaaaaagtggatgttagcaatctgcctgatgtttataagtgggatctgtgaagccgccgattgttttgatctt

SEQ ID NO: 795025 - DNA, 75 bp, synthetic construct
  source 1..75: mol_type = other DNA
taccgggataaaaagcagtaaaggtatccggattccggtcacaaagaaatcacttccggaaattaacagcgtgca

SEQ ID NO: 795026 - DNA, 75 bp, synthetic construct
  source 1..75: mol_type = other DNA
tactcatgcttagctctccggttattgctcaggactgttttgaactgtctggaagagattacaaaatagaccctg

SEQ ID NO: 795027 - DNA, 75 bp, synthetic construct
  source 1..75: mol_type = other DNA
gactgatgcaagtagactcccagcattttaacgaactggcccgctacggaattaagccagaacatctgacaacag

SEQ ID NO: 795028 - DNA, 75 bp, synthetic construct
  source 1..75: mol_type = other DNA
tcaccgtcatgaaattggtaaaggctctaacacgttaaaattgcgattaaaagggtatttaccggtcacctgtct

SEQ ID NO: 795029 - DNA, 75 bp, synthetic construct
  source 1..75: mol_type = other DNA
ttactgagagcaatatcatggaaagaatcccgttaccgggttaatgccatcggtattaatccggtaacgggatat

SEQ ID NO: 795030 - DNA, 75 bp, synthetic construct
  source 1..75: mol_type = other DNA
taatcttacagacattgtcagataccggttatgccgcaaaagcggcatggaaggccacacacaacaatatcatat

SEQ ID NO: 795031 - DNA, 75 bp, synthetic construct
  source 1..75: mol_type = other DNA
cccgatgtttgccggttataagccggaagattcggggctggatatcggcgacagcgccatcaccgaaacctacgg

SEQ ID NO: 795032 - DNA, 75 bp, synthetic construct
  source 1..75: mol_type = other DNA
ggactggcgaaagatctcgacgaggcggctgaactggcggcttccggggagatcaccttctcgccgtgccacgaa

SEQ ID NO: 795033 - DNA, 75 bp, synthetic construct
  source 1..75: mol_type = other DNA
gcccgctacggaattaagccagaacatctgacaacagatccctgcatgaacatttatacaggtgcctattatctg

SEQ ID NO: 795034 - DNA, 75 bp, synthetic construct
  source 1..75: mol_type = other DNA
caggagaaaaagcgccagcaatatgcaaaagaaattcaggcaatttatgttgccatcaaaaaaaatgcgccacca

SEQ ID NO: 795035 - DNA, 75 bp, synthetic construct
  source 1..75: mol_type = other DNA
gtactggagaacaaccagatgctatgggattcagaaattcagcatcatgcctgatagaggcgaagtgttctcgtg

SEQ ID NO: 795036 - DNA, 75 bp, synthetic construct
  source 1..75: mol_type = other DNA
atcgttgcgctggtgggcggcacggtggaagaggctatcgatttctcccgccagatgcgtgaaatcactctcggt

SEQ ID NO: 795037 - DNA, 75 bp, synthetic construct
  source 1..75: mol_type = other DNA
atattcagtctacttttgctgatacgatccccggctatatgccaggtcgctggtcttcagaagaattaagcgaag

SEQ ID NO: 795038 - DNA, 75 bp, synthetic construct
  source 1..75: mol_type = other DNA
tgatgaggagaatcttaaggttgcgtttaacgatgttgatttttgccttaaggtgcgtgaagcaggatatcgaaa

SEQ ID NO: 795039 - DNA, 75 bp, synthetic construct
  source 1..75: mol_type = other DNA
cgctgaaagcggtacgcttttaatggatcgcctggtagcactttataacgagacctttagcttcacattgccgtc

SEQ ID NO: 795040 - DNA, 75 bp, synthetic construct
  source 1..75: mol_type = other DNA
gtactttattcttgatttaaagcatctgccgcaaacagataaagggtggtatcagtttaatctgacgctggaatg

SEQ ID NO: 795041 - DNA, 75 bp, synthetic construct
  source 1..75: mol_type = other DNA
tgcagttgctggtgtgcaaaatgcacgttgttggcggagctttgcagataaggaatcgccggaggactggtcgcc

SEQ ID NO: 795042 - DNA, 75 bp, synthetic construct
  source 1..75: mol_type = other DNA
ctggctgatgagcaactgaaaaacatcaccgactaccggatcattgatgatggtcgtgaatgtgtacgcatttat

SEQ ID NO: 795043 - DNA, 75 bp, synthetic construct
  source 1..75: mol_type = other DNA
gggtaatgctgaaattattccgttcagcccgcgcaggtatctctatcacgcctatctggcgtatatgagggcaca

SEQ ID NO: 795044 - DNA, 75 bp, synthetic construct
  source 1..75: mol_type = other DNA
agctggcggtagtgattcgccatctgcttacacggtttgctgaccaggacgaagccagacgcctgttatatgagc

SEQ ID NO: 795045 - DNA, 75 bp, synthetic construct
  source 1..75: mol_type = other DNA
accaaccgcgcgacaaaatgacagaagtcatcatttttgctggcagtgatgcctggagccatgcaaaagaatgga

SEQ ID NO: 795046 - DNA, 75 bp, synthetic construct
  source 1..75: mol_type = other DNA
atgtgacgctgacagaggaatcggaggactggatgccgtcatgtgcaccactgaaaaatgatggtgataaaaatt

SEQ ID NO: 795047 - DNA, 75 bp, synthetic construct
  source 1..75: mol_type = other DNA
gactggctgacaacatcagtgataaacccggttccatcagcggtacatttaccatggatcaccttgaaccaactt

SEQ ID NO: 795048 - DNA, 75 bp, synthetic construct
  source 1..75: mol_type = other DNA
aactgctcacgcattttgatgagaaatggtatttacagacctatcaggacgtaagcctgactggattacctgcaa

SEQ ID NO: 795049 - DNA, 75 bp, synthetic construct
  source 1..75: mol_type = other DNA
ccggaaaacgaacgtgatcctatgcttgccgagaagattgaaggtgagctggccgttatcattcgccacctgctt

SEQ ID NO: 795050 - DNA, 75 bp, synthetic construct
  source 1..75: mol_type = other DNA
agcagatgatacaccaccagtcattctgggtacggaacaactggaaaacctggatgatatgcaaattatcgatga

SEQ ID NO: 795051 - DNA, 75 bp, synthetic construct
  source 1..75: mol_type = other DNA
tggtcgcgttgttgctgagcggttgcagtacctccaaagatgaaatgctgccacccggtgacagtaccatgctcg

SEQ ID NO: 795052 - DNA, 75 bp, synthetic construct
  source 1..75: mol_type = other DNA
gtatccccctggctgccctgctgttatccgggtgctccacctcgaaagaggagcttctgccggcgggcgatcaga

SEQ ID NO: 795053 - DNA, 75 bp, synthetic construct
  source 1..75: mol_type = other DNA
ttccgggctacagcacggtatttcctttttacagcaggacgcagtatgcgctgccaggtgagcgtacggaggctc

SEQ ID NO: 795054 - DNA, 75 bp, synthetic construct
  source 1..75: mol_type = other DNA
ctctggtaatgagttaatcgctatagcgacgtgcagttcttccgattattgcatggggcctaaggtcaataattg

SEQ ID NO: 795055 - DNA, 75 bp, synthetic construct
  source 1..75: mol_type = other DNA
tcgttgcgctgtcgtttttctctggtgccgggtacgcaggcatgtcagattatggtacatatctgagtaatgtac

SEQ ID NO: 795056 - DNA, 75 bp, synthetic construct
  source 1..75: mol_type = other DNA
cgccaactgggaagagaaatatctctacattattgagttgggtcagcgtctgccagaattacgcgacgaagacag

SEQ ID NO: 795057 - DNA, 75 bp, synthetic construct
  source 1..75: mol_type = other DNA
ttcagtgaccgcagcggggggatttcacgtcgtcgggtgatattcaatttttcggaggttgtaccggaaaacgaa

SEQ ID NO: 795058 - DNA, 75 bp, synthetic construct
  source 1..75: mol_type = other DNA
tttatgaaaagcaaatggggtaaacatcttgaactcgatcctttctacagccctaatctgacaaaaattagagag

SEQ ID NO: 795059 - DNA, 75 bp, synthetic construct
  source 1..75: mol_type = other DNA
tgctagctcactttgatgaacattggtatctgcataactatttggatgtgaaacagaccgggttgtcagcaagag

SEQ ID NO: 795060 - DNA, 75 bp, synthetic construct
  source 1..75: mol_type = other DNA
cataaagccccatattcaacgcgtatcccggcagtagtgctggcggttaacaataacgctatgtcattcagtgac

SEQ ID NO: 795061 - DNA, 75 bp, synthetic construct
  source 1..75: mol_type = other DNA
ctgggtacggaacaactggaaaacctggatgatatgcaaattatcgatgaaggtcgtcattatgtgcgtgtttat

SEQ ID NO: 795062 - DNA, 75 bp, synthetic construct
  source 1..75: mol_type = other DNA
actggttgttaattgccagtgaattacctttcagtccaccagcagagggggaaacgctggcaacacatgcgccga

SEQ ID NO: 795063 - DNA, 75 bp, synthetic construct
  source 1..75: mol_type = other DNA
gagaaagggcagactctgactcaggcaaccagtgacgctcaggggcatgtgcagctggaaaatgataaaaacgcg

SEQ ID NO: 795064 - DNA, 75 bp, synthetic construct
  source 1..75: mol_type = other DNA
taactacccgcgatatccaacccagcgtcggttttgccagtcgtggttcgttgcttcctggtaaggtcgttgaag

SEQ ID NO: 795065 - DNA, 75 bp, synthetic construct
  source 1..75: mol_type = other DNA
cgcgttaagccagaatctctgccagcattcattagccaatgggaataccgcaattcgctggcgaactggcagtca

SEQ ID NO: 795066 - DNA, 75 bp, synthetic construct
  source 1..75: mol_type = other DNA
tacccggcgtttctctttctgcggcggtagccttactggagcgacgcagtcaggcgattcatgccccggcgctgg

SEQ ID NO: 795067 - DNA, 75 bp, synthetic construct
  source 1..75: mol_type = other DNA
gttccagctctacccggatatcggcaacctgtcggcgtgggacaacgacgtgcagatggagttgcaggccggaat

SEQ ID NO: 795068 - DNA, 75 bp, synthetic construct
  source 1..75: mol_type = other DNA
aactccatcagcaaggcgctgggctacgcgcactatctcaacaatccgtggttccagcgatcagatgtcaccgac

SEQ ID NO: 795069 - DNA, 75 bp, synthetic construct
  source 1..75: mol_type = other DNA
aggataagcggctgtataaaccggtgctgtacgtacccgtccaggatgcagctgatgcctgggttgccaaacagt

SEQ ID NO: 795070 - DNA, 75 bp, synthetic construct
  source 1..75: mol_type = other DNA
gtttattctaaaaacaactgggaaaagctgcagaaagctctggcaccggtgctcaatcagcgtaacagagacaaa

SEQ ID NO: 795071 - DNA, 75 bp, synthetic construct
  source 1..75: mol_type = other DNA
ggtacccccgggccccgacgaagtggctaccagcctgaatgcgcctgagatagctccggctgtcgctgccactga

SEQ ID NO: 795072 - DNA, 75 bp, synthetic construct
  source 1..75: mol_type = other DNA
atgacaccattgaatccatcgttttatcccgaatttcagtatcgttcaaagggtgttctaaaagatctatttggg

SEQ ID NO: 795073 - DNA, 75 bp, synthetic construct
  source 1..75: mol_type = other DNA
gttgacgaaaaactgaaaatgcaggttggtccgaagtctgaaccgatcaaaggcgatgtcctgaactatgatgaa

SEQ ID NO: 795074 - DNA, 75 bp, synthetic construct
  source 1..75: mol_type = other DNA
gatgatcgcctgttggtggtgattggcccatgctcaattcatgatcctgtcgcggcaaaagagtatgccactcgc

SEQ ID NO: 795075 - DNA, 75 bp, synthetic construct
  source 1..75: mol_type = other DNA
atctcatcatgtcagcggctttcctcgcatggagtcttattgcctaccgttttcttccggatcatcccattgcgg

SEQ ID NO: 795076 - DNA, 75 bp, synthetic construct
  source 1..75: mol_type = other DNA
tcgctcgtgtatccagactccttaaccatgatgcgatttcattcgacgaatccgccgctttaaaacgaatcaacg

SEQ ID NO: 795077 - DNA, 75 bp, synthetic construct
  source 1..75: mol_type = other DNA
taaacaagaagcaccaacctggacgccaacccctaacactcgtcgtgaatatgcaaagcgtggggagagcctgcc

SEQ ID NO: 795078 - DNA, 75 bp, synthetic construct
  source 1..75: mol_type = other DNA
ttcctgatcacaatacccagccgctggagacttttgccgcacaatacgggcaagggttaagtaacatgctggaag

SEQ ID NO: 795079 - DNA, 75 bp, synthetic construct
  source 1..75: mol_type = other DNA
cggaactggtgtttcctgatggtgaaacgctgcaagcaagactcactactttccctccctgcccacagcactggt

SEQ ID NO: 795080 - DNA, 75 bp, synthetic construct
  source 1..75: mol_type = other DNA
tggcgcttgaaacttcgctcgccccggaagagttactcaaccatacacagcgcatagaactgcaacagggtcgtg

SEQ ID NO: 795081 - DNA, 75 bp, synthetic construct
  source 1..75: mol_type = other DNA
atttactattccaacaaatagaaaaatgataatggatccaatatttgagcgtgaagtcagaaccatagtttctag

SEQ ID NO: 795082 - DNA, 75 bp, synthetic construct
  source 1..75: mol_type = other DNA
aacgttgtgaaaggttggatataccctggaaaccaagatgtatataaccttaatggtggcatatccacaatgcct

SEQ ID NO: 795083 - DNA, 75 bp, synthetic construct
  source 1..75: mol_type = other DNA
ttctggcatccgcaatgataattttcatgaggctattttttttggtcaaccgcttggtttctcaagtgttaacaa

SEQ ID NO: 795084 - DNA, 75 bp, synthetic construct
  source 1..75: mol_type = other DNA
atatttttgcccccatcgccattgccgcctgtactagccttgggcttaacccgaccgctgccgcgattgcggtgg

SEQ ID NO: 795085 - DNA, 75 bp, synthetic construct
  source 1..75: mol_type = other DNA
cggtactaatgccaattttgggattggcctacgggtaagtcagggttgtattcgtctgcgcaatgacgatatcaa

SEQ ID NO: 795086 - DNA, 75 bp, synthetic construct
  source 1..75: mol_type = other DNA
cctgtgtgccattaaccacaatggtccaggacgctactgcgcatttagatgttggtcagcagcgactcaacctga

SEQ ID NO: 795087 - DNA, 75 bp, synthetic construct
  source 1..75: mol_type = other DNA
gtacagaaaagactctaaatcactccaggcgcttgaagtggatctgcaaaacttatggcataccacgaccatcat

SEQ ID NO: 795088 - DNA, 75 bp, synthetic construct
  source 1..75: mol_type = other DNA
gagatgtggagcgaaacggcggaagacccggcggcagaagtggcgaaagcgcgtgattgggtgaaagcgcgcatg

SEQ ID NO: 795089 - DNA, 75 bp, synthetic construct
  source 1..75: mol_type = other DNA
gataagttttaccagcagaaatattacgacagattacaaaagataattatttctgttatttcccggaggaaatga

SEQ ID NO: 795090 - DNA, 75 bp, synthetic construct
  source 1..75: mol_type = other DNA
tattatcgcaacaatatatagaaaaatatgccacggaagcctgggcgagaatgcaaaagcttaaagcgcaatcag

SEQ ID NO: 795091 - DNA, 75 bp, synthetic construct
  source 1..75: mol_type = other DNA
ggggatgctaccgcacaggctaatctcggcgctatttacttcagacttggttcagaagaagaacataaaaaggcg

SEQ ID NO: 795092 - DNA, 75 bp, synthetic construct
  source 1..75: mol_type = other DNA
agccagatgttgttatttgtattgacgtgatctcgtgtttgtatgcggccaaagctcgtaaaaaatcggggattg

SEQ ID NO: 795093 - DNA, 75 bp, synthetic construct
  source 1..75: mol_type = other DNA
gcgatccgggtctgcaccgttcgatgtttgctaacggcctgtcgaccgtgctctccggcttctttggttccacgc

SEQ ID NO: 795094 - DNA, 75 bp, synthetic construct
  source 1..75: mol_type = other DNA
aaagcgcgtaaaagatctgcttgatggcttatcacaagtgcaaggtgactggaaacttcatgtattgggagatgg

SEQ ID NO: 795095 - DNA, 75 bp, synthetic construct
  source 1..75: mol_type = other DNA
gctgctgatggcgatgaacggcgataccaacgttgcatcacgcggtggcgaaggggggctgcgctggctacaacg

SEQ ID NO: 795096 - DNA, 75 bp, synthetic construct
  source 1..75: mol_type = other DNA
aaagatatggcgctggaagatttccaccgcagcgcgctggcgattcagggctggttaccccgtttcattgaattt

SEQ ID NO: 795097 - DNA, 75 bp, synthetic construct
  source 1..75: mol_type = other DNA
ctggttaccccgtttcattgaatttggtgcctgtagtgcagaaatggcaccggaagcggtactcaacggattacg

SEQ ID NO: 795098 - DNA, 75 bp, synthetic construct
  source 1..75: mol_type = other DNA
ggcttcggtggttctattcatttgttcgatgtcgggcagccaaccgtcggtaagttgaacgaaatcgattacaaa

SEQ ID NO: 795099 - DNA, 75 bp, synthetic construct
  source 1..75: mol_type = other DNA
gccgcattacctcactctgctggatcaggggttagatcctgaactggcattgctcgataccttgctcctactgat

SEQ ID NO: 795100 - DNA, 75 bp, synthetic construct
  source 1..75: mol_type = other DNA
ggcaagtttctgccgtggcctgaccgatcgcgaactgcgtaccaataattcacaactgacggcaggtcaacggtt

SEQ ID NO: 795101 - DNA, 75 bp, synthetic construct
  source 1..75: mol_type = other DNA
caagctagggcgaagctcccgatggcggaagagcgaggtggagttctggcttcaggaacgtgtcgaccagtcccg

SEQ ID NO: 795102 - DNA, 75 bp, synthetic construct
  source 1..75: mol_type = other DNA
tatcactcagctgaccggcctgaccgataaatggttttacaagctcatcaaggatggtgcctttcctgcccccat

SEQ ID NO: 795103 - DNA, 75 bp, synthetic construct
  source 1..75: mol_type = other DNA
atgaccagatggtcgacatgtcgtttatcactcaactgaccggcctgaccgataaatggttttacaagctcatca

SEQ ID NO: 795104 - DNA, 75 bp, synthetic construct
  source 1..75: mol_type = other DNA
aatactatcaatatcagctacctggtgccgggaaaccgcatctgtatcgccggttcggtcaacatttgattaaaa

SEQ ID NO: 795105 - DNA, 75 bp, synthetic construct
  source 1..75: mol_type = other DNA
gctagattcggctgttgtctttcaggtatcccgtcgccaccgcgcagaatactccggcgacgaatgcccctgtag

SEQ ID NO: 795106 - DNA, 75 bp, synthetic construct
  source 1..75: mol_type = other DNA
cgccgcgatccacctgaaagacacccagccagtcaccgggcaaagtcccggacagttccgcgacgtgccgtttgg

SEQ ID NO: 795107 - DNA, 75 bp, synthetic construct
  source 1..75: mol_type = other DNA
gggtaaaacccagactcgtgatgattatccgtggggcctttgcattgaattgaacaacgagacgttagccaagct

SEQ ID NO: 795108 - DNA, 75 bp, synthetic construct
  source 1..75: mol_type = other DNA
gctagttgccgtgctggccagcagtggttccggcgcgcctgggggcgtgtttacgccgaccttatttatcggact

SEQ ID NO: 795109 - DNA, 75 bp, synthetic construct
  source 1..75: mol_type = other DNA
ggggccgcggcgggaatggctgcggcctatcgtgccccgcttgctggcagtttatttatagccgaagtgctgttt

SEQ ID NO: 795110 - DNA, 75 bp, synthetic construct
  source 1..75: mol_type = other DNA
atgctgctactggagtggttgttcctcaataatgactccggcagtctggtcaatgcagcgacaaacctttccccc

SEQ ID NO: 795111 - DNA, 75 bp, synthetic construct
  source 1..75: mol_type = other DNA
ctgatggatgaccagatggtcgatatggcgtttatcactcagctgaccggcctgaccgataagtggttttacaag

SEQ ID NO: 795112 - DNA, 75 bp, synthetic construct
  source 1..75: mol_type = other DNA
caagctgggccgtagctcccgatggctgaaaagtgaagtggaagcctggttgcaggcacgtattacacagtcccg

SEQ ID NO: 795113 - DNA, 75 bp, synthetic construct
  source 1..75: mol_type = other DNA
gataagtggtttgacaaactcatcaaagatgggggctttcctgcgcccatcaaaatggggcgcagctcccgctgg

SEQ ID NO: 795114 - DNA, 75 bp, synthetic construct
  source 1..75: mol_type = other DNA
tcatattgcggagaaatcggaccggctccggataaccttatcgccagagattttaaggcggagcaacctaatcag

SEQ ID NO: 795115 - DNA, 75 bp, synthetic construct
  source 1..75: mol_type = other DNA
tttctggggctttacggaactctccatcaataccgaactgcttgcccagggcaaaatcatgattgaccgtgcggc

SEQ ID NO: 795116 - DNA, 75 bp, synthetic construct
  source 1..75: mol_type = other DNA
cttattcgctcaatgtcccgtaaaggatgttcacctgataatgctgcatacgaaggctttttcggcaggctgaaa

SEQ ID NO: 795117 - DNA, 75 bp, synthetic construct
  source 1..75: mol_type = other DNA
tttgaaaattgacctagattatttaaatatttcattgatttcagttgatggaatatcatttaaaatatacgcagc

SEQ ID NO: 795118 - DNA, 75 bp, synthetic construct
  source 1..75: mol_type = other DNA
gaaaagtattaaggaacatgatatcgataacgaagtcatcttctatgttatcgaagaacctgaagcacacctaca

SEQ ID NO: 795119 - DNA, 75 bp, synthetic construct
  source 1..75: mol_type = other DNA
tgatgactcagcaatccaatattacctcatagataacatgataagatgtaacgttttccctaataaggtaatcgc

SEQ ID NO: 795120 - DNA, 75 bp, synthetic construct
  source 1..75: mol_type = other DNA
ggaggaagtcgcccgactgaatcaggaaatacgccgccggcagatggagctggatattctgaaaaaagcggagga

SEQ ID NO: 795121 - DNA, 75 bp, synthetic construct
  source 1..75: mol_type = other DNA
ctcaggatccgattgggctgaaggggggatggaatttttatcagtatccgttgaatccggtcataaatgtagatc

SEQ ID NO: 795122 - DNA, 75 bp, synthetic construct
  source 1..75: mol_type = other DNA
cataaatgtagatccgcaaggtttggttgatataaatttataccccgaaagggctttgttgaataaatcgaactt

SEQ ID NO: 795123 - DNA, 75 bp, synthetic construct
  source 1..75: mol_type = other DNA
ggcctggcaggacgtgataaaagcgggcgcactggcgctgcatatctccggcagcttccccgatctgaacctcca

SEQ ID NO: 795124 - DNA, 75 bp, synthetic construct
  source 1..75: mol_type = other DNA
aatgcagcaggccttattcgctcaatgtcccgtaaaggatgttcgcctgataatgctgcatgcgaaggctttttc

SEQ ID NO: 795125 - DNA, 75 bp, synthetic construct
  source 1..75: mol_type = other DNA
gcgataaatacgccacgatacgtacgatgctgacagatatctttaatagtaactaccagtgttatggctattgtc

SEQ ID NO: 795126 - DNA, 75 bp, synthetic construct
  source 1..75: mol_type = other DNA
atgaaacttaaattattgctaaatagtggcatcgtcggtattagtctgtttactagcggggtgagcgcggcgacg

SEQ ID NO: 795127 - DNA, 75 bp, synthetic construct
  source 1..75: mol_type = other DNA
atttatctgaccggtattttcatgacctggcgtagagcgcgtggctttattaaacaagagaaagccgttctcgca

SEQ ID NO: 795128 - DNA, 75 bp, synthetic construct
  source 1..75: mol_type = other DNA
gctggtcgatgctatcatcgagaaaatcccaggcgttaaccgaattaaatttagcgccgatgatattcagcgcaa

SEQ ID NO: 795129 - DNA, 75 bp, synthetic construct
  source 1..75: mol_type = other DNA
ggtggtaaatgttgatatctggaatatctggcatatgaccttcaccggcgcattgctgcatctggcaaccggttc

SEQ ID NO: 795130 - DNA, 75 bp, synthetic construct
  source 1..75: mol_type = other DNA
gcacattgtcagagttacgccgggaaatgtcagcatcagaaatcatgatgtgggcagaatttgacaggttcagtc

SEQ ID NO: 795131 - DNA, 75 bp, synthetic construct
  source 1..75: mol_type = other DNA
gaatttgcaaaactggataaaatgggcgtgaaagtctaccaggtagataaagctccgtttatcgagaaagtatag

SEQ ID NO: 795132 - DNA, 75 bp, synthetic construct
  source 1..75: mol_type = other DNA
tggaggcgcccgcagcttctacggcaataaaccggtgctgaaaccagacgatctcaaaggaatgaaagttcgtgt

SEQ ID NO: 795133 - DNA, 75 bp, synthetic construct
  source 1..75: mol_type = other DNA
tgagtgaggaaagccgccgctggctggcatcgtgcggcctgaccgtggagcagatgaaaaaccagatggacccgg

SEQ ID NO: 795134 - DNA, 75 bp, synthetic construct
  source 1..75: mol_type = other DNA
acccgcatcagctgcagcagctcattcgcctgccggggcagcagtatgatgaggagtccggcctgtattacaacc

SEQ ID NO: 795135 - DNA, 75 bp, synthetic construct
  source 1..75: mol_type = other DNA
ggtgcctccgctacgggaaagagagggcgatgtccgttttctggctgagcacttcctcgaaaaatcgggctgcgg

SEQ ID NO: 795136 - DNA, 75 bp, synthetic construct
  source 1..75: mol_type = other DNA
cgagaaaatcccaggcgttaaccgaattaaatttagcgccgacgatattcagcgcaaatttggtccatttggcga

SEQ ID NO: 795137 - DNA, 75 bp, synthetic construct
  source 1..75: mol_type = other DNA
cggcgatactttcagtggctctactgggtatttctctgatcgtatctaacctagattttcgtggtcgagcaatag

SEQ ID NO: 795138 - DNA, 75 bp, synthetic construct
  source 1..75: mol_type = other DNA
tatttactactgccgccctttatatactcccattaatatatctttggattgactatgactgcaagcagaattttt

SEQ ID NO: 795139 - DNA, 75 bp, synthetic construct
  source 1..75: mol_type = other DNA
ccgtcttgaggctcatgatgaacgttcttgctcattattcagtgaggtttgtggagtgctgcttcagcgcgttca

SEQ ID NO: 795140 - DNA, 75 bp, synthetic construct
  source 1..75: mol_type = other DNA
gacattaataaacccgatgggccagcaacagcagggatagatgatttgggtgaaattttagctaaaatgaaacag

SEQ ID NO: 795141 - DNA, 75 bp, synthetic construct
  source 1..75: mol_type = other DNA
tggcggcgtgaacgggacctgacgggctggatgtcgctgtcacggaaaccgcaagtgacctggtacggctgggac

SEQ ID NO: 795142 - DNA, 75 bp, synthetic construct
  source 1..75: mol_type = other DNA
ggctctgggaaaaataaagactggtcacgggtaaaatttggtgctggtcgttatcgtctcttctttcgttatagt

SEQ ID NO: 795143 - DNA, 75 bp, synthetic construct
  source 1..75: mol_type = other DNA
ctaaatcactgcctgatgactttattacttggtttaatagtatgcgcattctaagaaatcgttttatgcatacgg

SEQ ID NO: 795144 - DNA, 75 bp, synthetic construct
  source 1..75: mol_type = other DNA
gcggcctgccgctggcccttatcagcaaggaagggacaacagaatggtgcgcagaatacgatgaatggggcaacc

SEQ ID NO: 795145 - DNA, 75 bp, synthetic construct
  source 1..75: mol_type = other DNA
acctgctgaatgaagagaacccgcaccagctgcagcagctcatccgcctgccgggtcagcagtatgatgaggagt

SEQ ID NO: 795146 - DNA, 75 bp, synthetic construct
  source 1..75: mol_type = other DNA
cacataagttgctcaatactgttgatgcggtatataccgtttcttctcaagttgggtttgaagcattgctcttgg

SEQ ID NO: 795147 - DNA, 75 bp, synthetic construct
  source 1..75: mol_type = other DNA
gtacgcactctctttcgcaatgggaattgtcgataccacgccgattattaatgctcactggtttgcgctgccaac

SEQ ID NO: 795148 - DNA, 75 bp, synthetic construct
  source 1..75: mol_type = other DNA
cggaactcgtgtttcctgatggtgaaacgttgcaagcaagactcactactttccctcccagcccacagcactggt

SEQ ID NO: 795149 - DNA, 75 bp, synthetic construct
  source 1..75: mol_type = other DNA
gtggcgcttcaggcattggccaccacagccggatgcggcgtgaacgccttatccggcctacgaatggcgcggaaa

SEQ ID NO: 795150 - DNA, 75 bp, synthetic construct
  source 1..75: mol_type = other DNA
ggactggcgaaagatctcgacgaggcggctgagctggcggcttccggggagatcaccttctcgccgtgccacgag

SEQ ID NO: 795151 - DNA, 75 bp, synthetic construct
  source 1..75: mol_type = other DNA
tacatatcctttggataataaaatattgattcggggcaatgcattgctaaggctattacgaacatccagagtgag

SEQ ID NO: 795152 - DNA, 75 bp, synthetic construct
  source 1..75: mol_type = other DNA
aatataacatacattcatcttttgtggatgtggatgtggagttgagagaatcggatggtagtgcaatagttgtta

SEQ ID NO: 795153 - DNA, 75 bp, synthetic construct
  source 1..75: mol_type = other DNA
aagaacagaaattccagttagagatttacaaactggtcatgaaccagaacgcagccgcagaagaagcatttcagt

SEQ ID NO: 795154 - DNA, 75 bp, synthetic construct
  source 1..75: mol_type = other DNA
cttccagtcaggcggcgctaattcagatatcacgacccgcacaatcgaagcggtgcgtaaatcgaaggaagcgtt

SEQ ID NO: 795155 - DNA, 75 bp, synthetic construct
  source 1..75: mol_type = other DNA
tccttgacgccgtcttctcgttggatgcggtaattacggcagtagggatggttaaccatctgccggtgatgatgg

SEQ ID NO: 795156 - DNA, 75 bp, synthetic construct
  source 1..75: mol_type = other DNA
aagaacagaaattccagttagagatttacaagctggtcatgaaccagaacgcagccgcagaggaagcatttcagt

SEQ ID NO: 795157 - DNA, 75 bp, synthetic construct
  source 1..75: mol_type = other DNA
ataataaggccgttgcctatgactgcggagaatggattgtcgaaccatcatattggttaagaattggaaatccaa

SEQ ID NO: 795158 - DNA, 75 bp, synthetic construct
  source 1..75: mol_type = other DNA
tcattggtactgacgagttgaagcttgagctattcaaaattcacttccagtcaggcggcgctaattcagatatca

SEQ ID NO: 795159 - DNA, 75 bp, synthetic construct
  source 1..75: mol_type = other DNA
gcaacaaccgaactgcatgaacggctggaaaaccgcgatcatgattccggccacggtaaaggctacgccagtttc

SEQ ID NO: 795160 - DNA, 75 bp, synthetic construct
  source 1..75: mol_type = other DNA
cgaaattggggacggcatgactgaaggtgtatttatgctgccgaaactgaaaacggatgatatgaaaaccggtaa

SEQ ID NO: 795161 - DNA, 75 bp, synthetic construct
  source 1..75: mol_type = other DNA
gttcagctgacgaacagtggttccgatccgcttgtcggggttacctgggcggatgccggaaccagcgcagaagac

SEQ ID NO: 795162 - DNA, 75 bp, synthetic construct
  source 1..75: mol_type = other DNA
gcagtagggatggttaaccatctgccggtgatgatggcggcggtagtgattgcgatggcggttatgttgctggca

SEQ ID NO: 795163 - DNA, 75 bp, synthetic construct
  source 1..75: mol_type = other DNA
gacgaaacgccggaaatcattaccgacggtgacggctggctggtaaaaggcggtacagatttgcatgccttgcag

SEQ ID NO: 795164 - DNA, 75 bp, synthetic construct
  source 1..75: mol_type = other DNA
tccttgatgccgtcttctcgctggatgcggtgattactgcagtagggatggtcaaccatctgccggtgatgatgg

SEQ ID NO: 795165 - DNA, 75 bp, synthetic construct
  source 1..75: mol_type = other DNA
gattgtttaccagagcgcggggatcaccgcctcgatgcccggcgtggcgctgaaaaatggcgcaaaggcgagatg

SEQ ID NO: 795166 - DNA, 75 bp, synthetic construct
  source 1..75: mol_type = other DNA
cctccgggctcgctgggctactggcctgatgatcagcgacaattacagaacggtaaataacattaccctgggtaa

SEQ ID NO: 795167 - DNA, 75 bp, synthetic construct
  source 1..75: mol_type = other DNA
cctccgggctcgcagggctactggcctgatgaacagcgacaattacagaacggtaaataacattaccctgggtaa

SEQ ID NO: 795168 - DNA, 75 bp, synthetic construct
  source 1..75: mol_type = other DNA
atacgcgctggtgcgtaccgaccagccgggattcagcgcctgtacccgctctcagttaataaacaggatagatat

SEQ ID NO: 795169 - DNA, 75 bp, synthetic construct
  source 1..75: mol_type = other DNA
attgatattctccgggctcgcagggcgaccggcctgatgacccggaacaattacaaaatggtaaataacattacc

SEQ ID NO: 795170 - DNA, 75 bp, synthetic construct
  source 1..75: mol_type = other DNA
cctccgggctcgcggggctactggcctgatgagcagcgacaattacagaacggtaaataacattaccctgggtaa

SEQ ID NO: 795171 - DNA, 75 bp, synthetic construct
  source 1..75: mol_type = other DNA
cctccgggctcgccgggctactggcctgatgaccagcgacaattacagaacggtaaataacattaccctgggtaa

SEQ ID NO: 795172 - DNA, 75 bp, synthetic construct
  source 1..75: mol_type = other DNA
accggcctgatgacccgcgataactacagaacggtaaataacattacccggggtaagcatccggaggcgaaacaa

SEQ ID NO: 795173 - DNA, 75 bp, synthetic construct
  source 1..75: mol_type = other DNA
acggcctcacactgaatgacacaccgttagcagatgaacgtgtgattgagcagcatattgaagcagggatttcac

SEQ ID NO: 795174 - DNA, 75 bp, synthetic construct
  source 1..75: mol_type = other DNA
cagcatattgaggccggcatttcactgtgcgatgcactgaactttctcgttgaaaaatacgccctggtacgtacc

SEQ ID NO: 795175 - DNA, 75 bp, synthetic construct
  source 1..75: mol_type = other DNA
atacgcgctggtgcgtaccgaccagccgggattcagcgcctgtacccgctctcagttaataaacagaatggatat

SEQ ID NO: 795176 - DNA, 75 bp, synthetic construct
  source 1..75: mol_type = other DNA
atacgcgctggtgcgtaccgaccagccgggattcagcgcctgtacccgatctcagttaataaacagcatcgatat

SEQ ID NO: 795177 - DNA, 75 bp, synthetic construct
  source 1..75: mol_type = other DNA
cgactgctggaccagcactatggcctcacactgaatgacacaccgtttgccgatgaacgtgtgattgagcagcat

SEQ ID NO: 795178 - DNA, 75 bp, synthetic construct
  source 1..75: mol_type = other DNA
gccgatgaacgtgtgatcgagcagcatattgaggcaggcatttcactgtgtgatgcggtgaactttctcgtggaa

SEQ ID NO: 795179 - DNA, 75 bp, synthetic construct
  source 1..75: mol_type = other DNA
cggtgaactttctcgttgaaaaatacgcgctggtacgtaccgaccagccgggattcagcgcaggagccccatcgc

SEQ ID NO: 795180 - DNA, 75 bp, synthetic construct
  source 1..75: mol_type = other DNA
tcctccgggcccgccgggcaaccggcctgatgacccgcagcaactacagaatggtgaacgacatcatccggggtg

SEQ ID NO: 795181 - DNA, 75 bp, synthetic construct
  source 1..75: mol_type = other DNA
tgattctgtcggtagcactgataataccgatagcatccaatgcttctgatgctttgaaccagccgagcagtagtc

SEQ ID NO: 795182 - DNA, 75 bp, synthetic construct
  source 1..75: mol_type = other DNA
ttcgcctgacctgtgcggaatggtggaaacgcaaactgtggctgttacgttgcgagtggcgggaagaacaactcc

SEQ ID NO: 795183 - DNA, 75 bp, synthetic construct
  source 1..75: mol_type = other DNA
gatgcagcacctgttacggggcggcagtctgtacgttgacggcagcatcattgcaccgcagggatttgaaattgt

SEQ ID NO: 795184 - DNA, 75 bp, synthetic construct
  source 1..75: mol_type = other DNA
ttgttccacgcaaggactacctgattcgcaccgcctacgacctcgccgatgagctgaacgattacggcgaacaga

SEQ ID NO: 795185 - DNA, 75 bp, synthetic construct
  source 1..75: mol_type = other DNA
cctcgtcgcagttaatcaacagcatcgatatcctccgggctcgccgggcaacaggcctgatgacccgcgacaatt

SEQ ID NO: 795186 - DNA, 75 bp, synthetic construct
  source 1..75: mol_type = other DNA
tgatggtttccggtattgtcagttacacccgctggcctgcgctatcagggccaccaaagttatgtatcttttcat

SEQ ID NO: 795187 - DNA, 75 bp, synthetic construct
  source 1..75: mol_type = other DNA
ggcgaaggacgccatccgctgtatcaaaaattgattgccgcagcgccgactgcagtcgcgccggaagagagcgga

SEQ ID NO: 795188 - DNA, 75 bp, synthetic construct
  source 1..75: mol_type = other DNA
ctcacccggttactggaccagcactacggcctcacactgaatgacacaccgtttgccgatgaacgtgtgattgag

SEQ ID NO: 795189 - DNA, 75 bp, synthetic construct
  source 1..75: mol_type = other DNA
ttaccttcccgaacgctgtaccgtctttatcaccatcggtacaaccgtagaagccgttgccagggcattactcaa

SEQ ID NO: 795190 - DNA, 75 bp, synthetic construct
  source 1..75: mol_type = other DNA
gttcgctgatgaacgtgtgattgagcagcatattgaggcagggatttcactgtgtgatgcggtgaactttctcgt

SEQ ID NO: 795191 - DNA, 75 bp, synthetic construct
  source 1..75: mol_type = other DNA
cagcacatcgacgccgggatatcactggcggatgcgctcaactttatggtggagaaatcagagctggtacgtatc

SEQ ID NO: 795192 - DNA, 75 bp, synthetic construct
  source 1..75: mol_type = other DNA
gatccacaagtgattgaacgagtcgaagcgaacgaaatgccaggtaataaaataggcctgttgaatgtgcatcat

SEQ ID NO: 795193 - DNA, 75 bp, synthetic construct
  source 1..75: mol_type = other DNA
tatctgcgctataacattgaattaaaagacgatgagcaaatcgatatcaaaaaagagctgtatcaaattaaagac

SEQ ID NO: 795194 - DNA, 75 bp, synthetic construct
  source 1..75: mol_type = other DNA
cccggacagccgaatcacgcagctctggcagcgcctgagccgtaatcacggcgtaagcagcacggagatccgcca

SEQ ID NO: 795195 - DNA, 75 bp, synthetic construct
  source 1..75: mol_type = other DNA
aacttaagaacaacagcgcatacgcagcggataacttcgttcgtcacgggctgcgtgcccgtctgaaacgcatca

SEQ ID NO: 795196 - DNA, 75 bp, synthetic construct
  source 1..75: mol_type = other DNA
gtacctggtccggcgtaccggtggaaggttcactggttaacgtccgtattatcgcggtaatgtctggcgggatcc

SEQ ID NO: 795197 - DNA, 75 bp, synthetic construct
  source 1..75: mol_type = other DNA
cgatatcgtctctaaaatcggcattccaatgatcctcggcagcgtctgtatcggctttattgtgctgctggtgca

SEQ ID NO: 795198 - DNA, 75 bp, synthetic construct
  source 1..75: mol_type = other DNA
gacacagagcacgcacaaagaatcaatgaaaccactgaacgcgcccgccgcaaggctactttgctccaaaagaga

SEQ ID NO: 795199 - DNA, 75 bp, synthetic construct
  source 1..75: mol_type = other DNA
aaaacccaccaccggaaaccaggaaagaacaaaaactggtcgtcccgggaggtgatttgggtgagtggttaaggt

SEQ ID NO: 795200 - DNA, 75 bp, synthetic construct
  source 1..75: mol_type = other DNA
aggccattcagagctacatcaacgaggacattcgcattgatgccagactggatgaagaaaccgtcgcctttctga

SEQ ID NO: 795201 - DNA, 75 bp, synthetic construct
  source 1..75: mol_type = other DNA
acacagagccgcaaacagccacggcctttgcctgataaccacgaattactcgctaaagaatggcgggaatctgcc

SEQ ID NO: 795202 - DNA, 75 bp, synthetic construct
  source 1..75: mol_type = other DNA
ccagttccagttctttggtatcccctcccgtcaggtgtggcgtgaactgcgccgccttgccagccagatggcacg

SEQ ID NO: 795203 - DNA, 75 bp, synthetic construct
  source 1..75: mol_type = other DNA
attaaagctgtctttaaacatgacaaaggagcgtttgttgcggcatggcaggccagagaagatcagccagggctt

SEQ ID NO: 795204 - DNA, 75 bp, synthetic construct
  source 1..75: mol_type = other DNA
accccggcaagctatatcgcgacctatatcggtaagaacctggacgccagcgtatttatgggaaatgacccgaaa

SEQ ID NO: 795205 - DNA, 75 bp, synthetic construct
  source 1..75: mol_type = other DNA
taatccgctgcacaccatgcacacccacgcgcgggaaacctgcctggcgttagggaaacccgccgatgacgctac

SEQ ID NO: 795206 - DNA, 75 bp, synthetic construct
  source 1..75: mol_type = other DNA
taatccgctgcataccatgcacacccacgcgcgggaaacctgcctggcgctggggaaaaccaccgatgacgctac

SEQ ID NO: 795207 - DNA, 75 bp, synthetic construct
  source 1..75: mol_type = other DNA
caggcgcgcatcctcgatctgctggaaagcattatgcaaaaacaagcgccgggaatgctgctggtcacccatgat

SEQ ID NO: 795208 - DNA, 75 bp, synthetic construct
  source 1..75: mol_type = other DNA
accggcctgatggtccgcgacaattacagaacggtaaataacattaccctgggtaaacatccgggggcgaaacaa

SEQ ID NO: 795209 - DNA, 75 bp, synthetic construct
  source 1..75: mol_type = other DNA
tgatatcctccgggcccgccgggcaaccggcctgatggtccgcgacaattacagaacggtaaataacattaccct

SEQ ID NO: 795210 - DNA, 75 bp, synthetic construct
  source 1..75: mol_type = other DNA
caagtgttgcgaaagccatcgctgaaatattaggcgcaaccaataaaaaagacggttacattgagtgcggcagtg

SEQ ID NO: 795211 - DNA, 75 bp, synthetic construct
  source 1..75: mol_type = other DNA
accgacgcacaccgccggaccctgaacgggttccgggtgcggtactgcgcatcacctgcgcgacctggtggaaca

SEQ ID NO: 795212 - DNA, 75 bp, synthetic construct
  source 1..75: mol_type = other DNA
cccatccggacgaatggaaactggtcagaaaagaagcgaaaaccgacaacagcacggacgaggattttgacgttg

SEQ ID NO: 795213 - DNA, 75 bp, synthetic construct
  source 1..75: mol_type = other DNA
cgtacccgtggaacgccccgctaccggttatcgatcctgaaacgttcggcagagcgcagccaaccgcattacgcc

SEQ ID NO: 795214 - DNA, 75 bp, synthetic construct
  source 1..75: mol_type = other DNA
cgcagatgagctgaacgattacggcgaacagagcgtacagatttacgggatctggtcgccgctcatcggggagtc

SEQ ID NO: 795215 - DNA, 75 bp, synthetic construct
  source 1..75: mol_type = other DNA
gcaacgactgaaagatgacgcaatggatgcggtactcgctgccgccgatgccgggtgttttgccacctacattga

SEQ ID NO: 795216 - DNA, 75 bp, synthetic construct
  source 1..75: mol_type = other DNA
caatcgttgccgagttaaagaaacgtggctttatcgaaaacaaaggcaaagacattatcagtaccaggctgggaa

SEQ ID NO: 795217 - DNA, 75 bp, synthetic construct
  source 1..75: mol_type = other DNA
attctggaaccctctgccggcaccggggccatactgcgggcgattcgggataccgcgccgggggccatgtgtgat

SEQ ID NO: 795218 - DNA, 75 bp, synthetic construct
  source 1..75: mol_type = other DNA
ccggcaccggggccatactgcgggcgattcgtcatgtcgcgccgggggccatgtgtgatgcggtggagattaaca

SEQ ID NO: 795219 - DNA, 75 bp, synthetic construct
  source 1..75: mol_type = other DNA
taccgttttctgacgtccgcgaggagctgccgcgcggcacgtttgcttatacccgtgttccgacgatgattattc

SEQ ID NO: 795220 - DNA, 75 bp, synthetic construct
  source 1..75: mol_type = other DNA
gataatgacatgcacagtcagttaagagaacgtatccggctgctgcgcgcaaggctggataacgccgcgccggtt

SEQ ID NO: 795221 - DNA, 75 bp, synthetic construct
  source 1..75: mol_type = other DNA
taatcacgaggatgtcacctggtcgtctattgctgcaggatttaaaggactaatcccttcaaaagtaaaatcccg

SEQ ID NO: 795222 - DNA, 75 bp, synthetic construct
  source 1..75: mol_type = other DNA
ggtgacgctggcggagatcagcaaccgtgatcacattctggaaccctctgccggcaccggagccatactgcgggc

SEQ ID NO: 795223 - DNA, 75 bp, synthetic construct
  source 1..75: mol_type = other DNA
ggtgacgctggcggagatcagcaaccatgatcacattctggagccctctgccggcaccggagccatactgcgggc

SEQ ID NO: 795224 - DNA, 75 bp, synthetic construct
  source 1..75: mol_type = other DNA
aatgagtctggcaattacggtgtgttatacgctggcattgctggttgctctcaccagaatcgacaatcaaaagta

SEQ ID NO: 795225 - DNA, 75 bp, synthetic construct
  source 1..75: mol_type = other DNA
cgccgggcaacaggcctgatgacccgcgacaattacagaacggtaaataacattaccctggggaagcatccggag

SEQ ID NO: 795226 - DNA, 75 bp, synthetic construct
  source 1..75: mol_type = other DNA
taccattttctgacgtccgcgaggagctgccgcgcggcacgtttgcttatacccatgttccgacgatgattattc

SEQ ID NO: 795227 - DNA, 75 bp, synthetic construct
  source 1..75: mol_type = other DNA
ttctatttttcgatagaaacgatgtcaacggtgggctatggcgatatcgtccctgtttctgaatcggcacgtctg

SEQ ID NO: 795228 - DNA, 75 bp, synthetic construct
  source 1..75: mol_type = other DNA
ggtgacgctggcggggatcagcaaccgtgatcacattctggaaccctctgccggcaccggggccatactgcgggc

SEQ ID NO: 795229 - DNA, 75 bp, synthetic construct
  source 1..75: mol_type = other DNA
ttgagcgatggggggcatgggcagcaaataatcatgaagatgtaacatggccctcgatagctgctggttttaaag

SEQ ID NO: 795230 - DNA, 75 bp, synthetic construct
  source 1..75: mol_type = other DNA
gtgaggcttgagatggatcggtatgttgagcgtgaattgccgggagggagaacctctgtattttatcagcgaaaa

SEQ ID NO: 795231 - DNA, 75 bp, synthetic construct
  source 1..75: mol_type = other DNA
ctttataaagcggaaggtattattgaaggaatgcttatggctctgaatgtccggttagatatggatatgcggtag

SEQ ID NO: 795232 - DNA, 75 bp, synthetic construct
  source 1..75: mol_type = other DNA
tggagcggtggggagcatgggcagcaaataatcatgaagatgtaacatggtcctcgatagctgctggttttaaag

SEQ ID NO: 795233 - DNA, 75 bp, synthetic construct
  source 1..75: mol_type = other DNA
atgtcaccgcagaataatcatctgcagcgtccccctgccgctgtgttatacgccgatgaactggcaaaattaaaa

SEQ ID NO: 795234 - DNA, 75 bp, synthetic construct
  source 1..75: mol_type = other DNA
tcgttgccatcgtttactgaaacgaaagcagatgacctgattctaccatcgctgcatgtggctaaccgcgagttg

SEQ ID NO: 795235 - DNA, 75 bp, synthetic construct
  source 1..75: mol_type = other DNA
aacgctggggagcatgggcggcaaataatcatgaggatgtgacctggtcgcccattgcctctggatttaaggggc

SEQ ID NO: 795236 - DNA, 75 bp, synthetic construct
  source 1..75: mol_type = other DNA
tcaaatcaagtacggctggaactacgccctgcttatcaaccatggtccgtcaacggaagcgctggtccctgcccc

SEQ ID NO: 795237 - DNA, 75 bp, synthetic construct
  source 1..75: mol_type = other DNA
tgacctggtcgtccattgccgctggttttaagggattaattccttcaaaagtaagatctcgtccgcaatgctgtg

SEQ ID NO: 795238 - DNA, 75 bp, synthetic construct
  source 1..75: mol_type = other DNA
ggggcatgggcggcaaataaccatgaggatgttacatggtcgcccattgctgccggatttaagggactgatcccc

SEQ ID NO: 795239 - DNA, 75 bp, synthetic construct
  source 1..75: mol_type = other DNA
aaggctgagggcataattgaagggatgttaatggcattagatatccggttagagggtaatgactccaacttactg

SEQ ID NO: 795240 - DNA, 75 bp, synthetic construct
  source 1..75: mol_type = other DNA
ctggtgaagccagtcagctctatgcgcgggaaggctttaatattattgccactgccaatacccgcgatcgcggcg

SEQ ID NO: 795241 - DNA, 75 bp, synthetic construct
  source 1..75: mol_type = other DNA
cctatagctgctgggtttaaagggcttcttccctatacaagtaaaacacgtcaggcttgttcagatagtgatgca

SEQ ID NO: 795242 - DNA, 75 bp, synthetic construct
  source 1..75: mol_type = other DNA
accggcctgatggtccgcgacaattacagaacggtaaataacattaccctgggtaaacatccgaggacgaaacaa

SEQ ID NO: 795243 - DNA, 75 bp, synthetic construct
  source 1..75: mol_type = other DNA
caaagaccggaggaacgaaccagacacggagctgctgccgggcgcaatccttcgcctgacctgtgcggaatggtg

SEQ ID NO: 795244 - DNA, 75 bp, synthetic construct
  source 1..75: mol_type = other DNA
ggcaacaaccgcgccacgcagtagggcgtgaaggaacggggatccccgcacctgaatccgcgctttcctcctggc

SEQ ID NO: 795245 - DNA, 75 bp, synthetic construct
  source 1..75: mol_type = other DNA
ggcttaccggatgctggcccgtatcgcattacgcctgcacatcatgccgccacattacgaagccctgaacaagag

SEQ ID NO: 795246 - DNA, 75 bp, synthetic construct
  source 1..75: mol_type = other DNA
atgaaaacattacccgacacacacgtacgggaggcatcgcgctgcccgtctcccgtcaccatctggcagacactg

SEQ ID NO: 795247 - DNA, 75 bp, synthetic construct
  source 1..75: mol_type = other DNA
ggaaaaatacgcgctggtgcgtaccggccagccgggattcagcgcctgtacccgctctcagttaataaacagcat

SEQ ID NO: 795248 - DNA, 75 bp, synthetic construct
  source 1..75: mol_type = other DNA
gcgcataaaacaggacaaaaacgggatttcagaatcccgtaaacgattaattaatcaacataaggaaaagcgaca

SEQ ID NO: 795249 - DNA, 75 bp, synthetic construct
  source 1..75: mol_type = other DNA
gccacgccgctgggcaacctgattaataaaagcctggacgcacaggaaaaacaggacaaaaccatcacactggca

SEQ ID NO: 795250 - DNA, 75 bp, synthetic construct
  source 1..75: mol_type = other DNA
gcggggtagcctgaccagtggaaacaaaaaacagacagaaacgggattcacaaatcccgtaaatgagcaaaaaac

SEQ ID NO: 795251 - DNA, 75 bp, synthetic construct
  source 1..75: mol_type = other DNA
acgcgcacggaaccctgcgcaaaatattcgaacgtctggactgcaccgaccgtcactggctgactccgggttatc

SEQ ID NO: 795252 - DNA, 75 bp, synthetic construct
  source 1..75: mol_type = other DNA
ctttgctcatccggaagaaatcgacagcatcgtggccatcacccgcgatattgccattcaggaagaccgccacga

SEQ ID NO: 795253 - DNA, 75 bp, synthetic construct
  source 1..75: mol_type = other DNA
actgaacgcgcccgccgcaaagcagacctgctgcggggtggcctgaccagtggaaacaaaaaacagacagaaacg

SEQ ID NO: 795254 - DNA, 75 bp, synthetic construct
  source 1..75: mol_type = other DNA
tggcatccgcacggtggagcctcaccatgacggcaccgtgcactggcatatgatggtctttgctcatccggaaga

SEQ ID NO: 795255 - DNA, 75 bp, synthetic construct
  source 1..75: mol_type = other DNA
cagtgaactttcttgttgaaaaatacgcactggtgcgtaccgaccagccggaattcagtgcctgtacccgttctc

SEQ ID NO: 795256 - DNA, 75 bp, synthetic construct
  source 1..75: mol_type = other DNA
ctcacccgactgctggaccagcactatggcctcacgctgaatgacacaccgttcgctgatgaacgtgtgattgag

SEQ ID NO: 795257 - DNA, 75 bp, synthetic construct
  source 1..75: mol_type = other DNA
agcgggcggtgaagccctgcctgtcacccgtggctgtctggcaaatgctactgacacgcctgctggaacagcact

SEQ ID NO: 795258 - DNA, 75 bp, synthetic construct
  source 1..75: mol_type = other DNA
tgtgtgatgcggtgaactttctcgtggaaaaatacgcgctggtgcgtaccggccagccgggattcagcgcctgta

SEQ ID NO: 795259 - DNA, 75 bp, synthetic construct
  source 1..75: mol_type = other DNA
accggcctgatgacccgcgacaattacagaacggtaaataacattacccttggtaagtatccggaggcgaaatga

SEQ ID NO: 795260 - DNA, 75 bp, synthetic construct
  source 1..75: mol_type = other DNA
ggcaaccggcctgatgacccgcagcaactacagaatggtgaacgacatcatccggggtgaacattcggaggcgaa

SEQ ID NO: 795261 - DNA, 75 bp, synthetic construct
  source 1..75: mol_type = other DNA
ggcaaccggcctgatgacacgcgacaactacagaacggtaaataacattaccctgggtaaacatccgggggcgaa

SEQ ID NO: 795262 - DNA, 75 bp, synthetic construct
  source 1..75: mol_type = other DNA
gctcgcagggcgaccggcctgatgacccgcgacaattacagaacggtaaataacattacccaggggaagcatccg

SEQ ID NO: 795263 - DNA, 75 bp, synthetic construct
  source 1..75: mol_type = other DNA
tcccgtcaccatctggcagacactactcacccgactgctggaccagcactacggcctcacgctgaatgacacacc

SEQ ID NO: 795264 - DNA, 75 bp, synthetic construct
  source 1..75: mol_type = other DNA
tcccgtcaccatctggcagacactgctcatccgactgctggaccagcattacggcctcacactgaatgacacacc

SEQ ID NO: 795265 - DNA, 75 bp, synthetic construct
  source 1..75: mol_type = other DNA
cgaccggcctgatgacccggaacaattacagaatggtaaataacattacccagggcaagcatccggaggcaaaac

SEQ ID NO: 795266 - DNA, 75 bp, synthetic construct
  source 1..75: mol_type = other DNA
tgctgtcccgactgctggaccagcactatggcctcacgctgaatgacacaccgttcgctgatgaacgtgtgattg

SEQ ID NO: 795267 - DNA, 75 bp, synthetic construct
  source 1..75: mol_type = other DNA
tcccgtcaccatctggcagacactgctcacccgactgttggaccagcattacggcctcacactgaatgacacacc

SEQ ID NO: 795268 - DNA, 75 bp, synthetic construct
  source 1..75: mol_type = other DNA
gagcgtctcaagatgctcgacacactgcaggccacgcaactgcagtcggcggtggtgcgggcgatgtatgccgcg

SEQ ID NO: 795269 - DNA, 75 bp, synthetic construct
  source 1..75: mol_type = other DNA
cctgacgtactggctttactgaaagagctggaagttaaagataaacgcattgcagaattgacagacgcgcttaca

SEQ ID NO: 795270 - DNA, 75 bp, synthetic construct
  source 1..75: mol_type = other DNA
cggacggctgacgtatacccagaccaaaagtaaaaaaaatcgtaccgttccgatttcagagcagttacaaaatat

SEQ ID NO: 795271 - DNA, 75 bp, synthetic construct
  source 1..75: mol_type = other DNA
tattccagtgccagggcatccgccaatgagtcgtggcggtattttatggggaaacgaaaatttgtggccagccga

SEQ ID NO: 795272 - DNA, 75 bp, synthetic construct
  source 1..75: mol_type = other DNA
atgagaaagagctggcgctgatgggcgaggattatcaggacattttccgccagcaggtcagggaatctgcagagc

SEQ ID NO: 795273 - DNA, 75 bp, synthetic construct
  source 1..75: mol_type = other DNA
tgaagctctacccgttcgagatgagcggcggcatgttgcagcgcatgatgattgcgatggcggtgctgtgcgaat

SEQ ID NO: 795274 - DNA, 75 bp, synthetic construct
  source 1..75: mol_type = other DNA
aggaatgtttggcgagatcgacgtggaagggaaacgcacgtttacggaatttatccgtgaaggggtgggcgtgca

SEQ ID NO: 795275 - DNA, 75 bp, synthetic construct
  source 1..75: mol_type = other DNA
gcttcctaaaaaacgcggggcgcttttttcaccatgttatgaggcttttgacaccgctattaagagagcaaagat

SEQ ID NO: 795276 - DNA, 75 bp, synthetic construct
  source 1..75: mol_type = other DNA
tcgagccggtggaggacgggcagacccgtggggcaaatcagttttacagcgtcatggaacggctgaagatgcttg

SEQ ID NO: 795277 - DNA, 75 bp, synthetic construct
  source 1..75: mol_type = other DNA
tctcgcggaaatgcccgcgctgacgatctggtgcgaaataatggctacgcggcaaacgccgtgcagctccaccag

SEQ ID NO: 795278 - DNA, 75 bp, synthetic construct
  source 1..75: mol_type = other DNA
cagagcaaactgacaggctggctcggtgaaatggcgtcctattactcagctgcgcctgttcgcctgggtggggca

SEQ ID NO: 795279 - DNA, 75 bp, synthetic construct
  source 1..75: mol_type = other DNA
gaatagcgtgacgctgggcggtgtcaaaattccgcaccttttccccggtgatgatctgaaactacagacagcgca

SEQ ID NO: 795280 - DNA, 75 bp, synthetic construct
  source 1..75: mol_type = other DNA
cgtggatggaatactgcgatccggtgtttggtacgatggatgtggaagggcgtcgttcgtttaccgaatttattc

SEQ ID NO: 795281 - DNA, 75 bp, synthetic construct
  source 1..75: mol_type = other DNA
gaacgtaatatttatgacctcatcgtaagaacatacctggctcagttttatccagtgcatgaatataaagcgacg

SEQ ID NO: 795282 - DNA, 75 bp, synthetic construct
  source 1..75: mol_type = other DNA
atgaaacgaacgcctgtcctgattgatgtgaacggcgttccgcttcgggagagcctcagctaccatgggggcggt

SEQ ID NO: 795283 - DNA, 75 bp, synthetic construct
  source 1..75: mol_type = other DNA
ggatcgccccaatcctaaccttgaaacttttcgtaattggtcagttgacgtgccgtggcggcgggcagtcgtctg

SEQ ID NO: 795284 - DNA, 75 bp, synthetic construct
  source 1..75: mol_type = other DNA
gaactgtcccagatgcagcataaggcgcgtagtgatcggctccgcgcccttgctctattgggtctttattctctt

SEQ ID NO: 795285 - DNA, 75 bp, synthetic construct
  source 1..75: mol_type = other DNA
atgcgcattgaggccggactgagcacgtatgagaaagaactggcactgatgggcgaagattatcaggacattttc

SEQ ID NO: 795286 - DNA, 75 bp, synthetic construct
  source 1..75: mol_type = other DNA
tcgagccggtggaggacgggcagacccgtggggccaaccagttttacagcgtcatggaacggctgaagatgctcg

SEQ ID NO: 795287 - DNA, 75 bp, synthetic construct
  source 1..75: mol_type = other DNA
tttcctgctggctggaagaggcgcttcttcggggaattatccgcctgccacgggcgcgttttgatttttatcagg

SEQ ID NO: 795288 - DNA, 75 bp, synthetic construct
  source 1..75: mol_type = other DNA
cgatgggaacggatcccgcgtgaacttcccaccgggcgtccggccatgctgcatattttcgagccggtggaggac

SEQ ID NO: 795289 - DNA, 75 bp, synthetic construct
  source 1..75: mol_type = other DNA
cgcagttattccgtacgcgttttaaagccgtgagtccgaaacgggtggacacgccaggacacggtatggggaacc

SEQ ID NO: 795290 - DNA, 75 bp, synthetic construct
  source 1..75: mol_type = other DNA
accgcagcaccggtccgactgggaggcgcaaaagtgccgcacctgatgccgggagactcactgaacctgcagacg

SEQ ID NO: 795291 - DNA, 75 bp, synthetic construct
  source 1..75: mol_type = other DNA
caacgggcaacagattcatgcattctgtacttccttttaccgacaggtgcacgaacatattactgagcgtaatca

SEQ ID NO: 795292 - DNA, 75 bp, synthetic construct
  source 1..75: mol_type = other DNA
gtgcaaataaccgaagcattaatttcagagccgggagacatccggcgttttgttcagcaggcggtggaccactgg

SEQ ID NO: 795293 - DNA, 75 bp, synthetic construct
  source 1..75: mol_type = other DNA
ttttaccatgggctaccaacggcaagtaaccgaagatacttacgaatatttgctgctaaatggtgaggaatcttt

SEQ ID NO: 795294 - DNA, 75 bp, synthetic construct
  source 1..75: mol_type = other DNA
cagagccgggagatatccggcgttttattcagcaggcggtggaccactggccacatctgctgacatttcacttca

SEQ ID NO: 795295 - DNA, 75 bp, synthetic construct
  source 1..75: mol_type = other DNA
acgcaacatattctggcccggtgatgccgtggatcgacccggtcaaggaggctgaagcctggaaaattcagatcc

SEQ ID NO: 795296 - DNA, 75 bp, synthetic construct
  source 1..75: mol_type = other DNA
gagattgcggcggagctggcagcggatatccgacggctgtgggcggaatggtctgtcagtccggatgtgaccgga

SEQ ID NO: 795297 - DNA, 75 bp, synthetic construct
  source 1..75: mol_type = other DNA
tgaacagccatcaccagcgtgacgatggtaaacagcgtgagttccagccttacattgaagcgaactggatcaaca

SEQ ID NO: 795298 - DNA, 75 bp, synthetic construct
  source 1..75: mol_type = other DNA
ttaccggacggcagagtgataccaaagagattgcagctgaaaatatggtgcatctgaagtttacccgccggctgc

SEQ ID NO: 795299 - DNA, 75 bp, synthetic construct
  source 1..75: mol_type = other DNA
ggcagtcgtctgagtttttccagtgcggcgcgtaactataacggcacctacagtgcccagcggcaggagctggtc

SEQ ID NO: 795300 - DNA, 75 bp, synthetic construct
  source 1..75: mol_type = other DNA
tttccgggatacagagtgataccaaagagatcgccgcagacaaaatggtccatctgaaattcacccgccgcctgc

SEQ ID NO: 795301 - DNA, 75 bp, synthetic construct
  source 1..75: mol_type = other DNA
gaagggaaacgcacgtttacagaatttatacgtgaaggtgtgggtgttcatgcgtttaacggcgaaatctttgtg

SEQ ID NO: 795302 - DNA, 75 bp, synthetic construct
  source 1..75: mol_type = other DNA
atgaccgatctcttttccagccctgaccacactcttgacgctcttggcctgcgctgcccggaaccggtgatgatg

SEQ ID NO: 795303 - DNA, 75 bp, synthetic construct
  source 1..75: mol_type = other DNA
gaagggaaacgcacgtttacggaatttatgcgtgaaggtgtgggtgttcatgcgtttaacggcgaaatctttgtg

SEQ ID NO: 795304 - DNA, 75 bp, synthetic construct
  source 1..75: mol_type = other DNA
gaagggaaacgcacgtttacggaatttattcgtgaaggtgtgggagttcatgcgtttaacggcgaaatctttgtg

SEQ ID NO: 795305 - DNA, 75 bp, synthetic construct
  source 1..75: mol_type = other DNA
ttgattatgccgatatttcccaacgagagcagttggctgcggcattaaaacgttggccgttgctggctgagtttg

SEQ ID NO: 795306 - DNA, 75 bp, synthetic construct
  source 1..75: mol_type = other DNA
gagtggcgatttatgattgataacattctggaagacactaaagaagtggtcgatacattctttccagaatcagaa

SEQ ID NO: 795307 - DNA, 75 bp, synthetic construct
  source 1..75: mol_type = other DNA
gaagggaaacgcacgtttactgaatttattcgtgaaggtgtgggtgttcatgcgtttaacggcgaaatctttgtg

SEQ ID NO: 795308 - DNA, 75 bp, synthetic construct
  source 1..75: mol_type = other DNA
gaagggaaacgcacgtttactgaatttatacgtgaaggtgtgggagttcatgcgtttaacggcgaaatctttgtg

SEQ ID NO: 795309 - DNA, 75 bp, synthetic construct
  source 1..75: mol_type = other DNA
gaagggaaacgcacgtttacagaatttattcgtgaaggtgtgggggttcatgcgtttaacggcgaaatctttgtg

SEQ ID NO: 795310 - DNA, 75 bp, synthetic construct
  source 1..75: mol_type = other DNA
gaagggaaacgcacgtttaccgaatttatccgtgaaggtgtgggtgttcatgcgtttaacggcgaaatctttgtg

SEQ ID NO: 795311 - DNA, 75 bp, synthetic construct
  source 1..75: mol_type = other DNA
gaagggaaacgcacgtttactgaatttatgcgtgaaggtgtgggggttcatgcgtttaacggcgaaatctttgtg

SEQ ID NO: 795312 - DNA, 75 bp, synthetic construct
  source 1..75: mol_type = other DNA
gaagggaaacgcacgtttactgaatttatccgtgaaggtgtgggcgttcatgcgtttaacggcgaaatctttgtg

SEQ ID NO: 795313 - DNA, 75 bp, synthetic construct
  source 1..75: mol_type = other DNA
caggccacgcagcttcagtcggccattgtgaaggcgatgtatgcagccacaatcgaaagtgaacttgataccgaa

SEQ ID NO: 795314 - DNA, 75 bp, synthetic construct
  source 1..75: mol_type = other DNA
gcagaaggataatccgcttattaatattctggataagttctccacctggtatgacacgaatagcgtgacgctggg

SEQ ID NO: 795315 - DNA, 75 bp, synthetic construct
  source 1..75: mol_type = other DNA
attgacgggctcaaggaggtccaggaatcggtgatgcgtattgattccggactgagcacctatgagaaagagctg

SEQ ID NO: 795316 - DNA, 75 bp, synthetic construct
  source 1..75: mol_type = other DNA
ataccgaaaaggcctttgaatatatcgccggtgcgccacaggggcagaaggataatccgcttattaatattctgg

SEQ ID NO: 795317 - DNA, 75 bp, synthetic construct
  source 1..75: mol_type = other DNA
cgcgttttaaagccgtgagtccgaaacgggtggacacgccaggacacggtatggggaaccgttttctgcgggccg

SEQ ID NO: 795318 - DNA, 75 bp, synthetic construct
  source 1..75: mol_type = other DNA
aggcggcctggtcggaatacgccgaagggatgtctggcgagatcgacgtggaagagaaacgcacgtttacggaat

SEQ ID NO: 795319 - DNA, 75 bp, synthetic construct
  source 1..75: mol_type = other DNA
tgccatccgcgagccagtgccacggttgatgaagcatgttcacaactggtagatttactgcaacagacctggcag

SEQ ID NO: 795320 - DNA, 75 bp, synthetic construct
  source 1..75: mol_type = other DNA
tgtactgccttttaccgacaggtgcaagaacgtattactgagcgtaatcacatggccagtccggcatcgccgctg

SEQ ID NO: 795321 - DNA, 75 bp, synthetic construct
  source 1..75: mol_type = other DNA
taagtttctgcaccgattcagtaaatttcaacagggataaaatagtgcaaataaccgaagccttactttcagaac

SEQ ID NO: 795322 - DNA, 75 bp, synthetic construct
  source 1..75: mol_type = other DNA
cagagccgggagacatccggcgttttgttcagcaggcggtggaccactggccaaatctgttggcatttcacttca

SEQ ID NO: 795323 - DNA, 75 bp, synthetic construct
  source 1..75: mol_type = other DNA
ggcggacaatgccgggtggaaaggtgttatcaggttgcccgggatgatacatccggccagtacgttgcgttaaaa

SEQ ID NO: 795324 - DNA, 75 bp, synthetic construct
  source 1..75: mol_type = other DNA
atggaaaagcaacaatacgatgcctgttgctgctcagccagacgagcatttgccatccgcgggccagtgtcacgg

SEQ ID NO: 795325 - DNA, 75 bp, synthetic construct
  source 1..75: mol_type = other DNA
taccatatctgtgaggatgattttccgctctccgggagtggacgatgggaacggatcccgcgtgaacttcccacc

SEQ ID NO: 795326 - DNA, 75 bp, synthetic construct
  source 1..75: mol_type = other DNA
aaaccccaccacaggaaaccaggaaagaacaaaaactggtcgtcccgggaggtgatttgggtgagtggttaaggt

SEQ ID NO: 795327 - DNA, 75 bp, synthetic construct
  source 1..75: mol_type = other DNA
aaatcaaggcacatctgcgtgttgaccatgacgcggatgatgacatgctgatggacaaggttcgtcaggctaccg

SEQ ID NO: 795328 - DNA, 75 bp, synthetic construct
  source 1..75: mol_type = other DNA
aagaactgattcagggggagctgccgttttctgtgtccgtgctgatttacgatttgcgttgtccgacggtgttat

SEQ ID NO: 795329 - DNA, 75 bp, synthetic construct
  source 1..75: mol_type = other DNA
gcaaaaccatggccgaaaccgtggagaacgccatcggctgggcaggccttcaccgcatccaccagttccagttct

SEQ ID NO: 795330 - DNA, 75 bp, synthetic construct
  source 1..75: mol_type = other DNA
aatggagcaggtcgccgaagcacgcggcgacgtggcgtttttcgtcaccgtcacagccccttcccgttttcacag

SEQ ID NO: 795331 - DNA, 75 bp, synthetic construct
  source 1..75: mol_type = other DNA
gacggttacattgaatgtggcagtgattacgtgacctggtgtttcggccatatgtatgaacaggctgaaccggat

SEQ ID NO: 795332 - DNA, 75 bp, synthetic construct
  source 1..75: mol_type = other DNA
gtgcaaataaccgaagcattactttcagagccaggggaaatccggcgttttgttcagcaggcggtggaccactgg

SEQ ID NO: 795333 - DNA, 75 bp, synthetic construct
  source 1..75: mol_type = other DNA
ccacatctgttggcatttcacttcacgctccattcggcagaagggaacatcaatgggcaacagattcacacattc

SEQ ID NO: 795334 - DNA, 75 bp, synthetic construct
  source 1..75: mol_type = other DNA
atccacagagcgggaaaaagccgggctctcccgtccggtgtggatagcacagacgtatcagcagcagatagcgga

SEQ ID NO: 795335 - DNA, 75 bp, synthetic construct
  source 1..75: mol_type = other DNA
cggaatccggatcttgcggagcgggaagagctgattcagggggaactccccttttctgtatccgtgctgatttac

SEQ ID NO: 795336 - DNA, 75 bp, synthetic construct
  source 1..75: mol_type = other DNA
atgacggcattactgacactggaagaaatcaaggcacatctgcgtgttgaccatgacgcggatgatgacatgctg

SEQ ID NO: 795337 - DNA, 75 bp, synthetic construct
  source 1..75: mol_type = other DNA
tttactgcaacagacctggccggtgataagtgctggcggacaatgccgggtggaaagatgttttcgggttgcccg

SEQ ID NO: 795338 - DNA, 75 bp, synthetic construct
  source 1..75: mol_type = other DNA
atgccgggtggaaaggtgttttcgggttgcccggggtgatacatccggtcagtatgttgcgttaaaaacagtcgc

SEQ ID NO: 795339 - DNA, 75 bp, synthetic construct
  source 1..75: mol_type = other DNA
gcgagcatatgatcgtttcatggggcggtgtggcccactgcgatattcatctgcctgacccgctgccagccgatc

SEQ ID NO: 795340 - DNA, 75 bp, synthetic construct
  source 1..75: mol_type = other DNA
attacagccacgatggatcgcttgcgcaggtggacgtcagcgccaactaccatgaagggcagtacacctcagcgg

SEQ ID NO: 795341 - DNA, 75 bp, synthetic construct
  source 1..75: mol_type = other DNA
gccagttgggccgcgtcatctacgaaacccaggtcccggcggggccgttccgcatccaggatcttggcgattcgg

SEQ ID NO: 795342 - DNA, 75 bp, synthetic construct
  source 1..75: mol_type = other DNA
ggcggtactgcgtctgcaggatggtagctacccgccgtttggcgcggaagtgaaaaacgacaacgcgcagaacgt

SEQ ID NO: 795343 - DNA, 75 bp, synthetic construct
  source 1..75: mol_type = other DNA
caccgtacccagaatatgggcgggacacgcttgttgattgatgccgatggcgttgccgatgttccggtggaaggt

SEQ ID NO: 795344 - DNA, 75 bp, synthetic construct
  source 1..75: mol_type = other DNA
atctgtttaacggcttgttactgccatgccagcataaaggcaacgtcgcgccggttgttcctgatgacataaagc

SEQ ID NO: 795345 - DNA, 75 bp, synthetic construct
  source 1..75: mol_type = other DNA
ctgcaatggagccacgatgctaaatgcctgaaatccggtcaactggaaggcatggaaattaaggctgatttaagc

SEQ ID NO: 795346 - DNA, 75 bp, synthetic construct
  source 1..75: mol_type = other DNA
caacgccaaagcgatgggggcaatgaccttaaactggcaggaaaaacgctggcagcgattttttaacagcgaaga

SEQ ID NO: 795347 - DNA, 75 bp, synthetic construct
  source 1..75: mol_type = other DNA
tgctgctaaatggtgaggaatcttttaacgatctcggcgagccagagtggttattttcgcgcgcgctgggtgtcg

SEQ ID NO: 795348 - DNA, 75 bp, synthetic construct
  source 1..75: mol_type = other DNA
acggaagaatacgatatttactggtacgcctctgagaacgatgccagtaaaacctatgcctgcctgacgcctgaa

SEQ ID NO: 795349 - DNA, 75 bp, synthetic construct
  source 1..75: mol_type = other DNA
cgtcaacaactactaccgcaaccaggcgtatatcgaccttaacaacctgccggaaaacgccgaagccacccagtc

SEQ ID NO: 795350 - DNA, 75 bp, synthetic construct
  source 1..75: mol_type = other DNA
ggttcagctaaataaacaaccgctggcggaagaatacgatatttactggtacgcctctgagaacgatgccagtaa

SEQ ID NO: 795351 - DNA, 75 bp, synthetic construct
  source 1..75: mol_type = other DNA
atgggagtggagtcgctattatgcctggcgggcgtaccgtcattaaaagccaaactggcgctgggcgaagattac

SEQ ID NO: 795352 - DNA, 75 bp, synthetic construct
  source 1..75: mol_type = other DNA
ataccgaaaaggcctttgaatatatcgccggtgcgccgcaggagcagaaggataatccgcttattaatattctgg

SEQ ID NO: 795353 - DNA, 75 bp, synthetic construct
  source 1..75: mol_type = other DNA
agtttctggcgaaacgcagggagctgtgtggccagcgcccggatggcttctgcccccgttttcacacgcaggtcg

SEQ ID NO: 795354 - DNA, 75 bp, synthetic construct
  source 1..75: mol_type = other DNA
taacgacctcggtgaaccggagtggttattttctcgcgcgctgggtgtcgatatcccactgacatcacttcatat

SEQ ID NO: 795355 - DNA, 75 bp, synthetic construct
  source 1..75: mol_type = other DNA
acgcagatgttttcctgctggctggaagaggcacttcttcgggggattattcgtccgccacgggcacgttttgat

SEQ ID NO: 795356 - DNA, 75 bp, synthetic construct
  source 1..75: mol_type = other DNA
tttcctgctggctggaagaggcgcttcttcggggattattcgtccgccacgggcgcgttttgatttttaccaggc

SEQ ID NO: 795357 - DNA, 75 bp, synthetic construct
  source 1..75: mol_type = other DNA
ttcctgctggctggaagaggcacttcttcgggggattattcgtccgccacgggcgcgttttgatttttatcaggc

SEQ ID NO: 795358 - DNA, 75 bp, synthetic construct
  source 1..75: mol_type = other DNA
atctgctgagcggcaaaaagccggactctcacgtccggtgtggatagcgcaggcgtatcagcagcagatagcgga

SEQ ID NO: 795359 - DNA, 75 bp, synthetic construct
  source 1..75: mol_type = other DNA
gggatcgcgacgagcagaccaactacaacgtcatgctctcgcactacttcaatttaggcagtatccgcaatatga

SEQ ID NO: 795360 - DNA, 75 bp, synthetic construct
  source 1..75: mol_type = other DNA
caaactggcgctgggcgaagattacctcaattccgatattttcgacggttttaattatgttggtggcagtgtcag

SEQ ID NO: 795361 - DNA, 75 bp, synthetic construct
  source 1..75: mol_type = other DNA
tgctgttaaatggtgaggaatcttttaacgacctcggtgaaccggagtggttattttctcgcgcgctgggtgtcg

SEQ ID NO: 795362 - DNA, 75 bp, synthetic construct
  source 1..75: mol_type = other DNA
aacccgtctacatgctggaaaaagtagaaaatcaaaaccatgccaaatgggaggtccataattttaccatgggct

SEQ ID NO: 795363 - DNA, 75 bp, synthetic construct
  source 1..75: mol_type = other DNA
gcataaggatcacattgtcgggcatatgtttctgatcagctaccgtccgaactggcgctggctggggatgcggga

SEQ ID NO: 795364 - DNA, 75 bp, synthetic construct
  source 1..75: mol_type = other DNA
atctgaagtaccggatgtgctgaccggggcggtcgaacgaaaagttaccgctgacatgatgattgagtttatcgg

SEQ ID NO: 795365 - DNA, 75 bp, synthetic construct
  source 1..75: mol_type = other DNA
ccgccgccagctttgctgaaagcgacggtacggtgatcaacaacgaaggtcgcgcccaacgtttcttccaggttt

SEQ ID NO: 795366 - DNA, 75 bp, synthetic construct
  source 1..75: mol_type = other DNA
agcgtcgtggcgatgatttcatcaccctcaacgccgagcaggcgatgcaaggtgcggcagatattctgcgtcagt

SEQ ID NO: 795367 - DNA, 75 bp, synthetic construct
  source 1..75: mol_type = other DNA
caatatcagcgttcatgagccgcgtcagccgcaggatattgacaccatgtttaccttctcgatggaaggtaacaa

SEQ ID NO: 795368 - DNA, 75 bp, synthetic construct
  source 1..75: mol_type = other DNA
aaatagttaatactgtcaaaaaatatgcatcatgtgctgacgatgctttgcagggaggcaaagaaaacgttaaag

SEQ ID NO: 795369 - DNA, 75 bp, synthetic construct
  source 1..75: mol_type = other DNA
acagctgccgcaagtcgcctggctggcggaacatctggcggcgcaactggaggctatagcgcgtgaagccacagc

SEQ ID NO: 795370 - DNA, 75 bp, synthetic construct
  source 1..75: mol_type = other DNA
aaactggctcgtgagccgcaccgttacagtggtcgtaccgccatgcgcgccaacatcagcgttcatgagccgcgt

SEQ ID NO: 795371 - DNA, 75 bp, synthetic construct
  source 1..75: mol_type = other DNA
taaacgcgccctgcaccacaatgccgctgccgtggtgctggcacacaatcacccgtccggtgaggttacccccag

SEQ ID NO: 795372 - DNA, 75 bp, synthetic construct
  source 1..75: mol_type = other DNA
cgcagccgtggtgctggcacacaatcacccgtccggtgaagtcacacccagcaaggcagaccgccttatcacgga

SEQ ID NO: 795373 - DNA, 75 bp, synthetic construct
  source 1..75: mol_type = other DNA
ttaaatgcgccctgtatcacaatgccgcagccgtggtgctggcacacaatcacccgtccggtgaagtcacaccca

SEQ ID NO: 795374 - DNA, 75 bp, synthetic construct
  source 1..75: mol_type = other DNA
cagcgtgctccggtcttccagagtcgtatgccgcagccgtacatcaaactcaacccagcggatgccgcgaagttg

SEQ ID NO: 795375 - DNA, 75 bp, synthetic construct
  source 1..75: mol_type = other DNA
gctggtggccctgtacggcgtgaatatccgcatgatgcaggaatggcaggcaaaacaaaggcgaccacgaaaggg

SEQ ID NO: 795376 - DNA, 75 bp, synthetic construct
  source 1..75: mol_type = other DNA
gccgttaaagagcgtgctgcccgtactggccgcaacccgcagaccggtaaagagatcaccatcgctgctgctaaa

SEQ ID NO: 795377 - DNA, 75 bp, synthetic construct
  source 1..75: mol_type = other DNA
aatcgcccgcgaaaaaagcggcgcaggattttctgactcgctttgcgcagtttaaggacagggcagtgatcgaag

SEQ ID NO: 795378 - DNA, 75 bp, synthetic construct
  source 1..75: mol_type = other DNA
tgtgtcacttggtctgctgcgtgaagccatgcgcatcaatccggcagcgggcgtgaagcgtgaaatcgccacgct

SEQ ID NO: 795379 - DNA, 75 bp, synthetic construct
  source 1..75: mol_type = other DNA
aggctggatagacggcacgctggcaggcgacagcggacgccaggacgaagtcattaccaccatgatggtgtgggc

SEQ ID NO: 795380 - DNA, 75 bp, synthetic construct
  source 1..75: mol_type = other DNA
agggcgcaaaaagccggctacaaaagcgacggccagaaaagccacgaaaaaaaccgccgcaaaagcggcgcgtaa

SEQ ID NO: 795381 - DNA, 75 bp, synthetic construct
  source 1..75: mol_type = other DNA
agattctacaacgtgtcgatactcttcctctttatttacatgcctatgcttttcatttaaatatgcggctggaaa

SEQ ID NO: 795382 - DNA, 75 bp, synthetic construct
  source 1..75: mol_type = other DNA
cgcttattcgcaccttccctagttctttggatcagaaaaagtgctccagaaagtcaggagtggattgaagataaa

SEQ ID NO: 795383 - DNA, 75 bp, synthetic construct
  source 1..75: mol_type = other DNA
ttttgtctatttggtgcaaactggccgataaacggactacttccttcctacctggcagataatggagttaataca

SEQ ID NO: 795384 - DNA, 75 bp, synthetic construct
  source 1..75: mol_type = other DNA
attgcgggttaatttatacggtaaagaacgcactgtggagaaaaaagtaacaccgccgaagccagtgacaacgtg

SEQ ID NO: 795385 - DNA, 75 bp, synthetic construct
  source 1..75: mol_type = other DNA
aagtgagatggagtctctttccttactgtttgattttgcgaacatgatcaatgcaaatgagcatcccatcgacgc

SEQ ID NO: 795386 - DNA, 75 bp, synthetic construct
  source 1..75: mol_type = other DNA
cagaggtatcccaccatgaaaatcatcacccgtggcgaagccatgcatattcaccgtcagcatccggcatcccgt

SEQ ID NO: 795387 - DNA, 75 bp, synthetic construct
  source 1..75: mol_type = other DNA
cgataaagagttgctcgtgttggtgatagctattggtaagagagagaactcagccgtttacgaagacgcggataa

SEQ ID NO: 795388 - DNA, 75 bp, synthetic construct
  source 1..75: mol_type = other DNA
gaatcagctgattgcgggtgaaaccctcttcaccggcaccatcaaccgcacggaagtccatccccgtgaggtgat

SEQ ID NO: 795389 - DNA, 75 bp, synthetic construct
  source 1..75: mol_type = other DNA
tcttgttgatatcgatatgcccggttaccgactacacccattaagcggcgatcgcgatggcatctgggcaatatc

SEQ ID NO: 795390 - DNA, 75 bp, synthetic construct
  source 1..75: mol_type = other DNA
tcacgaaactgggaaatcagcgtcacgccaacgctggtggtggtgtcgaaggggcaggtggtaactacgaccagc

SEQ ID NO: 795391 - DNA, 75 bp, synthetic construct
  source 1..75: mol_type = other DNA
gtgatggtgtttgccgatcgcgtcgagatcatcagtcctggccatctgcctaacaacctgaccatcgaaaacatc

SEQ ID NO: 795392 - DNA, 75 bp, synthetic construct
  source 1..75: mol_type = other DNA
tggatatccgggtgccggaccatctgatagtcggtggcagccaggttttctcttttgccgaacatggtctgcttt

SEQ ID NO: 795393 - DNA, 75 bp, synthetic construct
  source 1..75: mol_type = other DNA
ttgctgtgttaggtactggcgtaaactcaaattatcccaaaaatagtggcgagatgagaggccatattgtaaata

SEQ ID NO: 795394 - DNA, 75 bp, synthetic construct
  source 1..75: mol_type = other DNA
ggtgttcctctattcgtttttacggtgtctggcggagcagaagcgcggcgcaaaaccgctggaaaaaccacttgc

SEQ ID NO: 795395 - DNA, 75 bp, synthetic construct
  source 1..75: mol_type = other DNA
ttgtgctttgagatcaccgaggggaaaaccaagagcgcggcgcgaatcgtccctgtacacagtaagctaatcccc

SEQ ID NO: 795396 - DNA, 75 bp, synthetic construct
  source 1..75: mol_type = other DNA
tgggttgccctgagcaaagtaagggaagtagatgtaccagaaatgtacgcgttgccttgcatgaaggggggcatc

SEQ ID NO: 795397 - DNA, 75 bp, synthetic construct
  source 1..75: mol_type = other DNA
cgagcctggcgaattggcgaaggtgttcgcggtgatgtcagatgatgaagagatgcagaatgtaacgctgatcgg

SEQ ID NO: 795398 - DNA, 75 bp, synthetic construct
  source 1..75: mol_type = other DNA
gaagttgcatggatcaataataattaccgttcaagtgattcaagctctgatattatcatccttcccaggatgata

SEQ ID NO: 795399 - DNA, 75 bp, synthetic construct
  source 1..75: mol_type = other DNA
gataattttcctgaattaatagaagtatacaattcatgctttagtaaaaatatattgttgtatgatgttcaggat

SEQ ID NO: 795400 - DNA, 75 bp, synthetic construct
  source 1..75: mol_type = other DNA
cgccaacagccattcttggttatggtttcccggaagaaagttttaataaggcgatggaagaatctccggatctga

SEQ ID NO: 795401 - DNA, 75 bp, synthetic construct
  source 1..75: mol_type = other DNA
aatttatttaactcaagcagtaatctcgcaatttatagattcggattattcaactgtaagcggtttagcatatgg

SEQ ID NO: 795402 - DNA, 75 bp, synthetic construct
  source 1..75: mol_type = other DNA
cgtccgagagtggttgcggctgcatatggccgcgcttgagcgggaagagttccgggtgttgtatctggataacca

SEQ ID NO: 795403 - DNA, 75 bp, synthetic construct
  source 1..75: mol_type = other DNA
gatccgtttttcgccttttgaacccgccacgccgtttacgctgcgcttctactcggcggcgcaaaacgcatgttg

SEQ ID NO: 795404 - DNA, 75 bp, synthetic construct
  source 1..75: mol_type = other DNA
cacgatattgaactggagctgcaaaaagaggcgaaaaagaagacgccgcagatccgtttttcgccttttgaaccc

SEQ ID NO: 795405 - DNA, 75 bp, synthetic construct
  source 1..75: mol_type = other DNA
gcaaaaacctcgacctgacgagtggcaggtgtacatgcttgatgtcgggcaagggctggcaatggtgatagccag

SEQ ID NO: 795406 - DNA, 75 bp, synthetic construct
  source 1..75: mol_type = other DNA
gagagatgacgcccggcgagcgcagtctcattctgcgggccctgaaaaccctagaccgccatcttcatgaacccg

SEQ ID NO: 795407 - DNA, 75 bp, synthetic construct
  source 1..75: mol_type = other DNA
tccgggtgctgtatctggacaaccagaatcagttgattgcccatgagacgcttttcaccggcacgattaaccgca

SEQ ID NO: 795408 - DNA, 75 bp, synthetic construct
  source 1..75: mol_type = other DNA
actttgtcctttacttaggggaactacacctcaagaagagattaaacatgccttgtcagagtactcagctacgat

SEQ ID NO: 795409 - DNA, 75 bp, synthetic construct
  source 1..75: mol_type = other DNA
aatgaatattccactatccgattttaaagacgtgcaaagcttaattaaatcagcatccggtgtaaaaacacagca

SEQ ID NO: 795410 - DNA, 75 bp, synthetic construct
  source 1..75: mol_type = other DNA
ttcaccggcaccatcaaccgcacggaagtccatccccgggaagtgattaaacgcgccctgtatcacaatgccgca

SEQ ID NO: 795411 - DNA, 75 bp, synthetic construct
  source 1..75: mol_type = other DNA
atgatggaacagtcactcatcccacagacaccggtacttccactgaccgcacaacgcacggtaaaacgcgcctta

SEQ ID NO: 795412 - DNA, 75 bp, synthetic construct
  source 1..75: mol_type = other DNA
actttaaagcctggctggtgggcgctgctgatgcgccagatttaggtaactttgaagccaacacgaccttccaga

SEQ ID NO: 795413 - DNA, 75 bp, synthetic construct
  source 1..75: mol_type = other DNA
ggtgaaacgcgcgctgtactttaatgcggcggcggtgatatttgcccataaccacccgtccggagaagtgactcc

SEQ ID NO: 795414 - DNA, 75 bp, synthetic construct
  source 1..75: mol_type = other DNA
acaggcgcgtaaggactggcaaaacgcccgtaaaaaactctcaagggcaaatctgaagaaaccatctgtagttga

SEQ ID NO: 795415 - DNA, 75 bp, synthetic construct
  source 1..75: mol_type = other DNA
tccggaccttatctggtcgttaccagacggcgaaatacgccgctacgacaggcgcctgaatataatctgtcgcga

SEQ ID NO: 795416 - DNA, 75 bp, synthetic construct
  source 1..75: mol_type = other DNA
caggctacggattattcccgtctgagcaggctcgtaaggactggcaaaacgcccgcaaaaactatccagggcaaa

SEQ ID NO: 795417 - DNA, 75 bp, synthetic construct
  source 1..75: mol_type = other DNA
ggcgtcataatataatttgtagtgagtgccgtaaaagcgaagttatgaagcgcatattgtcgttttatcagggta

SEQ ID NO: 795418 - DNA, 75 bp, synthetic construct
  source 1..75: mol_type = other DNA
gttctcgccagagagctggttgccagtggcgatgtatacaactctggttacgggttattcccgtctgaacaggcg

SEQ ID NO: 795419 - DNA, 75 bp, synthetic construct
  source 1..75: mol_type = other DNA
ctggctatgggttgttcccgtcagaacaggcgcgtaaggactggcaaaacgcccgcaaaaaactctcgagggcaa

SEQ ID NO: 795420 - DNA, 75 bp, synthetic construct
  source 1..75: mol_type = other DNA
aggtgaagaaaccatctgtggttgatccggaccttatctggtcattacctgacggagaaatacgtcgctacgaca

SEQ ID NO: 795421 - DNA, 75 bp, synthetic construct
  source 1..75: mol_type = other DNA
tccggaccttatctggtcattaccagacggagaaatacgccgctacgacaggcgtctgaacataatctgtagcga

SEQ ID NO: 795422 - DNA, 75 bp, synthetic construct
  source 1..75: mol_type = other DNA
ggagtatgaacataatctgtcacgagtgccggaagagtgaggttatgcagcgtgtactggctttctatcagggta

SEQ ID NO: 795423 - DNA, 75 bp, synthetic construct
  source 1..75: mol_type = other DNA
cgagtgccggaagagcgaagttatgcagcgcgtgctggcgttttatcaggggaattttcaggaggtggtgcggtg

SEQ ID NO: 795424 - DNA, 75 bp, synthetic construct
  source 1..75: mol_type = other DNA
gtggcaaaagtttttacacaagaagagcgggaaaaaattaaagggcaggctcttgaactcgtacgccagagtggg

SEQ ID NO: 795425 - DNA, 75 bp, synthetic construct
  source 1..75: mol_type = other DNA
acccgtaaaaagctctcaagggcaaagctgaagaaaccatctgcggttgatccggaccttatctggtcattacca

SEQ ID NO: 795426 - DNA, 75 bp, synthetic construct
  source 1..75: mol_type = other DNA
tgccgccgcatgtggaatatagcctcacgccgctgggcgagcaggtgagtgaaaaggttgctgcgctggcggact

SEQ ID NO: 795427 - DNA, 75 bp, synthetic construct
  source 1..75: mol_type = other DNA
ccccataaagaacttgagcctcttataaaattgtgcaccgagaagggcgagcagagccgcgctattcttaatgcg

SEQ ID NO: 795428 - DNA, 75 bp, synthetic construct
  source 1..75: mol_type = other DNA
cagcaccgcagcatactggatgcgctggccatgcctgccgctgctgatattgatttcgaaccacctgttatatct

SEQ ID NO: 795429 - DNA, 75 bp, synthetic construct
  source 1..75: mol_type = other DNA
gctttggccgcggaagattatgtaccctggcaggcattacagggagcgaaattggtgttgcaggattacgcgtca

SEQ ID NO: 795430 - DNA, 75 bp, synthetic construct
  source 1..75: mol_type = other DNA
taaccacagcctgttctggaaaggtctgaaaaaaggcaccaccctgcagggtgacctgaaagcggctatcgaacg

SEQ ID NO: 795431 - DNA, 75 bp, synthetic construct
  source 1..75: mol_type = other DNA
ctgaaattccagaaccgccgtccggactacatcaaagagttctggaacgtggtgaactgggacgaagcagcggca

SEQ ID NO: 795432 - DNA, 75 bp, synthetic construct
  source 1..75: mol_type = other DNA
gctggaaagcctgccagaatttgccaacctgccggttgaagagctgatcaccaaactggaccagctgccagcaga

SEQ ID NO: 795433 - DNA, 75 bp, synthetic construct
  source 1..75: mol_type = other DNA
atttaatattatgcaaaaaacgcgcctcaacaaagtatataaggccgtttatgatcagttagatgaaatctatac

SEQ ID NO: 795434 - DNA, 75 bp, synthetic construct
  source 1..75: mol_type = other DNA
ggagtatatcgagctgggtgcatattataccttgcaccaatcaagggtggttgatgatgttctgacagaatcaat

SEQ ID NO: 795435 - DNA, 75 bp, synthetic construct
  source 1..75: mol_type = other DNA
aggtgaagaaaccatctgtggttgatccggaccttatctggtcattacctgacggagaaatacgtcgttatgaca

SEQ ID NO: 795436 - DNA, 75 bp, synthetic construct
  source 1..75: mol_type = other DNA
ggctggatagaggctcgtgaacaacgtaaaactggctacggtacttcattgactaccggcatgttaggggctgtt

SEQ ID NO: 795437 - DNA, 75 bp, synthetic construct
  source 1..75: mol_type = other DNA
ggtggatatccgggtgccggaccatctgataatcggtggcaaccaggttttctcctttgcggaacacggtctgct

SEQ ID NO: 795438 - DNA, 75 bp, synthetic construct
  source 1..75: mol_type = other DNA
atacgcggatactgttaacggttcatcctacagcaacatgaaagagcttcgggtccaaagcaaaggagatcctat

SEQ ID NO: 795439 - DNA, 75 bp, synthetic construct
  source 1..75: mol_type = other DNA
agcgggaaaaaattaagggacaggttgttgcactcgtacgccagagtgggcgcgagacgttacgacagctggaag

SEQ ID NO: 795440 - DNA, 75 bp, synthetic construct
  source 1..75: mol_type = other DNA
tggggtcaggaggtggtgctgtgagtgaaattagctatcaggcttcaatttccgctggcattcgcatcaaaggag

SEQ ID NO: 795441 - DNA, 75 bp, synthetic construct
  source 1..75: mol_type = other DNA
gtggcaaaagtttttacacaagaagagcgggaaaaaattaaagggcaggttgttgatctggtacgccggagtggg

SEQ ID NO: 795442 - DNA, 75 bp, synthetic construct
  source 1..75: mol_type = other DNA
atggaaaggctattagacgcgtacaaacggatattacaggaagttaacgcccagtcatttaacctgaatgaggat

SEQ ID NO: 795443 - DNA, 75 bp, synthetic construct
  source 1..75: mol_type = other DNA
aaaatcaatcagggacgtcacctggtggatgcaggcggacgtatgagtcagcagcgcacgaagtttaacctggca

SEQ ID NO: 795444 - DNA, 75 bp, synthetic construct
  source 1..75: mol_type = other DNA
ggaagcctatgaagcgcgcctggcacgctgccgccatgcgctggaaaaaatcgaaaacaggctagcgcgcttaac

SEQ ID NO: 795445 - DNA, 75 bp, synthetic construct
  source 1..75: mol_type = other DNA
gtggcaaaagtttttacacaagaagagcgggaaaaaatcaaggggcaggttgttgagctagtacgccggagtggg

SEQ ID NO: 795446 - DNA, 75 bp, synthetic construct
  source 1..75: mol_type = other DNA
ggattttctgactcgctttgcgcagtttaaagacagggcagtgatcgacgggcagacactcggtgtactaatcga

SEQ ID NO: 795447 - DNA, 75 bp, synthetic construct
  source 1..75: mol_type = other DNA
agcgagaaaaaattaaagggcaggttgttgaactcgtatgccagagtgggcgcgagacgttacgacaacaggaag

SEQ ID NO: 795448 - DNA, 75 bp, synthetic construct
  source 1..75: mol_type = other DNA
gcgagcgtttttctcttagtaatatggacgataacgaactctctgcctttggtgataaagcccaccgcctgaacc

SEQ ID NO: 795449 - DNA, 75 bp, synthetic construct
  source 1..75: mol_type = other DNA
gtgccggaagagtgaggttatgcagcgtgtacttgcgttctaccagggaaatttcaggagattgtgtggtgagca

SEQ ID NO: 795450 - DNA, 75 bp, synthetic construct
  source 1..75: mol_type = other DNA
tttgcgatgaataactggtccttcctgcagtcaggaagtattggcatcgatcgcaaagatattgaaaaggtattt

SEQ ID NO: 795451 - DNA, 75 bp, synthetic construct
  source 1..75: mol_type = other DNA
gcaaaagtatttacaccagaagagcgggaaaaaattaaagggcaggttgttgaacttgtacgtctgagcggtcgc

SEQ ID NO: 795452 - DNA, 75 bp, synthetic construct
  source 1..75: mol_type = other DNA
agcgggaaaaaattaaggggaaggttgttgagctcgtgcgccagagtgggcgcgagacgttacgacaactggaag

SEQ ID NO: 795453 - DNA, 75 bp, synthetic construct
  source 1..75: mol_type = other DNA
ggcgtcataatttaatttgtagtgagtgccgtaagagcgaagttatgcagcgcatattatcgttttatcagggaa

SEQ ID NO: 795454 - DNA, 75 bp, synthetic construct
  source 1..75: mol_type = other DNA
agcgggaaaaaattaagaggcaggttgttgaactcgtgcgcctgagcgggcgcgagacgttacgacaactggaag

SEQ ID NO: 795455 - DNA, 75 bp, synthetic construct
  source 1..75: mol_type = other DNA
gctgtagttcgcatgaaatggtgcagctcccaatagagatagaggttagctacgatgcttctgctggtagcattg

SEQ ID NO: 795456 - DNA, 75 bp, synthetic construct
  source 1..75: mol_type = other DNA
cgcgagacgttaaggcaactggaggccaagacaggtgcgacaagatatctgatgagcattcttgccagagagttg

SEQ ID NO: 795457 - DNA, 75 bp, synthetic construct
  source 1..75: mol_type = other DNA
tccgggtcttatccggtcgttacaagatggagaaatacgccgctacgacaggcgtatgaacataatctgtcgtga

SEQ ID NO: 795458 - DNA, 75 bp, synthetic construct
  source 1..75: mol_type = other DNA
cgcgagacgttacggcaactggaagccaagacaggtgcgacaagatatctgatgagcgttctcgcaagagagctg

SEQ ID NO: 795459 - DNA, 75 bp, synthetic construct
  source 1..75: mol_type = other DNA
ggataacaacctgtggcagttgtggatcaccgccagaaccggcctgacgacggatatcgcggacaccggcacaga

SEQ ID NO: 795460 - DNA, 75 bp, synthetic construct
  source 1..75: mol_type = other DNA
agcttgtggcgcaggtggagcgattactgacccttcgcccggcgtgggcatcgcagcttgccgtggcgtataccg

SEQ ID NO: 795461 - DNA, 75 bp, synthetic construct
  source 1..75: mol_type = other DNA
agaacataatttgtcgcgagtgccgtcagagcgaagttatgcagcgcatactggaattttatcagggaaatgttc

SEQ ID NO: 795462 - DNA, 75 bp, synthetic construct
  source 1..75: mol_type = other DNA
acaggcgtcagaacataatctgtagcgagtgccggaagagcgaagttatgcagcgcgtactggcgttttatcagg

SEQ ID NO: 795463 - DNA, 75 bp, synthetic construct
  source 1..75: mol_type = other DNA
tccttaccttatctggtcattaccagacggagaaatacgtcgttacgacaggcgcctgaacatgatttgtcacga

SEQ ID NO: 795464 - DNA, 75 bp, synthetic construct
  source 1..75: mol_type = other DNA
ttgtggcaaaagtatttacacaagaagagcgggaaaaaaattaaggggcagattgttgaacttgtacgtctgagc

SEQ ID NO: 795465 - DNA, 75 bp, synthetic construct
  source 1..75: mol_type = other DNA
tggctgacgcagaacgacgaaaatgcaccagtggagcaagcgccgaaagtgacagcacagatgctgattgatgcg

SEQ ID NO: 795466 - DNA, 75 bp, synthetic construct
  source 1..75: mol_type = other DNA
gcggaaactgatggtaaaccccttcctcagccagcaggtgttgcgttaccagtacaggaagctgctacacaggaa

SEQ ID NO: 795467 - DNA, 75 bp, synthetic construct
  source 1..75: mol_type = other DNA
gagcgaatctgcgccgcgctgcgggagctgaacaagcaccgggatattgttcgacatattttcgattcctccagt

SEQ ID NO: 795468 - DNA, 75 bp, synthetic construct
  source 1..75: mol_type = other DNA
ggcgaaaaatcatgtccggaagtgggagcgagtctgcgcggcgctgcgggagctgaacaagcaccgggatattgt

SEQ ID NO: 795469 - DNA, 75 bp, synthetic construct
  source 1..75: mol_type = other DNA
aagcctttcctcagccagcgggggttgcgttaccagtacaggaggttgcaacacaggaagatattaaaacagaaa

SEQ ID NO: 795470 - DNA, 75 bp, synthetic construct
  source 1..75: mol_type = other DNA
gggaacagccagcgtcggcagaactgtcggaagaaaccaccacggcaacagtcgctaaaatttcggagagcgatt

SEQ ID NO: 795471 - DNA, 75 bp, synthetic construct
  source 1..75: mol_type = other DNA
ggcgaaaagtcatgcccagaagtgggagcgagtttgcgccgcgctgcgggagctgaacaagcaccgggatattgt

SEQ ID NO: 795472 - DNA, 75 bp, synthetic construct
  source 1..75: mol_type = other DNA
cagaaactgtggcggacattgtgcagtcgttgccgtcgtttaccgaaaagcgaatgaattaccgggttttaccat

SEQ ID NO: 795473 - DNA, 75 bp, synthetic construct
  source 1..75: mol_type = other DNA
ctgtggctgatattgtgcaatcgttgccatcgtttactgaagcgcgagcggatgacttggttttaccatcgctgc

SEQ ID NO: 795474 - DNA, 75 bp, synthetic construct
  source 1..75: mol_type = other DNA
gggccgccagtcgtgaacttcgtcgcgccaaaaaacaggtccagaagtgggagcgtgtctgtgctgcactacgtg

SEQ ID NO: 795475 - DNA, 75 bp, synthetic construct
  source 1..75: mol_type = other DNA
tgttgataaaacgggtcacacctggtttctggctgtcgaaggtgaatccggggtaaccgaagggcaggcactaca

SEQ ID NO: 795476 - DNA, 75 bp, synthetic construct
  source 1..75: mol_type = other DNA
cgttgataaaacgggtcacacctggtttctggctggtgaaggtgaatccggggtaaccgaagagcagccagcaca

SEQ ID NO: 795477 - DNA, 75 bp, synthetic construct
  source 1..75: mol_type = other DNA
atgctgaccgaagaggtcgctccaaaagttagcgctgacatgatgattgagtttatctctcaggagggggctaaa

SEQ ID NO: 795478 - DNA, 75 bp, synthetic construct
  source 1..75: mol_type = other DNA
cgtctgatgtatctcgacctggattactaccaggggcagtgcagtctgcgctcagatattcacagtacgcggcag

SEQ ID NO: 795479 - DNA, 75 bp, synthetic construct
  source 1..75: mol_type = other DNA
tattcaacagtcgctgaattcattttctccatcagaaagtcggggcaatccggacaaactgattaaagattgtat

SEQ ID NO: 795480 - DNA, 75 bp, synthetic construct
  source 1..75: mol_type = other DNA
cattctgactgaaggggagcgtcatgaggccgttgcaccttaccggctaatcgctctggacggttactggtatct

SEQ ID NO: 795481 - DNA, 75 bp, synthetic construct
  source 1..75: mol_type = other DNA
gcgactatgcagatttcaatacgcataaaaacccctttatactgtgtctatatacagcattattttggctgtatg

SEQ ID NO: 795482 - DNA, 75 bp, synthetic construct
  source 1..75: mol_type = other DNA
tcctgagatggaccaccatctggtcagctcattactaagcggtaggggcaccccaccatgtcttatctggcatca

SEQ ID NO: 795483 - DNA, 75 bp, synthetic construct
  source 1..75: mol_type = other DNA
tccaggaatgccggaaagtgaccctgcgtggcaacggatgcagccatactgatatcgccccctaccggctggttc

SEQ ID NO: 795484 - DNA, 75 bp, synthetic construct
  source 1..75: mol_type = other DNA
ttcgggctcttccgcacttcagctgtattcgcgaagtcctgtctcatgggccctctgaggaggagcatggcaata

SEQ ID NO: 795485 - DNA, 75 bp, synthetic construct
  source 1..75: mol_type = other DNA
accctgaaagttcagctgcaacagctggaggtggagcggcagaagctggtgctggctgaccagcaggccgcacac

SEQ ID NO: 795486 - DNA, 75 bp, synthetic construct
  source 1..75: mol_type = other DNA
acctgataatgactctcttatgatgtttctcactatttccagtttttctttaaaagataacttttttcatataac

SEQ ID NO: 795487 - DNA, 75 bp, synthetic construct
  source 1..75: mol_type = other DNA
ctctccttctacaggctggtcagagctatttcgggatgtcagcgcatcaccattctgactgaaggggagcgtcat

SEQ ID NO: 795488 - DNA, 75 bp, synthetic construct
  source 1..75: mol_type = other DNA
agcagcctgctggactgtgatgatcgaccctgtctggtatggcatcaggacagacctcatcccccggcaggaaag

SEQ ID NO: 795489 - DNA, 75 bp, synthetic construct
  source 1..75: mol_type = other DNA
accgggccggactggccgatatctttccagggctggatcgacgtctggcgggaatgctgctcactgcaggaggga

SEQ ID NO: 795490 - DNA, 75 bp, synthetic construct
  source 1..75: mol_type = other DNA
atggagactgtttttgatgcactgaaagcaatggggaaagccacgtcggtagagctggctgcgcgacttgatatc

SEQ ID NO: 795491 - DNA, 75 bp, synthetic construct
  source 1..75: mol_type = other DNA
accttctatctgatgcaaaaattcggattatctatccagaatgctcagcttcatctgtttgccttcctgtttgcc

SEQ ID NO: 795492 - DNA, 75 bp, synthetic construct
  source 1..75: mol_type = other DNA
ctttcggcatgggaggtctgggggcagcagttctggggcttatcgccgaccacaccagcatagagttagtctata

SEQ ID NO: 795493 - DNA, 75 bp, synthetic construct
  source 1..75: mol_type = other DNA
taaccgcgacgattgaacaacgtggtccactaactgcggatgaactggctacgttgttcggtaccacatcacgca

SEQ ID NO: 795494 - DNA, 75 bp, synthetic construct
  source 1..75: mol_type = other DNA
atgggagcgagtatgtgccgcgctgcgggagctgaataaatatcgcgatattgtcgcccaactttgccaggaggc

SEQ ID NO: 795495 - DNA, 75 bp, synthetic construct
  source 1..75: mol_type = other DNA
tgcgccgcgctgcgggaactgaacaagcaccgggatattgtccgacagattgtcgattcctccagtcgtattgtg

SEQ ID NO: 795496 - DNA, 75 bp, synthetic construct
  source 1..75: mol_type = other DNA
agattggcatgataaccctcaccttccagctcgcctcttcgctactgcaaccagtggtcggctactggaccgata

SEQ ID NO: 795497 - DNA, 75 bp, synthetic construct
  source 1..75: mol_type = other DNA
ataataatgaaattgatgattatatatcaaagttaaagcaacaatgccatttaaatacctcaaaggaagcaagaa

SEQ ID NO: 795498 - DNA, 75 bp, synthetic construct
  source 1..75: mol_type = other DNA
aaccggtgtcaccggtaccgatagtgacagggcaaatgctgattgaggcgattgaacaacatggcccacaaacgg

SEQ ID NO: 795499 - DNA, 75 bp, synthetic construct
  source 1..75: mol_type = other DNA
aatattattgccactgccaatacccgcgatcgcggcgtcaatgagatgagtgccgcgctaaagcgtcgcttcgat

SEQ ID NO: 795500 - DNA, 75 bp, synthetic construct
  source 1..75: mol_type = other DNA
gttttaccatcgctgcatatggcaaaccgcgaattgcgtcgggcgaaaaatcatgttcagaagtgggagcgtgtc

SEQ ID NO: 795501 - DNA, 75 bp, synthetic construct
  source 1..75: mol_type = other DNA
tgcgccgcgctgcgggagctgaacaagcaccgggatattgttcgacagattacggattcttcccgccgtattgta

SEQ ID NO: 795502 - DNA, 75 bp, synthetic construct
  source 1..75: mol_type = other DNA
acattccacaggtggtgttgagttttttaatatacttaataaaatcattgaatccggaagtcaggctggatgggt

SEQ ID NO: 795503 - DNA, 75 bp, synthetic construct
  source 1..75: mol_type = other DNA
ttctaaaaccacttaacccacaatatccgatgatcgagatcaacgggaactgcaaaatcatcggcgtagttgtcg

SEQ ID NO: 795504 - DNA, 75 bp, synthetic construct
  source 1..75: mol_type = other DNA
gaaactgtggcggacattgtgcagtcgttgccatcgtttaccgaaacgcaagcagatgagctgatttttccgtcc

SEQ ID NO: 795505 - DNA, 75 bp, synthetic construct
  source 1..75: mol_type = other DNA
gcggaaactgatggtaaggcctttcctcagcccgcaggtgttgcgttaccagtacaggaggctgcaacacaggaa

SEQ ID NO: 795506 - DNA, 75 bp, synthetic construct
  source 1..75: mol_type = other DNA
gggcgaagaatcatgtccagaagtgggagcgagtctgcgccgcgctgcgggagctgaacaagcaccgggatatgg

SEQ ID NO: 795507 - DNA, 75 bp, synthetic construct
  source 1..75: mol_type = other DNA
atgacttaccttgggcttcggagtttcgaggtcaatgctgacggcactattagggataaatcttccgctacaaac

SEQ ID NO: 795508 - DNA, 75 bp, synthetic construct
  source 1..75: mol_type = other DNA
acacaggaagatattaaaacagaaactgtggcggacattgtgcagccgcttgagaagcgagtggataatctggtt

SEQ ID NO: 795509 - DNA, 75 bp, synthetic construct
  source 1..75: mol_type = other DNA
cgcgtacacctggcgtgtggcttataacaacgttcagcaggaacagccagcgcaggcagaactgccggaagaaac

SEQ ID NO: 795510 - DNA, 75 bp, synthetic construct
  source 1..75: mol_type = other DNA
gcgctggtaacggaaaatgatggtaaggcctttcctcagccagcaggtgctgcgttaccagtccgggaagccgca

SEQ ID NO: 795511 - DNA, 75 bp, synthetic construct
  source 1..75: mol_type = other DNA
taatttaccagcagatccgaaaaccgcgccggtaacggaaaatgatggtaaggcctttcctcagccagcaggtgc

SEQ ID NO: 795512 - DNA, 75 bp, synthetic construct
  source 1..75: mol_type = other DNA
gtagagccatatcataagcgtgcaatagataactggtacgatacaaccgtagattgttcagaagattcgttttgg

SEQ ID NO: 795513 - DNA, 75 bp, synthetic construct
  source 1..75: mol_type = other DNA
acattgtgcagtcgctgccatcgtttactgcaacgcgagaagatgatttgattttggcatcgctgcatatggcaa

SEQ ID NO: 795514 - DNA, 75 bp, synthetic construct
  source 1..75: mol_type = other DNA
agtgggagcgtgtctgcgccgcgctgcgggagctgaacaagtgccgggatattctccgggatattaccgccacca

SEQ ID NO: 795515 - DNA, 75 bp, synthetic construct
  source 1..75: mol_type = other DNA
cgaaaagtgatgtgcagaagtgggggcgagtctgtgccgctctgcgggaactgaacaaacacagggatattctcc

SEQ ID NO: 795516 - DNA, 75 bp, synthetic construct
  source 1..75: mol_type = other DNA
aagttgttcaggttttaaaggttgaaggcgttaaggagaggtggattgatcttagtgaggttgcaaaatgggcca

SEQ ID NO: 795517 - DNA, 75 bp, synthetic construct
  source 1..75: mol_type = other DNA
caatgaaaaacggtttgcattgattattgaggaaatcaaccaacgcaaaaataaagagatggcgacagaagaaaa

SEQ ID NO: 795518 - DNA, 75 bp, synthetic construct
  source 1..75: mol_type = other DNA
cctcattctgcgggctctgaaaaccctggaccgccatcttcatgaacccggcgtggccttcacctccacccgtgc

SEQ ID NO: 795519 - DNA, 75 bp, synthetic construct
  source 1..75: mol_type = other DNA
aatctctagcgtgttaaattcaaatgatattagctcgaaaaacatcgataaaataaaatcaacacttttaggtac

SEQ ID NO: 795520 - DNA, 75 bp, synthetic construct
  source 1..75: mol_type = other DNA
ttattatgcgcagttatcgtattacaaatgtcagacaacgacgcaataaaaagaacaggtgatgaagttcttgaa

SEQ ID NO: 795521 - DNA, 75 bp, synthetic construct
  source 1..75: mol_type = other DNA
agaatcacaaattattcagataaactgggaccaaataaagatgcattcatggcgttaaagtggttggggaatcac

SEQ ID NO: 795522 - DNA, 75 bp, synthetic construct
  source 1..75: mol_type = other DNA
cacgccaaccagctacatcgccacctacatcggaaagaacctggacagccgcgccgtggatggcatcgacccgaa

SEQ ID NO: 795523 - DNA, 75 bp, synthetic construct
  source 1..75: mol_type = other DNA
acgcctggcatccacacttcagcaagaccagaacaccatgaaaacacccgttaccgtgctttctgacatgctgcg

SEQ ID NO: 795524 - DNA, 75 bp, synthetic construct
  source 1..75: mol_type = other DNA
ctcttttttacgtaagaagcaggaatctgaccgccagaaaggcaaaaagagtcgaccagcagagggctacgcacg

SEQ ID NO: 795525 - DNA, 75 bp, synthetic construct
  source 1..75: mol_type = other DNA
atgacgacagagtacatcagggactggcaacaaccacgccacgcagtagggcgtgaaggtacggggatccccgca

SEQ ID NO: 795526 - DNA, 75 bp, synthetic construct
  source 1..75: mol_type = other DNA
actgaacgcgcccgccgcaaagcagacctgctgcggggtggactgaccagtggaaacaaaaacagacagaaacgg

SEQ ID NO: 795527 - DNA, 75 bp, synthetic construct
  source 1..75: mol_type = other DNA
atgaaccgcagccagccattgatccggacgacttcgcgaacttcagtcggttgccaaaaaccggactgcaacgcg

SEQ ID NO: 795528 - DNA, 75 bp, synthetic construct
  source 1..75: mol_type = other DNA
taatcacgaaacgaaaacactcggcagcgaaattctgaattttgcatgtgagtatacaaaagctgctgccgaaaa

SEQ ID NO: 795529 - DNA, 75 bp, synthetic construct
  source 1..75: mol_type = other DNA
atgagtttcaagagagatcgttacttagttttagatccatgcggaaactatctggtaaggattaccgttccagct

SEQ ID NO: 795530 - DNA, 75 bp, synthetic construct
  source 1..75: mol_type = other DNA
tggatatccgggtgccggaccatctgatagtcggtggcagtcaggttttctcctttgccgaacatggtctgcttt

SEQ ID NO: 795531 - DNA, 75 bp, synthetic construct
  source 1..75: mol_type = other DNA
aaaacgcaaaacagttttatattcaccatggttttaagccatcaaaaagccaggcgcaaacattgtttcttaaac

SEQ ID NO: 795532 - DNA, 75 bp, synthetic construct
  source 1..75: mol_type = other DNA
ctctttcgtgatgcggtggccctggaatggatcaagatacgtagccagctaaagccagagcgtgataaaggctcg

SEQ ID NO: 795533 - DNA, 75 bp, synthetic construct
  source 1..75: mol_type = other DNA
gaactacagccatacatcgagctattacgttacccagagatagagacggagccccaacgtgagaaaactgataaa

SEQ ID NO: 795534 - DNA, 75 bp, synthetic construct
  source 1..75: mol_type = other DNA
tggaaagcgctctacgtggcattcacagcgttttacgagggctaaacgtaaggcattgggggaagtaggatcaga

SEQ ID NO: 795535 - DNA, 75 bp, synthetic construct
  source 1..75: mol_type = other DNA
gactacatcaatgacaaaagctttaagcgccattttcagcaatggctgaactcattgtggcaggaaaaagaccga

SEQ ID NO: 795536 - DNA, 75 bp, synthetic construct
  source 1..75: mol_type = other DNA
atgaaggcttatgcctggcaccggattcctttgcaaacaatatccataatttattatgcgcagttgttgtattac

SEQ ID NO: 795537 - DNA, 75 bp, synthetic construct
  source 1..75: mol_type = other DNA
ttgcgcacgaaaaagttcgaaaacataactgctctccatgttgatgactttgattatgcaaacccggatcttctc

SEQ ID NO: 795538 - DNA, 75 bp, synthetic construct
  source 1..75: mol_type = other DNA
gagtggccttcacctccacccgtgcggcacgagaatggctgattctgaacatggcgggactggagcgtgaagagt

SEQ ID NO: 795539 - DNA, 75 bp, synthetic construct
  source 1..75: mol_type = other DNA
tttttagtgactctcggtacgaagaactgactgcagagatatcttataagggacagatactctgtcagctaaata

SEQ ID NO: 795540 - DNA, 75 bp, synthetic construct
  source 1..75: mol_type = other DNA
taataacgaaataaaaacacttggcagcgaaattctgaattttgcatgtgaatatgcaaaagctgctgccgaaaa

SEQ ID NO: 795541 - DNA, 75 bp, synthetic construct
  source 1..75: mol_type = other DNA
atattgccattcaggaagaccgccacgagctgggcgatgacataactccgcgctttaaggcggagtacgtcgacg

SEQ ID NO: 795542 - DNA, 75 bp, synthetic construct
  source 1..75: mol_type = other DNA
tggcgatgggctgcttctacagcctgaacgagaagatgtatgtccgcattgttgaagaaatagaagcccgtaaac

SEQ ID NO: 795543 - DNA, 75 bp, synthetic construct
  source 1..75: mol_type = other DNA
gtgtgaagcttgtgaaccctacgatatcaaggacattgatgaatggtatgacagtgacgttaacttattaggcaa

SEQ ID NO: 795544 - DNA, 75 bp, synthetic construct
  source 1..75: mol_type = other DNA
atggggtcaggttcgacagtcaaagcagcgatagcgctgggacgtcgtgcaactggcgttgagctggagactgag

SEQ ID NO: 795545 - DNA, 75 bp, synthetic construct
  source 1..75: mol_type = other DNA
caccgtgccggacagcaacgcctggccgccgtccatcgggccatgcagcagggggccgcgaatgattactggttt

SEQ ID NO: 795546 - DNA, 75 bp, synthetic construct
  source 1..75: mol_type = other DNA
caccgtgccggacagcaacgtctggccgccgtgcagcgggccatgcagcagggggccgcgaatgattactggttt

SEQ ID NO: 795547 - DNA, 75 bp, synthetic construct
  source 1..75: mol_type = other DNA
cccggcacctatggcggcattatctttttgatctcgaaattctttaccgcctttaccgatatgggaaccggcatc

SEQ ID NO: 795548 - DNA, 75 bp, synthetic construct
  source 1..75: mol_type = other DNA
agaaatcagcgaaggtactacaaatatcatcgtaatgggccgcaacgtatggaaaaaataccgcgcctttaaagc

SEQ ID NO: 795549 - DNA, 75 bp, synthetic construct
  source 1..75: mol_type = other DNA
ctggggattaccgtcaccacgcgctgggggcacccccgggggggggggggagccagtttgctgcgctggcagggg

SEQ ID NO: 795550 - DNA, 75 bp, synthetic construct
  source 1..75: mol_type = other DNA
acggattcaaatactctgacttcacacctgcacgtaagcttagattcgatagaaaaactattcgaatgattgaac

SEQ ID NO: 795551 - DNA, 75 bp, synthetic construct
  source 1..75: mol_type = other DNA
ttgtttaccagtttgtttttcactcgctcggtaatgtttgaatcgagagacattattcttgatacgatcgacgat

SEQ ID NO: 795552 - DNA, 75 bp, synthetic construct
  source 1..75: mol_type = other DNA
gtgagtagtgaagaaagtatcacggaatcagttaagcagactttgaaggaacgagtagctaaccctttatggggt

SEQ ID NO: 795553 - DNA, 75 bp, synthetic construct
  source 1..75: mol_type = other DNA
cgccgaaaaattacatcgtaccaggtgatccggctattgagtacgtacaaacgcactctgcaccacagccaatac

SEQ ID NO: 795554 - DNA, 75 bp, synthetic construct
  source 1..75: mol_type = other DNA
caccgtgccggacagcaacggctggccgccgttcagcgggccatgcagcagggggccgcgaatgattactggttt

SEQ ID NO: 795555 - DNA, 75 bp, synthetic construct
  source 1..75: mol_type = other DNA
cgtggtgaagtatggaaagtgactgcggactttggagtgaattttaaagaagccgagttttactcattttatgaa

SEQ ID NO: 795556 - DNA, 75 bp, synthetic construct
  source 1..75: mol_type = other DNA
ttgctgccgcaatggtcatgggcgcagtcgtctccagttctgcttttgccgcaggtaacaacggtaccgcacgtt

SEQ ID NO: 795557 - DNA, 75 bp, synthetic construct
  source 1..75: mol_type = other DNA
tgcttctacagcctgaacgagaagatgtatgtccgcattgtggaagagatagaagcccgtaaacgcacggcgtaa

SEQ ID NO: 795558 - DNA, 75 bp, synthetic construct
  source 1..75: mol_type = other DNA
gccatccgcgacgcagagcacgcacagagaatcagtgaaaccactgaacgcgcccagccgcaaagcagacctgct

SEQ ID NO: 795559 - DNA, 75 bp, synthetic construct
  source 1..75: mol_type = other DNA
ttgctccaaaagagaggcaaacagcactttagtaatcaaaatgatgatgagaaaaaacaattacaaagttggata

SEQ ID NO: 795560 - DNA, 75 bp, synthetic construct
  source 1..75: mol_type = other DNA
ggtactcgctgccgccgatgccgggtgttttgccacctacattgaaaaacagggtggcgtgcttgttccacgcaa

SEQ ID NO: 795561 - DNA, 75 bp, synthetic construct
  source 1..75: mol_type = other DNA
cggacatacggcaagaccactgacccgtaccgagatggtggtggtcttcggggttattttccatgagtacggctg

SEQ ID NO: 795562 - DNA, 75 bp, synthetic construct
  source 1..75: mol_type = other DNA
atctttacaatgcgatggagaaaagcggtctgcgaggtgtcagtgttaaatatctctgcagcaccgcagaccggt

SEQ ID NO: 795563 - DNA, 75 bp, synthetic construct
  source 1..75: mol_type = other DNA
tcgtggcgttctcctgcctggcattcttcggctcagcgtttgttaacagcctgaactgggcgctggtttccgaca

SEQ ID NO: 795564 - DNA, 75 bp, synthetic construct
  source 1..75: mol_type = other DNA
gctgacttcagcatcagtcgttgccgcagggaacaacggtacagtgagattttacggcacaattgaagactcccc

SEQ ID NO: 795565 - DNA, 75 bp, synthetic construct
  source 1..75: mol_type = other DNA
aaactcgaagttgatatgggcgatatcggttctgaaaaactgaaaggcggcaagtcaaccacgccaaaagagttc

SEQ ID NO: 795566 - DNA, 75 bp, synthetic construct
  source 1..75: mol_type = other DNA
tacctttactggtaccgtttcttctgcaaatagcggcaattattacaccattttcaataccgataccggtgcggc

SEQ ID NO: 795567 - DNA, 75 bp, synthetic construct
  source 1..75: mol_type = other DNA
catcatacactaaatcagtaagttggcagcattacccgtttctggatggttatgtactggtaatgattggcgtgg

SEQ ID NO: 795568 - DNA, 75 bp, synthetic construct
  source 1..75: mol_type = other DNA
cgttttgtacaggctgtgggtgtctgcgccgcggcggttatctggcaagcattagtgacagattattatccttca

SEQ ID NO: 795569 - DNA, 75 bp, synthetic construct
  source 1..75: mol_type = other DNA
acagaactgcaccattcagctcaaagcaaaacgtaacagcactacggttgtggtgaacacggtggcctcagaaaa

SEQ ID NO: 795570 - DNA, 75 bp, synthetic construct
  source 1..75: mol_type = other DNA
tcgcttatcaacacctccctgcgcatctgcaggaaataagtaagccaatcggtgaccttgcgacactgatggatg

SEQ ID NO: 795571 - DNA, 75 bp, synthetic construct
  source 1..75: mol_type = other DNA
atcttaaattctcctcaattcaccgtcgcattttactgtggggaagcggtggcccgtttctggatggttatgtac

SEQ ID NO: 795572 - DNA, 75 bp, synthetic construct
  source 1..75: mol_type = other DNA
ttacgcaaagggcgagtaaaagagtgcgaagagatgatgatcaaactgtttggcgaaccggtggctttcgatgaa

SEQ ID NO: 795573 - DNA, 75 bp, synthetic construct
  source 1..75: mol_type = other DNA
aaaataagtaatgagccattctatgatgactcaacattaaccatgacgacgccgcaaattgaactgggcaatacg

SEQ ID NO: 795574 - DNA, 75 bp, synthetic construct
  source 1..75: mol_type = other DNA
tcagtgagatctgggaactgtcagaatccaatattggtgaactcgagcttgagtatcaggcaaaattcggtgatg

SEQ ID NO: 795575 - DNA, 75 bp, synthetic construct
  source 1..75: mol_type = other DNA
atcttgatctggatacccggattgcaacagtaagcggtaatacatcccttataacggccaaagctgaacaacagg

SEQ ID NO: 795576 - DNA, 75 bp, synthetic construct
  source 1..75: mol_type = other DNA
atggcagcagtaaaaatctcaggtgtgctgaaagatggtgcgggaaaaccaatacagaactgcaccattcagctc

SEQ ID NO: 795577 - DNA, 75 bp, synthetic construct
  source 1..75: mol_type = other DNA
aaatgtcgagcgcgatcgtcgtgatattaatcgattgcaggaactcggctggcgtgtattgattgtctgggagtg

SEQ ID NO: 795578 - DNA, 75 bp, synthetic construct
  source 1..75: mol_type = other DNA
ggtgaacggtcaggtgcaggagtatgacatcagcactgcctccatgccgttcctgactcgcccgggccaggtgcg

SEQ ID NO: 795579 - DNA, 75 bp, synthetic construct
  source 1..75: mol_type = other DNA
ttatctgaataccagcgacagtgaagggcaagatctgcgtgactgggaatggagccgctattacgcatggcgtgc

SEQ ID NO: 795580 - DNA, 75 bp, synthetic construct
  source 1..75: mol_type = other DNA
caactactatcgcaaccaggcctacattgatctgaacaaactgccggaaaacgcggaagccacccagtcggtggt

SEQ ID NO: 795581 - DNA, 75 bp, synthetic construct
  source 1..75: mol_type = other DNA
acggcaaaagtcaccgttagccagatgggccgcgtaatctacgaaacgcaggttccggcggggccgttccgtatt

SEQ ID NO: 795582 - DNA, 75 bp, synthetic construct
  source 1..75: mol_type = other DNA
aaagctctgggaaccagtgtggataccattaaaagctgggaatcgaagcgaagaaatcctacgggattggctgca

SEQ ID NO: 795583 - DNA, 75 bp, synthetic construct
  source 1..75: mol_type = other DNA
atggaggccatatgggttgccggatgcagcagttatgaaacaacgggcgtaatacatctgttaagggggtgtggt

SEQ ID NO: 795584 - DNA, 75 bp, synthetic construct
  source 1..75: mol_type = other DNA
aaagcgggtgaaaacttacaggtttactggtcaggcgaaaaacagtgtgacgtctcattgcccgacccgttaccg

SEQ ID NO: 795585 - DNA, 75 bp, synthetic construct
  source 1..75: mol_type = other DNA
cgaaagatgcggacatggtgcgctccggcaacgataaagagatgtacacggttacctacaaccagaacttccggg

SEQ ID NO: 795586 - DNA, 75 bp, synthetic construct
  source 1..75: mol_type = other DNA
gcgcaggacctggaacctatatgctttcagactatgttgatgtgctctacgccattgagttcacaacagaacatg

SEQ ID NO: 795587 - DNA, 75 bp, synthetic construct
  source 1..75: mol_type = other DNA
tggtacatcgatgaaaaatcgcaggatcagctttatgtaatgggcaaggcgttgattcacgaatctataaaatac

SEQ ID NO: 795588 - DNA, 75 bp, synthetic construct
  source 1..75: mol_type = other DNA
ggtaaagcggtcgtggcggacgtcaacaactactaccgtaaccaggcctacatcgacatcactaaactaccggaa

SEQ ID NO: 795589 - DNA, 75 bp, synthetic construct
  source 1..75: mol_type = other DNA
gtatatctcgctgagtatgccgtggggcgacagcagtaccgtcagctataacggcaactacggcagcggctcaga

SEQ ID NO: 795590 - DNA, 75 bp, synthetic construct
  source 1..75: mol_type = other DNA
aggctgatttgagtcaatccgctttattaatctccttgccgcaggcatatcttgaatacagcgatgttgactggg

SEQ ID NO: 795591 - DNA, 75 bp, synthetic construct
  source 1..75: mol_type = other DNA
aggccatcaatcgcattcccgacgatcggatcgaagatgcggcaaaatgcggacgctgcggtcacgacttgtttg

SEQ ID NO: 795592 - DNA, 75 bp, synthetic construct
  source 1..75: mol_type = other DNA
gaactttcagcctgatacgttgaaaatggtctatgaccgtaacggcgttattatttgtattgaaaaggatgtttc

SEQ ID NO: 795593 - DNA, 75 bp, synthetic construct
  source 1..75: mol_type = other DNA
atgcggtactgccgctgcgtctggacaatgatgagttaattgtcggcagtgaagatggtattgacccggtttcgc

SEQ ID NO: 795594 - DNA, 75 bp, synthetic construct
  source 1..75: mol_type = other DNA
caggtaatccaaaaaccgttgaacaatatcagctaacaaagaattttaatgttatctggttatggtccgaagacg

SEQ ID NO: 795595 - DNA, 75 bp, synthetic construct
  source 1..75: mol_type = other DNA
atcatccgtaatatcgttaacgatccgtccgttgtattcgacgatatcgtcaccaacgagcagattcagaaacgt

SEQ ID NO: 795596 - DNA, 75 bp, synthetic construct
  source 1..75: mol_type = other DNA
tctacgtcagctttgcttgttcctttgcctttgcagaacgcgaactgatggaaggcaacgccaaaattattcgcc

SEQ ID NO: 795597 - DNA, 75 bp, synthetic construct
  source 1..75: mol_type = other DNA
caaatcgccgggctgatatttcggggaaatggttgttcaaagatggcgtagtgataaagcgaacttataccgagg

SEQ ID NO: 795598 - DNA, 75 bp, synthetic construct
  source 1..75: mol_type = other DNA
aatgccgggcgttacacgcagatgatgaacaacacggacacgcatccgttctggcagtatgtggcggtgatggac

SEQ ID NO: 795599 - DNA, 75 bp, synthetic construct
  source 1..75: mol_type = other DNA
accgctatactcggcgattcttgcgcgcacgctggcaaaacaggaagctgagcaactggcgcgaagcaaggccgc

SEQ ID NO: 795600 - DNA, 75 bp, synthetic construct
  source 1..75: mol_type = other DNA
taacctgattcctatcgccacagcggggaatttcagcatgggaatgctgatttttatttttgtcgctcgggtgat

SEQ ID NO: 795601 - DNA, 75 bp, synthetic construct
  source 1..75: mol_type = other DNA
taatcgcgtcgaaggtctacgcctgggcggttcaatgctgatgcaggggctgattagcgccgagcagctggcaca

SEQ ID NO: 795602 - DNA, 75 bp, synthetic construct
  source 1..75: mol_type = other DNA
caactcgatacagcactgcgtaatcgcgtcgaaggtctacgcctgggcggttcaatgctgatgcaggggctgatt

SEQ ID NO: 795603 - DNA, 75 bp, synthetic construct
  source 1..75: mol_type = other DNA
caaatcgccgtgctgacatttcgggtagatggatgttcaaagatgacgtagtggtaaagcgaacttataccgagg

SEQ ID NO: 795604 - DNA, 75 bp, synthetic construct
  source 1..75: mol_type = other DNA
tctacgtcagctttgcttgttccttcgcatttgcagaacgcgaattgatggaaggcaacgccaaaattattcgcc

SEQ ID NO: 795605 - DNA, 75 bp, synthetic construct
  source 1..75: mol_type = other DNA
tcgacaccgagccaatgaagcccagtaataccgggcgtctgattgctgatattttgcctgataccgttgcgtttc

SEQ ID NO: 795606 - DNA, 75 bp, synthetic construct
  source 1..75: mol_type = other DNA
ctggtaatcctgaaacaaaagagcaataccagctaacgaaacaatttaacatcaaatggctttatacagaggatg

SEQ ID NO: 795607 - DNA, 75 bp, synthetic construct
  source 1..75: mol_type = other DNA
cgcaagcgtcgttgaattacctgatattacagcaaatcgccgtgctgacatttcgggtaaatggatgttcaaaga

SEQ ID NO: 795608 - DNA, 75 bp, synthetic construct
  source 1..75: mol_type = other DNA
cgtgaataccgccaccgtgattattgggatctcgcaaatatcttcccttctttttttaatacgtcaacagcaaaa

SEQ ID NO: 795609 - DNA, 75 bp, synthetic construct
  source 1..75: mol_type = other DNA
atctatctggcgatgggtgaagtgctgaacgagcagtttggtcgcaccgttctgccaattggtgaatcccactaa

SEQ ID NO: 795610 - DNA, 75 bp, synthetic construct
  source 1..75: mol_type = other DNA
atctatctggcgatgggtgaagtactgaacgagcagtttggtcgcaccgttctgccgattggtgaatcccactaa

SEQ ID NO: 795611 - DNA, 75 bp, synthetic construct
  source 1..75: mol_type = other DNA
gaaggcaacgccaaaattattcgcctgattgcccgcgacgaagccctgcacctgaccggtactcagcatatgctg

SEQ ID NO: 795612 - DNA, 75 bp, synthetic construct
  source 1..75: mol_type = other DNA
ctggcaccttctgggcgaaggcacccacaccgttaacggtaaaaccgtaaccgttagcctgcgcgagctgaagaa

SEQ ID NO: 795613 - DNA, 75 bp, synthetic construct
  source 1..75: mol_type = other DNA
ttgaatacatcaccaatatccgtatgcaggcagtcggtttggatctgccgttccagacgcgctccaacccgatcc

SEQ ID NO: 795614 - DNA, 75 bp, synthetic construct
  source 1..75: mol_type = other DNA
aagagcaaaggcaacaagcggaaaatgaaaagcagagcctgctgcagctcgtcagggataaaacccaactgtggg

SEQ ID NO: 795615 - DNA, 75 bp, synthetic construct
  source 1..75: mol_type = other DNA
agcaattaatccagaaggtttaagtgtcgttgagttgcctgatattacagcaaatcgccgggctgatatttcggg

SEQ ID NO: 795616 - DNA, 75 bp, synthetic construct
  source 1..75: mol_type = other DNA
attgtttacgacgaaaataatattattgttgccataaccaaagatgcctccacacttaaccctgaaggttatagc

SEQ ID NO: 795617 - DNA, 75 bp, synthetic construct
  source 1..75: mol_type = other DNA
gccacaccttatccgctctcaatgtgctggtttgatatgttttactcgccggagctggcgcgacgcgtctataac

SEQ ID NO: 795618 - DNA, 75 bp, synthetic construct
  source 1..75: mol_type = other DNA
gaactactgcaaaaacatattcgccagcgcgacttaatgttattgctggagcaactggtcacgctgattgacgaa

SEQ ID NO: 795619 - DNA, 75 bp, synthetic construct
  source 1..75: mol_type = other DNA
atggatgcaccgagtaccacaccgcatgacgcggtatttaaacaatttttaatgcatgcggagacggctcgcgac

SEQ ID NO: 795620 - DNA, 75 bp, synthetic construct
  source 1..75: mol_type = other DNA
agatgaattttctaagaacatgaagcatatatatataaaatataatgttgggattttaggaccttcattttatga

SEQ ID NO: 795621 - DNA, 75 bp, synthetic construct
  source 1..75: mol_type = other DNA
tttctgagtaaagggatgtctcgggaagacgttgcagagatggcaaatttacctcttgctgaggttgataagctg

SEQ ID NO: 795622 - DNA, 75 bp, synthetic construct
  source 1..75: mol_type = other DNA
gcaagccggataagaaaatgacctttcgcatgatgcgctatgccattgccgccatgcaccggcatctggaggcgg

SEQ ID NO: 795623 - DNA, 75 bp, synthetic construct
  source 1..75: mol_type = other DNA
tattacgcgcccgaaaggcggatttttactgtggatagaattgcctgaaaaggtcgatatggtctgcgtcgcgcg

SEQ ID NO: 795624 - DNA, 75 bp, synthetic construct
  source 1..75: mol_type = other DNA
gaaaaacgaaaagcaacaagttcgaaccaacaatattgggttgttgcgttattgcgtgaactagaagacgaaggt

SEQ ID NO: 795625 - DNA, 75 bp, synthetic construct
  source 1..75: mol_type = other DNA
ggtatttgccggattgctaccgttccgtggcttcaatctgcgcgagcgcgtgtttattagttgggttggattacg

SEQ ID NO: 795626 - DNA, 75 bp, synthetic construct
  source 1..75: mol_type = other DNA
cgatattgtcgcggtcgaatccccctgttattacggttcaatgcagatgctgcgcggcatgggcgtgaaagtgat

SEQ ID NO: 795627 - DNA, 75 bp, synthetic construct
  source 1..75: mol_type = other DNA
ccgtaattgtctgcgcatcaactgcgctttgccgctcagcgaaacctatcgcgaagcactaaagcaaattggcga

SEQ ID NO: 795628 - DNA, 75 bp, synthetic construct
  source 1..75: mol_type = other DNA
gcggcggcaacgtttgtgctggaaggtcactatcatcgccatatccggcggatgcggcagaattatcagcgcaat

SEQ ID NO: 795629 - DNA, 75 bp, synthetic construct
  source 1..75: mol_type = other DNA
cgcttctttgaaacccagtcatcaaaaggcgggcgttacactgtcacgcttcctgacggcactaaagtcgaagaa

SEQ ID NO: 795630 - DNA, 75 bp, synthetic construct
  source 1..75: mol_type = other DNA
ttctggctgaaacagaccagcgttacttcgattccttaccatctgagaatgatcttaactggtatcgtaatgatg

SEQ ID NO: 795631 - DNA, 75 bp, synthetic construct
  source 1..75: mol_type = other DNA
agaatcatctgaagagattatggcctggtgttatgccagttacttcacatggaaaaaaacaaccagaattcacca

SEQ ID NO: 795632 - DNA, 75 bp, synthetic construct
  source 1..75: mol_type = other DNA
ttttattcatcctgaataaacatgaacgggcatacagacgcctgaagcctgtatatacttttttagaactggcat

SEQ ID NO: 795633 - DNA, 75 bp, synthetic construct
  source 1..75: mol_type = other DNA
gtggcgcgctggcagatgaacactatcagtcggcggcgatgggggtggggcgcgacctcgcacagtttggcgcgc

SEQ ID NO: 795634 - DNA, 75 bp, synthetic construct
  source 1..75: mol_type = other DNA
atgatttaagccagtcggcgttgctgctgacagtgccacaggcttacctcgaatataccagcagcgactgggacc

SEQ ID NO: 795635 - DNA, 75 bp, synthetic construct
  source 1..75: mol_type = other DNA
atgacccgttctgatgatacccatgaaaacgaggcaaacatgacgccggaagagatgaagaatgagctgcgttat

SEQ ID NO: 795636 - DNA, 75 bp, synthetic construct
  source 1..75: mol_type = other DNA
gcagccatctggaaagcgtcattcgcctgcagaaaaacccggtgctgattgtgccggagacgtttacgccgccgg

SEQ ID NO: 795637 - DNA, 75 bp, synthetic construct
  source 1..75: mol_type = other DNA
cagtgaagaaagccggagaaatctggagcgcctgacgatgagccccttattcagcgggctgaagtgtcacctggt

SEQ ID NO: 795638 - DNA, 75 bp, synthetic construct
  source 1..75: mol_type = other DNA
gaagcggtgaaagccgtttctcgtcgcgcagataaagaaggtgccgcctctttttatgttgtcgacacttctgat

SEQ ID NO: 795639 - DNA, 75 bp, synthetic construct
  source 1..75: mol_type = other DNA
tgaacaccaccatgatctacgtgacccacgatcagaccgaagcgatgaccatggcgacgcggattgtgattatga

SEQ ID NO: 795640 - DNA, 75 bp, synthetic construct
  source 1..75: mol_type = other DNA
ccacgatcagaccgaagcgatgaccatggcgacgcggattgtgattatgaaggatgggattgttcagcaagttgg

SEQ ID NO: 795641 - DNA, 75 bp, synthetic construct
  source 1..75: mol_type = other DNA
gatcgatggcgataaattcgttacggaaacgcttaaattaaccattcccgaagagaaattagcggttctgaaaac

SEQ ID NO: 795642 - DNA, 75 bp, synthetic construct
  source 1..75: mol_type = other DNA
ccggcagcacccgactgcgcgaaggcgatgtgttgtgtgtaattggtcgggaacgcgatcttccggcgctcggta

SEQ ID NO: 795643 - DNA, 75 bp, synthetic construct
  source 1..75: mol_type = other DNA
acatgaccatgagcgagtatctggatgcgaacgacgacgaccgggcgcgcaccggtaacgacaaagagatgtata

SEQ ID NO: 795644 - DNA, 75 bp, synthetic construct
  source 1..75: mol_type = other DNA
ggataccgcttctctgaaaaaaactacatgaccatgagcgagtatctggatgcgaacgacgacgaccgggcgcgc

SEQ ID NO: 795645 - DNA, 75 bp, synthetic construct
  source 1..75: mol_type = other DNA
gcaaaaggggggaagttctcccgtcataccgcatgatattcaacctgtcattcaggagcagacacaacaggtggc

SEQ ID NO: 795646 - DNA, 75 bp, synthetic construct
  source 1..75: mol_type = other DNA
tcgcttatattctaaaagcgaggagataaaaaacaaggtagcattcgttgaggagtttgctgaattgggcaaata

SEQ ID NO: 795647 - DNA, 75 bp, synthetic construct
  source 1..75: mol_type = other DNA
attggtggaattgacagaccggataatggaaatatttattgtaataaaaaaatatcatggccagtaggcctttcc

SEQ ID NO: 795648 - DNA, 75 bp, synthetic construct
  source 1..75: mol_type = other DNA
ttttgtagaagaattttcggaattaggtacatattttgatatgccgatcaagtcttattcatcagggatgcgatc

SEQ ID NO: 795649 - DNA, 75 bp, synthetic construct
  source 1..75: mol_type = other DNA
gttttggtttaagcatggcatttaagtttgattattatattgtcgatgaagtaacggcagtcggtgatgccaggt

SEQ ID NO: 795650 - DNA, 75 bp, synthetic construct
  source 1..75: mol_type = other DNA
ccgattatactccaagaaggaggatatgaaagataaaattaagtttatcgaagaattcgccgaacttggtaaatt

SEQ ID NO: 795651 - DNA, 75 bp, synthetic construct
  source 1..75: mol_type = other DNA
attggcggcattgaccgccccgatagcggaaagatcatcaccaataaaacgatatcatggccagttggcctcgcc

SEQ ID NO: 795652 - DNA, 75 bp, synthetic construct
  source 1..75: mol_type = other DNA
gcggttatatgcgaaaagtaatgaactacatgaaaagattgcatttgttgaaagtttttctgagcttggaaaata

SEQ ID NO: 795653 - DNA, 75 bp, synthetic construct
  source 1..75: mol_type = other DNA
tgcgattctatttgataaacagcaaaatgttcatctgttcagtgaaatagaggaagctatatatcaatataaaat

SEQ ID NO: 795654 - DNA, 75 bp, synthetic construct
  source 1..75: mol_type = other DNA
gttttggattaagtatggcttttgattttgattattatcttgttgatgaaattacagctgttggagatgctcgct

SEQ ID NO: 795655 - DNA, 75 bp, synthetic construct
  source 1..75: mol_type = other DNA
aaagacgataatgcggttggtttttatgaggatgttcaggagggaatagaagagtattataggatatatgcctga

SEQ ID NO: 795656 - DNA, 75 bp, synthetic construct
  source 1..75: mol_type = other DNA
caagctgactcagcagaagcccggcaagctcaccatgaaccgtgagcagctcatcggcctgatccagtccgacgc

SEQ ID NO: 795657 - DNA, 75 bp, synthetic construct
  source 1..75: mol_type = other DNA
aagctcaccctaaatcgcgaagaactcattggcctgatccagtccgatgccaagtttatcgacgaacgtgaagat

SEQ ID NO: 795658 - DNA, 75 bp, synthetic construct
  source 1..75: mol_type = other DNA
gacataaccatcgtagtggacatgctgcttacgggatttgactccaagtacctcaatacactgtacgtggacaaa

SEQ ID NO: 795659 - DNA, 75 bp, synthetic construct
  source 1..75: mol_type = other DNA
caccagcagtattttacttagttcattttcttcccgtcttggcattcctattctggttattttcctggcgatcgg

SEQ ID NO: 795660 - DNA, 75 bp, synthetic construct
  source 1..75: mol_type = other DNA
ccggcgctcattttgtccgcatggatgattttcttcgcccgtcctctttcggtatttgccggattgctaccgttc

SEQ ID NO: 795661 - DNA, 75 bp, synthetic construct
  source 1..75: mol_type = other DNA
cttttgcctacatggtaagtaatctggcgctggcaattattttgctcgacggcgggatgcgaacccaggccagct

SEQ ID NO: 795662 - DNA, 75 bp, synthetic construct
  source 1..75: mol_type = other DNA
tgcgccaactgccggatgcggcgtgaacgccttatccggcctacggttcggcacaaacctgtaggcctgataaga

SEQ ID NO: 795663 - DNA, 75 bp, synthetic construct
  source 1..75: mol_type = other DNA
aaatatgagcattggaattatatcaactgtgtgaagaagcgccacaattgccggattacaggcaaaaaaaatgcg

SEQ ID NO: 795664 - DNA, 75 bp, synthetic construct
  source 1..75: mol_type = other DNA
attggtggcattgaccgccccgatagcggaaagatcatcaccaataaaacgatatcatggccagtcggcctcgcc

SEQ ID NO: 795665 - DNA, 75 bp, synthetic construct
  source 1..75: mol_type = other DNA
taccaaatttatgcggtcaaggctatcgccgattgcattcatcagaattgcggaaacggctatatctggcatacc

SEQ ID NO: 795666 - DNA, 75 bp, synthetic construct
  source 1..75: mol_type = other DNA
gctacggtaagacactgttgtgttttatccaactcttcatcgtcagcaatcgtactgatacctggtacttcgcga

SEQ ID NO: 795667 - DNA, 75 bp, synthetic construct
  source 1..75: mol_type = other DNA
cttggtattattgcgaacatttattcaactgtacgcacctggaagcttgctcaggtaattcaggaagaaccgctc

SEQ ID NO: 795668 - DNA, 75 bp, synthetic construct
  source 1..75: mol_type = other DNA
caaggcaaaagtctctacagcgactgtctcccgagcattaatgaatcccgataaagtctcccaggccacccgtaa

SEQ ID NO: 795669 - DNA, 75 bp, synthetic construct
  source 1..75: mol_type = other DNA
cgtttgcgtgcgaaaaattgcgcgagatacacggtttatctttatccgttgaaactctcagaaagtggatgatag

SEQ ID NO: 795670 - DNA, 75 bp, synthetic construct
  source 1..75: mol_type = other DNA
cgtcttatcatgcctacaagtctgtgccgaaccgtaggccgtatccggcatgtcacaaatagagcgccggaaata

SEQ ID NO: 795671 - DNA, 75 bp, synthetic construct
  source 1..75: mol_type = other DNA
ccgcaaccatgaaagacgtcgccctgaaagcaaaagtctctacggcgaccgtctcccgagcgttaatgaatccag

SEQ ID NO: 795672 - DNA, 75 bp, synthetic construct
  source 1..75: mol_type = other DNA
gacttcaccttcgacgccggaagcaaagccatgcagcagttgctcgaccttccgcaaccgccaactgctgttttc

SEQ ID NO: 795673 - DNA, 75 bp, synthetic construct
  source 1..75: mol_type = other DNA
tgatccgcaatacatcgcccggggcgacttctcctttgaagccggaagcaacgcgatgcaacagctgcttgctct

SEQ ID NO: 795674 - DNA, 75 bp, synthetic construct
  source 1..75: mol_type = other DNA
taaactggctgatgacgggacgcctgttcgtgcaggtcagaatatcgtgacgccggagatcatgaaacttcagtt

SEQ ID NO: 795675 - DNA, 75 bp, synthetic construct
  source 1..75: mol_type = other DNA
gtcattaacgctgacactgatgcgccattcactgctatcgcagctgaagtcagtggtgataatgctgaaggactt

SEQ ID NO: 795676 - DNA, 75 bp, synthetic construct
  source 1..75: mol_type = other DNA
gcattgagcaccttttacagcgtcaggttgatgccattattgtttcgacgtcgttgcctcctgagcatccttttt

SEQ ID NO: 795677 - DNA, 75 bp, synthetic construct
  source 1..75: mol_type = other DNA
atgaatataattggcaccgcctctcaggatggtgttctgcacatttatatcggcggtcggcgttatctgctggct

SEQ ID NO: 795678 - DNA, 75 bp, synthetic construct
  source 1..75: mol_type = other DNA
aacaatatcgtgaaatgctgatcgctgacggtatcgacccgaacgaactgctgaatagcatggctgctgttaaat

SEQ ID NO: 795679 - DNA, 75 bp, synthetic construct
  source 1..75: mol_type = other DNA
cacgctgagttatctgcgttattcgctgcgaacccgcatcacgcagaaattcccgaactacaagctggcaagtga

SEQ ID NO: 795680 - DNA, 75 bp, synthetic construct
  source 1..75: mol_type = other DNA
atcagcaactttatttcatgcaccaacaatattctatcaatatcctaaactaatagatgaagttaagtattgtat

SEQ ID NO: 795681 - DNA, 75 bp, synthetic construct
  source 1..75: mol_type = other DNA
gtttttatcgaattatgttatagatatcgggagggaaaattaaaaataaggcttctctcgaagatttgtgggata

SEQ ID NO: 795682 - DNA, 75 bp, synthetic construct
  source 1..75: mol_type = other DNA
tgtgtatcaaaagcgcgaaatcgttgttgatgctgattatgactatgaccggattgtctgggttgatgaagatgg

SEQ ID NO: 795683 - DNA, 75 bp, synthetic construct
  source 1..75: mol_type = other DNA
atgcggcgattatcggacgtgttgctctcgttccgggcaactctgtattaaccctgaacatcaggctgatgatgt

SEQ ID NO: 795684 - DNA, 75 bp, synthetic construct
  source 1..75: mol_type = other DNA
tatgacagtcagtcagcaccgatattcagtgctctgagtttatctgtagctccgggggaaagtgtggctataact

SEQ ID NO: 795685 - DNA, 75 bp, synthetic construct
  source 1..75: mol_type = other DNA
cacgctcatcaatgtacagtggcagtcggggctgttcgatcatcttctcagactaccgctggcgttttttgaacg

SEQ ID NO: 795686 - DNA, 75 bp, synthetic construct
  source 1..75: mol_type = other DNA
aggaatcaatggaatagcggagcaactggggatggccacccgggctctttcactggagttggatgaacttcgagt

SEQ ID NO: 795687 - DNA, 75 bp, synthetic construct
  source 1..75: mol_type = other DNA
tgacaaatctatagcctgtgccctgaatggaactcccgttggtgataaatatactaaagttagctatgacgtgct

SEQ ID NO: 795688 - DNA, 75 bp, synthetic construct
  source 1..75: mol_type = other DNA
taattgtgctgcagttgcctcttttagtaataatccctttatatggcctgtaaatgttacaggtactcttgcttt

SEQ ID NO: 795689 - DNA, 75 bp, synthetic construct
  source 1..75: mol_type = other DNA
tggaggcatggaataaatatcgggtattgttgaatcgtgttgatacatcaactgtacctgatattgagtggcctg

SEQ ID NO: 795690 - DNA, 75 bp, synthetic construct
  source 1..75: mol_type = other DNA
taaaggggtgaaatttgcattagatttcacagccagccagccagccagccagccagccaggtgtgaatgtggatt

SEQ ID NO: 795691 - DNA, 75 bp, synthetic construct
  source 1..75: mol_type = other DNA
gtcttatgctaaaagccattcgtttgtacggcgcgttcagcatgcttaatgtcactttcagcaatgagaaattac

SEQ ID NO: 795692 - DNA, 75 bp, synthetic construct
  source 1..75: mol_type = other DNA
atggacttattattactcactggggccactggatttctcggcggtgctgtgctagataaactgatgaacaatcac

SEQ ID NO: 795693 - DNA, 75 bp, synthetic construct
  source 1..75: mol_type = other DNA
ggagaacaccagctatacccgcatcgctaactatcttgaacgccaggcgcggcaacggggttatcaactgctgat

SEQ ID NO: 795694 - DNA, 75 bp, synthetic construct
  source 1..75: mol_type = other DNA
ggtgatggccgggatgatcgctatctttatgtcctttgcggggcaattcgctttcttcacctatattcgaccggt

SEQ ID NO: 795695 - DNA, 75 bp, synthetic construct
  source 1..75: mol_type = other DNA
gtggcgcggatgccatcacccgaccgaactggtcagccgttttctcggtggcgttttgcgtcgcctgcctgatta

SEQ ID NO: 795696 - DNA, 75 bp, synthetic construct
  source 1..75: mol_type = other DNA
tgatgatgagtatggtggcctggacgctgcgctttggtttcttcgcttatggagatccgtcaccaaccgggttta

SEQ ID NO: 795697 - DNA, 75 bp, synthetic construct
  source 1..75: mol_type = other DNA
tggggaagcgataaaattgttgctaccggcgtggcgattatctgggggctgacctttgctttaattcccgtgggc

SEQ ID NO: 795698 - DNA, 75 bp, synthetic construct
  source 1..75: mol_type = other DNA
tgagcgcgctggtactgacgctgtggggaagcgataaaattgttgctactggtgtggcgattatctgggggctga

SEQ ID NO: 795699 - DNA, 75 bp, synthetic construct
  source 1..75: mol_type = other DNA
gcgggcgcaccgtttgtgctcgccctgagcgcgctggtactgacgctgtggggaagcgataaaattgttgctact

SEQ ID NO: 795700 - DNA, 75 bp, synthetic construct
  source 1..75: mol_type = other DNA
ctctggcatcgctggaagaggatccggtggcatggctgcattcagacaatggcttaggtattccggcaataacta

SEQ ID NO: 795701 - DNA, 75 bp, synthetic construct
  source 1..75: mol_type = other DNA
gtggagttgagcgacggcactttatcgtggttagggaacgtcttgttctggatgacgttgccagaacctccgaag

SEQ ID NO: 795702 - DNA, 75 bp, synthetic construct
  source 1..75: mol_type = other DNA
gcaaatgatgtggagttgaagccctacaacgtcagcgcccagcgccgggatgtgttgatggagctcgatgacgcg

SEQ ID NO: 795703 - DNA, 75 bp, synthetic construct
  source 1..75: mol_type = other DNA
aacaggaagttgattccagcattcgtgccagcgcgcagggcctttttatgacgatggtaaatggcgtcggcgcat

SEQ ID NO: 795704 - DNA, 75 bp, synthetic construct
  source 1..75: mol_type = other DNA
ataatttaggaaccggaaaaggatattctgtactcgaagttatagaagcttttgaaaagataactggaatcaaaa

SEQ ID NO: 795705 - DNA, 75 bp, synthetic construct
  source 1..75: mol_type = other DNA
ctttgtgctggttggacgaatttgccgacccgactactgcacggaagctttataacgccgcgttcccgctggtgg

SEQ ID NO: 795706 - DNA, 75 bp, synthetic construct
  source 1..75: mol_type = other DNA
atgagtgaatttattgccgaaaaccgcggcgcggatgccatcatccgaccgaactggtccgccgttttctcggta

SEQ ID NO: 795707 - DNA, 75 bp, synthetic construct
  source 1..75: mol_type = other DNA
tgtccggaacggcaggcgaaaacggctcgcttgtgacttacattgccggtcagcgactggcggtatctgtcgcag

SEQ ID NO: 795708 - DNA, 75 bp, synthetic construct
  source 1..75: mol_type = other DNA
ggatcgtctgacgcgggaagagcgaaacagcctgctttataccggcatgtccacggtgaccgtcgcggccgcgga

SEQ ID NO: 795709 - DNA, 75 bp, synthetic construct
  source 1..75: mol_type = other DNA
tgtaaacataacgtcgttaattgggcgtggtggcagttgcgagcttaagcctgcggattttcacgtagattttga

SEQ ID NO: 795710 - DNA, 75 bp, synthetic construct
  source 1..75: mol_type = other DNA
atcttggtgcactgccggagctttctgtcagcttcctgcgtgaacagggtttccgcacggcctggaaagatgatc

SEQ ID NO: 795711 - DNA, 75 bp, synthetic construct
  source 1..75: mol_type = other DNA
cctggcaattgccacctttggcgataacgaactgctcgacttcttacagtgcccggtgctggcagtggctcaacg

SEQ ID NO: 795712 - DNA, 75 bp, synthetic construct
  source 1..75: mol_type = other DNA
atcttggcgcgctgccggagctttctgtcagcttcctgcgtgagcagggtttccgaactgcctggaaagatgatc

SEQ ID NO: 795713 - DNA, 75 bp, synthetic construct
  source 1..75: mol_type = other DNA
gagaacacccatcaatcaaactttgctctttgacgcacatatgtgacgagttagccgcccagcttcgcaaaggag

SEQ ID NO: 795714 - DNA, 75 bp, synthetic construct
  source 1..75: mol_type = other DNA
gaggcgctggaaagcattatgtgcatcaattttgccgctgctaacgttgtctcgctggagttcctgcggcagaac

SEQ ID NO: 795715 - DNA, 75 bp, synthetic construct
  source 1..75: mol_type = other DNA
ttgttgtgagcgcgctggaaatgaatgagggcggtttgtcacaggttgaggaacgcattctccatgaagtggtcg

SEQ ID NO: 795716 - DNA, 75 bp, synthetic construct
  source 1..75: mol_type = other DNA
atggcgcttaaaaatggtggcagtggcggcgctatcgtcaatgtctcttcggtggcctcacggttgggttcgcca

SEQ ID NO: 795717 - DNA, 75 bp, synthetic construct
  source 1..75: mol_type = other DNA
ccgggctgaaacacgcaatggccgtaactcttgagcatgtgtcggtcacggatgcagggcaggctggtgttgctg

SEQ ID NO: 795718 - DNA, 75 bp, synthetic construct
  source 1..75: mol_type = other DNA
caaacgcattgcagagctggagactaatcttgctgcacttgcggcggagaatgcggcaatgcatgaaactattga

SEQ ID NO: 795719 - DNA, 75 bp, synthetic construct
  source 1..75: mol_type = other DNA
aatacgaaggcggaaaggctctttggcagcacatcgctcgtcgttcttccgaactaaaagtttttatcctggaca

SEQ ID NO: 795720 - DNA, 75 bp, synthetic construct
  source 1..75: mol_type = other DNA
gtactccccgggtactgtcgctcgtcgattttcgatcctggacggagttaccatccagggtgtgctttaccaggt

SEQ ID NO: 795721 - DNA, 75 bp, synthetic construct
  source 1..75: mol_type = other DNA
cactctctccgaaacgcgaatctctgaccatcggtggatttactttctatgctcgccctatgtcagtaaaagaat

SEQ ID NO: 795722 - DNA, 75 bp, synthetic construct
  source 1..75: mol_type = other DNA
cagttcgtcaatggacctgaagaaatatggtggaaaaacattcacaaatgatgatgttttgaattatgccaaaac

SEQ ID NO: 795723 - DNA, 75 bp, synthetic construct
  source 1..75: mol_type = other DNA
gacgctggcgcagtggtttgaagagaaagggattgaaaaaggaatggtgaaaggaatggagaaagggattgagcg

SEQ ID NO: 795724 - DNA, 75 bp, synthetic construct
  source 1..75: mol_type = other DNA
acgcggtcatactgaacaagcggatttgttttatggtgtgctgagagacagggaaacgggagggaagtctatgat

SEQ ID NO: 795725 - DNA, 75 bp, synthetic construct
  source 1..75: mol_type = other DNA
atgaaatggtttataccggaacacgtcgtagaggcatttaaaaaaggtgagttaacacgacatcaagtagtaatg

SEQ ID NO: 795726 - DNA, 75 bp, synthetic construct
  source 1..75: mol_type = other DNA
atgaaatggtttaccccggagcacgtcatctcggcatttaaaaaaggtgagcttacacgccatcaagtagtaatg

SEQ ID NO: 795727 - DNA, 75 bp, synthetic construct
  source 1..75: mol_type = other DNA
gcaccaaacatgagcggaacaccggcggtggatattcccccgtgccatgtatctggtggaactggcgctagaaat

SEQ ID NO: 795728 - DNA, 75 bp, synthetic construct
  source 1..75: mol_type = other DNA
taaagaagaccgtgatgaacgttctattcttcgttgtattgaagatgaagacggtaagccagtatttgaatctat

SEQ ID NO: 795729 - DNA, 75 bp, synthetic construct
  source 1..75: mol_type = other DNA
ttaacgaacatgttttcaatactgataaagaagaccgtgatgaacgttcgattcttcgttgtattgaagatgaag

SEQ ID NO: 795730 - DNA, 75 bp, synthetic construct
  source 1..75: mol_type = other DNA
atgaatattaatgaaatgctgaaagccctttctccgaaacgtgaatctttaaccatcggtggatttactttctat

SEQ ID NO: 795731 - DNA, 75 bp, synthetic construct
  source 1..75: mol_type = other DNA
gtaacttaacctggaaaactaatttagaaggatatttttgcgatcctttagggaaagaaaaattatgtcagtatg

SEQ ID NO: 795732 - DNA, 75 bp, synthetic construct
  source 1..75: mol_type = other DNA
tgatgtcgtgcaatctgaagctgacgctaacagaaatgtgacagaaggcggtcgcgatttgatgaaaagcgtggg

SEQ ID NO: 795733 - DNA, 75 bp, synthetic construct
  source 1..75: mol_type = other DNA
atgaagaaagtttttctttgcgccatcttagaatcaggaggagtcatgaagaaagtttttctttgcgccatctta

SEQ ID NO: 795734 - DNA, 75 bp, synthetic construct
  source 1..75: mol_type = other DNA
agcaaggtaaaaatgaagagcaaaggcagcatgacgaatgggtcgcggagcgcaacagggaaatccagcaagaga

SEQ ID NO: 795735 - DNA, 75 bp, synthetic construct
  source 1..75: mol_type = other DNA
ctgtgcggactgcttggttttatcgcgcctgtaacctcgggcggcggctttaccctgattccaatcgcgacagcg

SEQ ID NO: 795736 - DNA, 75 bp, synthetic construct
  source 1..75: mol_type = other DNA
atgacacaggggattgatttaggttatgccgccacgcttccctcaaaagaggcggtagcatacttccgtgtcaaa

SEQ ID NO: 795737 - DNA, 75 bp, synthetic construct
  source 1..75: mol_type = other DNA
acccggcgaggcggtaacgatatccgcacgctgggctttatgaccgaaagtattgcgcaggcggtggaaagccgg

SEQ ID NO: 795738 - DNA, 75 bp, synthetic construct
  source 1..75: mol_type = other DNA
ttaaaaaaatcgtggaaactcgacaaggtttacgatgtgactgataaggtcagaaaatcggtgtatgaggagcct

SEQ ID NO: 795739 - DNA, 75 bp, synthetic construct
  source 1..75: mol_type = other DNA
tcccatgtttactgcggggagaaatgagataacaaatgctgttgctggtactggaaactggcttcagaactgtaa

SEQ ID NO: 795740 - DNA, 75 bp, synthetic construct
  source 1..75: mol_type = other DNA
cattttacgtgtcgctcataaacattgcgttaacgcctaaaatatttgcggcagacgcgatttttgaccagcttg

SEQ ID NO: 795741 - DNA, 75 bp, synthetic construct
  source 1..75: mol_type = other DNA
taagtgccaattactggataaccacagttctctgcggcctctttttggggatattcctgttcatgctgcaacagc

SEQ ID NO: 795742 - DNA, 75 bp, synthetic construct
  source 1..75: mol_type = other DNA
tggcgaaatctggaggaagctgaacgctacgtccggaaagtaaccgtcattgctgctgaaaaactcctggcccac

SEQ ID NO: 795743 - DNA, 75 bp, synthetic construct
  source 1..75: mol_type = other DNA
agggtattttgaggttgagctgacttttgaaaatatgaagctcgaagataagcacgtccaggaaccagctggttg

SEQ ID NO: 795744 - DNA, 75 bp, synthetic construct
  source 1..75: mol_type = other DNA
acagcaaagtgacaaactctttaaaccggggatgacggttgtcgatcttggtgctgcaccaggtggttggtcaca

SEQ ID NO: 795745 - DNA, 75 bp, synthetic construct
  source 1..75: mol_type = other DNA
gagctatgaagaattcttccgcgagcgccagaacgcgcgctacggcggcgatggtaaaggcggtatgcgctgttg

SEQ ID NO: 795746 - DNA, 75 bp, synthetic construct
  source 1..75: mol_type = other DNA
ggtcgttccgccagtgggacgtccggtgtcacgcgttggcctggatattcatccggaaaatccgtgggagcagtt

SEQ ID NO: 795747 - DNA, 75 bp, synthetic construct
  source 1..75: mol_type = other DNA
ttttcatcttaggatccatccttgtcaccagcagtattttacttagttcattttcttcccgtcttggcattccca

SEQ ID NO: 795748 - DNA, 75 bp, synthetic construct
  source 1..75: mol_type = other DNA
atgacaaacttcacgaccagcacgccacatgacgcattatttaaatcctttctcactcaccctgacaccgcgcgg

SEQ ID NO: 795749 - DNA, 75 bp, synthetic construct
  source 1..75: mol_type = other DNA
tacgtgaactgtgcgatctcgacaccttaaaactggaatccgccagctttgttgatgaaaatttgcgggcgctac

SEQ ID NO: 795750 - DNA, 75 bp, synthetic construct
  source 1..75: mol_type = other DNA
ggtcatcccgatgctgttttatcacggtagccgtagtccttatccctggtctttgtgctggctggacgaatttgc

SEQ ID NO: 795751 - DNA, 75 bp, synthetic construct
  source 1..75: mol_type = other DNA
gggccacatttaccaccagtgtgatcgggttcataatggacagcattatggttgtcggtgtttgtgtgatgatgc

SEQ ID NO: 795752 - DNA, 75 bp, synthetic construct
  source 1..75: mol_type = other DNA
aatatcacccgggtgattattgcacatagagagacaactttaagaacagttgatcggatttttagaattacaaat

SEQ ID NO: 795753 - DNA, 75 bp, synthetic construct
  source 1..75: mol_type = other DNA
ctcttgatacagaaagtgaacgtttcgtgaatgctgccataaaaaaaatgaatatcacccgggtgattattgcac

SEQ ID NO: 795754 - DNA, 75 bp, synthetic construct
  source 1..75: mol_type = other DNA
gctgggttgttggaggctgcagacattctgttatgtatgcgggtttcagaaacaagcaatgtgttgcattccttt

SEQ ID NO: 795755 - DNA, 75 bp, synthetic construct
  source 1..75: mol_type = other DNA
gtcgaaactgggcgtcagttctgatgcagggttgttggaggccgcagacattctgttatgtatgcgtcattgcga

SEQ ID NO: 795756 - DNA, 75 bp, synthetic construct
  source 1..75: mol_type = other DNA
tacatttttattcgtctggtgacatacggcaattaccgacagatatcagaagaatgtcttgtcagggaggcccgt

SEQ ID NO: 795757 - DNA, 75 bp, synthetic construct
  source 1..75: mol_type = other DNA
cggagcctcctccgattgttgttgcagaatggggccgatcctgaatggatacaacgatataccggactttcggca

SEQ ID NO: 795758 - DNA, 75 bp, synthetic construct
  source 1..75: mol_type = other DNA
tagttgaagcctggaaacgtggtgagatcaatcgttttaaagtaaggatgaacaggaacacagcgcgacgctgtg

SEQ ID NO: 795759 - DNA, 75 bp, synthetic construct
  source 1..75: mol_type = other DNA
gtgaagagtggagcatatctggtggcaatgtcactctggcatggccacgcgcttaaaggatcgcagggagaaaac

SEQ ID NO: 795760 - DNA, 75 bp, synthetic construct
  source 1..75: mol_type = other DNA
taaacagcgcggtcacggcgatagatgccaaaacgggcgaagtgaaaggccgtctggtgctggatgatcgtaagc

SEQ ID NO: 795761 - DNA, 75 bp, synthetic construct
  source 1..75: mol_type = other DNA
gcttacacgccatcaagtagtaatgaatcgtaatatggcaaggagtcgaggttatccagagcgagcagcttgctt

SEQ ID NO: 795762 - DNA, 75 bp, synthetic construct
  source 1..75: mol_type = other DNA
tcatccaggcatttaaaaaaggtgagcttacacgccaccaagtagtaatgaatcgtaatatggcaaggagtcgag

SEQ ID NO: 795763 - DNA, 75 bp, synthetic construct
  source 1..75: mol_type = other DNA
tgacgatgcactaaaaattattgatgaattaagaaaaaatgaaaaaggatctgaaaaagaatctgaaacagagta

SEQ ID NO: 795764 - DNA, 75 bp, synthetic construct
  source 1..75: mol_type = other DNA
gagctatgaagaattcttccgcgaacgccagaacgcgcgctacggcggcgatggtaaaggcgatatgcgctgttg

SEQ ID NO: 795765 - DNA, 75 bp, synthetic construct
  source 1..75: mol_type = other DNA
atgacaaacttcacgaccagtacgccgcatgacgcattatttaaatccttcctcacgcatcctgacaccgcgcgg

SEQ ID NO: 795766 - DNA, 75 bp, synthetic construct
  source 1..75: mol_type = other DNA
atgacaaacttcacgaccaacacgccacatgacgcattgtttaaatcttttctcacgcaccctgacaccgcgcgg

SEQ ID NO: 795767 - DNA, 75 bp, synthetic construct
  source 1..75: mol_type = other DNA
tgctgcgtaaagcggtaggtaaaggtgcctacgaaatggcttatagccagcaggagaacgcgctgtggctcgcca

SEQ ID NO: 795768 - DNA, 75 bp, synthetic construct
  source 1..75: mol_type = other DNA
accggatgccgccaggcagccgggagccgaagggtgtccccgcccccgagagtcagaacaacagaaacgacaaaa

SEQ ID NO: 795769 - DNA, 75 bp, synthetic construct
  source 1..75: mol_type = other DNA
cctcctgccgtccacttcttcggggtttctccccgcagtggacctttccgatgggggcccgtttaccgcctcacg

SEQ ID NO: 795770 - DNA, 75 bp, synthetic construct
  source 1..75: mol_type = other DNA
gacgacgatgacagcagtaacagtacaacgagcaaaaactgggactggagccgttattacgcctggcgggcctta

SEQ ID NO: 795771 - DNA, 75 bp, synthetic construct
  source 1..75: mol_type = other DNA
ccggtagcgggaaaaagttcacggtcagcagcagcaatacatcaacgaaggaagccgcattcaatttgtggggaa

SEQ ID NO: 795772 - DNA, 75 bp, synthetic construct
  source 1..75: mol_type = other DNA
tatggtctccgttcaagaggtgagattacatcactcagtgctaatggtctgcgcattgcttatggcaattatgga

SEQ ID NO: 795773 - DNA, 75 bp, synthetic construct
  source 1..75: mol_type = other DNA
ttattgaatggctggattcccgtggtgcatttaatcatccgtactggatgtgcaaaggctcatggtcatatgcaa

SEQ ID NO: 795774 - DNA, 75 bp, synthetic construct
  source 1..75: mol_type = other DNA
ttaaatggcgcatcaggtctggcagcacaacaaaagacctgatgacgcttaagtctgatgcactacgggttaccg

SEQ ID NO: 795775 - DNA, 75 bp, synthetic construct
  source 1..75: mol_type = other DNA
ccgctcagtttattgactggctagagtctcagggagcctttaatcatccctactggatgtgcaagtgttcctggt

SEQ ID NO: 795776 - DNA, 75 bp, synthetic construct
  source 1..75: mol_type = other DNA
ctataaaccagcaaataacggtacaacatggacgcatcaggctccatctggttgcgtatataccgggattatcgt

SEQ ID NO: 795777 - DNA, 75 bp, synthetic construct
  source 1..75: mol_type = other DNA
taaaaccagcactcagggagttcttgattaccttggtttgggagaaggttcggcattacccgttggcgtgcctgt

SEQ ID NO: 795778 - DNA, 75 bp, synthetic construct
  source 1..75: mol_type = other DNA
ccgcagccattaacaatgatccgaatttcagtaccaccattaacaatgcgctggcacaaaaagcgccgctgtcga

SEQ ID NO: 795779 - DNA, 75 bp, synthetic construct
  source 1..75: mol_type = other DNA
catacatgtggtttgaaacgggggataacggcaatgaatatttcaaatggagaagccgccagagtaccacaacaa

SEQ ID NO: 795780 - DNA, 75 bp, synthetic construct
  source 1..75: mol_type = other DNA
ggctgcgtcgtctgccagtgccgcgtcaacaagtgccgggcaggcctcagccagtgccaccgccgccggaaaatc

SEQ ID NO: 795781 - DNA, 75 bp, synthetic construct
  source 1..75: mol_type = other DNA
atgacagcccgccggttcaggcgggcttttttgtgggggggggggaatatggcagtactgatttcaggtgtactg

SEQ ID NO: 795782 - DNA, 75 bp, synthetic construct
  source 1..75: mol_type = other DNA
caaggactgattacgcgccatcatggtggtgcgggtcgggcctccagcgtcgtcaacatggcattcgaacagcgt

SEQ ID NO: 795783 - DNA, 75 bp, synthetic construct
  source 1..75: mol_type = other DNA
gccaccacagcgcgaaaaggtcttgtccagctcagtagcgccaccaacagtgattctgaaacgctggctgcaacg

SEQ ID NO: 795784 - DNA, 75 bp, synthetic construct
  source 1..75: mol_type = other DNA
cgggcacgaaactggcggatgacgagcaggtagtgaccagcggcgggcgcgtactgtgcgtcaccgcgctgggtc

SEQ ID NO: 795785 - DNA, 75 bp, synthetic construct
  source 1..75: mol_type = other DNA
accgatatcccggcgctgctggatttcgcgcaaaacgaaaagatcgatctaaccatcgtcggcccggaagcgccg

SEQ ID NO: 795786 - DNA, 75 bp, synthetic construct
  source 1..75: mol_type = other DNA
cgatccagaaacccagccgattatgctgcgcatgaagtccgatctggttgagctctgcctggcggcctgtgaagg

SEQ ID NO: 795787 - DNA, 75 bp, synthetic construct
  source 1..75: mol_type = other DNA
ttgagtatatcgacaacgcaactcctatcaaagttgaggacatgcttgcagacgatctcattcgagaacttgctg

SEQ ID NO: 795788 - DNA, 75 bp, synthetic construct
  source 1..75: mol_type = other DNA
accatccacattgcatgcccgtcttaaagccaaaggaataattcaagatggcattagtaccctgacctctcgtaa

SEQ ID NO: 795789 - DNA, 75 bp, synthetic construct
  source 1..75: mol_type = other DNA
atgaaagtattagtgattggtaacggcgggcgcgaacacgcgctggcctggaaagcggcgcaatcaccgctggtt

SEQ ID NO: 795790 - DNA, 75 bp, synthetic construct
  source 1..75: mol_type = other DNA
tatgaccttgctaacgggaaatatactgcgcaggatgccaccacggcgcgaaaaggccttgttcagctcagtagt

SEQ ID NO: 795791 - DNA, 75 bp, synthetic construct
  source 1..75: mol_type = other DNA
ggatatccggcttggtggtgctgccacatacaaacctgcgaacaatggcatgacatggacacatcaggcaccgtc

SEQ ID NO: 795792 - DNA, 75 bp, synthetic construct
  source 1..75: mol_type = other DNA
gccaatgacaatgctgaaaaacgtcttcagaaagataagaacggtgcggatattcctgataaaagattattcctg

SEQ ID NO: 795793 - DNA, 75 bp, synthetic construct
  source 1..75: mol_type = other DNA
gccgggaaaggcgttatcgtggcgatgacgctggaagaagcggaagcggctgttcacgatatgctggcgggcaac

SEQ ID NO: 795794 - DNA, 75 bp, synthetic construct
  source 1..75: mol_type = other DNA
aaccatcgttggcccggaagcgccgctggtcaaaggcgtggtggataccttccgtgccgcgggtctgaaaatctt

SEQ ID NO: 795795 - DNA, 75 bp, synthetic construct
  source 1..75: mol_type = other DNA
cggttaagacagcgtatgaccttgctaacgggaaatacactgcacaggacgccaccacggcgcggaaaggtcttg

SEQ ID NO: 795796 - DNA, 75 bp, synthetic construct
  source 1..75: mol_type = other DNA
atggcgatgatccggcagtattcagaccaatacaaaagttaattaacggaacatggtataacgtatcgcaggtat

SEQ ID NO: 795797 - DNA, 75 bp, synthetic construct
  source 1..75: mol_type = other DNA
tgaggtggatattctgcgcaacgatgtctgtgatatcagccttaacctgcaactgacggaacgtgtgctggtcag

SEQ ID NO: 795798 - DNA, 75 bp, synthetic construct
  source 1..75: mol_type = other DNA
cagcccgatgccatcaataatcccgctttacgggaaaagttattcacctttgaggtggatattctgcgcaacgat

SEQ ID NO: 795799 - DNA, 75 bp, synthetic construct
  source 1..75: mol_type = other DNA
agctttgatatcagcatcagcctgatgctgaccgagcgcacgctggtcagtgaggtggacggcgcgctgcatgtg

SEQ ID NO: 795800 - DNA, 75 bp, synthetic construct
  source 1..75: mol_type = other DNA
accgggcacaatttaccggggtgatactggatcggggaagaaaaaccatctggtaccgcacttacacggacaaaa

SEQ ID NO: 795801 - DNA, 75 bp, synthetic construct
  source 1..75: mol_type = other DNA
cctttatccggctcaaggcacagcaggcggcggaaggcacccccgttgtgctggatgagtttatttttgcaaacg

SEQ ID NO: 795802 - DNA, 75 bp, synthetic construct
  source 1..75: mol_type = other DNA
gagtccgtcatcgagcgtctggcacacaccaccagcgtggatgaagtgctggaactgttggctggtcgtaagtaa

SEQ ID NO: 795803 - DNA, 75 bp, synthetic construct
  source 1..75: mol_type = other DNA
cagcccgacatcatgaccactgacgaaggccagaaaaagggcttcacgttttatgcagacatcaacaatgacagc

SEQ ID NO: 795804 - DNA, 75 bp, synthetic construct
  source 1..75: mol_type = other DNA
agttttttgcgctgttaatgacggtgaatggcctggcaccggtgttgtcgccagtgctgggcgggtacattgtca

SEQ ID NO: 795805 - DNA, 75 bp, synthetic construct
  source 1..75: mol_type = other DNA
ggcaccggtgttgtcgccagtgctgggcgggtacattgtcagcacttttgactggcgcactttattctgggtaat

SEQ ID NO: 795806 - DNA, 75 bp, synthetic construct
  source 1..75: mol_type = other DNA
gtgattttgacctgctcatcgtgccggtgctggcgtggctgcgggaaaatcagcccgacatcatgaccaccgacg

SEQ ID NO: 795807 - DNA, 75 bp, synthetic construct
  source 1..75: mol_type = other DNA
ccagatggatttaaacgacggtgataatgtggatatcagtatcagcctgcaactcaccgagcgcaccctcgtcag

SEQ ID NO: 795808 - DNA, 75 bp, synthetic construct
  source 1..75: mol_type = other DNA
ttgcctccacactggcgacgtcgctgtcattcgaaaagcgttacacgctcaatgtcattgtgaccgactttaccg

SEQ ID NO: 795809 - DNA, 75 bp, synthetic construct
  source 1..75: mol_type = other DNA
aggggtgggttacgtggaggggctacgcgcagagctgaccgaagacacaccaatggtcacgcccacctccccgtc

SEQ ID NO: 795810 - DNA, 75 bp, synthetic construct
  source 1..75: mol_type = other DNA
caaaggacagcggaggataattttaccggggcatggatatcaatgcgcccccgcaatgttgcgtttaattacatc

SEQ ID NO: 795811 - DNA, 75 bp, synthetic construct
  source 1..75: mol_type = other DNA
tcgatgtgtgcttcaccggatttaagaaagcagataaagaaagattggttgataaggcgaatgaacaaggattaa

SEQ ID NO: 795812 - DNA, 75 bp, synthetic construct
  source 1..75: mol_type = other DNA
cgaaagctactcacatctcactaagcagtctggtccgaaaaaaatacattcgatgtgtgtttcaccggatttaag

SEQ ID NO: 795813 - DNA, 75 bp, synthetic construct
  source 1..75: mol_type = other DNA
atttcaaatggagaagcaaacaaagcaccacaacaaaagacctgatgaatcttaaatgggatgctttgtatgttc

SEQ ID NO: 795814 - DNA, 75 bp, synthetic construct
  source 1..75: mol_type = other DNA
gcaatgatgcttatgaaaaaataaatgtgattattgagaagcgtcgacaggaaggggcaagagaaaaagatgtca

SEQ ID NO: 795815 - DNA, 75 bp, synthetic construct
  source 1..75: mol_type = other DNA
tcatgtctccggaaatccaaagtttgaatatgccaatatggttgaagatatccgggagaaggtgtcatctgagat

SEQ ID NO: 795816 - DNA, 75 bp, synthetic construct
  source 1..75: mol_type = other DNA
ggtggcacctggtctgcatggacaaaagcctatgatgtggcgaacaagcccaccccggcagagattggcgctctt

SEQ ID NO: 795817 - DNA, 75 bp, synthetic construct
  source 1..75: mol_type = other DNA
gcgatgattattcatgccccgacccagcgtaaaatcaaaaatgcgaacggccagcagggaaacgttctggtccgt

SEQ ID NO: 795818 - DNA, 75 bp, synthetic construct
  source 1..75: mol_type = other DNA
cgtcagtaaataaagactggatggatcaaaaccttgacggggtgacttatgctccactccagaaaagaataggta

SEQ ID NO: 795819 - DNA, 75 bp, synthetic construct
  source 1..75: mol_type = other DNA
gcctgaccattaaccccaccggtaatgccgaaaacaccgttaaaaatattgcatttaactacatcgtgaggcttg

SEQ ID NO: 795820 - DNA, 75 bp, synthetic construct
  source 1..75: mol_type = other DNA
gttcagcgcaacaatatcattaagaaccgccaccgcgtcaccggaaggcagcggtgactggaccgcatacgggcc

SEQ ID NO: 795821 - DNA, 75 bp, synthetic construct
  source 1..75: mol_type = other DNA
ccgcacttacacggacaaaaacaaacccacaccacaggacatcggcgcactgcctgcaagtgagttgttacccgc

SEQ ID NO: 795822 - DNA, 75 bp, synthetic construct
  source 1..75: mol_type = other DNA
atgcctggtctggaaaatctggcattaattcctggttgtgtcggctcatcacctatccagaatattggtgcttat

SEQ ID NO: 795823 - DNA, 75 bp, synthetic construct
  source 1..75: mol_type = other DNA
tcaaattattcattaaaaatccgcttgataacggacttactcgtggcgaacaaatggaactggcacgaattgctc

SEQ ID NO: 795824 - DNA, 75 bp, synthetic construct
  source 1..75: mol_type = other DNA
tcgaattgttcattaaatccccgcttgaaaacggaattactcgtggcgaacaaatggaactggcacgaattgcac

SEQ ID NO: 795825 - DNA, 75 bp, synthetic construct
  source 1..75: mol_type = other DNA
ggatggttggataagctgtagtgagcggatgcctgaaaagaaccagaacgtgcttatttcggtgaatttcgatag

SEQ ID NO: 795826 - DNA, 75 bp, synthetic construct
  source 1..75: mol_type = other DNA
agatgcaacgattaagccgggtaatggtattgagcaggcaactcactggatgccgctaccggaaccaccgcggga

SEQ ID NO: 795827 - DNA, 75 bp, synthetic construct
  source 1..75: mol_type = other DNA
aatgccggtagtttcttcaaaaaccctgttgtatctgccgaaacggctaaagcattactggcacaatttccaaca

SEQ ID NO: 795828 - DNA, 75 bp, synthetic construct
  source 1..75: mol_type = other DNA
gcggtgattgcgatgcatgattcgtttaccgctctcggtggcatggtgccgatgtggctgatgcaaattggtgaa

SEQ ID NO: 795829 - DNA, 75 bp, synthetic construct
  source 1..75: mol_type = other DNA
ggataatgcatcagagcctcttgcttatgcttacaaagagcttacgcctgagattatgcgcaaccatttagctgt

SEQ ID NO: 795830 - DNA, 75 bp, synthetic construct
  source 1..75: mol_type = other DNA
ctcacaagtttccacacacgcagtttgaacagattgctaacctctacgaaatgcaatttgatgacggtcgcactt

SEQ ID NO: 795831 - DNA, 75 bp, synthetic construct
  source 1..75: mol_type = other DNA
cgcaatggtgatgaatttttcgaaacacagagtcgcaatgtaaccgactggatgcggctaccggaaccgccgcag

SEQ ID NO: 795832 - DNA, 75 bp, synthetic construct
  source 1..75: mol_type = other DNA
gcatgagcacactcgggaatgcctgggtcgatctgctacgcatcacgttatgggtgttagcccctgtggcgttgt

SEQ ID NO: 795833 - DNA, 75 bp, synthetic construct
  source 1..75: mol_type = other DNA
agcactatctgccgcttaatccgcaacaactgccggggctgtcgtgggatctggcgctcaataccgccgtcagct

SEQ ID NO: 795834 - DNA, 75 bp, synthetic construct
  source 1..75: mol_type = other DNA
gtactgccagcagaagaagcagaagaactggcacggattgcactggcatcgctggaagcagagccagtggcgtgg

SEQ ID NO: 795835 - DNA, 75 bp, synthetic construct
  source 1..75: mol_type = other DNA
ggattccggtaagcgaaaggatgccggaaccttatgaatacgttcttgtaactgatggttttgatggctgtgagg

SEQ ID NO: 795836 - DNA, 75 bp, synthetic construct
  source 1..75: mol_type = other DNA
aacaccccggaagcctattccgtgctgtttgatatggcgcgtgaagtgaaccgtctgaaagcagaagatatggca

SEQ ID NO: 795837 - DNA, 75 bp, synthetic construct
  source 1..75: mol_type = other DNA
cagttgaactacagcgaagagaacctgaagcaggcgcgttcggcgctggagcgtctctacactgccttgcgtggc

SEQ ID NO: 795838 - DNA, 75 bp, synthetic construct
  source 1..75: mol_type = other DNA
gacgagctgcaggccggggaagaaatcgggatgattaaatccgatcgcccgaaccctaacctcgagtcgtttcgt

SEQ ID NO: 795839 - DNA, 75 bp, synthetic construct
  source 1..75: mol_type = other DNA
tcactggaagctggatacaaacacaaattagctgaatttaatggcagccagggaacgcgtaatgaatggtatgtt

SEQ ID NO: 795840 - DNA, 75 bp, synthetic construct
  source 1..75: mol_type = other DNA
aaccttatgaatacgttcttgtaactgatggttttgatggctgtgaggttatgcgtgttaatacagatggctact

SEQ ID NO: 795841 - DNA, 75 bp, synthetic construct
  source 1..75: mol_type = other DNA
aagcaacgattaagccgggtaatggcattgagcaggcaactcactggatgccactaccggaaccgccgcaggagg

SEQ ID NO: 795842 - DNA, 75 bp, synthetic construct
  source 1..75: mol_type = other DNA
ccctgatgaggtgttgtccgcaatcctgaaggtcgccagggttcgtgcagatttcgatgcttctgaaggtgacag

SEQ ID NO: 795843 - DNA, 75 bp, synthetic construct
  source 1..75: mol_type = other DNA
taatcgaagaagcgaaattaaaaatagcgattgcgaaatgccaccccaattcagagatggcgcgggtagagggcg

SEQ ID NO: 795844 - DNA, 75 bp, synthetic construct
  source 1..75: mol_type = other DNA
acttacaacttgccagaattgatcgaaggcatggaagtttccattgatgtaagcacttgtgatgctgatttaggt

SEQ ID NO: 795845 - DNA, 75 bp, synthetic construct
  source 1..75: mol_type = other DNA
aggtcggcgtatatggcgactggtttaatgatggcaagcccacttgggatgacggtgatggcgaagacctgtatc

SEQ ID NO: 795846 - DNA, 75 bp, synthetic construct
  source 1..75: mol_type = other DNA
ggcgaggacaagcaacgattaagccgggtaatggtattgagcaggcaacccactggatgccgctgccagaaccgc

SEQ ID NO: 795847 - DNA, 75 bp, synthetic construct
  source 1..75: mol_type = other DNA
gcctctcgcttatgcttacaaagagcttacgcctgagattatgcgcaaccatttagctgtattcgagcgatatgg

SEQ ID NO: 795848 - DNA, 75 bp, synthetic construct
  source 1..75: mol_type = other DNA
gcacgctataccggaagcacctttcggcgcggagatgcaacgattaagccgggtaatggtattgagcaagcaact

SEQ ID NO: 795849 - DNA, 75 bp, synthetic construct
  source 1..75: mol_type = other DNA
gagcgaatgccgaacgataaacagtatgtttggtgttggggtaagtcttacggctggactgagtgcgataccttc

SEQ ID NO: 795850 - DNA, 75 bp, synthetic construct
  source 1..75: mol_type = other DNA
tgattaaagaaatcaaagagcgcataggaagcctggatgtgagagacaatattgaacgccgtgcttatgaaatcg

SEQ ID NO: 795851 - DNA, 75 bp, synthetic construct
  source 1..75: mol_type = other DNA
ggcttaggtattccagcaataaccaggagtaaaaacattgctgacagttggttatcaaagggctggtatgttcag

SEQ ID NO: 795852 - DNA, 75 bp, synthetic construct
  source 1..75: mol_type = other DNA
ataattttcgggaaattgcggaaacgtcaaccaactctccggtaactccggatggttggataagctgtagtgatc

SEQ ID NO: 795853 - DNA, 75 bp, synthetic construct
  source 1..75: mol_type = other DNA
catcgctggggctgatggtaatggagaagcagggcgaagtggcgatcctacagacacaaggcttaactccacgac

SEQ ID NO: 795854 - DNA, 75 bp, synthetic construct
  source 1..75: mol_type = other DNA
acgccgtatctggtcaatgtgaaacaaactgacctcgagccggggaaatataatgtcatcctcggcgaacaactt

SEQ ID NO: 795855 - DNA, 75 bp, synthetic construct
  source 1..75: mol_type = other DNA
cggttggcctcttgcgtatagtgattatgctgaaggctggaacgactgccgcgaagccatgcttcagtccggaaa

SEQ ID NO: 795856 - DNA, 75 bp, synthetic construct
  source 1..75: mol_type = other DNA
ccacataagcaaggccttaagtggcgaaatgaaccgccccgggtttcctggagagtgttttatctgtgaactcag

SEQ ID NO: 795857 - DNA, 75 bp, synthetic construct
  source 1..75: mol_type = other DNA
aatgtattggcaggatgcgccagttgaagacagcagcaaagcggctgcatacgctacaggctggaacgcctgccg

SEQ ID NO: 795858 - DNA, 75 bp, synthetic construct
  source 1..75: mol_type = other DNA
gatgaaggctggaacgcctgccgcgccaccatgcttcatggtgccaaacctgtaagccagacttacaagttgaac

SEQ ID NO: 795859 - DNA, 75 bp, synthetic construct
  source 1..75: mol_type = other DNA
attgatgccatgttggttcatgaaatggcgaaggctttattgccgctggtggctgataaaattccgaataaggcc

SEQ ID NO: 795860 - DNA, 75 bp, synthetic construct
  source 1..75: mol_type = other DNA
cgccgcccctccagtgccagtagtaccggaagaaaaaccaatgcctaacgctctaagcatgcttgaaagagagat

SEQ ID NO: 795861 - DNA, 75 bp, synthetic construct
  source 1..75: mol_type = other DNA
ccgctcaagatgattggattttaatttattcaaagcacggcgagtatatggcaggacaggtacaagaggaatacg

SEQ ID NO: 795862 - DNA, 75 bp, synthetic construct
  source 1..75: mol_type = other DNA
cgctgccttgccagcgccggtagtgccggaagaagcaactccggaaaacgtagaaatgctctctggctatgtttc

SEQ ID NO: 795863 - DNA, 75 bp, synthetic construct
  source 1..75: mol_type = other DNA
cgccagcgccggtagtgccggaagaagcaactccggaaaacgtagaaatgctctctggctatgtttccacgtaca

SEQ ID NO: 795864 - DNA, 75 bp, synthetic construct
  source 1..75: mol_type = other DNA
aaaatctcaagcagaagttagtggaatgcaatcgctataactactgcgcagatgcagttaagggcgtagaggatg

SEQ ID NO: 795865 - DNA, 75 bp, synthetic construct
  source 1..75: mol_type = other DNA
gaacaacaactactcaatgcctggcagcatgcaaccgcagaaggacaacccgttcttattctgggtgaaggaagt

SEQ ID NO: 795866 - DNA, 75 bp, synthetic construct
  source 1..75: mol_type = other DNA
acacatttggcattgatcataatgctcagcacattgtatgtgccgaagacgaacaacaactactcaatgcctggc

SEQ ID NO: 795867 - DNA, 75 bp, synthetic construct
  source 1..75: mol_type = other DNA
aacgtacttttcctggaagattactgcggaacggtgattatcaaccggatcaaaggtattgaaattaacgatacg

SEQ ID NO: 795868 - DNA, 75 bp, synthetic construct
  source 1..75: mol_type = other DNA
tggcaactctccggtaattccggatggttggataagctgtagtgagcgaatgccccctcaagatgattggatttt

SEQ ID NO: 795869 - DNA, 75 bp, synthetic construct
  source 1..75: mol_type = other DNA
tgaaccgctaatatgctccgcacgctataccggaagcacattccggcgaggagaagcaacgattaagccgggtaa

SEQ ID NO: 795870 - DNA, 75 bp, synthetic construct
  source 1..75: mol_type = other DNA
gcaccgaattacccccaggcggatggttcagtaaaactggctgctggctggctcatcgatcagtgtcagctaaaa

SEQ ID NO: 795871 - DNA, 75 bp, synthetic construct
  source 1..75: mol_type = other DNA
tatgatggtgtcagcgggagcgggaaccttcaacggtgaatctgcggtgtctgtaggaacatcttttaatgccgg

SEQ ID NO: 795872 - DNA, 75 bp, synthetic construct
  source 1..75: mol_type = other DNA
tcgatagcgtgcaatacggtgaacaaattcgaaaccttgcgcaagactcggcccaggcacatgagcaaatcgaaa

SEQ ID NO: 795873 - DNA, 75 bp, synthetic construct
  source 1..75: mol_type = other DNA
gcacatgcccagtcaacggctgaccatgccaacgctaacgccaacaccgctctgataaacggcgtcaaactttcc

SEQ ID NO: 795874 - DNA, 75 bp, synthetic construct
  source 1..75: mol_type = other DNA
atgattgcggcaattgttgatgaactggcacctgaactgattaaacgtaatgctgttggatacgaaagcgctttg

SEQ ID NO: 795875 - DNA, 75 bp, synthetic construct
  source 1..75: mol_type = other DNA
gacgccaaaaaagcgcttaccactgcgcaatctgcaattgatgcgaacaagggagctattgctgatactcagaaa

SEQ ID NO: 795876 - DNA, 75 bp, synthetic construct
  source 1..75: mol_type = other DNA
tgggtggcgtactgctggatagtgaagaggcgctggaacgtctgtttagcgcactggtgaattatcgtgagtcac

SEQ ID NO: 795877 - DNA, 75 bp, synthetic construct
  source 1..75: mol_type = other DNA
tacgcttcccgaaaacagtgagggcgtcattctgacagaaatttcaggtggtcagtatgcggtggcggtggctcg

SEQ ID NO: 795878 - DNA, 75 bp, synthetic construct
  source 1..75: mol_type = other DNA
ctgacagaaatttcaggtggtcagtatgcggtggcggtggctcgtgtagtcggtgatgattttgctaaaccctgg

SEQ ID NO: 795879 - DNA, 75 bp, synthetic construct
  source 1..75: mol_type = other DNA
cgaaggagtgggttgctgtctattacgacaatccagatgaaacacccgccgaaaaattacgctgcgacaccgtcg

SEQ ID NO: 795880 - DNA, 75 bp, synthetic construct
  source 1..75: mol_type = other DNA
cgccgaactgagagcacaaaatgatgcgaatgcgcgtactgcagcagaacaaaaacaaaaaatagatactctggc

SEQ ID NO: 795881 - DNA, 75 bp, synthetic construct
  source 1..75: mol_type = other DNA
ctactggtaaatatacaggatgcgtcacgccttatgcgttatccttcggggagtttttccggatggcgtctgtgg

SEQ ID NO: 795882 - DNA, 75 bp, synthetic construct
  source 1..75: mol_type = other DNA
gcgctggttggcgcagtatcaggtatagtactcgcaggccagttaaataacctgatgccggtaacggggttactg

SEQ ID NO: 795883 - DNA, 75 bp, synthetic construct
  source 1..75: mol_type = other DNA
gctgaacagaagaacattcctgtaatcatctgttataaagattatgggataaataaaactaaaaccattgaatac

SEQ ID NO: 795884 - DNA, 75 bp, synthetic construct
  source 1..75: mol_type = other DNA
agtatcgcgtggtgctggagcacaacactgaaaatacccctgggctggcggcgctggataccattcgcctgacca

SEQ ID NO: 795885 - DNA, 75 bp, synthetic construct
  source 1..75: mol_type = other DNA
aagtgctgaatcatccgtggctgaccttaagcgtggcgctcagcacgctgctgcttagcgtgctgctgtgggtgt

SEQ ID NO: 795886 - DNA, 75 bp, synthetic construct
  source 1..75: mol_type = other DNA
cctgacaccgatgatgtgcgcgcggatgctcagccaggagtcgctgcgtaaacagaaccgcttctcccgtgcctc

SEQ ID NO: 795887 - DNA, 75 bp, synthetic construct
  source 1..75: mol_type = other DNA
ccaatatccgcgcatccgtcgatgatactcagtttgaattgatgatggctatcgcgctggtagtcatgattatct

SEQ ID NO: 795888 - DNA, 75 bp, synthetic construct
  source 1..75: mol_type = other DNA
ccagatgcaatcggcagaagagtaccgccagctaatcattgcctaccagaacggcgcgccgattcgtctgggcga

SEQ ID NO: 795889 - DNA, 75 bp, synthetic construct
  source 1..75: mol_type = other DNA
ccgctgtcgttaatcggcaccttcgcggtcatggtgtttctcgatttttcaatcaataacctgacactgatggcg

SEQ ID NO: 795890 - DNA, 75 bp, synthetic construct
  source 1..75: mol_type = other DNA
aagctatgtcccgcaaactatcgcgtttctgattggtggctatggctgtcgcgccgcactacaaaaatggcaagg

SEQ ID NO: 795891 - DNA, 75 bp, synthetic construct
  source 1..75: mol_type = other DNA
gctctgggttacatgatgcaacgttgtaaagaacgagactgccagaatcaaagcaatgccgaagtcgctcatagt

SEQ ID NO: 795892 - DNA, 75 bp, synthetic construct
  source 1..75: mol_type = other DNA
ggtcgctctgggttacatgatgcaacgttgtgaagaagttgactgccagaatcatggcaatgccgaagtcgctca

SEQ ID NO: 795893 - DNA, 75 bp, synthetic construct
  source 1..75: mol_type = other DNA
cgatgctggatcgtgaaaaactgaccccgacttatctgggtgagtccatcgcggtaccgcacggtacggttgaag

SEQ ID NO: 795894 - DNA, 75 bp, synthetic construct
  source 1..75: mol_type = other DNA
gggcgatgtgactaacgacctgagccacgtacgtaaaatcatcgttgcctgtgatgccggtatgggttccagtgc

SEQ ID NO: 795895 - DNA, 75 bp, synthetic construct
  source 1..75: mol_type = other DNA
tgaagctaacccaggtccaggtatgggcgtgctgctggcgtacatgttctttggtcgtggcagtgctaaacaatc

SEQ ID NO: 795896 - DNA, 75 bp, synthetic construct
  source 1..75: mol_type = other DNA
ggaatgcggctatatgtccatagaattgcatggctgatggtttacaatgattggccaaccgatgtgattgaccat

SEQ ID NO: 795897 - DNA, 75 bp, synthetic construct
  source 1..75: mol_type = other DNA
gcaaaacgccgaagattgatttccagcggctggcggaaattcgtgaagtggtggatgttcctctggtgctgcatg

SEQ ID NO: 795898 - DNA, 75 bp, synthetic construct
  source 1..75: mol_type = other DNA
ggttaaagcctggtttgcggaaaacccgcagggtaatgatcctcgctattatatgcgcgtcggcatggatgcaat

SEQ ID NO: 795899 - DNA, 75 bp, synthetic construct
  source 1..75: mol_type = other DNA
gcaacactagagttacgagtcaaaaggcattacgactataatcatggtacttacaaagttaatatcacagttgat

SEQ ID NO: 795900 - DNA, 75 bp, synthetic construct
  source 1..75: mol_type = other DNA
ggaatagcggtggccctataattaacaaatacggctttgttgttggtatgcttgtacaaataccaatatcatctg

SEQ ID NO: 795901 - DNA, 75 bp, synthetic construct
  source 1..75: mol_type = other DNA
aaagttatatgacgtttcgcatataaattcgtttgtccgactgtcaaaggggcgaattgttggttctggtcactc

SEQ ID NO: 795902 - DNA, 75 bp, synthetic construct
  source 1..75: mol_type = other DNA
ccgctggcactgcatctcgaccaccacgaatcgctggatgatattcgccgtaaagtccacgcaggcgtgcgcagc

SEQ ID NO: 795903 - DNA, 75 bp, synthetic construct
  source 1..75: mol_type = other DNA
gttcttctgactcgttcaatgagtggatataagaccccattgcttaatgatttctgcggggagccattaaagcgt

SEQ ID NO: 795904 - DNA, 75 bp, synthetic construct
  source 1..75: mol_type = other DNA
ttgcgagagcagattgcccgcctgatgctcgacagcggctcggtggtcaccgccgatgacatcatcatcaccagc

SEQ ID NO: 795905 - DNA, 75 bp, synthetic construct
  source 1..75: mol_type = other DNA
gaaacgatgaagctcatcactccgcagccgcgttcgggttattttgtcgcacaacgtaaagcccagccgcctgta

SEQ ID NO: 795906 - DNA, 75 bp, synthetic construct
  source 1..75: mol_type = other DNA
aatgacctggtgctcggctcccatatgctggaagtctgcccgtcgatcgccgcagaagagaaaccgatcctcgac

SEQ ID NO: 795907 - DNA, 75 bp, synthetic construct
  source 1..75: mol_type = other DNA
atactgtctctgttggtgatgtctttgtatcatcctggggctatgagcaaaccaatgtaaccttctaccaggttc

SEQ ID NO: 795908 - DNA, 75 bp, synthetic construct
  source 1..75: mol_type = other DNA
ttttactggtgaatgttttaagcgtcagataaaagattttggtgatgagctggcaatcaaaatcgaagattttga

SEQ ID NO: 795909 - DNA, 75 bp, synthetic construct
  source 1..75: mol_type = other DNA
ttcttctttttttcctgaactgggaaaaattttttctcatatagatagtgggcgaaaaagcagggcatttaatga

SEQ ID NO: 795910 - DNA, 75 bp, synthetic construct
  source 1..75: mol_type = other DNA
ggtggcgtcgaatccggggccagggttggggttactgctggcgtttagtctgtttggtaagggaatgagtaagcg

SEQ ID NO: 795911 - DNA, 75 bp, synthetic construct
  source 1..75: mol_type = other DNA
gcgcggcggcgtacggttgtcagagcagatccagaatgatttattgctgcgggcgacggggggagtgtgtttgta

SEQ ID NO: 795912 - DNA, 75 bp, synthetic construct
  source 1..75: mol_type = other DNA
gcgcggtggtgtgcggttgtcagagcagatccagaatgatttattgctgcgggcgacaggcggcgtgtgtttgta

SEQ ID NO: 795913 - DNA, 75 bp, synthetic construct
  source 1..75: mol_type = other DNA
taacactcaaaactcatggaacagcaagatgaggaaaaacaattcatctggtgtgaagggggtgacttttaattc

SEQ ID NO: 795914 - DNA, 75 bp, synthetic construct
  source 1..75: mol_type = other DNA
acggtcttatgcgcatgggtacaattgcccattccggcactggtggcattatttttcaccatcgcattttgtagc

SEQ ID NO: 795915 - DNA, 75 bp, synthetic construct
  source 1..75: mol_type = other DNA
gcgaccggaggatttacggggacgggcggcaaatatgagcctgcggggatagttcaccgcggggagtttgttttc

SEQ ID NO: 795916 - DNA, 75 bp, synthetic construct
  source 1..75: mol_type = other DNA
tatgaatttaaaaagggaatgaattttgaggttgtagaaaatttgagctcgccaaatccggcgagcgcaaaatct

SEQ ID NO: 795917 - DNA, 75 bp, synthetic construct
  source 1..75: mol_type = other DNA
tttctgaggccgcccctcatctgaacgcctctctgagcacaattaacggtaatgaatttgccgcaattgtcccgg

SEQ ID NO: 795918 - DNA, 75 bp, synthetic construct
  source 1..75: mol_type = other DNA
gacaacttttactggacagagacgaaggtaaagaggaggaacgagggggaattggaacaccggcaacaagggggc

SEQ ID NO: 795919 - DNA, 75 bp, synthetic construct
  source 1..75: mol_type = other DNA
gtgcactggcaaactcacaccgtttttaatcaaccgatacctttaaataacagcaatctatacctgtccgatggc

SEQ ID NO: 795920 - DNA, 75 bp, synthetic construct
  source 1..75: mol_type = other DNA
agattactcatcagctattcctgctgggctgcggtgcgcaaatgttgaaatatgcttctccgccaatggcgcagg

SEQ ID NO: 795921 - DNA, 75 bp, synthetic construct
  source 1..75: mol_type = other DNA
gcgagctgccgcggctttaccgggagatgccggtaaacagtatttgggaaggttccggcaatattatgtgcctgg

SEQ ID NO: 795922 - DNA, 75 bp, synthetic construct
  source 1..75: mol_type = other DNA
gaaaagattggttatcgagcaaacgaacaaacacagtatttccccagagcaatttttgaaaggtgctgtgacaat

SEQ ID NO: 795923 - DNA, 75 bp, synthetic construct
  source 1..75: mol_type = other DNA
aatttctgaaaggtgctgtgataatcttgcacagcgataacatcacacttccgggcgattcaatgttaatttatg

SEQ ID NO: 795924 - DNA, 75 bp, synthetic construct
  source 1..75: mol_type = other DNA
atgaacaattacccaatgcaaattatggttgatagcgacacagtaaatatggttcaacacttcgttgattccggt

SEQ ID NO: 795925 - DNA, 75 bp, synthetic construct
  source 1..75: mol_type = other DNA
tcattttgtctccagcatggggacgaccggcactatcaccggcgtttcacgctttatgcgcgaacaatccaaacc

SEQ ID NO: 795926 - DNA, 75 bp, synthetic construct
  source 1..75: mol_type = other DNA
cggttgccggagcactgcgcgtggcaaaagctaaccccggcgcggtggtggtggcgatcatctgcgatcgcggcg

SEQ ID NO: 795927 - DNA, 75 bp, synthetic construct
  source 1..75: mol_type = other DNA
gaagaaggcagcagtattcccggcattcgccgctggcctgcggaatatctgccggggattttcaacgcttctctg

SEQ ID NO: 795928 - DNA, 75 bp, synthetic construct
  source 1..75: mol_type = other DNA
agattttcgttgataacgacaccgctatgatgattcaggctttcactgatgtaggtgttagcattgactttgaca

SEQ ID NO: 795929 - DNA, 75 bp, synthetic construct
  source 1..75: mol_type = other DNA
agcaattgaagattttattcaggggattgaaactggtgaaccacgttttatgtttcccgttagcgactcaagcat

SEQ ID NO: 795930 - DNA, 75 bp, synthetic construct
  source 1..75: mol_type = other DNA
aacaaatacagcattagccctgaaaaatatctcaaggcagctatagcaattttgtacgctgacaatattttggtt

SEQ ID NO: 795931 - DNA, 75 bp, synthetic construct
  source 1..75: mol_type = other DNA
aacagatacaatatttccccagagcaatttttgaaaggtgctgtgacaattttgtacgctgacaatattttggtt

SEQ ID NO: 795932 - DNA, 75 bp, synthetic construct
  source 1..75: mol_type = other DNA
aacaaatacagcattagccctgaaaaatatctcaaggcggctatagcaattttgtacagcgataatattctggtg

SEQ ID NO: 795933 - DNA, 75 bp, synthetic construct
  source 1..75: mol_type = other DNA
agattttcgttgatagcgacaccgctatgatggtgcaaagcttcactgatgcaggtgtggcaattgactttgaca

SEQ ID NO: 795934 - DNA, 75 bp, synthetic construct
  source 1..75: mol_type = other DNA
tggtgcggaactgattcttgtcaccaaagagcagggcatggaaggtgcgcgcgatctggcgctggagatggcgaa

SEQ ID NO: 795935 - DNA, 75 bp, synthetic construct
  source 1..75: mol_type = other DNA
gcgccgttgtcgggattaggtggggaaacgctgttaaaaatgagtttggcgattacggtgtgttatacgctggca

SEQ ID NO: 795936 - DNA, 75 bp, synthetic construct
  source 1..75: mol_type = other DNA
cacatggttgggctgcagagcagttgcttaaaacggcagaaatgctgttaggcaagcaggaaaacgtcggctgga

SEQ ID NO: 795937 - DNA, 75 bp, synthetic construct
  source 1..75: mol_type = other DNA
aatatgctggcgaacgtgtaatgctgttattcaccaacccgacagatgttgagcgcctcgttgaaggcggcgtga

SEQ ID NO: 795938 - DNA, 75 bp, synthetic construct
  source 1..75: mol_type = other DNA
gcgaccagaatctgctgatggctcccgtgttgctgtggctcagagagaaccagccggacgccatcaacaacccgg

SEQ ID NO: 795939 - DNA, 75 bp, synthetic construct
  source 1..75: mol_type = other DNA
gaaaaagggcttcacgttttatgcagacatcaacaatgacagcagctttgatatcagcatcagcctgatgctgac

SEQ ID NO: 795940 - DNA, 75 bp, synthetic construct
  source 1..75: mol_type = other DNA
acggattaacgcgatgacattgttgcgaggtggcctgatagcggcaattttgtgtgcattgctcacggtcttatg

SEQ ID NO: 795941 - DNA, 75 bp, synthetic construct
  source 1..75: mol_type = other DNA
aaatcaaaaatggcgtaccgacggtaggagtcatcgacacatccggaaaacctgtcgttgtggctctggacaaac

SEQ ID NO: 795942 - DNA, 75 bp, synthetic construct
  source 1..75: mol_type = other DNA
aagataacagctatgttttcgtgcttgaacgtggtggtgcctggtgttacgactacactgtctcggtacttaacc

SEQ ID NO: 795943 - DNA, 75 bp, synthetic construct
  source 1..75: mol_type = other DNA
gccggggattttcaacgcttctctggtggatgaggtgctggatattcatcagcgcgatgcggaaaacaccatgcg

SEQ ID NO: 795944 - DNA, 75 bp, synthetic construct
  source 1..75: mol_type = other DNA
tctgttaacgtcggtggtatggcattccgtcagggtaaaacccaggtgaataacgcggtttcggttgatgaaaaa

SEQ ID NO: 795945 - DNA, 75 bp, synthetic construct
  source 1..75: mol_type = other DNA
aaagaactatataaaattctaaagaaagatcataaaaccaaagaagaatcagtaaaaaaaattattgactggata

SEQ ID NO: 795946 - DNA, 75 bp, synthetic construct
  source 1..75: mol_type = other DNA
aaatcaaaaatggtgtaccgacggtaggtattatcgacacctctggaaaaccaatcgttgtagctcaggacaaac

SEQ ID NO: 795947 - DNA, 75 bp, synthetic construct
  source 1..75: mol_type = other DNA
atggcaattgccggttcgctggtgagtaaaaagagccaacccgccagctccggcacgctgccaacgcacggcccg

SEQ ID NO: 795948 - DNA, 75 bp, synthetic construct
  source 1..75: mol_type = other DNA
caacgcgtttggtcagcgactgatttccactatttatactcaggctaaccagtatcgcgtggtgctggagcacaa

SEQ ID NO: 795949 - DNA, 75 bp, synthetic construct
  source 1..75: mol_type = other DNA
tattcactgggcgatgcggtgcaggcgattatggataccgagaagacgctaaatctgccagtggatatcaccacg

SEQ ID NO: 795950 - DNA, 75 bp, synthetic construct
  source 1..75: mol_type = other DNA
tactcaggtcagccgcacgcagtaccagtttacattgcaggccacgtctttggatgcgctcagtacctgggtgcc

SEQ ID NO: 795951 - DNA, 75 bp, synthetic construct
  source 1..75: mol_type = other DNA
agcggtgtatgacatggcccgtaagggggcgagggatgagattcaggcgcagatgcgtgacggtggcgtattttc

SEQ ID NO: 795952 - DNA, 75 bp, synthetic construct
  source 1..75: mol_type = other DNA
ggaagtccggcgcagatgcggcgggcggaaggcattaattttaatcagaacaatcacgtggtgattcagaacgac

SEQ ID NO: 795953 - DNA, 75 bp, synthetic construct
  source 1..75: mol_type = other DNA
cgtgttcaccgccctgaccgaaaaggtgaaatccatttttggccgcaaacaggccagcgatgacgcccgtctgaa

SEQ ID NO: 795954 - DNA, 75 bp, synthetic construct
  source 1..75: mol_type = other DNA
gaatctgccggtggatatcaccacgcagttccagggcagcaccctcgccttccagtcggcgctgggcagcactgt

SEQ ID NO: 795955 - DNA, 75 bp, synthetic construct
  source 1..75: mol_type = other DNA
atcatccgtggctgaccttaagcgtggcactcagcacgctgctgcttagtgttctcttgtgggtgttcattccga

SEQ ID NO: 795956 - DNA, 75 bp, synthetic construct
  source 1..75: mol_type = other DNA
tactcagtttgaattgatgatggctatcgcgctggtagtcatgattatctacctgtttttgcgcaatattccggc

SEQ ID NO: 795957 - DNA, 75 bp, synthetic construct
  source 1..75: mol_type = other DNA
ccgctgtcgttaatcggcactttcgcggttatggtgtttctcgatttttcaatcaataacctgacactgatggcg

SEQ ID NO: 795958 - DNA, 75 bp, synthetic construct
  source 1..75: mol_type = other DNA
acccaccggtttacagcaaagtgaatccggcagatccgccgatcatgacgcttgccgttacctcaaccgccatgc

SEQ ID NO: 795959 - DNA, 75 bp, synthetic construct
  source 1..75: mol_type = other DNA
ttggcgttgatggcactaacccgtcgctgaacagtgcgcgtttgcagatcaacctcaaaccgttggatgaacgtg

SEQ ID NO: 795960 - DNA, 75 bp, synthetic construct
  source 1..75: mol_type = other DNA
ctggcgaaggccacatcggcactgaagaacacctggtctgcggaggagacatgcttcgtggaagctggatggccg

SEQ ID NO: 795961 - DNA, 75 bp, synthetic construct
  source 1..75: mol_type = other DNA
accacaccgaaagtctgacccagcagcgccgcagcaaggccaccggtggtggcggtgacgccctgatgacgaact

SEQ ID NO: 795962 - DNA, 75 bp, synthetic construct
  source 1..75: mol_type = other DNA
ctgaatgatgtgcatgaagcggtgaccgctgttgctgaacatgtgcaggaaaaactgagcgccactgagcagcgc

SEQ ID NO: 795963 - DNA, 75 bp, synthetic construct
  source 1..75: mol_type = other DNA
aattgctgagatgaccgcggcgaaagcagaacaactgattgagcagggcattattactgacggcatgattgtgaa

SEQ ID NO: 795964 - DNA, 75 bp, synthetic construct
  source 1..75: mol_type = other DNA
ggtcgatctgctacgcatcacgttatgggtgctagtccctgtggcgttgttgatcgcattgttttttattcaaca

SEQ ID NO: 795965 - DNA, 75 bp, synthetic construct
  source 1..75: mol_type = other DNA
accacaccgaaagtctgacccagcagcgccgcagcaaggccaccggcggtggcggtgatgccctgatgacgaact

SEQ ID NO: 795966 - DNA, 75 bp, synthetic construct
  source 1..75: mol_type = other DNA
ccgctgtcgctgaacatgtgcaggaaaaactgagcgccactgagcagcgcctcgctgagatggaaaccgcctttt

SEQ ID NO: 795967 - DNA, 75 bp, synthetic construct
  source 1..75: mol_type = other DNA
gcgtgcaacaggcgtcagcaaaggtccggggcagcagcaagccgtcaggaacgctgcgtcggctgaagagctgac

SEQ ID NO: 795968 - DNA, 75 bp, synthetic construct
  source 1..75: mol_type = other DNA
gcgtgcaacaggcgtcagcaaaggtccggggcagcagaaagccgtcaggaccgctgcgtcggctgaagagctgac

SEQ ID NO: 795969 - DNA, 75 bp, synthetic construct
  source 1..75: mol_type = other DNA
gcgtgcaacaggcgtcagcaaaggtccggggcagcagaaagccgtcaggatcgccgcgtcggctgaagagctgac

SEQ ID NO: 795970 - DNA, 75 bp, synthetic construct
  source 1..75: mol_type = other DNA
ttgtttctcggtgacggcgacagcgtcaaagtgacccagcttgatgaagagttaggccatgttggactggcgcag

SEQ ID NO: 795971 - DNA, 75 bp, synthetic construct
  source 1..75: mol_type = other DNA
ggcggcaacgctgggcgcggatctgattttgctctccgacgtcagcggcattctcgacggcaaagggcaacgcat

SEQ ID NO: 795972 - DNA, 75 bp, synthetic construct
  source 1..75: mol_type = other DNA
gcgtgcaacaggcgtcagcaaaggtccggggcagcagcaagccgtcaggatcgcagcgtcggctgaagagctgac

SEQ ID NO: 795973 - DNA, 75 bp, synthetic construct
  source 1..75: mol_type = other DNA
aaatcaggttctgtagatctggtcctaaattgcgatagtgtctataacgtcacgactaatccagtgacttttaaa

SEQ ID NO: 795974 - DNA, 75 bp, synthetic construct
  source 1..75: mol_type = other DNA
gacgctctgcgaccaggagtctcgctatatggagaacgtgaaatatctccgccgggaagaaaagcagcgccgtca

SEQ ID NO: 795975 - DNA, 75 bp, synthetic construct
  source 1..75: mol_type = other DNA
tgatggatttcctgtagaaacgagtggttcgcttctgtcgcctaaaacctattctgttgctgataccattaataa

SEQ ID NO: 795976 - DNA, 75 bp, synthetic construct
  source 1..75: mol_type = other DNA
tgtcttttttatctggatccgacattcgctccatactctcctccttttttataagcataaaaacaaaaacaacca

SEQ ID NO: 795977 - DNA, 75 bp, synthetic construct
  source 1..75: mol_type = other DNA
gcgattttctggctgtcacccgccgtatcaaccctccggctgaaggtcaggccgaccgtgtggcgcggctgaatg

SEQ ID NO: 795978 - DNA, 75 bp, synthetic construct
  source 1..75: mol_type = other DNA
ttcaaacagtatattcaaattcactcatcttgaatgctcctgcggtcgtctttccatttgaaaatgatatagcaa

SEQ ID NO: 795979 - DNA, 75 bp, synthetic construct
  source 1..75: mol_type = other DNA
agcatatgcggcaacgtactttatatatctgatatttacatcaactttcttctatcagtccatatataaaaaggc

SEQ ID NO: 795980 - DNA, 75 bp, synthetic construct
  source 1..75: mol_type = other DNA
gtgccagtcacagcttttggttgtatttgtgttttttatttaaagttttatatcataaatatactttttactcct

SEQ ID NO: 795981 - DNA, 75 bp, synthetic construct
  source 1..75: mol_type = other DNA
tgacccgctggttccccgccagttgcgacagtcgcgccatcgtcgtccgttaccggcacatctcccccgtgaaat

SEQ ID NO: 795982 - DNA, 75 bp, synthetic construct
  source 1..75: mol_type = other DNA
tacgacaaaataaaaatatttcgttatacccaattactggcgttcgtggtgggtggtgcgatgtatttcgtgcaa

SEQ ID NO: 795983 - DNA, 75 bp, synthetic construct
  source 1..75: mol_type = other DNA
ggctattgcttttatcttacttacggttttggtttggtttgcgaaaccgccgtttacagcgaaaggcgttgggtg

SEQ ID NO: 795984 - DNA, 75 bp, synthetic construct
  source 1..75: mol_type = other DNA
gcagacggtcagcgtgacggcaggcaatggcgcaactgtcgctccgacggtcaccacgcaaccggacggcacggt

SEQ ID NO: 795985 - DNA, 75 bp, synthetic construct
  source 1..75: mol_type = other DNA
aagagaagccaaaaaacaagaataaaccaccacccaccccttcatctcctccccaaaaaacacaaataaaaaaat

SEQ ID NO: 795986 - DNA, 75 bp, synthetic construct
  source 1..75: mol_type = other DNA
cattaatgtaatatctactaaattaaaccttgatgatcttaatattgtttattttgaaggaaattgctacgaatc

SEQ ID NO: 795987 - DNA, 75 bp, synthetic construct
  source 1..75: mol_type = other DNA
ggtgtctgatttggtctgtatttattgctttcgcaatcaaatattaccttccttcagttcatattgtgactcaag

SEQ ID NO: 795988 - DNA, 75 bp, synthetic construct
  source 1..75: mol_type = other DNA
atgtacctgagccttcaaaggatactcagttccatttttcagagccattcttagaagagttttatctaaatgtaa

SEQ ID NO: 795989 - DNA, 75 bp, synthetic construct
  source 1..75: mol_type = other DNA
tcgaatgaaaaagtcctaagttcctacagcgaagccattgatggcgcaagattgatagattgcatctggtttaga

SEQ ID NO: 795990 - DNA, 75 bp, synthetic construct
  source 1..75: mol_type = other DNA
gccgcggatccctccctgcttgctacgccgcgtacatacctgatgagccatatgccgtggctaccgtttttgctg

SEQ ID NO: 795991 - DNA, 75 bp, synthetic construct
  source 1..75: mol_type = other DNA
agatgtatttagtcttattcaagatgagaatgggatggttaatgtttttgatggtgatggtaagtttttatcata

SEQ ID NO: 795992 - DNA, 75 bp, synthetic construct
  source 1..75: mol_type = other DNA
tatataagcgatagcgatattaagacctctggaagcgtatctgacaaagaaaatggagggataacagccagcgca

SEQ ID NO: 795993 - DNA, 75 bp, synthetic construct
  source 1..75: mol_type = other DNA
acgctgatattctggctgtggtacgggaaagactgaaaaatccggcaagacggatcagggttaacgttgatgacc

SEQ ID NO: 795994 - DNA, 75 bp, synthetic construct
  source 1..75: mol_type = other DNA
agaagatgcgcgtcgtttctaccgttcagaggaaggtattgtgctggtcacgcgtgaaatgctacgcaaactgca

SEQ ID NO: 795995 - DNA, 75 bp, synthetic construct
  source 1..75: mol_type = other DNA
tctttgaagccaaaattgtagaaaacctactttacaatgatcagccgaccttatcgtcagatgagcacaaagcac

SEQ ID NO: 795996 - DNA, 75 bp, synthetic construct
  source 1..75: mol_type = other DNA
ttctgagttgattagtgttgacattagcgtcaaaggtgacactggtgacatggttaagcgaaaagtaaatctgag

SEQ ID NO: 795997 - DNA, 75 bp, synthetic construct
  source 1..75: mol_type = other DNA
cagagtttgttgatccggtaaaacctatcgatcatacatctcgcttagaagcagagttagaacggcaacgtcaag

SEQ ID NO: 795998 - DNA, 75 bp, synthetic construct
  source 1..75: mol_type = other DNA
cgacaggctgacgacggtgcagactgacaccacacgtatccagacggtatacgagccgggaagcttcacgccgct

SEQ ID NO: 795999 - DNA, 75 bp, synthetic construct
  source 1..75: mol_type = other DNA
actttatatggctgccgattggcggcgcgatctctgaccggattgggcgtctcccggtgctaatgggcatcacct

SEQ ID NO: 796000 - DNA, 75 bp, synthetic construct
  source 1..75: mol_type = other DNA
tggctaatgtgcgctgcgctgtgcggactcgctgcgacgacaatgctgtttgctcgtctcagtagtggttatcag

SEQ ID NO: 796001 - DNA, 75 bp, synthetic construct
  source 1..75: mol_type = other DNA
attgccaaatataatattgacaaggattattttataatttgcaatcaattttggaaacataaagatcatgcaact

SEQ ID NO: 796002 - DNA, 75 bp, synthetic construct
  source 1..75: mol_type = other DNA
atgtctcccggtacctatgcctggacacaggtgcccgtgtttagtgggatcattatcgccagtgcgatcgtagcg

SEQ ID NO: 796003 - DNA, 75 bp, synthetic construct
  source 1..75: mol_type = other DNA
ttcgcttcacgctcttttctcataacctgccaaaaggcaccgtttctgccacgctgaatattctggcgctcggca

SEQ ID NO: 796004 - DNA, 75 bp, synthetic construct
  source 1..75: mol_type = other DNA
gatgccccggagatggggatcatgaatattcccgtcgtgcaggatgagcgagtcactcagaacgagctcaacatc

SEQ ID NO: 796005 - DNA, 75 bp, synthetic construct
  source 1..75: mol_type = other DNA
agcattcttcgtcgcgctaaagaaatcgtgaccaaaaaagaagaaccgtggaaatcatggagcagcattctgcgc

SEQ ID NO: 796006 - DNA, 75 bp, synthetic construct
  source 1..75: mol_type = other DNA
cactctggatgttgaaattgcgctggccaccttgccaatggatttcaatatctacgacatacctggtggggtcta

SEQ ID NO: 796007 - DNA, 75 bp, synthetic construct
  source 1..75: mol_type = other DNA
cccatcacagctgattataccgacgaactgaacgacttcgacctgcgccgccttgaagcgctgcgtctggcttaa

SEQ ID NO: 796008 - DNA, 75 bp, synthetic construct
  source 1..75: mol_type = other DNA
tcagcaactcatggcacgaaaaaggctacggagaccaccagcaatgtgcaggttcaagaaactgtcagtgatgaa

SEQ ID NO: 796009 - DNA, 75 bp, synthetic construct
  source 1..75: mol_type = other DNA
aacgtttatcacgcagcgaacgggatcagcagcactcaggtgaaagatgcccgcgtcagcctgatgtacttcaac

SEQ ID NO: 796010 - DNA, 75 bp, synthetic construct
  source 1..75: mol_type = other DNA
cactacctgcaccagttgaacctgaaattgatagccaatttgttgatgggcaactggcggccgaccgcggcgaat

SEQ ID NO: 796011 - DNA, 75 bp, synthetic construct
  source 1..75: mol_type = other DNA
atcaaagctttactcatatggatcaaaagttcatatatcatggtggtgggcgaagtaaaattgaattttgcgata

SEQ ID NO: 796012 - DNA, 75 bp, synthetic construct
  source 1..75: mol_type = other DNA
ttcgatacatatattacccgttcaatcctaattgaatgtcgaattggtagccagtcatttggtgacgatattaaa

SEQ ID NO: 796013 - DNA, 75 bp, synthetic construct
  source 1..75: mol_type = other DNA
aaaaagcgcaagagaaagaaggattacttgtttttttaggaatgaaatccgttaatgactatactcttaatattc

SEQ ID NO: 796014 - DNA, 75 bp, synthetic construct
  source 1..75: mol_type = other DNA
attgcggtgcagcaggggcagtcgatagtgaccggcggggatcatgaaacactcgtacagggcacgctgcatctt

SEQ ID NO: 796015 - DNA, 75 bp, synthetic construct
  source 1..75: mol_type = other DNA
cggaacgccgctggtcgagtacacgcgggaccggctgcaccgtgagacggcccgcagcttcggcggggaggcata

SEQ ID NO: 796016 - DNA, 75 bp, synthetic construct
  source 1..75: mol_type = other DNA
gttatcttgcggggatgaagctgggcggaacgccgctggtcgagtacacgcgggaccggctgcaccgtgagacgg

SEQ ID NO: 796017 - DNA, 75 bp, synthetic construct
  source 1..75: mol_type = other DNA
tgcggcggcaaatcgatatggattaatgagttcgggaactggggatgagatgggagcctctgtctctgattattt

SEQ ID NO: 796018 - DNA, 75 bp, synthetic construct
  source 1..75: mol_type = other DNA
atgttgatgccgtctgggatgatgactgtattattggttcgagttatccgcagccgtctatcgcgagcattgcca

SEQ ID NO: 796019 - DNA, 75 bp, synthetic construct
  source 1..75: mol_type = other DNA
gcttttcgatgataatgcttcttctgtgtcagatgtaaaaatgtcagtcagcgaagcaccgataaccaatctcaa

SEQ ID NO: 796020 - DNA, 75 bp, synthetic construct
  source 1..75: mol_type = other DNA
taggctattgttttgagaagcggcaaagaagcatgatttatgaaagtttgtcggttagtcatatttgtgagtatt

SEQ ID NO: 796021 - DNA, 75 bp, synthetic construct
  source 1..75: mol_type = other DNA
gcatgttgacgctgtaaacaatggtggcgaaggcaacggtatacaggcttatacggcaattaaggaaattatgct

SEQ ID NO: 796022 - DNA, 75 bp, synthetic construct
  source 1..75: mol_type = other DNA
tttccctcgacctctctctggtcagtcagcagtttctctcccttgaatttcagcaggtgctggacaagatggcct

SEQ ID NO: 796023 - DNA, 75 bp, synthetic construct
  source 1..75: mol_type = other DNA
actacgcagaccacgcctcaacgttgtacaaatatcaggcatgtacattcggttattcgttttatcagatatttg

SEQ ID NO: 796024 - DNA, 75 bp, synthetic construct
  source 1..75: mol_type = other DNA
gtggtgggcacggcagccaccgtggcggatgtcacccaggtcgacaagctgctgcacggcgacgagaacgtcgtc

SEQ ID NO: 796025 - DNA, 75 bp, synthetic construct
  source 1..75: mol_type = other DNA
ggtagaccttagactggaagatcttgatatgactgaagaaaattattttttattaggcgacagaaaaacagatta

SEQ ID NO: 796026 - DNA, 75 bp, synthetic construct
  source 1..75: mol_type = other DNA
aaatattcagcctgatcaagggcagcttgatcgtacctggtgggaagaaggattcatttcatgggacgaagcctc

SEQ ID NO: 796027 - DNA, 75 bp, synthetic construct
  source 1..75: mol_type = other DNA
tgatgttggcatcgcggcgcaataatcgcgcattaagcggtgtgatgatcaacgctgatgcgggtttagcgattc

SEQ ID NO: 796028 - DNA, 75 bp, synthetic construct
  source 1..75: mol_type = other DNA
tcttcagaaataacctgtttgagcgaaaagaaaattatagcggtaggccggcttgagtatcaaaagggatttgat

SEQ ID NO: 796029 - DNA, 75 bp, synthetic construct
  source 1..75: mol_type = other DNA
aaatgctgatttttatatcgttaattcatttccaatggcttttttgtcatttttcaatgtcttttcaaataaaaa

SEQ ID NO: 796030 - DNA, 75 bp, synthetic construct
  source 1..75: mol_type = other DNA
catgcgcgggtgtgagatgcgcggcatggtggctaattttggcggtttcctttccattaataaactttcgcagta

SEQ ID NO: 796031 - DNA, 75 bp, synthetic construct
  source 1..75: mol_type = other DNA
ctgcgtccggaggctggcacatacaccacaaacctcgttgctgcgaacaccatgtttgtgacccgccttcatgaa

SEQ ID NO: 796032 - DNA, 75 bp, synthetic construct
  source 1..75: mol_type = other DNA
tcgtcaaccgggtttcacactcacacttgatgacgccggtcaatggctgcgttcgcgtgtggtgtggttagggat

SEQ ID NO: 796033 - DNA, 75 bp, synthetic construct
  source 1..75: mol_type = other DNA
tctggggagattttcccgttacgcaggcagacgatcccgtcgaggcgatggtttacagcctgtggcatattcgtg

SEQ ID NO: 796034 - DNA, 75 bp, synthetic construct
  source 1..75: mol_type = other DNA
ctcaaatatagatccattaggattagaaacactaaaatgcattaagccactgcattcaatgggcggaactggtga

SEQ ID NO: 796035 - DNA, 75 bp, synthetic construct
  source 1..75: mol_type = other DNA
atacagcgccttctttgtcgaactgtcgaaggagatccaggatgacatcatccgccggacagcgcatcagctgta

SEQ ID NO: 796036 - DNA, 75 bp, synthetic construct
  source 1..75: mol_type = other DNA
ggaaccgcgaccattacagctacaaccgcagatggtgatttcaccgacacatgtgctgtgaccgtgactgccgca

SEQ ID NO: 796037 - DNA, 75 bp, synthetic construct
  source 1..75: mol_type = other DNA
ttgcctgccaggcagagatttccgggctggttcattaccagcaacaacacattatcctgtccggacaatcgctgc

SEQ ID NO: 796038 - DNA, 75 bp, synthetic construct
  source 1..75: mol_type = other DNA
aaagggctttcaaagaatggaataagctggataaggcaatacgtgaccagtttaaaaagaaactcagaaaactac

SEQ ID NO: 796039 - DNA, 75 bp, synthetic construct
  source 1..75: mol_type = other DNA
tgttttaaaataaaactaagagcatctgggtttcggcttatttataaggtcattgatgaggaaattgttatatgg

SEQ ID NO: 796040 - DNA, 75 bp, synthetic construct
  source 1..75: mol_type = other DNA
tatatataaaattatttaatattttcgctaacaaaaatgaaatttattttcaatttacatctgaagaagaaaaga

SEQ ID NO: 796041 - DNA, 75 bp, synthetic construct
  source 1..75: mol_type = other DNA
atcacgacaagtctatgactatgcacgaaatgctttaactaaacatgaatataaaacatcaactttattcgatat

SEQ ID NO: 796042 - DNA, 75 bp, synthetic construct
  source 1..75: mol_type = other DNA
cggaacctattctctatacagatcattactcagatcaccacaaacagatcattaacccctcttgtccggttgcgc

SEQ ID NO: 796043 - DNA, 75 bp, synthetic construct
  source 1..75: mol_type = other DNA
accctgcgcaacggaagatgccaccggcagccggaaaaccatgacgtggagccgttacggtcagttgctgagctt

SEQ ID NO: 796044 - DNA, 75 bp, synthetic construct
  source 1..75: mol_type = other DNA
acattcacctgaccgcgctcggcgcgatgatgctctcctttctgctcgtcggctgcgacgacagcgtcgcacaga

SEQ ID NO: 796045 - DNA, 75 bp, synthetic construct
  source 1..75: mol_type = other DNA
aaaaaattaatttcaatggcattaccactccctgataattgcattatgcatgattggtggcttatattggtagca

SEQ ID NO: 796046 - DNA, 75 bp, synthetic construct
  source 1..75: mol_type = other DNA
aaagagcctttaaagagtggaagaaactggacaagacaatacgtgaccagtttaaaaagaaactcaggaaactac

SEQ ID NO: 796047 - DNA, 75 bp, synthetic construct
  source 1..75: mol_type = other DNA
gatgaagaaaagctcggaccaaagccaatcgtattcggtggcaatacctacgatttttggccgtttcaggtagca

SEQ ID NO: 796048 - DNA, 75 bp, synthetic construct
  source 1..75: mol_type = other DNA
aggtgacggcggtgcaccgcgaggaagggctgagtcagtaccgcgcatacgacagccgtggacagttaactgcgg

SEQ ID NO: 796049 - DNA, 75 bp, synthetic construct
  source 1..75: mol_type = other DNA
gttcttatacctaaagaatatgatattcaagctgaacatgaacagcctcatgttacttatcatctgcatccagat

SEQ ID NO: 796050 - DNA, 75 bp, synthetic construct
  source 1..75: mol_type = other DNA
tcgtggttgcgtcagtgaaagaagcaccgattggtatcgaggtcatccccgctcacgtcactgaatatctgaaca

SEQ ID NO: 796051 - DNA, 75 bp, synthetic construct
  source 1..75: mol_type = other DNA
tgaggcatttggatttggtacgtatacaagcccaacagttcatgattctatttgcccgacaattcccgtcgcttc

SEQ ID NO: 796052 - DNA, 75 bp, synthetic construct
  source 1..75: mol_type = other DNA
ttatcagtgatgttgtggaccttgtcagcggtgtccgtgagaccgtgactgaacctctgtggtcgatgcgggttt

SEQ ID NO: 796053 - DNA, 75 bp, synthetic construct
  source 1..75: mol_type = other DNA
taccccggcgttaaggggaaatgaggtcaacatgggtatacgggagcaacaaaaaattgatggcgagtacccaca

SEQ ID NO: 796054 - DNA, 75 bp, synthetic construct
  source 1..75: mol_type = other DNA
gctctgccatcgaggatttgctcgatcttgaagaatttcactatgagaatagctttgcttgggaggacgaaactc

SEQ ID NO: 796055 - DNA, 75 bp, synthetic construct
  source 1..75: mol_type = other DNA
ggagtatcaaaatactactgcccgatctgatacgtgccgagtacgaacgaaataaagatagggtgattgaggcta

SEQ ID NO: 796056 - DNA, 75 bp, synthetic construct
  source 1..75: mol_type = other DNA
acataccccggcgttgttgttaacgacattgactgagcctcaggatcggtcgctggctattaataatccacagct

SEQ ID NO: 796057 - DNA, 75 bp, synthetic construct
  source 1..75: mol_type = other DNA
tttgtgaacgacgcaaaccacaaggaattacagaccaattccttaatgcgtttatggaaaactgcgtaacccact

SEQ ID NO: 796058 - DNA, 75 bp, synthetic construct
  source 1..75: mol_type = other DNA
tttattggtgtaaactcgaccgtttagaagttattaacactaaacagacggtaaagaaaggccacaagcatcttg

SEQ ID NO: 796059 - DNA, 75 bp, synthetic construct
  source 1..75: mol_type = other DNA
agctactcgaaaaaggcgctattgatgggggatatatttcaaaccctatgattgcgggtaaggtttttgtccagg

SEQ ID NO: 796060 - DNA, 75 bp, synthetic construct
  source 1..75: mol_type = other DNA
ttattgctaccgtattatcttccactgctgcatgggctgatcagactgtaacatcacaaaaagcgaataaacctt

SEQ ID NO: 796061 - DNA, 75 bp, synthetic construct
  source 1..75: mol_type = other DNA
acgggctgcgcgacgcctcgtttcgcggcgtccccttctgtctggtggatacggaaggcaccggtggccgcagag

SEQ ID NO: 796062 - DNA, 75 bp, synthetic construct
  source 1..75: mol_type = other DNA
atgagtgcgagttttgacagtgtgagagtttattatgccatggacaaggtaaccggtgctgtagcgagcagtgtt

SEQ ID NO: 796063 - DNA, 75 bp, synthetic construct
  source 1..75: mol_type = other DNA
gtttacaaaaaaaaacttttggaaggagagtccttcaatgaaaatattacacatcatgaagatgctgaatttcta

SEQ ID NO: 796064 - DNA, 75 bp, synthetic construct
  source 1..75: mol_type = other DNA
taagcgttataataccatgttggaactgtagtaaatatatcacaaaaacattggattctatcaaatattcatatt

SEQ ID NO: 796065 - DNA, 75 bp, synthetic construct
  source 1..75: mol_type = other DNA
tatccgtcttgttctgccgcaggatcagactatacatcgtcgagatcgcaatgattatgaattgttcctctgcga

SEQ ID NO: 796066 - DNA, 75 bp, synthetic construct
  source 1..75: mol_type = other DNA
gtgaggacaactctcctgaaaattatgtcagttggtggccagatggtacggcaaagttttctggaagaaataatg

SEQ ID NO: 796067 - DNA, 75 bp, synthetic construct
  source 1..75: mol_type = other DNA
tcgtcgtaccaatacgtcgctgacatgacccccggagttacaccgaatggagagccgtatgacggcatcatgcgg

SEQ ID NO: 796068 - DNA, 75 bp, synthetic construct
  source 1..75: mol_type = other DNA
aaaacaaaaccgccgacgacgaagacgacgagaaggacaagaaaaaaacggcggatgatgaggacgacgaggaag

SEQ ID NO: 796069 - DNA, 75 bp, synthetic construct
  source 1..75: mol_type = other DNA
ccagcacaccattcttgccttcaaagaaaaccgtcttcctcgaacttcattccagtcgtgcgcaaccgctatcaa

SEQ ID NO: 796070 - DNA, 75 bp, synthetic construct
  source 1..75: mol_type = other DNA
gagaatctctgtatttcgaagatatgaccgcgctcattaaggaggttgaagaacggaataaacaagccagaacta

SEQ ID NO: 796071 - DNA, 75 bp, synthetic construct
  source 1..75: mol_type = other DNA
gtgaatgtgaataccagtagtgggcaaccgattgattcgacgtgtcgttttcagtatgtattgaatgaactgtag

SEQ ID NO: 796072 - DNA, 75 bp, synthetic construct
  source 1..75: mol_type = other DNA
cttgctgaaaggctgggaaaagtggcagggtcacttactagtcttgcattggccatttgtgtgttaattatgatt

SEQ ID NO: 796073 - DNA, 75 bp, synthetic construct
  source 1..75: mol_type = other DNA
ttatgtatgctctacaacactatggtcttgcttcttgtccattgaattggtgtaattcatctcacattgagaatg

SEQ ID NO: 796074 - DNA, 75 bp, synthetic construct
  source 1..75: mol_type = other DNA
ttacccggaagcgcaacaccatgacgattcaacgcacgaagaaaacagaaccagccaaacccgaaaccacgtcca

SEQ ID NO: 796075 - DNA, 75 bp, synthetic construct
  source 1..75: mol_type = other DNA
gatgctaaaaaaggcaataacattttgtttaagcttacaactaaagatggaaaaacgcccccattaggagctata

SEQ ID NO: 796076 - DNA, 75 bp, synthetic construct
  source 1..75: mol_type = other DNA
ttgagtttagctcccttcgtttgtttattgctgtaccaaaaaatcttctgtctgagattgataaaatatcatcaa

SEQ ID NO: 796077 - DNA, 75 bp, synthetic construct
  source 1..75: mol_type = other DNA
ccgacgttaaggcatttggtccctttttaacgccgatgtcgcgtctggcgcataccggctatcggcttgaggggc

SEQ ID NO: 796078 - DNA, 75 bp, synthetic construct
  source 1..75: mol_type = other DNA
tttattttgtcttttattagttggcatcttattgagaagccagctcttcgttttgctaaatctgcaggaaaaaat

SEQ ID NO: 796079 - DNA, 75 bp, synthetic construct
  source 1..75: mol_type = other DNA
ttggtgatcacgattcgcacaaacccatgagtgagaatacggtaaatagtgcgggtgatgctgccaacttactga

SEQ ID NO: 796080 - DNA, 75 bp, synthetic construct
  source 1..75: mol_type = other DNA
ctggtggtacatcgtaccccgcgtcatatttacgcacaggtaattgcaccgaacggttctgaagttctggtagct

SEQ ID NO: 796081 - DNA, 75 bp, synthetic construct
  source 1..75: mol_type = other DNA
acatgtgctgtggcagtcgcatgttctggttcgataaaaatgacgaacgggcgatattcagcgatatcagaaagg

SEQ ID NO: 796082 - DNA, 75 bp, synthetic construct
  source 1..75: mol_type = other DNA
actgcatgagcgtgttctggcggcaacatgaagccgaactatctcgcttcctgacatcgaagacaggtgatagcg

SEQ ID NO: 796083 - DNA, 75 bp, synthetic construct
  source 1..75: mol_type = other DNA
agcggcatcccctgatgcaatctcaacgctggatatttgcctgcctgaaacattgcaggctttacccgaagatga

SEQ ID NO: 796084 - DNA, 75 bp, synthetic construct
  source 1..75: mol_type = other DNA
ttcatcaatgcaattccatccagagtcggtgttgaccatcgatgggccgcggatcctttatgaatcaatccaaca

SEQ ID NO: 796085 - DNA, 75 bp, synthetic construct
  source 1..75: mol_type = other DNA
gcttcagtcgcctggaaaatgaaattgctgaactgaataaaaaactgtcgacgctgatgccttctgaagatgaaa

SEQ ID NO: 796086 - DNA, 75 bp, synthetic construct
  source 1..75: mol_type = other DNA
atgtctcccagattttttccgcacgtagcggtggatatatcaatatccacaaatgtagaagatgattattttttt

SEQ ID NO: 796087 - DNA, 75 bp, synthetic construct
  source 1..75: mol_type = other DNA
ttatacacagctggcggagaagtttcccgggactctggatgggccggtggtatttatcgggatggctgagacggc

SEQ ID NO: 796088 - DNA, 75 bp, synthetic construct
  source 1..75: mol_type = other DNA
tatcagttaacggtattaacaatgatcctattgcacaaatgcagtactggaatgcaataatggatttagttgata

SEQ ID NO: 796089 - DNA, 75 bp, synthetic construct
  source 1..75: mol_type = other DNA
ggaaaaaattaattattccgcacaggatagcgacattttaacgaccatcggattcaggcctgacgcggcttcggt

SEQ ID NO: 796090 - DNA, 75 bp, synthetic construct
  source 1..75: mol_type = other DNA
taaaagtttccaggctgaatgaaagatttcaattccttcaggatcgttttgagaaagcatgtatatatctcacaa

SEQ ID NO: 796091 - DNA, 75 bp, synthetic construct
  source 1..75: mol_type = other DNA
tttgctacaatgtatgggaatcctattacaaaccccaaaaaatggcctgtccatcttatgggagaaattattgaa

SEQ ID NO: 796092 - DNA, 75 bp, synthetic construct
  source 1..75: mol_type = other DNA
tgtcgccggtcgtctttatgccggtgtcagtagcggaacgctggagggaacgacggcggtaaaaatgaacggttc

SEQ ID NO: 796093 - DNA, 75 bp, synthetic construct
  source 1..75: mol_type = other DNA
tattagttaacggcatcaacaatgatccacttgcccaaatgcagtactggactgcagtaagaaatataattgatg

SEQ ID NO: 796094 - DNA, 75 bp, synthetic construct
  source 1..75: mol_type = other DNA
taattatcgtgatgaacaggctattgccgctggtataatttttcgcaccagcgaaaacaccgtcgtcagactaaa

SEQ ID NO: 796095 - DNA, 75 bp, synthetic construct
  source 1..75: mol_type = other DNA
caaacattaaaatcagcaaacacttatacaaataagcaagtgaatgcgctggagcaaaataccaatcaacaactt

SEQ ID NO: 796096 - DNA, 75 bp, synthetic construct
  source 1..75: mol_type = other DNA
tttatcgccgtaccctctcatgcggtacgatacaggtaacccgcgaccagggtgatgtttcgctcgatgacctgt

SEQ ID NO: 796097 - DNA, 75 bp, synthetic construct
  source 1..75: mol_type = other DNA
attatcaagactgctctacaccgatgaagacgaagaaactgaaatgaggttgccacagcaaatcaaagatactga

SEQ ID NO: 796098 - DNA, 75 bp, synthetic construct
  source 1..75: mol_type = other DNA
acaactgactttatccgacaattccattacttcatgaacaaaaacagccatttaaagcaaatgaaagtctctgat

SEQ ID NO: 796099 - DNA, 75 bp, synthetic construct
  source 1..75: mol_type = other DNA
taccggtatttattaccaggccttttaactatacaggtgttggtcaggctgataattttttattgcctaaaattg

SEQ ID NO: 796100 - DNA, 75 bp, synthetic construct
  source 1..75: mol_type = other DNA
caaagatgataatatttatttttgctattataatcattgttgttttatgcgtaattacttatctttatttataca

SEQ ID NO: 796101 - DNA, 75 bp, synthetic construct
  source 1..75: mol_type = other DNA
tggcgtgctgatcacctttgcgaaatgctgccgcccaattcctggcgacccgattatcgcccacgtcagccccgg

SEQ ID NO: 796102 - DNA, 75 bp, synthetic construct
  source 1..75: mol_type = other DNA
tagtgcatattataaatcagagccattaattgataggttttttcttgttgccagttctcataatttagcagcata

SEQ ID NO: 796103 - DNA, 75 bp, synthetic construct
  source 1..75: mol_type = other DNA
tgacaacctcgggcaggatgaagtgttagttataaagatagatactgcagtacgtcacactaaaaaggccgactg

SEQ ID NO: 796104 - DNA, 75 bp, synthetic construct
  source 1..75: mol_type = other DNA
atgagacaaactctttgcgacggatatctggtcatttttgcgttagcacaggccgtgattctgctgctaaccccg

SEQ ID NO: 796105 - DNA, 75 bp, synthetic construct
  source 1..75: mol_type = other DNA
gtgacggatcaggacggcaacggcaaggcggatgcagaggaagcggcagcagcggtggcggcggccacggagaaa

SEQ ID NO: 796106 - DNA, 75 bp, synthetic construct
  source 1..75: mol_type = other DNA
tctctattaccacccgcactggaacgctggttgcggatgattatgtcgttgccgccggtaatggcagcacgcatt

SEQ ID NO: 796107 - DNA, 75 bp, synthetic construct
  source 1..75: mol_type = other DNA
gacggtcagtcctatccgttgtcgctcgctatcaagaccctcattccgggctacctgtcaggcttaccgtcctga

SEQ ID NO: 796108 - DNA, 75 bp, synthetic construct
  source 1..75: mol_type = other DNA
cgccgctgatattaatgaacggatgtcgcgtaccagcgatatgctggagcaacacgccagcgtgacccgtacgct

SEQ ID NO: 796109 - DNA, 75 bp, synthetic construct
  source 1..75: mol_type = other DNA
actacaagctcaggcatattgagaaattagtgagcgcggttcatgccggtgaaggcaaaatggaaacgctcaaaa

SEQ ID NO: 796110 - DNA, 75 bp, synthetic construct
  source 1..75: mol_type = other DNA
tttgcaacaagccaaaatcgatcttgatggtgctctggatgccgttcgcaccctatgcgaaccagtaaaaatgcc

SEQ ID NO: 796111 - DNA, 75 bp, synthetic construct
  source 1..75: mol_type = other DNA
tatttctgggtctatcgtgaacgccactggccgtggggagaaaacgcaccagctccccagttgaaagataatccg

SEQ ID NO: 796112 - DNA, 75 bp, synthetic construct
  source 1..75: mol_type = other DNA
ccgatatgccctttgcgctgctgcttctcgcgcccagcttattactgctgggtggtctggtggcctggccaatgg

SEQ ID NO: 796113 - DNA, 75 bp, synthetic construct
  source 1..75: mol_type = other DNA
atttttgtactggcctcaatcgcagaaaacacgctggcacgcgggcgttttttactcattcaccatgtgacctag

SEQ ID NO: 796114 - DNA, 75 bp, synthetic construct
  source 1..75: mol_type = other DNA
tacatgaaatatatagaagcatcaagaaaaattcactcagcttatttaaaaacatcgataaagcaattgttttca

SEQ ID NO: 796115 - DNA, 75 bp, synthetic construct
  source 1..75: mol_type = other DNA
ggagttatagaatttgtgtttttttataacattacatgtggattattattactacttattttagtggcgtgctat

SEQ ID NO: 796116 - DNA, 75 bp, synthetic construct
  source 1..75: mol_type = other DNA
gggtaagactggcaaaaagcagatcaaacagtattcagagcgactgacgttcgcacttgagcaggcgaaatcgtt

SEQ ID NO: 796117 - DNA, 75 bp, synthetic construct
  source 1..75: mol_type = other DNA
tcgcctgccgtcgatactcatacccctgatgctcctgcctgtaaagaaaaaaaagaaaagacgccgttttccacg

SEQ ID NO: 796118 - DNA, 75 bp, synthetic construct
  source 1..75: mol_type = other DNA
acggtttatccccgctggcgcggggaacactgctggcgcatcactggccgcaggtcaaaaaccggtttatccccg

SEQ ID NO: 796119 - DNA, 75 bp, synthetic construct
  source 1..75: mol_type = other DNA
acctgagcctctttgtaagccaaggccaacttacgtttaaaaagggatgttttgtaaataacaattgttctttta

SEQ ID NO: 796120 - DNA, 75 bp, synthetic construct
  source 1..75: mol_type = other DNA
tccatgaccttaaagccaaggggatatcagattacgaaggtagtagccgggataagcaacttttctctggtcaca

SEQ ID NO: 796121 - DNA, 75 bp, synthetic construct
  source 1..75: mol_type = other DNA
gacgttattgctgccttttatcggcgcactggtcgtttcgttttcgccacaacgtcgggccgccgaatggggggt

SEQ ID NO: 796122 - DNA, 75 bp, synthetic construct
  source 1..75: mol_type = other DNA
tggaactcgccgctaaccaccgtactggcgttactggcctgtggttttgcctgcttcattgagatgggaaaaatt

SEQ ID NO: 796123 - DNA, 75 bp, synthetic construct
  source 1..75: mol_type = other DNA
aaagaaaagcagttgttctctggtcacaaaacagaggcgcaagtgctgacgtatgatcgcaaacccgcagtaact

SEQ ID NO: 796124 - DNA, 75 bp, synthetic construct
  source 1..75: mol_type = other DNA
gtatgatcgcaaacctgcagtttctccgactctggatattccggtgctggatgtcacagttctgagcagaaaccc

SEQ ID NO: 796125 - DNA, 75 bp, synthetic construct
  source 1..75: mol_type = other DNA
ctggtggaaccaggctaaacacgcagccgagaaaaaatccggcgtcccgtttgggtgcaatttccatgacataaa

SEQ ID NO: 796126 - DNA, 75 bp, synthetic construct
  source 1..75: mol_type = other DNA
tggtcagtcccgcacgggcctacctgctgtccctcaattcaccccgcagccggcagaccatggcctcgttccttg

SEQ ID NO: 796127 - DNA, 75 bp, synthetic construct
  source 1..75: mol_type = other DNA
cggagcgtaatcttctggcagaagcgttcccgctggatgaggaatttctgccggcgctgtccggccctgacgccc

SEQ ID NO: 796128 - DNA, 75 bp, synthetic construct
  source 1..75: mol_type = other DNA
attcaagtcatggacatagcgttactttagttgacaataatgctaaaaattgggttgatataaaatatatatttt

SEQ ID NO: 796129 - DNA, 75 bp, synthetic construct
  source 1..75: mol_type = other DNA
ttacatcggacaagacagggatttatccaggaaagaacagcaacgtataaccgtcttcggggcctgatatctgaa

SEQ ID NO: 796130 - DNA, 75 bp, synthetic construct
  source 1..75: mol_type = other DNA
atagtattttaaaattaatttgtaaggaagctgcatcagagacgtatcgcgtgctcttgaaactttacaaaaaat

SEQ ID NO: 796131 - DNA, 75 bp, synthetic construct
  source 1..75: mol_type = other DNA
gacgatgttcttaacgctcgggaaaaacagcttcgtcagtggcgcggcgcacgagtggcgatgatctttcaggaa

SEQ ID NO: 796132 - DNA, 75 bp, synthetic construct
  source 1..75: mol_type = other DNA
gtgagttatgacaatgagactctgggtagtggaggaacaagcccctccatgactctgaatgaaggtgatacagcg

SEQ ID NO: 796133 - DNA, 75 bp, synthetic construct
  source 1..75: mol_type = other DNA
agcagtttgatggactatattggcgatggtcgtcgtgttagtgggcatacgggtttcctggatggggttcgttta

SEQ ID NO: 796134 - DNA, 75 bp, synthetic construct
  source 1..75: mol_type = other DNA
ccagttattgaaggatttgatataacacttaataaaacaaaaccatcagcagtggatatatattcagatgtgttt

SEQ ID NO: 796135 - DNA, 75 bp, synthetic construct
  source 1..75: mol_type = other DNA
atgatgttgttcagtggatagagaataaccttgataaaccgttacatatacaggatgtggcaaaacatgccgggt

SEQ ID NO: 796136 - DNA, 75 bp, synthetic construct
  source 1..75: mol_type = other DNA
ttgatagaaaaattatcagacctgccattttcatataatcacatcagagaagtacaagataaactggcaaccaaa

SEQ ID NO: 796137 - DNA, 75 bp, synthetic construct
  source 1..75: mol_type = other DNA
gacattaccgaagaacaattaaaaattatgagatttgcaattataaaatctataccaagggcaactcttacagat

SEQ ID NO: 796138 - DNA, 75 bp, synthetic construct
  source 1..75: mol_type = other DNA
ccaagtaatattcgttttgttaagtatatgaaaggacatttacatgatgatgaaaaaactcagcatttaaaaaaa

SEQ ID NO: 796139 - DNA, 75 bp, synthetic construct
  source 1..75: mol_type = other DNA
ctcatccgcggcacatcatcagaattggttaactttcctgggcggttgcgggcatatatcaatgccaatctaacc

SEQ ID NO: 796140 - DNA, 75 bp, synthetic construct
  source 1..75: mol_type = other DNA
atctgacgaaccagctgttgtttatcccgcttatttcgagccaggccgctatgaagggctgccaaacgaggttta

SEQ ID NO: 796141 - DNA, 75 bp, synthetic construct
  source 1..75: mol_type = other DNA
tctggtgaagagtcagataccagccagaaggacgatgtagaccagaatacggattctgtcgccaaaaatagcgat

SEQ ID NO: 796142 - DNA, 75 bp, synthetic construct
  source 1..75: mol_type = other DNA
agcacgcaggtaaaagatgcccgcgtcagcctgatgtacttcaacgcacgccacgtcgccaaaacgatcaccaaa

SEQ ID NO: 796143 - DNA, 75 bp, synthetic construct
  source 1..75: mol_type = other DNA
actgctggattcctggcgcgacaaccctggcgaaaagattctggttacccgccagcagctggccacagcgcgggc

SEQ ID NO: 796144 - DNA, 75 bp, synthetic construct
  source 1..75: mol_type = other DNA
gagcgctgacgagattaaagcgttgcttgaagaacataacgcagcccttcccgctccagtgccgcttggcgcgag

SEQ ID NO: 796145 - DNA, 75 bp, synthetic construct
  source 1..75: mol_type = other DNA
tgtaccagctactttggtcatgccagcgatacgccagaaaagaatccgcagtggctgcagctacgcatgcagatt

SEQ ID NO: 796146 - DNA, 75 bp, synthetic construct
  source 1..75: mol_type = other DNA
cctgaatctgcatcgttatctgaacatgaagtcagtgatgcaaagtcagaccgggaagagcaaatcaaaatcatc

SEQ ID NO: 796147 - DNA, 75 bp, synthetic construct
  source 1..75: mol_type = other DNA
ggcgaaaaacgcagggcgattaagccgtctgcaaggttctggttcacgcgataacaatgccatgattatgcgcat

SEQ ID NO: 796148 - DNA, 75 bp, synthetic construct
  source 1..75: mol_type = other DNA
cagcgcgtactggctcagttcatcggtgatggtgaatatctctatcacatcgacgcagggcagaaaaatgagatt

SEQ ID NO: 796149 - DNA, 75 bp, synthetic construct
  source 1..75: mol_type = other DNA
gctgctgacccaccctagccgagccgttgaggtgagctactttggttttgacgaggagacgggcttggaagttcg

SEQ ID NO: 796150 - DNA, 75 bp, synthetic construct
  source 1..75: mol_type = other DNA
gattacctatgctaacccggtgaacccgctactgggtgcgaaggtgctgccgggcgagacggaccttgcgctgcc

SEQ ID NO: 796151 - DNA, 75 bp, synthetic construct
  source 1..75: mol_type = other DNA
caacgaatggaccatttaaagtaaatggtaagtggacatccggcactcattatacaggtggttccaaacgtctag

SEQ ID NO: 796152 - DNA, 75 bp, synthetic construct
  source 1..75: mol_type = other DNA
tgaaaaatggtatttatggcaatgttggcgatgctttagcggatctaaacaataacacgatacaatgggactccg

SEQ ID NO: 796153 - DNA, 75 bp, synthetic construct
  source 1..75: mol_type = other DNA
gaatgcgaaagagattgctgaaaatgaagtccaaattcatgttaataggctgattcataacttagtaacattaaa

SEQ ID NO: 796154 - DNA, 75 bp, synthetic construct
  source 1..75: mol_type = other DNA
tgccacagatgcgtaatccggttgccagcagcaataaaccgcctacggcgctgaagtctgccatcatcgacggtg

SEQ ID NO: 796155 - DNA, 75 bp, synthetic construct
  source 1..75: mol_type = other DNA
tattgcgttaataaacgaattggccatcatcttcaataaattaggtattgatactgaagatgttttaaaagctgc

SEQ ID NO: 796156 - DNA, 75 bp, synthetic construct
  source 1..75: mol_type = other DNA
cttatcaggctagattcggagctgtcggagatcctcatgctcggtggaaatttgcagaagagaaacgacgccggg

SEQ ID NO: 796157 - DNA, 75 bp, synthetic construct
  source 1..75: mol_type = other DNA
atggctttaatggcgcaaaccctcgcctgcttgaaaagcttatctcgcgaaaagatgtaaacgtattccggcttc

SEQ ID NO: 796158 - DNA, 75 bp, synthetic construct
  source 1..75: mol_type = other DNA
gaacagaggacgggcaggtaaaagcggcgcaggagcatgcaaaaaatatcatgtcctgcagcattgccccaggta

SEQ ID NO: 796159 - DNA, 75 bp, synthetic construct
  source 1..75: mol_type = other DNA
tcacaacgatgaaatcggttacagaaacgccattggtcgagcgtattatggagtttatcatgaaacgcttgataa

SEQ ID NO: 796160 - DNA, 75 bp, synthetic construct
  source 1..75: mol_type = other DNA
gattagcggcgctcaggaagacgttaccggaaatggcgttttcaggcagtcggcaaaaagcacttcgcagaacat

SEQ ID NO: 796161 - DNA, 75 bp, synthetic construct
  source 1..75: mol_type = other DNA
tgagtaaagatcttattccagctaaaatggatgggtattatttttcaccacaagaagatgtatgggtacttgaca

SEQ ID NO: 796162 - DNA, 75 bp, synthetic construct
  source 1..75: mol_type = other DNA
aatctttacttgctaaaaaaaatgatgaacttaaagtaattgccgaatctattggtgttgatggagctgataaaa

SEQ ID NO: 796163 - DNA, 75 bp, synthetic construct
  source 1..75: mol_type = other DNA
ttggagttaaaggattttaatgatgttgagaataacctgctgggtggtggaacagaggacgggcaggtaaaagcg

SEQ ID NO: 796164 - DNA, 75 bp, synthetic construct
  source 1..75: mol_type = other DNA
aattgtcctgatattcgcaacacgaaaattatcgatatagtatcagaattaaaagactataatgtaaatgttgat

SEQ ID NO: 796165 - DNA, 75 bp, synthetic construct
  source 1..75: mol_type = other DNA
ccggtgttctttacccctgtcgataaacagggtggtttaaaagaagcggaactgaaatcgctgattttagagcaa

SEQ ID NO: 796166 - DNA, 75 bp, synthetic construct
  source 1..75: mol_type = other DNA
taatagtgatattagggattgttttgtggagatgcttcaggataaaaatgaggaagtccgtattgaagcaataat

SEQ ID NO: 796167 - DNA, 75 bp, synthetic construct
  source 1..75: mol_type = other DNA
acagcatttgctatttctgttatcaatgataaagcaacaattccactattgattaatctgttaaaagatccaaat

SEQ ID NO: 796168 - DNA, 75 bp, synthetic construct
  source 1..75: mol_type = other DNA
ccggtgggacagccgggaccagctgaccgggtattgcagcgcacagggtgagcagtgggaataccgccacgacgc

SEQ ID NO: 796169 - DNA, 75 bp, synthetic construct
  source 1..75: mol_type = other DNA
atgtacttcactgccgcaccggaaaatcgggtaaaagtggcgggcttgctgattcccgcaaccttaaccgccatg

SEQ ID NO: 796170 - DNA, 75 bp, synthetic construct
  source 1..75: mol_type = other DNA
actacgccctgttcgatgccggaaaaatcagcggcactgcctgcctcaacgtcggtggtcgcctgctggaaaccg

SEQ ID NO: 796171 - DNA, 75 bp, synthetic construct
  source 1..75: mol_type = other DNA
taggtgcaaaagttttactttcaagcagtaatattcaatctaaacatgccgttataaatatccaaaccagacctg

SEQ ID NO: 796172 - DNA, 75 bp, synthetic construct
  source 1..75: mol_type = other DNA
gatagctaattttggagaaataaaagccatcgctcattgcttgcagcgttctaaaaatatttttggtataaactt

SEQ ID NO: 796173 - DNA, 75 bp, synthetic construct
  source 1..75: mol_type = other DNA
ttacaacgatcttgatggagttgataccagtatcatatttccattaagtgaggtttcgcatgcttcttggttcaa

SEQ ID NO: 796174 - DNA, 75 bp, synthetic construct
  source 1..75: mol_type = other DNA
cagtcgaaactcatagactcaatatcatgaagaaattagatgttcacagtggtatcgagttgatcaaaacagctt

SEQ ID NO: 796175 - DNA, 75 bp, synthetic construct
  source 1..75: mol_type = other DNA
acttattttgatagtgtacatatggattgtgaaaaaatatcttccagatattcctctgataatcaacttacaaat

SEQ ID NO: 796176 - DNA, 75 bp, synthetic construct
  source 1..75: mol_type = other DNA
gcgttatcacctggaagccgccatggcctctcacgccgcatcacacgtggccttggtcgcatgccagctcgggtt

SEQ ID NO: 796177 - DNA, 75 bp, synthetic construct
  source 1..75: mol_type = other DNA
ttgttatttctggatgcgtattcctttatactatctttagagataatacaaaggatacgaatgatctattaactc

SEQ ID NO: 796178 - DNA, 75 bp, synthetic construct
  source 1..75: mol_type = other DNA
aagaacaatcttaaaaatatgattttcgggacatctgttttaatcgttattatttccccgaatatgattaaaagt

SEQ ID NO: 796179 - DNA, 75 bp, synthetic construct
  source 1..75: mol_type = other DNA
gaagagttgtttaacccatgatatgttggtccgctatggagtaaaagtagaggaatatccagagttgtttcgttc

SEQ ID NO: 796180 - DNA, 75 bp, synthetic construct
  source 1..75: mol_type = other DNA
acacattgtccgatgtgctgagtacatttagaaatgataattttcgtgcatatagttatagtggggacaggagtc

SEQ ID NO: 796181 - DNA, 75 bp, synthetic construct
  source 1..75: mol_type = other DNA
aaacgtgaagaggaattgcgccggaaggagcaggaggatacagaacgtagtcgcgcggagcgacgagcggaacag

SEQ ID NO: 796182 - DNA, 75 bp, synthetic construct
  source 1..75: mol_type = other DNA
gcactgaccgataaggggttacggtatgcagggtatggtgttgccgtaaatcacgatgcagacaatcacatttca

SEQ ID NO: 796183 - DNA, 75 bp, synthetic construct
  source 1..75: mol_type = other DNA
gagcctgataatagatatttaaagcatttaactcatgaaggcgttgaagttgagtttatgacaatagacataaca

SEQ ID NO: 796184 - DNA, 75 bp, synthetic construct
  source 1..75: mol_type = other DNA
atactcgaaattcttcagacaatttttgggccagtttggaacctggaatcaatctcggatcttggcgaatcagaa

SEQ ID NO: 796185 - DNA, 75 bp, synthetic construct
  source 1..75: mol_type = other DNA
acgcttgcactgggatatcacggaagaaatacactcaggtagtaataataagacgagtaataggcgactgaatct

SEQ ID NO: 796186 - DNA, 75 bp, synthetic construct
  source 1..75: mol_type = other DNA
aataaatcatttgaattgacggacaccagttttactgttgcaagttatcagtattcttcggcaggataccattct

SEQ ID NO: 796187 - DNA, 75 bp, synthetic construct
  source 1..75: mol_type = other DNA
tatctgaaaacctgtctgacccgggaaatgctggcccgctatggtgtcatgacggaggaatatccggagttgttt

SEQ ID NO: 796188 - DNA, 75 bp, synthetic construct
  source 1..75: mol_type = other DNA
atttaaacctctggatgagtattcctatgaaacgctggttggggggggatgataaaggggtaacagctacagcac

SEQ ID NO: 796189 - DNA, 75 bp, synthetic construct
  source 1..75: mol_type = other DNA
cgtaatggtactgcatacaggagttatgataatagaattcggcggaccacaataaacataagtcaagcgcttggt

SEQ ID NO: 796190 - DNA, 75 bp, synthetic construct
  source 1..75: mol_type = other DNA
cactgggctttaatcacacctgggacgaatggcggcgcgaggaatatacacgaacacgtgtctccgaaaagaaga

SEQ ID NO: 796191 - DNA, 75 bp, synthetic construct
  source 1..75: mol_type = other DNA
acaggaaacagttggttatcatggtgatgcttgctgttctggtcatatcaggagttgcagcctggaatgtacacg

SEQ ID NO: 796192 - DNA, 75 bp, synthetic construct
  source 1..75: mol_type = other DNA
gcagccgccagtacgatgccgggtatgcgcaggcggaagaagaccgcaaagccgaagaagacaaagttcgtcagt

SEQ ID NO: 796193 - DNA, 75 bp, synthetic construct
  source 1..75: mol_type = other DNA
tgcgcaggcgaaggaagaccgcaaagctgaagatgagatagttcgtcagcactacgaacaggagaaagcgaccaa

SEQ ID NO: 796194 - DNA, 75 bp, synthetic construct
  source 1..75: mol_type = other DNA
tgcgcaggcgaaggaagatcagaaacaggctgatgataagttcaggtcacagcgtgagcaggagaaaacacaaat

SEQ ID NO: 796195 - DNA, 75 bp, synthetic construct
  source 1..75: mol_type = other DNA
atgcttgaagaaagcaaccgagcttacatcgcagcagcagaagaggctgagcgatatcggtctgcaggactcaca

SEQ ID NO: 796196 - DNA, 75 bp, synthetic construct
  source 1..75: mol_type = other DNA
tgaacgtgaagcacaatcccgtatcgatgtggcgcgtgttgatgctgagcatgctaatgccgctgctgacagcct

SEQ ID NO: 796197 - DNA, 75 bp, synthetic construct
  source 1..75: mol_type = other DNA
tcacccgcttcagatgttcgaggttgaacagcagggtaatgaaatggtggtctatgctgcccctcgtgatgtgcg

SEQ ID NO: 796198 - DNA, 75 bp, synthetic construct
  source 1..75: mol_type = other DNA
gcagccggtgttgcaggggaaagcgcgggtgacatttcactcgccggatctggcgaatctcgtaaacaatcccac

SEQ ID NO: 796199 - DNA, 75 bp, synthetic construct
  source 1..75: mol_type = other DNA
cgccggttatcaggaagagatagaccatcgttcatacgagcgacagggggttgagaaaacgcctggcattcacct

SEQ ID NO: 796200 - DNA, 75 bp, synthetic construct
  source 1..75: mol_type = other DNA
tcacccgcttcaggtgttcgaggttgatgtcacgaacggtgcaatagtgatccacacccaacgcctgaaatcaga

SEQ ID NO: 796201 - DNA, 75 bp, synthetic construct
  source 1..75: mol_type = other DNA
gcaacttctgacgcaggtttgccagacatggccgcaatatacccgcaatctccgccagccgaagacatggccgga

SEQ ID NO: 796202 - DNA, 75 bp, synthetic construct
  source 1..75: mol_type = other DNA
gaagaccgccagccagccatgccatcactggcagcaaggaaggtggattttacgcagggacgtctgccaccgacg

SEQ ID NO: 796203 - DNA, 75 bp, synthetic construct
  source 1..75: mol_type = other DNA
aggtgacgccgggaagtgagacgaacagtgacagcagtcgtctgaatctgacctggtacggtacatacggcgaag

SEQ ID NO: 796204 - DNA, 75 bp, synthetic construct
  source 1..75: mol_type = other DNA
aaaacagctcgggccggagtttcagcgccagctattaatgtgtctgtatgagttgctcgaaatggtgcaaaacgg

SEQ ID NO: 796205 - DNA, 75 bp, synthetic construct
  source 1..75: mol_type = other DNA
gtgaatggtataacaaagcaccaacgcatcatccgtcctaccgttatcttcggtgaacgcaaccgcggtaacgtc

SEQ ID NO: 796206 - DNA, 75 bp, synthetic construct
  source 1..75: mol_type = other DNA
gtttcaggaggaaaggggaaacgtgctggtgtcagggttatttactttcatcaggttaaacattatgagatcaga

SEQ ID NO: 796207 - DNA, 75 bp, synthetic construct
  source 1..75: mol_type = other DNA
ggcaaaccgacgctgttggcggtggacgccgggcgtaagctgctgcatctggcgtccaaaccgaccttcgccaac

SEQ ID NO: 796208 - DNA, 75 bp, synthetic construct
  source 1..75: mol_type = other DNA
actggaaggcattctcgatcaggaactggacaccgcggaagagtcgctgctaacgccgtcgcgctcgctgcaacg

SEQ ID NO: 796209 - DNA, 75 bp, synthetic construct
  source 1..75: mol_type = other DNA
acgccgggcgtaagctgctgcatctggcgtccaaaccgaccttcgccaacctcgatgcgtgggtgaatgcgatgc

SEQ ID NO: 796210 - DNA, 75 bp, synthetic construct
  source 1..75: mol_type = other DNA
gtccgggagcgaaagaaagcgaagggaattttatatgtcgggtatgagcggggacgcctgttcggccgcgagctg

SEQ ID NO: 796211 - DNA, 75 bp, synthetic construct
  source 1..75: mol_type = other DNA
cgaagtcgggttcagaaacctgaaaagcagcctgctgaacaatgccctggtgctgagaagccgtaaggttgagct

SEQ ID NO: 796212 - DNA, 75 bp, synthetic construct
  source 1..75: mol_type = other DNA
gcttatgccaccgccctctgcacaactgtttgcagagcaccttcccgtcgagtggatacagcactgtctgacgct

SEQ ID NO: 796213 - DNA, 75 bp, synthetic construct
  source 1..75: mol_type = other DNA
agtcatttacccgccagcattttccagatttcacgtagcgacgcctggaatttaaccctctctcccgatgcagcc

SEQ ID NO: 796214 - DNA, 75 bp, synthetic construct
  source 1..75: mol_type = other DNA
caacaagtgcttgataaggctttggctgggtttgataccgttgttttgcttgcggcggaacatcgtgatgacgta

SEQ ID NO: 796215 - DNA, 75 bp, synthetic construct
  source 1..75: mol_type = other DNA
aaagtaagtggcaggctgaagaagttttgcgtgaatggtataacaaagcgccaacagaacgttcattaaccatca

SEQ ID NO: 796216 - DNA, 75 bp, synthetic construct
  source 1..75: mol_type = other DNA
atcgagcagccggaagagagcaccattttccagaaatacccgctgatattaacccagaagcggctggtgactttt

SEQ ID NO: 796217 - DNA, 75 bp, synthetic construct
  source 1..75: mol_type = other DNA
aagctcatggagcaaagaggatggtcaatcttcagaaagtgaaagtgtttacacctatgcagagcgtggtattac

SEQ ID NO: 796218 - DNA, 75 bp, synthetic construct
  source 1..75: mol_type = other DNA
ctttctgtttttgagagtaattctcagttgcctggggtatatcatgttgacattgtacttaatggcaagttgatt

SEQ ID NO: 796219 - DNA, 75 bp, synthetic construct
  source 1..75: mol_type = other DNA
ataatatctctaatctttattttgctgtttttacatcatttttttgccttctttcagtaaacgcagatgcgaaaa

SEQ ID NO: 796220 - DNA, 75 bp, synthetic construct
  source 1..75: mol_type = other DNA
gatatctccctgtcagttaactggtcgcgaaaccgcaacgcgggtggctattacggctggcggcagggaaaaaca

SEQ ID NO: 796221 - DNA, 75 bp, synthetic construct
  source 1..75: mol_type = other DNA
ctcgacggaatatttgctcgtggacagaaaaaagataaaaatacagatgaggggtattcatggcgtgtaagatat

SEQ ID NO: 796222 - DNA, 75 bp, synthetic construct
  source 1..75: mol_type = other DNA
cgacagaatggttatctcattcatacagttagtgtcgcccccggtgcttttgcactttatgatatccctgttaca

SEQ ID NO: 796223 - DNA, 75 bp, synthetic construct
  source 1..75: mol_type = other DNA
agtgaaggacgggacacctggtgttattgccggtgcagtaacaaacctgcttaccctcggtgtcaatctgataac

SEQ ID NO: 796224 - DNA, 75 bp, synthetic construct
  source 1..75: mol_type = other DNA
atgaaagcactgaatcagttgcgtagtgtggttgatggcacattcactttcctaagcgaaaacggctatattatg

SEQ ID NO: 796225 - DNA, 75 bp, synthetic construct
  source 1..75: mol_type = other DNA
tctaaaggcagcgctggccgcattcgataacctggacgagaacctgaaaaaccactggttactggaatctgcaaa

SEQ ID NO: 796226 - DNA, 75 bp, synthetic construct
  source 1..75: mol_type = other DNA
ggcagtgggagagtgcctatattcgtgcggagcgggggattaacagtctcagaagtcgtctgacgctgggtgagg

SEQ ID NO: 796227 - DNA, 75 bp, synthetic construct
  source 1..75: mol_type = other DNA
aacagcctgggatatatcccgttaatattattctaaatggcgattatgttggatcagaaaacataacattttatt

SEQ ID NO: 796228 - DNA, 75 bp, synthetic construct
  source 1..75: mol_type = other DNA
aacggggattatgggcagatgaaaatccggtgccaccatgggcctggaggaaacagaataaaaaaaataatcact

SEQ ID NO: 796229 - DNA, 75 bp, synthetic construct
  source 1..75: mol_type = other DNA
ttgcgggcggcaccgggttctcttatgcccgctcgattttgctgacggcgctggcgcgtaacccaaaccgtgata

SEQ ID NO: 796230 - DNA, 75 bp, synthetic construct
  source 1..75: mol_type = other DNA
ccacggagaagcgtggctgcgcgatgatgaagagcgtccgatgattttgattgcgggcggtaccgggttctctta

SEQ ID NO: 796231 - DNA, 75 bp, synthetic construct
  source 1..75: mol_type = other DNA
ttgcgggcggcaccgggttctcctatgcgcgctcgattttattgacggcgttggcgcgtaatcccaatcgcgata

SEQ ID NO: 796232 - DNA, 75 bp, synthetic construct
  source 1..75: mol_type = other DNA
atgccagcgatcttaattgaaaagcatcgcgccgaccagcaaggcaatattgtccagatagatattgaatattgg

SEQ ID NO: 796233 - DNA, 75 bp, synthetic construct
  source 1..75: mol_type = other DNA
gctaaccgctcacaggcattattccgcgaactgtatccggcgctaaaacaaattcaatcgaactattccggcaga

SEQ ID NO: 796234 - DNA, 75 bp, synthetic construct
  source 1..75: mol_type = other DNA
gaattctggacgatttgttatcggtaagcactactttttacttgagaatgaggagttgcgcgaatttaagcacag

SEQ ID NO: 796235 - DNA, 75 bp, synthetic construct
  source 1..75: mol_type = other DNA
aggagttgcgcgaatttaagcacagcatgtctttaagaccttctgtgaaaatcgcccgtaacgttcgctccctca

SEQ ID NO: 796236 - DNA, 75 bp, synthetic construct
  source 1..75: mol_type = other DNA
gtgatgaactcagaaatttgcgactagttttaaacgagtcgcaaaatgaggtgagaatctctcctaaaactcgct

SEQ ID NO: 796237 - DNA, 75 bp, synthetic construct
  source 1..75: mol_type = other DNA
tcacgcaaaaatgctcgaaaccgatcgggcgtgggaggtattcgaaaaactggaagactgctatttcagccaggg

SEQ ID NO: 796238 - DNA, 75 bp, synthetic construct
  source 1..75: mol_type = other DNA
cgtgggcgtactggcaccgtgttaacggcggtattgcaggatcatggtacgctggcagagcatgatatctatatt

SEQ ID NO: 796239 - DNA, 75 bp, synthetic construct
  source 1..75: mol_type = other DNA
tcaccatttactggggcgggcgtgaagagcagcatctgtatgatctctgcgagcttgaggcgctttcgttaaagc

SEQ ID NO: 796240 - DNA, 75 bp, synthetic construct
  source 1..75: mol_type = other DNA
atggcctcgacgccggatgaaaaagggtttatcgagctgcatattggcgcttctgaaatcaacctttacgcgaaa

SEQ ID NO: 796241 - DNA, 75 bp, synthetic construct
  source 1..75: mol_type = other DNA
cagcaaggcaatattgtccagatagatattgaatattggcgatttgaggccgtagacctcatcattaatctgtag

SEQ ID NO: 796242 - DNA, 75 bp, synthetic construct
  source 1..75: mol_type = other DNA
ctggatagcgccttacgttcaggtcgccatatcggtcttgacgaactggacaaccatgcattcctgatggatttt

SEQ ID NO: 796243 - DNA, 75 bp, synthetic construct
  source 1..75: mol_type = other DNA
accctggccgatgaagcaaaattgctgaaactggtgaacaatcgttctactggttcagacgttgaccggcagaag

SEQ ID NO: 796244 - DNA, 75 bp, synthetic construct
  source 1..75: mol_type = other DNA
gctggcgaatccgttatttccggtgctggacagcgccttacgttcaggccgccatattggcctcgacgaactgga

SEQ ID NO: 796245 - DNA, 75 bp, synthetic construct
  source 1..75: mol_type = other DNA
acttcagttgaaggcaagcaggagcactacttcaccacacgtcttactgacgcgacgattgtggacatgaacctg

SEQ ID NO: 796246 - DNA, 75 bp, synthetic construct
  source 1..75: mol_type = other DNA
catatgccgcattgccaggacccggcgaaacgcgagttcacccagttgctcgaagtttcactggcctaccgcaaa

SEQ ID NO: 796247 - DNA, 75 bp, synthetic construct
  source 1..75: mol_type = other DNA
aagcaatgccgattgaaaatcatctgcaactcaacgatgaaaccgaagagagtcagccagatagcggagaggaag

SEQ ID NO: 796248 - DNA, 75 bp, synthetic construct
  source 1..75: mol_type = other DNA
tgcaccgctggatgtcacgaacggtgcaatagtgatccacacccaacgcctgaaatcagatccagggggtaatct

SEQ ID NO: 796249 - DNA, 75 bp, synthetic construct
  source 1..75: mol_type = other DNA
atcttgatgaccagcgggttgaatattgagtggtcaacctttatggcttctatgctggtcggcaccattggtatt

SEQ ID NO: 796250 - DNA, 75 bp, synthetic construct
  source 1..75: mol_type = other DNA
ttaaccaactttcttacggcgtcatcaattgttggagcattatccatcggcctttccattcctggattatggttg

SEQ ID NO: 796251 - DNA, 75 bp, synthetic construct
  source 1..75: mol_type = other DNA
aagttaaacgctatcttgcaagcccggcggcggtgggggaatatctcgccgaccagctggtactgccaatggcgg

SEQ ID NO: 796252 - DNA, 75 bp, synthetic construct
  source 1..75: mol_type = other DNA
tttttcctcagattcactaccggggaagtgggaacacagaaaatttcggttcatgtacattttgcgatgttctat

SEQ ID NO: 796253 - DNA, 75 bp, synthetic construct
  source 1..75: mol_type = other DNA
ccaaccgatccgcagtctggtcagccttccgggcagcgtgctcacaaaccgttcattttcaccgtggcgctgaac

SEQ ID NO: 796254 - DNA, 75 bp, synthetic construct
  source 1..75: mol_type = other DNA
agccgcagattcagccacaattcacagccgaggaaatcatcctcctttgttacatgcaactctggatggaaaaag

SEQ ID NO: 796255 - DNA, 75 bp, synthetic construct
  source 1..75: mol_type = other DNA
cagggcggctattcacgctatcaggaaaacatggcactgcgtgataccgccggaatggatgtgtcaccgtgggag

SEQ ID NO: 796256 - DNA, 75 bp, synthetic construct
  source 1..75: mol_type = other DNA
ttgcacctggcatgaagagttcagcgtttgtgccggatcagttaattgccggtacgctgcaactggtcacggata

SEQ ID NO: 796257 - DNA, 75 bp, synthetic construct
  source 1..75: mol_type = other DNA
tcgactgccattgcgctggccttcttcggtgtcgggtcgatggtgtctgcactggttctcccgagactcctcgac

SEQ ID NO: 796258 - DNA, 75 bp, synthetic construct
  source 1..75: mol_type = other DNA
gccgacagagctgaacgatatcagacttgttcgcgaaactattcgcacgttaggccagcgtgtgcgggaaggtta

SEQ ID NO: 796259 - DNA, 75 bp, synthetic construct
  source 1..75: mol_type = other DNA
tgcatggagtaaattgttcattgaacgttacggctttactaacgcgacagaagtggcgatggcctgtgcaacgtt

SEQ ID NO: 796260 - DNA, 75 bp, synthetic construct
  source 1..75: mol_type = other DNA
acgccagcaggcggcgtctcttgccaaaaacatgacggtgaactttaaccgtcgtggtgagcagggggcgctgat

SEQ ID NO: 796261 - DNA, 75 bp, synthetic construct
  source 1..75: mol_type = other DNA
atgaaacgtgttgtaatgccagcgctggtattgtggatcccggccctgcccctggtgctggcgacattaccgttc

SEQ ID NO: 796262 - DNA, 75 bp, synthetic construct
  source 1..75: mol_type = other DNA
tttgtctgacacagattttaaaaaaatcggtgatgaggcaaaaaaagtcgcatcctcattcaagggtagtgtagg

SEQ ID NO: 796263 - DNA, 75 bp, synthetic construct
  source 1..75: mol_type = other DNA
acagcaagcggattatggattgcacaacccagaacaagataagctggttgaagatatgggcggcaataaagaatt

SEQ ID NO: 796264 - DNA, 75 bp, synthetic construct
  source 1..75: mol_type = other DNA
caggaagctgtaagtactcatataggtgaagtatggcaaaatttactattgagtgggacccgtttagttaagctg

SEQ ID NO: 796265 - DNA, 75 bp, synthetic construct
  source 1..75: mol_type = other DNA
taatcctagaattaggttgcatgaagcaattgcgaagaactgtaacaacattgattcgattatatttattgttga

SEQ ID NO: 796266 - DNA, 75 bp, synthetic construct
  source 1..75: mol_type = other DNA
tcaattcacgctttggctggcgcaacacccgtaagcttcttggttcatcactgggtgtaacggcccaaggattac

SEQ ID NO: 796267 - DNA, 75 bp, synthetic construct
  source 1..75: mol_type = other DNA
gtagtcacgccagcggaatatcagacgattattaagaccgtgctgaaaacccgtgacagtgataacgccaccatc

SEQ ID NO: 796268 - DNA, 75 bp, synthetic construct
  source 1..75: mol_type = other DNA
aatcgcgcttgcagctgtgggagcgggttatctgcttggctcgcttaatcggagtgtggctggggaggatgatga

SEQ ID NO: 796269 - DNA, 75 bp, synthetic construct
  source 1..75: mol_type = other DNA
tgtttttctccgatcccaatcgctggaaggacaacagcacgtcgttcagcctgggcgatgtattgccaactatgg

SEQ ID NO: 796270 - DNA, 75 bp, synthetic construct
  source 1..75: mol_type = other DNA
gccggtattgcgccaccttggcgcaccagatttgccgctggttatctcccgcgacactgtgcggaaggctaccaa

SEQ ID NO: 796271 - DNA, 75 bp, synthetic construct
  source 1..75: mol_type = other DNA
aaggttacacgccgcgtgaggatggcgctggcgcatcgtctcagtactcccgtagtggtaaacctgatccgttta

SEQ ID NO: 796272 - DNA, 75 bp, synthetic construct
  source 1..75: mol_type = other DNA
ctgaggcgcaacccggtaaccagaatcgtaacagcctgaacattcagcaacccggcgaaactgacagctatgaag

SEQ ID NO: 796273 - DNA, 75 bp, synthetic construct
  source 1..75: mol_type = other DNA
atgtcactctgcgaaaagtgctgaccgccgggctggagaaaaaatacatcgcggcagggatgcagccggaaagag

SEQ ID NO: 796274 - DNA, 75 bp, synthetic construct
  source 1..75: mol_type = other DNA
tctatcctgaagatattcgcaaggggccgtattactcccgcaccagcagtctgacgccggaagagacaattgcat

SEQ ID NO: 796275 - DNA, 75 bp, synthetic construct
  source 1..75: mol_type = other DNA
cttgatgccgtggataaaaatggtgatccggtggtgtcagcggtacacatgaaggctgtccggtcgcgtctggaa

SEQ ID NO: 796276 - DNA, 75 bp, synthetic construct
  source 1..75: mol_type = other DNA
tttgccaacgccagcattcaggggaccgcaaacctggtgagaacgctcggacatcttaatggcgacgggccgtta

SEQ ID NO: 796277 - DNA, 75 bp, synthetic construct
  source 1..75: mol_type = other DNA
ggcaacggtgaacacgtcgtataacccggaattcctggtcagtaacttcatccgtgacgtgcagacggcggtgat

SEQ ID NO: 796278 - DNA, 75 bp, synthetic construct
  source 1..75: mol_type = other DNA
tctggtcaatatccgtaaggcacctgagcacaacacagataacacctgggcttatccgacgaatgcggaactgga

SEQ ID NO: 796279 - DNA, 75 bp, synthetic construct
  source 1..75: mol_type = other DNA
gggaacggcaaatctggtgagaacgctcggacatcttaatggtgagggacctttactggagcgccttcgctggaa

SEQ ID NO: 796280 - DNA, 75 bp, synthetic construct
  source 1..75: mol_type = other DNA
ggtatatacgatgaaaatcctgctaatgacctaaatggaataccttttgttggagatttatcgaaattaatttca

SEQ ID NO: 796281 - DNA, 75 bp, synthetic construct
  source 1..75: mol_type = other DNA
tgagaagataaaaaatttaataaaacaattaactgatacaacctgttcagttatgttaatacccgatatctttac

SEQ ID NO: 796282 - DNA, 75 bp, synthetic construct
  source 1..75: mol_type = other DNA
tgagaaaattataaaagatcttgtgtcaaaacttacagatactacctgttcagtgttacttataccggatgtgtt

SEQ ID NO: 796283 - DNA, 75 bp, synthetic construct
  source 1..75: mol_type = other DNA
aagagctgtttggtgaaaactgtagctactttgaactcgaaaatcctagtagtttagttgatgctatcgaaaatg

SEQ ID NO: 796284 - DNA, 75 bp, synthetic construct
  source 1..75: mol_type = other DNA
atgaaaattgcaattttagtaaacagtttagaaattaaagggcctgtcatagttgcagttaatctagcaaagcaa

SEQ ID NO: 796285 - DNA, 75 bp, synthetic construct
  source 1..75: mol_type = other DNA
ccggcctactacggaaattaggatataacactcgagttgttgcagtggctggatcaactcctgctggaataggtt

SEQ ID NO: 796286 - DNA, 75 bp, synthetic construct
  source 1..75: mol_type = other DNA
ttagccctgttggtccttgttatcttccagatgattggggggattactgacttttatcgctcctggcgaggtgtg

SEQ ID NO: 796287 - DNA, 75 bp, synthetic construct
  source 1..75: mol_type = other DNA
gcaatatcggtccttaattcaggggtatatgcttcgtcataaggttaagccaggtatcactggcttagcacaaat

SEQ ID NO: 796288 - DNA, 75 bp, synthetic construct
  source 1..75: mol_type = other DNA
atttacgataatataaaattggaaagtgccgaatatgacaatgtaccttatgctggaaatatagataaacttatt

SEQ ID NO: 796289 - DNA, 75 bp, synthetic construct
  source 1..75: mol_type = other DNA
gagaaaatggagaagcgaattgaatacgatttgctatacattcgtggttggagtatatggttagatttgaaaatt

SEQ ID NO: 796290 - DNA, 75 bp, synthetic construct
  source 1..75: mol_type = other DNA
tgaaaaaaaattgaaaaaaattgttagggagttaacggacacaacttgttctgtaatgttgattcctgatatttt

SEQ ID NO: 796291 - DNA, 75 bp, synthetic construct
  source 1..75: mol_type = other DNA
atgctgtagcacacaatgaacaatatcgaattttaattgatggatatatgttacgtcataaagttaaacccggaa

SEQ ID NO: 796292 - DNA, 75 bp, synthetic construct
  source 1..75: mol_type = other DNA
atttaacattcgaagtcatcataaaatgactgtatatatcacatcactattgagtgttattattgcatcgattgg

SEQ ID NO: 796293 - DNA, 75 bp, synthetic construct
  source 1..75: mol_type = other DNA
ttgatggtattttgaaaagaggaataccgatctatacttctgaacttgtgcaaaagttaagagacaataatgttc

SEQ ID NO: 796294 - DNA, 75 bp, synthetic construct
  source 1..75: mol_type = other DNA
tacgcagaacgatccgcgcgtgacccgcgtggggagttttctgcgccgcacctcgctggacgagctgccgcagtt

SEQ ID NO: 796295 - DNA, 75 bp, synthetic construct
  source 1..75: mol_type = other DNA
tatcaatgtgctgaccggggggatgtcgattgtcggtccacgtccgcacgcagtagcgcataacgaacagtatcg

SEQ ID NO: 796296 - DNA, 75 bp, synthetic construct
  source 1..75: mol_type = other DNA
aattcagatatttgtgatgtaacaggtcaagaccttatgcgcttgtggccagaacagggaataagacttcttgct

SEQ ID NO: 796297 - DNA, 75 bp, synthetic construct
  source 1..75: mol_type = other DNA
atcgctaaagctgcgattgattctaatagacacatccccggcttgttatcgaagtgcagattacagcccaagtct

SEQ ID NO: 796298 - DNA, 75 bp, synthetic construct
  source 1..75: mol_type = other DNA
gacggcagcgtcacgcagagtcagtttgacgccgtgggcaggctcaggacacagacggatgccgcaggccggaca

SEQ ID NO: 796299 - DNA, 75 bp, synthetic construct
  source 1..75: mol_type = other DNA
ggcagcatgagaccagacatgcgtacaacgcgcagggactggcgaaccgctgtataccggacagcctgcccgccg

SEQ ID NO: 796300 - DNA, 75 bp, synthetic construct
  source 1..75: mol_type = other DNA
accgtgaagggtgaaaccgcagagcggtggcagtatgacgaacgcggctggctgacagacatcagccatatcagc

SEQ ID NO: 796301 - DNA, 75 bp, synthetic construct
  source 1..75: mol_type = other DNA
gacgtcagtagcgagaaacagcagatcctcagccagcttgccgggcgaattcgtcagccaggtttcaccctaaaa

SEQ ID NO: 796302 - DNA, 75 bp, synthetic construct
  source 1..75: mol_type = other DNA
ttaaagtttatgcgccaaagcataaaatgaccgaacgtttcttaaaatcttgcataaaaaagattattatgaaaa

SEQ ID NO: 796303 - DNA, 75 bp, synthetic construct
  source 1..75: mol_type = other DNA
gagccgttacggtcagttgctgagcttcaccgactgttccggttatgtaacccgctatgaccatgaccgttttgg

SEQ ID NO: 796304 - DNA, 75 bp, synthetic construct
  source 1..75: mol_type = other DNA
attgctgtcgttaggtggattttctcttctggcagatttaaatatcgaatatattatttttctacaatggttttt

SEQ ID NO: 796305 - DNA, 75 bp, synthetic construct
  source 1..75: mol_type = other DNA
ttgcacccaccgctgcgggctctgcggtcagcaataccagtatcaacaacaggctgaacaacgggaccagtgtca

SEQ ID NO: 796306 - DNA, 75 bp, synthetic construct
  source 1..75: mol_type = other DNA
aatgcggacaaggtggtgatgcaggacggcgcccgcattgacgtttctgcaacgcagcagggtaacggcggtacg

SEQ ID NO: 796307 - DNA, 75 bp, synthetic construct
  source 1..75: mol_type = other DNA
acaccgttcgtcggcatacccgtgggtgtattcgtcggcatttatgtctttgccaaagtggttcgtctgatttca

SEQ ID NO: 796308 - DNA, 75 bp, synthetic construct
  source 1..75: mol_type = other DNA
ccgcatagccgaacctgcgttgggactggcggaagaggttcccacatccgatcccgtaaagcgtcgccttgcgct

SEQ ID NO: 796309 - DNA, 75 bp, synthetic construct
  source 1..75: mol_type = other DNA
tggagcgtcagcaggcctatgtggcgctggatctccaggagtggaagcaggccgatgaactgacggatgacgtta

SEQ ID NO: 796310 - DNA, 75 bp, synthetic construct
  source 1..75: mol_type = other DNA
gcaaaaaaaaaattcttttgatttggaaataatatgtatagatgcccatgggggcagatatttcgaatattattt

SEQ ID NO: 796311 - DNA, 75 bp, synthetic construct
  source 1..75: mol_type = other DNA
tggcgctggcaggcggttatactgggcatctgggggattattcgaccggcgcggcacaggcgatcatgccgtatg

SEQ ID NO: 796312 - DNA, 75 bp, synthetic construct
  source 1..75: mol_type = other DNA
tttcttaccattttgccaatggtggtaaccccacgcgctgcggtgctctcttccatgcagggcagcttgccgggt

SEQ ID NO: 796313 - DNA, 75 bp, synthetic construct
  source 1..75: mol_type = other DNA
atgtcacaagcaaaagcaaacctgaagaaattacgtcatcgctgttatattccaccaaaacaaaaaatatccagt

SEQ ID NO: 796314 - DNA, 75 bp, synthetic construct
  source 1..75: mol_type = other DNA
gaagttttaactaataatatctggggtatggggcttgatccggcattaattgatttagatagtttccgtaccatt

SEQ ID NO: 796315 - DNA, 75 bp, synthetic construct
  source 1..75: mol_type = other DNA
ccgtttctgacgcgcatgatgatgtcaacattcagaggggattgtgtgctggtggtatcttcgcgcagcttcttc

SEQ ID NO: 796316 - DNA, 75 bp, synthetic construct
  source 1..75: mol_type = other DNA
aaaatggttggcacgacgaagcgtttctggcgcgttgcaccacaggttatgccgtcttcgcctcttatttgctgg

SEQ ID NO: 796317 - DNA, 75 bp, synthetic construct
  source 1..75: mol_type = other DNA
atcccgacgcgacagcttcattccctgtgtacctggtgcatccggaataaatatcgtacaggcgacggctgcgac

SEQ ID NO: 796318 - DNA, 75 bp, synthetic construct
  source 1..75: mol_type = other DNA
aatctgctactggcgaccgcgccgcgctactgtcagtactacaatcaactccatcaactgccgttggttgctctt

SEQ ID NO: 796319 - DNA, 75 bp, synthetic construct
  source 1..75: mol_type = other DNA
tttgttgcctgaccttatggataatcgtgatttacagtttgctgacaagctttgctcatgcagatggtggaatta

SEQ ID NO: 796320 - DNA, 75 bp, synthetic construct
  source 1..75: mol_type = other DNA
tattgataaatcccatcctgcatggtacatgacaaaatttcttgaattgatatcaatgatttatatcatttcaac

SEQ ID NO: 796321 - DNA, 75 bp, synthetic construct
  source 1..75: mol_type = other DNA
acctggggatactatttccgcaccgggatcgtcatgactctgcctgtgctgtttgtaacgctggccgcgctggcg

SEQ ID NO: 796322 - DNA, 75 bp, synthetic construct
  source 1..75: mol_type = other DNA
attgcttgggttaaccgcaatctgtgcctgtctaattggccttgttgccacaattgtccatcaaacacgtaatac

SEQ ID NO: 796323 - DNA, 75 bp, synthetic construct
  source 1..75: mol_type = other DNA
aatgggatacatgcaggcgtttgttaagtacggattgcgtaacctgaaagaagggccgaaattccggaaaagcat

SEQ ID NO: 796324 - DNA, 75 bp, synthetic construct
  source 1..75: mol_type = other DNA
aagccaaaacgccgtttatcagacttgtgcaactctggcatgcggtgaggcgttggcggcggcaaatgcaggccc

SEQ ID NO: 796325 - DNA, 75 bp, synthetic construct
  source 1..75: mol_type = other DNA
cagcaggtggaatttcacgaaaacaaagccaaaacgccgtttatcagacttgtgcaactctggcaggcggtgagg

SEQ ID NO: 796326 - DNA, 75 bp, synthetic construct
  source 1..75: mol_type = other DNA
tatgagcaagctaacaatggacagcgtccagttcatcagagaaaactacattccacgacataaggtttatggagc

SEQ ID NO: 796327 - DNA, 75 bp, synthetic construct
  source 1..75: mol_type = other DNA
ttactgcatgaaaataatggaatatacataacacaaacaacacaaataagttatagtgttttcattattgggctt

SEQ ID NO: 796328 - DNA, 75 bp, synthetic construct
  source 1..75: mol_type = other DNA
aaagggaatgaacgccgtgggttacctgattatcgttacaaagggattgcgatagaacgtgttgccagaatgatc

SEQ ID NO: 796329 - DNA, 75 bp, synthetic construct
  source 1..75: mol_type = other DNA
acaggatgtttgctccggactgctgtcaacgggctgtaaacctcgcttcggagagaatgaacagctggattatgg

SEQ ID NO: 796330 - DNA, 75 bp, synthetic construct
  source 1..75: mol_type = other DNA
aacctgtcgaaagatatatcgctggttactgattaccttgtaaccaattacataaaattggtgaatgccagcagt

SEQ ID NO: 796331 - DNA, 75 bp, synthetic construct
  source 1..75: mol_type = other DNA
tgcgtatccggcagggtgagaagagacaactttttagcctggccattgatggcaaacaaattaataaaattgccg

SEQ ID NO: 796332 - DNA, 75 bp, synthetic construct
  source 1..75: mol_type = other DNA
tcatattttattagtaaattcagaaattacttcggaattacaccaaaacagttttcaataaaagtaaagaataaa

SEQ ID NO: 796333 - DNA, 75 bp, synthetic construct
  source 1..75: mol_type = other DNA
gatattattctcagagagaatgctatcgtaacagcaacactccctgcaaatactgacgaaacaatccccgtcgtt

SEQ ID NO: 796334 - DNA, 75 bp, synthetic construct
  source 1..75: mol_type = other DNA
caatacacttagtttaagaataaaagtattgccagcatcaacttatcccacagggaaagtatcaacgtatttaac

SEQ ID NO: 796335 - DNA, 75 bp, synthetic construct
  source 1..75: mol_type = other DNA
aagctgtcttcactgacgattgggataaaaagccgcgttactcacgtctgctacatggtgttggtattctggccc

SEQ ID NO: 796336 - DNA, 75 bp, synthetic construct
  source 1..75: mol_type = other DNA
aatacggtgccctacacccttggagcgctggaatcggcccaaagcgttgccgaacgtttcggtatttcggtggct

SEQ ID NO: 796337 - DNA, 75 bp, synthetic construct
  source 1..75: mol_type = other DNA
ttttacgagcaaaaaaagatcaggttttacctaaatggattttacattggatttcaacttctgatttcaaaaaac

SEQ ID NO: 796338 - DNA, 75 bp, synthetic construct
  source 1..75: mol_type = other DNA
aattgatggatggggttgaggttgagtggaaaacccttgaggatataactttacgaactagtaatattaaatggc

SEQ ID NO: 796339 - DNA, 75 bp, synthetic construct
  source 1..75: mol_type = other DNA
cgcctttggaatatcaacaagaaataaagcgcagattcacagtaaacgaaaaatcccaaacgggattggaccgcg

SEQ ID NO: 796340 - DNA, 75 bp, synthetic construct
  source 1..75: mol_type = other DNA
cgccattggaatatcagcaagaaattaaacgcagattcacagtaaatgaaaaatctcaaacaggattggaccgcg

SEQ ID NO: 796341 - DNA, 75 bp, synthetic construct
  source 1..75: mol_type = other DNA
ctctttttcagtcagcatactctccatcgtactgacgagcgtacgcagattaacaacgtaagcgtcaacggagca

SEQ ID NO: 796342 - DNA, 75 bp, synthetic construct
  source 1..75: mol_type = other DNA
gagcaggggttacggggggccaaagccttcgatgtttcagagtttggcgcagattttggctacactctggattgc

SEQ ID NO: 796343 - DNA, 75 bp, synthetic construct
  source 1..75: mol_type = other DNA
cctcaatcatgtgcatatcagtgcacgtcgttttcccgagatttttcaatggatcacagggatacaaaccaaaaa

SEQ ID NO: 796344 - DNA, 75 bp, synthetic construct
  source 1..75: mol_type = other DNA
acataaagtatcctgttatttatcaacattgcttaagctggatcggtttcttcaggcaatttataacatgacgac

SEQ ID NO: 796345 - DNA, 75 bp, synthetic construct
  source 1..75: mol_type = other DNA
atcgcccagaccaaaacgctggctaagcttgccaatcatgcggcaaaaaaatggcagcggcagacgggggggggg

SEQ ID NO: 796346 - DNA, 75 bp, synthetic construct
  source 1..75: mol_type = other DNA
cttatgaggtgaacggtatggagaaaacggtgctgacatcactcccggcagaccgctacaaagcaaaagaggtag

SEQ ID NO: 796347 - DNA, 75 bp, synthetic construct
  source 1..75: mol_type = other DNA
catcaacacccatcagtggcctggcaaagctgctattggtcgtctgaaaggtaacgagctggagcaatataattt

SEQ ID NO: 796348 - DNA, 75 bp, synthetic construct
  source 1..75: mol_type = other DNA
atctaagaaatacagataaaaccacattaataacagtggaacatcttgaagctttacttactgttatgtcaacta

SEQ ID NO: 796349 - DNA, 75 bp, synthetic construct
  source 1..75: mol_type = other DNA
aaaaatccgaatattttctgaatgggatgagaaatttctatatccatgcggtgaataaaaaggctctcttttgcc

SEQ ID NO: 796350 - DNA, 75 bp, synthetic construct
  source 1..75: mol_type = other DNA
atgctggttaactccacaaaacctctgcccaaaacgttgttatacgaactggcaccgcatacccacggtcgtttg

SEQ ID NO: 796351 - DNA, 75 bp, synthetic construct
  source 1..75: mol_type = other DNA
gaacagccaagccaacggataagcaatacaaactgaccgatggcagcggtatgcacttgcttgtccatcctaata

SEQ ID NO: 796352 - DNA, 75 bp, synthetic construct
  source 1..75: mol_type = other DNA
aatggtgacgtgtacttccagaagaaagcattctttgaagctaacggtgtacatgttttcagttctaactatgcc

SEQ ID NO: 796353 - DNA, 75 bp, synthetic construct
  source 1..75: mol_type = other DNA
atgtctcaatacgctcacgttgctttaatcgcttatcatttggtggctgatagctcaatgactcctcgtgatgca

SEQ ID NO: 796354 - DNA, 75 bp, synthetic construct
  source 1..75: mol_type = other DNA
atcagtgcccgtcgttttccagagattttccagtggatcacaggaatacaaacccggaatttgccgttaatttca

SEQ ID NO: 796355 - DNA, 75 bp, synthetic construct
  source 1..75: mol_type = other DNA
atacaaaaagaatagattattgggagaatggaactattccctggatgagttctggcgaagtaaatttaaaaaata

SEQ ID NO: 796356 - DNA, 75 bp, synthetic construct
  source 1..75: mol_type = other DNA
tgatacttaagaagatacaaacttttaatggaaaaataaaattcaggcagtttgagggaggcctacttgataaac

SEQ ID NO: 796357 - DNA, 75 bp, synthetic construct
  source 1..75: mol_type = other DNA
gcgtggcggtaaggcaacgcagccggacggccatacgctggcacggctgtgggcgtcgctgccgccggatatccg

SEQ ID NO: 796358 - DNA, 75 bp, synthetic construct
  source 1..75: mol_type = other DNA
atgcggctgcaccggtgtattcttctctgccggaagaactcatgatgcttaaggtcgtactgcatccatctctgc

SEQ ID NO: 796359 - DNA, 75 bp, synthetic construct
  source 1..75: mol_type = other DNA
atcctcctggtgccaaaacactggtgttctggtatgaacatcgggaaaggatcacctgggccacactgtggaatt

SEQ ID NO: 796360 - DNA, 75 bp, synthetic construct
  source 1..75: mol_type = other DNA
atccacctggggcaaaaacactggtcttctggtactcaagtaaggagagaatcacctgggccacattgtggaatc

SEQ ID NO: 796361 - DNA, 75 bp, synthetic construct
  source 1..75: mol_type = other DNA
aatacggaagacgcaacgctacagcttaagaaggcacaggcaaaagccaggacactgatagacgctgcaaaacta

SEQ ID NO: 796362 - DNA, 75 bp, synthetic construct
  source 1..75: mol_type = other DNA
agtctcacactccggcaaaagataagaagttcgtgaagatgtctttgcacatgggcgcggaggatattcgacctt

SEQ ID NO: 796363 - DNA, 75 bp, synthetic construct
  source 1..75: mol_type = other DNA
gcctgcaaagggaagaaggtcgtcagctgcgcatgtaatgactgccaggggcgcggaaaagctgtcagcaagacg

SEQ ID NO: 796364 - DNA, 75 bp, synthetic construct
  source 1..75: mol_type = other DNA
tgagatgggatgaaccagctcctacaatgacaaccctatgttttggttttggtaatggacgttttgggcatcctc

SEQ ID NO: 796365 - DNA, 75 bp, synthetic construct
  source 1..75: mol_type = other DNA
taaacgtattgcttgttcaaagcctggtggaacgtggcgagattggccgatagagttggttgcgtcatgccatat

SEQ ID NO: 796366 - DNA, 75 bp, synthetic construct
  source 1..75: mol_type = other DNA
aaatgacaaaaaatggcctcttctttacgaatttgaacgtttaattcgggatgttaatccagagattgtgacaat

SEQ ID NO: 796367 - DNA, 75 bp, synthetic construct
  source 1..75: mol_type = other DNA
aaatataaaacgaactacttctcctgacaaacgatggaaccttctggaaagctttgggcgcctgatcaatgagat

SEQ ID NO: 796368 - DNA, 75 bp, synthetic construct
  source 1..75: mol_type = other DNA
tcttcctcccattgaagaatggaaaggtaacgtcgtttcacacccggctaaaggccgtgaacaaggtccgagact

SEQ ID NO: 796369 - DNA, 75 bp, synthetic construct
  source 1..75: mol_type = other DNA
acttgttgaccacgctgatggacagccagtagaaccagccagagacaatcagccaagaacagaacgccgcagagc

SEQ ID NO: 796370 - DNA, 75 bp, synthetic construct
  source 1..75: mol_type = other DNA
aacatatcaagagagtgctggataaatggaaccacagcaaagcagcagactatgcagtcggtgatgcttacggtg

SEQ ID NO: 796371 - DNA, 75 bp, synthetic construct
  source 1..75: mol_type = other DNA
acctgcaagccgactacgtatctaaaactgtaaccacatcgcaatcactggcatcacccctcaacgtgacaacct

SEQ ID NO: 796372 - DNA, 75 bp, synthetic construct
  source 1..75: mol_type = other DNA
ttcatccctgaataaaagtcacattaaggcggcttttaaggaggcttacagcaaccctaaattactgaactggta

SEQ ID NO: 796373 - DNA, 75 bp, synthetic construct
  source 1..75: mol_type = other DNA
atactcttaagaaactattacgtaatgaaattcaatggtctgagttaactaacgacgatttctactacgaatata

SEQ ID NO: 796374 - DNA, 75 bp, synthetic construct
  source 1..75: mol_type = other DNA
gaagatcgaaaaaaaggcaagcctagaggaaaaaacaatagcggtaaacgcaggtatggaaacactcaagctgag

SEQ ID NO: 796375 - DNA, 75 bp, synthetic construct
  source 1..75: mol_type = other DNA
gcgaacgtttgcatcgtctcatcgagaaaggcaaggccagcggcgagttgtctccctcgcttgacaacgaggcgg

SEQ ID NO: 796376 - DNA, 75 bp, synthetic construct
  source 1..75: mol_type = other DNA
cgtcatatgagcgatcgggtggcggtgatgtatctcgggcagattgtagaactgggcgacgcgcagcaggtgctg

SEQ ID NO: 796377 - DNA, 75 bp, synthetic construct
  source 1..75: mol_type = other DNA
ggctttccgcaaaagaaacagacagccttgtatggctgtgggattatgccaaccgctcacaggcattgttccgtg

SEQ ID NO: 796378 - DNA, 75 bp, synthetic construct
  source 1..75: mol_type = other DNA
gaggccggacagggcgcttatgacgcacaagtcaggaacgatgagcaggatgtgattctggtcgatcacgaagaa

SEQ ID NO: 796379 - DNA, 75 bp, synthetic construct
  source 1..75: mol_type = other DNA
cacagtgaaatcgtcatacatcgttacggtaccggcgcgatggtgttgtgctggcactgcgacaaccagttgcgt

SEQ ID NO: 796380 - DNA, 75 bp, synthetic construct
  source 1..75: mol_type = other DNA
cagaccggaacgtccacttcggtctcggttataccatcggggtgacagcgcgtgataactggaactacatccctg

SEQ ID NO: 796381 - DNA, 75 bp, synthetic construct
  source 1..75: mol_type = other DNA
agcatgtttttaattattgctgtcgctctgcaatagttaatctggatggtgaaactgctgaacaaagattagcat

SEQ ID NO: 796382 - DNA, 75 bp, synthetic construct
  source 1..75: mol_type = other DNA
tagaattagattctaaaaagtttatgctaataaaccctgcgaacatattaaacttatgcgataaatttattttat

SEQ ID NO: 796383 - DNA, 75 bp, synthetic construct
  source 1..75: mol_type = other DNA
atgggttctatctcaaagaggtgttctttgagcgattagcctcaatggaagagctatctaaaagctatcataaca

SEQ ID NO: 796384 - DNA, 75 bp, synthetic construct
  source 1..75: mol_type = other DNA
gttcgatagcagaaccgggtaaaaccaaagcggccaaagctgaagtggagcgtaacggctacaaaatctgggaac

SEQ ID NO: 796385 - DNA, 75 bp, synthetic construct
  source 1..75: mol_type = other DNA
gctattgaaacgctgatcctcctacgttcgatagcagaaccgggtaaaaccaaagcggcaaaagcagaggtttaa

SEQ ID NO: 796386 - DNA, 75 bp, synthetic construct
  source 1..75: mol_type = other DNA
acgacgagcggacccaccactaccactacgacagccagcaccgtctggtgttctacacgcggatacagcatggcg

SEQ ID NO: 796387 - DNA, 75 bp, synthetic construct
  source 1..75: mol_type = other DNA
gcctcattcagcagtacgttaagcgggcatcttggggtggggtatagccatggtgccggtgtggaatccccgtgg

SEQ ID NO: 796388 - DNA, 75 bp, synthetic construct
  source 1..75: mol_type = other DNA
taccaggcaggtattaaagcctcattcagcagtacgttaagcgggcatttcggggtggggtatagccatggtgcc

SEQ ID NO: 796389 - DNA, 75 bp, synthetic construct
  source 1..75: mol_type = other DNA
aaatttgcatgaccttattaccgggaatgatggagaacgtatagaggaacagacagaacgcataagccgaggata

SEQ ID NO: 796390 - DNA, 75 bp, synthetic construct
  source 1..75: mol_type = other DNA
acaaaatgccagcacttccggctaaaggtaacttgaacctccgtgacatcttagagtcggacttcgcgttcgcgt

SEQ ID NO: 796391 - DNA, 75 bp, synthetic construct
  source 1..75: mol_type = other DNA
cgtttggtactctcaaggtactgcagcgcaggctaagcaaaatcaaagtacacatcatcaactttacacctacta

SEQ ID NO: 796392 - DNA, 75 bp, synthetic construct
  source 1..75: mol_type = other DNA
ggtggccttgctgacagcaatgacagcgacacaaaaacggggttctcgcttctgccgaagtggttttcgcagcgg

SEQ ID NO: 796393 - DNA, 75 bp, synthetic construct
  source 1..75: mol_type = other DNA
tgaatgaagagaacccgcatcagctgcagcagcttatccggctgccggggcagcagtatgatgaggagtccggcc

SEQ ID NO: 796394 - DNA, 75 bp, synthetic construct
  source 1..75: mol_type = other DNA
ttcagcgaactgcgcagctatgacgatcgcctgcgtcactatgctgatatgagaatcagtattgatctcgacgat

SEQ ID NO: 796395 - DNA, 75 bp, synthetic construct
  source 1..75: mol_type = other DNA
tgggaaaatgatggccgtgaacttcttgattttgcagcaagcctgtatggttctccaaccagaacaataaaaaat

SEQ ID NO: 796396 - DNA, 75 bp, synthetic construct
  source 1..75: mol_type = other DNA
tttgattgggtgataccaaaagaatggcgaattaaagatgcgtatataattactccagatggggataaaatctgt

SEQ ID NO: 796397 - DNA, 75 bp, synthetic construct
  source 1..75: mol_type = other DNA
ttgcgcatggctgaaaagacgacttttttattatacaacaccttttttttcatcgttgctggcccttcataaggg

SEQ ID NO: 796398 - DNA, 75 bp, synthetic construct
  source 1..75: mol_type = other DNA
tattgcgctgggccgtctttttcggacgaaccagatagtatcacagctcgcttcatattatggggagcaggaaag

SEQ ID NO: 796399 - DNA, 75 bp, synthetic construct
  source 1..75: mol_type = other DNA
cggcttcgcgtgatgattttcgtgaaaaattcacacccgcacagaacctgaattacacccgccgacgcgcagaac

SEQ ID NO: 796400 - DNA, 75 bp, synthetic construct
  source 1..75: mol_type = other DNA
ctccattcccccaaaaattttgggtggacagtattactggaaccgagtcaaaaatttttagcacctcaggaatgc

SEQ ID NO: 796401 - DNA, 75 bp, synthetic construct
  source 1..75: mol_type = other DNA
tgaatggggcaacctgctgaatgaagagaacccgcatcagctgcagcagctcatccgcctgccgggtcagcagta

SEQ ID NO: 796402 - DNA, 75 bp, synthetic construct
  source 1..75: mol_type = other DNA
tccggcctgtattacaaccaccgctattatgacccgctgcaggggcggtatatcactcaggatccgattgggctg

SEQ ID NO: 796403 - DNA, 75 bp, synthetic construct
  source 1..75: mol_type = other DNA
gtgattgaaaacgacgtatcgattctgcaatctgtgacgcttggcggtacgggtaaatctggtggtgaccgtcac

SEQ ID NO: 796404 - DNA, 75 bp, synthetic construct
  source 1..75: mol_type = other DNA
tccgttcctctggagccgaccgtctatcgacagatttcattactggcgaaagaaactccagtagaaggcagcccg

SEQ ID NO: 796405 - DNA, 75 bp, synthetic construct
  source 1..75: mol_type = other DNA
gctcccgaaattattgcgctttatgatcaaggcgatgagcaggcaagggcgcacgttgagcgttatctggattta

SEQ ID NO: 796406 - DNA, 75 bp, synthetic construct
  source 1..75: mol_type = other DNA
cagaatatagctccacaaatgaaaatatcgacgaagtattcagacgaataaactcaaacgggaagattttatcca

SEQ ID NO: 796407 - DNA, 75 bp, synthetic construct
  source 1..75: mol_type = other DNA
tatggcgcgcgtgttattgccattacgccagcacaaacaccgctggcagaacaggtagatctggtattgccgtta

SEQ ID NO: 796408 - DNA, 75 bp, synthetic construct
  source 1..75: mol_type = other DNA
tatcaaacaacctgttaaaaacagacgagaaacatgcaccgttcggggtggatattattcacattcagaaccccg

SEQ ID NO: 796409 - DNA, 75 bp, synthetic construct
  source 1..75: mol_type = other DNA
cctccgcgccacgcttttgccatgctgtctccacacaacaaggagacattttcatgaaaccattcacttccctta

SEQ ID NO: 796410 - DNA, 75 bp, synthetic construct
  source 1..75: mol_type = other DNA
atgaaattaaaagtcatcgctacactgattgctactgttgccgtgggtgtaagctttaacagcaattttgcttct

SEQ ID NO: 796411 - DNA, 75 bp, synthetic construct
  source 1..75: mol_type = other DNA
tgaactggcagccaaaagcaaggtacaaacatttaaaatccgcttcagcgattgcgccggtcttccaggaaaaag

SEQ ID NO: 796412 - DNA, 75 bp, synthetic construct
  source 1..75: mol_type = other DNA
caggcgcggcaaattcttgcgttaggaactggcggcggttccactatctgttcacaggagattcagtaccgttta

SEQ ID NO: 796413 - DNA, 75 bp, synthetic construct
  source 1..75: mol_type = other DNA
gaatttccaacgggttttacagttggaggtcatggttcgcctacatctatgagtgatgacagaatcaaaaaagga

SEQ ID NO: 796414 - DNA, 75 bp, synthetic construct
  source 1..75: mol_type = other DNA
ggggatggaacctgtatcagtacccactcaatcctattgaacatatagatccgttggggttagcacttgatttga

SEQ ID NO: 796415 - DNA, 75 bp, synthetic construct
  source 1..75: mol_type = other DNA
cggaggagacctggtacgggtgggacggtgacaggctgaccactgtacagacccaacagacaagaatccagacgg

SEQ ID NO: 796416 - DNA, 75 bp, synthetic construct
  source 1..75: mol_type = other DNA
tactcatggtgcagatagtcatggagaatattgggacgaaatattttcaggtaaagatgagaaaatagttaaaag

SEQ ID NO: 796417 - DNA, 75 bp, synthetic construct
  source 1..75: mol_type = other DNA
attggggatgtatgcgctgagtgtaataatggaatactgtcgcaactagatgctgatttcgtaacttgttttaaa

SEQ ID NO: 796418 - DNA, 75 bp, synthetic construct
  source 1..75: mol_type = other DNA
ttgtatccgttctgtttctctctggttgtaacgataaagtgtatgatgttgattattattttgcaaaccaatccg

SEQ ID NO: 796419 - DNA, 75 bp, synthetic construct
  source 1..75: mol_type = other DNA
gcgagtacgacatccgcctctttaaccgtaaacagtaacctgactatgggtacctgtagtgcgaaggtaatggat

SEQ ID NO: 796420 - DNA, 75 bp, synthetic construct
  source 1..75: mol_type = other DNA
tacgtgagggtttttttaatatcggaagatttttggtaagtatgattataactaaaaatagaaaaactttaattt

SEQ ID NO: 796421 - DNA, 75 bp, synthetic construct
  source 1..75: mol_type = other DNA
ttcgaaaaaaaagaaaaaataaaaatagtgcccttgagtgataatataggtctagcagcagctcaaaatttaggt

SEQ ID NO: 796422 - DNA, 75 bp, synthetic construct
  source 1..75: mol_type = other DNA
tgcctttactggttggtttcacacgtgaatatcctgatattaaagtcgagctcacaactgacgattctcttgtcg

SEQ ID NO: 796423 - DNA, 75 bp, synthetic construct
  source 1..75: mol_type = other DNA
cctcgttattatcaagctgtgtttttgtctatttatgaacttcttttcaaccaaaatatgcaattaattgataaa

SEQ ID NO: 796424 - DNA, 75 bp, synthetic construct
  source 1..75: mol_type = other DNA
gtgattgccattacctcgttaaccgattctccgctgcggcggctggcgcatttcacgctcgataccgtttccggt

SEQ ID NO: 796425 - DNA, 75 bp, synthetic construct
  source 1..75: mol_type = other DNA
tagttgatggcgaacgtttagttcacttgatgattgaaaacgaggttggtgtttcctctcgtttagttaaagtgc

SEQ ID NO: 796426 - DNA, 75 bp, synthetic construct
  source 1..75: mol_type = other DNA
tggttcgcggaatgtgttcgctgatccccaatctggaaggcattagcgacaacattcgtgccatcagtattgttg

SEQ ID NO: 796427 - DNA, 75 bp, synthetic construct
  source 1..75: mol_type = other DNA
tggcatcttatttaatgatcgttaccgcaaacgcaccattcttggctgtgtcgtggcaaccatgcaggcgtggca

SEQ ID NO: 796428 - DNA, 75 bp, synthetic construct
  source 1..75: mol_type = other DNA
ctcttgatgtgaatgtttttattgccaatgaaggtatgaagaacgaaggttctcatacgagaaaacttggtcctg

SEQ ID NO: 796429 - DNA, 75 bp, synthetic construct
  source 1..75: mol_type = other DNA
acgcaatcgcctgatacgtatgcttgatgtcgccctcggccttaaactcggcaatggacaggctgcaacaatggc

SEQ ID NO: 796430 - DNA, 75 bp, synthetic construct
  source 1..75: mol_type = other DNA
ccacaaagaagctatatatcagcattatatcaaacatccacaagagctttacaggaaagcataccctcaatctac

SEQ ID NO: 796431 - DNA, 75 bp, synthetic construct
  source 1..75: mol_type = other DNA
acgagtttggctagattaaactatattcatagagtagcctcatgtttgtcagccttttatccatgtcgaggttat

SEQ ID NO: 796432 - DNA, 75 bp, synthetic construct
  source 1..75: mol_type = other DNA
tcgtcgacaagataaaacaacttgaccctaaagacatattttctcctatcgacacaatgataatcagagactcaa

SEQ ID NO: 796433 - DNA, 75 bp, synthetic construct
  source 1..75: mol_type = other DNA
aaagcagcacttgaacatgcaaaaagtgaagttattgacagtttaactgtcgaggaacttaatgtattaaaaaat

SEQ ID NO: 796434 - DNA, 75 bp, synthetic construct
  source 1..75: mol_type = other DNA
cactgcacctgtttatgcagctgatgaaggatccggtgaaattcactttaaaggtgaggttattgaagcgccttg

SEQ ID NO: 796435 - DNA, 75 bp, synthetic construct
  source 1..75: mol_type = other DNA
ccggaattatacaaaactaggcgaattcactccaccaaaaactgatgctggtaccggaagaacgattcatctagt

SEQ ID NO: 796436 - DNA, 75 bp, synthetic construct
  source 1..75: mol_type = other DNA
gcattactggctacattccattctaatgtagaagagtatcataagcttttcaataatgtcgtatcaaaaggttct

SEQ ID NO: 796437 - DNA, 75 bp, synthetic construct
  source 1..75: mol_type = other DNA
caacatagcacaacaacattcagataataatattaattcttttgattttcatcgaggagataaaaaggcagaagc

SEQ ID NO: 796438 - DNA, 75 bp, synthetic construct
  source 1..75: mol_type = other DNA
actgttccaccaccatggaaatgggggttgataccgatcgcgtgatgacgctggcctctcgcagccagcaggcaa

SEQ ID NO: 796439 - DNA, 75 bp, synthetic construct
  source 1..75: mol_type = other DNA
agttcattaacagggactcctttttgcttaagcggctcaatggttctttctatataaaccgtattccagagtgtt

SEQ ID NO: 796440 - DNA, 75 bp, synthetic construct
  source 1..75: mol_type = other DNA
ccgtctggaggacgggaactggcgcttgctggaacgggatatcgtcctggatcaagcggtcatctcctcccataa

SEQ ID NO: 796441 - DNA, 75 bp, synthetic construct
  source 1..75: mol_type = other DNA
ttctccggatatcgacctcgcaccaacgtccagtgaacaaacactgaacttctttgcctggatggaacaaattga

SEQ ID NO: 796442 - DNA, 75 bp, synthetic construct
  source 1..75: mol_type = other DNA
ttcgatagctcagcgaaaaccactggcgcagatccgatactcaacaataccagcactggcgaagccaccggtgtc

SEQ ID NO: 796443 - DNA, 75 bp, synthetic construct
  source 1..75: mol_type = other DNA
ctcggttataaaacggtagaactgaacgagtttattctgccggctaaagccaccaacgctgtcgagcgggtcaaa

SEQ ID NO: 796444 - DNA, 75 bp, synthetic construct
  source 1..75: mol_type = other DNA
acaggcctggcaggaatatccaaaacgtgctggtggtaactcaaaatccgcagccttcaaagcctggaaagcccg

SEQ ID NO: 796445 - DNA, 75 bp, synthetic construct
  source 1..75: mol_type = other DNA
gatgcctataaaaagcggtatgtttcagatgttgagaaaaacaatgctgagatgcagttaattgataagaaaatg

SEQ ID NO: 796446 - DNA, 75 bp, synthetic construct
  source 1..75: mol_type = other DNA
tccgtgcacctgttgcgggtaaaattgcagaaattgtagaaagaacaggtcgttttgttaatgcgggtgatacta

SEQ ID NO: 796447 - DNA, 75 bp, synthetic construct
  source 1..75: mol_type = other DNA
agaaatgtcaatgggattgtttacccagataaagggattattagtattaaaagcaaacaatcaggtactttgtca

SEQ ID NO: 796448 - DNA, 75 bp, synthetic construct
  source 1..75: mol_type = other DNA
cggtaaaactccgatggaacactactttgaacttgctgagaaaattgaaacgatgtctatgaatcacacaaatga

SEQ ID NO: 796449 - DNA, 75 bp, synthetic construct
  source 1..75: mol_type = other DNA
tggtatttgaagaatgatgaaaaaaaaggattcggtgaaaataataatcaaaactttcaatttgccaaaaataag

SEQ ID NO: 796450 - DNA, 75 bp, synthetic construct
  source 1..75: mol_type = other DNA
taactaatattcgcaaaaaccacagccgaaaccatgaacgttttgttattggtaaacattattttttgctggaaa

SEQ ID NO: 796451 - DNA, 75 bp, synthetic construct
  source 1..75: mol_type = other DNA
atgagtcaaatcaccagtcctgcaacttattcaattagtcggccacaggacgtattagcgaaccgagtaataaac

SEQ ID NO: 796452 - DNA, 75 bp, synthetic construct
  source 1..75: mol_type = other DNA
acgcacgggattgtttgttgaacaggttaaagaatggcgggctatctcaattcaggcgcatgaaaagaaattgaa

SEQ ID NO: 796453 - DNA, 75 bp, synthetic construct
  source 1..75: mol_type = other DNA
gcgtctgcaccagcgcgttctgcccgacaggaatattcaccggaatttgaacaggcctggcaggaatatcccaaa

SEQ ID NO: 796454 - DNA, 75 bp, synthetic construct
  source 1..75: mol_type = other DNA
gaatgaggatttaaatttaacgtgttttttccattataaagatgggcagtggcggggtatttttttttttttttt

SEQ ID NO: 796455 - DNA, 75 bp, synthetic construct
  source 1..75: mol_type = other DNA
tatggagcaggttcgtttaaccccattctggttggaagggggcagaaatgcagtgcagaccagatttaattctca

SEQ ID NO: 796456 - DNA, 75 bp, synthetic construct
  source 1..75: mol_type = other DNA
cctggccaatgatcttctccgggaaatgcgtgagtatgatgcatggttacagtgtgactgtattccgggagattc

SEQ ID NO: 796457 - DNA, 75 bp, synthetic construct
  source 1..75: mol_type = other DNA
tgtcgtcactgggtgacttcgcaaacattttccagcatgcctttggtattcagggtgtagtgccgaacaatgaag

SEQ ID NO: 796458 - DNA, 75 bp, synthetic construct
  source 1..75: mol_type = other DNA
gtggaggcgctgagccgggattcatggcgggtaacgctggatgtggcggtggaagagtactaccagaacgagccg

SEQ ID NO: 796459 - DNA, 75 bp, synthetic construct
  source 1..75: mol_type = other DNA
atgctcattcacataaccattctggttctcagtatcagtcttgttacgtatattgcatttaataatataacacga

SEQ ID NO: 796460 - DNA, 75 bp, synthetic construct
  source 1..75: mol_type = other DNA
cacttcttgagaagccgggcgctgcgctgcagctggcagcaaaagttaatgaccagtttgtgcctgagctggaaa

SEQ ID NO: 796461 - DNA, 75 bp, synthetic construct
  source 1..75: mol_type = other DNA
ccgagcgcgataaccatattctgacgctgcgggcggtgattattctgctgtgcctgtgtctggcgggcgtcggct

SEQ ID NO: 796462 - DNA, 75 bp, synthetic construct
  source 1..75: mol_type = other DNA
acggcgaggaggactattcccgcaacctgcgctcgctgcgcgcctacctaacgcccgcctgttacacccgactgg

SEQ ID NO: 796463 - DNA, 75 bp, synthetic construct
  source 1..75: mol_type = other DNA
agcacgattttcaggtgcgtcgcaacggcggtgaactacgcgagcgcactcgtggcgtgtatgaactgcccggcc

SEQ ID NO: 796464 - DNA, 75 bp, synthetic construct
  source 1..75: mol_type = other DNA
acctaaaaatgctgatctgaaagagtctgttattgttatccacaatagcatgaagctgtataaacagattcgtga

SEQ ID NO: 796465 - DNA, 75 bp, synthetic construct
  source 1..75: mol_type = other DNA
agctgatagtaatagaacgcagattgccgaaaatgcccaaaaattcgttttctcaaaatatagttgggaacatgt

SEQ ID NO: 796466 - DNA, 75 bp, synthetic construct
  source 1..75: mol_type = other DNA
gctacgtaagaagcaagataatcttaaattggttatcgttggcgatccttttgccagtaaaaaaggtgaaaaagc

SEQ ID NO: 796467 - DNA, 75 bp, synthetic construct
  source 1..75: mol_type = other DNA
attgtcagtctcgccagagaattttaataattttatttgtagtatttatgttttatttgttacattgctagtatt

SEQ ID NO: 796468 - DNA, 75 bp, synthetic construct
  source 1..75: mol_type = other DNA
cagaagtccgggaaatacatctcagtggtcttgttgagtttcactcgcatactcacacgcatcgacgctgggatt

SEQ ID NO: 796469 - DNA, 75 bp, synthetic construct
  source 1..75: mol_type = other DNA
tctggtaaccggcctagtcagtaatggtccggtccgtacttccgcagacgcaaaggaatattcccatgatgagtg

SEQ ID NO: 796470 - DNA, 75 bp, synthetic construct
  source 1..75: mol_type = other DNA
tttttcgaaagattttataagcgagctaggattaaaaaaatccactgcaaaacttcttcctaagaataccacttt

SEQ ID NO: 796471 - DNA, 75 bp, synthetic construct
  source 1..75: mol_type = other DNA
taatgtagaaatgaaggtaggaaaaaaaataaattattatctctatggagatgcgattcgagagaatgaggctat

SEQ ID NO: 796472 - DNA, 75 bp, synthetic construct
  source 1..75: mol_type = other DNA
aatcgaaataattcatgcaaacacatttcgttcaagaatatattgtgcattggtgaaatacattacttcatgcaa

SEQ ID NO: 796473 - DNA, 75 bp, synthetic construct
  source 1..75: mol_type = other DNA
gttatgcatgtctggggggagcagaaagaagtctgcagtctcttattgaaggatttatagccaaagattataatg

SEQ ID NO: 796474 - DNA, 75 bp, synthetic construct
  source 1..75: mol_type = other DNA
gccggaatacgctatccaacaagaaattcgcagcgggcagctcgttgtgctgaatcgggacgaactggtgatccc

SEQ ID NO: 796475 - DNA, 75 bp, synthetic construct
  source 1..75: mol_type = other DNA
atggaacgacaattaagggcggtacttcacgcatagagggggggactgcaaatggaacaatcattgatggtggag

SEQ ID NO: 796476 - DNA, 75 bp, synthetic construct
  source 1..75: mol_type = other DNA
ttcgccgctcagtactttccttattgatatctgccttgatatatgccccgcccgggatggcggccttcactcatg

SEQ ID NO: 796477 - DNA, 75 bp, synthetic construct
  source 1..75: mol_type = other DNA
attcagggggccagtctagttccgcatgtttatccacgagatgtatcacctattttaataccaatcccctgcccg

SEQ ID NO: 796478 - DNA, 75 bp, synthetic construct
  source 1..75: mol_type = other DNA
atgaggtgaaatacttttcactaaatgattacaaggaagatttatcctcctttgaggtatctatgggaaatatat

SEQ ID NO: 796479 - DNA, 75 bp, synthetic construct
  source 1..75: mol_type = other DNA
catgcgtaaaaaacagtacaactactatcgcgaccagttgttgagttttaaagagggtgaggttgagtggaagac

SEQ ID NO: 796480 - DNA, 75 bp, synthetic construct
  source 1..75: mol_type = other DNA
tctgggataatctgatggatgagtattttttttgtaagtcgttacggagagccacggagtggagttatcgcaagg

SEQ ID NO: 796481 - DNA, 75 bp, synthetic construct
  source 1..75: mol_type = other DNA
cagtacaactactatcgcgaccagttgttgagttttgatgaggagcaggaaaaacctatttatcaggaaaaattg

SEQ ID NO: 796482 - DNA, 75 bp, synthetic construct
  source 1..75: mol_type = other DNA
aaatattctaaacaataattatttataccattttttattgttaaatacagagactatttatatccttgcaggggg

SEQ ID NO: 796483 - DNA, 75 bp, synthetic construct
  source 1..75: mol_type = other DNA
gcagtttgcgcagaacattgcgcgaggcatgccgcagaaagaggcggcgatatgcgctggctactcaccgtcgcg

SEQ ID NO: 796484 - DNA, 75 bp, synthetic construct
  source 1..75: mol_type = other DNA
gcgcagaaggaagtgcgcaaaacttcgcaaagccagatgccacacgtagttgtggttgaggctttttcaccgact

SEQ ID NO: 796485 - DNA, 75 bp, synthetic construct
  source 1..75: mol_type = other DNA
tttggctcgtgtcgctgactttcttgagagagaaatgcatataactaattctgttggttataatgtttatgtgaa

SEQ ID NO: 796486 - DNA, 75 bp, synthetic construct
  source 1..75: mol_type = other DNA
acgcatcgttaaaattgaagaaaaacgcatttcactccaggaagtggaacaacgtctgctggcactggacggtat

SEQ ID NO: 796487 - DNA, 75 bp, synthetic construct
  source 1..75: mol_type = other DNA
gggaattaatatcacacctgtggtttttactggtgttagtggtcatgacgacgctgtgcgtatggatatttaagc

SEQ ID NO: 796488 - DNA, 75 bp, synthetic construct
  source 1..75: mol_type = other DNA
aatatttcctcgactccatccgcgcctggctgatgttgttagggataccttttcatatttctttaatctattcga

SEQ ID NO: 796489 - DNA, 75 bp, synthetic construct
  source 1..75: mol_type = other DNA
ttgaggctgaaatcaacgaagagctcgatgatatttttgcctagcaggaacagcgtaagctgtctaaaacgctga

SEQ ID NO: 796490 - DNA, 75 bp, synthetic construct
  source 1..75: mol_type = other DNA
cgcagggatcatcattgcggtcagcaaagccggtgaatgttcaccgttcatgatagtgcgcaggaccttaattcc

SEQ ID NO: 796491 - DNA, 75 bp, synthetic construct
  source 1..75: mol_type = other DNA
tatgctttcctgcccgtattcccggtggttctggttttggtctttagcccgctggtgatcacatccattaaaatc

SEQ ID NO: 796492 - DNA, 75 bp, synthetic construct
  source 1..75: mol_type = other DNA
gagacatcgcgcagcggggagacagtacgctaccgctacgatgacgcgcacagtgagttaccggcgacgacaacg

SEQ ID NO: 796493 - DNA, 75 bp, synthetic construct
  source 1..75: mol_type = other DNA
aatcgctgggcactttgttttgaaaacagctatctttttattgtagcgttgttggccacgctacactcaggtaaa

SEQ ID NO: 796494 - DNA, 75 bp, synthetic construct
  source 1..75: mol_type = other DNA
acggcgttacacgggcaatcagaaccacgaccacacaagccgggtatggtgtgcgggaatggtacgtctgtcccc

SEQ ID NO: 796495 - DNA, 75 bp, synthetic construct
  source 1..75: mol_type = other DNA
gctcgccacgctacacgccggaaaaacgccggtgcttccggggcataaccgtgtcatccagcttaatgagcaacg

SEQ ID NO: 796496 - DNA, 75 bp, synthetic construct
  source 1..75: mol_type = other DNA
tttgccaagcccatttcgtcattattatgctactcgaaatatctttcttttattaaataaaaaatatgtacccat

SEQ ID NO: 796497 - DNA, 75 bp, synthetic construct
  source 1..75: mol_type = other DNA
gatgtaaaaatattcaatttcaatgataatttaggcatagcagaagcccaaagtataggaatgaaatgggctttt

SEQ ID NO: 796498 - DNA, 75 bp, synthetic construct
  source 1..75: mol_type = other DNA
acttaggagacctgaaaaaagcagtagatcgcacttatgccgaaatgggtatgggtggtgctggtgatgaaatat

SEQ ID NO: 796499 - DNA, 75 bp, synthetic construct
  source 1..75: mol_type = other DNA
ctccttcactgatgcaaatgacgcctccccgcaaaattgatctggccggtgaaaaagccctgctgggcgtggatg

SEQ ID NO: 796500 - DNA, 75 bp, synthetic construct
  source 1..75: mol_type = other DNA
gcccgtctaacctgcgtggtttgcagggggacgtggtgattgatgaggcggcattccatgaagccctggacgaac

SEQ ID NO: 796501 - DNA, 75 bp, synthetic construct
  source 1..75: mol_type = other DNA
cgctaacagccgagcttattttaatcatgatccaagtgctgtttttggtttagataaaaaggatgtcaaaaatgt

SEQ ID NO: 796502 - DNA, 75 bp, synthetic construct
  source 1..75: mol_type = other DNA
aattgatgatattttaaattggtattatgtatctaactttaaaaaaaggaaagatgaaattaatcaatttgctaa

SEQ ID NO: 796503 - DNA, 75 bp, synthetic construct
  source 1..75: mol_type = other DNA
aagcagaactgctggctgaacgattaggcgcacgtctggcgggttgtcgtgtcgtcggttccgtattgccgcagc

SEQ ID NO: 796504 - DNA, 75 bp, synthetic construct
  source 1..75: mol_type = other DNA
acggaaaccggcgtcattgcctggcgttaccgcgaacaagagcaacgccgctggcggccctttccaggtatgcac

SEQ ID NO: 796505 - DNA, 75 bp, synthetic construct
  source 1..75: mol_type = other DNA
gtaataaactatacagtaccagatgaaaatattactattaatacgataaattctactggagagcgaacgcaactt

SEQ ID NO: 796506 - DNA, 75 bp, synthetic construct
  source 1..75: mol_type = other DNA
acgcacacccaaactcaacgtttaaatacaccacgagcagtttgttagacttgatgaactcagaaatcacaacgt

SEQ ID NO: 796507 - DNA, 75 bp, synthetic construct
  source 1..75: mol_type = other DNA
aaagatcccgtacgcagcgtgcccggtgaacatagtgactcagcaatgcagaatatcggcatgctgtttaaccgt

SEQ ID NO: 796508 - DNA, 75 bp, synthetic construct
  source 1..75: mol_type = other DNA
atccgttactattcataactacccagaaaacgaagtgcttcctgaagaagcaaatgcttggcttcctgatttttt

SEQ ID NO: 796509 - DNA, 75 bp, synthetic construct
  source 1..75: mol_type = other DNA
ggggccaggtcagacatcatgtcgggaccgtctgtaacgtggatgccggtacctgctgcccaaggttatctggtt

SEQ ID NO: 796510 - DNA, 75 bp, synthetic construct
  source 1..75: mol_type = other DNA
agtacaaaagacttaaatagaaaaatcctaggcaataaaggtattggacgtttagcaatgatgagacttggggat

SEQ ID NO: 796511 - DNA, 75 bp, synthetic construct
  source 1..75: mol_type = other DNA
ccgtgcgcccaccaaaacaaacgcgatttaacggtgcaaaactggtatggatgctgaaaggcagcccgcttaccg

SEQ ID NO: 796512 - DNA, 75 bp, synthetic construct
  source 1..75: mol_type = other DNA
aaggtttgggtgatagatttagtcagtatttgaagggtattaatatcaaaaacagaacggggataaaaatctctg

SEQ ID NO: 796513 - DNA, 75 bp, synthetic construct
  source 1..75: mol_type = other DNA
gttcaatgtgttggatgaaagcatcgccagactccaaggtgaaatatctgcaaaaagtagtttagtaacggaatt

SEQ ID NO: 796514 - DNA, 75 bp, synthetic construct
  source 1..75: mol_type = other DNA
ttacgaaagaagtttttaaatacatgttcaatgtgttggatgaaagcatcgccagactccaaggtgaaatatctg

SEQ ID NO: 796515 - DNA, 75 bp, synthetic construct
  source 1..75: mol_type = other DNA
gatcagagagtgttgcaagaaaatgataaaagaaacatttaatgtagaactctttgagacatatagagataaaaa

SEQ ID NO: 796516 - DNA, 75 bp, synthetic construct
  source 1..75: mol_type = other DNA
gtgtattagaaagatccagagaggtttctcggctagaaaatattgttgcagaagatagtgaggaaattgaagctg

SEQ ID NO: 796517 - DNA, 75 bp, synthetic construct
  source 1..75: mol_type = other DNA
attttttccctaaaccatacctaaaaaaatataaagaatttggtttcgaaaacagacttcgaactccatatcaca

SEQ ID NO: 796518 - DNA, 75 bp, synthetic construct
  source 1..75: mol_type = other DNA
ttagccatcgtttacacgaccgtctgggtgagccgcagtatacagattcactgcattctcaggggtcggcaagca

SEQ ID NO: 796519 - DNA, 75 bp, synthetic construct
  source 1..75: mol_type = other DNA
gcttcacgcagctggcgctgggaaattacaggctgacagtccgggcggtaaatgcatggggacagccggtgcaca

SEQ ID NO: 796520 - DNA, 75 bp, synthetic construct
  source 1..75: mol_type = other DNA
cgtcgccagcatgacgccggtcgttcagttgttatgacgatgcactcaactgtggatccgctggaaaaagagccg

SEQ ID NO: 796521 - DNA, 75 bp, synthetic construct
  source 1..75: mol_type = other DNA
aaccatcctttacttttgatatttgatacggttggcaaatatttagggaaacagaccaaggaaaaatattcaaaa

SEQ ID NO: 796522 - DNA, 75 bp, synthetic construct
  source 1..75: mol_type = other DNA
tctttcttgtcgatggtgaaactaaagaatatgaagcaaaatctcctgaactcatactttcacaaattgaaaaaa

SEQ ID NO: 796523 - DNA, 75 bp, synthetic construct
  source 1..75: mol_type = other DNA
tattcggcgatggatttacgtgaaattcaggattggattgtaagaccgcaattacagcgcgtaaaaggcgttgcg

SEQ ID NO: 796524 - DNA, 75 bp, synthetic construct
  source 1..75: mol_type = other DNA
ggatggacatgaaagctgttggttatttctgtctaaaaatggtggacctctaagtcgccaacgcttttggcaatt

SEQ ID NO: 796525 - DNA, 75 bp, synthetic construct
  source 1..75: mol_type = other DNA
tgatagcggtcggcagttgcagtgggaaaagcgggtgccgacaccgcgtgacagctatgacgcatttttagatgc

SEQ ID NO: 796526 - DNA, 75 bp, synthetic construct
  source 1..75: mol_type = other DNA
ttcgcgcctggtttactggcggtgcgacagcagaaaaaggcgctggcggtggtgattatcacgaccagggggcga

SEQ ID NO: 796527 - DNA, 75 bp, synthetic construct
  source 1..75: mol_type = other DNA
aacaaaacggcgtcattgaggttgattgcggctgtgttacctctgaagctttttatcactggatgcgcgtagctt

SEQ ID NO: 796528 - DNA, 75 bp, synthetic construct
  source 1..75: mol_type = other DNA
cgataaagtcatggaggcgcttaaggcagcaactacccatgactatgaagtgtatagctttgctaaaaaattatt

SEQ ID NO: 796529 - DNA, 75 bp, synthetic construct
  source 1..75: mol_type = other DNA
atgatgaaaaatccattagcttattttcatattgccacctttttattgtcaggtaaaagtcgtaatctgtcagaa

SEQ ID NO: 796530 - DNA, 75 bp, synthetic construct
  source 1..75: mol_type = other DNA
taaacaaaatagggtttataatcacgttagtgatgaagagattcttgaaaagtatgaatctataaaactctcggc

SEQ ID NO: 796531 - DNA, 75 bp, synthetic construct
  source 1..75: mol_type = other DNA
ataaaagtaacatttgcagcagagctctttgatacacaaaactgtaacaaaaaacaaaataaaaaaccatggaag

SEQ ID NO: 796532 - DNA, 75 bp, synthetic construct
  source 1..75: mol_type = other DNA
aacaaatatcagaaaatgtccggctaaacgctgaagcattacttagaaaagttaatcaagagactactaaaaaat

SEQ ID NO: 796533 - DNA, 75 bp, synthetic construct
  source 1..75: mol_type = other DNA
atgaagatattgaagctgaaatgcctaaaatggggggatgaccccgccggtaaagaagctcgattcttacaagct

SEQ ID NO: 796534 - DNA, 75 bp, synthetic construct
  source 1..75: mol_type = other DNA
atgaaagcgaataataaagattatttcccagaggatgtgagacttaatgttatgaggaagaaagggggaatttta

SEQ ID NO: 796535 - DNA, 75 bp, synthetic construct
  source 1..75: mol_type = other DNA
tccaacccatgcattgcatgggggacaaatccagtaatatttgttttctgtcgctgctgacatggaatatgtcat

SEQ ID NO: 796536 - DNA, 75 bp, synthetic construct
  source 1..75: mol_type = other DNA
aattcaaggcaggtaaaaaccagaaccagcttagcgaagaaaacattaagaaaatcgtcaagacctaccgtgatg

SEQ ID NO: 796537 - DNA, 75 bp, synthetic construct
  source 1..75: mol_type = other DNA
ctccgattaacgacagcgtatggtaaccagcttgataagaaggtccgcgaaggtgttcgcaataagttcaccggg

SEQ ID NO: 796538 - DNA, 75 bp, synthetic construct
  source 1..75: mol_type = other DNA
cgtatcaggagcaccgccttatcatggccctgttctatgatgtggcactgccgggctgggtggtcgttaatcacg

SEQ ID NO: 796539 - DNA, 75 bp, synthetic construct
  source 1..75: mol_type = other DNA
cgacatcctgaatgcgcctaaggtcgctagcgatatgtctgccagcttcctgaatgacttgaagagcaagtatcg

SEQ ID NO: 796540 - DNA, 75 bp, synthetic construct
  source 1..75: mol_type = other DNA
atcctatataataccgaatcaaaggcattgccaagtgctttggcatcagaactttctagtaaagttgaacaggaa

SEQ ID NO: 796541 - DNA, 75 bp, synthetic construct
  source 1..75: mol_type = other DNA
ataatactgtcaaagtattgcaaagagcgttgcgtggatacgaaatgactgcagagttgttaggcgccagactaa

SEQ ID NO: 796542 - DNA, 75 bp, synthetic construct
  source 1..75: mol_type = other DNA
gctgaggaaggaatggaaaaatgtacttggagagatgcacttgtatctagagtaatagaggtggaatcttccagg

SEQ ID NO: 796543 - DNA, 75 bp, synthetic construct
  source 1..75: mol_type = other DNA
gatgtggtgaaagtcccgctgtccggaccgctgacacaggcatttgaagatgcccgcgaccgcattattgctgcg

SEQ ID NO: 796544 - DNA, 75 bp, synthetic construct
  source 1..75: mol_type = other DNA
taccattccggatttacgtattatccgcgacctggtctgcgatggtcacggatggacggttctgccggattatca

SEQ ID NO: 796545 - DNA, 75 bp, synthetic construct
  source 1..75: mol_type = other DNA
gggcgataatgcacttccaggcaatgtagttcccgcccgtgaaataaatttacgtaatggtgatattagtagtat

SEQ ID NO: 796546 - DNA, 75 bp, synthetic construct
  source 1..75: mol_type = other DNA
tttcgtcggtgacttgaagcatttcggctactacgacactgaagctgaggcgtacatcgttcgctgcgctgtcct

SEQ ID NO: 796547 - DNA, 75 bp, synthetic construct
  source 1..75: mol_type = other DNA
tacaagacagataactagcgttgcagcaggttctgtcgatacggatgctgttaacgttgcacagctcagggattt

SEQ ID NO: 796548 - DNA, 75 bp, synthetic construct
  source 1..75: mol_type = other DNA
tacaatgtctttacccgatcaggcatctcgtttagcttggctcgcccaagttattccgatgctacatggaacagg

SEQ ID NO: 796549 - DNA, 75 bp, synthetic construct
  source 1..75: mol_type = other DNA
aatgttggctttacgtaatgcgcttgatgacccttcacaggaaacttgtggcaaatgtgagaactgtattgcgga

SEQ ID NO: 796550 - DNA, 75 bp, synthetic construct
  source 1..75: mol_type = other DNA
aaaccaagagcattgcggtcaaatgtacgaatgttgctgcgcaggcttatttaacaatgcgtctggaagccagtg

SEQ ID NO: 796551 - DNA, 75 bp, synthetic construct
  source 1..75: mol_type = other DNA
agactatcacttatttaagtgatactggttgtctggagattcagggggccagtctaccaggtcagattgttgttt

SEQ ID NO: 796552 - DNA, 75 bp, synthetic construct
  source 1..75: mol_type = other DNA
cctaacgatctcaatagcgttattcctttccgtctggatgcagctgcggcagccaatgtcacacttcgcgcctgg

SEQ ID NO: 796553 - DNA, 75 bp, synthetic construct
  source 1..75: mol_type = other DNA
cacaagggcgatgaaaccctcttccacgacccgaacaatcttcagtcgctatgcaagcgctgccacgactcggtt

SEQ ID NO: 796554 - DNA, 75 bp, synthetic construct
  source 1..75: mol_type = other DNA
tctttaactattgttgcctgtatgttgtgtttagtcatgattgcaggtttagttggcctggctattgccagtgca

SEQ ID NO: 796555 - DNA, 75 bp, synthetic construct
  source 1..75: mol_type = other DNA
gaaagtagtgaagggatacgactaaaaccatcagacacacttgtctccaacagactccgtgaagcccaacacaat

SEQ ID NO: 796556 - DNA, 75 bp, synthetic construct
  source 1..75: mol_type = other DNA
aagtcaaagacaatcagccgcaaaaaggccagcagaatcgcttccaccaatgtcgcaatctggatggtgcatttg

SEQ ID NO: 796557 - DNA, 75 bp, synthetic construct
  source 1..75: mol_type = other DNA
accgcatcgcggaagatgcgcactatgtctatcgctacgatgaatacggcaggctggcggagaagacggaccgta

SEQ ID NO: 796558 - DNA, 75 bp, synthetic construct
  source 1..75: mol_type = other DNA
aatacctcggtggcgttgttgcagtcctcacaggtagggctgcataaatcactgatggtgggaatgggctacagc

SEQ ID NO: 796559 - DNA, 75 bp, synthetic construct
  source 1..75: mol_type = other DNA
gcttccagcttatcgtgacagagcacgcaaatcttcgcgaccagtggttccaggatgctttaactgagcttccct

SEQ ID NO: 796560 - DNA, 75 bp, synthetic construct
  source 1..75: mol_type = other DNA
ctggtggcggtgctgtaaaacgctctcagtcgcgctctgacgcaatatttgtaaaaggtactggttggtatgcct

SEQ ID NO: 796561 - DNA, 75 bp, synthetic construct
  source 1..75: mol_type = other DNA
ctggtatgtttcaactaccgttgtctatctggtgcttttgcctctgcttctgtctggtattgctgaagaacagtt

SEQ ID NO: 796562 - DNA, 75 bp, synthetic construct
  source 1..75: mol_type = other DNA
cgatatcctcatcgcctgtgtggatggcctgaaaggcttcccggatgccatcaacacagtatatccgaaggcccg

SEQ ID NO: 796563 - DNA, 75 bp, synthetic construct
  source 1..75: mol_type = other DNA
ctatgctttttggtaatataaagtataactatgttctgtggactattagtattgagttttttggttctatattgg

SEQ ID NO: 796564 - DNA, 75 bp, synthetic construct
  source 1..75: mol_type = other DNA
cctgcggccgtgcacaaaatgcccggaaaattttttgttttttctgtggctggtatgtggtggagagttgcagca

SEQ ID NO: 796565 - DNA, 75 bp, synthetic construct
  source 1..75: mol_type = other DNA
tgtgaacatgattacccacaatgctggtttaccctccgtctggtgctggcgaaacgccgttatcgctgtgtacgt

SEQ ID NO: 796566 - DNA, 75 bp, synthetic construct
  source 1..75: mol_type = other DNA
cctggcgtgatggcctgtaccggaatgcgccgaataaagagagcgccgacgaggaatacggctgcattcctaaaa

SEQ ID NO: 796567 - DNA, 75 bp, synthetic construct
  source 1..75: mol_type = other DNA
gccgacgaggaatacggctgtatcccgaaaaaatccggcggtgcctatattcctcacgcgcttattgaaatggcg

SEQ ID NO: 796568 - DNA, 75 bp, synthetic construct
  source 1..75: mol_type = other DNA
agcagaaatggcgtgatgatctctacaaaaacgccccgacccgtgaggatgccgacgaggaatacggctgtatcc

SEQ ID NO: 796569 - DNA, 75 bp, synthetic construct
  source 1..75: mol_type = other DNA
gtgttcctggcactgggcatcaatatcgaaggtcagaaagaactgctgggtatgtggctggccgaaaatgaaggg

SEQ ID NO: 796570 - DNA, 75 bp, synthetic construct
  source 1..75: mol_type = other DNA
ctctcttaaaaatggtagctgggctaagaaaaaattattttacaagattctgtctgcaatgacaccagaccagtt

SEQ ID NO: 796571 - DNA, 75 bp, synthetic construct
  source 1..75: mol_type = other DNA
ccgcaaaattgatctggccggtgaaaaagccctgctgggcgtggatgtgccggacagccttgatttgcccggtga

SEQ ID NO: 796572 - DNA, 75 bp, synthetic construct
  source 1..75: mol_type = other DNA
gattgtggttgtcggtacagcctccgcgattggtggggcactgtatctgtctgatgtggacatgtccggtaacgg

SEQ ID NO: 796573 - DNA, 75 bp, synthetic construct
  source 1..75: mol_type = other DNA
cattacaaaatggcttctgggtggagaaaaacaattttgtcatggtattttagatttacttcatgatgctacggg

SEQ ID NO: 796574 - DNA, 75 bp, synthetic construct
  source 1..75: mol_type = other DNA
ctgcaatatgcaaaaaatatatgttgtatataccagacttaatgaaatagacaagcgtaaggctttagcaaaatg

SEQ ID NO: 796575 - DNA, 75 bp, synthetic construct
  source 1..75: mol_type = other DNA
taatgcagataaaccagatgcacattcccatgttaaaaaaacgtggaataataaaagatgaacgagatttgttag

SEQ ID NO: 796576 - DNA, 75 bp, synthetic construct
  source 1..75: mol_type = other DNA
ttcatcaaatgatcgctatgaacttgaggccaaactccgtacagcacagcgagatctgaaaatcaacgccaaacg

SEQ ID NO: 796577 - DNA, 75 bp, synthetic construct
  source 1..75: mol_type = other DNA
agcattgggggttcatacggagtttgatgacgttacgaataactatgatgatcagctaattcagggaacactgga

SEQ ID NO: 796578 - DNA, 75 bp, synthetic construct
  source 1..75: mol_type = other DNA
ttgtacttccctttgcttttaagttaccctggagaacttaaacgcttctttcaatcatgcattgatagcggcatc

SEQ ID NO: 796579 - DNA, 75 bp, synthetic construct
  source 1..75: mol_type = other DNA
gggcgttggcggcctgtttggcatcaaccggctggcggccaccaccggcgcccagcggtttacttctctcgggct

SEQ ID NO: 796580 - DNA, 75 bp, synthetic construct
  source 1..75: mol_type = other DNA
atccggcaacggtgccgactgcctgatgcgacgcttgcgcgtcttatcaggcctacaaattcccgcaccctccgt

SEQ ID NO: 796581 - DNA, 75 bp, synthetic construct
  source 1..75: mol_type = other DNA
actcggcaagtggattgatgcgcttgccggtggtattgagcggttcggtaactacctggcttcgccgacgttcaa

SEQ ID NO: 796582 - DNA, 75 bp, synthetic construct
  source 1..75: mol_type = other DNA
ctgttaaaaaaacgtggaataataaaagatgaacgagatttgttagggaaggtgcgaataagcaggtcatttctt

SEQ ID NO: 796583 - DNA, 75 bp, synthetic construct
  source 1..75: mol_type = other DNA
ttgcaatggaaaaccaaaaaagaggctgcaatatgcaaaaaaaatatatgttgtatataccagacttaatgaaat

SEQ ID NO: 796584 - DNA, 75 bp, synthetic construct
  source 1..75: mol_type = other DNA
atgaatggggcaacctgctgaatgaagagaacccgcatcagctgcagcagcttatccgcctgccggggcagcagt

SEQ ID NO: 796585 - DNA, 75 bp, synthetic construct
  source 1..75: mol_type = other DNA
ggtttaatgcgggtcacactatgccagtttaccactcttaaagaaaatggcatcctttcacgatttacattgtca

SEQ ID NO: 796586 - DNA, 75 bp, synthetic construct
  source 1..75: mol_type = other DNA
gcgtctggaagccagtgccgtttctggtcaggcgatggtgtcggacaatcaggatttaggttttattgtggccga

SEQ ID NO: 796587 - DNA, 75 bp, synthetic construct
  source 1..75: mol_type = other DNA
cgcgctggcagaagatatcttcaccagcctgctgcaccacggtattcgccggatactggtaattaacggccatga

SEQ ID NO: 796588 - DNA, 75 bp, synthetic construct
  source 1..75: mol_type = other DNA
cagttggaagctggtctatctgatgagcttcgtaaagccgatccgataactcacgacgaacttgataaaaaagct

SEQ ID NO: 796589 - DNA, 75 bp, synthetic construct
  source 1..75: mol_type = other DNA
cggtcagacgcactgtcaatggatttatctgttggccgctgtcgttaaaagcggcatcaaggttggttcgcgaga

SEQ ID NO: 796590 - DNA, 75 bp, synthetic construct
  source 1..75: mol_type = other DNA
atagtcaatctcctcgatatcaccagtgttgatgcacagaatcagcagcaggtgaaaaacgccatgattaactat

SEQ ID NO: 796591 - DNA, 75 bp, synthetic construct
  source 1..75: mol_type = other DNA
ctgcccttttacctgcaaaccgtgctcgggcgtagtgaagtcgaaacaggtttacttctgacaccgtggccgtta

SEQ ID NO: 796592 - DNA, 75 bp, synthetic construct
  source 1..75: mol_type = other DNA
cacgggcttggcgcgcgtgacgatgcgatgggaatgcagtatctgattcctggctggacgttcgataacaagcgc

SEQ ID NO: 796593 - DNA, 75 bp, synthetic construct
  source 1..75: mol_type = other DNA
ctgggcgtggaactggactgggaacaggtacaaaaggcacatgaggcctataaacgtctgcctgtcggtgcgcgt

SEQ ID NO: 796594 - DNA, 75 bp, synthetic construct
  source 1..75: mol_type = other DNA
ctacatcctttttcttctttgatgacattgaaagccttctattcgaagattattttggttattcaaaatacgatg

SEQ ID NO: 796595 - DNA, 75 bp, synthetic construct
  source 1..75: mol_type = other DNA
ttcagagaggcggcgcggctggtgctgcgtagtgcaaaacgtaaatacggatcggcgtactggtatcacccatta

SEQ ID NO: 796596 - DNA, 75 bp, synthetic construct
  source 1..75: mol_type = other DNA
ggtgctgcgcagtgctaagcgcaaatatggctctgcatactggtatcacccattacttggcaaatttcagatgag

SEQ ID NO: 796597 - DNA, 75 bp, synthetic construct
  source 1..75: mol_type = other DNA
atgatcagcaatgtgaagttttacgagctggctaagcgcgttgatctgctggttgaaaaggttttgcatcttgag

SEQ ID NO: 796598 - DNA, 75 bp, synthetic construct
  source 1..75: mol_type = other DNA
cattctcgatcgctcagcagacgttagttccagcacatatccttcgttgtttccagggcgtaagtcagccggaac

SEQ ID NO: 796599 - DNA, 75 bp, synthetic construct
  source 1..75: mol_type = other DNA
gcaagccactaaactactcaattactaacccaaaaggtgaagtgatagaaatgttagaacatgaattgagtagca

SEQ ID NO: 796600 - DNA, 75 bp, synthetic construct
  source 1..75: mol_type = other DNA
gtgccgctggttctattgccggctccctgcttggtgcgaactctgcgaaggattcagctaaccgtgccaataagt

SEQ ID NO: 796601 - DNA, 75 bp, synthetic construct
  source 1..75: mol_type = other DNA
gggccgtttcatttcctggattttatatatatgtttcatcacgggtgagaatgccctctaaagttcgtgctttta

SEQ ID NO: 796602 - DNA, 75 bp, synthetic construct
  source 1..75: mol_type = other DNA
gagcctcaaaatctattgacctatggtagtaaagttctgcttgatagaccattcggtaatatacaatctggcatt

SEQ ID NO: 796603 - DNA, 75 bp, synthetic construct
  source 1..75: mol_type = other DNA
ttctccatttcgacttaagccacttcgatccacgccgcgcccccgttacggcggggcttatccgggaaatactca

SEQ ID NO: 796604 - DNA, 75 bp, synthetic construct
  source 1..75: mol_type = other DNA
tcgacgaagctaaagttattgagttcagtaaaaatgccccggactggcgtaatccgctctggcgtcatgaagata

SEQ ID NO: 796605 - DNA, 75 bp, synthetic construct
  source 1..75: mol_type = other DNA
aacgacagtatccgcatccagacgatttatcagccggggagcttcactccactcatcagtgttgaaactgccacc

SEQ ID NO: 796606 - DNA, 75 bp, synthetic construct
  source 1..75: mol_type = other DNA
tggtggaaaaactgatgtccaccgtaacagcgataaccaatatccatgaactctccccttccccaaagggaggga

SEQ ID NO: 796607 - DNA, 75 bp, synthetic construct
  source 1..75: mol_type = other DNA
gacgtagtaagaatatttatctgacttcagacggtaatttgtatttacagcggaccacaaggatatatggacgct

SEQ ID NO: 796608 - DNA, 75 bp, synthetic construct
  source 1..75: mol_type = other DNA
ataacggcagcgttatcagcgggaacaacgtgcagcttgcgggcggcaatatcaccaacagcggcggcagcatca

SEQ ID NO: 796609 - DNA, 75 bp, synthetic construct
  source 1..75: mol_type = other DNA
gacggaagaattgaatccagcgatccgttttatcgtgaagatttcacggtactctaccgttggcctcactcgtta

SEQ ID NO: 796610 - DNA, 75 bp, synthetic construct
  source 1..75: mol_type = other DNA
acggagatgccttcttatgaagaagggatctcgctctttgatgttgaagccactctgcaaccggatggggtgctc

SEQ ID NO: 796611 - DNA, 75 bp, synthetic construct
  source 1..75: mol_type = other DNA
tgcgtgcatggacgttgtttcttcccggcgggatccgccttcagggggcgcatgaatacacaccgcccgctatta

SEQ ID NO: 796612 - DNA, 75 bp, synthetic construct
  source 1..75: mol_type = other DNA
taaatcaggtatggttgggcattttggaggggtatgagcaatttaaaaaaataaatatcattaaaacatttaata

SEQ ID NO: 796613 - DNA, 75 bp, synthetic construct
  source 1..75: mol_type = other DNA
ggggctatttccccaatatgcataattgcttttttttatgctgataaaataatgactctttggatgggcagtgac

SEQ ID NO: 796614 - DNA, 75 bp, synthetic construct
  source 1..75: mol_type = other DNA
tgaccttccccgctggttaccactgcaacgcctggcaaatcaggctgtgggacactgtctggggacgcagggtat

SEQ ID NO: 796615 - DNA, 75 bp, synthetic construct
  source 1..75: mol_type = other DNA
gaattgttggagccgcaatagcatggtctgtaagaacatcgttagattttttgatattattattaattgataaga

SEQ ID NO: 796616 - DNA, 75 bp, synthetic construct
  source 1..75: mol_type = other DNA
cagaagctgtttcccgtttatctattatccctgcagcactatcaagagctgtatttccaaaacttagctctgcaa

SEQ ID NO: 796617 - DNA, 75 bp, synthetic construct
  source 1..75: mol_type = other DNA
attaaattatggggggtggattacagttagcaatattattagtccattaatggcttatcttgataggttttttat

SEQ ID NO: 796618 - DNA, 75 bp, synthetic construct
  source 1..75: mol_type = other DNA
agcgcctattttatgacgggagaacccgtacgccttgaagctgcaaagcgattgtttaagaagttttatacggaa

SEQ ID NO: 796619 - DNA, 75 bp, synthetic construct
  source 1..75: mol_type = other DNA
gatgattcagcattacagatgaaaaaatccagaaatatttctctttttaaaaatacagatcttgtcaatagaaat

SEQ ID NO: 796620 - DNA, 75 bp, synthetic construct
  source 1..75: mol_type = other DNA
tcgccgcccatctttttgataacggtgaacctttacccgccttggggaatattaatggagaacataatgaacagc

SEQ ID NO: 796621 - DNA, 75 bp, synthetic construct
  source 1..75: mol_type = other DNA
caagcctggcaaatcaggctgtgggacactgtctggggacgcagggtatcattccggagtaagtcagctcagaaa

SEQ ID NO: 796622 - DNA, 75 bp, synthetic construct
  source 1..75: mol_type = other DNA
tgggcgcatattacaccgaccgaattgcggaaaatgtcgggaattcccaacacctcgtttaaccgcagcattaag

SEQ ID NO: 796623 - DNA, 75 bp, synthetic construct
  source 1..75: mol_type = other DNA
acaggcagcttagaaacgaagcgcggcgcagccgctgacgaacgtaccgttcactgccgtacaggcagcttagaa

SEQ ID NO: 796624 - DNA, 75 bp, synthetic construct
  source 1..75: mol_type = other DNA
gaggtgaccttaaaataataagagaagcttcctcgagagttaaacttgaaggtgatttcattcagaaaggaattg

SEQ ID NO: 796625 - DNA, 75 bp, synthetic construct
  source 1..75: mol_type = other DNA
acttccacagaagccgtcgcaatccgcatcccgtgctttctcagcctcagaatatctgccgcaatacgctggcag

SEQ ID NO: 796626 - DNA, 75 bp, synthetic construct
  source 1..75: mol_type = other DNA
tttttgctagtgttttgtctttatttaatgttaaattatttcatgtttggggtggttaatggaccgcagtcttat

SEQ ID NO: 796627 - DNA, 75 bp, synthetic construct
  source 1..75: mol_type = other DNA
ggaagtgggtcagaaacgggttcaggtggcaggctggcggaataacgcggttaaaattgtggggggctatggtct

SEQ ID NO: 796628 - DNA, 75 bp, synthetic construct
  source 1..75: mol_type = other DNA
agatttatggctacgatgttgccatgctgaccctgctgggattacaggccgggctttattcgccggagatcgttg

SEQ ID NO: 796629 - DNA, 75 bp, synthetic construct
  source 1..75: mol_type = other DNA
taaagctcatccgtgaatctgagcgcctgaaaatgaaggaagcggctgaattagctggcatcaattacaccacgt

SEQ ID NO: 796630 - DNA, 75 bp, synthetic construct
  source 1..75: mol_type = other DNA
actcagcggataacgtcaacggtgtgtattaccgaccgctgcaaaaactgattaatggcatctggtataacgtag

SEQ ID NO: 796631 - DNA, 75 bp, synthetic construct
  source 1..75: mol_type = other DNA
tttacccaaccccttggcaaacttggcattatttttttctaattataaaaataagaaaataattattcattggca

SEQ ID NO: 796632 - DNA, 75 bp, synthetic construct
  source 1..75: mol_type = other DNA
gaatgcggcaggtggggcgaaaaatctgccgttgctggtcgcctaaggatctcgcgatctctttgtcgcgcagta

SEQ ID NO: 796633 - DNA, 75 bp, synthetic construct
  source 1..75: mol_type = other DNA
gccttgagcatgcagcggagaaagcgctttatccctggcaattctgtttcatccttggaggaggatggcggcgag

SEQ ID NO: 796634 - DNA, 75 bp, synthetic construct
  source 1..75: mol_type = other DNA
aaccactgcgcaagctttgcaacctgcaaaccttacgcctggaacccactagttttattgaaaaaagtttacgcg

SEQ ID NO: 796635 - DNA, 75 bp, synthetic construct
  source 1..75: mol_type = other DNA
ctgattaatggcgtatggcaaaaatatgctggtggtcgctggattgaatctgatgccgggaaggagctgaagatt

SEQ ID NO: 796636 - DNA, 75 bp, synthetic construct
  source 1..75: mol_type = other DNA
tctcatgctcctgggatatcgaacatgattttggtgttatgatgttatatgattgcgttgttaaattaggtggcg

SEQ ID NO: 796637 - DNA, 75 bp, synthetic construct
  source 1..75: mol_type = other DNA
attagtttccaataagtccattgcacaccaggagagcctttcaggaaaaaaacgggaaaagatagactatcgata

SEQ ID NO: 796638 - DNA, 75 bp, synthetic construct
  source 1..75: mol_type = other DNA
attcaataaatgaatttaaaaacataaagtcaaattatataattggagtcaacaagaacataaatatacttctag

SEQ ID NO: 796639 - DNA, 75 bp, synthetic construct
  source 1..75: mol_type = other DNA
cagttgctaaaatcgacttctgtattaaacgtatccggatgcatgaacaaatgagcaggataatccggaagacgt

SEQ ID NO: 796640 - DNA, 75 bp, synthetic construct
  source 1..75: mol_type = other DNA
gattccagtaattttaacttgtcattaaaaggtcttttaacaagaaatggtggcatatttggttctgttacaggc

SEQ ID NO: 796641 - DNA, 75 bp, synthetic construct
  source 1..75: mol_type = other DNA
ttgagcgtagatgccctgatgcgtaagctgcgttttgatttcagagacacttttggcgaagggttctattttgac

SEQ ID NO: 796642 - DNA, 75 bp, synthetic construct
  source 1..75: mol_type = other DNA
caacacataacgttacgtacgcctatgttgtcactgggaaatcagcaatggaataacctgagtattgtttcgcaa

SEQ ID NO: 796643 - DNA, 75 bp, synthetic construct
  source 1..75: mol_type = other DNA
ggggatccgcagtgaggccgaatgcgacgaactggggttatggccgctcatctacatctggaatgtggatcgtgc

SEQ ID NO: 796644 - DNA, 75 bp, synthetic construct
  source 1..75: mol_type = other DNA
tggtaaaggagagattaattttaagggttactccaaagggttttatcaaaatcacttcattcattatttccagtt

SEQ ID NO: 796645 - DNA, 75 bp, synthetic construct
  source 1..75: mol_type = other DNA
acgcgttacctgagcggaatttcaattgagcaatgtcatatacaaggcctgatcggcatagcgcatcaggcagtt

SEQ ID NO: 796646 - DNA, 75 bp, synthetic construct
  source 1..75: mol_type = other DNA
atgagcaggataatccggaatactggcacagacgaaatactcttccgtctgagtaaaaaccatcatttatatgag

SEQ ID NO: 796647 - DNA, 75 bp, synthetic construct
  source 1..75: mol_type = other DNA
gctccaggagctgggcgcaactcgcctagtggtacatcgtaccccgcgtcacatttacgcacaggtaattgcacc

SEQ ID NO: 796648 - DNA, 75 bp, synthetic construct
  source 1..75: mol_type = other DNA
tggagccttttgtgccccgtgaagaccctgcgtacgttgaaatacgtgatgaggcgatgaaggtcatctccgagg

SEQ ID NO: 796649 - DNA, 75 bp, synthetic construct
  source 1..75: mol_type = other DNA
accgggccactttcggtttttcttaataaaatagcttctcactttgatttatcatggcaatatatagacggacaa

SEQ ID NO: 796650 - DNA, 75 bp, synthetic construct
  source 1..75: mol_type = other DNA
ataaggtgcttaatgaggtgtttaaagatgcgcgcaggaaattatatccatcctttcgcatgagtgttgatgaat

SEQ ID NO: 796651 - DNA, 75 bp, synthetic construct
  source 1..75: mol_type = other DNA
attatgatgtgaaaaacacaattaatgcagctaataatgagtccagaacaggaagtggattgctaaagaaaatta

SEQ ID NO: 796652 - DNA, 75 bp, synthetic construct
  source 1..75: mol_type = other DNA
actgagatagaggatgttttgaacgcaaaaatctattaccagaccttattgtcatttgctggtgattacgattat

SEQ ID NO: 796653 - DNA, 75 bp, synthetic construct
  source 1..75: mol_type = other DNA
cactttccaccgccgctgaagcgttatgggacgtggtacgagaccagggcaatgcgctaatggctggtcgggaag

SEQ ID NO: 796654 - DNA, 75 bp, synthetic construct
  source 1..75: mol_type = other DNA
ggcgcgcaatggtattcaggcgaatattgtgcaggagattggacatccggcgacgctgttcccgatggtagccgc

SEQ ID NO: 796655 - DNA, 75 bp, synthetic construct
  source 1..75: mol_type = other DNA
gatcgggatggggtggcaagcggaaaggcgcaggcgcaccattgggcaatactaatgccgtcaaacatggcgaac

SEQ ID NO: 796656 - DNA, 75 bp, synthetic construct
  source 1..75: mol_type = other DNA
aggaactgtcacaaatcgccaatttctggattggcgatacagacttcgctgaacactttatttacgcctcaaaaa

SEQ ID NO: 796657 - DNA, 75 bp, synthetic construct
  source 1..75: mol_type = other DNA
gtcgtgcgacccgcgcacgccgcaagctccaggagctgggcgcaactcgcctagtggtacatcgtaccccgcgtc

SEQ ID NO: 796658 - DNA, 75 bp, synthetic construct
  source 1..75: mol_type = other DNA
taataaggtgcaaactactaatagtataacatctagtgattcaggctcaggttcggggtcttcatcaggatcatc

SEQ ID NO: 796659 - DNA, 75 bp, synthetic construct
  source 1..75: mol_type = other DNA
taacaaagaaggattcagagcataagtttgacttaattaatcttgcttcttatcgcgaagaggtcaggcagttaa

SEQ ID NO: 796660 - DNA, 75 bp, synthetic construct
  source 1..75: mol_type = other DNA
gatagttcatggaacttaaatattgttgttaagaaaagtgggttagaaaaaacagaaccatatattgtcccattt

SEQ ID NO: 796661 - DNA, 75 bp, synthetic construct
  source 1..75: mol_type = other DNA
gcacttatctgggttcgggttgcatttaacggtattgaggatgcagaaaataatactttgttgaaactggatgaa

SEQ ID NO: 796662 - DNA, 75 bp, synthetic construct
  source 1..75: mol_type = other DNA
gcggcggagttgggggacattttgcgtatacttatgtagtggatgttgataatccagaatcatcgacagaatctg

SEQ ID NO: 796663 - DNA, 75 bp, synthetic construct
  source 1..75: mol_type = other DNA
atgaggatgagaacctccgggggcagggaggttcgactcgagcgaagcgagagaacgttgcgccagcaacggccc

SEQ ID NO: 796664 - DNA, 75 bp, synthetic construct
  source 1..75: mol_type = other DNA
tgctggcaaaatacctgaatacggacacgggacgtattgcccgttttctgcagaataacctgagtggtgtgttgc

SEQ ID NO: 796665 - DNA, 75 bp, synthetic construct
  source 1..75: mol_type = other DNA
gcccgatggagcaggcgtggcagcaggttcttacgcccgcggcagaaagtctgaatgcccggtggcgtactgcgg

SEQ ID NO: 796666 - DNA, 75 bp, synthetic construct
  source 1..75: mol_type = other DNA
ttggcgatagcaccgttttgcagcacagcgctcgtttctccgcagggctgcaaaaagcagcagtcgccaccggcc

SEQ ID NO: 796667 - DNA, 75 bp, synthetic construct
  source 1..75: mol_type = other DNA
taatatacaacccatcattaaaagacagtgctggatgggatttcattgttgacttccctacacaattttcaactc

SEQ ID NO: 796668 - DNA, 75 bp, synthetic construct
  source 1..75: mol_type = other DNA
tcagtgagggtttgcaactgcgggtcaaggatctggatttcgatcacggcacgatcatcgtgcgggagggcaagg

SEQ ID NO: 796669 - DNA, 75 bp, synthetic construct
  source 1..75: mol_type = other DNA
tcagcgcatgggtgaaaggcgacgcaactggcacaattgatattggtgaattcaatagccaggttaatttccaga

SEQ ID NO: 796670 - DNA, 75 bp, synthetic construct
  source 1..75: mol_type = other DNA
cgaagtggccaatcttcgtgttacgtacaacatcaagagtccgtcaggtaaggaaactattcaaacggtcggctt

SEQ ID NO: 796671 - DNA, 75 bp, synthetic construct
  source 1..75: mol_type = other DNA
aagtctcactgctgttgctgccggagaggatgtcgttcctgcctcagaactggctgccgctataaaacaaataaa

SEQ ID NO: 796672 - DNA, 75 bp, synthetic construct
  source 1..75: mol_type = other DNA
gggaaatcggttgatttaaccgatacccgggattacggcagcctgactgctgccggactcggacaggagtggtat

SEQ ID NO: 796673 - DNA, 75 bp, synthetic construct
  source 1..75: mol_type = other DNA
gcataatggaaaagacggtgtagctcagatgtcattacctatatatgcatactcaacatgtcgtttttggccaaa

SEQ ID NO: 796674 - DNA, 75 bp, synthetic construct
  source 1..75: mol_type = other DNA
ttggaacacaatacatttttcagtgttaccggcatagatgagtctctctatgaaaagcatataatctttatcact

SEQ ID NO: 796675 - DNA, 75 bp, synthetic construct
  source 1..75: mol_type = other DNA
ttttaatttatatcactctccctttcattcagcttgtctatttcatttcctctgaaaagaaactaactattcaca

SEQ ID NO: 796676 - DNA, 75 bp, synthetic construct
  source 1..75: mol_type = other DNA
cgcaaaagactgcgcaatggcttcaggcatgcgacggaaacagggttcaggaatacgtgaagctggagcgattgc

SEQ ID NO: 796677 - DNA, 75 bp, synthetic construct
  source 1..75: mol_type = other DNA
atgaatggtgttgagggggtatgtgagccgtcacactggatgccactaccagaaccgcctcgattaaaggagcta

SEQ ID NO: 796678 - DNA, 75 bp, synthetic construct
  source 1..75: mol_type = other DNA
ggatgaaagcaataaagagcaagcggacgttattcctgtttatgctgccgcgcctgcgtcggttgtgccggataa

SEQ ID NO: 796679 - DNA, 75 bp, synthetic construct
  source 1..75: mol_type = other DNA
ggataaccgcatcgcagaggatgcgcactatgtttaccactatgatgaatacggcagactgatggagaagacgga

SEQ ID NO: 796680 - DNA, 75 bp, synthetic construct
  source 1..75: mol_type = other DNA
aaaatatattaaatgaatttaatgatgaggatgtcattggcaatataaagtcagcaatacaacaaattataaaat

SEQ ID NO: 796681 - DNA, 75 bp, synthetic construct
  source 1..75: mol_type = other DNA
attttcaaacatccggccgggaaattattctgggctttgacggatgaaagtaataaagatcaatcggacgttatt

SEQ ID NO: 796682 - DNA, 75 bp, synthetic construct
  source 1..75: mol_type = other DNA
ttagcagctccatataaccgtgcgtcattttcgttcgtgactgaagcggctgctaattatagcgaacagggggtt

SEQ ID NO: 796683 - DNA, 75 bp, synthetic construct
  source 1..75: mol_type = other DNA
tttttttagtggcaaaattttctacaggaaaatgaagtttgtgacagataatctaaagggcctcatttatgtcat

SEQ ID NO: 796684 - DNA, 75 bp, synthetic construct
  source 1..75: mol_type = other DNA
cccagttacctgagcgcctttgtgaacgattaacctgctgcacaaaaaataaatatgagcattggaattatatca

SEQ ID NO: 796685 - DNA, 75 bp, synthetic construct
  source 1..75: mol_type = other DNA
gttgcttatattttcaaacatccggccgggaaattattctgggctttaacggatgaaagcaataaagagcaagcg

SEQ ID NO: 796686 - DNA, 75 bp, synthetic construct
  source 1..75: mol_type = other DNA
cagttaatacaccttgccaggatgcgccagcccatatctggctgcaaacagctggagtatggccagaagatggcg

SEQ ID NO: 796687 - DNA, 75 bp, synthetic construct
  source 1..75: mol_type = other DNA
tggcagcatattggaactgggtaatgagtccaattgattacaaaaaatatagagctttcacatatttatcaggaa

SEQ ID NO: 796688 - DNA, 75 bp, synthetic construct
  source 1..75: mol_type = other DNA
accctgatctccgtaaataataacctgatatcgcatatagactcatttccgccgaagattgagaaaatttttatt

SEQ ID NO: 796689 - DNA, 75 bp, synthetic construct
  source 1..75: mol_type = other DNA
caggtgcccgaatcatgcaaagaattagaactcgatttcaataaccttacagaatttccacaagtacctgatgga

SEQ ID NO: 796690 - DNA, 75 bp, synthetic construct
  source 1..75: mol_type = other DNA
attctatgactggagcggggatcggtaatggggatttgctggtcgtcgaccgttccagaaaacctgcacatggag

SEQ ID NO: 796691 - DNA, 75 bp, synthetic construct
  source 1..75: mol_type = other DNA
ggctttcattcagcttacaaagacaccactataaatgaggctttttttatagatccagaaagggcctctaatcgc

SEQ ID NO: 796692 - DNA, 75 bp, synthetic construct
  source 1..75: mol_type = other DNA
ataggcagcatgaacgcaacacaggctctcgtacggaacgtgggaacctgtcgtctcgatgctaagggagcggcg

SEQ ID NO: 796693 - DNA, 75 bp, synthetic construct
  source 1..75: mol_type = other DNA
atgataagacggggtctatcacgatagaaaaaaatcagggggaggggactttacccattcggcataaattagagt

SEQ ID NO: 796694 - DNA, 75 bp, synthetic construct
  source 1..75: mol_type = other DNA
tggtcaacggggatacggcgcagtgaagccgcaggtctggaggtgttcagcgtggatgccagtcgccgcatcctg

SEQ ID NO: 796695 - DNA, 75 bp, synthetic construct
  source 1..75: mol_type = other DNA
tagtcgattacagccagggccgtaactataccgcccatctggtctggcctaacaatatgcgcgaaggcaacgaaa

SEQ ID NO: 796696 - DNA, 75 bp, synthetic construct
  source 1..75: mol_type = other DNA
taacagcgtcattattcgcgaagatattattgcgcaactggaaactgcgcagaaaatccgtgacatcttcttcag

SEQ ID NO: 796697 - DNA, 75 bp, synthetic construct
  source 1..75: mol_type = other DNA
acgtattttgtcaaagccgccggcgacagcatgaaagacgcaggcataggggaaggtgatcttctggtcgtggat

SEQ ID NO: 796698 - DNA, 75 bp, synthetic construct
  source 1..75: mol_type = other DNA
ggtgcgccaggagacgcaccagttgttgcaaaatcagcactgtggggcgtaattaccccttgccttttacactgc

SEQ ID NO: 796699 - DNA, 75 bp, synthetic construct
  source 1..75: mol_type = other DNA
ctactttatgactcgcgaagacttattcgatggcgcaccgtcaatgcccgtgcaaacgccaacagccaccaggga

SEQ ID NO: 796700 - DNA, 75 bp, synthetic construct
  source 1..75: mol_type = other DNA
tcttgcctccataaatggtacgtttagtgcagaagacagaaaagagactgataaaattgggcatgttttatttta

SEQ ID NO: 796701 - DNA, 75 bp, synthetic construct
  source 1..75: mol_type = other DNA
tcaccgggaaacgtactcctgatggtattctaacataccatcaagacggttttgttagaaaaataattaaatcat

SEQ ID NO: 796702 - DNA, 75 bp, synthetic construct
  source 1..75: mol_type = other DNA
tgcgagaaataagtttattcatgattttgttaaatcgtggaataaagttatgaatagcgatcggtttgatttaaa

SEQ ID NO: 796703 - DNA, 75 bp, synthetic construct
  source 1..75: mol_type = other DNA
gacggcagcaaagtcgcccgggcgcatgcgatcaccgctgtatgggaagcaggtaacgttttccttccccataaa

SEQ ID NO: 796704 - DNA, 75 bp, synthetic construct
  source 1..75: mol_type = other DNA
aaggatgaaaatgcgatattgcataatcaattgcatgagattgaagagcgggtaacggctttgttgaataaatcg

SEQ ID NO: 796705 - DNA, 75 bp, synthetic construct
  source 1..75: mol_type = other DNA
cgtcaatttattactagtcatcagcttcgctttcaggaaatcaggacgaccaacgatcttttcttcgtctgcgca

SEQ ID NO: 796706 - DNA, 75 bp, synthetic construct
  source 1..75: mol_type = other DNA
ctttcagcgcgctctgaacctgccgaccgatgccaaccaggacacgatcaaggccgccttcaagaacggcgtgct

SEQ ID NO: 796707 - DNA, 75 bp, synthetic construct
  source 1..75: mol_type = other DNA
tatcagaattgggagagcaagcctattcttatgttaccaataaattttcacttaatacaatgctagctaattata

SEQ ID NO: 796708 - DNA, 75 bp, synthetic construct
  source 1..75: mol_type = other DNA
gctggaacgacacctatgcaaaagcgcgggatgtccaggcactggacccggatacattgccgaacacctatctga

SEQ ID NO: 796709 - DNA, 75 bp, synthetic construct
  source 1..75: mol_type = other DNA
gcttgcttccataaacggtacgtttagtgcagaagacagaaaagagaccgataaaattgggcatgttttatttta

SEQ ID NO: 796710 - DNA, 75 bp, synthetic construct
  source 1..75: mol_type = other DNA
cgcaacatatttccgggtgcctggttgggaaataagccggctgatggtgtggccgtaaagcgtaacactgacgaa

SEQ ID NO: 796711 - DNA, 75 bp, synthetic construct
  source 1..75: mol_type = other DNA
gtctgtccaaaaacagtggcgaaatcatcatggcgacccgctgggcgacagatgacctgtccgggcgtgtggtgg

SEQ ID NO: 796712 - DNA, 75 bp, synthetic construct
  source 1..75: mol_type = other DNA
tggtaagtaagcaggaagcagcggccgagttactcaaacgacgcaatgcgcgggcaagcctccacgacttcattc

SEQ ID NO: 796713 - DNA, 75 bp, synthetic construct
  source 1..75: mol_type = other DNA
atgcggagggtgaatcagccgccgtggatgtgcaactggtgtacctgactgacgactcaaaattgcaggcagccg

SEQ ID NO: 796714 - DNA, 75 bp, synthetic construct
  source 1..75: mol_type = other DNA
aacccttgtcagccagtgccatccttaaagcactggagcgtgtcggattcaaatcgacggttacaggccacggct

SEQ ID NO: 796715 - DNA, 75 bp, synthetic construct
  source 1..75: mol_type = other DNA
ggggagatcttcaaatttgccgttatcaccgaactggtgacgagaaatccggttgcagatctggatacggcactg

SEQ ID NO: 796716 - DNA, 75 bp, synthetic construct
  source 1..75: mol_type = other DNA
tgaagtcatgaaggcccgccgcccgcatgtggtcccgctatcccggcaggcggtcgagctattacaggaccagtt

SEQ ID NO: 796717 - DNA, 75 bp, synthetic construct
  source 1..75: mol_type = other DNA
cctaaggacggcagaactgcgaaaaatgcgctgggaatgggtggatctggcgtcggcaacaatcacattgcccgc

SEQ ID NO: 796718 - DNA, 75 bp, synthetic construct
  source 1..75: mol_type = other DNA
aagtcgatcgccactggtcacggctggcgcacaacattcagcacggcgcttaacgagtcaggcaggtactcacca

SEQ ID NO: 796719 - DNA, 75 bp, synthetic construct
  source 1..75: mol_type = other DNA
cagaggcgggcaatgatgcaggactacgccgacgccattgattcaatactggctggtgacggcaatccgcttgag

SEQ ID NO: 796720 - DNA, 75 bp, synthetic construct
  source 1..75: mol_type = other DNA
gataaccgttcggcttgataacatgaccaacattcccgaaggtatggactggggcgtcattgatggcaacctgat

SEQ ID NO: 796721 - DNA, 75 bp, synthetic construct
  source 1..75: mol_type = other DNA
caggtgcaacccttaaaggtcgcacgtttgagcgcgtctataccggcagctcgtggagcgaatggcgtgaagtct

SEQ ID NO: 796722 - DNA, 75 bp, synthetic construct
  source 1..75: mol_type = other DNA
aacttattttgacgaagatgatgtatatgattatcgaggtgcggctgtggcttgtggaccaaacttcggaaattc

SEQ ID NO: 796723 - DNA, 75 bp, synthetic construct
  source 1..75: mol_type = other DNA
tcaccgaactggttaaccggaatccggttgcagatctggatacggcactgaaagcccgccgaccagggcacaatg

SEQ ID NO: 796724 - DNA, 75 bp, synthetic construct
  source 1..75: mol_type = other DNA
tctgaatgttgaaggcgctgtgaaagaagccgctattgctgccctggctgcaaaaggtttccagatggctggctt

SEQ ID NO: 796725 - DNA, 75 bp, synthetic construct
  source 1..75: mol_type = other DNA
ctgcacacaacgctacaccacccgaaccggtaatatttacattcggatgcttgatgcagaatggaaccctgtcag

SEQ ID NO: 796726 - DNA, 75 bp, synthetic construct
  source 1..75: mol_type = other DNA
agtttcaaggccggtgattttgacacaagagaatattccggctatatttgataataacaggactttttatgtgtc

SEQ ID NO: 796727 - DNA, 75 bp, synthetic construct
  source 1..75: mol_type = other DNA
gggactgccgctggcgctcatcagcgaagacggcaatacggcgtggcgcggggagtatgatgaatggggcaacca

SEQ ID NO: 796728 - DNA, 75 bp, synthetic construct
  source 1..75: mol_type = other DNA
tacgtaacaccagtccggatgttccttatcttattcagtcatgggtgatgaccccagataataaaaatcagcaga

SEQ ID NO: 796729 - DNA, 75 bp, synthetic construct
  source 1..75: mol_type = other DNA
gtgatgtggaacgtgtcgatctctcttatcacgagagtttacaacgcattgttaaaggcgatgtcgatgcggtga

SEQ ID NO: 796730 - DNA, 75 bp, synthetic construct
  source 1..75: mol_type = other DNA
atgaacaggaaggcgtttctggcctgcgtgctgatgtgcatcatattaaccggctgcgaaacggcgaaaaaaatc

SEQ ID NO: 796731 - DNA, 75 bp, synthetic construct
  source 1..75: mol_type = other DNA
aatatatacaagcagaagccaaacaatatttcaaagaccagtataaactaacaaaaaatgattatttgaagaaag

SEQ ID NO: 796732 - DNA, 75 bp, synthetic construct
  source 1..75: mol_type = other DNA
tgaatgccgcttcgacaaagcctgttccagttatctcccgaatcgcaccttagaaaatgccatgtaccaggccct

SEQ ID NO: 796733 - DNA, 75 bp, synthetic construct
  source 1..75: mol_type = other DNA
cagcgagttgtaatttgggatcatcttcatcgattcgcaaataaacatcggcgattctctaatgctaattgggct

SEQ ID NO: 796734 - DNA, 75 bp, synthetic construct
  source 1..75: mol_type = other DNA
tcgaattacctgctgaagagcgttacgctgctagtattcatggtaaggtgctgaagttttcatccacgctgcgac

SEQ ID NO: 796735 - DNA, 75 bp, synthetic construct
  source 1..75: mol_type = other DNA
tcattcccctggcctcaagccatttcgacttcagtgaacaaaagctggtattaagtttccctcaggcggcgatgc

SEQ ID NO: 796736 - DNA, 75 bp, synthetic construct
  source 1..75: mol_type = other DNA
aagcaggaattcagataggacaaaagttgacaacaaatgcaattagatgtatcagcaaagaaattattgtaaaaa

SEQ ID NO: 796737 - DNA, 75 bp, synthetic construct
  source 1..75: mol_type = other DNA
tggttttgatgcaataacaacaaatattatcgggaattatgcaagagatacatttctgagtctggcagataatta

SEQ ID NO: 796738 - DNA, 75 bp, synthetic construct
  source 1..75: mol_type = other DNA
gttattgattcgctatggtgtgacaaaagatgaatatcgtggtttacaaattaatatcatggacccttctattat

SEQ ID NO: 796739 - DNA, 75 bp, synthetic construct
  source 1..75: mol_type = other DNA
caaataactacaatcccgacaaatctttttcgtttagatcctcatataactattgagattgcaaataacccctta

SEQ ID NO: 796740 - DNA, 75 bp, synthetic construct
  source 1..75: mol_type = other DNA
tattatggggcgcacctaccaccaggaaaaccgcacccccggcagcctgccgggaacaaagacgcagatgaccat

SEQ ID NO: 796741 - DNA, 75 bp, synthetic construct
  source 1..75: mol_type = other DNA
cagaggcttacgcactagcctatcatgcgctcattagtaacggatttagtgagcaacatgcagtggtgatcgcga

SEQ ID NO: 796742 - DNA, 75 bp, synthetic construct
  source 1..75: mol_type = other DNA
aactatcaaaacatacggaaggcttctcaagaagagagcaataaatatcgaatacaataagctgaaaaatttgct

SEQ ID NO: 796743 - DNA, 75 bp, synthetic construct
  source 1..75: mol_type = other DNA
gaagacttattgtctgtcgacatttagcttcctactggatagcacagtttaacaaaagtagtggtcacgtggatt

SEQ ID NO: 796744 - DNA, 75 bp, synthetic construct
  source 1..75: mol_type = other DNA
taagtacattgatcattacagggtgtacggctcaatcttccgcagaaaacagaaatagtgatcattatgcgtatt

SEQ ID NO: 796745 - DNA, 75 bp, synthetic construct
  source 1..75: mol_type = other DNA
gctcgtttattctccaacgattaggcacccgccgacagtccatgtatggatttgccgttgtgaccttagcattgc

SEQ ID NO: 796746 - DNA, 75 bp, synthetic construct
  source 1..75: mol_type = other DNA
gaccattgccacactctcatatcctcctgctattcgccctactggggtgggatttgcccgtgcgattatgcgcac

SEQ ID NO: 796747 - DNA, 75 bp, synthetic construct
  source 1..75: mol_type = other DNA
gtggcaggcgctgaaatatgccggttactgcgccaacctgcgcaaagatcagatcctagacatcttccagctcta

SEQ ID NO: 796748 - DNA, 75 bp, synthetic construct
  source 1..75: mol_type = other DNA
ataaaattattgctctcattctggaggcatcaggggaaccgactgatgcagataaagtattctgtcttggtaaca

SEQ ID NO: 796749 - DNA, 75 bp, synthetic construct
  source 1..75: mol_type = other DNA
ggaattgattataaaacaatatcatatcacaaaataagagccctaaataaacttaacataaaaggtactgtttag

SEQ ID NO: 796750 - DNA, 75 bp, synthetic construct
  source 1..75: mol_type = other DNA
cttactcgttaaaacaaatagccattattaaaggaattgattataaaacagtatcatatcacaaaataagagccc

SEQ ID NO: 796751 - DNA, 75 bp, synthetic construct
  source 1..75: mol_type = other DNA
tatattttcaatgaaatgatttttcattccgaaaaaagcagagcactagaaataagtacatcaaatcacaatatg

SEQ ID NO: 796752 - DNA, 75 bp, synthetic construct
  source 1..75: mol_type = other DNA
gatgaccaaaaatcatgatataactcatttcttctggcgtgaatcgcttagacttatatatgatgaatgctatat

SEQ ID NO: 796753 - DNA, 75 bp, synthetic construct
  source 1..75: mol_type = other DNA
gtaccttagttatattgttcctttcgtacagggaagcggtcaggaagtggcttccaggattattggtcaggatgg

SEQ ID NO: 796754 - DNA, 75 bp, synthetic construct
  source 1..75: mol_type = other DNA
gccgggagtgattggcccggatgatttaccgccgggctggggactgctgcatgcaattaacgggcggatcaggaa

SEQ ID NO: 796755 - DNA, 75 bp, synthetic construct
  source 1..75: mol_type = other DNA
cttgcgcgtaggttgggctgggaattctaaatgggcgggagagttagaggatttcaaaggttaccattctttatt

SEQ ID NO: 796756 - DNA, 75 bp, synthetic construct
  source 1..75: mol_type = other DNA
tatgatggtgaaggcttcctttctacatttctttttggtggtgcgagtgttattaaaatcgcgaccctgaaaaat

SEQ ID NO: 796757 - DNA, 75 bp, synthetic construct
  source 1..75: mol_type = other DNA
ttatatgatatatactcatcaatagccgagtatcctaatccgtcagttcttgctgaagatggtgtcgatttaaaa

SEQ ID NO: 796758 - DNA, 75 bp, synthetic construct
  source 1..75: mol_type = other DNA
ggtacgatggtgacgtattcactctgaacgtatccaattccaccattgatgatgactatgaagctctttacttca

SEQ ID NO: 796759 - DNA, 75 bp, synthetic construct
  source 1..75: mol_type = other DNA
atgaagaaattattaaaatggattttatatattttcatcgggttggtgattattggatattttgcaggcaataac

SEQ ID NO: 796760 - DNA, 75 bp, synthetic construct
  source 1..75: mol_type = other DNA
tctgaacgtcggctggttaaaacactgctcgctgattttcagagggttcacggtaaaacagcacttttattccgg

SEQ ID NO: 796761 - DNA, 75 bp, synthetic construct
  source 1..75: mol_type = other DNA
cgccgtggagcatcatgccttgttgaggtgaaatgttcgcgggcagactttctggcagaccggaaaaaagtgttc

SEQ ID NO: 796762 - DNA, 75 bp, synthetic construct
  source 1..75: mol_type = other DNA
gctgggacggcgacaggctgacgacggtacagaccgacaccacgcgtatccagacggtataccagccggggagct

SEQ ID NO: 796763 - DNA, 75 bp, synthetic construct
  source 1..75: mol_type = other DNA
cgaatggcgaaacgggtatggcggcgggagcgtgacctgacggggtggatgtcgctgtcgcgtaaaccggaggtg

SEQ ID NO: 796764 - DNA, 75 bp, synthetic construct
  source 1..75: mol_type = other DNA
gagcgctatcacctgcaggagtggctggcaaaaaacccccaagcactgacccgcgataatgacgacgaactgcta

SEQ ID NO: 796765 - DNA, 75 bp, synthetic construct
  source 1..75: mol_type = other DNA
acggtacctccccaacaatcgatttccgcggtaggtcaagatatttattggcgagaagctgataaaacaacctta

SEQ ID NO: 796766 - DNA, 75 bp, synthetic construct
  source 1..75: mol_type = other DNA
catctattcaatctatttataactggtatattgataacagactctttgttaataggagatatcaacgtaaattag

SEQ ID NO: 796767 - DNA, 75 bp, synthetic construct
  source 1..75: mol_type = other DNA
ggttgcgcgaagtgatcgagaagctcaatgactggccgtcgaaccaagtgcatgaactgctgccctggaacttct

SEQ ID NO: 796768 - DNA, 75 bp, synthetic construct
  source 1..75: mol_type = other DNA
gcacaaatagatccagatatgtcacacatttggggcggttctctttttgggtgtctaaatggttgtctacctgct

SEQ ID NO: 796769 - DNA, 75 bp, synthetic construct
  source 1..75: mol_type = other DNA
gggcaaccagcttaatgaggagaacccgcatcacctgtatcagccataccgtctgccggggcagcagcatgatga

SEQ ID NO: 796770 - DNA, 75 bp, synthetic construct
  source 1..75: mol_type = other DNA
actgaaggcgtcccgctgcctgatgcgatcttagctgaaatccaccgtgtatctaatcgccgggaagtaaccgtt

SEQ ID NO: 796771 - DNA, 75 bp, synthetic construct
  source 1..75: mol_type = other DNA
aagcggttttctgggtatcaccattgggctgatgatcctttattttgcaaagctagactcacgtgttctgatcgc

SEQ ID NO: 796772 - DNA, 75 bp, synthetic construct
  source 1..75: mol_type = other DNA
aactttttcagggcatgatatttaccctcttgattacttttgctactggtcttggtaacgttctgtccgagttct

SEQ ID NO: 796773 - DNA, 75 bp, synthetic construct
  source 1..75: mol_type = other DNA
ctcttgcaatgtccattatgcgtaatgcgactgagaacgaaataaatgatgtttttgatagaattaatacatacg

SEQ ID NO: 796774 - DNA, 75 bp, synthetic construct
  source 1..75: mol_type = other DNA
ctattctggcgaaatacatccagttcaatcagcctcacgccatgttctggctgggatttgatgttgaccgcatcg

SEQ ID NO: 796775 - DNA, 75 bp, synthetic construct
  source 1..75: mol_type = other DNA
tatctaccgtggaggggagcagttacagccctggcaacgctcgtttgtgactatgtttctggaacatagggagat

SEQ ID NO: 796776 - DNA, 75 bp, synthetic construct
  source 1..75: mol_type = other DNA
tgcggcagtcggtacggtggttattggtggtggtataataatatacaacaatcgcgaggctgttggggacgcgat

SEQ ID NO: 796777 - DNA, 75 bp, synthetic construct
  source 1..75: mol_type = other DNA
tcgtccatcaaatgactatgaaataatctttccaaataataatgatttagttgaagaaattaaaagagaggccgt

SEQ ID NO: 796778 - DNA, 75 bp, synthetic construct
  source 1..75: mol_type = other DNA
aacgtggcgtaacagtgccgccacctggacatctgcggaccgggccagccatttcagttcatgggcacgtcgtgg

SEQ ID NO: 796779 - DNA, 75 bp, synthetic construct
  source 1..75: mol_type = other DNA
aagcgttaagggtgaataaagcgcctaacagcatggcctcatggaaaatgtatcatccgatcacagctgataatg

SEQ ID NO: 796780 - DNA, 75 bp, synthetic construct
  source 1..75: mol_type = other DNA
atagcctgcactcgttgcaggaggtgtcttttagtagcctcggttttaccgagcgctatcatcttcaggagtggt

SEQ ID NO: 796781 - DNA, 75 bp, synthetic construct
  source 1..75: mol_type = other DNA
agttatcaaagactaatggaagccttcatgaatgaagctgaaaaaaaagcagagttaattttaaataagggtgag

SEQ ID NO: 796782 - DNA, 75 bp, synthetic construct
  source 1..75: mol_type = other DNA
gggttcttaaagacattcaagaagttgaagaagaagctatgagggtaataagaaacagtgcagaacataatctcg

SEQ ID NO: 796783 - DNA, 75 bp, synthetic construct
  source 1..75: mol_type = other DNA
cgtgactacgactggaacgacaacggacagctaattcgcatcagcggcccgcaggagagccgggagtaccgttac

SEQ ID NO: 796784 - DNA, 75 bp, synthetic construct
  source 1..75: mol_type = other DNA
tcagatgaagatcatcgtttcgtatactgcaaacgccccgacagaaccaatgaaagatcaggggtggaatgcggc

SEQ ID NO: 796785 - DNA, 75 bp, synthetic construct
  source 1..75: mol_type = other DNA
tgcaaatggtcaatgggcatggctagaaaatgaaacgaatattaatgtgtcaagtgagttagtgaggtttttaaa

SEQ ID NO: 796786 - DNA, 75 bp, synthetic construct
  source 1..75: mol_type = other DNA
aagctatcgaccgcataggccgccttgaacatcttgaaaccgccatgagacgtgccactgtacatctggccaccc

SEQ ID NO: 796787 - DNA, 75 bp, synthetic construct
  source 1..75: mol_type = other DNA
ttatcgtctcccattaccgttacgattgagtgtaaggatggttattattttattaatttctccggagataaatca

SEQ ID NO: 796788 - DNA, 75 bp, synthetic construct
  source 1..75: mol_type = other DNA
tggaacaaacaatgaaatggattgctacttatctgccgacgctttacgcggcaggcgctgcgctgagcatttcgg

SEQ ID NO: 796789 - DNA, 75 bp, synthetic construct
  source 1..75: mol_type = other DNA
tcgaacaaacaatgaaatggatcgctacttatctgccgacactgtttgcggctggtgcggcgctgagtatttcgg

SEQ ID NO: 796790 - DNA, 75 bp, synthetic construct
  source 1..75: mol_type = other DNA
attacagtgtggtgatcggttggttggcagatgatttgactgaagaagagcatgctgaacttgttgatgcggcaa

SEQ ID NO: 796791 - DNA, 75 bp, synthetic construct
  source 1..75: mol_type = other DNA
gaatgacgacttttggaaagatggtgaagaaggtgcttatgcgatgggttatgaggatgggcgtgacaaaacggt

SEQ ID NO: 796792 - DNA, 75 bp, synthetic construct
  source 1..75: mol_type = other DNA
tccaatggcttcggtgatgcaatggatgcttatgaggaaaacatccgctctgctggagtcaaagtgaaggagtaa

SEQ ID NO: 796793 - DNA, 75 bp, synthetic construct
  source 1..75: mol_type = other DNA
ctcaactatatcgatgatgaggattaccggcgtcggatactcactcagctcaaccggggagaaggacgccatgca

SEQ ID NO: 796794 - DNA, 75 bp, synthetic construct
  source 1..75: mol_type = other DNA
caaaccgcagacgttatggtcttgctgcattcattgggctgattgctggcgttgtttccgcatttgttaagtggg

SEQ ID NO: 796795 - DNA, 75 bp, synthetic construct
  source 1..75: mol_type = other DNA
ggtgattgaccagggcgcagacgacaccaccaacgccgtgtcgatccgtaacttctttaagcgcgtgaccggggt

SEQ ID NO: 796796 - DNA, 75 bp, synthetic construct
  source 1..75: mol_type = other DNA
ttgcttacctcgacgagcagaccaaacgcatgatccgccgcgctatcttaaaagcggtggcaatccccggttatc

SEQ ID NO: 796797 - DNA, 75 bp, synthetic construct
  source 1..75: mol_type = other DNA
tgcatcccgagtattttattatggttttgttaagtattatcgccgctattctcttgaggttttaatggcatttgc

SEQ ID NO: 796798 - DNA, 75 bp, synthetic construct
  source 1..75: mol_type = other DNA
tatcattatgtgtatgaacattctaaaaatcatcaggtgaaaatgcaaaactatgttgctttgtatggtttttgt

SEQ ID NO: 796799 - DNA, 75 bp, synthetic construct
  source 1..75: mol_type = other DNA
taatcgttctatcatatatttcaggtcacttcatatctattctatcatcctgtttaattgaaaaatacatgaaca

SEQ ID NO: 796800 - DNA, 75 bp, synthetic construct
  source 1..75: mol_type = other DNA
aatctggatctgctgtcagcactaacaggcagcggcgaaacggatatgcgaactgcttcaagtggtgggtttgtg

SEQ ID NO: 796801 - DNA, 75 bp, synthetic construct
  source 1..75: mol_type = other DNA
gcgcagaaagatagagcatgaatcagaaagattcgcgccatgtgcttttgcccttgagcaattccttaaagagta

SEQ ID NO: 796802 - DNA, 75 bp, synthetic construct
  source 1..75: mol_type = other DNA
ttctgtaaaatacgctggtgagagggggttctggctggaagtgcacggagactcaatgacttcgcccgtaggaat

SEQ ID NO: 796803 - DNA, 75 bp, synthetic construct
  source 1..75: mol_type = other DNA
atcacggcgggcggagtcagcatctgacggcggcactggatctgctcacagacaacgccctgcgccttgacctaa

SEQ ID NO: 796804 - DNA, 75 bp, synthetic construct
  source 1..75: mol_type = other DNA
ccttcacagataaaacgggtaaaattgcattaaatggcgggtgggggcttgggataaaggcagaccaggtaagcg

SEQ ID NO: 796805 - DNA, 75 bp, synthetic construct
  source 1..75: mol_type = other DNA
ggtgctggacaaataccggatatgtctagttttacgagtggtaccggctgggcatctttaccgggtgggactatt

SEQ ID NO: 796806 - DNA, 75 bp, synthetic construct
  source 1..75: mol_type = other DNA
gaaaaaaactctctgagttagttgaggaagaactggagtttatgatcagaaaaggaatttttcaggagggagaac

SEQ ID NO: 796807 - DNA, 75 bp, synthetic construct
  source 1..75: mol_type = other DNA
acttgtctgatggtacctctttcaataacaaggcattagggctgacaggtatgcttgccagctactcgtcatcca

SEQ ID NO: 796808 - DNA, 75 bp, synthetic construct
  source 1..75: mol_type = other DNA
atccacatcactaaagaggccggcgtcgttgttgacggcacaaccgggaatgcgattgagtttggtaacgcgatc

SEQ ID NO: 796809 - DNA, 75 bp, synthetic construct
  source 1..75: mol_type = other DNA
agttttaccatgggcagctgcaggtcttgctgcagtagctacgggaattgctatatataccttaagtgacgatga

SEQ ID NO: 796810 - DNA, 75 bp, synthetic construct
  source 1..75: mol_type = other DNA
ttctttgccacattttatacactgagccggcctgtttcgatggatgcactctccagcctgtccgttggtgcgcag

SEQ ID NO: 796811 - DNA, 75 bp, synthetic construct
  source 1..75: mol_type = other DNA
tgtctgtgtctgggtgaaaaaataccatgaggatgccatcaaccgtgttgtgttgacggttgatctcagtaaggc

SEQ ID NO: 796812 - DNA, 75 bp, synthetic construct
  source 1..75: mol_type = other DNA
tttcggtgtgggaatggcttcaggtaccgatgcctataatggggcattaactaaagccacggcaaccaaccacga

SEQ ID NO: 796813 - DNA, 75 bp, synthetic construct
  source 1..75: mol_type = other DNA
gccgtttacccgcgtggaaagcctcgatttcgacgatcacccgttcaccgttcagcagtgggatgagccatgcgc

SEQ ID NO: 796814 - DNA, 75 bp, synthetic construct
  source 1..75: mol_type = other DNA
gttccttcagtgttcaaggagccgaaaaacattctgtacactctggatgcgcgtgaaatgcgtgacccggaacat

SEQ ID NO: 796815 - DNA, 75 bp, synthetic construct
  source 1..75: mol_type = other DNA
acaggccagcggactgattacttcaccgcaaaccataaaagcagccctggcacatcagagcggaacatggataac

SEQ ID NO: 796816 - DNA, 75 bp, synthetic construct
  source 1..75: mol_type = other DNA
tcgaggaaggatgcggtaaatgcgtggcctgtatgacgatttgcccgaccggtgccatcgtcgagccatataccg

SEQ ID NO: 796817 - DNA, 75 bp, synthetic construct
  source 1..75: mol_type = other DNA
gagttttataataaataataggaaggatgtaaaaaatttttatgatataaagataaatgcggacaatgagtcaaa

SEQ ID NO: 796818 - DNA, 75 bp, synthetic construct
  source 1..75: mol_type = other DNA
tagaatccgctgtaaatgtaattaaatcatttgtctttaatgaaaaggagcactacaaagatttttatgatctcg

SEQ ID NO: 796819 - DNA, 75 bp, synthetic construct
  source 1..75: mol_type = other DNA
tggaaaatgcaatgagagtaattaaattatttgtctgcaatgggataaaaaactataaagatttttatgatctct

SEQ ID NO: 796820 - DNA, 75 bp, synthetic construct
  source 1..75: mol_type = other DNA
aaaaagcccgccagttgaagaaaaagcaggcttataaaccggaccccgaagcgtcattcagttggtcggcaaata

SEQ ID NO: 796821 - DNA, 75 bp, synthetic construct
  source 1..75: mol_type = other DNA
atggcactcccccgtattactcaaaaagagatgactgagcgtgaacagcgcgaacttaaaacactgctggatcgg

SEQ ID NO: 796822 - DNA, 75 bp, synthetic construct
  source 1..75: mol_type = other DNA
gttattatagatatcatagttgtaagtacgatagctggtattgctgggggcgtgggagcatggatctttgccaag

SEQ ID NO: 796823 - DNA, 75 bp, synthetic construct
  source 1..75: mol_type = other DNA
ggagcgaagagaagtttttaaaagtcacggaaggctcagcgattaggcggattggtcacttacgctggctgcgaa

SEQ ID NO: 796824 - DNA, 75 bp, synthetic construct
  source 1..75: mol_type = other DNA
ataggccacctgcgctggctgcgtaatatcgccgtagcattaggcaatgcgccctgggatgaagcgattctggcg

SEQ ID NO: 796825 - DNA, 75 bp, synthetic construct
  source 1..75: mol_type = other DNA
ttcttctttttaggcgaattgctggtcgatattccgctgcccgtggatcaaccagtcgaggaaggatgcggtaaa

SEQ ID NO: 796826 - DNA, 75 bp, synthetic construct
  source 1..75: mol_type = other DNA
ttaaaggttccgacgattaatataggcgatcgccaaaaaggaagggttagaggtgattcggtaatagataccata

SEQ ID NO: 796827 - DNA, 75 bp, synthetic construct
  source 1..75: mol_type = other DNA
atcgcgcaggataaacctgacgttgccgggctttatcacctgatcgcctcaggcactaccacctggttcgactat

SEQ ID NO: 796828 - DNA, 75 bp, synthetic construct
  source 1..75: mol_type = other DNA
cggcaccaccacctggttcgactatgcccagcgggtgttcgctaccgcgcgtgcggcgggcgttgagctggccgt

SEQ ID NO: 796829 - DNA, 75 bp, synthetic construct
  source 1..75: mol_type = other DNA
atgcatattctgctgttcggcaaaaatggccaggtgggctgggagctgcagcgcgcgctgctgccgctggggcgt

SEQ ID NO: 796830 - DNA, 75 bp, synthetic construct
  source 1..75: mol_type = other DNA
ccgatcccggaaccgctgcgctttatcgagccgcgcgaaacggagacccgcactatgcacgcgctggaggagtac

SEQ ID NO: 796831 - DNA, 75 bp, synthetic construct
  source 1..75: mol_type = other DNA
aaaattaaactttggcagggcttactggcaggtgctttagcacaactttttgttcatatgatttcattccctctc

SEQ ID NO: 796832 - DNA, 75 bp, synthetic construct
  source 1..75: mol_type = other DNA
ctcacgtcaccttatctttcgtaccagttgggtttatgctgcgcgcggtgccaacttcgccaaaactatgctgcg

SEQ ID NO: 796833 - DNA, 75 bp, synthetic construct
  source 1..75: mol_type = other DNA
ggatgcaaattatacccgagaagcgcaggtatttggggagttgattcgctgtgagatataccgccagtcctgctt

SEQ ID NO: 796834 - DNA, 75 bp, synthetic construct
  source 1..75: mol_type = other DNA
atgattagtgcattcgatattttcaaaattgggattggtccctccagttcgcatacgggggggcaaatgaatgcc

SEQ ID NO: 796835 - DNA, 75 bp, synthetic construct
  source 1..75: mol_type = other DNA
cagtagtcgactcccggtggcggcaggcgcacatgtggttgattttcctgtagcaaaaaacattatttttcatcc

SEQ ID NO: 796836 - DNA, 75 bp, synthetic construct
  source 1..75: mol_type = other DNA
aacgtctacggcgaaaccaagctggcgggcgagcaggcggctgcgctctgctcccgtcacctgatcttccgcacc

SEQ ID NO: 796837 - DNA, 75 bp, synthetic construct
  source 1..75: mol_type = other DNA
aaataccgtccatttcagtaggtctgggggcgggtgacccggcgcagtattacaaagctgcgatgattgcggcgc

SEQ ID NO: 796838 - DNA, 75 bp, synthetic construct
  source 1..75: mol_type = other DNA
gcgcctggctgtttccccgctacagcggctctgaaaaggccgccgacaccctgagtctgtgccgggaaacggtct

SEQ ID NO: 796839 - DNA, 75 bp, synthetic construct
  source 1..75: mol_type = other DNA
cagacagcctggagagcaacaatccatcaatatccgggcctgttacaggtcagcttcatgcagccggagaaccgg

SEQ ID NO: 796840 - DNA, 75 bp, synthetic construct
  source 1..75: mol_type = other DNA
gaagagagaaggggggggcgtagaaagccacgtagaatgtccccgacaggacgacgcacttcagtgtttacggtt

SEQ ID NO: 796841 - DNA, 75 bp, synthetic construct
  source 1..75: mol_type = other DNA
ctcgccggaaatcgtcgtattccgctggaagaggcagagcagtacaagcgcggtcacggtgaagagatttggcct

SEQ ID NO: 796842 - DNA, 75 bp, synthetic construct
  source 1..75: mol_type = other DNA
gtgctcaatctgtacaatccggtgaataccgatttcgacttcaatgccaaagatccggcaaactccggcccttac

SEQ ID NO: 796843 - DNA, 75 bp, synthetic construct
  source 1..75: mol_type = other DNA
acaatggacgtcttttaaaaaccgtcaaacttaataataatctgctggaagtgacaaattccgggcaggaccctc

SEQ ID NO: 796844 - DNA, 75 bp, synthetic construct
  source 1..75: mol_type = other DNA
tcacagtcaacaaagtatggttgatacatttcgtgccggtcttttcgataatcaggacatcactatcgcggatca

SEQ ID NO: 796845 - DNA, 75 bp, synthetic construct
  source 1..75: mol_type = other DNA
gggccgatgtggtccgcgacggcatcgtctgggatttcttcggcgctgtcaccattgttcgtcgccatctcgaca

SEQ ID NO: 796846 - DNA, 75 bp, synthetic construct
  source 1..75: mol_type = other DNA
caatggagaaagctgtatttcactggaggaagaaccgccccccaaacagcagatagtctgcagccggtcctttag

SEQ ID NO: 796847 - DNA, 75 bp, synthetic construct
  source 1..75: mol_type = other DNA
tccccggatatgctggtgaaagagggcgacatgcgttctcttcgcgttcagcaagtttccacctcccgcggcatg

SEQ ID NO: 796848 - DNA, 75 bp, synthetic construct
  source 1..75: mol_type = other DNA
gctgtgtaaccagacgcctgccgcgacggaatctccgctgtggctgggggtggatctgggcacctgcgatgtggt

SEQ ID NO: 796849 - DNA, 75 bp, synthetic construct
  source 1..75: mol_type = other DNA
cccctcgactgcaaacggcggcaacgctgtgtaaccagacgcccgccacgacggagtctccgctgtggctggggg

SEQ ID NO: 796850 - DNA, 75 bp, synthetic construct
  source 1..75: mol_type = other DNA
ccatcaacgtgctggaatctgccgggctggaagtgagccatgtgctggatgagccaaccgcagtcgcggatctgc

SEQ ID NO: 796851 - DNA, 75 bp, synthetic construct
  source 1..75: mol_type = other DNA
ccagggcaggcccggcagttggcatggaaaacgaccatgttggcacgaagtgggactgttcggatgccgacaatc

SEQ ID NO: 796852 - DNA, 75 bp, synthetic construct
  source 1..75: mol_type = other DNA
ccgatcgcgcattgcaatcgcatctcaacagcgtctctgccacctggcacgccttcgggcagaccgcaaacaaaa

SEQ ID NO: 796853 - DNA, 75 bp, synthetic construct
  source 1..75: mol_type = other DNA
atgggccttatgaacgcatttgattcgcaaaccgaagattcttcacctgcaattggccgcaacttacgcagccgc

SEQ ID NO: 796854 - DNA, 75 bp, synthetic construct
  source 1..75: mol_type = other DNA
cgttgccctgctcgactggctgatcgccgcacgcccaaccgtggctgatcaggctctgcacgagcataacaacgt

SEQ ID NO: 796855 - DNA, 75 bp, synthetic construct
  source 1..75: mol_type = other DNA
ggacaacttgtttataaaaatcgtgcaggctgggcacatgaccgtttaaaacgtgccgggttgtcgcaaagtttg

SEQ ID NO: 796856 - DNA, 75 bp, synthetic construct
  source 1..75: mol_type = other DNA
gaaaaagagagtcagtacaagatagcaaaagacatgggtgtatctcaatcaattataagcaacataaaaactggc

SEQ ID NO: 796857 - DNA, 75 bp, synthetic construct
  source 1..75: mol_type = other DNA
cgcaaaccgaagattcttcacctgcaattggtcgcaacttgcgcagccgcccgctggcgcgtaaaaaactctccg

SEQ ID NO: 796858 - DNA, 75 bp, synthetic construct
  source 1..75: mol_type = other DNA
ggcgcaatatcgggtaccggtagtcggtagtgactccaacttactgatagtgttttatgttcagataatgcccga

SEQ ID NO: 796859 - DNA, 75 bp, synthetic construct
  source 1..75: mol_type = other DNA
tgattccattcctattctgtgcattaccggccaggcaccgcgcgcccgtctgcataaagaagattttcaggccgt

SEQ ID NO: 796860 - DNA, 75 bp, synthetic construct
  source 1..75: mol_type = other DNA
ggtatcggtaaccgttttgctaaccgtcataccggttcggtagagaaatacaccgaagggcgcaaaatcgttcat

SEQ ID NO: 796861 - DNA, 75 bp, synthetic construct
  source 1..75: mol_type = other DNA
caactgccgtctgaacgcgaactcatggcgttctttaatgtcgggcgtccttcggtacgtgaagcgctggcggcg

SEQ ID NO: 796862 - DNA, 75 bp, synthetic construct
  source 1..75: mol_type = other DNA
ggactactgcgtgcaactcgctttcgagaatatcaactccagtgaagtgaatggctacggtgttgaccacgtaaa

SEQ ID NO: 796863 - DNA, 75 bp, synthetic construct
  source 1..75: mol_type = other DNA
caccgaagggcgcaaaatcgtccacatcgatattgagccgacacaaattggccgcgtgctgtgtccggatctggg

SEQ ID NO: 796864 - DNA, 75 bp, synthetic construct
  source 1..75: mol_type = other DNA
ggcggtttatctaccttgcgcgtcaggttaaccctgacatggcggactacatcaaaaaactgaaactgccgggaa

SEQ ID NO: 796865 - DNA, 75 bp, synthetic construct
  source 1..75: mol_type = other DNA
aaactggggatgggtggcaacggctgacgttggtaatgggcgagataagtcggtcctcaacatctgcaaggtatc

SEQ ID NO: 796866 - DNA, 75 bp, synthetic construct
  source 1..75: mol_type = other DNA
gtggttaatgccaatcgccatcaggaaatctatcaggcaaccggtctgaaagtgatagcggattctctggcggat

SEQ ID NO: 796867 - DNA, 75 bp, synthetic construct
  source 1..75: mol_type = other DNA
ctgtataagcaagaacttcagagtattgagccccctggtaatgccattacccctgaacagcgagaaattcagcag

SEQ ID NO: 796868 - DNA, 75 bp, synthetic construct
  source 1..75: mol_type = other DNA
gtgttgacgaactcctgccatggaacgtggttctcaccaataaataagcgtcaatacggtgctccgttgacgctt

SEQ ID NO: 796869 - DNA, 75 bp, synthetic construct
  source 1..75: mol_type = other DNA
tgagtccacgcagcaggacggcagttggacaagtgtgacctccggccatggtactggtaagtcggatatgacgag

SEQ ID NO: 796870 - DNA, 75 bp, synthetic construct
  source 1..75: mol_type = other DNA
tctgggaagtgaagaagctctcgccggtgaacacgcagatcatcttctgtatattatcgatgaagcctccggtgt

SEQ ID NO: 796871 - DNA, 75 bp, synthetic construct
  source 1..75: mol_type = other DNA
ttgaatgtcttcgttaacctgctggggtcttttgccatgacggcgctggctttttggctgttttcggcatcaacc

SEQ ID NO: 796872 - DNA, 75 bp, synthetic construct
  source 1..75: mol_type = other DNA
tttttgttatccagggagggatacaaagtgttttggagaagttatatctatcttacgagatattgccattacaag

SEQ ID NO: 796873 - DNA, 75 bp, synthetic construct
  source 1..75: mol_type = other DNA
tctggcgaaagaacgtaatggcgcagatattcccaatgtggcgttatttttacagaatctcggtctcttagacac

SEQ ID NO: 796874 - DNA, 75 bp, synthetic construct
  source 1..75: mol_type = other DNA
atgagcaaaactcgtcggactaaacgcaccttttccccggagttcaggctcgaagctatcgagcaagtagttaaa

SEQ ID NO: 796875 - DNA, 75 bp, synthetic construct
  source 1..75: mol_type = other DNA
aaaagtggcaggtgttggcatccttctgcgatttttctatttttattcatgcaccagctcaaattctgcgggaac

SEQ ID NO: 796876 - DNA, 75 bp, synthetic construct
  source 1..75: mol_type = other DNA
ggatttgcctggtttagccggatgacgaacattgatcccgtgtggaaagtgctaatcactaccgggttttgtggc

SEQ ID NO: 796877 - DNA, 75 bp, synthetic construct
  source 1..75: mol_type = other DNA
tcacaaacgaaatcttccgcgttccggcgcgccgccagcgcaagcccgcggttaagccgtccgacatcccgacca

SEQ ID NO: 796878 - DNA, 75 bp, synthetic construct
  source 1..75: mol_type = other DNA
cgagaagagtttcgataaatggcttaccgggcagccgggtgaacgtattgtgcgtaaagaccgctacggtcgcgt

SEQ ID NO: 796879 - DNA, 75 bp, synthetic construct
  source 1..75: mol_type = other DNA
atgctgggttccagggacgatgaaagtacccgtagggccggaaatatcctcaaaatgggagggcaggcaagtaaa

SEQ ID NO: 796880 - DNA, 75 bp, synthetic construct
  source 1..75: mol_type = other DNA
agggggatctacttgtttgcgagggaggtgagataggccggtgtgcaatttgggataatcaaatccaagactgtt

SEQ ID NO: 796881 - DNA, 75 bp, synthetic construct
  source 1..75: mol_type = other DNA
caactttattagttggcgttttgcgttgttatgcggttgtattttgctggcactggcttttctgctcgggcgcgt

SEQ ID NO: 796882 - DNA, 75 bp, synthetic construct
  source 1..75: mol_type = other DNA
ggtaaaccctgacatggcggactacatcaaaaaactgaaactgccggggattcatctgcgtgaagaatctcgccg

SEQ ID NO: 796883 - DNA, 75 bp, synthetic construct
  source 1..75: mol_type = other DNA
gatatgctggtgaaagagggcgacatgcgttctcttcgcgttcagcaagtttccacctcccgcggcatgattact

SEQ ID NO: 796884 - DNA, 75 bp, synthetic construct
  source 1..75: mol_type = other DNA
ttcaccattacaatagctggctggatgcgcatcaattgcgccccttcaaaggcgcaccagagacatttgacgttg

SEQ ID NO: 796885 - DNA, 75 bp, synthetic construct
  source 1..75: mol_type = other DNA
taaccaccttctgggaatatctcgcgcaacaagacccggaactgcccgctattcagacgctcccgatggatggtt

SEQ ID NO: 796886 - DNA, 75 bp, synthetic construct
  source 1..75: mol_type = other DNA
tgatgatgaaattgagaatgttcataaaccgctactgcgtatgctggcggccttacaggcggtaagtccgcagcg

SEQ ID NO: 796887 - DNA, 75 bp, synthetic construct
  source 1..75: mol_type = other DNA
tgaacggacacatctacagagtaccagatcgtcgtaagcgtaaaccggagctgaagccttccgaaataccaacac

SEQ ID NO: 796888 - DNA, 75 bp, synthetic construct
  source 1..75: mol_type = other DNA
gttaagccgtccgaaatcccgactatgaaggactacaccgcccgcctggtggatcagaaatggctgcgtctcgcg

SEQ ID NO: 796889 - DNA, 75 bp, synthetic construct
  source 1..75: mol_type = other DNA
tcaccaacgaaatctaccgggtccggacacgcactaagcgaaagcctgaactcaagccatccgaaatcccatcac

SEQ ID NO: 796890 - DNA, 75 bp, synthetic construct
  source 1..75: mol_type = other DNA
tgccgccgcaggtaaggatgttgccgccctgaatggtgtggatgtcagggctttcacgggtgaggcgaaattctg

SEQ ID NO: 796891 - DNA, 75 bp, synthetic construct
  source 1..75: mol_type = other DNA
agcctcgagcaaaacggacccgctgcgcccatgctttatcatttacgaagagggtcataattttgccccggccgg

SEQ ID NO: 796892 - DNA, 75 bp, synthetic construct
  source 1..75: mol_type = other DNA
atggcttataaagttttaggtaaattagtcggtaatactggtgatgccagccagttaactatggttgtgcaagac

SEQ ID NO: 796893 - DNA, 75 bp, synthetic construct
  source 1..75: mol_type = other DNA
ttctacgaagacctgatgaataaccagaaaatcccggacagtggcgttctgacgcagaaagtgaaagaacagatt

SEQ ID NO: 796894 - DNA, 75 bp, synthetic construct
  source 1..75: mol_type = other DNA
gcagtggctgtactgctaacggtaactgtctttctggcgggaacggtgaccgacaggtttatgagaaactggcca

SEQ ID NO: 796895 - DNA, 75 bp, synthetic construct
  source 1..75: mol_type = other DNA
atgaaacgtcttctgtcattgctgctgttgctggcagtcagtgtggcacaggctgacagcaacagtgattaccgg

SEQ ID NO: 796896 - DNA, 75 bp, synthetic construct
  source 1..75: mol_type = other DNA
cgttcagatttgaacctgtacagttaaacttcaacaatcaaaacacgatgcgcttttataagcacatctttgaaa

SEQ ID NO: 796897 - DNA, 75 bp, synthetic construct
  source 1..75: mol_type = other DNA
caactcagtttgtacctttcagttttgaaccagtacaactcaacttcaataaccacaacaccatgaggttttaca

SEQ ID NO: 796898 - DNA, 75 bp, synthetic construct
  source 1..75: mol_type = other DNA
ggccggtgcattgctcactggcacactgacgtgtttgttgagaaaaaagcgctgcctgactggctgagagcattc

SEQ ID NO: 796899 - DNA, 75 bp, synthetic construct
  source 1..75: mol_type = other DNA
gtggcggaaacgggcgatgtctacgacgcgctggcggataaatatctggcgattggctgctcctgtgtttcgccg

SEQ ID NO: 796900 - DNA, 75 bp, synthetic construct
  source 1..75: mol_type = other DNA
acacttaacgtatcccgtcgtgtaaaaggtgcttacagtcccgatgagtttatcgaaaaggtaaaacagtacaaa

SEQ ID NO: 796901 - DNA, 75 bp, synthetic construct
  source 1..75: mol_type = other DNA
aattcaggactggtttaatgaattgcacgacgaaaataatttaatgaaggagaatctggaacaccatatcgccac

SEQ ID NO: 796902 - DNA, 75 bp, synthetic construct
  source 1..75: mol_type = other DNA
atgaaacgtcttctgccattgctgctggggctggcagtcagtgtggcacaggctgacagcaacagtgattaccgt

SEQ ID NO: 796903 - DNA, 75 bp, synthetic construct
  source 1..75: mol_type = other DNA
ttaatatcacgctttgacattctggggggggttttattaaatctaattggtgagtttcttgtattcagtatgcta

SEQ ID NO: 796904 - DNA, 75 bp, synthetic construct
  source 1..75: mol_type = other DNA
accctgggggcggacagtcaggaaaacggagaaggtgctgcggcagatatcggtaactggaatttgcaggagttt

SEQ ID NO: 796905 - DNA, 75 bp, synthetic construct
  source 1..75: mol_type = other DNA
agcgatatcgtggcgctggagaatgcgctggatatgtaccgactggataacgggcgttatccgaccacagaacag

SEQ ID NO: 796906 - DNA, 75 bp, synthetic construct
  source 1..75: mol_type = other DNA
cggccaatatggcggacgcccgcaactaccgtaccggtggatacatcaaacgactgccaaaggatccgtggggca

SEQ ID NO: 796907 - DNA, 75 bp, synthetic construct
  source 1..75: mol_type = other DNA
accctgggggcagatggtcaggaaaacggggaaggcgctggcgcagatatcggtaactggaatttgcaggagttt

SEQ ID NO: 796908 - DNA, 75 bp, synthetic construct
  source 1..75: mol_type = other DNA
atgctgaaaagtgaaccgtcattcgcgtctctgctcgttaagcaaagccctggcatgcactacggacacggctgg

SEQ ID NO: 796909 - DNA, 75 bp, synthetic construct
  source 1..75: mol_type = other DNA
aggcctcggcgtggtttccctgaacggcaagatggtggacggtccggttatcgatcgcgcccgtctggtgctctc

SEQ ID NO: 796910 - DNA, 75 bp, synthetic construct
  source 1..75: mol_type = other DNA
tcgctcgctgctccattttgcaggccgcgcgctctgccggtatccaggcgttcgatacggtctattccgacgcta

SEQ ID NO: 796911 - DNA, 75 bp, synthetic construct
  source 1..75: mol_type = other DNA
gcgatggtcagcaactccttcatctacccggctgatgccctgatgtttgacctcgaagactccgtagcattgcgt

SEQ ID NO: 796912 - DNA, 75 bp, synthetic construct
  source 1..75: mol_type = other DNA
acgttaggcgcggatggccaggaaaatggcgaaggagctgcgactgacattggcaactggaacttgcgggaattt

SEQ ID NO: 796913 - DNA, 75 bp, synthetic construct
  source 1..75: mol_type = other DNA
gcagcttgagaacgcgctggcgcgctgtgccagccaggtaaaaatgattaaacactgtcaggacgaaaacgatgc

SEQ ID NO: 796914 - DNA, 75 bp, synthetic construct
  source 1..75: mol_type = other DNA
ggcaagatggtggacggtccggttatcgatcgcgcccgtctggtgctctctcgtgcagaactttccggcatccgc

SEQ ID NO: 796915 - DNA, 75 bp, synthetic construct
  source 1..75: mol_type = other DNA
actggattatggacctgcagaatgacagaggggagccagtaatctccggtattcctctcgtcactggcgctgatc

SEQ ID NO: 796916 - DNA, 75 bp, synthetic construct
  source 1..75: mol_type = other DNA
ggcggtgatgtcttctgcctcgatggtgaatgcgataaggcacagagcggtaagaacagtgactttggggcggcc

SEQ ID NO: 796917 - DNA, 75 bp, synthetic construct
  source 1..75: mol_type = other DNA
gaggtcatcccgggttataccaactcccctcctgaaagcgggtattacggtggcgtgacctcctctggcgtcgat

SEQ ID NO: 796918 - DNA, 75 bp, synthetic construct
  source 1..75: mol_type = other DNA
gaacacgcactgtacataccatacccggaacggatgggggcaaatccatcaggcgtttgataccgatatgcaggt

SEQ ID NO: 796919 - DNA, 75 bp, synthetic construct
  source 1..75: mol_type = other DNA
tggcggttaattattccgggatggtgtgggcgtttttcgccgcgctggctgccggctggctggcttctgtaagtg

SEQ ID NO: 796920 - DNA, 75 bp, synthetic construct
  source 1..75: mol_type = other DNA
cgcttgccgccgcaggtaaggatgttgccgccctgaatggtgtggatgtcagggctttcacgggcgaggcgaaat

SEQ ID NO: 796921 - DNA, 75 bp, synthetic construct
  source 1..75: mol_type = other DNA
ggtgaaccgggctgacagcattgtgggaaacacaggccagcagtgtagtgcacagcagataaaccgcagtgaatt

SEQ ID NO: 796922 - DNA, 75 bp, synthetic construct
  source 1..75: mol_type = other DNA
caagacgtgctgatatcgtttcagtttcatcggatattgcaactgtttatgaaataaaaagtgaaaaagattccg

SEQ ID NO: 796923 - DNA, 75 bp, synthetic construct
  source 1..75: mol_type = other DNA
cgcaacatgctctctcctgctgactttggcccgaaactgctggaagtgatcaaagaacatttcccgcaggatgtg

SEQ ID NO: 796924 - DNA, 75 bp, synthetic construct
  source 1..75: mol_type = other DNA
cggcaacaaatacgtggttggcgtgcgcaacatgctctctcctgccgactttggcccgaaattgctggaagtgat

SEQ ID NO: 796925 - DNA, 75 bp, synthetic construct
  source 1..75: mol_type = other DNA
aaagagtgggccccgaaagtcgagtgggttgaatcctgtccgttcgacaaatcagaagaagttctgcaggggagc

SEQ ID NO: 796926 - DNA, 75 bp, synthetic construct
  source 1..75: mol_type = other DNA
gggattgggtttggcagcgggaaaaatcctgactgtcgcggtattacagtggatgaactgcagtccctgaagttt

SEQ ID NO: 796927 - DNA, 75 bp, synthetic construct
  source 1..75: mol_type = other DNA
tggctgcgctggttacattcggaacagggttgcaggccagtgataaatatacgccaggcaagcagtttgcagaca

SEQ ID NO: 796928 - DNA, 75 bp, synthetic construct
  source 1..75: mol_type = other DNA
gtgggcgtttttcgccgcgctggctgccggttggctggccccggtgagtggattgtccgcgttctgggcgagcgt

SEQ ID NO: 796929 - DNA, 75 bp, synthetic construct
  source 1..75: mol_type = other DNA
cggaaagcggacatggtgtggataccattgtggtagacttcagtgcactgcttgggcatctcagttccgcattcc

SEQ ID NO: 796930 - DNA, 75 bp, synthetic construct
  source 1..75: mol_type = other DNA
gacagactggatttcactaacttctacgaagacctgatgaataaccagaaaatcccggacagtggcgttctgacg

SEQ ID NO: 796931 - DNA, 75 bp, synthetic construct
  source 1..75: mol_type = other DNA
gaacaggacgctggtgaaagatggtcagtcatacagcatgtaccagagctgctgggcataccgggacacgtatgt

SEQ ID NO: 796932 - DNA, 75 bp, synthetic construct
  source 1..75: mol_type = other DNA
actggtatatgcaaaccagatgtacatcgacacagtggcagtgttctgcggaaatctgacgcttatcaaaatcca

SEQ ID NO: 796933 - DNA, 75 bp, synthetic construct
  source 1..75: mol_type = other DNA
gcgctgactggtgcaatatcttcgtcgtcggagatctgcatgggtgctacacgctgctgatgaacgaactcgaca

SEQ ID NO: 796934 - DNA, 75 bp, synthetic construct
  source 1..75: mol_type = other DNA
gttcctctggtgtgatgaatactttaacagtcccggaccggattcactactcagttatctgtttagccctgagca

SEQ ID NO: 796935 - DNA, 75 bp, synthetic construct
  source 1..75: mol_type = other DNA
cgccttttactccgaagaaggtgcctgtctgcatgaatatgccacgtattcctgcgagtccaggacatccgggaa

SEQ ID NO: 796936 - DNA, 75 bp, synthetic construct
  source 1..75: mol_type = other DNA
ccatgtgctggtgaataacgcctatcttggcctgattcgtcagtcacaacgtgcctttgacatggactactgcgt

SEQ ID NO: 796937 - DNA, 75 bp, synthetic construct
  source 1..75: mol_type = other DNA
ctcaccccgtccgggtcgggaatacaaaattcaaacgtcatacggcaatgaagctgcgtctggttgtcagggtaa

SEQ ID NO: 796938 - DNA, 75 bp, synthetic construct
  source 1..75: mol_type = other DNA
agcggaaaaagcagtgattttggtgaggcagtatcacagctggctgcgcttgccgccgcaggtaaggatgttgcc

SEQ ID NO: 796939 - DNA, 75 bp, synthetic construct
  source 1..75: mol_type = other DNA
atgaaacgtcttctgccattgctgctggggctggcagtcagtttggcacaggctgacagcaacagtgattaccgg

SEQ ID NO: 796940 - DNA, 75 bp, synthetic construct
  source 1..75: mol_type = other DNA
atgggaaacccggacgctggagtatgaaatgagtcagctacctgcacgtgaagtgaatggtcagtatgttgtctc

SEQ ID NO: 796941 - DNA, 75 bp, synthetic construct
  source 1..75: mol_type = other DNA
cccggattcggttatctgggagctttacgcagcaaccggtgtggatgccgtgccgattcgttttgcaggctctta

SEQ ID NO: 796942 - DNA, 75 bp, synthetic construct
  source 1..75: mol_type = other DNA
ccagcgcgacgataccggcgaaacggtggccgtcgaagtggtcatgcgtgggcgtcagaaagaagtcgataccgg

SEQ ID NO: 796943 - DNA, 75 bp, synthetic construct
  source 1..75: mol_type = other DNA
gacaccatcaacatgattgagaaggtgaacggcgtcgaccggctggagcaacaccgccgtaatatcggcctgtga

SEQ ID NO: 796944 - DNA, 75 bp, synthetic construct
  source 1..75: mol_type = other DNA
tcgccagatacgccgatacttcatcgaatgcgaacgcaaactgcaccagcagtcctccacgatactggcgccgca

SEQ ID NO: 796945 - DNA, 75 bp, synthetic construct
  source 1..75: mol_type = other DNA
aatacaacccgtacagggcttatgcatgggacggagagaaaagcgtttacgtcgggtgctatccaactgtggatg

SEQ ID NO: 796946 - DNA, 75 bp, synthetic construct
  source 1..75: mol_type = other DNA
aaatcatttagaggtggcagttcagcgagtgaatctaatggcagtgggattacaaggttatttacaccaattgta

SEQ ID NO: 796947 - DNA, 75 bp, synthetic construct
  source 1..75: mol_type = other DNA
aatgcctggtgcagttgatgtggatctggggcttgatgaaagtgcgctggacacagagttttccattggtggtac

SEQ ID NO: 796948 - DNA, 75 bp, synthetic construct
  source 1..75: mol_type = other DNA
ttaaaagtttttactccgtcatgtatgcgccgtcgtgcgtaaaaatctcactgatgggcgccagccataaacgca

SEQ ID NO: 796949 - DNA, 75 bp, synthetic construct
  source 1..75: mol_type = other DNA
ctgtatctggattccggaacctacgttaaccgaatcccatctcggcaaggagctgctggaaaaagtcgagctgac

SEQ ID NO: 796950 - DNA, 75 bp, synthetic construct
  source 1..75: mol_type = other DNA
atggcaaggtccgatcatgatattatcaatctgtctctggaacatgaactgaatgagtggctggcagagagaggt

SEQ ID NO: 796951 - DNA, 75 bp, synthetic construct
  source 1..75: mol_type = other DNA
aatatgagaagtatcgcggcggcgggatgccgggtgcggtggatgtggatctggggcttgatgacagtgcgctgg

SEQ ID NO: 796952 - DNA, 75 bp, synthetic construct
  source 1..75: mol_type = other DNA
taaggagttggtcgaaatcgacaccatcaacatgattgagaaggtgaacggcgtcgaccggctggagcaacaccg

SEQ ID NO: 796953 - DNA, 75 bp, synthetic construct
  source 1..75: mol_type = other DNA
gcgcagacagcagtcagtgacgcagagaaggagatgttcatcaacaatctccgcgccgtctgtcataacttccgg

SEQ ID NO: 796954 - DNA, 75 bp, synthetic construct
  source 1..75: mol_type = other DNA
tggctacgtcaaattggcgggcataatgcctggcgtgacagcaacggacagttgagaacgacctcggcacaggcc

SEQ ID NO: 796955 - DNA, 75 bp, synthetic construct
  source 1..75: mol_type = other DNA
gctgcaaagcttgctgaagaatgccctcgccgaaccctacgtcctcggcgtctccgccggggcctccaccggcgc

SEQ ID NO: 796956 - DNA, 75 bp, synthetic construct
  source 1..75: mol_type = other DNA
gcgcgaaagccgcaaagaacagcgcagcacaggaaaacccggcaccgctggcagacgttattgtggctgacggtc

SEQ ID NO: 796957 - DNA, 75 bp, synthetic construct
  source 1..75: mol_type = other DNA
taagacgtggacgcgattcaccacgctggctggcgcaagtgtattggttccagagtttaccggcctggtactggc

SEQ ID NO: 796958 - DNA, 75 bp, synthetic construct
  source 1..75: mol_type = other DNA
aaaggcaattaaatggaggtgtcgattttttaagtggtgttaataactattttcagagtgtcatggcagaacaca

SEQ ID NO: 796959 - DNA, 75 bp, synthetic construct
  source 1..75: mol_type = other DNA
cagaccggtgtcagcaaaaccgccattttttctctggtgaggcgatttcaccaggtattcactgactggcctctt

SEQ ID NO: 796960 - DNA, 75 bp, synthetic construct
  source 1..75: mol_type = other DNA
gatcgcgggctttttttatgcggcacggcagcggaacggatggcgaaaagatttagtgacctgtacgcaaagcaa

SEQ ID NO: 796961 - DNA, 75 bp, synthetic construct
  source 1..75: mol_type = other DNA
actatcagcgccgttcgagtgacacagaaaatgaaggataaccccgttgtcgcactgacccgtgtgccggggctg

SEQ ID NO: 796962 - DNA, 75 bp, synthetic construct
  source 1..75: mol_type = other DNA
acaggcgcagtctgtactccagaccactatcagtgctgttcgggtggcgcagaaaatgaagggtaaccccgttgt

SEQ ID NO: 796963 - DNA, 75 bp, synthetic construct
  source 1..75: mol_type = other DNA
gcttaactccgccagcaccaccttcacccgtatgtcgccggggttaagcaccatggcagccaaaattctggcgag

SEQ ID NO: 796964 - DNA, 75 bp, synthetic construct
  source 1..75: mol_type = other DNA
cggggcggtctccggtgccgttccttcaccttccggggtagcgcagtacgtccgcgacggcgtcaactacgccaa

SEQ ID NO: 796965 - DNA, 75 bp, synthetic construct
  source 1..75: mol_type = other DNA
tgtctggggtaatgtgggcgtgcagctgggtgataatggctacaatgacaccgcagtgatggtgggcctgaaata

SEQ ID NO: 796966 - DNA, 75 bp, synthetic construct
  source 1..75: mol_type = other DNA
ctgtatctggattccggaacctacgttaaaagtttttactccgtcatgtatgcgccgtcgtgcgtaaaaatctca

SEQ ID NO: 796967 - DNA, 75 bp, synthetic construct
  source 1..75: mol_type = other DNA
atgaacaagggcaaccaatctaccttcatcataaccgacttttaagttatgccgacatagcgcagcgatgcgcgg

SEQ ID NO: 796968 - DNA, 75 bp, synthetic construct
  source 1..75: mol_type = other DNA
atgaataacatgctgatgcaacgtattgttgacgaagtgattcttcgcctgaagcaacgtgcgaaaaagacactc

SEQ ID NO: 796969 - DNA, 75 bp, synthetic construct
  source 1..75: mol_type = other DNA
acgctgaccgtttcgcaactgcgagaagccagcgttcacaagatagttcatcagtatgcatcgttacaaattcga

SEQ ID NO: 796970 - DNA, 75 bp, synthetic construct
  source 1..75: mol_type = other DNA
ggtaacggtaaattccccaatatgaataaggcgctgtatgttgatagcgtcagttcggtggcgggtgcgtttatc

SEQ ID NO: 796971 - DNA, 75 bp, synthetic construct
  source 1..75: mol_type = other DNA
cgggcgttatccaactaccgagcaggggcttgaggcgctgatccagcagccagccaatatggcggacgcccgcaa

SEQ ID NO: 796972 - DNA, 75 bp, synthetic construct
  source 1..75: mol_type = other DNA
gcccgtctaccgctaacctggtgcgacgaacaaggaaaaccaatccaccttcatcgtggtcgacttttaagttat

SEQ ID NO: 796973 - DNA, 75 bp, synthetic construct
  source 1..75: mol_type = other DNA
ttgatgcgcttgatagtgtgattgcttcgcgcctgatgcagatggcgctggaggcggcgcgtcaggtgatcggtc

SEQ ID NO: 796974 - DNA, 75 bp, synthetic construct
  source 1..75: mol_type = other DNA
ttttgccgaagccgtttctcagctgagcgcagccgtttttccatttcaggcgcataacgctgaacccagcggtaa

SEQ ID NO: 796975 - DNA, 75 bp, synthetic construct
  source 1..75: mol_type = other DNA
tttcgttacagaggggagaattattcagtacctgaagatgatttgctctgttgctatccgtcgttgtcgggcgat

SEQ ID NO: 796976 - DNA, 75 bp, synthetic construct
  source 1..75: mol_type = other DNA
tttggtgaacaggtgctggtgttttccaaagccgatatcgccagtcgttttgacgaagccgataatttctgtgac

SEQ ID NO: 796977 - DNA, 75 bp, synthetic construct
  source 1..75: mol_type = other DNA
atgtctgataatctgccgtggaaaacctggatgccggacgatctcgcgccgccacagacagagtttgtaccgcta

SEQ ID NO: 796978 - DNA, 75 bp, synthetic construct
  source 1..75: mol_type = other DNA
ctggcccaggggctggaacaaggtctggcagaggcgaagtctcaacaagcgccaattcatgcccggatgcagcaa

SEQ ID NO: 796979 - DNA, 75 bp, synthetic construct
  source 1..75: mol_type = other DNA
cggtggccgcacggggctgactgcggttgtggttggcgttatgttcctgttggttatgttcttctcaccgctggt

SEQ ID NO: 796980 - DNA, 75 bp, synthetic construct
  source 1..75: mol_type = other DNA
atgatcaacggccttggcgtgctggggtggggcgtgggtggcatcgaagcagaagccgcaatgttaggccagccg

SEQ ID NO: 796981 - DNA, 75 bp, synthetic construct
  source 1..75: mol_type = other DNA
cccgcaatccacttatctggcctggcttgatttacgtccgttgaatattgacgacaacgcgttgcaaaaagcact

SEQ ID NO: 796982 - DNA, 75 bp, synthetic construct
  source 1..75: mol_type = other DNA
tttgtccgtctcaatgccggctgcccacgttcgaaactggaaaaaggtgtggctggattaataaacgccatccgc

SEQ ID NO: 796983 - DNA, 75 bp, synthetic construct
  source 1..75: mol_type = other DNA
gttgaccgaccattctcatttatggggcgtattaacgaggatgtgaatacatacacgaatctcggtcgtcgtggt

SEQ ID NO: 796984 - DNA, 75 bp, synthetic construct
  source 1..75: mol_type = other DNA
atggcaaggtccgattacgatattatcaatctgtctctggaacatgaactgaatgagtggctggcagagaaaggt

SEQ ID NO: 796985 - DNA, 75 bp, synthetic construct
  source 1..75: mol_type = other DNA
cggcgtacctgccgttgttgatctggcggcaatgcgcgaagcggttaaacgcctcggcggcgatactgcaaaggt

SEQ ID NO: 796986 - DNA, 75 bp, synthetic construct
  source 1..75: mol_type = other DNA
tcggccttgatgacgatgcgctgtcaatggagtggtcgctcgggggcttcccggattcggttatctgggagcttt

SEQ ID NO: 796987 - DNA, 75 bp, synthetic construct
  source 1..75: mol_type = other DNA
ggttgctccagcaacgctaaaatcgatcagctgtcttctgacgttcagactctgaacgctaaagtgaccagctga

SEQ ID NO: 796988 - DNA, 75 bp, synthetic construct
  source 1..75: mol_type = other DNA
atgagtgcaccatcatttattttttcaatattacccgttatactgataatgtgtatcattacgtctttattctgg

SEQ ID NO: 796989 - DNA, 75 bp, synthetic construct
  source 1..75: mol_type = other DNA
tatatcgcaaatacgatgaatgcagcgttcccggaactcaactggcagatcccacaatccacttatcttgcctgg

SEQ ID NO: 796990 - DNA, 75 bp, synthetic construct
  source 1..75: mol_type = other DNA
ctggttctcactgttacccaaatgctgcgcaaacatggcgtggtggggaaattcgtcgaattttatggtgatggt

SEQ ID NO: 796991 - DNA, 75 bp, synthetic construct
  source 1..75: mol_type = other DNA
aaaaacatccccggcaacagtcctttattgctcgggaatcggttacgttattggctttatcgtgaatccctctac

SEQ ID NO: 796992 - DNA, 75 bp, synthetic construct
  source 1..75: mol_type = other DNA
acgtgccgggttgtcgcaaagtttgtcgcgtggcaaatggtgcctgactcctgcgggttttgactgggttgcgtc

SEQ ID NO: 796993 - DNA, 75 bp, synthetic construct
  source 1..75: mol_type = other DNA
attctggaaatggaaaacctggtgaaaatcatccgggcgtcgttacagggggccagtatcgccacacagacggtg

SEQ ID NO: 796994 - DNA, 75 bp, synthetic construct
  source 1..75: mol_type = other DNA
tggaagaaatcggggccggagatggcttcgctggaggcctggctggaggcctggctggaagaacatgagaaatac

SEQ ID NO: 796995 - DNA, 75 bp, synthetic construct
  source 1..75: mol_type = other DNA
acagttcccgctgccggaggggatgaatctgcccctgaccctgcgccattaccgggtgtttatctcgtactgttc

SEQ ID NO: 796996 - DNA, 75 bp, synthetic construct
  source 1..75: mol_type = other DNA
ggcggattgctcgacaagatgcgcgatctgctgggcagaaacgacaagacgggtagcagcggcgcattgcatatc

SEQ ID NO: 796997 - DNA, 75 bp, synthetic construct
  source 1..75: mol_type = other DNA
cacgggccatgaactttatgctggaaaataacccggatatgttcatgctgtggatgagcggcgataacctatcca

SEQ ID NO: 796998 - DNA, 75 bp, synthetic construct
  source 1..75: mol_type = other DNA
tgggcgaggctggcggtaaaaccgatattatttatatcgggaccatcctgcattacgactccgtactgtcgcgca

SEQ ID NO: 796999 - DNA, 75 bp, synthetic construct
  source 1..75: mol_type = other DNA
aaacggcctgcaaagctggcaacaatgcgatgcagcgatggtgcgcaattttgctgtacgcagtcgccgtaaagg

SEQ ID NO: 797000 - DNA, 75 bp, synthetic construct
  source 1..75: mol_type = other DNA
caacctctccaccacgcaaatctatactcatcttgattttcaaccccttgcctcggtgtacgatgcggcgcatcc

SEQ ID NO: 797001 - DNA, 75 bp, synthetic construct
  source 1..75: mol_type = other DNA
atgaccgatttacacaccgatgtagaacgctacctacgttatctgagcgtggagcggcagcttagtccgataact

SEQ ID NO: 797002 - DNA, 75 bp, synthetic construct
  source 1..75: mol_type = other DNA
gactggaagaccgtccgtccctgcttgttgcggtgatgttctccctgattatctacattgagaacaggatgtacc

SEQ ID NO: 797003 - DNA, 75 bp, synthetic construct
  source 1..75: mol_type = other DNA
gagctggtggggctcgatatcaaacacctcgacctggagtctggtgaagtgtgggtgatgggaaaaggcagcaaa

SEQ ID NO: 797004 - DNA, 75 bp, synthetic construct
  source 1..75: mol_type = other DNA
atgaccgatttacataccgatgtggaacgctacctacgttatttgagcgtggagcgtcaacttagcccgattacc

SEQ ID NO: 797005 - DNA, 75 bp, synthetic construct
  source 1..75: mol_type = other DNA
agcccgttcgatgcggcatcgccgctaccacgccgaccatccagcgcacggcgctgctggcccagcagcaggccc

SEQ ID NO: 797006 - DNA, 75 bp, synthetic construct
  source 1..75: mol_type = other DNA
ggtgaaaccctgcgctttaacccgtttgcgaacatcaccgatattgaccagtcagcggagcgtgtccgtgaccag

SEQ ID NO: 797007 - DNA, 75 bp, synthetic construct
  source 1..75: mol_type = other DNA
agccattcccatcaatggggcgaatgagtctattgtggaggcgctcgaccacatgctgcgcaccaaactgccgcg

SEQ ID NO: 797008 - DNA, 75 bp, synthetic construct
  source 1..75: mol_type = other DNA
atgagtaataacccacttgaggctgtcactcaggcggtcaattcactgctgaccgcgcttaaattaccggatgaa

SEQ ID NO: 797009 - DNA, 75 bp, synthetic construct
  source 1..75: mol_type = other DNA
gacattctggaaatggaaaacctggtgaaaatcatccgggcgtctctgcagggagcatatatcaccacgcagacg

SEQ ID NO: 797010 - DNA, 75 bp, synthetic construct
  source 1..75: mol_type = other DNA
ctcgaagaaaaaaagccgggccgacattctggaaatggaaaatctggtgaaaatcatccgtgcctcttttcacgg

SEQ ID NO: 797011 - DNA, 75 bp, synthetic construct
  source 1..75: mol_type = other DNA
attatatgaaagcggcagcgacacagttcccgctgccggaggggatgaatctgcccctgaccctgcgccattacc

SEQ ID NO: 797012 - DNA, 75 bp, synthetic construct
  source 1..75: mol_type = other DNA
tggtggcgctggagctggcgcaagcctttgcccggctgggcagcaaggtcacggccctggcgcgcaataccttgt

SEQ ID NO: 797013 - DNA, 75 bp, synthetic construct
  source 1..75: mol_type = other DNA
gcgcgacaagctgcatgactggctcaccaaaaccgtgatgccgctgggcgaggctggcggtaaaaccgatattat

SEQ ID NO: 797014 - DNA, 75 bp, synthetic construct
  source 1..75: mol_type = other DNA
gacggcgaattcgtgctcaccacggcgcacggcgaactgcgcgccgacaagctgctggtcgccaccggccgcgcg

SEQ ID NO: 797015 - DNA, 75 bp, synthetic construct
  source 1..75: mol_type = other DNA
gcgcagcctggcattggaagcggcgggggtagccgtcaatgcgcagggggccatcgtcatcgacaagggcatgcg

SEQ ID NO: 797016 - DNA, 75 bp, synthetic construct
  source 1..75: mol_type = other DNA
atgaaattacgtgtctggcatatcccgcaagtacctatgaaaccgttcattgcagaagtggcaagtgttgaagag

SEQ ID NO: 797017 - DNA, 75 bp, synthetic construct
  source 1..75: mol_type = other DNA
ttggaagcggcgggggtagccgtcaatgcgcagggggccatcgtcatcgacaagggcatgcgcaccagtagcccg

SEQ ID NO: 797018 - DNA, 75 bp, synthetic construct
  source 1..75: mol_type = other DNA
tgatatgaatcggctgctggatattgatattaacgatcccctcgctgtacgcgaccgggcgatgctggaagtgat

SEQ ID NO: 797019 - DNA, 75 bp, synthetic construct
  source 1..75: mol_type = other DNA
gtatgtatgcacaacgttgaagagaccaaagtatatcgtccttctgcctgggccgcgcacggcatggatattgaa

SEQ ID NO: 797020 - DNA, 75 bp, synthetic construct
  source 1..75: mol_type = other DNA
actcggtaatggcgaactggggcgctaaccacggggttctgaccatcggccacgttggcgcagactttatcactc

SEQ ID NO: 797021 - DNA, 75 bp, synthetic construct
  source 1..75: mol_type = other DNA
gacttccagcgatctggcgcagattgaatcggcgctgaacgagatgattgccaacaatcaggaccgcgaagcgtt

SEQ ID NO: 797022 - DNA, 75 bp, synthetic construct
  source 1..75: mol_type = other DNA
ggcgaaagcgtacaacaacccacatgccaaagccgtcattattgaagctgagtcaggtggcggcggtccttcaga

SEQ ID NO: 797023 - DNA, 75 bp, synthetic construct
  source 1..75: mol_type = other DNA
gtgtgagaacatgggcggggtgtatctggacggtgaaaccctgcgctttaacccgtttgcgaacatcaccgatat

SEQ ID NO: 797024 - DNA, 75 bp, synthetic construct
  source 1..75: mol_type = other DNA
gaactggaaatggcgctggcctgggctgataaaaacttccgctatggcgaagatgaaaataacaaacagtatcaa

SEQ ID NO: 797025 - DNA, 75 bp, synthetic construct
  source 1..75: mol_type = other DNA
cctcctatgccaaatggtttccgtccgtggagaaagaggcgaaggagtggggggaactgcgtcagcggctgggct

SEQ ID NO: 797026 - DNA, 75 bp, synthetic construct
  source 1..75: mol_type = other DNA
catgataaataccagaattcgccgggtatcaccaaccggctcgatgagattatcgaactgctcgggaagtactgc

SEQ ID NO: 797027 - DNA, 75 bp, synthetic construct
  source 1..75: mol_type = other DNA
cgacagtaatgccctgatcggttctatcggtgtgcgtatggaccactggaatctgtcagagatcatgagcacagt

SEQ ID NO: 797028 - DNA, 75 bp, synthetic construct
  source 1..75: mol_type = other DNA
tgtaccgcacgccgcgtaacctcaagaaactgaacgtcattgatgaaggctggcgtctgctggacttcaaaaatc

SEQ ID NO: 797029 - DNA, 75 bp, synthetic construct
  source 1..75: mol_type = other DNA
ttcctgaaaaacgccagtgacagcgagcagtatgccgagtcaccgaccatccgcagccgtctggatgaaatgatt

SEQ ID NO: 797030 - DNA, 75 bp, synthetic construct
  source 1..75: mol_type = other DNA
ggcgtggaagaaatcggggccggagatggcttcgctggaggcctggctggaagaacatgagaaatacaggagtgt

SEQ ID NO: 797031 - DNA, 75 bp, synthetic construct
  source 1..75: mol_type = other DNA
ggctggaagatcagcttaacgccggtaacctgccggaaggcagcgaccagtttaacagtctgcaagagaagctga

SEQ ID NO: 797032 - DNA, 75 bp, synthetic construct
  source 1..75: mol_type = other DNA
ctgtttgtgaaccgcagtacggtgggctttctgctacgtgcagagccccttatcggcgctaacgaacagattgtg

SEQ ID NO: 797033 - DNA, 75 bp, synthetic construct
  source 1..75: mol_type = other DNA
ctgctgacgccgtcctaccgtaatcagctggcgttcctcgatatttacggggacgggatgggcaacaccaactac

SEQ ID NO: 797034 - DNA, 75 bp, synthetic construct
  source 1..75: mol_type = other DNA
cgcgggccatgaactttatgctggagaacaacccagacatattcatgctgtggatggggggcgataacctgtcca

SEQ ID NO: 797035 - DNA, 75 bp, synthetic construct
  source 1..75: mol_type = other DNA
gtacggcgcgggtctgcgtctttccgaactggtggggctcgatatcaaacacctcgacctggagtccggcgaagt

SEQ ID NO: 797036 - DNA, 75 bp, synthetic construct
  source 1..75: mol_type = other DNA
ataatcacgttcacccgcataaattacgtcactcattcgccacgcatatgctggagtcgagtggtgatctgcgtg

SEQ ID NO: 797037 - DNA, 75 bp, synthetic construct
  source 1..75: mol_type = other DNA
gagcgccgcctgccgattggtcgcaacgctgtggcgtggattgagcactggcttgatttgcgcgacctgtttggt

SEQ ID NO: 797038 - DNA, 75 bp, synthetic construct
  source 1..75: mol_type = other DNA
tcagttcacggatttgcaggatcaggtcatcgctaacctgttcaaactgtatccgtgggaatttatgctgcgcga

SEQ ID NO: 797039 - DNA, 75 bp, synthetic construct
  source 1..75: mol_type = other DNA
ctcacctgctgtcgcgacacagtggaagatcgcggcacaattcagtatttgcaggactgcgcgaccgaagctgaa

SEQ ID NO: 797040 - DNA, 75 bp, synthetic construct
  source 1..75: mol_type = other DNA
tcatccgcaaatggaaaaatatgtggttaaaccgatcttctcccgtgaaggcgcaaacgtgtcgatcattgagaa

SEQ ID NO: 797041 - DNA, 75 bp, synthetic construct
  source 1..75: mol_type = other DNA
ccactgaacaggaaatactgaacagtttccgtaaggggggctttgaactcatcgccgctcgctatcagcagatgc

SEQ ID NO: 797042 - DNA, 75 bp, synthetic construct
  source 1..75: mol_type = other DNA
cctattatgtgcgtgcagcagagaagcattttgcgctgccaccgggaatggatttaccgctgacgctcagaaact

SEQ ID NO: 797043 - DNA, 75 bp, synthetic construct
  source 1..75: mol_type = other DNA
ggcgttcatcgacctgttctacgagggaatgaacaataccaatttcaacatggcagtctgcgggacgtccggggc

SEQ ID NO: 797044 - DNA, 75 bp, synthetic construct
  source 1..75: mol_type = other DNA
ttaattagcggtgtccgccagacgtttattatgcaatggggaatactgacacctctgagatcaggcggcactgtg

SEQ ID NO: 797045 - DNA, 75 bp, synthetic construct
  source 1..75: mol_type = other DNA
ccgctaaaaattacccatatggcggtcggcgatggcggcggagtattgccaacgccagactcaaagcaggctgca

SEQ ID NO: 797046 - DNA, 75 bp, synthetic construct
  source 1..75: mol_type = other DNA
gcgaccggcatgttgccgatttgtctcggggaagcgacgaagttttcccagtacctgctggactctgataaacgt

SEQ ID NO: 797047 - DNA, 75 bp, synthetic construct
  source 1..75: mol_type = other DNA
aacaccaactgcacgacagggaacgaataatacccaaatcgcaagcacggctttcgttatggccgcgattgccgc

SEQ ID NO: 797048 - DNA, 75 bp, synthetic construct
  source 1..75: mol_type = other DNA
tacccggtggtgaatcttccgttaacgtcttctgtttacttcaaaaatggtaacccggttcgtacatctggtgcg

SEQ ID NO: 797049 - DNA, 75 bp, synthetic construct
  source 1..75: mol_type = other DNA
ttgatgacctgggtgaaaaactcggttgtggcgcgcatgttatttacctgcgtcgtctggcggtaagtaaatatc

SEQ ID NO: 797050 - DNA, 75 bp, synthetic construct
  source 1..75: mol_type = other DNA
ttattgtgttgttgcatcgtacgataatgcacggtcaggtgtgtcaacaatggttagttttgcagcattacctgt

SEQ ID NO: 797051 - DNA, 75 bp, synthetic construct
  source 1..75: mol_type = other DNA
aaaaactgtacgagtacgcgcgtcagggcattgaagtgcctcgtgaagcacgaccgattaccgtttatgagttgc

SEQ ID NO: 797052 - DNA, 75 bp, synthetic construct
  source 1..75: mol_type = other DNA
accgtcatcctgttgtcgccaacgatgggtatgactcaaaagaggtatgggaactggcggcaatcttcagaagag

SEQ ID NO: 797053 - DNA, 75 bp, synthetic construct
  source 1..75: mol_type = other DNA
ttggcgttccgttcttctggccgtccgccgcaatgccaaatactgtaatcgacagctggtccggtatggtgtttt

SEQ ID NO: 797054 - DNA, 75 bp, synthetic construct
  source 1..75: mol_type = other DNA
cgctgactcatttgagtggaaaggatgttgctagtcttctcgcataccttggtttgggagaagcggcaaaacgga

SEQ ID NO: 797055 - DNA, 75 bp, synthetic construct
  source 1..75: mol_type = other DNA
tgtagctggtcttctcacataccttggttttggagaaggtgctaactgggttatgttacctggaggaatgataat

SEQ ID NO: 797056 - DNA, 75 bp, synthetic construct
  source 1..75: mol_type = other DNA
acgcggtgaatttatccgtggctgggatgatgggcgcggggtggatgcggggagaacaatattatccgctcaagg

SEQ ID NO: 797057 - DNA, 75 bp, synthetic construct
  source 1..75: mol_type = other DNA
caggtgctggcagccggattaaatatggcgtcgtgaacgattatggggcggtgcgcgaatatgaaggaatcgtcc

SEQ ID NO: 797058 - DNA, 75 bp, synthetic construct
  source 1..75: mol_type = other DNA
ttcttgctggcgtgctgttctgctcgtgtgtaggggcagcctcctttggtccccgtgaaagtatgctgatttttg

SEQ ID NO: 797059 - DNA, 75 bp, synthetic construct
  source 1..75: mol_type = other DNA
cagttacataacgtgacggcgaacggacgtgaatttaagggcaaaggggtttcgtttattcttcttccgatgtcc

SEQ ID NO: 797060 - DNA, 75 bp, synthetic construct
  source 1..75: mol_type = other DNA
acgttatgttgttcaacttaattatgtgaacgcgggcggtaaacgttatcagggtaaaggcgtttcatggtttat

SEQ ID NO: 797061 - DNA, 75 bp, synthetic construct
  source 1..75: mol_type = other DNA
ggtttaaggttcccatgatttatcgtccagctgcactttccagcactcctcagcaacctgagtcccttcaatggc

SEQ ID NO: 797062 - DNA, 75 bp, synthetic construct
  source 1..75: mol_type = other DNA
atgtgtaggggctgcgtcctttggccctcgtgaaagcatgctaatttttgatggacggaaaaatagcagctctta

SEQ ID NO: 797063 - DNA, 75 bp, synthetic construct
  source 1..75: mol_type = other DNA
tgctttggttggctcttcgcctgaagcgctggatacgctgaatgaacttgctgcggctttgggtaatgatcctaa

SEQ ID NO: 797064 - DNA, 75 bp, synthetic construct
  source 1..75: mol_type = other DNA
gtattgatggtagtttaaatggaacgctcacttacaacattaaccaaccaggcggcgggcaaattcaggcgattg

SEQ ID NO: 797065 - DNA, 75 bp, synthetic construct
  source 1..75: mol_type = other DNA
ctaaatgagctggcggcggcgctgggtaatgaccctaattttgccacgacaattacaaactccctggcaggtaag

SEQ ID NO: 797066 - DNA, 75 bp, synthetic construct
  source 1..75: mol_type = other DNA
gtgagcaatacgacgatcgagattttctctggagagaaagattatgatctaaacggttttgattgcggcgaagag

SEQ ID NO: 797067 - DNA, 75 bp, synthetic construct
  source 1..75: mol_type = other DNA
catggggttattttgcacgcctgattattcggatgtaagtgctgtgatttatagtagtttagctacttggggaaa

SEQ ID NO: 797068 - DNA, 75 bp, synthetic construct
  source 1..75: mol_type = other DNA
gagacgctaagccaccctagagtagcacaaggttatgttgaatctgatggatacgtcaattttgtagcgccagag

SEQ ID NO: 797069 - DNA, 75 bp, synthetic construct
  source 1..75: mol_type = other DNA
aacgattttcttctatttctcgacaaattcagacagggtttcaacatgtctttcctgctcttggtgttcagctca

SEQ ID NO: 797070 - DNA, 75 bp, synthetic construct
  source 1..75: mol_type = other DNA
aactcatccccgaaagacagcgccctgcgccgtctgctgaatgaagaggtgggaacaaccaccgcccgacggatt

SEQ ID NO: 797071 - DNA, 75 bp, synthetic construct
  source 1..75: mol_type = other DNA
aactcatcaccggaagacagcgccctgcgccgtctgctgaatgaagaggtgggtacgaaaaccgcacgccgtatt

SEQ ID NO: 797072 - DNA, 75 bp, synthetic construct
  source 1..75: mol_type = other DNA
ggacttcccggaggcaatattaaaatctgccaactcactgtggctgatgaaaatccgggaaggcgacaaggagct

SEQ ID NO: 797073 - DNA, 75 bp, synthetic construct
  source 1..75: mol_type = other DNA
gaaaatatcacgtcagttcatgatgcttatatagctttcgagcagttacactttgatagacacatgcatcactat

SEQ ID NO: 797074 - DNA, 75 bp, synthetic construct
  source 1..75: mol_type = other DNA
gttttgtgcgccagtcatggctgactcaccagccatcgctttattcgcgtcttgatctggcgtgggatggtactg

SEQ ID NO: 797075 - DNA, 75 bp, synthetic construct
  source 1..75: mol_type = other DNA
tactcaaatttaccgtcggtccactggagctatgggcgctgaactcatcgccaaaagacagtgccctgcgtaaaa

SEQ ID NO: 797076 - DNA, 75 bp, synthetic construct
  source 1..75: mol_type = other DNA
caactgttcgaagtcaccatccagcgcacggacccccgtgtgaaatacgccgggatggaaatccgccagatcatc

SEQ ID NO: 797077 - DNA, 75 bp, synthetic construct
  source 1..75: mol_type = other DNA
cgcgatgacaggatgaacctgaccaacagtatcggtgccggcgtggtgtcaaaaaccggccgcctgagcgacggc

SEQ ID NO: 797078 - DNA, 75 bp, synthetic construct
  source 1..75: mol_type = other DNA
tcggggagatgattaaccataacccggactccctgtacccgaaaagacgtcagctggacccgtattctgatctga

SEQ ID NO: 797079 - DNA, 75 bp, synthetic construct
  source 1..75: mol_type = other DNA
atgtcactcatcacccgaattgaagacgcaatcatctggctgtcccgctacggactggccagagaatttccggaa

SEQ ID NO: 797080 - DNA, 75 bp, synthetic construct
  source 1..75: mol_type = other DNA
cgcacttatcaacacgctggtccgggcgctgtctgctgaccaggaggggcagcttgtccggctgatggaaacggc

SEQ ID NO: 797081 - DNA, 75 bp, synthetic construct
  source 1..75: mol_type = other DNA
taactatattttcaatttacactcacttctcctatggcatgaccaagaaagaaacgatcagagatttcatactgt

SEQ ID NO: 797082 - DNA, 75 bp, synthetic construct
  source 1..75: mol_type = other DNA
gaaaatatcacgccagttcatgatgcttatatagctttcaagcagttacaccttgatagacacatgcatcactat

SEQ ID NO: 797083 - DNA, 75 bp, synthetic construct
  source 1..75: mol_type = other DNA
gttctaataataatggactggctaaagtcgtttatcctattgtgcttaagctttcacgttttatcagcatagcgg

SEQ ID NO: 797084 - DNA, 75 bp, synthetic construct
  source 1..75: mol_type = other DNA
aaaggcttacccgacaaataaattgcctgatttacgtggtgagttcattcgtggctgggatgatgggcgcggcat

SEQ ID NO: 797085 - DNA, 75 bp, synthetic construct
  source 1..75: mol_type = other DNA
aacagcagccagattattgctgaacaggtgatccctgaaaatgagggcggttggtggatacgtgaagtgggcctg

SEQ ID NO: 797086 - DNA, 75 bp, synthetic construct
  source 1..75: mol_type = other DNA
ctgaaagaaatagccgtagccattaacaatgatccgaaattcagtaccaccattaataatgcgctggcactgaaa

SEQ ID NO: 797087 - DNA, 75 bp, synthetic construct
  source 1..75: mol_type = other DNA
tggcaggcaaacaaccgctggacaatacgcttactaatttgagtggaaaggatgtggctggtcttctcgcatacc

SEQ ID NO: 797088 - DNA, 75 bp, synthetic construct
  source 1..75: mol_type = other DNA
gaggataattttaccggggcatggatatcaatgcgccctcgtaacctttcatttaattacatcgtgagggctgca

SEQ ID NO: 797089 - DNA, 75 bp, synthetic construct
  source 1..75: mol_type = other DNA
tgcagcgcagacggcgaacaatacgcagattgccaccacggcatttgtgaaagcggcagttgccgagatggtcgg

SEQ ID NO: 797090 - DNA, 75 bp, synthetic construct
  source 1..75: mol_type = other DNA
attaaaattaccagatctacgcagtgagtttattcgcggctgggacgatgggcgtggcgtagacgctggacgtca

SEQ ID NO: 797091 - DNA, 75 bp, synthetic construct
  source 1..75: mol_type = other DNA
ggaatgatcctaactttgcgacaacagtaatgagtgcgctggcgggaaaaatgaacaaagcagctaatggcgctg

SEQ ID NO: 797092 - DNA, 75 bp, synthetic construct
  source 1..75: mol_type = other DNA
agcgccgccgcgctcggtgtgcctttaaaaattacccatatggcggtcggcgatggcggcggaacattgccaacg

SEQ ID NO: 797093 - DNA, 75 bp, synthetic construct
  source 1..75: mol_type = other DNA
ccagatctgcgtattcctgcgaccatcagttttgtcgccagcgtcgcccagttcacgccaaaaaccgtcgaaacc

SEQ ID NO: 797094 - DNA, 75 bp, synthetic construct
  source 1..75: mol_type = other DNA
ttaataatattcgcgagcatctcatgctttatctttttctctggggggtactggcgattatggatcttatctacg

SEQ ID NO: 797095 - DNA, 75 bp, synthetic construct
  source 1..75: mol_type = other DNA
agtgtcacctgatggcttatgtcctgcgttaaagcgtgccatgcagcgtggagtgaaggtgctgacctgggattc

SEQ ID NO: 797096 - DNA, 75 bp, synthetic construct
  source 1..75: mol_type = other DNA
tcatgccacacgctggtggagaacggcctgttgaacaagtaccggaatgcttctctaaagctggcctttaggctg

SEQ ID NO: 797097 - DNA, 75 bp, synthetic construct
  source 1..75: mol_type = other DNA
aagcccgcagggaatgcagatcccccgtagcccacggcagattgtgatgctccagcgcaaagccagcaaaccagg

SEQ ID NO: 797098 - DNA, 75 bp, synthetic construct
  source 1..75: mol_type = other DNA
cggctggcagaactcggtggtgccgggtttggcaacccgccttacagccgctctcagtaccacgacaagcaggcc

SEQ ID NO: 797099 - DNA, 75 bp, synthetic construct
  source 1..75: mol_type = other DNA
gatcaatggcgcactccggatctgttgttttgggggatcaatgcgatgttcggccctctggtgttggaccttttt

SEQ ID NO: 797100 - DNA, 75 bp, synthetic construct
  source 1..75: mol_type = other DNA
cggtgaaagaatttggcctgtgggatgtggttcagcaaggcaaaatatcagtttatgtcgcggatgcattattga

SEQ ID NO: 797101 - DNA, 75 bp, synthetic construct
  source 1..75: mol_type = other DNA
aaagccaatgcccagcaacatcggttggataaaatcacccacgcgtgtcgactgctggaacaggaaacgcctgta

SEQ ID NO: 797102 - DNA, 75 bp, synthetic construct
  source 1..75: mol_type = other DNA
cgtggtgatggggcgctttccggttaccgctggggggtggcacgcaaagcgcaattactacgccgcgaagctgaa

SEQ ID NO: 797103 - DNA, 75 bp, synthetic construct
  source 1..75: mol_type = other DNA
ttgcagcagatgtttcccgctgccgacaacgcgcctgccgatctgacgtttcagcaacatgtgcgtgaagtgatc

SEQ ID NO: 797104 - DNA, 75 bp, synthetic construct
  source 1..75: mol_type = other DNA
cgtgctgaagccgttccaggaagtgctgaaggaccctgcgccgaagaaactgatcatcgttcatctgctgggtac

SEQ ID NO: 797105 - DNA, 75 bp, synthetic construct
  source 1..75: mol_type = other DNA
cgcgtccgtacaccattgaagcattgcaacaggcccttactttcgccaacgaaaagaatcctgatctgtatctga

SEQ ID NO: 797106 - DNA, 75 bp, synthetic construct
  source 1..75: mol_type = other DNA
cactttccggttaccgctggggcgtgtcgcgtaaagcgcaactgctgcgccgcgaagctgaaaatgaggagaggt

SEQ ID NO: 797107 - DNA, 75 bp, synthetic construct
  source 1..75: mol_type = other DNA
ggtttggcaacccgccttacagccgctctcagtaccacgacaagcaggccgttaccggaatgacccacatcatta

SEQ ID NO: 797108 - DNA, 75 bp, synthetic construct
  source 1..75: mol_type = other DNA
atgaaagcctgaacctgggcgattacgttgaagatcagattgagtctgtcacctttgaccgcattacgacccaga

SEQ ID NO: 797109 - DNA, 75 bp, synthetic construct
  source 1..75: mol_type = other DNA
tcagtaactttattcgcaactcaattatgattgcgtttacgcttccgatcatagtagagaactatacattttcgg

SEQ ID NO: 797110 - DNA, 75 bp, synthetic construct
  source 1..75: mol_type = other DNA
atgcaaatcctgtttaacgatcaaccgatgcaatgcgccgccggacaaacggttcacgaactgctggagcaactc

SEQ ID NO: 797111 - DNA, 75 bp, synthetic construct
  source 1..75: mol_type = other DNA
tcacccgttatctcgacattgacgaagactttgccactgtcctggtagaagaaggcttctcgacgctggaagaac

SEQ ID NO: 797112 - DNA, 75 bp, synthetic construct
  source 1..75: mol_type = other DNA
cgaagaagtgattgaaattaaagctgccgctcgcgatcctggctctcgtgcgaaaatcgcggtgaaaaccaacga

SEQ ID NO: 797113 - DNA, 75 bp, synthetic construct
  source 1..75: mol_type = other DNA
gtggttgatcagttccgtgaacacgaaggtgaaatcatcaccggcgtggtgaaaaaagtaaaccgcgacaacatc

SEQ ID NO: 797114 - DNA, 75 bp, synthetic construct
  source 1..75: mol_type = other DNA
gaagccatccgtgtcgatccatacacgcaaaaacgcttcacgttctttaacgatccggacgggctgccgttggaa

SEQ ID NO: 797115 - DNA, 75 bp, synthetic construct
  source 1..75: mol_type = other DNA
catattggtatttcggtgttttcaaagtgttaatgcaaaaaattttcccgagaaaagtgtttaatttaattaagt

SEQ ID NO: 797116 - DNA, 75 bp, synthetic construct
  source 1..75: mol_type = other DNA
tgatgaaccgcgtccgcctgttcgtgaatctgcctctcaaaatgcttgaccagacggccatcaagcgcgagctgg

SEQ ID NO: 797117 - DNA, 75 bp, synthetic construct
  source 1..75: mol_type = other DNA
gcgtgagcaatgggcacaacatatcgtgcaggatggtgaccagatcctgctttttcaggttattgcagggggttg

SEQ ID NO: 797118 - DNA, 75 bp, synthetic construct
  source 1..75: mol_type = other DNA
gcgggagcaatgggcgcaacatatcgtgcaggatggcgaccagatcctgctttttcaggttattgcagggggttg

SEQ ID NO: 797119 - DNA, 75 bp, synthetic construct
  source 1..75: mol_type = other DNA
tggcgattaatcagcaaatcgtcccgcgtgagcagtggacgcaacatatcgtgcaggatggcgaccagatcctgc

SEQ ID NO: 797120 - DNA, 75 bp, synthetic construct
  source 1..75: mol_type = other DNA
cctgtgccgccaacaagctggctatcgttataccttgtcatcgggtggtccgtggtgatggcacactttccggtt

SEQ ID NO: 797121 - DNA, 75 bp, synthetic construct
  source 1..75: mol_type = other DNA
cgtaccgtccgcccggatgtggtggtgaatgccgccgcgcacacggcggtggacaaggcagaaagcgagcgggag

SEQ ID NO: 797122 - DNA, 75 bp, synthetic construct
  source 1..75: mol_type = other DNA
aacgtctacggtgaaaccaaacgcgccggtgaactggccctggagcagggtaacccgcgtcacctgattttccgt

SEQ ID NO: 797123 - DNA, 75 bp, synthetic construct
  source 1..75: mol_type = other DNA
ccggtgaactggcgctggagcagggcaacccgcgtcacctgattttccgtaccagctgggtgtatgccacccgcg

SEQ ID NO: 797124 - DNA, 75 bp, synthetic construct
  source 1..75: mol_type = other DNA
agtgcatgagcagcagagagcgcgaagacctgaaaagttttgtgacacggtgcgagattcgcggagatattcaga

SEQ ID NO: 797125 - DNA, 75 bp, synthetic construct
  source 1..75: mol_type = other DNA
aacgccccgctaactcacgcttgaatacggaaaaattccagcatagttttggtctaacgctgccttcctgggaga

SEQ ID NO: 797126 - DNA, 75 bp, synthetic construct
  source 1..75: mol_type = other DNA
ctggatgttttgcatcgcctggggtatggcggccaccgtgatgatttgcagcgtgttggcggtactggagatggt

SEQ ID NO: 797127 - DNA, 75 bp, synthetic construct
  source 1..75: mol_type = other DNA
taaaaaattccagcgtacatttgatctggttttgccggactggtcagtcggtgttgagcggatgttgactgagat

SEQ ID NO: 797128 - DNA, 75 bp, synthetic construct
  source 1..75: mol_type = other DNA
actcaacaagctcaacgcagtaccaacaacagcctatcctacaccagctcgtcgtccacataactctcgccttaa

SEQ ID NO: 797129 - DNA, 75 bp, synthetic construct
  source 1..75: mol_type = other DNA
tacagaaaaatttcagcagaactttgcgcttgtcttgcctgactggcaggttggcgtgaaacgaatgcttaacga

SEQ ID NO: 797130 - DNA, 75 bp, synthetic construct
  source 1..75: mol_type = other DNA
ggcagactgtacggcgacggcaatccgtaaaacgcttcgtgatccggcgctggctggtacctatcatctggtggc

SEQ ID NO: 797131 - DNA, 75 bp, synthetic construct
  source 1..75: mol_type = other DNA
atggccaggtgggctgggaactgcagcgttcactgtccaccctcggcgacgtggtcgcggtggactactttgaca

SEQ ID NO: 797132 - DNA, 75 bp, synthetic construct
  source 1..75: mol_type = other DNA
tcggtcattaatgatcagtttggcgctccaactggagctgagttgctggccgattgtaccgcccatgcaatccga

SEQ ID NO: 797133 - DNA, 75 bp, synthetic construct
  source 1..75: mol_type = other DNA
caatgaagtcggcgcttgggttattcactactctactgactacgtatttccggggaccggtgaaataccatggca

SEQ ID NO: 797134 - DNA, 75 bp, synthetic construct
  source 1..75: mol_type = other DNA
cagttgttattacgatttgaaggtgttttccgtggtgaatatggacgggcggaaggagaagcaacaatccgtacc

SEQ ID NO: 797135 - DNA, 75 bp, synthetic construct
  source 1..75: mol_type = other DNA
ccatctggttgctagtggtacgacaacttggtatgaatatgcttctcttattttttccgaggcaagaaaagcagg

SEQ ID NO: 797136 - DNA, 75 bp, synthetic construct
  source 1..75: mol_type = other DNA
cctttgggtaatttgattgctcttgatgttcactccactgattattgtggtgatttcagcaaccccgaaggtgtg

SEQ ID NO: 797137 - DNA, 75 bp, synthetic construct
  source 1..75: mol_type = other DNA
atccggcgcgaatgctgggtatggatgatgttctcggatcgctaaaaccggggaaacgcgccagcattatcgctc

SEQ ID NO: 797138 - DNA, 75 bp, synthetic construct
  source 1..75: mol_type = other DNA
cgcggcgacctggcaacaaacccgcgccgcgtttgatgctggtgccgacggcctggtgcattgctataacgggat

SEQ ID NO: 797139 - DNA, 75 bp, synthetic construct
  source 1..75: mol_type = other DNA
atacgcgccaacgcagtgacaatcgctatcaccgccggactcttgggttaaccactttaggtcgagccaaagcga

SEQ ID NO: 797140 - DNA, 75 bp, synthetic construct
  source 1..75: mol_type = other DNA
cacaaaatcacagggatacaggtggcatacagcacagtatggtggctttacaaccgccgaaccgccgccgacgcc

SEQ ID NO: 797141 - DNA, 75 bp, synthetic construct
  source 1..75: mol_type = other DNA
atgctgaggctggcaggatgtggggacggtggtgcacttcagcccggaaaacggggcgttgcgatgacagtctcc

SEQ ID NO: 797142 - DNA, 75 bp, synthetic construct
  source 1..75: mol_type = other DNA
tttgcacaattactcaatgcgaccagcgttgaagcaattgcaaaagcggctaatgaagttggggcttgggtaatt

SEQ ID NO: 797143 - DNA, 75 bp, synthetic construct
  source 1..75: mol_type = other DNA
tacagaaaaatttcagcagaactttgcgcttgttttgcctgactggcaggttggcgtgaaacgaatgctcaacga

SEQ ID NO: 797144 - DNA, 75 bp, synthetic construct
  source 1..75: mol_type = other DNA
ggctgattgtacggcacatgctattcgtgttgcactgaaaaaaccagaagtcgcaggcttgtaccatttggtagc

SEQ ID NO: 797145 - DNA, 75 bp, synthetic construct
  source 1..75: mol_type = other DNA
gcgttgaatcaattgcaaaagcggctaatgaagttggggcctgggtaattcatttctcaactgactacgtattcc

SEQ ID NO: 797146 - DNA, 75 bp, synthetic construct
  source 1..75: mol_type = other DNA
gtgcgaagcagcgatgttctgattgtgctccctcgggacaatagcactgttgctggttttgatggccaatcgagt

SEQ ID NO: 797147 - DNA, 75 bp, synthetic construct
  source 1..75: mol_type = other DNA
cgttgagcgatcgtcctgttgaattgaatctctatagtctgcgcgaacatattgagaacctgatttcacttgagg

SEQ ID NO: 797148 - DNA, 75 bp, synthetic construct
  source 1..75: mol_type = other DNA
taaaggctgtctcgctcttgatgtaaacggacgtcctctggataaaaacattacgctgcatgatctgctgggttc

SEQ ID NO: 797149 - DNA, 75 bp, synthetic construct
  source 1..75: mol_type = other DNA
cgatgaactaccgttcccgcccttgttgaagctggtcgccgaccagctcaaggtcggcgtcgaaagctggaacga

SEQ ID NO: 797150 - DNA, 75 bp, synthetic construct
  source 1..75: mol_type = other DNA
aacgggctgcgcacgcgctgcgtggcaacggccatgccgttgatgacgcgctgttgcagtacctgtcgccgctcg

SEQ ID NO: 797151 - DNA, 75 bp, synthetic construct
  source 1..75: mol_type = other DNA
tgctgctggaggtggacgaatggacgggcttcactcggcatttcgcgcatctgaaatcgggcgacccggccaaag

SEQ ID NO: 797152 - DNA, 75 bp, synthetic construct
  source 1..75: mol_type = other DNA
cggacttgccaaagcactgagagaaattggccgcattgagcgaaccctgtttatgctcgactggttccgcgcccc

SEQ ID NO: 797153 - DNA, 75 bp, synthetic construct
  source 1..75: mol_type = other DNA
acatcaacctgaccggcgattacctctggcgcagcagcgccaagatcggcgcgggcaagttcaggccgctacggc

SEQ ID NO: 797154 - DNA, 75 bp, synthetic construct
  source 1..75: mol_type = other DNA
tccgccttcacatgccgggaccattaccgtctatgaaggttccagatcaggtacgctgaatgattttctcggtgc

SEQ ID NO: 797155 - DNA, 75 bp, synthetic construct
  source 1..75: mol_type = other DNA
gcatccgcaggcattggcgatgtcgctcttcaaatttgaaatgtcagcagagtacctgagtcgtattgagaatga

SEQ ID NO: 797156 - DNA, 75 bp, synthetic construct
  source 1..75: mol_type = other DNA
caaaagttcggttacgtaaaagcgaagtgagatttgtcaggcaaaaaccatcggcaggtttgtcgttagtcgcac

SEQ ID NO: 797157 - DNA, 75 bp, synthetic construct
  source 1..75: mol_type = other DNA
aaacgaacgcatcatcaagcgccagtagtgccgcttcctcggcaacggcggcaggcaattccgcgaaggcggcaa

SEQ ID NO: 797158 - DNA, 75 bp, synthetic construct
  source 1..75: mol_type = other DNA
gggacgaaaaccacatcgtcgtttgattacggcactaaatccacgaataacaccggggcacatacacacagtgtg

SEQ ID NO: 797159 - DNA, 75 bp, synthetic construct
  source 1..75: mol_type = other DNA
agctgtacccgcagatgaacaccgacgacctgacagaacggctggcgcgtctgttgtttgtggcgaatatctggg

SEQ ID NO: 797160 - DNA, 75 bp, synthetic construct
  source 1..75: mol_type = other DNA
cccgccctcaacgccgtcgagcgggcgagtgccgaggcgatcacccgtgctaaccggcgcatctacgacgccttg

SEQ ID NO: 797161 - DNA, 75 bp, synthetic construct
  source 1..75: mol_type = other DNA
gttgccggactccaaggacgacctgatccgacattacacattcaacgataccgacctctcgatcatccgacagcg

SEQ ID NO: 797162 - DNA, 75 bp, synthetic construct
  source 1..75: mol_type = other DNA
gcgctggatattctgctgaacggcggcacgttaaatggcacgctggaacccgttttagcgccgctgtttaagcgg

SEQ ID NO: 797163 - DNA, 75 bp, synthetic construct
  source 1..75: mol_type = other DNA
atcagctgcaggacggcgatattgatgagacaccaccgtctgaacgacagaagaacactatgctgccgctgtcgt

SEQ ID NO: 797164 - DNA, 75 bp, synthetic construct
  source 1..75: mol_type = other DNA
cctccattgaaattaaggaggccgcaggcaaggccgacagcagcgatatttatcagaacctgataacgcttgccc

SEQ ID NO: 797165 - DNA, 75 bp, synthetic construct
  source 1..75: mol_type = other DNA
gcgcgcaaggtgcccgccgatgcgccaaccgcattcatcaagccgcgctgggcaaagctggttctgaccgacgac

SEQ ID NO: 797166 - DNA, 75 bp, synthetic construct
  source 1..75: mol_type = other DNA
atggacgggcttcacccggcacttcgcccacctgaagtcaggcgacctggccaaggacaaaaacctgttgctgac

SEQ ID NO: 797167 - DNA, 75 bp, synthetic construct
  source 1..75: mol_type = other DNA
cttccagccgttcacgattggccactaccggcaggctgtccagttgctgaccgagctggccatgcaaaccgacaa

SEQ ID NO: 797168 - DNA, 75 bp, synthetic construct
  source 1..75: mol_type = other DNA
accacgtcatcgtcggacggccagaacttcagaaccggcagcaaagcagaaagcactggtcggggtctgacgctc

SEQ ID NO: 797169 - DNA, 75 bp, synthetic construct
  source 1..75: mol_type = other DNA
attagcagcgacaggctgaacatcaagcaaatacgcgcccattgggatgaaattctgcggctggccacctccatc

SEQ ID NO: 797170 - DNA, 75 bp, synthetic construct
  source 1..75: mol_type = other DNA
gggcgaggcgcgcaatgcgctggccagggcagtgtttttcaaccgcctgggtgaaatccgcgaccgcagtttcga

SEQ ID NO: 797171 - DNA, 75 bp, synthetic construct
  source 1..75: mol_type = other DNA
acacccatatctccgaccagtacgcgccgttccacaccaaggtcgtgaacgtcggcgtgcgcgactcgacctacg

SEQ ID NO: 797172 - DNA, 75 bp, synthetic construct
  source 1..75: mol_type = other DNA
gccctgggatgaaacgattctggcggcgctcgagagtcgcaaaggtgagcacccacttcttgatgagcacatagc

SEQ ID NO: 797173 - DNA, 75 bp, synthetic construct
  source 1..75: mol_type = other DNA
cacggaaggatcggcgattcgtcgtattggtcacctgcgttggctgcgtaatattgccgtagccttaggcaatgc

SEQ ID NO: 797174 - DNA, 75 bp, synthetic construct
  source 1..75: mol_type = other DNA
cacggaaggttcggcgattcgccgtataggtcacctgcgttggctgcgtaatatcgccgtggcattaggcaatgc

SEQ ID NO: 797175 - DNA, 75 bp, synthetic construct
  source 1..75: mol_type = other DNA
gctgaaagggcaacaacttacagtcagcgaactggatgtcgtcgcgtttgaaaatcagccgccggttaaactggt

SEQ ID NO: 797176 - DNA, 75 bp, synthetic construct
  source 1..75: mol_type = other DNA
cgcatcgtccgccagttcggcggcgtcatcggcatcatcggcgtctgcttcaaaagatgaggcgaccagacaggc

SEQ ID NO: 797177 - DNA, 75 bp, synthetic construct
  source 1..75: mol_type = other DNA
agaggccggtcacgctgtccgtgagatggagcgtaagcgtcaacggagcaccgtattgacgcttatttattggtg

SEQ ID NO: 797178 - DNA, 75 bp, synthetic construct
  source 1..75: mol_type = other DNA
cagtacggatttggggacgaaaaccacatcgtcgtttgattacggaaccaaatccacgaataacaccggggcgca

SEQ ID NO: 797179 - DNA, 75 bp, synthetic construct
  source 1..75: mol_type = other DNA
gacgcgatgttttaagccgtttactgagcggagctgcgccaaccgtaggtggcgcatttgtggtgacgcttgccg

SEQ ID NO: 797180 - DNA, 75 bp, synthetic construct
  source 1..75: mol_type = other DNA
taggtgcttgcgtaggtatgcgtggcgcgcgtgttcaggcggtttctactgaactgggcggcgagcgtatcgata

SEQ ID NO: 797181 - DNA, 75 bp, synthetic construct
  source 1..75: mol_type = other DNA
tgtatgacgatttgcccgaccggtgccatcgtcgagccatataccgtcgatgctcgccgctgtatctcttatctc

SEQ ID NO: 797182 - DNA, 75 bp, synthetic construct
  source 1..75: mol_type = other DNA
aaaagaggcggcaaaatcatcagaaacgagcgcagcctcgagcgccagtagtgcagcctcctcggcaacagcggc

SEQ ID NO: 797183 - DNA, 75 bp, synthetic construct
  source 1..75: mol_type = other DNA
tgctgattgaaacacagggcgaggtctgcctccttccccttcctggtgatgcagcagagcggttgtttccgtcgg

SEQ ID NO: 797184 - DNA, 75 bp, synthetic construct
  source 1..75: mol_type = other DNA
ggtaataactaaccttgtgctctcactttctatattgggattggtctatttcatctttcaaaacttggccttgag

SEQ ID NO: 797185 - DNA, 75 bp, synthetic construct
  source 1..75: mol_type = other DNA
caacgccgatacgccaacttcattgtacgagtcggcttatttccagtggttgtggctggaagatgcccggcgcag

SEQ ID NO: 797186 - DNA, 75 bp, synthetic construct
  source 1..75: mol_type = other DNA
tcgaagaaacgcagaaagaaaaaatggcctctgtatcctccggaatgcagttgccgcctggctttaagatgccgt

SEQ ID NO: 797187 - DNA, 75 bp, synthetic construct
  source 1..75: mol_type = other DNA
cgaccaggctcggtgatcccggttgtagtgatgcgtgatgataaacagttaacgttgcaggtcaccattcaggaa

SEQ ID NO: 797188 - DNA, 75 bp, synthetic construct
  source 1..75: mol_type = other DNA
gggacgaaaaccacatcgtcgtttgattacggcactaaatccacgaataacaccggggcgcatacgcacagtgtg

SEQ ID NO: 797189 - DNA, 75 bp, synthetic construct
  source 1..75: mol_type = other DNA
aaggtgcggctgttcgggcgcatcggccaggcgctgatcgaggccaagcaagcgggccgcgatccgttcgccgcc

SEQ ID NO: 797190 - DNA, 75 bp, synthetic construct
  source 1..75: mol_type = other DNA
gcagaagcttgcgcagcccgaggacttcgatttcctgcaccgcatcggcgaaagctacgccacgctgcgccgcta

SEQ ID NO: 797191 - DNA, 75 bp, synthetic construct
  source 1..75: mol_type = other DNA
caaaattatggataagctgatccgcgatggtcgcgtgatccgcggctacattggtatcggcggacgcgagatcgc

SEQ ID NO: 797192 - DNA, 75 bp, synthetic construct
  source 1..75: mol_type = other DNA
ataacaaccctgaactatttcctcatggttttgatattataatagaagatacaacgtttcagatgtattctcccg

SEQ ID NO: 797193 - DNA, 75 bp, synthetic construct
  source 1..75: mol_type = other DNA
ggtaatccttttgtgatgaattttgacgataataagttatatgcacttacaggtttggctcgaataaaaggtaaa

SEQ ID NO: 797194 - DNA, 75 bp, synthetic construct
  source 1..75: mol_type = other DNA
gatctggcggtgctgaaaattaacgccacaggcggtttaccaacgattccgatcaatccacgccgcgtaccgcac

SEQ ID NO: 797195 - DNA, 75 bp, synthetic construct
  source 1..75: mol_type = other DNA
ccgggcggcaaaacttcctgcaaaccgatgcttccattaaccacggtaactctggcggcgcgctggtgaactcgc

SEQ ID NO: 797196 - DNA, 75 bp, synthetic construct
  source 1..75: mol_type = other DNA
accactgcacgcgcagggcggtggtatagatcaactgcaagggatcgtggttaatgaagtgtcacctgacggccc

SEQ ID NO: 797197 - DNA, 75 bp, synthetic construct
  source 1..75: mol_type = other DNA
taatgatgacattcagggcaccgcagcagtaacagtcggtacgttgattgctgccagccgcgcggcgggtggaca

SEQ ID NO: 797198 - DNA, 75 bp, synthetic construct
  source 1..75: mol_type = other DNA
cgacagcgatgtgctgtcactgctggatgtggtgcgcaatgtcaaaccggatattctgatcggcgtctccggaca

SEQ ID NO: 797199 - DNA, 75 bp, synthetic construct
  source 1..75: mol_type = other DNA
acgaaaccctcttctaccgcctggtgaataatcatcttgatgagatgatgcccgtaatctatacaccaactgtcg

SEQ ID NO: 797200 - DNA, 75 bp, synthetic construct
  source 1..75: mol_type = other DNA
tttggtcagttctatcccaagcatgaaaaggctaatttcctgaatctgagcttccaggagcggtacttccatttt

SEQ ID NO: 797201 - DNA, 75 bp, synthetic construct
  source 1..75: mol_type = other DNA
tgaacattcatgaactgattcatcagtgcattgcttcatggaagaccggtaaccgtggcgtttcgcttgatgatg

SEQ ID NO: 797202 - DNA, 75 bp, synthetic construct
  source 1..75: mol_type = other DNA
accaaatcacgactacgaatcaaaataatcgcagacattccggactcacgtcgccgcgatctcgacaacatcctt

SEQ ID NO: 797203 - DNA, 75 bp, synthetic construct
  source 1..75: mol_type = other DNA
cagctttctactccatgcactgacagcatcataaacagcattgcagcaggtattttcaccaaagagggggcagca

SEQ ID NO: 797204 - DNA, 75 bp, synthetic construct
  source 1..75: mol_type = other DNA
aagagcacattaagcttctttctgaatcagaaggcaggagtaatgctatgaagcacaaagaagaactccttgcag

SEQ ID NO: 797205 - DNA, 75 bp, synthetic construct
  source 1..75: mol_type = other DNA
gtggaatgactatcgcgcaaagtctatgcaatcagacaccccagccaccgatgcttttctggctgaagtacgagc

SEQ ID NO: 797206 - DNA, 75 bp, synthetic construct
  source 1..75: mol_type = other DNA
cccgggcatcgggctgggtgttattgcttccggcgcgtcacgtatcaccgatgagatgctgatgtcggcaagtga

SEQ ID NO: 797207 - DNA, 75 bp, synthetic construct
  source 1..75: mol_type = other DNA
atggaaccaaaaacaaaaaaacagcgttcgctttatatcccttacgctggccctgtactgctggaatttccgttg

SEQ ID NO: 797208 - DNA, 75 bp, synthetic construct
  source 1..75: mol_type = other DNA
aataaggaagaaatacaacaacaacccatcgggacaacaagagtacttaaacaaactcagagagctttatgctac

SEQ ID NO: 797209 - DNA, 75 bp, synthetic construct
  source 1..75: mol_type = other DNA
ggggctatgagcggtccgttactggccgggaaaatgctggcattaggcactggcacggttggcgtaatggccgct

SEQ ID NO: 797210 - DNA, 75 bp, synthetic construct
  source 1..75: mol_type = other DNA
ttatcccacctggtacaaccttactggcagaagtgccgctgctggataataacggcaaatttaacggtcagtacg

SEQ ID NO: 797211 - DNA, 75 bp, synthetic construct
  source 1..75: mol_type = other DNA
gggtcgtatcttttttattttttaatacctgttgttttgactaaagtcagtcttgtgcttagtgctgcgctggga

SEQ ID NO: 797212 - DNA, 75 bp, synthetic construct
  source 1..75: mol_type = other DNA
aggagtggagcccaatactatgccataaacagtgatgataaacgctcccgcatagacattgactctttattttaa

SEQ ID NO: 797213 - DNA, 75 bp, synthetic construct
  source 1..75: mol_type = other DNA
gccctgaagctggccaccgcgccggttggtacaatcactatggtcgtgtctgggtgctgaaaacggccccgggcg

SEQ ID NO: 797214 - DNA, 75 bp, synthetic construct
  source 1..75: mol_type = other DNA
aagtgcagtgccgctggttggccgtgcgtcggttgcctctgatcgttcgcttatcccaccaggtactaccttgct

SEQ ID NO: 797215 - DNA, 75 bp, synthetic construct
  source 1..75: mol_type = other DNA
gggcactgagcgataaatatatcctcgcttacagcaactccctgatggataacttcattatggatgtacagggta

SEQ ID NO: 797216 - DNA, 75 bp, synthetic construct
  source 1..75: mol_type = other DNA
atggtaggattgattcgcggtgtcagcgaggggctcggcccggtcggcggcgcagctgctatctattcattaagc

SEQ ID NO: 797217 - DNA, 75 bp, synthetic construct
  source 1..75: mol_type = other DNA
gtaattcttgtgtaccggaatgaaaaaaatgaacaggaggcaaccagtgagccagcaaaccagaataagcgataa

SEQ ID NO: 797218 - DNA, 75 bp, synthetic construct
  source 1..75: mol_type = other DNA
tcaactggctgccgatgctgctggtggagcagggctttcggccatcgcaggcggcaggcgtaatgtttgctctgc

SEQ ID NO: 797219 - DNA, 75 bp, synthetic construct
  source 1..75: mol_type = other DNA
accgttggttttccgcgcatccggcagatccccaaagggtatttacttgctggcagcatattgtttgtcagctat

SEQ ID NO: 797220 - DNA, 75 bp, synthetic construct
  source 1..75: mol_type = other DNA
tatgatgaaatcatcaataatatcaccaccagcccattgagttatttcctggcgttcattggtgcgtttatctgg

SEQ ID NO: 797221 - DNA, 75 bp, synthetic construct
  source 1..75: mol_type = other DNA
ggtgtcagtgaggggctcggcccggtcggcggcgcagctgctatctattcattaagcgggctgctgttaatcttc

SEQ ID NO: 797222 - DNA, 75 bp, synthetic construct
  source 1..75: mol_type = other DNA
tttccgccgggcatgagatggcttcggaactgaaagcagaatgtggtgccgttgatatgcgtagtgtggcaaagc

SEQ ID NO: 797223 - DNA, 75 bp, synthetic construct
  source 1..75: mol_type = other DNA
cactttcgattatttagtgacttctcctccttacataaatgtttttaattatcatcagaactaccgaccaattat

SEQ ID NO: 797224 - DNA, 75 bp, synthetic construct
  source 1..75: mol_type = other DNA
acttactgagacagtaagcaaaggcaaggctgcaattattgatggcaatgatgatgctaatgcagggataatgat

SEQ ID NO: 797225 - DNA, 75 bp, synthetic construct
  source 1..75: mol_type = other DNA
ccagcgccgaatcctgaagcgccgcgtgaaggcgtagtggtgccaccggtaccggatcaggaacctgaggcctga

SEQ ID NO: 797226 - DNA, 75 bp, synthetic construct
  source 1..75: mol_type = other DNA
tctcgatgactgggaacatctggaccactatttccgccacccgctggcacgtcgcccgatgcgctttgccgcacc

SEQ ID NO: 797227 - DNA, 75 bp, synthetic construct
  source 1..75: mol_type = other DNA
gtggttgagcgagctttccgatgccattgaaaccagcaaaggcattctttctgtacccgttcccgttggcaaatt

SEQ ID NO: 797228 - DNA, 75 bp, synthetic construct
  source 1..75: mol_type = other DNA
gaatggcccgtgcaggcgctggagtacaaatcgtttctgcgttttcgggtaggcaaaattcttgacgatctgtgt

SEQ ID NO: 797229 - DNA, 75 bp, synthetic construct
  source 1..75: mol_type = other DNA
agccctcagttaattgaataccttctttcaaaacattgtaagaagggagactacgtccttgacccattttgcggg

SEQ ID NO: 797230 - DNA, 75 bp, synthetic construct
  source 1..75: mol_type = other DNA
taaaccgccagtaaaaggcgctactggtagagctgcgttctgttgccctgattgtggccttaaagcctgggcaaa

SEQ ID NO: 797231 - DNA, 75 bp, synthetic construct
  source 1..75: mol_type = other DNA
taatcagagggggacggtttcagacagccgtgtatgacctgctgaaaaatggcttctcgatctcctggtatgata

SEQ ID NO: 797232 - DNA, 75 bp, synthetic construct
  source 1..75: mol_type = other DNA
cctgaaactggcgagcattctggcgaagctgatgaatctgccagcgccaaatcctgaagcgccacgtgaaggcga

SEQ ID NO: 797233 - DNA, 75 bp, synthetic construct
  source 1..75: mol_type = other DNA
gccaggattccagcgcagtgaattcctgatcgagaaaggcgccatcgacatgatcgtccgtcgtccggaaatgcg

SEQ ID NO: 797234 - DNA, 75 bp, synthetic construct
  source 1..75: mol_type = other DNA
gaataccttcgattacttggttacgtcacctccctatataaatgtttttaattaccatcagaattatcgtccgat

SEQ ID NO: 797235 - DNA, 75 bp, synthetic construct
  source 1..75: mol_type = other DNA
cttcgtaaacttgatcaaaagaatgaagttcagagggttaaactctctatagacgttccattcttagagggactg

SEQ ID NO: 797236 - DNA, 75 bp, synthetic construct
  source 1..75: mol_type = other DNA
acaggaacaccagaacaaccgggtaagcaaaatctgcctggtgccgaagagggcgacggcttcttttacgctaag

SEQ ID NO: 797237 - DNA, 75 bp, synthetic construct
  source 1..75: mol_type = other DNA
atgaaaaaacaacgtaatttacgtagcatggcggcccaggccgttgaacaagtcgtcgagcaagggcaatcatta

SEQ ID NO: 797238 - DNA, 75 bp, synthetic construct
  source 1..75: mol_type = other DNA
cgtcgatgtggtgctcgattgcaccggcgtgtatggcacccgcgagcatggcgaagcgcatattgccgccggggc

SEQ ID NO: 797239 - DNA, 75 bp, synthetic construct
  source 1..75: mol_type = other DNA
gtttgtatcaactgctttatacccgcattccacctcatgctgcgctggctgaaacggttgaaggtgctgtcgcaa

SEQ ID NO: 797240 - DNA, 75 bp, synthetic construct
  source 1..75: mol_type = other DNA
acaggaacaccagagcaaccgggtaaacaaaatctgcctggtgccgaagagggcgacggcttcttttacgctaag

SEQ ID NO: 797241 - DNA, 75 bp, synthetic construct
  source 1..75: mol_type = other DNA
cccgcgacagctggcttgcattgttggatgaagcaggaatgaaaggtttcccgcatgcggattaccctgatgctg

SEQ ID NO: 797242 - DNA, 75 bp, synthetic construct
  source 1..75: mol_type = other DNA
ctagcgacattgttgtaattcacccagatacaatacgtatgagaaatgaagtaggttatctgcgtgaccttttat

SEQ ID NO: 797243 - DNA, 75 bp, synthetic construct
  source 1..75: mol_type = other DNA
gcacgtcgtcttgcagaatttaatgaaacaccttttcaggctgcctgtaagaacttcctcgataataaaaaagaa

SEQ ID NO: 797244 - DNA, 75 bp, synthetic construct
  source 1..75: mol_type = other DNA
gagtttttctcagacaatagtgtaacatttacatccatattcagagcaaagggaaacgaagcagctatggtatac

SEQ ID NO: 797245 - DNA, 75 bp, synthetic construct
  source 1..75: mol_type = other DNA
ccagccaccgatgctttcctggctgaagtacgtgcgcaggcgtttaatgacctttgctcggcgttcgttaaacac

SEQ ID NO: 797246 - DNA, 75 bp, synthetic construct
  source 1..75: mol_type = other DNA
cgaaaccccagccaccgacgctttcgtggccgaagtgcgggctcagggcgtggagatggctatggagcatatgca

SEQ ID NO: 797247 - DNA, 75 bp, synthetic construct
  source 1..75: mol_type = other DNA
ttggtaaatggtattatgctgagtttaccatgcctaccactatggcttatcgtattggtgttgaatccaaattgc

SEQ ID NO: 797248 - DNA, 75 bp, synthetic construct
  source 1..75: mol_type = other DNA
accgagactggtttttgttcgatgaggtcgaaccaaaggccggacaggtggtgccggctctcgcacacattgggc

SEQ ID NO: 797249 - DNA, 75 bp, synthetic construct
  source 1..75: mol_type = other DNA
agcctgacggcaccaccggtacagggaatgccggtgcagactgccctgcgcaccctgcacggcgtcattaccagc

SEQ ID NO: 797250 - DNA, 75 bp, synthetic construct
  source 1..75: mol_type = other DNA
ggcgtacgtgcggagatcgtgcagctggatctcggcaatctaccagaaggggcactggcgctggagaaactcatt

SEQ ID NO: 797251 - DNA, 75 bp, synthetic construct
  source 1..75: mol_type = other DNA
aaggctggctgcctgtcttatacttaaaaatgatgacagagcaagagatcaagttaatctgcatcaacagtatat

SEQ ID NO: 797252 - DNA, 75 bp, synthetic construct
  source 1..75: mol_type = other DNA
atggttagttattacatggctagatcaacggggattttgtacaaaatagatcgccatacggtgtactacttcaat

SEQ ID NO: 797253 - DNA, 75 bp, synthetic construct
  source 1..75: mol_type = other DNA
atggttcgttactacatggctaaacctacaggcattttgtataagattgatggcgaatatgtttattactttcac

SEQ ID NO: 797254 - DNA, 75 bp, synthetic construct
  source 1..75: mol_type = other DNA
aaggccgtttgtgcgggtgctgtctgaaaaatccgggcacgacgggggcatccgccgaaagatgaggtccgccag

SEQ ID NO: 797255 - DNA, 75 bp, synthetic construct
  source 1..75: mol_type = other DNA
tgcttgttgtctttagactgttcggtcgtacatggacgcttgaccttaaggataatgaccacacagaaccctgtt

SEQ ID NO: 797256 - DNA, 75 bp, synthetic construct
  source 1..75: mol_type = other DNA
ctggacgagtgagaacgctaaaaataaagctgttttaatggctaatgcctggcttaatggcttcaacctgaaaat

SEQ ID NO: 797257 - DNA, 75 bp, synthetic construct
  source 1..75: mol_type = other DNA
gacgttttggcgcaacgcatgagattgccagcctggtggtgtggctttgttcggagggcgcaaattacaccaccg

SEQ ID NO: 797258 - DNA, 75 bp, synthetic construct
  source 1..75: mol_type = other DNA
tggatctcggtaaactgccagaaggtgcgcaggcgctggagaaactcattcaacggctggggcgtattgatgtgc

SEQ ID NO: 797259 - DNA, 75 bp, synthetic construct
  source 1..75: mol_type = other DNA
atgaacaatgtcattcccctgcagaattcaccagaacgcgtttccctgttacccattgcgccggggggggatttt

SEQ ID NO: 797260 - DNA, 75 bp, synthetic construct
  source 1..75: mol_type = other DNA
atctggatgatgactactttgacatgttgcaggaagagctctgcagcgtggtggaggcatccggtgccagcctgg

SEQ ID NO: 797261 - DNA, 75 bp, synthetic construct
  source 1..75: mol_type = other DNA
tttatcgcgacgggtatcaatcgccatgcgtacaaccgctggcacgtttcatgaaggagttcgcggaggttaaca

SEQ ID NO: 797262 - DNA, 75 bp, synthetic construct
  source 1..75: mol_type = other DNA
atccgataattatacggtttacttataatttccctttggaaaaaagagttattcgtgatgaaatcatgaatatta

SEQ ID NO: 797263 - DNA, 75 bp, synthetic construct
  source 1..75: mol_type = other DNA
aacattgaggttatccgcaagctgttggatacgctgaaagcatcactgatggaagaaaaccagatggaacttgca

SEQ ID NO: 797264 - DNA, 75 bp, synthetic construct
  source 1..75: mol_type = other DNA
ggcgacgacgcgccagcggtgttccgcaagggtgtgctgattaccggcgtgacggccagcgcggcgcgtgaccgc

SEQ ID NO: 797265 - DNA, 75 bp, synthetic construct
  source 1..75: mol_type = other DNA
catatcaaggtcagcaccgagtatggcggcaagagccagctaaacctcggtcatctggtggatgccgggaaacag

SEQ ID NO: 797266 - DNA, 75 bp, synthetic construct
  source 1..75: mol_type = other DNA
tcattaccggctttaaacatctctcctcgtcacaggatgaagcccgttacgaagtgcggctggagccgcgtatgg

SEQ ID NO: 797267 - DNA, 75 bp, synthetic construct
  source 1..75: mol_type = other DNA
cggttatctgtggtacccgtctggatattctgccatggactgcagaatctgaggctgcagtaacgaatttagatc

SEQ ID NO: 797268 - DNA, 75 bp, synthetic construct
  source 1..75: mol_type = other DNA
cttatttcagttgttcataagcttgtcattaaagatgttgtccagtacgcagaacgcaaaatgaacgcatacagg

SEQ ID NO: 797269 - DNA, 75 bp, synthetic construct
  source 1..75: mol_type = other DNA
ttgttctatgtgagcacaggctcgcttatctcctcaggaagattaaaaccaggcaaaatcaaacgtgtttcagca

SEQ ID NO: 797270 - DNA, 75 bp, synthetic construct
  source 1..75: mol_type = other DNA
gtggcgaggaaaaacaaccttcggtacatgatggtgtgccaaaactggttgctgatttcctggctgataaattcg

SEQ ID NO: 797271 - DNA, 75 bp, synthetic construct
  source 1..75: mol_type = other DNA
cttcggaacatgatggtgtgccaaaactggttgctgatttcctggctgataaattcgtcgatcagagcactgatg

SEQ ID NO: 797272 - DNA, 75 bp, synthetic construct
  source 1..75: mol_type = other DNA
tggatctcagcgataagttggatgctctgatgtccaaagcggccaccgcgagtggcatggagttgctggatatca

SEQ ID NO: 797273 - DNA, 75 bp, synthetic construct
  source 1..75: mol_type = other DNA
cctccggggtacattctccgggatttgccatcttgtcagcgaattcggcgctgggacgtgtgatgactgttttct

SEQ ID NO: 797274 - DNA, 75 bp, synthetic construct
  source 1..75: mol_type = other DNA
gtgctggatatcaaatcggtaggcgatgaagtcattaccgataaagccgaagttctgatgttttatgccgcgcgc

SEQ ID NO: 797275 - DNA, 75 bp, synthetic construct
  source 1..75: mol_type = other DNA
aagggctggaaggcgcaggcaaaaccacggcacgtaacgtggtggtcgagacgcttgagcaactgggtatccacg

SEQ ID NO: 797276 - DNA, 75 bp, synthetic construct
  source 1..75: mol_type = other DNA
gcgcgctgaatcctgtagtcctgccaagcgttctggcgctggtgatgacggcagtatttgatgccaccggaacta

SEQ ID NO: 797277 - DNA, 75 bp, synthetic construct
  source 1..75: mol_type = other DNA
gctgaaaaaatgaatatgccgccatcctccatggtttattttctgcgtgatgcggttgatgcaggcgtgctgacg

SEQ ID NO: 797278 - DNA, 75 bp, synthetic construct
  source 1..75: mol_type = other DNA
aagaagatgatgttgtggtcatcaaaacgccaggcggcgaagtagaatttgaagtaattaaggtggaatacctgt

SEQ ID NO: 797279 - DNA, 75 bp, synthetic construct
  source 1..75: mol_type = other DNA
tggaatatcaccgaccacgtcctgcgctatctcattcttgatttctcaacggctcccgaagcagcacaggaggtg

SEQ ID NO: 797280 - DNA, 75 bp, synthetic construct
  source 1..75: mol_type = other DNA
tgcggacggtatccagaatcgtctgaccgcgcaggatatcgccgaagcgaccatcatcatccactccgtggcggt

SEQ ID NO: 797281 - DNA, 75 bp, synthetic construct
  source 1..75: mol_type = other DNA
gtgcctgcccaatgggcctggctcacacctttatggccgctcaggcgctggaagaagcggcggtagaagccggtt

SEQ ID NO: 797282 - DNA, 75 bp, synthetic construct
  source 1..75: mol_type = other DNA
accggaattatcagccccgcgaaaatgcagactggcctgagccacctgaaggagttaagcgttacgtcatcagag

SEQ ID NO: 797283 - DNA, 75 bp, synthetic construct
  source 1..75: mol_type = other DNA
gtgatcatcggcctggaaaaactgaaagtccctggtggcattctgctgaccattatcggtatctcaattgtcggt

SEQ ID NO: 797284 - DNA, 75 bp, synthetic construct
  source 1..75: mol_type = other DNA
ttaaacgtaatgcctatatggcagaaatgctggaatcccaggaagtggatttgatggtaaccaccctgatcttac

SEQ ID NO: 797285 - DNA, 75 bp, synthetic construct
  source 1..75: mol_type = other DNA
caaacccggcgaaaagcgctcgtccatatctacttaaactcggtttgattggcaaatcaaaccgtcgtaatcgta

SEQ ID NO: 797286 - DNA, 75 bp, synthetic construct
  source 1..75: mol_type = other DNA
taatacaaaaggcatggcgctttatggtcgcgttaaagaggaattaatcaggcgtggtgtgattgcggtgtatga

SEQ ID NO: 797287 - DNA, 75 bp, synthetic construct
  source 1..75: mol_type = other DNA
agaatgaagtcagaggagagttgacgtttctggaaaaagccaaagggataagtgtattacgttctttatatgagg

SEQ ID NO: 797288 - DNA, 75 bp, synthetic construct
  source 1..75: mol_type = other DNA
tcggtcaggcgcttctcagaggaaatcctgtcagttccccgttatccgataatgcccacgtcaatccggtgtctg

SEQ ID NO: 797289 - DNA, 75 bp, synthetic construct
  source 1..75: mol_type = other DNA
gtgatcgaaatcttacatgaatactggaaaccgctgttgtggaccgacggttatcgctttaccggcgtggcgatc

SEQ ID NO: 797290 - DNA, 75 bp, synthetic construct
  source 1..75: mol_type = other DNA
cttccggggtgcattctccgggatttattacgttgtcagcacattcggtgctggggcgtgtgatgacggttttct

SEQ ID NO: 797291 - DNA, 75 bp, synthetic construct
  source 1..75: mol_type = other DNA
tgcacagaaatagataaccatgatgtttttgattatgacgtgtttctggatgaactgattggccggctactgagg

SEQ ID NO: 797292 - DNA, 75 bp, synthetic construct
  source 1..75: mol_type = other DNA
gccggaatggaagatattgaacatcttcaggtacaggcttaccggacattatttgaattgagccgtgaactgaat

SEQ ID NO: 797293 - DNA, 75 bp, synthetic construct
  source 1..75: mol_type = other DNA
atggattatacttacatggaacaccatataatgttgctccagctgagcaaacgcatgtgcctcttattacctgga

SEQ ID NO: 797294 - DNA, 75 bp, synthetic construct
  source 1..75: mol_type = other DNA
ggtgtatgtaagcgaatccctacaattaatattgagccatcaaattcagataatacattatgcaagaaaaactca

SEQ ID NO: 797295 - DNA, 75 bp, synthetic construct
  source 1..75: mol_type = other DNA
aagcgcatcggaaaaagataatcaggataataacgggtattatgactggaaagatacctggatgttcggcacatc

SEQ ID NO: 797296 - DNA, 75 bp, synthetic construct
  source 1..75: mol_type = other DNA
ggcctgaactgtaccgtgctggcgctgacgctcaacacctgtgcttacaccactgagatttttgccggggcgatc

SEQ ID NO: 797297 - DNA, 75 bp, synthetic construct
  source 1..75: mol_type = other DNA
gatcctgatgctgcactctactgcgttggcatttactgccacggtgccggatctgctgaaaatagcccgcgatat

SEQ ID NO: 797298 - DNA, 75 bp, synthetic construct
  source 1..75: mol_type = other DNA
tcaaaactatgctctgaatggatattctcgtggtaccaatgattttacaaagaaatataatgaacttatatcctt

SEQ ID NO: 797299 - DNA, 75 bp, synthetic construct
  source 1..75: mol_type = other DNA
tacaaaataaaattacgtgcgtcaggttttcgcctagtctatcaggtgatagatgatcaattaattatcgctgtt

SEQ ID NO: 797300 - DNA, 75 bp, synthetic construct
  source 1..75: mol_type = other DNA
tgatgatatgttaattattgcggttgtcgcggtaggtaagcgtgaacgtagtaacgtttataatctcgccagcga

SEQ ID NO: 797301 - DNA, 75 bp, synthetic construct
  source 1..75: mol_type = other DNA
ctggtcatccttattgcaaaacccagtaccgggctgggagaagtgcttgtgacgataaatttgcttaatgccctt

SEQ ID NO: 797302 - DNA, 75 bp, synthetic construct
  source 1..75: mol_type = other DNA
tacaaaataaaacttcgcgcagcaggttttcgtctggtctatcaggtgattgatgacatgttaattattgcggtt

SEQ ID NO: 797303 - DNA, 75 bp, synthetic construct
  source 1..75: mol_type = other DNA
ggtttcgtctggtatatcaggtgagtgatgacatgttaattattgctgttgttactgaaccgccccgggtttcct

SEQ ID NO: 797304 - DNA, 75 bp, synthetic construct
  source 1..75: mol_type = other DNA
agcgcagcgttatgcccggttggtgaaagagaacggtgtgtcacaacaggatgctgatgatgctcagtctgtctg

SEQ ID NO: 797305 - DNA, 75 bp, synthetic construct
  source 1..75: mol_type = other DNA
tgatgatcaattagttatcgctgttgttgctgtagggaaacgtgaacgtagtgatgtttataatcttgccagcga

SEQ ID NO: 797306 - DNA, 75 bp, synthetic construct
  source 1..75: mol_type = other DNA
aacttcattatggatgtgcagggtagcgggtatatcgactttggtgatggcagtccgcttaactttttcagctat

SEQ ID NO: 797307 - DNA, 75 bp, synthetic construct
  source 1..75: mol_type = other DNA
gtggatgcgcactatactccgctcgcgttttcatgcaaccttttttttaacccgatcacggatctggcatgattt

SEQ ID NO: 797308 - DNA, 75 bp, synthetic construct
  source 1..75: mol_type = other DNA
gacgataaatttgcttaatgcccttgtttggctggcgatcaatctggttaatcgattaaggaaggtgcgaacaag

SEQ ID NO: 797309 - DNA, 75 bp, synthetic construct
  source 1..75: mol_type = other DNA
atgaacaatagtaataatctggattatttcactctctatatcatcttttccattgcatttatgctgatcaccctc

SEQ ID NO: 797310 - DNA, 75 bp, synthetic construct
  source 1..75: mol_type = other DNA
tatcgccagtaactttggccgttatgctggtgcaagtccatttactacctttaatggtcgttattatggtgatca

SEQ ID NO: 797311 - DNA, 75 bp, synthetic construct
  source 1..75: mol_type = other DNA
tctgtttaatggtcagaaaaccaactggctgattgtaccaggattattattagccctggtcggcgtctgctgggt

SEQ ID NO: 797312 - DNA, 75 bp, synthetic construct
  source 1..75: mol_type = other DNA
agacgaatcgcatcctgaccgttacagcgcacaatatcgcgcagaatcgcagccggacggcatcatcggtatcgg

SEQ ID NO: 797313 - DNA, 75 bp, synthetic construct
  source 1..75: mol_type = other DNA
aacatggcgagacttcatcgtctgctttggttcatcgacgattgagtatttttccctgactggtgcaaccaccgt

SEQ ID NO: 797314 - DNA, 75 bp, synthetic construct
  source 1..75: mol_type = other DNA
agtcgggcgcatcaggaaaaatgtcggcttcaaattgcgcgttatcacgaagtcacctgtcactctgtctggcgc

SEQ ID NO: 797315 - DNA, 75 bp, synthetic construct
  source 1..75: mol_type = other DNA
tggaaatcaacaaggtggcttctgtttacggtacggaaggaggaatgagtaaggcaaatagtctggataaagccg

SEQ ID NO: 797316 - DNA, 75 bp, synthetic construct
  source 1..75: mol_type = other DNA
tgaagagcagcagttacaggcaatacgtgatgtgcttcgccctcagcgggaggccagaccggaggcacagccaca

SEQ ID NO: 797317 - DNA, 75 bp, synthetic construct
  source 1..75: mol_type = other DNA
atttaaagtactacatcctgaggatattcgcaaggggccgtattactcccgcaccagcagtctgacaccggaaga

SEQ ID NO: 797318 - DNA, 75 bp, synthetic construct
  source 1..75: mol_type = other DNA
catgccactgaaaggtaagatccttaacacctgggaagtttcttccgacgaagtgctggcctcgcaggaagtgca

SEQ ID NO: 797319 - DNA, 75 bp, synthetic construct
  source 1..75: mol_type = other DNA
gtgccggcgggatcgttatcactctcccgctgttaccgctggccggctgggtgatcctgccgaccggcgcactga

SEQ ID NO: 797320 - DNA, 75 bp, synthetic construct
  source 1..75: mol_type = other DNA
acgtcgtcacagcctgggcaacccgacactgatcgttgatgcccggggatggtctctgaaacgaaccgggagaga

SEQ ID NO: 797321 - DNA, 75 bp, synthetic construct
  source 1..75: mol_type = other DNA
atgacgatgtgtaccgcgctatcgacttcatttacgaaggcaatcagataacgtgcggcgataagctggaatctg

SEQ ID NO: 797322 - DNA, 75 bp, synthetic construct
  source 1..75: mol_type = other DNA
tggtgtgtactgaaaacaggcctgtatgacgatgtgtaccgcgctatcgacttcatttacgaaggcaatcagata

SEQ ID NO: 797323 - DNA, 75 bp, synthetic construct
  source 1..75: mol_type = other DNA
caaacgttctgatgtgaacggtgtatctcgcggcgtcgagtacaacatggcgcagaatgctgtttatcgcgtgtg

SEQ ID NO: 797324 - DNA, 75 bp, synthetic construct
  source 1..75: mol_type = other DNA
atatcagtaaatatataaaggatgatattggattcagctatcaggggtacttccgctcaggctggggcaccggta

SEQ ID NO: 797325 - DNA, 75 bp, synthetic construct
  source 1..75: mol_type = other DNA
tacttcgttgctgattattcctgcagctactgcgcgtcgctttgcccgtacgccggaacagatggctggtgtcgc

SEQ ID NO: 797326 - DNA, 75 bp, synthetic construct
  source 1..75: mol_type = other DNA
accgggcctgcaaaggctttgctgcgagcgattgccaatgatccgcaacatgtgctgcaagcacttaaccgttag

SEQ ID NO: 797327 - DNA, 75 bp, synthetic construct
  source 1..75: mol_type = other DNA
tagacacgttgcgtaactgggagcaggggcgacgttcaccgaccgggcctgcaaaggctttgctgcgagcgattg

SEQ ID NO: 797328 - DNA, 75 bp, synthetic construct
  source 1..75: mol_type = other DNA
tggggcgatactcaggatttaatgggcgcagccgtattcctcgcaagtccggcatcgaattatgtcaacggacat

SEQ ID NO: 797329 - DNA, 75 bp, synthetic construct
  source 1..75: mol_type = other DNA
atgtcaatcgaatctctcaatgcgttctcaatggattttttctccctgaaaggtaaaaccgcaattgttaccggc

SEQ ID NO: 797330 - DNA, 75 bp, synthetic construct
  source 1..75: mol_type = other DNA
aacgcaggtatttgtaagctgaataaggtgctggacttcggtcgtgctgactgggacccgatgattgatgtgaac

SEQ ID NO: 797331 - DNA, 75 bp, synthetic construct
  source 1..75: mol_type = other DNA
ccaagaatataatagtttcgccaacatggatactgacacgtttatctttacaattataccagacaataaccatgt

SEQ ID NO: 797332 - DNA, 75 bp, synthetic construct
  source 1..75: mol_type = other DNA
caaataggtaacaatgcaggcctgcatatcatctatttcctgcaatatggtcactggaatgtaaatgactatttt

SEQ ID NO: 797333 - DNA, 75 bp, synthetic construct
  source 1..75: mol_type = other DNA
catttaaacagatgaaaaatcctactgatcctgaggaattagctaatatatttaataaaaacataaagaatatat

SEQ ID NO: 797334 - DNA, 75 bp, synthetic construct
  source 1..75: mol_type = other DNA
ctgtatatgctgattatattaataacactactgatttcagaccaaaacctgaacgtatcttcatatgtggagaga

SEQ ID NO: 797335 - DNA, 75 bp, synthetic construct
  source 1..75: mol_type = other DNA
gtctaaattcccggaagaaagtacgtgataaaaataatgaaataatttatttatcagggcttagttgttttcaat

SEQ ID NO: 797336 - DNA, 75 bp, synthetic construct
  source 1..75: mol_type = other DNA
atgaaagtatttcacaatatatttaagcacatctcttcaagccatcaagataagcattcagatcaagttaacaat

SEQ ID NO: 797337 - DNA, 75 bp, synthetic construct
  source 1..75: mol_type = other DNA
accgcagaaggcgcgccgcagaagataatcgccgcctgttgcgaacgtttcggtaccgtcgatattctggttaac

SEQ ID NO: 797338 - DNA, 75 bp, synthetic construct
  source 1..75: mol_type = other DNA
gtagaagttaacgtacgccgcgatggtcagatctataacatcgcctttgaaaatggcgaaaaggtgcaggattta

SEQ ID NO: 797339 - DNA, 75 bp, synthetic construct
  source 1..75: mol_type = other DNA
cgatttccagcgcccagcgtcgtatgcgtgcggctaaaaaagtggtgcgtaaaaagctaaccagcggcccggcgc

SEQ ID NO: 797340 - DNA, 75 bp, synthetic construct
  source 1..75: mol_type = other DNA
gatccgcagtttgccgggcagaccaaagaacgtctctcttcgcgtcagtgcgcggcatttgtttctggcgtggtg

SEQ ID NO: 797341 - DNA, 75 bp, synthetic construct
  source 1..75: mol_type = other DNA
catcaaaaatgaaaacggtgaacagaactcgtctgccgcagcacatactataaatggatcgcagcaaattgccgt

SEQ ID NO: 797342 - DNA, 75 bp, synthetic construct
  source 1..75: mol_type = other DNA
tcaacaacaagataatgaaaatgacgacagttattttgaaatgaaagatagctggatgctgacttctgttttacg

SEQ ID NO: 797343 - DNA, 75 bp, synthetic construct
  source 1..75: mol_type = other DNA
atgctgatgatgctcagtctacctgtgcacaagataaagccagtgtagaggcgaaaaaagccgcactggaaactg

SEQ ID NO: 797344 - DNA, 75 bp, synthetic construct
  source 1..75: mol_type = other DNA
tgactgcccctctctcgtcagaacggtcgaacttgaccataaaacagtattgtcctttctgaatgatgtgaataa

SEQ ID NO: 797345 - DNA, 75 bp, synthetic construct
  source 1..75: mol_type = other DNA
cagcggcccggcgctgcctggcaaactggctgactgtaccgcgcaggaccttaaccgtaccgaactgttcctcgt

SEQ ID NO: 797346 - DNA, 75 bp, synthetic construct
  source 1..75: mol_type = other DNA
cacgccaaacgcgtggacgttattttacatgctgaccagtcgctggaagtgattgacgatggccgcgggatgccg

SEQ ID NO: 797347 - DNA, 75 bp, synthetic construct
  source 1..75: mol_type = other DNA
taccggcggttgaactgattctttgccgtctgcacgcgggcggtaaattctctaacaaaaattaccagttctctg

SEQ ID NO: 797348 - DNA, 75 bp, synthetic construct
  source 1..75: mol_type = other DNA
gttgaacttgaccataaaacggtattgtcctttctgaatgacgtgaataacagactgcctgatatgttctgtatt

SEQ ID NO: 797349 - DNA, 75 bp, synthetic construct
  source 1..75: mol_type = other DNA
atggatgctgtatgttccgttgttctggtttgccagcctttcgacttaattatctgtaagaaacctgtatcattc

SEQ ID NO: 797350 - DNA, 75 bp, synthetic construct
  source 1..75: mol_type = other DNA
ctgctgatgaactggctgatggtgtgatggaatcgctgcgatttgatgcgcatgagctgctgattatccatcttc

SEQ ID NO: 797351 - DNA, 75 bp, synthetic construct
  source 1..75: mol_type = other DNA
atgccgattcagcaacttccgcttatgaaaggtgtcggcaaagactttcgaaacgctgactatatcgactatctg

SEQ ID NO: 797352 - DNA, 75 bp, synthetic construct
  source 1..75: mol_type = other DNA
catgagctgctgattatccatcttccgcgccatgtcctcgtatacgacgcatcttcaagtgccaatggtccgcaa

SEQ ID NO: 797353 - DNA, 75 bp, synthetic construct
  source 1..75: mol_type = other DNA
ccggctgaaattacacatcagccagaacgttccggggcaggtgctacagcaggccgatggcgaagtgctggcgat

SEQ ID NO: 797354 - DNA, 75 bp, synthetic construct
  source 1..75: mol_type = other DNA
catgagttgctgattatccaccttccgcgccatgttctcgtgtacgacgcatcttcaagcgccaatggtccgcaa

SEQ ID NO: 797355 - DNA, 75 bp, synthetic construct
  source 1..75: mol_type = other DNA
attgagaaaatcctccgctcctacactgctgatgaactggctgatggcgtgatggaatcgttgcgatttgatgct

SEQ ID NO: 797356 - DNA, 75 bp, synthetic construct
  source 1..75: mol_type = other DNA
agtgctgaatatcgcgcggaatcacaaccagacggcatagttggcattgggacgtggcgagacttcatcgtctgc

SEQ ID NO: 797357 - DNA, 75 bp, synthetic construct
  source 1..75: mol_type = other DNA
tggtgccgctttgtatgtcgcacagccatcactgatggtgcaaaaaggcatcgccgggacttactgcaaaacgcc

SEQ ID NO: 797358 - DNA, 75 bp, synthetic construct
  source 1..75: mol_type = other DNA
ccatcgctgatggtgcagaaaggtattgccggaacctactgtaaaacgccattcgctgattcctatgcgttcatc

SEQ ID NO: 797359 - DNA, 75 bp, synthetic construct
  source 1..75: mol_type = other DNA
agtcgggcgcatcaggaaaaatgtcggcttcaaattgcgcgttatcacgaagtcaccagtaacactatccgggtg

SEQ ID NO: 797360 - DNA, 75 bp, synthetic construct
  source 1..75: mol_type = other DNA
agttgggcgcatcaggaaaaatgtcggcttcaaattgcgcgttattacgaagtcaccagtcactctatctggctg

SEQ ID NO: 797361 - DNA, 75 bp, synthetic construct
  source 1..75: mol_type = other DNA
tgatggcacggttaaaaccgtctcaaactggcctgcagacagcggattcactcagtatgagttaggttcagtccg

SEQ ID NO: 797362 - DNA, 75 bp, synthetic construct
  source 1..75: mol_type = other DNA
aatgttgtcgtcccaggtgttgtctccattctgaagacaatggcaagtaatggttcacttcccagtaccggtaaa

SEQ ID NO: 797363 - DNA, 75 bp, synthetic construct
  source 1..75: mol_type = other DNA
tatgcgtggtcaaaagacggtactgattcatggtttatcactgaccttgaagatgaatcgcaccctgaccgctac

SEQ ID NO: 797364 - DNA, 75 bp, synthetic construct
  source 1..75: mol_type = other DNA
gtcgtattacaaaaaccatttgtatatgacaatcgcgttttatggcgaaaggttggtcgagttagacgcctcatt

SEQ ID NO: 797365 - DNA, 75 bp, synthetic construct
  source 1..75: mol_type = other DNA
tcaaagcggataacgccagagtgttcgaccttgaggttgaatcgtcaactggcgttgcgcagtacgctgaccgcc

SEQ ID NO: 797366 - DNA, 75 bp, synthetic construct
  source 1..75: mol_type = other DNA
cgcagtatgagttaggttctgttcgtgacattacgcgcttacgcgggcgttatgcgtggtcaaaagacggcactg

SEQ ID NO: 797367 - DNA, 75 bp, synthetic construct
  source 1..75: mol_type = other DNA
agcctgacggcatcatcggcataggtacatggcgagacttcatagtctgctttggttcatcgacgattgaatatt

SEQ ID NO: 797368 - DNA, 75 bp, synthetic construct
  source 1..75: mol_type = other DNA
aatgttggcttcaaattgcgcgttatcacgaagtcacctgtcactctgtctggcgctcagataaggattgagtaa

SEQ ID NO: 797369 - DNA, 75 bp, synthetic construct
  source 1..75: mol_type = other DNA
ggtgctgtagaaagaaacggcaacctgtttgataacagtgtaaagatttccgcagatccacgtcttaatgcagtt

SEQ ID NO: 797370 - DNA, 75 bp, synthetic construct
  source 1..75: mol_type = other DNA
cgattcttgataaaaacgtaacgttttatacaaaagtctctggtgaaaaggtggcatcgctggagagtataacca

SEQ ID NO: 797371 - DNA, 75 bp, synthetic construct
  source 1..75: mol_type = other DNA
aatgacaacagaagcgacattaagtgcaggagaaagtttattacttggcggatttatccaagataaagaaagttc

SEQ ID NO: 797372 - DNA, 75 bp, synthetic construct
  source 1..75: mol_type = other DNA
tgaccgggaaattgcagttcgatatcagcagccagtacgacaagcagcaggaacacctgctgtttactccactgt

SEQ ID NO: 797373 - DNA, 75 bp, synthetic construct
  source 1..75: mol_type = other DNA
gcagaatgctgtttatcgcgtgtgtggtggcaagctgtacaaaggagaaagtgaagtcggtgacgtcgccggaag

SEQ ID NO: 797374 - DNA, 75 bp, synthetic construct
  source 1..75: mol_type = other DNA
gtttgctgattcgtatgcgttcatcagcaatccggcaactggtgcgccgtctgtatacatcatcggctccggtca

SEQ ID NO: 797375 - DNA, 75 bp, synthetic construct
  source 1..75: mol_type = other DNA
gtgaagtcggtgatgttgccggaagtggtcgtgtatcaatggcgcatggtcggacatctcaggctgtaggcgtta

SEQ ID NO: 797376 - DNA, 75 bp, synthetic construct
  source 1..75: mol_type = other DNA
cagatggctgaaggtgatgccggtccgacagcacaggagttaactgagcgtccgcgtctgcccgcccccggcgat

SEQ ID NO: 797377 - DNA, 75 bp, synthetic construct
  source 1..75: mol_type = other DNA
gaacggcgttcattgacgagaacaacggaaaattgttgatgaacgggcttatgcaggatacccggaagagactga

SEQ ID NO: 797378 - DNA, 75 bp, synthetic construct
  source 1..75: mol_type = other DNA
tcggtaaaggtctgaaagcaaccggtaaggctgtcagtgatggtgccaaagcctcggatgaatggctgacagaac

SEQ ID NO: 797379 - DNA, 75 bp, synthetic construct
  source 1..75: mol_type = other DNA
ccaaaaccacggatgcggcggtgaaatcgctgaatggtattgatataccggaacagcaggtgcccttcctgggga

SEQ ID NO: 797380 - DNA, 75 bp, synthetic construct
  source 1..75: mol_type = other DNA
ttggtgccaaagataaaaatggtgatccgattattggagctgttcatttaagcgtcagcaagaaagggattgaga

SEQ ID NO: 797381 - DNA, 75 bp, synthetic construct
  source 1..75: mol_type = other DNA
taaggccactaatggcgtgaaacatgtggtaccgatggatgttatcgagagactgcctgaactgatgcatgatcc

SEQ ID NO: 797382 - DNA, 75 bp, synthetic construct
  source 1..75: mol_type = other DNA
ggaaaacgccgctggtcgccagggggaaatactggagggcgaaacagttcgtcgtggtctgccgtcaccggatgc

SEQ ID NO: 797383 - DNA, 75 bp, synthetic construct
  source 1..75: mol_type = other DNA
cgcgtaatgttcgtatgcctcagcctgaatcacttccccgcactgtacgggactcactgcctgagcttgcacagc

SEQ ID NO: 797384 - DNA, 75 bp, synthetic construct
  source 1..75: mol_type = other DNA
taacgccttcctgaaactggtgcaggataatcccgacaaggattactggcaggtattcactgatgacagaccgga

SEQ ID NO: 797385 - DNA, 75 bp, synthetic construct
  source 1..75: mol_type = other DNA
cggtagataaaccgagcactcaccagcaggcgcgtggtgcgaaaattgaagactttggcgaggagattaagggcg

SEQ ID NO: 797386 - DNA, 75 bp, synthetic construct
  source 1..75: mol_type = other DNA
ctacttcaccaccaaaaaggacggcaaaacttactacattaaacttcatgatccgcgcctgatgcgtgcgatgaa

SEQ ID NO: 797387 - DNA, 75 bp, synthetic construct
  source 1..75: mol_type = other DNA
agcatgttgtcacaccagcggaatatcagacgattatcaaaaccgtgctgaaaacccgcgacagtgataacgtca

SEQ ID NO: 797388 - DNA, 75 bp, synthetic construct
  source 1..75: mol_type = other DNA
cgtttttctccgaccccaatcgctggaaggacaacagcacgtcgttcagcctgggcgatgtattaccaactatag

SEQ ID NO: 797389 - DNA, 75 bp, synthetic construct
  source 1..75: mol_type = other DNA
tttttctctctgcaaccactgacggcatcaattacgggcgtgagcagatgattgagcagaatgaaccgttcgttt

SEQ ID NO: 797390 - DNA, 75 bp, synthetic construct
  source 1..75: mol_type = other DNA
acgtgcggcgataagctggaatcggttaccggtaaattgcagttcgatatcagcagccagtatggtcttcaacag

SEQ ID NO: 797391 - DNA, 75 bp, synthetic construct
  source 1..75: mol_type = other DNA
tggtgccgcgttgtatgtcgcacagccatcgctgatggtgcagaaaggcattgccggaacttactgcaaaacgcc

SEQ ID NO: 797392 - DNA, 75 bp, synthetic construct
  source 1..75: mol_type = other DNA
aatgtcggcttcaaattgcgcgttatcacgaagtcacctgtcactctgtctggcgctcagataaggatcgagtaa

SEQ ID NO: 797393 - DNA, 75 bp, synthetic construct
  source 1..75: mol_type = other DNA
aacatggcgagacttcatcgtctgctttggttcatcgacgattgaatacttttccctgactggggcaaccaccgt

SEQ ID NO: 797394 - DNA, 75 bp, synthetic construct
  source 1..75: mol_type = other DNA
gaacacctgttgtttacaccactcttcaaagctgagaacgccagatgttttgatctggaagttgaatcatcgact

SEQ ID NO: 797395 - DNA, 75 bp, synthetic construct
  source 1..75: mol_type = other DNA
gctactgggaatggatgtttatggctggcaagtgatggcgctgacgctactgctgggaacccctacgcttggctt

SEQ ID NO: 797396 - DNA, 75 bp, synthetic construct
  source 1..75: mol_type = other DNA
gcggatttatcaactgaagacttgaccaacgaagagattgcggaacgtctgggaatagcttcagattggatggat

SEQ ID NO: 797397 - DNA, 75 bp, synthetic construct
  source 1..75: mol_type = other DNA
ttaacgctttaccggaaggaaaaattaagccgcgataaccctcagtacagtgggctccaattgcccaaagaggag

SEQ ID NO: 797398 - DNA, 75 bp, synthetic construct
  source 1..75: mol_type = other DNA
cagcagtcagtatgggcttcaacaggaacacctgctgtttactccactgttcaaagcggataacgccagatgctt

SEQ ID NO: 797399 - DNA, 75 bp, synthetic construct
  source 1..75: mol_type = other DNA
acctatcccccaactatcctgaagaaaaccactttctagatgataatctaacggaagaactcgataatgaggaaa

SEQ ID NO: 797400 - DNA, 75 bp, synthetic construct
  source 1..75: mol_type = other DNA
acggaagaactcgataatgaggaaattcgacaacatctgggaatagattcggattggatggatgcagtggacact

SEQ ID NO: 797401 - DNA, 75 bp, synthetic construct
  source 1..75: mol_type = other DNA
gccatcccgccggagtcggtactgatgcaggacggcgcattcagcctgacggcaccgccggtgcagggaatgccg

SEQ ID NO: 797402 - DNA, 75 bp, synthetic construct
  source 1..75: mol_type = other DNA
ctcgcagggctccatgtatcccttcagtggatgggccagtaacgaatccagcccgctgcaatcctcggttctgct

SEQ ID NO: 797403 - DNA, 75 bp, synthetic construct
  source 1..75: mol_type = other DNA
gtgatgcgctgggaggccggtcgcaacccgcctaatacccggaagaattttggttacctcatgtggcgcaaacgt

SEQ ID NO: 797404 - DNA, 75 bp, synthetic construct
  source 1..75: mol_type = other DNA
gcttgtgatctgtccaataattctctacgagggacattattaagtttagcagcttttactaatgatctttatatt

SEQ ID NO: 797405 - DNA, 75 bp, synthetic construct
  source 1..75: mol_type = other DNA
acagtgccacccgttcgggcgcagtgtgacccgctgggaaaccgggaaaaatccgcccaatacaaagaaaaactt

SEQ ID NO: 797406 - DNA, 75 bp, synthetic construct
  source 1..75: mol_type = other DNA
aatatccgtccccaatcctgcccaaagaacgctggcgttaccagatggtgaatatgtacccggacagcggacagt

SEQ ID NO: 797407 - DNA, 75 bp, synthetic construct
  source 1..75: mol_type = other DNA
aaatacccgctgacgtactggctgaacatcatcacatcgctgggctgtctggaaggtggtgacctggatatcgct

SEQ ID NO: 797408 - DNA, 75 bp, synthetic construct
  source 1..75: mol_type = other DNA
aagaactgcgtattgggaaaataactatccaggaaaccttatatggtctgctgttcacaccagaacttcattctt

SEQ ID NO: 797409 - DNA, 75 bp, synthetic construct
  source 1..75: mol_type = other DNA
ggcggtctttgacgctaccggaaccatccgtgcagttgctggtcaggcgaatctgctggataaagacgggcagat

SEQ ID NO: 797410 - DNA, 75 bp, synthetic construct
  source 1..75: mol_type = other DNA
gaatggcacggggattggtatcggcctgtttttgctgctgattgctgccaacggcgtcggtctggtgattaaaaa

SEQ ID NO: 797411 - DNA, 75 bp, synthetic construct
  source 1..75: mol_type = other DNA
atgagtacccgaaatatccacgttaacaccgcgtcgccggcttttggtaaaacggcacagggaacggcgaaaaag

SEQ ID NO: 797412 - DNA, 75 bp, synthetic construct
  source 1..75: mol_type = other DNA
gcatcgcgttctcaacgttcagtggccgcgccgccgcagacccctcctgtgagggccggtttgttaacccgatca

SEQ ID NO: 797413 - DNA, 75 bp, synthetic construct
  source 1..75: mol_type = other DNA
gtgaacctgcctgatatcttggggatggagattgccataaatggtgaggttttctcgttatcccacgaagcctag

SEQ ID NO: 797414 - DNA, 75 bp, synthetic construct
  source 1..75: mol_type = other DNA
cagcgagtcagcttgggaagaaatgacctgcttattcgcaccttccttagtgacgggaggttatgataaacaagc

SEQ ID NO: 797415 - DNA, 75 bp, synthetic construct
  source 1..75: mol_type = other DNA
tcgatgttctgttctggtgtgccggttcgcagggaagtatgtacccgttcaatggccaggtgagtaatgagtcca

SEQ ID NO: 797416 - DNA, 75 bp, synthetic construct
  source 1..75: mol_type = other DNA
gggcacggccagaaaagacgataagcaggtgaacggagccttctaccacgttcactggtacaaatatccgctgac

SEQ ID NO: 797417 - DNA, 75 bp, synthetic construct
  source 1..75: mol_type = other DNA
gacggatgtcacccggtccccgggatgcatggttaatctgggtttcagtctgccggagttcgggaaaacggcaca

SEQ ID NO: 797418 - DNA, 75 bp, synthetic construct
  source 1..75: mol_type = other DNA
gcaggatgtctgatgggcggcgatatggatatcgggtacatctcagaaattgaccctacctggacagacagcagt

SEQ ID NO: 797419 - DNA, 75 bp, synthetic construct
  source 1..75: mol_type = other DNA
tcccggagctggggaaaaccgggcagggaacggccaaaaaagacgacaagcaggtgaacggggcattttaccatg

SEQ ID NO: 797420 - DNA, 75 bp, synthetic construct
  source 1..75: mol_type = other DNA
aagaatatcccgatggccgtaaggagctggtcagttttatgacaggtactgaaaaaacagtcaaggctagagcct

SEQ ID NO: 797421 - DNA, 75 bp, synthetic construct
  source 1..75: mol_type = other DNA
gcaccggagaaaagtcagccgttcggccagcgggctaaacaaaaactcactgaactggtgagcaacgctacagac

SEQ ID NO: 797422 - DNA, 75 bp, synthetic construct
  source 1..75: mol_type = other DNA
ccggtcgccaaagggcgtcagccggatacgccgaacccctccatgccgatccagttttgcccgatgggtatttta

SEQ ID NO: 797423 - DNA, 75 bp, synthetic construct
  source 1..75: mol_type = other DNA
gatgccgatactttcgcagtcaaagccccgataaccgatcacggaagaaccgagcatttctggcttacggatgtc

SEQ ID NO: 797424 - DNA, 75 bp, synthetic construct
  source 1..75: mol_type = other DNA
gcgcatggcgttcaagcttcaccgccagggcatgatcatgaacagcatcggtgaaaacacggctgtctgctttga

SEQ ID NO: 797425 - DNA, 75 bp, synthetic construct
  source 1..75: mol_type = other DNA
gctgaacattatcacgtcgatgggctgcctgcagggtggcgacctggatattggttatctgtcggaacttgaccc

SEQ ID NO: 797426 - DNA, 75 bp, synthetic construct
  source 1..75: mol_type = other DNA
atgaaccgttatgtaacaggactggcgctgatgttgttatgcctgaccggtacggccagagccgcttcggctgaa

SEQ ID NO: 797427 - DNA, 75 bp, synthetic construct
  source 1..75: mol_type = other DNA
tggtcgtctggtttctggcgaatggcgtaagctgaacatcggtacggtcgttatcgccgtggcgctggtcacctt

SEQ ID NO: 797428 - DNA, 75 bp, synthetic construct
  source 1..75: mol_type = other DNA
ttattgttctgcgacagtgaaaagggtgcgcggcatgggatagtccaggaggttgccccatcaggtgacagcaac

SEQ ID NO: 797429 - DNA, 75 bp, synthetic construct
  source 1..75: mol_type = other DNA
gaggatgattttgatggcgtggatgtgaaatatatcaaccctgtgacctgggcggaggaaaccgtacagtgtcgg

SEQ ID NO: 797430 - DNA, 75 bp, synthetic construct
  source 1..75: mol_type = other DNA
tgaaggttgacctgtcgtcggcaaccatcgagccgatccgcctggtgttctgcggctcaacgcgccacgtctacg

SEQ ID NO: 797431 - DNA, 75 bp, synthetic construct
  source 1..75: mol_type = other DNA
tgctgaccgatgatatccctggcagcaacactatttcgtgtttgattgagtcgatgacaactgctggtggggtga

SEQ ID NO: 797432 - DNA, 75 bp, synthetic construct
  source 1..75: mol_type = other DNA
ggatatagcgttctcgccagtaactctctgggtgaaattaatccctatccgggtatgccggttaccctggaaatt

SEQ ID NO: 797433 - DNA, 75 bp, synthetic construct
  source 1..75: mol_type = other DNA
ttttcttttgcagagggggatatcagaattggcgccacgccagtggcttctctgggaaaaggcttcagttatacg

SEQ ID NO: 797434 - DNA, 75 bp, synthetic construct
  source 1..75: mol_type = other DNA
taggtaatcaaatgtttcagtatgctgcggcatatatcttacagagaaagcttaaacaaagatcattagttttag

SEQ ID NO: 797435 - DNA, 75 bp, synthetic construct
  source 1..75: mol_type = other DNA
gggggcatggttaaatactttcgaagataaaatagttgtttcccctcgtaagtggtttgctggaaataataaatc

SEQ ID NO: 797436 - DNA, 75 bp, synthetic construct
  source 1..75: mol_type = other DNA
aggatatgagtacaagtgatggcgtaacgactattacagtatcagaaccacttgactggacattcaacaacccac

SEQ ID NO: 797437 - DNA, 75 bp, synthetic construct
  source 1..75: mol_type = other DNA
atgcgtcgcctgatgaaatacctgcagcagcgggtgacgttccagaccactaccgagctggacgcgctgtgctac

SEQ ID NO: 797438 - DNA, 75 bp, synthetic construct
  source 1..75: mol_type = other DNA
cgctgcctgcagctgttttcggtgatgccccggtttacacctccggcacggcatcaaccggcggcagcccggcgg

SEQ ID NO: 797439 - DNA, 75 bp, synthetic construct
  source 1..75: mol_type = other DNA
gataaaatagttgtttcccctcgtaagtggtttgctggaaataataaatctaagttgaccatggatagttggatt

SEQ ID NO: 797440 - DNA, 75 bp, synthetic construct
  source 1..75: mol_type = other DNA
attcactcatgagtcgctcaataaatcaaagaaagcagactcaatggatgcgtttatttgcacactgcagaaaaa

SEQ ID NO: 797441 - DNA, 75 bp, synthetic construct
  source 1..75: mol_type = other DNA
gcaggccaaaacagggctttggtcattaccagatgctgttgaaccatggcgttatcgatatgaacatataactca

SEQ ID NO: 797442 - DNA, 75 bp, synthetic construct
  source 1..75: mol_type = other DNA
ctaccggaagccaccttgctggctgcggcgttaattcatccgctctcgtcagccacacagcaacacacaccgtca

SEQ ID NO: 797443 - DNA, 75 bp, synthetic construct
  source 1..75: mol_type = other DNA
acaattcagtattacattaactaacgagatggctgacatggtgcgctcccgtgtggcttccggtgcctatgcttc

SEQ ID NO: 797444 - DNA, 75 bp, synthetic construct
  source 1..75: mol_type = other DNA
ccgtttttgttgcgacttgtctggttgccgggatgggttctatcgcgatggggttgtgggccaatctaccattgg

SEQ ID NO: 797445 - DNA, 75 bp, synthetic construct
  source 1..75: mol_type = other DNA
ggcagtatttgatgccaccggaactatccgtgccgtcgccggccaggcgaacctgctggataaagatgggcagat

SEQ ID NO: 797446 - DNA, 75 bp, synthetic construct
  source 1..75: mol_type = other DNA
accatggaaaggcaaccagcccgactatggaagaactggagagcagggcgaagcaagccaaaactgggctttggt

SEQ ID NO: 797447 - DNA, 75 bp, synthetic construct
  source 1..75: mol_type = other DNA
catggctcgcacccacgtgtgttacgggaagccggtgccgacgatgctgatatgctggtcgccgtaaccagttca

SEQ ID NO: 797448 - DNA, 75 bp, synthetic construct
  source 1..75: mol_type = other DNA
ttgctcacggtgatgaaagcacctcacgcgttgtcggcagagtcattgacgaaatcaagctaccgccaggaacga

SEQ ID NO: 797449 - DNA, 75 bp, synthetic construct
  source 1..75: mol_type = other DNA
gccaggttggcggcacactggcggaaaacctggttggcgagaacaacgatatcactgttgtcgataccaacggtg

SEQ ID NO: 797450 - DNA, 75 bp, synthetic construct
  source 1..75: mol_type = other DNA
atcggttacgcaatgtttgctgtgctgtgggcagtattctgtggcgccaccgcgctggcaggtagctggggtggc

SEQ ID NO: 797451 - DNA, 75 bp, synthetic construct
  source 1..75: mol_type = other DNA
tggttcccggcgaaagagcgttccatcgcagtaggttactttaacgttggttcttcaattggtgcgatgattgca

SEQ ID NO: 797452 - DNA, 75 bp, synthetic construct
  source 1..75: mol_type = other DNA
attctcgaaagccttggtaatgacctgtcaaagctcctgcccttacttgatcagggtggtgaaaagcttcgccag

SEQ ID NO: 797453 - DNA, 75 bp, synthetic construct
  source 1..75: mol_type = other DNA
atcaccaaagatttaatcggtaacacctggaacattatcagcggtattaccgttgccttcgttctctatatcctc

SEQ ID NO: 797454 - DNA, 75 bp, synthetic construct
  source 1..75: mol_type = other DNA
atggctttgccggtgtgtctggcgtcatttggtttccacggcaatattcccagcctgattatttgctatggcaaa

SEQ ID NO: 797455 - DNA, 75 bp, synthetic construct
  source 1..75: mol_type = other DNA
cgcccactggccgctggtcagttggttacccgagcgtaatttcaacgtttttatgtttgattatcgcgggtttgg

SEQ ID NO: 797456 - DNA, 75 bp, synthetic construct
  source 1..75: mol_type = other DNA
acgcgcattgatgcggagctgtcgatggtggcgttgcgggagtatagagagaaatttccggcatggcgggatgcg

SEQ ID NO: 797457 - DNA, 75 bp, synthetic construct
  source 1..75: mol_type = other DNA
ggcgtattttgccgctggtgtgctacgacttacgttttccggtgtggtcgcgcaatctcaacgattatgacctcg

SEQ ID NO: 797458 - DNA, 75 bp, synthetic construct
  source 1..75: mol_type = other DNA
agcccgcgctggctggcggaaaaggggcgtcatattgaggcggaagaagtgttgcgtatgctgcgcgatacgtcg

SEQ ID NO: 797459 - DNA, 75 bp, synthetic construct
  source 1..75: mol_type = other DNA
tttttgctccgcatatctggaataaaagcagtgataacgtaaaatacaagctcggcgtgacgctagacggataca

SEQ ID NO: 797460 - DNA, 75 bp, synthetic construct
  source 1..75: mol_type = other DNA
cttttttgaccatgttgggtacttgggtttctggggtgggagcattttctgctgttgcgacatcattgttgttgg

SEQ ID NO: 797461 - DNA, 75 bp, synthetic construct
  source 1..75: mol_type = other DNA
atgaagagatgtaaatatattttaagaggtttgttgctgaagtttaaaagtataagttctatgcatttgttattt

SEQ ID NO: 797462 - DNA, 75 bp, synthetic construct
  source 1..75: mol_type = other DNA
gaactcccggctttcgcgggaagtcttgtcagtctgatcgttatagtctttatggcaaaaaaccgtaaagaaaaa

SEQ ID NO: 797463 - DNA, 75 bp, synthetic construct
  source 1..75: mol_type = other DNA
tactcattgcactgggctttaacccactaaaagcagcgattgcatcactggttgctaatacagtccctacagcgt

SEQ ID NO: 797464 - DNA, 75 bp, synthetic construct
  source 1..75: mol_type = other DNA
tgcctcgtcactcagcttctctctgagtaacggcagccatctgtcgatgaagattgagtggatcgcaacccccgg

SEQ ID NO: 797465 - DNA, 75 bp, synthetic construct
  source 1..75: mol_type = other DNA
tgcagcaaccgctggtgtggatggatggcccggctaacctgcgccattttgatcgccagctggaaggaattaccg

SEQ ID NO: 797466 - DNA, 75 bp, synthetic construct
  source 1..75: mol_type = other DNA
aaaggaattttgatggtctgcccggtgcaaaagatatcattctgggcgagttaactaagagagttcaccggatct

SEQ ID NO: 797467 - DNA, 75 bp, synthetic construct
  source 1..75: mol_type = other DNA
catgagaaggaacagataagccgtgctgttcaggaaatgtttgaagaagctgatatgtggctggtttcagattaa

SEQ ID NO: 797468 - DNA, 75 bp, synthetic construct
  source 1..75: mol_type = other DNA
aaaggaattttgatggtctgccagatgcaaaagatatcattctgggcgaattgaccaagagggttcgcaggattt

SEQ ID NO: 797469 - DNA, 75 bp, synthetic construct
  source 1..75: mol_type = other DNA
gcggatatcatcatcgcttctacccatattgcgggcgaaatcaccgtgaccggcaacaaatatgtggttggcgtg

SEQ ID NO: 797470 - DNA, 75 bp, synthetic construct
  source 1..75: mol_type = other DNA
tttttaacccaatcaaatattgaccacacggtaaatagctgcgcggttggcgaatacaaaagtgagctgaacggt

SEQ ID NO: 797471 - DNA, 75 bp, synthetic construct
  source 1..75: mol_type = other DNA
cgcaacatgctctcacccacagactttggcccgaaactgctggaagtgatcaaagaacatttcccgcaggacatg

SEQ ID NO: 797472 - DNA, 75 bp, synthetic construct
  source 1..75: mol_type = other DNA
ttccatatgcagacaggtctcttaatgataatgaacgtgggcatttgcaggttctgcaacagatttcgcccaaat

SEQ ID NO: 797473 - DNA, 75 bp, synthetic construct
  source 1..75: mol_type = other DNA
atgccatttatcgcacaagatagagtgcatttatcgcgcggcgcatcaccgggcggcacggtacatttttatgat

SEQ ID NO: 797474 - DNA, 75 bp, synthetic construct
  source 1..75: mol_type = other DNA
cgccaccgccgaaccgcaccaggccacacgcatagatgcggaactttcgatggtggcattacgggaatatcgtga

SEQ ID NO: 797475 - DNA, 75 bp, synthetic construct
  source 1..75: mol_type = other DNA
aacaggcatttaaaattaaaagaatttagcactaaaggtaatatccattacttacatttttctttatacaatccg

SEQ ID NO: 797476 - DNA, 75 bp, synthetic construct
  source 1..75: mol_type = other DNA
ggcagtctatgaagatcacccgtgggctaatcgcgaatgtgtgccgatggccgatctggcaggggaaaaactgtt

SEQ ID NO: 797477 - DNA, 75 bp, synthetic construct
  source 1..75: mol_type = other DNA
tgtgggcgcccagatttgtttattccacatacggttgttcacggcacagaccctgaacttgatgattatgatgat

SEQ ID NO: 797478 - DNA, 75 bp, synthetic construct
  source 1..75: mol_type = other DNA
cgcgtattgctcgtgaaattgctgtacccaatagcgatgtccgaaaaaacctccgttctcacatgaaacagccat

SEQ ID NO: 797479 - DNA, 75 bp, synthetic construct
  source 1..75: mol_type = other DNA
tctggcggatgcagaaaaggggaattgatccgtttaaagtcgagaaaacatccccttccgccgtggacgaaaggg

SEQ ID NO: 797480 - DNA, 75 bp, synthetic construct
  source 1..75: mol_type = other DNA
gacggcgcaaagtatttccgaaactttacaactcagtgcttcccgcgctttcgtgatgcgtgactggattttgag

SEQ ID NO: 797481 - DNA, 75 bp, synthetic construct
  source 1..75: mol_type = other DNA
acaactatattggtcgcttgttattaccagcatcagtagagaaattcccgctgattggtctgaacagcaccatgt

SEQ ID NO: 797482 - DNA, 75 bp, synthetic construct
  source 1..75: mol_type = other DNA
gggctaacctgccaatggcgattggttgcgccatttccttgacagcatttaccgcattcagcctggtactcgggc

SEQ ID NO: 797483 - DNA, 75 bp, synthetic construct
  source 1..75: mol_type = other DNA
tgatccctggttacgccactgcacccgctctgatgtacgtaggtttgctgatgttaagtaacgtctcgaagctgg

SEQ ID NO: 797484 - DNA, 75 bp, synthetic construct
  source 1..75: mol_type = other DNA
ccggctcggcctgtggcatgacaatgaagcaatcgagccgtggaaatggcgacaattacataatcagcataagga

SEQ ID NO: 797485 - DNA, 75 bp, synthetic construct
  source 1..75: mol_type = other DNA
cgccagcgtgttccgtaacgatgacggcggcaaaggtgatatgcaacaggccaactggagtaatccgggatggcc

SEQ ID NO: 797486 - DNA, 75 bp, synthetic construct
  source 1..75: mol_type = other DNA
ggtaataactggacggcagatttaggcggggtggggaatcttgcaatcagcgccagcgtgttccgtaacgatgac

SEQ ID NO: 797487 - DNA, 75 bp, synthetic construct
  source 1..75: mol_type = other DNA
atggataaaaaattactggctcttttgatcctggcgagtctcagcccggcagaggcgacattaaccaaaattccc

SEQ ID NO: 797488 - DNA, 75 bp, synthetic construct
  source 1..75: mol_type = other DNA
gtatcgggtcgacacttagctatttaaaccaggcgcaaagccagcaagggacgccagtaatggtcctgctttcgc

SEQ ID NO: 797489 - DNA, 75 bp, synthetic construct
  source 1..75: mol_type = other DNA
ctgaatagcgccatgttactggtagctgaagatggcggatttacacttgaaattaacggtagcgaaaaagagcta

SEQ ID NO: 797490 - DNA, 75 bp, synthetic construct
  source 1..75: mol_type = other DNA
tattatgcaatggttaatcttgacaccgtaacatttcttgattcaacaagtttatatagcaagctggaactggat

SEQ ID NO: 797491 - DNA, 75 bp, synthetic construct
  source 1..75: mol_type = other DNA
cgcaaccgtggttggcgttctgtttctgttgattctgtttttatctccgctgtcgtttctgatccccggttatgc

SEQ ID NO: 797492 - DNA, 75 bp, synthetic construct
  source 1..75: mol_type = other DNA
cgaagcgaatctgctgattgattttgtcctggctgatacaggcaaagggaaaataacaaaggcgattgatggagt

SEQ ID NO: 797493 - DNA, 75 bp, synthetic construct
  source 1..75: mol_type = other DNA
gtttcggctgatatatatcctgtttcaaatgacgaattacacatatctggtaataaatgggcattgcatgtgcgt

SEQ ID NO: 797494 - DNA, 75 bp, synthetic construct
  source 1..75: mol_type = other DNA
tattagatgcgatagaaaaaagcataattgaatttatccattacatagaaggcaaatacaaatttaaattaaatg

SEQ ID NO: 797495 - DNA, 75 bp, synthetic construct
  source 1..75: mol_type = other DNA
ggatatcgatagcgattctcagattggattagattctttacgaaagaaatattctttaaccagttctgatgctaa

SEQ ID NO: 797496 - DNA, 75 bp, synthetic construct
  source 1..75: mol_type = other DNA
cagatactccgcaaaaaaaagctgacttatctaaccaattgaatacagaaaaattgacaatggagctacaattga

SEQ ID NO: 797497 - DNA, 75 bp, synthetic construct
  source 1..75: mol_type = other DNA
atgaatatgatgaccgtgccgtttcacggcgattcgctttatgtggttaaccataacggtgagccatacgttccc

SEQ ID NO: 797498 - DNA, 75 bp, synthetic construct
  source 1..75: mol_type = other DNA
atgaatatgatgaccgtgccgtttcacggcgattctctttatgtggttaaccataatggcgaaccgtatgttcca

SEQ ID NO: 797499 - DNA, 75 bp, synthetic construct
  source 1..75: mol_type = other DNA
acatgaaaagggataaaaacatcgccagtctgtatggtgcagggttaaacgaatggaaatcagtcaaagcggctc

SEQ ID NO: 797500 - DNA, 75 bp, synthetic construct
  source 1..75: mol_type = other DNA
tcgaagagtgaataaagcagagttatttcagaaaatatcggctctcgcgactgaatgccacgctatagcatctga

SEQ ID NO: 797501 - DNA, 75 bp, synthetic construct
  source 1..75: mol_type = other DNA
gaaacgaacttaaaaattaccttgaaaatttaggttttaaaaggtgtaaacatttgtgggaatggccccaaggaa

SEQ ID NO: 797502 - DNA, 75 bp, synthetic construct
  source 1..75: mol_type = other DNA
tgatctttctaagagatgatggaatctcccttcagtatcccgatggtcaatgcgctggatatgggatagatggga

SEQ ID NO: 797503 - DNA, 75 bp, synthetic construct
  source 1..75: mol_type = other DNA
caagttaaaacaacggtttaatagctgcatggtcgaaatgaccattcagctaccaggtgatacccaacgtcgccc

SEQ ID NO: 797504 - DNA, 75 bp, synthetic construct
  source 1..75: mol_type = other DNA
cgcctcgacgatgagcgcgggaaagagcatatcaaggtcagcaccgaatatggcggcaagagccagttaaacctc

SEQ ID NO: 797505 - DNA, 75 bp, synthetic construct
  source 1..75: mol_type = other DNA
ggtcaacctcgactttgaccgcgatacgtggaaaccgggctatgagagcctgtgggtacgccagtcgaggcccta

SEQ ID NO: 797506 - DNA, 75 bp, synthetic construct
  source 1..75: mol_type = other DNA
acacgtatggcctgcatctgccgctgctggcgggaacggaagtcagcatcgcctttgaggaaggcaacccggacc

SEQ ID NO: 797507 - DNA, 75 bp, synthetic construct
  source 1..75: mol_type = other DNA
tacaggcacagaacgatctgatggaactgttggcacagaaatcgatagtgatcaccagtacggaagatgagatca

SEQ ID NO: 797508 - DNA, 75 bp, synthetic construct
  source 1..75: mol_type = other DNA
cggggaatttaatgctaagttcctttttactgatgatgatggtctaccttatgccaacacaaaatatattgcatg

SEQ ID NO: 797509 - DNA, 75 bp, synthetic construct
  source 1..75: mol_type = other DNA
cctaccactacgctgacaacttcctgcaaaaaggcgacaaggaggcagcggaaagcggcgcgttttatgcccgta

SEQ ID NO: 797510 - DNA, 75 bp, synthetic construct
  source 1..75: mol_type = other DNA
cgccatctaccagaagcagacggtgccgcaaatcgtcgaaaaaatcctgcgcgagcggcatcaaatgcgcggtca

SEQ ID NO: 797511 - DNA, 75 bp, synthetic construct
  source 1..75: mol_type = other DNA
cgccatctaccagaatcagacggtgccgcaaatcgtcgaaaaaatcctgcgcgagcggcatcatatgcgcggtca

SEQ ID NO: 797512 - DNA, 75 bp, synthetic construct
  source 1..75: mol_type = other DNA
cgccatctaccagaaacagacggtgccgcaaatcgtcgaaaaaatcctgcgcgagcggcatcagatgcgcggtca

SEQ ID NO: 797513 - DNA, 75 bp, synthetic construct
  source 1..75: mol_type = other DNA
tgaccatccagaactacaagcgcaacgtgctgcgtaccccggccaacaataaaatccgcctcgacgatgagcgcg

SEQ ID NO: 797514 - DNA, 75 bp, synthetic construct
  source 1..75: mol_type = other DNA
cagcgcggggaaggttttgaactgcgtaccgatctgtggggtgcagtacgggcaaagaaaggcatctttatcagc

SEQ ID NO: 797515 - DNA, 75 bp, synthetic construct
  source 1..75: mol_type = other DNA
cgcaggacaaggcgcagggtcaggtcagagagatggccgacattatcagcgaactgaacggtctgagcgataaaa

SEQ ID NO: 797516 - DNA, 75 bp, synthetic construct
  source 1..75: mol_type = other DNA
ggccgtatatcgccggggtaaagcacgactcggcgcacaccgaccatgtgaccatccagaacgacaagcgcaacg

SEQ ID NO: 797517 - DNA, 75 bp, synthetic construct
  source 1..75: mol_type = other DNA
tttaaaacctctgattttggctatcgccgcattacggtggaaagaccgcttaaactggcattttatcctcgcgat

SEQ ID NO: 797518 - DNA, 75 bp, synthetic construct
  source 1..75: mol_type = other DNA
ctttcttatggtccgtcgctgacttactccgtggtgatttcaaacagtctcagtatggcagagtgattctgccat

SEQ ID NO: 797519 - DNA, 75 bp, synthetic construct
  source 1..75: mol_type = other DNA
atctggctgcatgggcagaagtgtttcaaaagtttggagctaaacctaaacgaaccccttgctcagctgatgctt

SEQ ID NO: 797520 - DNA, 75 bp, synthetic construct
  source 1..75: mol_type = other DNA
gttacttcaaagcggaagtgttgccgcacgttgcggatgcgtggattaacgccgataagcgcgatgcgaaagatg

SEQ ID NO: 797521 - DNA, 75 bp, synthetic construct
  source 1..75: mol_type = other DNA
tcaaaacggctggcgtgaagctggatgcgaaagagaacaagcagtttatcgatgccattaccacgaaaaacccgg

SEQ ID NO: 797522 - DNA, 75 bp, synthetic construct
  source 1..75: mol_type = other DNA
tgtggatggcaccgtgagcaacggcggacgtatcgggattatccttaacggctctccactgtttactggtggtgc

SEQ ID NO: 797523 - DNA, 75 bp, synthetic construct
  source 1..75: mol_type = other DNA
ggtggaagttatatccggatagagggtagcggcattgagccgggaacgccgggggattataacgtcaaagcggtg

SEQ ID NO: 797524 - DNA, 75 bp, synthetic construct
  source 1..75: mol_type = other DNA
gcgtgacggccagcgcggcgcgtgaccgcagctatgagctgacgtttaccgccatcccgtactcagagcgctacg

SEQ ID NO: 797525 - DNA, 75 bp, synthetic construct
  source 1..75: mol_type = other DNA
acgtatggcctgcatctgccgctgctggcgggaacggaagtcagcatcgcctttgaggaaggcaacccggaccga

SEQ ID NO: 797526 - DNA, 75 bp, synthetic construct
  source 1..75: mol_type = other DNA
gcccaacgttgcttacaggcgctgggcgttgacgttagtcctgaacaacttgtttcaacgctaagcccggcgtaa

SEQ ID NO: 797527 - DNA, 75 bp, synthetic construct
  source 1..75: mol_type = other DNA
actgccattgaagccggtgatgagcgtcgcgcacgcgcaaaatttcactggcaatttctggagcaattcccggca

SEQ ID NO: 797528 - DNA, 75 bp, synthetic construct
  source 1..75: mol_type = other DNA
ccgacgcccggctgaaaattgaggttatcgaattttacgacgaccagagcggctatgagcgcggactgacgctgc

SEQ ID NO: 797529 - DNA, 75 bp, synthetic construct
  source 1..75: mol_type = other DNA
cgccatctaccagaaacagacggtgccgcaaatcgtcgaaaaaatcctgcgcgagcgccatcacatgcgcggtca

SEQ ID NO: 797530 - DNA, 75 bp, synthetic construct
  source 1..75: mol_type = other DNA
cgccgggagaatataacgttaaggcgggatattatgggcgtaagccgaaggcgaagctgacaccggagctgatgg

SEQ ID NO: 797531 - DNA, 75 bp, synthetic construct
  source 1..75: mol_type = other DNA
acgaacgctacctgaatgaacaggccattctcaaaggccagagcaccagttcactgctgatgccggggctggaga

SEQ ID NO: 797532 - DNA, 75 bp, synthetic construct
  source 1..75: mol_type = other DNA
tgcaaagtccggtggatgtgctgaccttcgaaggccgcgaacaactgagtaccccgttccgctacgacattcagt

SEQ ID NO: 797533 - DNA, 75 bp, synthetic construct
  source 1..75: mol_type = other DNA
tgaaaatactgggcaaccacttattaattggccctatgaactagaactggaaagtgggctaaaaatgagtgggat

SEQ ID NO: 797534 - DNA, 75 bp, synthetic construct
  source 1..75: mol_type = other DNA
ctcgtcacgcgacgaagcccgttacgaagtgcgtcttgaaccccgtatggcgctgcttacccgcagccgtcagaa

SEQ ID NO: 797535 - DNA, 75 bp, synthetic construct
  source 1..75: mol_type = other DNA
ggaaggcaacccggaccgaccttatattgcaggcgtaaaacacgactcggcacacactgaccatgtgaccattca

SEQ ID NO: 797536 - DNA, 75 bp, synthetic construct
  source 1..75: mol_type = other DNA
tgatggtgaaacggaagccgtatgggggttgaacagcgcgtacagcgtggtggaaaaaagcgtctccacgcggga

SEQ ID NO: 797537 - DNA, 75 bp, synthetic construct
  source 1..75: mol_type = other DNA
ctgaccatgtgaccattcagaactacaagcgcaacgtgctacgcaccccggcgaacaacaaaatccgcctcgacg

SEQ ID NO: 797538 - DNA, 75 bp, synthetic construct
  source 1..75: mol_type = other DNA
tacgccagtcgcgcccgtatgcgggagacacctacggcctgcacctgccgctgctggcgggaacggaagtcagca

SEQ ID NO: 797539 - DNA, 75 bp, synthetic construct
  source 1..75: mol_type = other DNA
cgcaccgaaaggcgtggcggtcgccagcggcgagcacctgcaactggccgcggtgaaaaacctccagataaatgc

SEQ ID NO: 797540 - DNA, 75 bp, synthetic construct
  source 1..75: mol_type = other DNA
gggcgctaccgggtcaacctcgactttgaccgcgatacgtggaaaccgggttatgaaagcctgtgggtgcgccag

SEQ ID NO: 797541 - DNA, 75 bp, synthetic construct
  source 1..75: mol_type = other DNA
tgcccgtatccgccacgaacactacctgaatgaacaggccattctcaaaggccagagcaccagttcactgctgat

SEQ ID NO: 797542 - DNA, 75 bp, synthetic construct
  source 1..75: mol_type = other DNA
cggcgatggcaatactggatggcgcacagtcacagatgaagtcgctgtccactgatgcgcagacggcgaatgccg

SEQ ID NO: 797543 - DNA, 75 bp, synthetic construct
  source 1..75: mol_type = other DNA
gatgcacgctccgaaaggagtggcggtcgccagcggcgagcacctgcaactggccgctgtgaaaaacctccagat

SEQ ID NO: 797544 - DNA, 75 bp, synthetic construct
  source 1..75: mol_type = other DNA
gatgcacgcaccgaaaggggtggcggtcgccagcggcgagcacctgcaactggccgcagtgaaaaacctccagat

SEQ ID NO: 797545 - DNA, 75 bp, synthetic construct
  source 1..75: mol_type = other DNA
gatgcacgcaccgaaaggagtggcggtcgccagcggcgagcacctgcaactggccgcggtgaaaaacctccagat

SEQ ID NO: 797546 - DNA, 75 bp, synthetic construct
  source 1..75: mol_type = other DNA
cgccatctaccagaaacagacggtgccgcaaatcgtcgaaaaaatcctgcgcgagcgacatcaaatgcgcggtca

SEQ ID NO: 797547 - DNA, 75 bp, synthetic construct
  source 1..75: mol_type = other DNA
gatgcacgcgccgaaaggagtggcggtcgccagcggcgagcacctgcaactggccgcagtgaaaaacctccagat

SEQ ID NO: 797548 - DNA, 75 bp, synthetic construct
  source 1..75: mol_type = other DNA
gatgcacgccccgaaaggcgtggcggtcgccagcggcgagcacctgcaactggccgccgtgaaaaacctccagat

SEQ ID NO: 797549 - DNA, 75 bp, synthetic construct
  source 1..75: mol_type = other DNA
cagaactacaagcgcaacgtgctgcgaaccccggcgaacaacaaaatccgcctcgacgatgagcgcggcaaagag

SEQ ID NO: 797550 - DNA, 75 bp, synthetic construct
  source 1..75: mol_type = other DNA
gagccggagtcggtgctaatgcaggacggcgcattcagcctgagcgccccgccggtacagggaatgccggtacag

SEQ ID NO: 797551 - DNA, 75 bp, synthetic construct
  source 1..75: mol_type = other DNA
gaacaaggacgattgcccatacagtcagggcttttcgttgagtcaataaaaattgatctgccggatagtcaggaa

SEQ ID NO: 797552 - DNA, 75 bp, synthetic construct
  source 1..75: mol_type = other DNA
ctgttgcagcaaaaaattgagcagttacagcaggaagtgctactgggtagcgcacctaagggcgtggcgcttgtc

SEQ ID NO: 797553 - DNA, 75 bp, synthetic construct
  source 1..75: mol_type = other DNA
ccaccgggggcgataacaccacttacggcgaagcctaccactatgccgacaacttcctgcaacaaggcgataaag

SEQ ID NO: 797554 - DNA, 75 bp, synthetic construct
  source 1..75: mol_type = other DNA
ctgttgcagcagagtgtaaaagatctgacgcaggcggcgatcctgctaagcgcacccaaaggcgtggcgatcgcc

SEQ ID NO: 797555 - DNA, 75 bp, synthetic construct
  source 1..75: mol_type = other DNA
ccgacgcccggctgaaaattgaggttgtcgagttttacgacgaccagagcggctatgagcgcggactgacgctgc

SEQ ID NO: 797556 - DNA, 75 bp, synthetic construct
  source 1..75: mol_type = other DNA
tggcagctacatccggctggatgcctgcggaatagaagcgggaacgccgggagaatataacgttaaggcgggata

SEQ ID NO: 797557 - DNA, 75 bp, synthetic construct
  source 1..75: mol_type = other DNA
cagcacctttgaactgatcaatgccgctcctgctgaggtgtatagctacagctatgaatcttctcgtggtgatgc

SEQ ID NO: 797558 - DNA, 75 bp, synthetic construct
  source 1..75: mol_type = other DNA
gcggcaaagagcatatcaaggtcagtaccgagtacggcggcaagagccagctaaacctcggtcatctggtggatg

SEQ ID NO: 797559 - DNA, 75 bp, synthetic construct
  source 1..75: mol_type = other DNA
cgaacaggtgatgcagtatggcgaggacgacctgacgtttatttcacgcctgctgtcggaagtgggtatctggtt

SEQ ID NO: 797560 - DNA, 75 bp, synthetic construct
  source 1..75: mol_type = other DNA
gaaaattgaggttgtcgagttttacgacgaccagagcggctatgagcgcggactgacgctgccgcttcgccatcc

SEQ ID NO: 797561 - DNA, 75 bp, synthetic construct
  source 1..75: mol_type = other DNA
ccaaccgccttatgcgtctgcgcaaccgcgtcaaccggtccagcagccgcctgaagcgcaggtaccgccgcagta

SEQ ID NO: 797562 - DNA, 75 bp, synthetic construct
  source 1..75: mol_type = other DNA
atgagaaaattaattttatgtaattttctgatattacctagtttattctcatgtgtcgaagccgcgccagcgatt

SEQ ID NO: 797563 - DNA, 75 bp, synthetic construct
  source 1..75: mol_type = other DNA
taccggcaggcgctgaccagcgcggcgctgcccggcctgccggccgatgcgctgcaggcggccggtgcctcgctc

SEQ ID NO: 797564 - DNA, 75 bp, synthetic construct
  source 1..75: mol_type = other DNA
ggacgctacgacagcacaaaaaggaattgtccagctcagtagtgcaaccaacagcacatctgaaacgcttgctgc

SEQ ID NO: 797565 - DNA, 75 bp, synthetic construct
  source 1..75: mol_type = other DNA
tgctggggatggcctggttcaatgactggcacgcggcgctctatatgcccgctttctgcgccattctggtggcac

SEQ ID NO: 797566 - DNA, 75 bp, synthetic construct
  source 1..75: mol_type = other DNA
ggcgtagtgcttgacgatcagcgtcgtatgatgaccccgcagaaattgcgcgagtatcaggacatcatccgtgaa

SEQ ID NO: 797567 - DNA, 75 bp, synthetic construct
  source 1..75: mol_type = other DNA
ttaccagtaccgataaagccatcgcgccggagtcggtgctgatgcaggacggcgcattcagcctgacggcaccgc

SEQ ID NO: 797568 - DNA, 75 bp, synthetic construct
  source 1..75: mol_type = other DNA
atgttattcagaaagaagtgcctttttatggcgctgatattcattgctggcagcgccggctttattgcattcaga

SEQ ID NO: 797569 - DNA, 75 bp, synthetic construct
  source 1..75: mol_type = other DNA
ttccgtggccgtctgatacacccccggcagggtatggattaatgcagggacaggcttttgataaatcagtctatc

SEQ ID NO: 797570 - DNA, 75 bp, synthetic construct
  source 1..75: mol_type = other DNA
tatgaccttgccagtggtaaatatacggctcaggacgcgagcacagcgcagaaaggtctggtgaaactcagcagt

SEQ ID NO: 797571 - DNA, 75 bp, synthetic construct
  source 1..75: mol_type = other DNA
gatccgtcatggcctggattttcaccgcgcacagttcttgattttgaagccaacggtttaaatgagaacgatagt

SEQ ID NO: 797572 - DNA, 75 bp, synthetic construct
  source 1..75: mol_type = other DNA
ctacgccgttgaaaatcgagagctatacgctggatggtgttctggatgaggaccgggcctaccgcatcggcatgc

SEQ ID NO: 797573 - DNA, 75 bp, synthetic construct
  source 1..75: mol_type = other DNA
tccggttgcggttgaaatcgacggtgtccccgtcccgccggcagagtggacactgcgcgttatcaagcgagaaac

SEQ ID NO: 797574 - DNA, 75 bp, synthetic construct
  source 1..75: mol_type = other DNA
cactgtaagtgccacaggtaattcagagaacaccgtaaaaaacgttgcgtataactatattgtgaggctggcata

SEQ ID NO: 797575 - DNA, 75 bp, synthetic construct
  source 1..75: mol_type = other DNA
gcgtggtggaaaaaagcgtctccacgcgggactacaactaccgtgaagccacggcggaaatgaccacaggccagc

SEQ ID NO: 797576 - DNA, 75 bp, synthetic construct
  source 1..75: mol_type = other DNA
gtggtgggagttatatccggatagagggtagcggcattgagccgggaacgccgggggattataacgtcaaagcgg

SEQ ID NO: 797577 - DNA, 75 bp, synthetic construct
  source 1..75: mol_type = other DNA
acgccacgacagcacaaaaagggattgtccagctcagtagtgccaccaacagcacgtctgaaacattggccgcga

SEQ ID NO: 797578 - DNA, 75 bp, synthetic construct
  source 1..75: mol_type = other DNA
gacaccgaaagcggttaaggcggcgtatgaccttgcgaaaggtaaatactcggctcaggacgcgaccacggcgca

SEQ ID NO: 797579 - DNA, 75 bp, synthetic construct
  source 1..75: mol_type = other DNA
cggtaggcgctcccgttgcgtggccgtctgacagtgttcctgctggctatgccgtcatgcagggacaaacttttg

SEQ ID NO: 797580 - DNA, 75 bp, synthetic construct
  source 1..75: mol_type = other DNA
acgtggtttacagtattgatggcggttttgacgcgtggcagcgacagtttcccgcagaggtggcttacggcgcgt

SEQ ID NO: 797581 - DNA, 75 bp, synthetic construct
  source 1..75: mol_type = other DNA
cagcactgacgaagtcgttccgggaatgtttacgcgtcaggcctgggaagagcaggtacaggatgcgattaacga

SEQ ID NO: 797582 - DNA, 75 bp, synthetic construct
  source 1..75: mol_type = other DNA
cttttttctgacggtcatcgtggcatttcttttttatgcctttccggaaaacgtcgcttcggccaccggcttcgg

SEQ ID NO: 797583 - DNA, 75 bp, synthetic construct
  source 1..75: mol_type = other DNA
tgacgtgatctgcccgtggtgtgaaacaggtctgtcattcagcaatgatggcggaaacactaacttcgacgtaaa

SEQ ID NO: 797584 - DNA, 75 bp, synthetic construct
  source 1..75: mol_type = other DNA
ggcgcggcgctggcggcgacactgggtttcgcgggggcaaacttagcatggcaaacggtgttttgggtaggtggt

SEQ ID NO: 797585 - DNA, 75 bp, synthetic construct
  source 1..75: mol_type = other DNA
gcaaagccatcgatctgacggacacccgcgattacggcagcctggttgcagcaagtctggggcaggaatggagtg

SEQ ID NO: 797586 - DNA, 75 bp, synthetic construct
  source 1..75: mol_type = other DNA
gggaatacttactatccaggtgtgtcgctcagctggcggagtgtaagcagtggtatgcaactctacgccagtcac

SEQ ID NO: 797587 - DNA, 75 bp, synthetic construct
  source 1..75: mol_type = other DNA
ctggcgtacaagacctatgcggatcgcgaggctgatctggctgccatcaatgacgccttgatgcgtattactgaa

SEQ ID NO: 797588 - DNA, 75 bp, synthetic construct
  source 1..75: mol_type = other DNA
tttgaagacggtggggtttatgactacaacggcgaaaatcactacagtgtcaggagctgcgtggaggttgcccct

SEQ ID NO: 797589 - DNA, 75 bp, synthetic construct
  source 1..75: mol_type = other DNA
gaagccgtaattaccgaatcgcaaaaagtgaaagccatgaaactgccggaggaagcccaggagaaaatgatcctg

SEQ ID NO: 797590 - DNA, 75 bp, synthetic construct
  source 1..75: mol_type = other DNA
tcctgaaattcaacatcttccggcgattcgctggaagctgcgcaatctggcagtgctgaatgataaaaatccggc

SEQ ID NO: 797591 - DNA, 75 bp, synthetic construct
  source 1..75: mol_type = other DNA
tttcaggggttgaatcttctcagcccacgcaaattgcaggcactgcttcgcgccagccattcggttaaaaccaac

SEQ ID NO: 797592 - DNA, 75 bp, synthetic construct
  source 1..75: mol_type = other DNA
atggatctgcgtgatagttatgcccggcaggttaagctgttgatggctgctctgccgcatgtggcgaaggagtcc

SEQ ID NO: 797593 - DNA, 75 bp, synthetic construct
  source 1..75: mol_type = other DNA
ggctggatcttcagcgccggaatactcggtttgctacccggcgcgttggttggcgggatgctggcggaccgttac

SEQ ID NO: 797594 - DNA, 75 bp, synthetic construct
  source 1..75: mol_type = other DNA
gtttctcttctgaacacaacgttactaagcgtgaacaaggcaaagaatatcttattgaaatcccgtactttttaa

SEQ ID NO: 797595 - DNA, 75 bp, synthetic construct
  source 1..75: mol_type = other DNA
caccgaagcggctgatattctgaccacctgcgcgcagttgtggatcatgatgtatgcgctgctttcagtcttctc

SEQ ID NO: 797596 - DNA, 75 bp, synthetic construct
  source 1..75: mol_type = other DNA
gaagagtttggtctgcgacttcatcagtcgccaaccggcaatgatattcgctctctggcgggtgcatttaagcag

SEQ ID NO: 797597 - DNA, 75 bp, synthetic construct
  source 1..75: mol_type = other DNA
atgtggtctatagcattgacggcggctttgaagcctggcaacgtcagtttcccgcagaggtggcgtacggcgcgt

SEQ ID NO: 797598 - DNA, 75 bp, synthetic construct
  source 1..75: mol_type = other DNA
agtgcacgtagtgaccgagaatagccagatggtggtaaaccacggcgttggcttctccgttcaaatcactgttaa

SEQ ID NO: 797599 - DNA, 75 bp, synthetic construct
  source 1..75: mol_type = other DNA
actgattttcaggaaacactcactgatatttatgctgactatgttgctaaacaccacgtagcgtatcagcgcact

SEQ ID NO: 797600 - DNA, 75 bp, synthetic construct
  source 1..75: mol_type = other DNA
catttagcccagcacgtaacgacgctgtaaacgtagttactgagaatagccagatggttgtaaaccacggcgtag

SEQ ID NO: 797601 - DNA, 75 bp, synthetic construct
  source 1..75: mol_type = other DNA
tgtaaacgtagttactgagaatagccagatggttgtaaaccacggcgtaggcttcactgtacagatcacagtagc

SEQ ID NO: 797602 - DNA, 75 bp, synthetic construct
  source 1..75: mol_type = other DNA
atgattatcggaaatgaagtggttgatcttgctccactgtttgaattaaacgatacccgtaactatctgctgtct

SEQ ID NO: 797603 - DNA, 75 bp, synthetic construct
  source 1..75: mol_type = other DNA
ttcggcattatttttctgaccgctgtcgtggtgcatattattttgcactgggtggtactgcggacctttgaaaaa

SEQ ID NO: 797604 - DNA, 75 bp, synthetic construct
  source 1..75: mol_type = other DNA
agatgccaaaatacggcgcggatggctcagtgatcgatatcggcttaactaccgtcaaagtgcgtaactgggata

SEQ ID NO: 797605 - DNA, 75 bp, synthetic construct
  source 1..75: mol_type = other DNA
aactggagcgggatgtcagcatctggcggacgacgtattaaacgcagtatcagcattgatgtcaccagtattcgt

SEQ ID NO: 797606 - DNA, 75 bp, synthetic construct
  source 1..75: mol_type = other DNA
aagagtccggtacagcaacgcaggtgttgttgcgaagcgttgacggaggttggcggctgctgatttcaaatccat

SEQ ID NO: 797607 - DNA, 75 bp, synthetic construct
  source 1..75: mol_type = other DNA
aacggcaaaggcgatccagcgtatgtataatgattatattaatggtattggtgcggcccatattgtacgtacata

SEQ ID NO: 797608 - DNA, 75 bp, synthetic construct
  source 1..75: mol_type = other DNA
aacttattgctgacgggaagtggtatccaccctcttaccgtcagtgggtcgaaattcaggctgctcagggagaca

SEQ ID NO: 797609 - DNA, 75 bp, synthetic construct
  source 1..75: mol_type = other DNA
cgaaagctcggatatccattctggctctctccgcaattttcaggcgttgaactaagggaaatcgctcatgaaatg

SEQ ID NO: 797610 - DNA, 75 bp, synthetic construct
  source 1..75: mol_type = other DNA
tttgaacataatggaagatgttttatgaagaaaaatgaaacatggatgttattaaatggagatgcaacaccaaac

SEQ ID NO: 797611 - DNA, 75 bp, synthetic construct
  source 1..75: mol_type = other DNA
tgataattatttccatgataattatatcttgcgattattataatgctggcatggactatcaagataatatagccc

SEQ ID NO: 797612 - DNA, 75 bp, synthetic construct
  source 1..75: mol_type = other DNA
aacgttttgaaggatattaaccgtgtgtcgttggctgtgttacatacccttgatgattttatacctactactgaa

SEQ ID NO: 797613 - DNA, 75 bp, synthetic construct
  source 1..75: mol_type = other DNA
cggtgacggtttcgtcacgcctgtcttctgtccggatttggcaaaaactattaacgtatcttttagagcatcatt

SEQ ID NO: 797614 - DNA, 75 bp, synthetic construct
  source 1..75: mol_type = other DNA
gaacatatagaggcgggagtgaatcttactgatgctgttaatttccttgtggaacgattcgagcttgtgcgcatt

SEQ ID NO: 797615 - DNA, 75 bp, synthetic construct
  source 1..75: mol_type = other DNA
gaagacatcagggatgagcggcagaaacttattgctgacgggaagtggtatccaccctcttaccgtcagtgggtc

SEQ ID NO: 797616 - DNA, 75 bp, synthetic construct
  source 1..75: mol_type = other DNA
ggatttatttatatccgcatgtacagtttgctcgactacataacaaaactagctatagaaattgaaaatttaaaa

SEQ ID NO: 797617 - DNA, 75 bp, synthetic construct
  source 1..75: mol_type = other DNA
ctgcgctggaacgccagaccggttcttgaggagcgcctgtttctgattggcacacacgagctgctggcggatatt

SEQ ID NO: 797618 - DNA, 75 bp, synthetic construct
  source 1..75: mol_type = other DNA
cttgctatttcagtataagcgtccgcaatacataacgatgtcaagtggttctgagtggcacttatggaatcagaa

SEQ ID NO: 797619 - DNA, 75 bp, synthetic construct
  source 1..75: mol_type = other DNA
atgctgtgcgccggttgcaccagcgcccggcctgcaccgacgccagtgattgtccccaacgcctgcccgaaagtg

SEQ ID NO: 797620 - DNA, 75 bp, synthetic construct
  source 1..75: mol_type = other DNA
ccgtgcccgtcagatagcactcggtgtcgatggtgttcaggaggtctataatgaaatccggcaggggactcccgt

SEQ ID NO: 797621 - DNA, 75 bp, synthetic construct
  source 1..75: mol_type = other DNA
gcgagcggcagcagatattgccagtagggtgagtggcgtgaagcgggtcacgacggcattctcctgtatacggtg

SEQ ID NO: 797622 - DNA, 75 bp, synthetic construct
  source 1..75: mol_type = other DNA
gcttcagagtagcggaagaagagctgttactgccggatgagcagcatgacgattaccgctggctgacgccggacg

SEQ ID NO: 797623 - DNA, 75 bp, synthetic construct
  source 1..75: mol_type = other DNA
cgctgctggccagtgacgatgttcatgcgaacagccgcgcctattttctcgctgagaagcgtgccggagtgcctg

SEQ ID NO: 797624 - DNA, 75 bp, synthetic construct
  source 1..75: mol_type = other DNA
cccggcctgcaccgacgccagtgattgtccccaacgcctgcccgaaagtgagcctttgcccgatgccgggcagtg

SEQ ID NO: 797625 - DNA, 75 bp, synthetic construct
  source 1..75: mol_type = other DNA
atgagatttatcagcgtcagcgcgagatgaaagaagcgttaaattcactggaggatttgaagtcgattagggatt

SEQ ID NO: 797626 - DNA, 75 bp, synthetic construct
  source 1..75: mol_type = other DNA
atggaaataaaacgcatcgaaaatgcgcgttatcttgaaaatggcgcgattgactgcggggtgttgtttgatggc

SEQ ID NO: 797627 - DNA, 75 bp, synthetic construct
  source 1..75: mol_type = other DNA
gacatcaaagaaaatattcattttcaggcgcgaaatcagcagattaagcacggcttttatcgtgatttaccacga

SEQ ID NO: 797628 - DNA, 75 bp, synthetic construct
  source 1..75: mol_type = other DNA
ttattaataggctttgtgcgaaatattcatcacagctgattgatgaaatccagagatatcaacctgaagtatcag

SEQ ID NO: 797629 - DNA, 75 bp, synthetic construct
  source 1..75: mol_type = other DNA
tttcaaagtccatgctagtcgtacatattcagggattgttataacaggttatggagaggaagaatattacccttc

SEQ ID NO: 797630 - DNA, 75 bp, synthetic construct
  source 1..75: mol_type = other DNA
aaaaaagacactgcatatgtcaaagaaaaataaaatgatggttacgggtgtgactttgacaacagatggtggagt

SEQ ID NO: 797631 - DNA, 75 bp, synthetic construct
  source 1..75: mol_type = other DNA
gaccagaagggtttctcctggcaggatcaagaaccctggataacatctttggatgttcatcgggcacagttcaac

SEQ ID NO: 797632 - DNA, 75 bp, synthetic construct
  source 1..75: mol_type = other DNA
gctattaggtagcgcactatttgccagggctgcggataaagaaatgaccattggtgcaatataccttgataccca

SEQ ID NO: 797633 - DNA, 75 bp, synthetic construct
  source 1..75: mol_type = other DNA
gcggtcgctcctcggccccgatgccgcagcgagtaacagaagaaggaaaacaggacgatgaagaaaaaccacaac

SEQ ID NO: 797634 - DNA, 75 bp, synthetic construct
  source 1..75: mol_type = other DNA
caccgcctgcggtcagtctggcggggataactgccctgactgtggtgcggtgatgggcgacgcaacatatcagga

SEQ ID NO: 797635 - DNA, 75 bp, synthetic construct
  source 1..75: mol_type = other DNA
cctgtcatcagcgaaatctgttaccacgtaccaaccgcgtattgtgattgcaccgggattcagtgaggacgatgc

SEQ ID NO: 797636 - DNA, 75 bp, synthetic construct
  source 1..75: mol_type = other DNA
ggcgcggtgatgggattgtccagcccttcggcctgcaattagctgggggtgaagatgaaccctttccactcaata

SEQ ID NO: 797637 - DNA, 75 bp, synthetic construct
  source 1..75: mol_type = other DNA
ggatcctgaatcgctgacactgaaaatcacgctgggttgtgatgagcacggtgttatcacggctaaacccgggga

SEQ ID NO: 797638 - DNA, 75 bp, synthetic construct
  source 1..75: mol_type = other DNA
tgcacggcaaacctgctgaacatggaaaatatctccaccattattcgtcacgatggttttaaacactggggcaac

SEQ ID NO: 797639 - DNA, 75 bp, synthetic construct
  source 1..75: mol_type = other DNA
ttccggtactgctggctcgtggctgctgggaacggcgctggatttcacggcgaaacaggagggccgggtcggcaa

SEQ ID NO: 797640 - DNA, 75 bp, synthetic construct
  source 1..75: mol_type = other DNA
cgaagacatggctaagattgaggagaatatgcttcttccggtttcaggtcagattctgcctgttcgctggctggc

SEQ ID NO: 797641 - DNA, 75 bp, synthetic construct
  source 1..75: mol_type = other DNA
tctgtcatcagcaaaatccattaccacgtatcagccacgtattgtgattgcgccgggatttagtgaggacgatgc

SEQ ID NO: 797642 - DNA, 75 bp, synthetic construct
  source 1..75: mol_type = other DNA
gggactctcaaacaggcgctgacagagattaatgatcagcgtaatgcgctgacagtggtggtgcgggtggctgat

SEQ ID NO: 797643 - DNA, 75 bp, synthetic construct
  source 1..75: mol_type = other DNA
aatggcaacgccgcaggatgtggttcagcgccggacgttatttggtgggcgtgttgaactgcttcgtccgcgtgt

SEQ ID NO: 797644 - DNA, 75 bp, synthetic construct
  source 1..75: mol_type = other DNA
cttgttgccgaaggggctatttttggcggcagggcatggctggatcctgaactgaatacggcggaaacgctggct

SEQ ID NO: 797645 - DNA, 75 bp, synthetic construct
  source 1..75: mol_type = other DNA
gcgttcccggcgcgcaaattgtcgctaatcaggaagggactgttttagataaagcgatttccgttggtgaaaaac

SEQ ID NO: 797646 - DNA, 75 bp, synthetic construct
  source 1..75: mol_type = other DNA
gcggtcgttcctctgccccgatgccgcagcgtgtaacagaagaagaaaaacaggatgatgaagaaaaaccgcaac

SEQ ID NO: 797647 - DNA, 75 bp, synthetic construct
  source 1..75: mol_type = other DNA
gtggtgagatctggtattttaaccctgatccggttgccgggcatgaacttcggggtccacattattgcattgtgg

SEQ ID NO: 797648 - DNA, 75 bp, synthetic construct
  source 1..75: mol_type = other DNA
aatggcttaaagcagatcgaacgcattctcgaagcgctggcagaagtggggggtaaaggcatcgtcgttccggca

SEQ ID NO: 797649 - DNA, 75 bp, synthetic construct
  source 1..75: mol_type = other DNA
tttccactgccgggtacttgaaccggaagaattcagtaaccgctttatcgtagcacctgaatttaaccgccgtac

SEQ ID NO: 797650 - DNA, 75 bp, synthetic construct
  source 1..75: mol_type = other DNA
agacccgcgattctgtgtaccagaatcagccagaaacggaacagaacgaccagaaagcggaacagaacagcccaa

SEQ ID NO: 797651 - DNA, 75 bp, synthetic construct
  source 1..75: mol_type = other DNA
gatggtcttgatgttgccaatgaaaagatcagacaactatttattggtcgttatttatcatttaccgaggtaaca

SEQ ID NO: 797652 - DNA, 75 bp, synthetic construct
  source 1..75: mol_type = other DNA
acattaactcagatggaattcaccataatggggtatatggtttctggttataatccatatcagattgctgaagtt

SEQ ID NO: 797653 - DNA, 75 bp, synthetic construct
  source 1..75: mol_type = other DNA
gtgctgttgccgggtaataagaagacgaagaccgggcgcttatggacgtacgttcgagacgaccgcaacgccgga

SEQ ID NO: 797654 - DNA, 75 bp, synthetic construct
  source 1..75: mol_type = other DNA
ctacaacacctgtattaatcagaaaggggtcgataaatatgtctcggcgtatctggtgggcgatcctctggaatt

SEQ ID NO: 797655 - DNA, 75 bp, synthetic construct
  source 1..75: mol_type = other DNA
ggtagcagaacatgaaattctgctcgcctttcgtgcgttacttgcctctgatagtgaacgttttctgccctccgc

SEQ ID NO: 797656 - DNA, 75 bp, synthetic construct
  source 1..75: mol_type = other DNA
tttttacgtctttttctggataaagactggattgagtatcttgcaagtacggaaatgggaattgtgttgataagc

SEQ ID NO: 797657 - DNA, 75 bp, synthetic construct
  source 1..75: mol_type = other DNA
catattctgagaccaagtctttacctacatcgggagtcagcaattcagtaggtgtaacggttggcggcggagttg

SEQ ID NO: 797658 - DNA, 75 bp, synthetic construct
  source 1..75: mol_type = other DNA
cggccccggctggaaagcgacttctgatatccgcttacagatacgcgatgatgcactggtactcaacgacaacgg

SEQ ID NO: 797659 - DNA, 75 bp, synthetic construct
  source 1..75: mol_type = other DNA
gctggcgctcatcagcgaagacggcaatacggcgtggcgcggggagtatgatgaatggggcaaccagcttaatga

SEQ ID NO: 797660 - DNA, 75 bp, synthetic construct
  source 1..75: mol_type = other DNA
ggcagtcaggaaggtgtcgtgaaagcggatcctcgctattcagaatgtaacctccctgatgtaaatgaaagaggg

SEQ ID NO: 797661 - DNA, 75 bp, synthetic construct
  source 1..75: mol_type = other DNA
gacgagcggacccaccactaccactacgacagccagcaccgcctggtgttccacacgcggatacagcacggtgag

SEQ ID NO: 797662 - DNA, 75 bp, synthetic construct
  source 1..75: mol_type = other DNA
gcggaacaccgctggtcgagtacacgcgggacaggctgcaccgtgagacggcccgcagcttcggcggggaggcat

SEQ ID NO: 797663 - DNA, 75 bp, synthetic construct
  source 1..75: mol_type = other DNA
tggcagtatgacgaccacggctggctgacagaaatcagccacctgagtgaaggccaccgtgtggcggtccactac

SEQ ID NO: 797664 - DNA, 75 bp, synthetic construct
  source 1..75: mol_type = other DNA
cctcgctggtaatgacttttttcggcatccccattctggcgcagtttttggcggcggttattgccatgctgggtg

SEQ ID NO: 797665 - DNA, 75 bp, synthetic construct
  source 1..75: mol_type = other DNA
tgggtcgatgttgatgctaccggtaaagtgacatttaaaaatgtcggcagcaattgggaaaggattacgacgacg

SEQ ID NO: 797666 - DNA, 75 bp, synthetic construct
  source 1..75: mol_type = other DNA
gcgcatcagcggcccgcaggagtgccgggagtaccgttacagcggcacgggaaggctgacgggcgtccacactac

SEQ ID NO: 797667 - DNA, 75 bp, synthetic construct
  source 1..75: mol_type = other DNA
gctttgaaagaaacgcagaatagatctctatgtaatgatatggaatactctggtattgtctgtaaagatactaat

SEQ ID NO: 797668 - DNA, 75 bp, synthetic construct
  source 1..75: mol_type = other DNA
ggactaatttatgccgtatctggtgtacctggattgattgctgcaaacagcattactaacagtgcttaccagttc

SEQ ID NO: 797669 - DNA, 75 bp, synthetic construct
  source 1..75: mol_type = other DNA
agcttatttattctgaaaaagcaggtgcggtaacaatgcaatttgcgactatgaactggaacccgcagttcactg

SEQ ID NO: 797670 - DNA, 75 bp, synthetic construct
  source 1..75: mol_type = other DNA
tcggcaaatttttctatccgctggggcgtaacaatgtgcgtaccagctccagtctgtcgtttatcagctacgacc

SEQ ID NO: 797671 - DNA, 75 bp, synthetic construct
  source 1..75: mol_type = other DNA
agcgttcttaccgtgttagcagtgtgctggctgacgacgcttgtttttttagtcttactatttctcaatcaagat

SEQ ID NO: 797672 - DNA, 75 bp, synthetic construct
  source 1..75: mol_type = other DNA
ttccatgttaatgttcagattcaagcctgcaattaaatctgctgtcatgtgggggcgtcgtgtatttaacaacta

SEQ ID NO: 797673 - DNA, 75 bp, synthetic construct
  source 1..75: mol_type = other DNA
agtaaggtagagggtattccagtagctatgcaaaacggacgaaacagcatactgctctcaccggaagacaaagag

SEQ ID NO: 797674 - DNA, 75 bp, synthetic construct
  source 1..75: mol_type = other DNA
agtaccatcttgggaaatgcgctcaagattgatttatgagaaatgtatgcagcctgttaatattattcctcacgg

SEQ ID NO: 797675 - DNA, 75 bp, synthetic construct
  source 1..75: mol_type = other DNA
ccgctggcgtatcaccgcgcgtgggatgaacggcgacgggctggtcgggcaggggcgtgcttatctgcgttcgga

SEQ ID NO: 797676 - DNA, 75 bp, synthetic construct
  source 1..75: mol_type = other DNA
attacgagattatgatctgggtttttacagtacctatttggaaaaagatctaggaaacttacgttcaacctttaa

SEQ ID NO: 797677 - DNA, 75 bp, synthetic construct
  source 1..75: mol_type = other DNA
atccgccgttgccgtgcacttgatatgacgcatgaagaaattcgtgggttgcttaaggccatgaatactcatggc

SEQ ID NO: 797678 - DNA, 75 bp, synthetic construct
  source 1..75: mol_type = other DNA
cggatccccgctattcagaatgtaacctcccagatgtaaatgaaagagggccaattgctgcgggtctttatatct

SEQ ID NO: 797679 - DNA, 75 bp, synthetic construct
  source 1..75: mol_type = other DNA
taataataatgtgactttaacgggctcaattccagagactaaagtaggatatcgagtaagtcgaggctggggaaa

SEQ ID NO: 797680 - DNA, 75 bp, synthetic construct
  source 1..75: mol_type = other DNA
atatgattaatgcttctgccggttatactcatgctggtagcgcccgcactgttgattatagcttttctggaggag

SEQ ID NO: 797681 - DNA, 75 bp, synthetic construct
  source 1..75: mol_type = other DNA
tctagggtcaaaaaagatggtgatactcatataggtcaatcttatgggtttaaatactctaaaaataaaattgat

SEQ ID NO: 797682 - DNA, 75 bp, synthetic construct
  source 1..75: mol_type = other DNA
ccatgcgtgaacgctatgtgaagcgtgcaaactcactatttgtaaaaatgaatggcggtactttatccagtggcg

SEQ ID NO: 797683 - DNA, 75 bp, synthetic construct
  source 1..75: mol_type = other DNA
tggcgattcatgatgagcgagaaataattgatatctgctcacgaaggagcgcaacatatcatttaaccagaagta

SEQ ID NO: 797684 - DNA, 75 bp, synthetic construct
  source 1..75: mol_type = other DNA
caacccgatagagcttccaagtctatcaactatcagcccacatcaggaaaagaacaattctgggtcgctaaacga

SEQ ID NO: 797685 - DNA, 75 bp, synthetic construct
  source 1..75: mol_type = other DNA
ttgtactcatcagaaagtctgagtatctcagcagacagcaacttgctgatttaacaggcattccctatggcactt

SEQ ID NO: 797686 - DNA, 75 bp, synthetic construct
  source 1..75: mol_type = other DNA
tggtatctggccgagctgagccgtggctggaacaaactgctggaagcggaaaatcgcatgcagaactggcaaatt

SEQ ID NO: 797687 - DNA, 75 bp, synthetic construct
  source 1..75: mol_type = other DNA
atacgaagcactaggacgtttatctagggaggaacacgttctaaatgaaatattaaaaagtaaaaatttattcaa

SEQ ID NO: 797688 - DNA, 75 bp, synthetic construct
  source 1..75: mol_type = other DNA
tgcgaaatcgctatgtggacgggttccactttgataacgcgaaagcaatgtacgacgcctataccacagacattt

SEQ ID NO: 797689 - DNA, 75 bp, synthetic construct
  source 1..75: mol_type = other DNA
ggggcgatgccgggcgaaaaaagtgcgtttggtgatgtggagaaggccgcgcgggtttacgcaattaacgagctg

SEQ ID NO: 797690 - DNA, 75 bp, synthetic construct
  source 1..75: mol_type = other DNA
atgaatccggatattaaccaggaaatctacggcatgccggaatatcttggcgcattactctcggccagcctttct

SEQ ID NO: 797691 - DNA, 75 bp, synthetic construct
  source 1..75: mol_type = other DNA
attaatttacgccgcgacgccagccagcgattttgtctgtggcacgcaacaggtggcttcgggtatcaccgtgca

SEQ ID NO: 797692 - DNA, 75 bp, synthetic construct
  source 1..75: mol_type = other DNA
gggaaggtgacccaccgccatttcatgaaatccgaagtttatccggtcgcctgcactcagcagaaaaaggcagtg

SEQ ID NO: 797693 - DNA, 75 bp, synthetic construct
  source 1..75: mol_type = other DNA
gggaacgaaatgacggctgggctatacaaatacggttatgtagatgatcgaggtgtcattgaatacggcaggatt

SEQ ID NO: 797694 - DNA, 75 bp, synthetic construct
  source 1..75: mol_type = other DNA
gtaactaatcctggggcgcattcttggttgatgcaaacttggcttgaagatgaaaacggcatcaggaaggggcat

SEQ ID NO: 797695 - DNA, 75 bp, synthetic construct
  source 1..75: mol_type = other DNA
gaaaaacgcgccgctatactggcaaaggtaaatggtgtagcgcttaaagcgaaggacttgcagaacgccaataac

SEQ ID NO: 797696 - DNA, 75 bp, synthetic construct
  source 1..75: mol_type = other DNA
gggcgcgtgcagaaagacgaaacgctggaagccgcatttgagcggctgacgatggcggaactggggctgcgtctg

SEQ ID NO: 797697 - DNA, 75 bp, synthetic construct
  source 1..75: mol_type = other DNA
agcgccaccttctggaaagcctactgcgaagaactgttccgcttcgaccaggcttatcgcctgtttaatgaatat

SEQ ID NO: 797698 - DNA, 75 bp, synthetic construct
  source 1..75: mol_type = other DNA
ataaagtgagcctattgcagacgcatccggtgggcgaactttatgaaccgcgtatcctgaacatttacattgtcg

SEQ ID NO: 797699 - DNA, 75 bp, synthetic construct
  source 1..75: mol_type = other DNA
aggcggcgtcctccctgactatggcctagtgataagaaacgggttgaatggaattgatgtcgataattcgacaac

SEQ ID NO: 797700 - DNA, 75 bp, synthetic construct
  source 1..75: mol_type = other DNA
aacaatcacgcacaggcccgggaacgcatcgataccgattatcagcgcctcaaaaaactcatctggtcggagggt

SEQ ID NO: 797701 - DNA, 75 bp, synthetic construct
  source 1..75: mol_type = other DNA
aggatccgattgggctgaaggggggatggaatttttatcagtatccgttgaatccgatctcaaatatagatccat

SEQ ID NO: 797702 - DNA, 75 bp, synthetic construct
  source 1..75: mol_type = other DNA
tcagcttatggcaacccatatgatgaactgggggtttatattgagaaaaaagacatattctctataatttcccct

SEQ ID NO: 797703 - DNA, 75 bp, synthetic construct
  source 1..75: mol_type = other DNA
ccaacgacgcgcatcatattacttcgccagcaccagatggttctgggctatctaaggcaatttatagagcactgg

SEQ ID NO: 797704 - DNA, 75 bp, synthetic construct
  source 1..75: mol_type = other DNA
agtcaccagcaacaaaagtcatgataatttatccgtacctattgttttgactcaggaaataccaatatcatttgt

SEQ ID NO: 797705 - DNA, 75 bp, synthetic construct
  source 1..75: mol_type = other DNA
gattacccagtacgttaaccaacaaacagaagacgacagcgaactggaaaacacgcaggcgatgctgaaacgcca

SEQ ID NO: 797706 - DNA, 75 bp, synthetic construct
  source 1..75: mol_type = other DNA
tgagggccttaagtcttatagagaagaaattataaagcttggattaacctccctttttacaatacattcagatcc

SEQ ID NO: 797707 - DNA, 75 bp, synthetic construct
  source 1..75: mol_type = other DNA
tgagcatcacgattacgttttagatgccagggacaaagcaacaagcaccatctttattgcaagccataggattag

SEQ ID NO: 797708 - DNA, 75 bp, synthetic construct
  source 1..75: mol_type = other DNA
gcagcaggaaaacagcctcagtgagaacgcgatagtgtgtgcggtggcggatgatatccggccttatgagataga

SEQ ID NO: 797709 - DNA, 75 bp, synthetic construct
  source 1..75: mol_type = other DNA
agcagtaagctgtttaagtatgtaatgctctttttttctttttgctatcattttcattgctttttatattgttaa

SEQ ID NO: 797710 - DNA, 75 bp, synthetic construct
  source 1..75: mol_type = other DNA
taattgcagatataaaaaaaccaaccgtaatggttggttttttttgggatttttggtcggcacgagaggatttga

SEQ ID NO: 797711 - DNA, 75 bp, synthetic construct
  source 1..75: mol_type = other DNA
ggacaccgttattatctcggtgcaagaacacaaaacgcttcccggttgccgtatatctttaaagctagcgacaaa

SEQ ID NO: 797712 - DNA, 75 bp, synthetic construct
  source 1..75: mol_type = other DNA
tatggatcacttccgggaagcgatcaaaaagggtgaacgcagcgccttcaaaacgctgccggcaaaaggctataa

SEQ ID NO: 797713 - DNA, 75 bp, synthetic construct
  source 1..75: mol_type = other DNA
gcagcagaaaccggcgcggaagattgcacagtagcgtggttattcatcactaacggctcaggcgacgcattcgct

SEQ ID NO: 797714 - DNA, 75 bp, synthetic construct
  source 1..75: mol_type = other DNA
gaaaacggcgtgtggtggattgacaacaagccacactgcgcggtggcggtggaaaaactgcgtacaccgccggag

SEQ ID NO: 797715 - DNA, 75 bp, synthetic construct
  source 1..75: mol_type = other DNA
caaactatgattttcataagataatgactttgacagatatgaagttgataaacgattgtggctgtgatgatagaa

SEQ ID NO: 797716 - DNA, 75 bp, synthetic construct
  source 1..75: mol_type = other DNA
agaaatttttatattttgccatagctttgggacatatattactgttaatgctatctccaaattattgtccgaagg

SEQ ID NO: 797717 - DNA, 75 bp, synthetic construct
  source 1..75: mol_type = other DNA
tggtataaaaattgcgatagtaaaaataaaaatgtggcagttgaacttcttcaaatctacgaattgcatcaatga

SEQ ID NO: 797718 - DNA, 75 bp, synthetic construct
  source 1..75: mol_type = other DNA
ttgtctgaccatgcccccggaagaggtgaaagatatcagccgtttccgcgcgctcacgccggagcaggaatcggt

SEQ ID NO: 797719 - DNA, 75 bp, synthetic construct
  source 1..75: mol_type = other DNA
ctggtatacccgtctgacctgggttcagcacctggccggtcttctgccggtgaccgggcgggaaaccggcacggg

SEQ ID NO: 797720 - DNA, 75 bp, synthetic construct
  source 1..75: mol_type = other DNA
cgctaacaattcagcgtgggcgcaacatgccatcagcggtgataaagtgttggaaggcgctctccacccggataa

SEQ ID NO: 797721 - DNA, 75 bp, synthetic construct
  source 1..75: mol_type = other DNA
gagtacacgcgggacaggctgcaccgtgagacggcccgcagcttgaccgtgactacgactggaacgacaacggac

SEQ ID NO: 797722 - DNA, 75 bp, synthetic construct
  source 1..75: mol_type = other DNA
caggtgacgtcagtgacgtacccggacgggcttcgcagcagccgggagtatgatgagaagggaaggctgacggcg

SEQ ID NO: 797723 - DNA, 75 bp, synthetic construct
  source 1..75: mol_type = other DNA
tttattaacctgccaaacagcatacgatagtgactgcggagaaatacatgagcggtgtatgatgttatgtaaaac

SEQ ID NO: 797724 - DNA, 75 bp, synthetic construct
  source 1..75: mol_type = other DNA
catccgcatcgaaacggagaacggcgagcgggagaaagcgcagcgccgcagcctggcggagaaactccagcagga

SEQ ID NO: 797725 - DNA, 75 bp, synthetic construct
  source 1..75: mol_type = other DNA
gccgcaggcgcttatcagcccggaaggggaaacggcgtggtgcggggagtatgacgaatggggaaacctgctggg

SEQ ID NO: 797726 - DNA, 75 bp, synthetic construct
  source 1..75: mol_type = other DNA
cggggcgggcagtacagcggggtacgaacaggccacggcgtacaccctcacagggcagctccggagcaggcacct

SEQ ID NO: 797727 - DNA, 75 bp, synthetic construct
  source 1..75: mol_type = other DNA
gcatggcttgcgcagtgcgggctgacggtggagcagatggaaagccagatggaggcggaatacatcccggagcgg

SEQ ID NO: 797728 - DNA, 75 bp, synthetic construct
  source 1..75: mol_type = other DNA
gaaacacatagacaaaaactgctgggccctcatcattaccccaaaaaacattctcgaaatgatcctagcataaga

SEQ ID NO: 797729 - DNA, 75 bp, synthetic construct
  source 1..75: mol_type = other DNA
ttacccgttggcataccggtgatttccgcaggtcacgatacccagttcgccctttttggcgctggtgccgaacaa

SEQ ID NO: 797730 - DNA, 75 bp, synthetic construct
  source 1..75: mol_type = other DNA
aggagtcggggctgtactacaaccggaaccggtactatgatccgttgcaggggaggtatatcacccaggatccca

SEQ ID NO: 797731 - DNA, 75 bp, synthetic construct
  source 1..75: mol_type = other DNA
gacgggagcatcacccgcagcgagtatgatgaggcggggaggctgaaggcacagacggatgcggcgggacggcgg

SEQ ID NO: 797732 - DNA, 75 bp, synthetic construct
  source 1..75: mol_type = other DNA
agggctttacaggattggttggataagaatccaacagcatctccaggggatcgagcagcagcagaaaacgttctt

SEQ ID NO: 797733 - DNA, 75 bp, synthetic construct
  source 1..75: mol_type = other DNA
ctgaacaacatcctcaaccagatcaccgcgatttatcgtccgcggatgttcatcgtggaagcaggcaacagcttc

SEQ ID NO: 797734 - DNA, 75 bp, synthetic construct
  source 1..75: mol_type = other DNA
ggacgcctgcgccggtgggcgtttttggccccggctggaaagcgccttctgatatccgcttacagctgcgtgatg

SEQ ID NO: 797735 - DNA, 75 bp, synthetic construct
  source 1..75: mol_type = other DNA
acaggtggagccggaatacacaccggcgcgaaaagttcatctttatcactgcgaccaccggggcctgccgctggc

SEQ ID NO: 797736 - DNA, 75 bp, synthetic construct
  source 1..75: mol_type = other DNA
cggggcctgccgctggcgctcatcagcgaagacggcaatacggcgtggcgcggggagtatgatgaatggggcaac

SEQ ID NO: 797737 - DNA, 75 bp, synthetic construct
  source 1..75: mol_type = other DNA
cgggctaccagacccgttatgaatacgaccgcttcggccagatgacggcggtccaccgcgaggaaggcatcagcc

SEQ ID NO: 797738 - DNA, 75 bp, synthetic construct
  source 1..75: mol_type = other DNA
atagaccttaataaaaaactaaaaactattaacctcgggcctcttcctgttgcaaataattgttttagccgaacg

SEQ ID NO: 797739 - DNA, 75 bp, synthetic construct
  source 1..75: mol_type = other DNA
cggatggtggcgcaccgttacgcgggaaggccggagatgcgctaccgctacgacgatacggggcgggtggtggag

SEQ ID NO: 797740 - DNA, 75 bp, synthetic construct
  source 1..75: mol_type = other DNA
taaccggtagcgaaatcgctgagaagtttggcgtaacgctgattgagtttaacagggtagccaacggcatcaccc

SEQ ID NO: 797741 - DNA, 75 bp, synthetic construct
  source 1..75: mol_type = other DNA
attttcatactatctgttgtttttttaagcgatcagataaaagggcgctgaaaaaaacattctccaaaattagat

SEQ ID NO: 797742 - DNA, 75 bp, synthetic construct
  source 1..75: mol_type = other DNA
cgatgccattttctccggacattgcgaattccctgcatgtggacggacggtttttgtaaacagagcaatatgcgt

SEQ ID NO: 797743 - DNA, 75 bp, synthetic construct
  source 1..75: mol_type = other DNA
gcacgctcacggcgtggccggataaccgcatcgcagaggatgcgcactatgtttaccactatgatgaatacggca

SEQ ID NO: 797744 - DNA, 75 bp, synthetic construct
  source 1..75: mol_type = other DNA
tttcggcggtgtggctgatgcacgacccggcatacccggagagcctgcccgctgcgccactggtgcggtacacgt

SEQ ID NO: 797745 - DNA, 75 bp, synthetic construct
  source 1..75: mol_type = other DNA
tgcctgagcgaaaaatacatctttatcactgtgaccaccggggcctgccgctggcgcttatcagtgaagacggca

SEQ ID NO: 797746 - DNA, 75 bp, synthetic construct
  source 1..75: mol_type = other DNA
tcggggattcggtatcctacttctacgaatcttaccgaagatatggcgttatggttcgaattactctctaagagc

SEQ ID NO: 797747 - DNA, 75 bp, synthetic construct
  source 1..75: mol_type = other DNA
gggtgcgctgtacccgtatgaacggtctgcaggtgcatggctggttgctcaggctgttcaatccccggccggcgt

SEQ ID NO: 797748 - DNA, 75 bp, synthetic construct
  source 1..75: mol_type = other DNA
tgaacaagtatgatcgtacccagaatgcgcatctgttgttgttcggaccgacgggggcaggtaagtcggccacac

SEQ ID NO: 797749 - DNA, 75 bp, synthetic construct
  source 1..75: mol_type = other DNA
accaccgtattgcttggggccgggctgcagccggttcgaccggaatttgaggtggggccgctgaatacctggctg

SEQ ID NO: 797750 - DNA, 75 bp, synthetic construct
  source 1..75: mol_type = other DNA
ctacggcgacagaggccgatagcggctcctctccagatgctccatcggatgcatgggctcgctatctcgcgcgac

SEQ ID NO: 797751 - DNA, 75 bp, synthetic construct
  source 1..75: mol_type = other DNA
atggcggtccgccgtccgcgtctgtttattgcggaggccggtaactcctttggtttactggcggactattacgcc

SEQ ID NO: 797752 - DNA, 75 bp, synthetic construct
  source 1..75: mol_type = other DNA
aacaggcgttgccggagattgatgagggtgatgaagaggaggatcagcgcgatattctgggagaaatggaaattt

SEQ ID NO: 797753 - DNA, 75 bp, synthetic construct
  source 1..75: mol_type = other DNA
catgaaaaggcagaacggatgcggattatgcgggagatggggtgtagtgaggtggaggcggcgataaccctaagc

SEQ ID NO: 797754 - DNA, 75 bp, synthetic construct
  source 1..75: mol_type = other DNA
ggctgtggctcgccacccagaacctggcggattttcctgacgaggcgaagaaactgttaaatatgattgagtggt

SEQ ID NO: 797755 - DNA, 75 bp, synthetic construct
  source 1..75: mol_type = other DNA
caactgggaatggacgccagtaaatattcactgcaatattcggaaaagtctatcggatacggtatgtatcaaggc

SEQ ID NO: 797756 - DNA, 75 bp, synthetic construct
  source 1..75: mol_type = other DNA
atgtagtgaaaccagatggcacgacaggacaaccagagggggaggtctctcctctggttattcatggccgggaac

SEQ ID NO: 797757 - DNA, 75 bp, synthetic construct
  source 1..75: mol_type = other DNA
tccgctcaaccgcaaggaccgcgcccagaacggccacctgttgctactcggcccgaccggcgcaggcaaatccgc

SEQ ID NO: 797758 - DNA, 75 bp, synthetic construct
  source 1..75: mol_type = other DNA
cactgcaggacagctttgatgagtatgacacgcatccctgggtggtgcagttcttctgccaggatgaaaatgacg

SEQ ID NO: 797759 - DNA, 75 bp, synthetic construct
  source 1..75: mol_type = other DNA
ctgtttcctttgccgataacaatgatataacaaatacaaacctatctcgaggtagaggacgtaatccaaaaccac

SEQ ID NO: 797760 - DNA, 75 bp, synthetic construct
  source 1..75: mol_type = other DNA
gtaagctcggtattaaatgataaaaaaggtgtttatataatggtttataaaagacctgcggatcatggtggtgct

SEQ ID NO: 797761 - DNA, 75 bp, synthetic construct
  source 1..75: mol_type = other DNA
ccactcatcagagttgaaaccgccaccggtgagctggcgaaaacgcagcgccgcagcctggcggatgcgcttcag

SEQ ID NO: 797762 - DNA, 75 bp, synthetic construct
  source 1..75: mol_type = other DNA
acgatcaacgctggcaatctgtcttagcccgcgacccgaatgccgacggcgaattcgttttcgccgtgcgtacca

SEQ ID NO: 797763 - DNA, 75 bp, synthetic construct
  source 1..75: mol_type = other DNA
tgaagcagtcaggaacgggccgtgattttggccccgactggctggacggttggtgtgaaactaagtcggtgtgtg

SEQ ID NO: 797764 - DNA, 75 bp, synthetic construct
  source 1..75: mol_type = other DNA
cttttgggacgcggaaccctaacaatgattcagctattgttacacaattcgcgcccggtactaagcttcctaaaa

SEQ ID NO: 797765 - DNA, 75 bp, synthetic construct
  source 1..75: mol_type = other DNA
ctgtcacggaaaccgcaagtgacctggtacggctgggacggcgaccgcctgaccacgatacagaacgacagaacc

SEQ ID NO: 797766 - DNA, 75 bp, synthetic construct
  source 1..75: mol_type = other DNA
aaaaagtgattttaagacgttagaagataaaaatataaaacaatacattcatctcttgaatcactttatgaatat

SEQ ID NO: 797767 - DNA, 75 bp, synthetic construct
  source 1..75: mol_type = other DNA
gaatagatgttgtatcacaggcgaatttctatttaaataattttgcagatatttattgtgagttctgtaatacac

SEQ ID NO: 797768 - DNA, 75 bp, synthetic construct
  source 1..75: mol_type = other DNA
tggtgagctttacttcaatgctgagcgcagtatcgctgtggctgcgaatctgaaaatggaagccacaggtaacgg

SEQ ID NO: 797769 - DNA, 75 bp, synthetic construct
  source 1..75: mol_type = other DNA
ttcaccaaggacataaccattccggcctggagcacagacagtgtttacggggataataccgtttatgaaatggct

SEQ ID NO: 797770 - DNA, 75 bp, synthetic construct
  source 1..75: mol_type = other DNA
acctgcaaaaacgcaggaaactgtcctgtctgccctgctggcgcagacggaggaagtgagcgtgccgctggccta

SEQ ID NO: 797771 - DNA, 75 bp, synthetic construct
  source 1..75: mol_type = other DNA
tacaccattaatgcttattcggcgtgcaggtttgacggggccaatacgaggataaacgcaggggggacctccact

SEQ ID NO: 797772 - DNA, 75 bp, synthetic construct
  source 1..75: mol_type = other DNA
tggattttaatatttatgaaattccgggcagcgtttatcgtcgcgcaaaagaagtcgtccggaagaaagaaagtc

SEQ ID NO: 797773 - DNA, 75 bp, synthetic construct
  source 1..75: mol_type = other DNA
gcactgacaataccaacgtcaacggtgaagacatgactgagattgaggagaatatgctcctgccagtttcaggtc

SEQ ID NO: 797774 - DNA, 75 bp, synthetic construct
  source 1..75: mol_type = other DNA
acctcagcgccgcaatgtattgcgatgtggcaaacctggacaaatttttctggatcttcgtcaacaaagatgctg

SEQ ID NO: 797775 - DNA, 75 bp, synthetic construct
  source 1..75: mol_type = other DNA
gctgacgaagtaaacaaaattatgcaggcagccaatatcagccagcctgacgccgataagttgcttgctgcctct

SEQ ID NO: 797776 - DNA, 75 bp, synthetic construct
  source 1..75: mol_type = other DNA
ggaaaccctcgctgctgcacgacatacaccggaaaaagatatcctggaagaagttaaccgcgaactggctgctga

SEQ ID NO: 797777 - DNA, 75 bp, synthetic construct
  source 1..75: mol_type = other DNA
ggaaaagaagaagagaaagcgtttctgatggaatgcgcaagcacaggaaaaacggttatcactgcggaagaaggc

SEQ ID NO: 797778 - DNA, 75 bp, synthetic construct
  source 1..75: mol_type = other DNA
tgatccggaaatcgtggatattgcctgtggtcgctcctctgccccgatgccgcagcgtgtaacaaaagaaggaaa

SEQ ID NO: 797779 - DNA, 75 bp, synthetic construct
  source 1..75: mol_type = other DNA
atgaatattttcactttatccaaagcaccgctatacctgttaatttcactatttttacccacgatggccatggct

SEQ ID NO: 797780 - DNA, 75 bp, synthetic construct
  source 1..75: mol_type = other DNA
gcgcatgtcaccctcaaaggtaaaaaagcgggcacgcatacggttaccgcaacgttgggtaacaataatgccagc

SEQ ID NO: 797781 - DNA, 75 bp, synthetic construct
  source 1..75: mol_type = other DNA
ggaacgacttaaagatcgcctgcaccgtgaaattattgagcgtgattatcacctcagcgccgcaatgtattgcga

SEQ ID NO: 797782 - DNA, 75 bp, synthetic construct
  source 1..75: mol_type = other DNA
tcccttaattgtggtgaacggtcatcacgttatcacatccaccagcagagtgtggtaccacctgatgatcgacct

SEQ ID NO: 797783 - DNA, 75 bp, synthetic construct
  source 1..75: mol_type = other DNA
aacaaaacaacctgaaccagtagtgcaacaagaaccagaaaaagtttgcaccacatgtggtcagaccgatggcgg

SEQ ID NO: 797784 - DNA, 75 bp, synthetic construct
  source 1..75: mol_type = other DNA
gccagcagacgaaaatccttactctccgaagccagaatgaccagcccccggcgctggagttccgggatatccagt

SEQ ID NO: 797785 - DNA, 75 bp, synthetic construct
  source 1..75: mol_type = other DNA
tatggtataaaaattgcgatagtaaaaataaaaaagtggcagttgaacttcttcaaatctacgaattgcatcaat

SEQ ID NO: 797786 - DNA, 75 bp, synthetic construct
  source 1..75: mol_type = other DNA
ggaacacggccattcccccaagcagacgcaggaagttaacggtttatccccgctggcgcggggaacacctggatt

SEQ ID NO: 797787 - DNA, 75 bp, synthetic construct
  source 1..75: mol_type = other DNA
ggcggagaagatacagcaggaagggagcgaagacggtcacggtgtggtgttcccggctgaactggtggggctgct

SEQ ID NO: 797788 - DNA, 75 bp, synthetic construct
  source 1..75: mol_type = other DNA
attagtgaaaagagtcacggcagagaagaaacccgtcttcatattgtttgcgatgtccctgatgagcttattgat

SEQ ID NO: 797789 - DNA, 75 bp, synthetic construct
  source 1..75: mol_type = other DNA
agatgcactgtggcacgtctcatggcggttatggggcttgtcggtgttctctggggtaaaaggtccgcactaccg

SEQ ID NO: 797790 - DNA, 75 bp, synthetic construct
  source 1..75: mol_type = other DNA
gtttcgggaaggtatcagagtggccagatgcactgtggcacgtctcatggcggttatggggcttgtcggtgttct

SEQ ID NO: 797791 - DNA, 75 bp, synthetic construct
  source 1..75: mol_type = other DNA
atatccactggatccaatatctgattcagatccacttggattgaagacctgttcctgcacagtgactttttccgc

SEQ ID NO: 797792 - DNA, 75 bp, synthetic construct
  source 1..75: mol_type = other DNA
gcgcgcacgctgcatctgtaccactgtgaccaccggggactgccgctggcgcttatcagcgaagacggcaatacg

SEQ ID NO: 797793 - DNA, 75 bp, synthetic construct
  source 1..75: mol_type = other DNA
gcgccgcaggagacctgacagcaacggtatcaccggacggtaaacgcagcaccatcgcatatgataaacgcgggc

SEQ ID NO: 797794 - DNA, 75 bp, synthetic construct
  source 1..75: mol_type = other DNA
tgacctgacggggtggatgtcgctgtcgcgtaaaccggaggtgacatggtacgggtgggacggtgacaggctgac

SEQ ID NO: 797795 - DNA, 75 bp, synthetic construct
  source 1..75: mol_type = other DNA
actgacgcgcagcatggagtatgacgccgccgggcgcatcaccgtgctgaccaacgagaacggcagccagtccac

SEQ ID NO: 797796 - DNA, 75 bp, synthetic construct
  source 1..75: mol_type = other DNA
cccgcatcacctgcaccagccgtaccgtctgccgggccagcagcatgatgaggagtcggggctgtactataaccg

SEQ ID NO: 797797 - DNA, 75 bp, synthetic construct
  source 1..75: mol_type = other DNA
tataacaatgatagcttctcgtggaaatgttgcagacacagggataactgatcgtgtcaatgacataataaatga

SEQ ID NO: 797798 - DNA, 75 bp, synthetic construct
  source 1..75: mol_type = other DNA
cccgcaggagagccgggagtaccgttacagcgacacgggaaggctgacgggcgtccacaccacggcggcgaacct

SEQ ID NO: 797799 - DNA, 75 bp, synthetic construct
  source 1..75: mol_type = other DNA
tccagacatctgttatcacttaacccattacaagcccgctgccgcagatattcccgtggcgagcgataacccagc

SEQ ID NO: 797800 - DNA, 75 bp, synthetic construct
  source 1..75: mol_type = other DNA
agcgggtggtgaaaaaggagcatgcggacgggagcatcacccgcagcgagtatgatgaggcggggaggctgaagg

SEQ ID NO: 797801 - DNA, 75 bp, synthetic construct
  source 1..75: mol_type = other DNA
acagccgactgcgccgctggcgcgctacacgtacacggccagcggagaactgcgggcggtgtatgaccgcagcgg

SEQ ID NO: 797802 - DNA, 75 bp, synthetic construct
  source 1..75: mol_type = other DNA
ggtacagctatgatgacccggcgagtgagctgccgacagggatagaggatgcgacgggcagtacaaaacagatgg

SEQ ID NO: 797803 - DNA, 75 bp, synthetic construct
  source 1..75: mol_type = other DNA
ggcggaacagatggccgcgcagatggaggatgcatacatcccggagcggaggctgcatctttaccactgtgacca

SEQ ID NO: 797804 - DNA, 75 bp, synthetic construct
  source 1..75: mol_type = other DNA
gcggaggttgaaaactggatagaagcaaagcgcagatctgctttaaaggcagcaagacccggttttatgtggtca

SEQ ID NO: 797805 - DNA, 75 bp, synthetic construct
  source 1..75: mol_type = other DNA
tcatcaacaggaaacaactcctggagatgattccactttcaacgcgcacaatttataacctggaacagcgtgggg

SEQ ID NO: 797806 - DNA, 75 bp, synthetic construct
  source 1..75: mol_type = other DNA
tgctaaagatgcaaaaagcacacagaaagcctggaattgtcgtcactccagacagtcaaacgataaaaaaagata

SEQ ID NO: 797807 - DNA, 75 bp, synthetic construct
  source 1..75: mol_type = other DNA
gcaagttaaaaccctattcccgtccggtaaaactctccgactctcacggtctgtatctgctcgtcaatccgggtg

SEQ ID NO: 797808 - DNA, 75 bp, synthetic construct
  source 1..75: mol_type = other DNA
atgtaaaaaatatatatcaatggggttgtgagttttgtcatacgggagaaaaagaaccagtatggctttcaatga

SEQ ID NO: 797809 - DNA, 75 bp, synthetic construct
  source 1..75: mol_type = other DNA
ttatattagcaatttgaaagaacttaataaagaaagagttaacaaaaaaataactggccgtttccctaataaaaa

SEQ ID NO: 797810 - DNA, 75 bp, synthetic construct
  source 1..75: mol_type = other DNA
gccatgaaagaacctcaaaagcccgcattatacatcagattcaactaattagaggcatcacccttaactcggtag

SEQ ID NO: 797811 - DNA, 75 bp, synthetic construct
  source 1..75: mol_type = other DNA
acgggactttcttttctgccggatattatgggacagaaatcaggcgaggaaacaaaaacggatttagttgtactg

SEQ ID NO: 797812 - DNA, 75 bp, synthetic construct
  source 1..75: mol_type = other DNA
cagcagctttcaaactttgtccagactaaaaccggggtgaatgatacaccgacgctgattaaacgtgagcttgat

SEQ ID NO: 797813 - DNA, 75 bp, synthetic construct
  source 1..75: mol_type = other DNA
tagatataacgaacaaaagttataaacccattacaaaaattacatttgatgactataaccatccacgcaacaatg

SEQ ID NO: 797814 - DNA, 75 bp, synthetic construct
  source 1..75: mol_type = other DNA
aaaagcgaagaaagccaaaattattggcaatggcgcgaaactggaagaaattatcgcctgtctggataatttcga

SEQ ID NO: 797815 - DNA, 75 bp, synthetic construct
  source 1..75: mol_type = other DNA
tcattagccagcatgccgcagagctgtttggtcgtcaggaggcgcaacagctgctggatcgcgtcgcccaggaga

SEQ ID NO: 797816 - DNA, 75 bp, synthetic construct
  source 1..75: mol_type = other DNA
agggcagccctgctaaaacggcaattgatgggatgtctggcggtggaatgtattacattgtcaatgaatatccct

SEQ ID NO: 797817 - DNA, 75 bp, synthetic construct
  source 1..75: mol_type = other DNA
tattagaagatagactggatgcagagttctattctcttgagcaaattaagaaccataaaacactacaagactatg

SEQ ID NO: 797818 - DNA, 75 bp, synthetic construct
  source 1..75: mol_type = other DNA
cgaaagggaaagaggtggcggtggatgacggtattcttggtggattgaaggatattttgtttggcactaccggac

SEQ ID NO: 797819 - DNA, 75 bp, synthetic construct
  source 1..75: mol_type = other DNA
attatcaagcgtatcaatagtttaactctaaacactttaatcacaaaaatatttgaaaattatgggcttaaatta

SEQ ID NO: 797820 - DNA, 75 bp, synthetic construct
  source 1..75: mol_type = other DNA
aatgattacgccactcccaaaaacaacggactggaaggactggcctgggataaagagaaacagcatttatattca

SEQ ID NO: 797821 - DNA, 75 bp, synthetic construct
  source 1..75: mol_type = other DNA
ccaacatgatagacatattgacgtacgacgacctgttgcgtcgacttaataatacgattgaagcattgaaaggtt

SEQ ID NO: 797822 - DNA, 75 bp, synthetic construct
  source 1..75: mol_type = other DNA
aggcccaacaagccctggaagatggcgacaacagcttagatcaggcgattttaagtaaactgagcgctgagggtt

SEQ ID NO: 797823 - DNA, 75 bp, synthetic construct
  source 1..75: mol_type = other DNA
gcgcgctgtccgagcttatccaactgctgggtgcaggcaaaatcaacgacttcttcgaccaaccgactcagggtt

SEQ ID NO: 797824 - DNA, 75 bp, synthetic construct
  source 1..75: mol_type = other DNA
tattcctgccgacttgtatattgtttatgagcaacaacaggcgacgccagcgctggagaggttggttaaggcgtt

SEQ ID NO: 797825 - DNA, 75 bp, synthetic construct
  source 1..75: mol_type = other DNA
agcaacagcagggatagatgatttgggtgaaattttagctaagatgaaacagagaacatcgagaggaataagaaa

SEQ ID NO: 797826 - DNA, 75 bp, synthetic construct
  source 1..75: mol_type = other DNA
atgacaaataaaaacaacattcagagtgttttatgtcaattcaaagagattaaaagcacaagctttaaatttaat

SEQ ID NO: 797827 - DNA, 75 bp, synthetic construct
  source 1..75: mol_type = other DNA
tttatgctaataacgtccatgttatgcgctttgtctccggcagcattcaaagtaataaaaccataaatattacag

SEQ ID NO: 797828 - DNA, 75 bp, synthetic construct
  source 1..75: mol_type = other DNA
tctaaagatattgaacttaacccacggtctataggcacgatcaactccacaacaatgtcttttagtggtggtgct

SEQ ID NO: 797829 - DNA, 75 bp, synthetic construct
  source 1..75: mol_type = other DNA
ttgagcacggctaacacgtggagtgcacgccagactttcaacggcgggatcaccggggcgctgacagggaacgcc

SEQ ID NO: 797830 - DNA, 75 bp, synthetic construct
  source 1..75: mol_type = other DNA
cgcttcgatctctcactggagatcccattaccaccccccggcattttgagtaaaacggtagtgccgggagaaagc

SEQ ID NO: 797831 - DNA, 75 bp, synthetic construct
  source 1..75: mol_type = other DNA
taacggcgtgctttttcttgatgagctacctgaatttgaacggcgtacactggatgccttgcgagagccgattga

SEQ ID NO: 797832 - DNA, 75 bp, synthetic construct
  source 1..75: mol_type = other DNA
ggtgaggttggtatatatttacacagaaatcctgatgattgtatatcatatcaaacatttaagaatatggggcaa

SEQ ID NO: 797833 - DNA, 75 bp, synthetic construct
  source 1..75: mol_type = other DNA
acaccaccacaatagatatgaattttaattctagcgacagaacaaaagtgcaacaactatctcagaatctttcaa

SEQ ID NO: 797834 - DNA, 75 bp, synthetic construct
  source 1..75: mol_type = other DNA
gttacacaggttgtttctgaaattccaaacgaatgggcccagaagtttataccgcaaggagacttttcaccttat

SEQ ID NO: 797835 - DNA, 75 bp, synthetic construct
  source 1..75: mol_type = other DNA
tcgacagtaatacacccgtaacaatcacgggagggaatacaggaactgccaagaaatatgatttcagcggactta

SEQ ID NO: 797836 - DNA, 75 bp, synthetic construct
  source 1..75: mol_type = other DNA
acacgatgcttttccaatctgaatttaataatattaatattctcaaaaatattatcaagcgtatcaatagtttaa

SEQ ID NO: 797837 - DNA, 75 bp, synthetic construct
  source 1..75: mol_type = other DNA
aaattattgtgtttgatgataattcacctcagcggctaagtggaacatacgagattattaatggagatgttacac

SEQ ID NO: 797838 - DNA, 75 bp, synthetic construct
  source 1..75: mol_type = other DNA
aagcgatttcctgagattaccgacaaactggcacgtacagctgtacttcgcgctgctattgaaaaggtgcatccg

SEQ ID NO: 797839 - DNA, 75 bp, synthetic construct
  source 1..75: mol_type = other DNA
atatcaatcgtaatttgaaagtgaaaattcatggtcttcgaatgctcgacgtgagagttcttggtatgtatccgt

SEQ ID NO: 797840 - DNA, 75 bp, synthetic construct
  source 1..75: mol_type = other DNA
ttatcggtggcctgctgattggtggattaactccaaccgccagtgacgttctggcaacgctggagccggaagcgt

SEQ ID NO: 797841 - DNA, 75 bp, synthetic construct
  source 1..75: mol_type = other DNA
agggcgtgatattgcgatggctataggagggggccgcttggaaaacggaatctatggtcactcccgtttttgcaa

SEQ ID NO: 797842 - DNA, 75 bp, synthetic construct
  source 1..75: mol_type = other DNA
tcgttggaattattgtctacaatgaagaagcttataaaaataaaatagcaattgacgatgaatccccactttcca

SEQ ID NO: 797843 - DNA, 75 bp, synthetic construct
  source 1..75: mol_type = other DNA
gtgagcagcatgattgagctgtatattggcggcagtattttttccggctggctgacggtcagtgttcgtcgctcg

SEQ ID NO: 797844 - DNA, 75 bp, synthetic construct
  source 1..75: mol_type = other DNA
tcagtggctatctccaaaatttgcagtgcaagtatcgagatgggtgcgtgagtggatgtcaggtgaaagagcgcc

SEQ ID NO: 797845 - DNA, 75 bp, synthetic construct
  source 1..75: mol_type = other DNA
aaatccactacaacaaattgaccctatgggattattgcagacttgggatgatgccagatctggagcatgtacggg

SEQ ID NO: 797846 - DNA, 75 bp, synthetic construct
  source 1..75: mol_type = other DNA
ctcgttgggctcattatcctttgatgtcacgcgatctgatgctcagttacataatcagaataaagaaatgggtta

SEQ ID NO: 797847 - DNA, 75 bp, synthetic construct
  source 1..75: mol_type = other DNA
aaaaattgctgattatcttgggaaagctaaaaatgacaaaaaccaaaagatccgctcactaacgccgaaactgaa

SEQ ID NO: 797848 - DNA, 75 bp, synthetic construct
  source 1..75: mol_type = other DNA
taaacagggagacagcgagtcggccgcccggctggcggcccctgtggccaccatcagtgatgagcagatcggtcg

SEQ ID NO: 797849 - DNA, 75 bp, synthetic construct
  source 1..75: mol_type = other DNA
catgggggatagtgtatatatcttcttattttttcgatatggcttttcaaagcaaatcccacactataaaaaaaa

SEQ ID NO: 797850 - DNA, 75 bp, synthetic construct
  source 1..75: mol_type = other DNA
ggtccaccgttggcctttatgctggcgttgaattacggctttacggtgatgttttcgattgccgccgggatattc

SEQ ID NO: 797851 - DNA, 75 bp, synthetic construct
  source 1..75: mol_type = other DNA
tgcctgcatcatgtgtgactgagtattggtgtaaaatcacccgccagcagattatacctgctggttttttttatt

SEQ ID NO: 797852 - DNA, 75 bp, synthetic construct
  source 1..75: mol_type = other DNA
ccaaccgctgcgctgatgattccagtaagtggatgtttagggacggagctgtggttaaacggatttaccggagga

SEQ ID NO: 797853 - DNA, 75 bp, synthetic construct
  source 1..75: mol_type = other DNA
gcgtatccacttaccctgtgcggttgagaaaatcgccttcgaccgcttccatgtagcaaagcaacttggcgaagt

SEQ ID NO: 797854 - DNA, 75 bp, synthetic construct
  source 1..75: mol_type = other DNA
tagattccggtgacaccacggtgcggcgcattgagatctcaccggaattgctccccagtctgaatgtggttgctt

SEQ ID NO: 797855 - DNA, 75 bp, synthetic construct
  source 1..75: mol_type = other DNA
cttatttactaacagtatttctaccggggtaattctggctggcgttattcagggagcaattgcacaaagttgggg

SEQ ID NO: 797856 - DNA, 75 bp, synthetic construct
  source 1..75: mol_type = other DNA
cctattgaccaggccagtagtgcgcctaatgttttcaaaacattcttcagagcattaagcccttacgactacaca

SEQ ID NO: 797857 - DNA, 75 bp, synthetic construct
  source 1..75: mol_type = other DNA
gctacgatgacgcgcacagtgagttaccggcgacgacaacggatgcgacgggcagcacccggcagatgacgtgga

SEQ ID NO: 797858 - DNA, 75 bp, synthetic construct
  source 1..75: mol_type = other DNA
acacaggcacagcgggcggaagaggcccggcagcaggcggtcgtcgccggagcaaaacgaccggacattcctgat

SEQ ID NO: 797859 - DNA, 75 bp, synthetic construct
  source 1..75: mol_type = other DNA
attatttgtctgatgtcctgaagtttaatccagtggctaatgcgaatatcgccaaagaaaaagagccagcagagt

SEQ ID NO: 797860 - DNA, 75 bp, synthetic construct
  source 1..75: mol_type = other DNA
attataccagtcgcctgaaatcctctgcggcatttaatattattgtcgaatcactgcgaatgtctgatttgccct

SEQ ID NO: 797861 - DNA, 75 bp, synthetic construct
  source 1..75: mol_type = other DNA
accagatgtccgctgtgcttaacgatctcaaaacggtaatggatcaagaacagcaacatctctctatggggcaga

SEQ ID NO: 797862 - DNA, 75 bp, synthetic construct
  source 1..75: mol_type = other DNA
gtaccgggatcctgactcttaacaacgattccgcggcgtatcagggtacgacggatatcgtggggggggaaattg

SEQ ID NO: 797863 - DNA, 75 bp, synthetic construct
  source 1..75: mol_type = other DNA
gatgcttccgttatcaataatggcctgctcaccatctccactgagcgtagctgggcgatgacgcacagtatcagc

SEQ ID NO: 797864 - DNA, 75 bp, synthetic construct
  source 1..75: mol_type = other DNA
ttaccggtgaagtgaataaagctgcaaatgtggctgctcatgccgtggtgaatgccgcactggtggcacagggaa

SEQ ID NO: 797865 - DNA, 75 bp, synthetic construct
  source 1..75: mol_type = other DNA
aacttctgatgcttatgaagctttttatttttggagtaactatattggctattttgcaatctatttagtaactaa

SEQ ID NO: 797866 - DNA, 75 bp, synthetic construct
  source 1..75: mol_type = other DNA
gggcgctgtataactggtttgataacagcgtcagttccgataaccgttctgctgacgactatgattctcgcggtg

SEQ ID NO: 797867 - DNA, 75 bp, synthetic construct
  source 1..75: mol_type = other DNA
cagtaatactcagagtaatcgtgtgggttataaatcggatgggcgcatcagcggttacagcgctgggctgtacgc

SEQ ID NO: 797868 - DNA, 75 bp, synthetic construct
  source 1..75: mol_type = other DNA
cacaaccactgaaggaagctctgtacagtggatacaaaacgcctcacaggatgatttagagaaggctgctgaagt

SEQ ID NO: 797869 - DNA, 75 bp, synthetic construct
  source 1..75: mol_type = other DNA
gcaggacatagccggcaaaccacttacccggcgaatggttagacaaatcatccataacgccgaaaaagtgaaggc

SEQ ID NO: 797870 - DNA, 75 bp, synthetic construct
  source 1..75: mol_type = other DNA
ttgtcattacgctgggtaaacagatcgttcacggcaaatacgtgccaggctcgccgcttccggctgaggcggaac

SEQ ID NO: 797871 - DNA, 75 bp, synthetic construct
  source 1..75: mol_type = other DNA
gtttatcgcccggaggccggaagctatatcagcaacattgccgcagccaactcgctgtttagccatcgtttacac

SEQ ID NO: 797872 - DNA, 75 bp, synthetic construct
  source 1..75: mol_type = other DNA
acgatgccgcattgaaaccgcgcgagcacgccgtacccgaatcgacaaccgggcagaatgcttttctcaaagcct

SEQ ID NO: 797873 - DNA, 75 bp, synthetic construct
  source 1..75: mol_type = other DNA
ttcgtgccattgccgccgccagatggtggcgactggcgacccggccagcaggacgtagccgccgctgtatttgcc

SEQ ID NO: 797874 - DNA, 75 bp, synthetic construct
  source 1..75: mol_type = other DNA
tatttttacttatagccactatttttggtgattatttttatgaaataataagttcaagatttctatccggtaacg

SEQ ID NO: 797875 - DNA, 75 bp, synthetic construct
  source 1..75: mol_type = other DNA
aaaacaggctaaaagaattcgcagcgcttcatggccaccgaattgctggctggtatgtagaaaatgcttcaggcg

SEQ ID NO: 797876 - DNA, 75 bp, synthetic construct
  source 1..75: mol_type = other DNA
tgtcaatatcattattactcatgagcctacattttattcttatgctgatctggagggtgacgttcttgagttttc

SEQ ID NO: 797877 - DNA, 75 bp, synthetic construct
  source 1..75: mol_type = other DNA
tgcataaaaataatttagtaatcattcgttgccatgatgtcatggatcgagaacctacgttcggaatgtccaagg

SEQ ID NO: 797878 - DNA, 75 bp, synthetic construct
  source 1..75: mol_type = other DNA
cctcctgagctaaaacaggttgctatccagataggggtcgcctcagaaaacggaatctatggtcactcccgtttt

SEQ ID NO: 797879 - DNA, 75 bp, synthetic construct
  source 1..75: mol_type = other DNA
gagctgaaaaccatcgccgccaccacctggagcgagtacaaaaatacttcgaaaaagatgccgccctgtcgcgcc

SEQ ID NO: 797880 - DNA, 75 bp, synthetic construct
  source 1..75: mol_type = other DNA
cgactggtcaacggaaaatcactgcgcgaaacggcccgcctggctggcgtttccaaaatgactgtaatcagggtc

SEQ ID NO: 797881 - DNA, 75 bp, synthetic construct
  source 1..75: mol_type = other DNA
aataccgcgatgatgaactgtacagcgtacggcacctggtgtttaacggctttgagctgataagccagcagttca

SEQ ID NO: 797882 - DNA, 75 bp, synthetic construct
  source 1..75: mol_type = other DNA
cgcacagggggagctgtgggaataccgccacgacgccagcggcagacgaacagagaagcgctgcgaccggaagaa

SEQ ID NO: 797883 - DNA, 75 bp, synthetic construct
  source 1..75: mol_type = other DNA
cccggggatggggagtaagcttcgtcagccgttgtctccgggtgtcgcgtgcgcagttgcacgtaattctcagac

SEQ ID NO: 797884 - DNA, 75 bp, synthetic construct
  source 1..75: mol_type = other DNA
tccagataggggtcgcctcagaaaacggaatctatggtcactcccgtttttgcaacaccgattttgacgacaagt

SEQ ID NO: 797885 - DNA, 75 bp, synthetic construct
  source 1..75: mol_type = other DNA
gtgaaaggaaatggcagtcaatggcacttctccgattacaggggagaggtaaatccacatatcaatttaagagcc

SEQ ID NO: 797886 - DNA, 75 bp, synthetic construct
  source 1..75: mol_type = other DNA
gaaaatccgcttcacgtacctgtgggacggcgacagtatgcggaaatccgggaataccgcgatgatgaactgtac

SEQ ID NO: 797887 - DNA, 75 bp, synthetic construct
  source 1..75: mol_type = other DNA
tattttgatgcacttaaggattcgcttattctcggactagaaccacctgaagactttgctttaattacagacgat

SEQ ID NO: 797888 - DNA, 75 bp, synthetic construct
  source 1..75: mol_type = other DNA
tgggcggcaagtctcgcgctatgtcgcatgtgcttgatgctttgccccacggtgaatgcctggttgagcctttcg

SEQ ID NO: 797889 - DNA, 75 bp, synthetic construct
  source 1..75: mol_type = other DNA
gctataacggtttataccgagtgaatgggaagaatgaatttaacgttccatttggtcgtcgccgcaagccaattt

SEQ ID NO: 797890 - DNA, 75 bp, synthetic construct
  source 1..75: mol_type = other DNA
atttggcagtggtttcctcgctcaatcttgataaatacagaaaattcaaatgcgggggaattgaaatatacaaat

SEQ ID NO: 797891 - DNA, 75 bp, synthetic construct
  source 1..75: mol_type = other DNA
tggtatttcgtccactcgaggaacgtattccagcagatttgtatattgtttatgaacagcaacaggcaacaccag

SEQ ID NO: 797892 - DNA, 75 bp, synthetic construct
  source 1..75: mol_type = other DNA
cccgttctgtagttgctcgacaatacccatgttacgtggattgttgtcagcgaaagccgggtttggtcgtaaccg

SEQ ID NO: 797893 - DNA, 75 bp, synthetic construct
  source 1..75: mol_type = other DNA
gcgttaatttgaaaaatgaattcaacgttccttttggttttcgtaagaagccaattttccctgtggctgagattc

SEQ ID NO: 797894 - DNA, 75 bp, synthetic construct
  source 1..75: mol_type = other DNA
atgtaaaccaccagtggcgtgggaaacaagatatcacgatcccagagtcaccagccaaaccatgtctgcctaagg

SEQ ID NO: 797895 - DNA, 75 bp, synthetic construct
  source 1..75: mol_type = other DNA
agagtattgtcgcgttagataaacgtttgagaatgcctgccaattataagtatttcaatgctggtgttgttgtat

SEQ ID NO: 797896 - DNA, 75 bp, synthetic construct
  source 1..75: mol_type = other DNA
tttagccttttgtttactaaatatgaaaacctggggcttaaattcatcaagttagatgaatctaaattagaaggg

SEQ ID NO: 797897 - DNA, 75 bp, synthetic construct
  source 1..75: mol_type = other DNA
acgcccacgcaagctcattgagctggcgactgcccttcagtgcgagccacgctggcttctttttggagagcaagg

SEQ ID NO: 797898 - DNA, 75 bp, synthetic construct
  source 1..75: mol_type = other DNA
gtattatgcgggatacggcgtcgcatatattaaaagcgatcgattaccatattcctaaaaactctacaggtttgc

SEQ ID NO: 797899 - DNA, 75 bp, synthetic construct
  source 1..75: mol_type = other DNA
taatgattaacaaagaccgcgttaatgtgttgaatgatgcgactgtggaagaggctaatctggtgcaaaccggac

SEQ ID NO: 797900 - DNA, 75 bp, synthetic construct
  source 1..75: mol_type = other DNA
ttagtggaacctctgtgaccaacggcaataaagtacaattgggtaattacctgccaaaatcaataaaagacgggc

SEQ ID NO: 797901 - DNA, 75 bp, synthetic construct
  source 1..75: mol_type = other DNA
ctgcgtgaacttcctcaagcaaaatgccgccgatgcgccggacgcatctttcaataacgtgttcccggaggatga

SEQ ID NO: 797902 - DNA, 75 bp, synthetic construct
  source 1..75: mol_type = other DNA
ctcttcgcataatacgtccggaaatatggataaacttaaaattaagtttgattcattagcctctcacgataggta

SEQ ID NO: 797903 - DNA, 75 bp, synthetic construct
  source 1..75: mol_type = other DNA
tcggggagaagcagggcggattgaactcggcgtagtgggaacggctatgtggggacggatgcgcccggttatgcg

SEQ ID NO: 797904 - DNA, 75 bp, synthetic construct
  source 1..75: mol_type = other DNA
aagggcgtttcaaatttgacctgacggcgggcgattttcgtagcggtaatagtcagcaatcatcgcctttctttt

SEQ ID NO: 797905 - DNA, 75 bp, synthetic construct
  source 1..75: mol_type = other DNA
tgtttgctattgatccgatgaaagcaagtttgatcgcactcattggtggggtgtcagctatgatggccaaccggg

SEQ ID NO: 797906 - DNA, 75 bp, synthetic construct
  source 1..75: mol_type = other DNA
atgagagatttagtgctatggaatattgctattctgttgaatatttatatcccgaactgctgtagaaaaggcttt

SEQ ID NO: 797907 - DNA, 75 bp, synthetic construct
  source 1..75: mol_type = other DNA
caggtcgtcttcaatcacccagcgccccgggtttccccacagtctgtgagctgtaatttcaccgtgcggatcgcg

SEQ ID NO: 797908 - DNA, 75 bp, synthetic construct
  source 1..75: mol_type = other DNA
taccggtcattgattctgcgctttcataccgaagtctggcagcgtattggcgaatattcgtggcaacgtcagctg

SEQ ID NO: 797909 - DNA, 75 bp, synthetic construct
  source 1..75: mol_type = other DNA
tggcagaggagttggctgtgcaggtgggtattcgtccggagtatctcgaccgcctgcctcatgcgttctccaggt

SEQ ID NO: 797910 - DNA, 75 bp, synthetic construct
  source 1..75: mol_type = other DNA
tttggttttcccccagcaccagcacatgcattctgcgcttgatgtgttcaaaacctggctactgaatgaactcaa

SEQ ID NO: 797911 - DNA, 75 bp, synthetic construct
  source 1..75: mol_type = other DNA
ctttgggactcttatattccagagcttgatgctttgaaagcaacagtggttgataatgacccgacgaaaactata

SEQ ID NO: 797912 - DNA, 75 bp, synthetic construct
  source 1..75: mol_type = other DNA
gcttcatttaaatggtgtaactttactggcagtctttttcaatcctctttattaagaggagtccttttcagaggc

SEQ ID NO: 797913 - DNA, 75 bp, synthetic construct
  source 1..75: mol_type = other DNA
cagggtgaacctgccaccaccaccttccggattgccgcaccggcagcaccgtcgcggattgagctgacgccgggc

SEQ ID NO: 797914 - DNA, 75 bp, synthetic construct
  source 1..75: mol_type = other DNA
tggaaacgcagacggtggatttcacgctcgggtctcaggggctgcggcacacacccggtgacattattgaaatct

SEQ ID NO: 797915 - DNA, 75 bp, synthetic construct
  source 1..75: mol_type = other DNA
gatgctaacccatatctggtgatggcggcgattttcgccggtattttgcacggtttagataatgagctgccatta

SEQ ID NO: 797916 - DNA, 75 bp, synthetic construct
  source 1..75: mol_type = other DNA
ggacagcgaatatgcccgcatgtggggccatatgggcagtgggattatggcggaggggaatctctataaacgccc

SEQ ID NO: 797917 - DNA, 75 bp, synthetic construct
  source 1..75: mol_type = other DNA
agcgccagcgtgcccgtttatcagggcagtgtccagcttgatcccgccaaagagcataatgtcgccagtacggcc

SEQ ID NO: 797918 - DNA, 75 bp, synthetic construct
  source 1..75: mol_type = other DNA
tacggcgtatgccgccctgacaggtagcgatggcagtaaaatactcaacattacgcgcccggatacctatggcac

SEQ ID NO: 797919 - DNA, 75 bp, synthetic construct
  source 1..75: mol_type = other DNA
ttaaagcccagcagtttacggtgacactgggcgctcaggtctgcaccattcgcctgaatcagcgtactacgggga

SEQ ID NO: 797920 - DNA, 75 bp, synthetic construct
  source 1..75: mol_type = other DNA
tcatcctctgtgccatttgtacatcacccccttcctgaacgtgctgacagcgggttttccggctgcgccggcaac

SEQ ID NO: 797921 - DNA, 75 bp, synthetic construct
  source 1..75: mol_type = other DNA
ttgatgccagaacagccgttgataatgtattgaatagattttcgttattaacaaatactatatatataatgttga

SEQ ID NO: 797922 - DNA, 75 bp, synthetic construct
  source 1..75: mol_type = other DNA
caggaagaagtcgaaggcaacgggctggaacaggaaggcttacccttcccgattcgccagagtgatgccctgtgg

SEQ ID NO: 797923 - DNA, 75 bp, synthetic construct
  source 1..75: mol_type = other DNA
ttgacgttgagccgcggaacgttcttaaccgcctgtggcagcagctacgccagcgcggattgttcccggttgtag

SEQ ID NO: 797924 - DNA, 75 bp, synthetic construct
  source 1..75: mol_type = other DNA
cgatgatgcgctggcgctaaaacgcctggtgcgtctgatggcagaaaagcataagatgcacgccacttttatggc

SEQ ID NO: 797925 - DNA, 75 bp, synthetic construct
  source 1..75: mol_type = other DNA
cggtatttgacgctaccactcaggctgcgaaggtgaagaaaggggaatctatgccggtgacagtcacagtgaaag

SEQ ID NO: 797926 - DNA, 75 bp, synthetic construct
  source 1..75: mol_type = other DNA
ggagtccggcctgtattacaaccgccaccgctattatgacccgctgcaggggcgatatatcactcaggatccgat

SEQ ID NO: 797927 - DNA, 75 bp, synthetic construct
  source 1..75: mol_type = other DNA
aaaaacccgctttttccagagtacattactccacggccttccggctggctggacaatatatggtggaacgcaact

SEQ ID NO: 797928 - DNA, 75 bp, synthetic construct
  source 1..75: mol_type = other DNA
ggtatcattgaacctgcgggatcatcggactgtgcaatctccccggcgacgacaccaggggttgccacctgcttc

SEQ ID NO: 797929 - DNA, 75 bp, synthetic construct
  source 1..75: mol_type = other DNA
tggatgactaagtacgaggcatttgagatctacgaaggaccaagaaaagtcgcagatgtattattgatagggaat

SEQ ID NO: 797930 - DNA, 75 bp, synthetic construct
  source 1..75: mol_type = other DNA
gacgtccggtcgccgccgataatttacatctgacactggcatttttaggcgaagtgagcgcagagaaagagaagg

SEQ ID NO: 797931 - DNA, 75 bp, synthetic construct
  source 1..75: mol_type = other DNA
tctctttggataagacatgggatgccgatcttctccctctctgttcacgcattttcaaacgccctatctcgcagc

SEQ ID NO: 797932 - DNA, 75 bp, synthetic construct
  source 1..75: mol_type = other DNA
cagccgatgctcgacgatatgctatcgttgtataatcgctaccctggcggtacgcttcaggcggctattggctgg

SEQ ID NO: 797933 - DNA, 75 bp, synthetic construct
  source 1..75: mol_type = other DNA
tgcggtatcattgaacctgcgggctcattggactgtgcaatctccccggcgacgacatcagggtttgccacctgc

SEQ ID NO: 797934 - DNA, 75 bp, synthetic construct
  source 1..75: mol_type = other DNA
tcgaatgctgtcgcagcggtaacgccggtcgtcaataatgaaatctgggcgctggcgcatacggttgacagcagt

SEQ ID NO: 797935 - DNA, 75 bp, synthetic construct
  source 1..75: mol_type = other DNA
gaccgaaattattctctgaagtgagcgcaggaaaccgttcactagtggaaaataacgaaacctgggtgcgtgtgg

SEQ ID NO: 797936 - DNA, 75 bp, synthetic construct
  source 1..75: mol_type = other DNA
gaatcttcaccaggatagctcgaccggtcttagaacaccgataaccgcatcagcacttggcagtagccctatgct

SEQ ID NO: 797937 - DNA, 75 bp, synthetic construct
  source 1..75: mol_type = other DNA
ggattataccttcagccgtccgaaactggcggctgaagtcgataatgaagcaggcagtgtcgacgatcataatga

SEQ ID NO: 797938 - DNA, 75 bp, synthetic construct
  source 1..75: mol_type = other DNA
atgccttattgaatatttatgaaaataaaaaacaaatgttatcatttgtggtttttttgactctcagttttattg

SEQ ID NO: 797939 - DNA, 75 bp, synthetic construct
  source 1..75: mol_type = other DNA
ttaactatatctcctggcagttacaaacgcgggccggggtgacggtatatgcctggatgccggtactggctttcg

SEQ ID NO: 797940 - DNA, 75 bp, synthetic construct
  source 1..75: mol_type = other DNA
aagcgctttgccagtcaggttgctcaggtacgtgaaccacaaacgatgcgtgtgatgcacgtcgatctggattac

SEQ ID NO: 797941 - DNA, 75 bp, synthetic construct
  source 1..75: mol_type = other DNA
actggcctgcgctctgggctccagtgggcagttgggttgattctccagccaataaaaaagtcgattttggcggct

SEQ ID NO: 797942 - DNA, 75 bp, synthetic construct
  source 1..75: mol_type = other DNA
ctggtattacagcttttaatacggtgcaaaatccaaacagattgagtgctctgaacgatgatgctgttggagcat

SEQ ID NO: 797943 - DNA, 75 bp, synthetic construct
  source 1..75: mol_type = other DNA
aagcgttttgccagtcaggtcgctcaggtacgtgaaccgcagaccatgcgcgtgatgcatgtcgatctggattac

SEQ ID NO: 797944 - DNA, 75 bp, synthetic construct
  source 1..75: mol_type = other DNA
cgcgcctgaaaagtaagatgctgatcgactttactaagcaactgacgcaatcggtacgcaatattcgcggtccgc

SEQ ID NO: 797945 - DNA, 75 bp, synthetic construct
  source 1..75: mol_type = other DNA
gcatgggtctcgattaaggatctaggaaattgtagtgtattcattaaagatagtagtgagtatttaacttctgac

SEQ ID NO: 797946 - DNA, 75 bp, synthetic construct
  source 1..75: mol_type = other DNA
actctttacgcctcctcgtttgcccgtgggcgcacacgctacacgccgctaaaacgctggacactgacgcaataa

SEQ ID NO: 797947 - DNA, 75 bp, synthetic construct
  source 1..75: mol_type = other DNA
gagttcaccctttacgcttcctcgtttgcccgaggacgcacacgctacacgccgctaaaacgctggacactgacg

SEQ ID NO: 797948 - DNA, 75 bp, synthetic construct
  source 1..75: mol_type = other DNA
ctaataagaagaaaagatcaactaaaccatcaaagagcatgggatatattatctgatacttatgaagatatgaag

SEQ ID NO: 797949 - DNA, 75 bp, synthetic construct
  source 1..75: mol_type = other DNA
agatatattaactaccaatgaagcaattgctcatttttataatatgaagcatggcatcaacaaagaatatttata

SEQ ID NO: 797950 - DNA, 75 bp, synthetic construct
  source 1..75: mol_type = other DNA
aaatctaatcccggaagctctgcaatctcgcgccgaattgcgtcaaaaagtacgtaatagtgcagattttaaacc

SEQ ID NO: 797951 - DNA, 75 bp, synthetic construct
  source 1..75: mol_type = other DNA
tggaatccgactttaacaatattaaagaaatttattctgatgatgagttaaaccgtttgctggaagctgttaatc

SEQ ID NO: 797952 - DNA, 75 bp, synthetic construct
  source 1..75: mol_type = other DNA
atgactcagatgcataaaggatttttgctcatcggcgtctttttgtacgcggcgtttttggccccgaagatttac

SEQ ID NO: 797953 - DNA, 75 bp, synthetic construct
  source 1..75: mol_type = other DNA
agcacttcaacacaatccttaaccagacgcgtgagcgcctctctggtgtcgctgacgtactaccagaggcgctat

SEQ ID NO: 797954 - DNA, 75 bp, synthetic construct
  source 1..75: mol_type = other DNA
tagcgtgttccgcgctggggctgaatctgcgaagcaaggcagcgaaggactcaaggagcagcagaacgcgctcaa

SEQ ID NO: 797955 - DNA, 75 bp, synthetic construct
  source 1..75: mol_type = other DNA
agaaaaccggggcttatcagtcgattgatattcgctttagttatgatatcaacggcttgcttgaagttgacgtgc

SEQ ID NO: 797956 - DNA, 75 bp, synthetic construct
  source 1..75: mol_type = other DNA
tccccggatatttttcttcgtatcgttcagcataccggacagccaggagaacggcgattgcgctggcgacgataa

SEQ ID NO: 797957 - DNA, 75 bp, synthetic construct
  source 1..75: mol_type = other DNA
cgtgaccgcgttgctccggcagttaagcctatgcaaatcattgagctgaaggtaaaaattacaccattactggcg

SEQ ID NO: 797958 - DNA, 75 bp, synthetic construct
  source 1..75: mol_type = other DNA
gccaggtcgctctgttggtgcgagcattaccctgggtcgctaacgagtcctgttttgcgctgaaaggcggaacgg

SEQ ID NO: 797959 - DNA, 75 bp, synthetic construct
  source 1..75: mol_type = other DNA
tgcaagccctgcaaagattaacctcttcgccggactaccacggcccacggatttacttctccatgagtgacggac

SEQ ID NO: 797960 - DNA, 75 bp, synthetic construct
  source 1..75: mol_type = other DNA
ctggttgctctttatcagaatatctgtgattttgccgatagcttgggtgatgaggttcagcgcaaagagttactg

SEQ ID NO: 797961 - DNA, 75 bp, synthetic construct
  source 1..75: mol_type = other DNA
aaggactggttctccctctggggaccatggcatgctgtactgaagcgtacggaagctgaccgctgggcgcaggca

SEQ ID NO: 797962 - DNA, 75 bp, synthetic construct
  source 1..75: mol_type = other DNA
tccttaccatcgctcccacaggctcttaaaaatctcagagcgacccgtaatttcctcactgagctaccagcattt

SEQ ID NO: 797963 - DNA, 75 bp, synthetic construct
  source 1..75: mol_type = other DNA
gagaggtcgcgctgcccaacgtgcgggaggcgctcacccgtatcgccgcagaactggaagcgcaaaccgggatcc

SEQ ID NO: 797964 - DNA, 75 bp, synthetic construct
  source 1..75: mol_type = other DNA
atggtgcatgacgaactggaaaaagagtacgttatcgccgcccgtctggatggcgcatcaacgctgaatattctc

SEQ ID NO: 797965 - DNA, 75 bp, synthetic construct
  source 1..75: mol_type = other DNA
aaggactggcggtttctatagatatcagtaaacaagcgcacgttcagctcgcggaagcctgggaggccgtgagcg

SEQ ID NO: 797966 - DNA, 75 bp, synthetic construct
  source 1..75: mol_type = other DNA
gaccaccacccgggaaaatttggaacagctgcataaactggtgaacagccggggcgcggtcggggcggcagagtt

SEQ ID NO: 797967 - DNA, 75 bp, synthetic construct
  source 1..75: mol_type = other DNA
gttactcatgaagatctggtgaaaaacaggcctcgctcccctgtcagaccgcctatacccgcaacctccaaaacg

SEQ ID NO: 797968 - DNA, 75 bp, synthetic construct
  source 1..75: mol_type = other DNA
agtctgcatctgctttttatcccttttagcagaacaagaatctcctcattttcaggacttttttttatttttcgc

SEQ ID NO: 797969 - DNA, 75 bp, synthetic construct
  source 1..75: mol_type = other DNA
gagcggagctgcgccaaccgtaggcggcgcatttgtggtgacgcttgccgcgacgatctgtggcctggtactggg

SEQ ID NO: 797970 - DNA, 75 bp, synthetic construct
  source 1..75: mol_type = other DNA
tcatcaaaatatgtctcaacagctacggtgttgctaaaggctcaggctgataacgtttcgccgttcccacaggtg

SEQ ID NO: 797971 - DNA, 75 bp, synthetic construct
  source 1..75: mol_type = other DNA
gaaaaaaacgggaagagaccgtcgacgtttccagatttgccaaagaaattaaaaagaacgcctgtaagattgtac

SEQ ID NO: 797972 - DNA, 75 bp, synthetic construct
  source 1..75: mol_type = other DNA
taaggtttattgtgtctttgatagagacgctcaccctaactatgatgaagctcttagcaggattaattccttaaa

SEQ ID NO: 797973 - DNA, 75 bp, synthetic construct
  source 1..75: mol_type = other DNA
cgtgtcggcacaaacccaatgattcagcagacggacaatgccgacagtcggttccagaagcttgatacccctgat

SEQ ID NO: 797974 - DNA, 75 bp, synthetic construct
  source 1..75: mol_type = other DNA
aaaccgcattactgatgcgtcggatgttgataacaggtatgtcggaacccaatgccgcgtctcaggatgctgcgt

SEQ ID NO: 797975 - DNA, 75 bp, synthetic construct
  source 1..75: mol_type = other DNA
ggtgaccagtacatccggtgttggtgcgggaagctgtaatggcagtgcctgtgagaaattcaggaatgcagagga

SEQ ID NO: 797976 - DNA, 75 bp, synthetic construct
  source 1..75: mol_type = other DNA
aacaggcctcgctcccctgtcagaccacctatacccgcaaccgccaaaacgccagaccttcctgaacgtcattaa

SEQ ID NO: 797977 - DNA, 75 bp, synthetic construct
  source 1..75: mol_type = other DNA
aactgggcaagacgcttgtggcgcttgacgacaatcctgtgcgtcagatgcgagggggccttcgcttcaatccga

SEQ ID NO: 797978 - DNA, 75 bp, synthetic construct
  source 1..75: mol_type = other DNA
atggaaaaggcgattgctgctgttggcgctgaaaacatcgctactaaccagattgaactctctccttatctgcaa

SEQ ID NO: 797979 - DNA, 75 bp, synthetic construct
  source 1..75: mol_type = other DNA
tctaccgcagttcaaaatggaaatgaggcagagtcactaataggaaaattatctagcgaagtattgtctaatttt

SEQ ID NO: 797980 - DNA, 75 bp, synthetic construct
  source 1..75: mol_type = other DNA
tcaaagagagatacattacagacttttgatgagtgatcagtcggatcatctcaggcagattgcagcagtagacgg

SEQ ID NO: 797981 - DNA, 75 bp, synthetic construct
  source 1..75: mol_type = other DNA
gcgtggttatattaaccgagaaagaagtagaggttagaattaacgatcatgcatcatttatcctcccggcaaact

SEQ ID NO: 797982 - DNA, 75 bp, synthetic construct
  source 1..75: mol_type = other DNA
caaacgacggtggagccacgatatatatcgataacctcgattttttcaatgcagaagagaggctcaccgttgtag

SEQ ID NO: 797983 - DNA, 75 bp, synthetic construct
  source 1..75: mol_type = other DNA
tctttgtggcaatgatgccaaatgcattcgcactaagtcacggagacagcgcaacacttaaagaaggtacattta

SEQ ID NO: 797984 - DNA, 75 bp, synthetic construct
  source 1..75: mol_type = other DNA
attggaaatggagctcaaagcaatatggtgtaattatgaatggcatgtcaaatcaccagataggcaaccgtaatg

SEQ ID NO: 797985 - DNA, 75 bp, synthetic construct
  source 1..75: mol_type = other DNA
ttatgaaaaattattaacacctgttgatggactttctcccttgggagctggtgaagatggaatggatgcgtggta

SEQ ID NO: 797986 - DNA, 75 bp, synthetic construct
  source 1..75: mol_type = other DNA
aaggataaaaccgcagacaatgcggcggaatatttcttcgatccatccgtgggtatcaacgtttacggcagtgat

SEQ ID NO: 797987 - DNA, 75 bp, synthetic construct
  source 1..75: mol_type = other DNA
atccaatacgggtgatgttaacgttagcaatgaagcgacagggttcagcatcacaaccaacagtgggaaggtttc

SEQ ID NO: 797988 - DNA, 75 bp, synthetic construct
  source 1..75: mol_type = other DNA
ggagggggccgcttggaaaacggaatctatggtcactcccgtttttgcaacaccgattttgacgataagtgggct

SEQ ID NO: 797989 - DNA, 75 bp, synthetic construct
  source 1..75: mol_type = other DNA
ggaattatcacgctgtgttctggtttgcgatggtgatgattatcgccactctgttttgcttactgcggattaaag

SEQ ID NO: 797990 - DNA, 75 bp, synthetic construct
  source 1..75: mol_type = other DNA
ccgcgcactgtcgatggcaattctcgatatcgccgcgctgggctttctcgatctcggcgcacaactcccctcgcc

SEQ ID NO: 797991 - DNA, 75 bp, synthetic construct
  source 1..75: mol_type = other DNA
tccgggcgtcagttgccggacaaagcgattgatgtgctggataccgcctgcgcccgtgtggcaatcaacctgtca

SEQ ID NO: 797992 - DNA, 75 bp, synthetic construct
  source 1..75: mol_type = other DNA
ggaagaactggtcaatatgattcaggtgcaacgcgcttacgaaatcaacagtaaagcggtgtccaccaccgatca

SEQ ID NO: 797993 - DNA, 75 bp, synthetic construct
  source 1..75: mol_type = other DNA
ccggtacgcgacgccttgagacgtctacaaagcgaggggctggtacatatccgcccgaaaagcggaacctttgtt

SEQ ID NO: 797994 - DNA, 75 bp, synthetic construct
  source 1..75: mol_type = other DNA
acaacacaaagctgctcgacccgctggagattcgcgaccttcacgaactggtgcgcgacactgacaaagttttcc

SEQ ID NO: 797995 - DNA, 75 bp, synthetic construct
  source 1..75: mol_type = other DNA
gcgattactgaactggccatttcccacagcataaagctgctcgatcctctggagattcgcgaccttcacaaactg

SEQ ID NO: 797996 - DNA, 75 bp, synthetic construct
  source 1..75: mol_type = other DNA
tcggggtgcttgttctttctgttatatgtgctgatcacagcactttccttacccggcgcagtgctgatgactttg

SEQ ID NO: 797997 - DNA, 75 bp, synthetic construct
  source 1..75: mol_type = other DNA
gctttttcaaccgaagtttgctgcttttttctcttttattgtcttgacgatgaaaaaccaggcaatcgatgcgca

SEQ ID NO: 797998 - DNA, 75 bp, synthetic construct
  source 1..75: mol_type = other DNA
tgaagtagataagattactggctctacaccatttattgccgttaccagtcttgccgaaggcacgaagacattgcc

SEQ ID NO: 797999 - DNA, 75 bp, synthetic construct
  source 1..75: mol_type = other DNA
ggcaggagtccggcacaaatcccggcggtgctggtgcattctcacggcccgttcgcatggggtaaaaacgccgcc

SEQ ID NO: 798000 - DNA, 75 bp, synthetic construct
  source 1..75: mol_type = other DNA
ttgatatttatactgccatatgccatacccacatttgtaacgttacttattttccgccttcttttaaatggaatt

SEQ ID NO: 798001 - DNA, 75 bp, synthetic construct
  source 1..75: mol_type = other DNA
atgaattcagttgattttctgtcggttccattaaatgcaaaaataacagtaattgccgtttgtgtttgggtaggg

SEQ ID NO: 798002 - DNA, 75 bp, synthetic construct
  source 1..75: mol_type = other DNA
catatgcatcgttctcatcaacagcatgtcgcgattattcaggctatccaggatgcggatgccgaaaaagcgctc

SEQ ID NO: 798003 - DNA, 75 bp, synthetic construct
  source 1..75: mol_type = other DNA
accccatcacaaaaatagcaatgatgctgtgctatttgtttacgggaatgaatacaacgcctttagctaagatga

SEQ ID NO: 798004 - DNA, 75 bp, synthetic construct
  source 1..75: mol_type = other DNA
cgctgatcgtcagctgcattttgtacgtcggaacggacatttctaaggaatacactcaggcggcggttaattcca

SEQ ID NO: 798005 - DNA, 75 bp, synthetic construct
  source 1..75: mol_type = other DNA
aaggtggctggcaggatagtaacgtacggatgttatttgtcgcctcgacgttaatgtggacctgcaacaccatgt

SEQ ID NO: 798006 - DNA, 75 bp, synthetic construct
  source 1..75: mol_type = other DNA
aaaatcaaggactggttaggagatggcgtcattgccgacttcgacgacaaacagatcgagcaagcgctggctgat

SEQ ID NO: 798007 - DNA, 75 bp, synthetic construct
  source 1..75: mol_type = other DNA
atgtttggaaagatattcaaatctgacaataacaattgccaacacagaaaactaccagtagtatctgacattact

SEQ ID NO: 798008 - DNA, 75 bp, synthetic construct
  source 1..75: mol_type = other DNA
cagtgttttaacgacgtaaacgtcatcgaatcgcagactggcctcattgatgaggacgtcttcgccaacttctca

SEQ ID NO: 798009 - DNA, 75 bp, synthetic construct
  source 1..75: mol_type = other DNA
actgggaccgttataacccggcagaccaagacagttcgtgctggatccgtgtggcacaggcgtgggcaggcaccg

SEQ ID NO: 798010 - DNA, 75 bp, synthetic construct
  source 1..75: mol_type = other DNA
caaacgcaaccaatcaaaaagtcacctggacttctcaaaatagcgacaaagcgaccgtggatcagaacggtatct

SEQ ID NO: 798011 - DNA, 75 bp, synthetic construct
  source 1..75: mol_type = other DNA
ccgccggaaaaccgctggagttcagcaagcctgccgcctggcaaaataacctgccactgacgccagtagataaag

SEQ ID NO: 798012 - DNA, 75 bp, synthetic construct
  source 1..75: mol_type = other DNA
atcttgaacacttacatcctcaaaacactttcggcgagcttgctggttttgtcgccgatttatttccagttcttg

SEQ ID NO: 798013 - DNA, 75 bp, synthetic construct
  source 1..75: mol_type = other DNA
tgttatacgagggtggagtgattctaatacctaccctataacttattatgacacaaatagcacaatatgtcaaga

SEQ ID NO: 798014 - DNA, 75 bp, synthetic construct
  source 1..75: mol_type = other DNA
gcacgatagctgatatcactatggctggtactgctgtatgggctgcattcaaagctaatgattggttaaaaaata

SEQ ID NO: 798015 - DNA, 75 bp, synthetic construct
  source 1..75: mol_type = other DNA
tcaaagagtttctgaatacatcagggatggagtccctccctgtcaccttactcgacggcaagcaggtgatggctg

SEQ ID NO: 798016 - DNA, 75 bp, synthetic construct
  source 1..75: mol_type = other DNA
cagcaggctgctgcgcaaccagtagcgttgtggtcagcgacgaagccgtcaaatggaacgccagcgccgaatggg

SEQ ID NO: 798017 - DNA, 75 bp, synthetic construct
  source 1..75: mol_type = other DNA
atgaatgacatctcatatggtcgagaagcggaaaaatggcctcgggaatattctatgcttgctcgcaggatacaa

SEQ ID NO: 798018 - DNA, 75 bp, synthetic construct
  source 1..75: mol_type = other DNA
gagacagtacgctaccgctacgatgacgcgcacagtgagttaccggcgacgacaacggatgcgacgggcagcacc

SEQ ID NO: 798019 - DNA, 75 bp, synthetic construct
  source 1..75: mol_type = other DNA
aactggcataaaagttgctctcaatgatgaacagaatttattctgtactattacttttcaacacgttatcgatga

SEQ ID NO: 798020 - DNA, 75 bp, synthetic construct
  source 1..75: mol_type = other DNA
tggtacttgatacagcaaacagtgaaagtgaaacagaattgcagggcaatcgtcaaattattgcgccttaccgtg

SEQ ID NO: 798021 - DNA, 75 bp, synthetic construct
  source 1..75: mol_type = other DNA
ggggccagactgtggtacggcgattatcaacggcgcgcgctctgttttggtaacgccgtgcgtcgcggcaacatc

SEQ ID NO: 798022 - DNA, 75 bp, synthetic construct
  source 1..75: mol_type = other DNA
gagaagaaattatagatgaagatatcgctcggctatctcccctgatgcacgggcatatcaatatgttgggccatt

SEQ ID NO: 798023 - DNA, 75 bp, synthetic construct
  source 1..75: mol_type = other DNA
catgacggttatttccgggaaagattctgatgcgttggtggtttttgagcgtgaacaccctgagcaatatgccga

SEQ ID NO: 798024 - DNA, 75 bp, synthetic construct
  source 1..75: mol_type = other DNA
acccactccagctacggcaatattgatgtgttacagcaggcctgcccacaagaggtgtggatcaaccccattgat

SEQ ID NO: 798025 - DNA, 75 bp, synthetic construct
  source 1..75: mol_type = other DNA
aagtcgtcaggctttagaacttctaaaaacgatcagagaaatcagtggtgaatgcgaccttgtattcattggcga

SEQ ID NO: 798026 - DNA, 75 bp, synthetic construct
  source 1..75: mol_type = other DNA
tccctgatgacaaaagtgcaggaactggacgaactccagcaacaggccgacgccgaccagcaggcatacctgacg

SEQ ID NO: 798027 - DNA, 75 bp, synthetic construct
  source 1..75: mol_type = other DNA
ccggtgagctggcgaaaacgcagcgccgcagcctggcggatacccttcagcagtccggcggcgaagacggtggca

SEQ ID NO: 798028 - DNA, 75 bp, synthetic construct
  source 1..75: mol_type = other DNA
tctccgggcagtgatatcgttcctgcgatggggcaggcaccgtggtgccgtaaggtaacgctgaataaggtggag

SEQ ID NO: 798029 - DNA, 75 bp, synthetic construct
  source 1..75: mol_type = other DNA
cccctgacggattttgtcagtgtccggacggcagaaattattccctacgatgtggtggcggatattcatattccc

SEQ ID NO: 798030 - DNA, 75 bp, synthetic construct
  source 1..75: mol_type = other DNA
cgcccacgccggcggtgtatgaagatgatgacgcttttcgcgaacgtatccagttgtcatgggcacggctcagca

SEQ ID NO: 798031 - DNA, 75 bp, synthetic construct
  source 1..75: mol_type = other DNA
atctgtctgcgatacctgtgcccgatgtggtggaggtgccggacactgcagctctggtgagtcagatagtggcga

SEQ ID NO: 798032 - DNA, 75 bp, synthetic construct
  source 1..75: mol_type = other DNA
gtatggacggagccctgcatcagacgggggtgattacggtggcactgaaatcgccggccagtgatattgttccgg

SEQ ID NO: 798033 - DNA, 75 bp, synthetic construct
  source 1..75: mol_type = other DNA
agtatcaggagctggatacgttgttttcggctctggtggaatctgatcccgcgtataaatgggcagaggcgctgg

SEQ ID NO: 798034 - DNA, 75 bp, synthetic construct
  source 1..75: mol_type = other DNA
tcaacggggaaagactgagagaaccaaacgaagtttttaaacgttatggtcgagcaataagatatgattttcaag

SEQ ID NO: 798035 - DNA, 75 bp, synthetic construct
  source 1..75: mol_type = other DNA
ggtttgaaagcagtaaagctatcatggcagaatcatttgcaactggttccgatcatcaggttgtaaacgagctca

SEQ ID NO: 798036 - DNA, 75 bp, synthetic construct
  source 1..75: mol_type = other DNA
ggattctgtgttcagtctgtaggcaaggggggggtctttgggcgtttattaggaggtcatagtggactcgagggc

SEQ ID NO: 798037 - DNA, 75 bp, synthetic construct
  source 1..75: mol_type = other DNA
aagataaagttgaaaaaaggcttcaaaatcgccaggctaaatatcaaaatgaaattaatcaactatctgcattgg

SEQ ID NO: 798038 - DNA, 75 bp, synthetic construct
  source 1..75: mol_type = other DNA
taatattaataattcctcagttacttatattgatattagctccaatgatacagactatattactattggtatcga

SEQ ID NO: 798039 - DNA, 75 bp, synthetic construct
  source 1..75: mol_type = other DNA
atgctaccatctatttcaatcaacaacaccagcgctgcttacacagaatctatcaatgaaaataacaatgatgaa

SEQ ID NO: 798040 - DNA, 75 bp, synthetic construct
  source 1..75: mol_type = other DNA
aatcggttagaaactcggaaacttgaaaatatccgcgacacccttctccccaaactcctttcgggcgaaatcacc

SEQ ID NO: 798041 - DNA, 75 bp, synthetic construct
  source 1..75: mol_type = other DNA
tggtcaccgggcagagaagagaggacgtatcgctgttcagattcagcgatatcagggatggaagattgtttgtca

SEQ ID NO: 798042 - DNA, 75 bp, synthetic construct
  source 1..75: mol_type = other DNA
aatcacccaagcattttctgatatcagggattctacagagttaaagtttggccccaaccctcccccgttccatga

SEQ ID NO: 798043 - DNA, 75 bp, synthetic construct
  source 1..75: mol_type = other DNA
acgctaatctgccccgtaacctgacctatcgcaaaagagacaggctttacagctggcgaaatccgacaaccggcc

SEQ ID NO: 798044 - DNA, 75 bp, synthetic construct
  source 1..75: mol_type = other DNA
gcgataacacgctggccctgtacgcgccaaaccgttttgtcctcgattgggtacgggacaagtaccttaataata

SEQ ID NO: 798045 - DNA, 75 bp, synthetic construct
  source 1..75: mol_type = other DNA
tgatcgattttagccacagtaacagccagaaaatagcacgtaatcagttaatggtcgcaacggaagtttgtcggc

SEQ ID NO: 798046 - DNA, 75 bp, synthetic construct
  source 1..75: mol_type = other DNA
cgtcgcctgttaggtttatggtgctttgccttggcgacgctacgcttaatctgttactgatttctggtaccatgg

SEQ ID NO: 798047 - DNA, 75 bp, synthetic construct
  source 1..75: mol_type = other DNA
gcaccgtatctggctgaagtggtgaaaaccatgaccacagacccggttacaggtgaggtgaataaggctgcaaat

SEQ ID NO: 798048 - DNA, 75 bp, synthetic construct
  source 1..75: mol_type = other DNA
actatctgggaagcgcgacctcatttacaacaggtatgatggctcccgatcgtggtgtccttgcgaacacaggta

SEQ ID NO: 798049 - DNA, 75 bp, synthetic construct
  source 1..75: mol_type = other DNA
aacggtatggcggcctccggttttggaacgggaggcaaataccagcaggcgatacaggccgcaacggcagcagta

SEQ ID NO: 798050 - DNA, 75 bp, synthetic construct
  source 1..75: mol_type = other DNA
aacggctgttaccgctatcaggggcaggaatatcagttacccattaatgaacatagttcaaaagccgctattcac

SEQ ID NO: 798051 - DNA, 75 bp, synthetic construct
  source 1..75: mol_type = other DNA
tgcaaatcaccaatatgcattgcagtggacagaccgtttcacttgccgcgggggattatcacgcgaccattgtga

SEQ ID NO: 798052 - DNA, 75 bp, synthetic construct
  source 1..75: mol_type = other DNA
agcttgttaagccgcccgttaaacctcattcgctcgccgtatattattctgtcggcaacttacgtcatcggccaa

SEQ ID NO: 798053 - DNA, 75 bp, synthetic construct
  source 1..75: mol_type = other DNA
tttgaagtcggcaccaaaccggtgacgcaaacgccacaagcggcagtgacgagcaacgtcgcggcccctgcacag

SEQ ID NO: 798054 - DNA, 75 bp, synthetic construct
  source 1..75: mol_type = other DNA
cctggcgacagctcgaaagctttaacgccgatgttgcgcatgaacttcgaaccccactgactaatctgatcggcc

SEQ ID NO: 798055 - DNA, 75 bp, synthetic construct
  source 1..75: mol_type = other DNA
tgccactgcgcttatcgatcggcggctgttccaccgctcactggccaatttactggaaaatagcgcaagacattc

SEQ ID NO: 798056 - DNA, 75 bp, synthetic construct
  source 1..75: mol_type = other DNA
caaaatcctcaaacatataaaaagtcatctaattatgttgagcgcatttgtcataggcgcatattctgcatattg

SEQ ID NO: 798057 - DNA, 75 bp, synthetic construct
  source 1..75: mol_type = other DNA
gtgagttaggggaaattccggaagggtggtcgattaaaccattagatggaatcgcaacctatcaaaatgggttgg

SEQ ID NO: 798058 - DNA, 75 bp, synthetic construct
  source 1..75: mol_type = other DNA
aagtgaaggcgttgctgttaatcttgatgtagaaagtaacatcaatatttccaataactcccgggtgatgctgcc

SEQ ID NO: 798059 - DNA, 75 bp, synthetic construct
  source 1..75: mol_type = other DNA
atgactctttgcaaaagcagatgcacaacgaactgttgttccgggaatcattaatgagtccgtggatcaccgccc

SEQ ID NO: 798060 - DNA, 75 bp, synthetic construct
  source 1..75: mol_type = other DNA
acatatctggctttctggcgatatacacggttgtcttgagcagttgcgccgcaaattatggcattgtcgttttga

SEQ ID NO: 798061 - DNA, 75 bp, synthetic construct
  source 1..75: mol_type = other DNA
aatgctcattctcgttcttcgtcgaaaaactctttccgcggtggcggcggttcttctggcggtggcggttcatcc

SEQ ID NO: 798062 - DNA, 75 bp, synthetic construct
  source 1..75: mol_type = other DNA
cgatttattctctagcattgagcaatatttacggtgggtaattgagaaaaataatgactataataaggaaaatta

SEQ ID NO: 798063 - DNA, 75 bp, synthetic construct
  source 1..75: mol_type = other DNA
aaacaatttcaataacaaaatcctcaaacatataaaaagttatctaattatgttgagcatatttgctataggcgt

SEQ ID NO: 798064 - DNA, 75 bp, synthetic construct
  source 1..75: mol_type = other DNA
tgttatggcatgcaataaaaactataaccaacatgaagtggctggctgtttaaccctgtcttaccgtgaggttaa

SEQ ID NO: 798065 - DNA, 75 bp, synthetic construct
  source 1..75: mol_type = other DNA
ttaccgctatatcctgtatgtataccggatttgcatttgcaacgaatgtctcgttgaatcctgcccaggtagaac

SEQ ID NO: 798066 - DNA, 75 bp, synthetic construct
  source 1..75: mol_type = other DNA
atgagtgatatgccgcatcaggagcgtctggtcagacgggtcaggaaactgctggagctgagccgcaataacagt

SEQ ID NO: 798067 - DNA, 75 bp, synthetic construct
  source 1..75: mol_type = other DNA
gtgcgtccggtggggcagaagttcctgatgtaatgggcgaggacaatttttttattgagggtacgccatttctta

SEQ ID NO: 798068 - DNA, 75 bp, synthetic construct
  source 1..75: mol_type = other DNA
tgtctgataaaaatcgcttatatccatgctcacgctgtcacctcggttcggctgatggcattgtgggaacactga

SEQ ID NO: 798069 - DNA, 75 bp, synthetic construct
  source 1..75: mol_type = other DNA
atgatgtacagcaaatacgatgaggcgcagttccacttgaggcttacgcacgagttgcacgctaagattaagcag

SEQ ID NO: 798070 - DNA, 75 bp, synthetic construct
  source 1..75: mol_type = other DNA
tccttgggattgggcaaagttttgccggaacgggatcgaccctatggggcgttggcgtggttggctcgctgcata

SEQ ID NO: 798071 - DNA, 75 bp, synthetic construct
  source 1..75: mol_type = other DNA
gcattgattaccgggtcaaaatgtacaacccggaaaccggtgggcaaattgatgtgcgcaataatgaaaatatgg

SEQ ID NO: 798072 - DNA, 75 bp, synthetic construct
  source 1..75: mol_type = other DNA
cagctgccgaatgtggatctgaaaaccatcaatcagaccgtggatctgaaatccgggcagacggtcattatcagt

SEQ ID NO: 798073 - DNA, 75 bp, synthetic construct
  source 1..75: mol_type = other DNA
tcatttgcaaacaatactcggcattatagtgcaatagtttctaaaaactggctctttaatcaaaacggaaaaact

SEQ ID NO: 798074 - DNA, 75 bp, synthetic construct
  source 1..75: mol_type = other DNA
gtttcaaaatacaacgcgctgctgactgacaccgcggcactgcgcaccactcttgccgctgttctggctcaactt

SEQ ID NO: 798075 - DNA, 75 bp, synthetic construct
  source 1..75: mol_type = other DNA
gaccgcgtaaaccgtcagttcgtggcagaacgacctgaccagctgtggggggctgattttacttacgtcagcaca

SEQ ID NO: 798076 - DNA, 75 bp, synthetic construct
  source 1..75: mol_type = other DNA
tgctggatgcactggagcaggcgttgtgggcccgtcggccgtccggcacagtccatcacagtgataaaggttctc

SEQ ID NO: 798077 - DNA, 75 bp, synthetic construct
  source 1..75: mol_type = other DNA
gcgtaaagtctggcgccagttgttacgcgaaggtatcagggtggccagatgtacagtggcgcggctcatggcggt

SEQ ID NO: 798078 - DNA, 75 bp, synthetic construct
  source 1..75: mol_type = other DNA
aagagaggctggcctcattaatctcggaacgagtaaaagaagttgcggctgatatccttagaaaagaaaaaaccc

SEQ ID NO: 798079 - DNA, 75 bp, synthetic construct
  source 1..75: mol_type = other DNA
cggacaaaaacgcccgcgccggtggggagcctcggccccggctggaaaatgcctgcggatatccgcttacagctg

SEQ ID NO: 798080 - DNA, 75 bp, synthetic construct
  source 1..75: mol_type = other DNA
attatcgctaattgggaaggtcaggaagttgattttgacgataccacttatcgttcttctgcaacaattgtatac

SEQ ID NO: 798081 - DNA, 75 bp, synthetic construct
  source 1..75: mol_type = other DNA
taagtattccaaaagcggctggtgtatctccggtatttaaattctatggtgaagcagaagcacaggatgattcta

SEQ ID NO: 798082 - DNA, 75 bp, synthetic construct
  source 1..75: mol_type = other DNA
tcagataacctgctacatgtgacgaaggttatcaacggcggcacgaacggacttgaagatcgtcgcgctcgcttc

SEQ ID NO: 798083 - DNA, 75 bp, synthetic construct
  source 1..75: mol_type = other DNA
caattatctgttcttttatattccggtgtcattatatcttagttattactatggatataattttttaaatctata

SEQ ID NO: 798084 - DNA, 75 bp, synthetic construct
  source 1..75: mol_type = other DNA
tttatttcagaaagtacatatttacgctatcttaatgttcttgttaatattcgtgatgcgtttgttgcagggatt

SEQ ID NO: 798085 - DNA, 75 bp, synthetic construct
  source 1..75: mol_type = other DNA
acttatcgctcaagtaacactatcgtttaccgcgtatgggattactcagatattgcacttgctcattctgaagca

SEQ ID NO: 798086 - DNA, 75 bp, synthetic construct
  source 1..75: mol_type = other DNA
attggtaaatatcctaccagtgcatttgccaataaaggcgatgtcaccgcctccaaagccttcaccatcaacctg

SEQ ID NO: 798087 - DNA, 75 bp, synthetic construct
  source 1..75: mol_type = other DNA
cggctctcattatttccgcatcagcaatgaatgcttatgcaacaaatggcaaagtcaattttaccggtgaaatta

SEQ ID NO: 798088 - DNA, 75 bp, synthetic construct
  source 1..75: mol_type = other DNA
ctatcgtatatcgcgtatgggattactcagatatcgcacttgcacactctgaagctttcgtaaatatcgttattg

SEQ ID NO: 798089 - DNA, 75 bp, synthetic construct
  source 1..75: mol_type = other DNA
gctacgtattagtactaccgctaatgatgaatgggaaatgattcaggaaggcgtactaacacatatcagtattgg

SEQ ID NO: 798090 - DNA, 75 bp, synthetic construct
  source 1..75: mol_type = other DNA
tctgataacgcagacctacgccgtcttaatcaaaatggtgcagtactctttaatcataatcgtgatgatctcatt

SEQ ID NO: 798091 - DNA, 75 bp, synthetic construct
  source 1..75: mol_type = other DNA
aatatacctgcgtggtgaccgattcggcagagaaagcacagagtgtgacgtctgttgaatgcaccgtgacagtga

SEQ ID NO: 798092 - DNA, 75 bp, synthetic construct
  source 1..75: mol_type = other DNA
atcctgagtccaaagtaaaatcgctagattggaaagagttggtcgagcacggttttgacgatattgacccgcaag

SEQ ID NO: 798093 - DNA, 75 bp, synthetic construct
  source 1..75: mol_type = other DNA
atgcctgctggcacgaacggcatcagaattgtgatttttggtattgtgcgccatttgttttctctgctggcgcag

SEQ ID NO: 798094 - DNA, 75 bp, synthetic construct
  source 1..75: mol_type = other DNA
gaaatgtttttatggggttattatttcatattaatgattcatatagtcgagaatatgacgatagagatgtcagag

SEQ ID NO: 798095 - DNA, 75 bp, synthetic construct
  source 1..75: mol_type = other DNA
tgctaggcaaaatgtcttgttcaaggcacgagatgcgctaaatgtgttggaatcgtttagtgagaaatggcgttc

SEQ ID NO: 798096 - DNA, 75 bp, synthetic construct
  source 1..75: mol_type = other DNA
cccctatatttccagacacctgttatcacttaacccattactggcttgctgccgtagatattcccgtggcgagcg

SEQ ID NO: 798097 - DNA, 75 bp, synthetic construct
  source 1..75: mol_type = other DNA
tatttttaattatggttcaatgtatctgaaattatataatgttactgagaatccaactataataactgatcgttt

SEQ ID NO: 798098 - DNA, 75 bp, synthetic construct
  source 1..75: mol_type = other DNA
atgggactggcacaaaatatctggcagtttttgatcctacgggcgcttcttgggttacttggcggatttgtcccc

SEQ ID NO: 798099 - DNA, 75 bp, synthetic construct
  source 1..75: mol_type = other DNA
cgttacggcagagctggagatcccggaaggaccggacgccagtacggtgctgaataatgccatcgatgtattacg

SEQ ID NO: 798100 - DNA, 75 bp, synthetic construct
  source 1..75: mol_type = other DNA
acctgtccgaactggacgtaccggatgccattgtggtgccggatgcgactgaaatcttcacccggtggctggcgc

SEQ ID NO: 798101 - DNA, 75 bp, synthetic construct
  source 1..75: mol_type = other DNA
cacgggtgagaatgccctctaaagttcgtgcttttattgattttatggtggagaaaagagtaaaactcgaaaatt

SEQ ID NO: 798102 - DNA, 75 bp, synthetic construct
  source 1..75: mol_type = other DNA
ttttgaattgccgaccttcgtttgcgtgctgtttgtgggcgtgattctgagtaacggtctgtcaatgatgggctt

SEQ ID NO: 798103 - DNA, 75 bp, synthetic construct
  source 1..75: mol_type = other DNA
atgggcagcctcttcggcagagtatgggctattccggtggtggtaccggatttggcgggcagcttgcggaatggc

SEQ ID NO: 798104 - DNA, 75 bp, synthetic construct
  source 1..75: mol_type = other DNA
ggtataaaaaagcatctcagaatcctgttttttcttttagatacaatgtgttattgtatttttcataatctacca

SEQ ID NO: 798105 - DNA, 75 bp, synthetic construct
  source 1..75: mol_type = other DNA
gcattttgttaggctatctcttgaatatggcaaaaaatggatatacgaaaatattaatatattgcccaacactaa

SEQ ID NO: 798106 - DNA, 75 bp, synthetic construct
  source 1..75: mol_type = other DNA
caatcctgggctgtcggggctgatatcaattgggtcaaacaacgcgattggaacgatacgctaaagatggctgaa

SEQ ID NO: 798107 - DNA, 75 bp, synthetic construct
  source 1..75: mol_type = other DNA
cagaatatatcatatgtgcgaataaaaccaagcataatcatccaaataatttaactcttgcaagaattttaatac

SEQ ID NO: 798108 - DNA, 75 bp, synthetic construct
  source 1..75: mol_type = other DNA
ttgtcgaagagggaaaagaaagtatccaagacaggatcaaacagctgattggcaccagaagtatgcggcaggctg

SEQ ID NO: 798109 - DNA, 75 bp, synthetic construct
  source 1..75: mol_type = other DNA
aacaagttagagagatttacgagttttgtaagactaagggtgatcatttcaatgtaacctataaaaagaccagcg

SEQ ID NO: 798110 - DNA, 75 bp, synthetic construct
  source 1..75: mol_type = other DNA
aactggttactggatttactgtatgaacaaaacagagttgtaccggttattgagggaaaaacgttgtgtgtcgca

SEQ ID NO: 798111 - DNA, 75 bp, synthetic construct
  source 1..75: mol_type = other DNA
caaaggctatgagctggtcaggttatcggtaaatgcttcagggaaacttgttgcatatgccgcaccagcaaattt

SEQ ID NO: 798112 - DNA, 75 bp, synthetic construct
  source 1..75: mol_type = other DNA
ggaacggtacttccaatttctgcacgacaaagacggttctggccttttgggtatggctgagacacggccgtctct

SEQ ID NO: 798113 - DNA, 75 bp, synthetic construct
  source 1..75: mol_type = other DNA
aatgaggtgatagcggtttattatgcgtgtaaaggtgattgtgataagcattttgaggattatttttggaatgaa

SEQ ID NO: 798114 - DNA, 75 bp, synthetic construct
  source 1..75: mol_type = other DNA
agacatctactcatatatggctaatcattgtgccaatagaaaaatatcatttaacgttgttaagttagcacatca

SEQ ID NO: 798115 - DNA, 75 bp, synthetic construct
  source 1..75: mol_type = other DNA
ttcaatttcaatacgcatggtcagcgttatctcccgatgatccgcgtataacgggaaaaccggatagtacattgc

SEQ ID NO: 798116 - DNA, 75 bp, synthetic construct
  source 1..75: mol_type = other DNA
agcgttattttgctttctgctacgttatctcaacagcagcgcgacaaactcgtcgccgcctttgcgcgtggtgca

SEQ ID NO: 798117 - DNA, 75 bp, synthetic construct
  source 1..75: mol_type = other DNA
attgaaggcagcattcgtcgtattgtctatgaacacgatctcacgctgaaagataagctcttttcgtcactctta

SEQ ID NO: 798118 - DNA, 75 bp, synthetic construct
  source 1..75: mol_type = other DNA
ctcggggcgacttaggcagttcgctccgggctgggctgtatgcaggaaccccccgttcagcccgactgctgcacc

SEQ ID NO: 798119 - DNA, 75 bp, synthetic construct
  source 1..75: mol_type = other DNA
gcggtggcagtaaacgtatcccgcaaaaaaatatcaaaatgttttgtgggaaaccaatgattgcttggtcgatta

SEQ ID NO: 798120 - DNA, 75 bp, synthetic construct
  source 1..75: mol_type = other DNA
aaatttacctgaacttgaatatcaacatttatgtgctggtcaggtttttgatggagtactcactcattcacattc

SEQ ID NO: 798121 - DNA, 75 bp, synthetic construct
  source 1..75: mol_type = other DNA
atgttttattattgcagggagggaactacttattcccattagttacaatacctattgcttcacgggtgtttggac

SEQ ID NO: 798122 - DNA, 75 bp, synthetic construct
  source 1..75: mol_type = other DNA
ttaacgctgattagcgttgtccagtacctgaaggtatttattttcggacgtttccctctttatttacgaaagggg

SEQ ID NO: 798123 - DNA, 75 bp, synthetic construct
  source 1..75: mol_type = other DNA
gacggttactgaatttgaaacgctcattgacagtgccgaagggattgtccgcttcaaagaacagtttatctatct

SEQ ID NO: 798124 - DNA, 75 bp, synthetic construct
  source 1..75: mol_type = other DNA
accccgcgacgcttgcagatgttgcaaccttccgtcgcaggtttacacctggcctggcaattcgctgttcatctg

SEQ ID NO: 798125 - DNA, 75 bp, synthetic construct
  source 1..75: mol_type = other DNA
agtcacattgcagagggtaaccacgcccttcgaacggtccgggaggttgtcgagaaacttgaagcatcgcattta

SEQ ID NO: 798126 - DNA, 75 bp, synthetic construct
  source 1..75: mol_type = other DNA
acaatggtcatacaggttctgatgttatctcaattaccgattctttcggaggattagatagaactcaagcatctc

SEQ ID NO: 798127 - DNA, 75 bp, synthetic construct
  source 1..75: mol_type = other DNA
ccattggctcggatatattatttgctaaattatattgttatcggtataaagaaacatgcttttgactataaaaac

SEQ ID NO: 798128 - DNA, 75 bp, synthetic construct
  source 1..75: mol_type = other DNA
gcttatcgctgtcattcagcatcaaaaagagacaggcgcgctggcggagcgtaaggtgctgattatcatgccgac

SEQ ID NO: 798129 - DNA, 75 bp, synthetic construct
  source 1..75: mol_type = other DNA
tgcaggtggaaataatgtgggtattaagttcgctcttaatgataaaactattaaatatatatggatattaaataa

SEQ ID NO: 798130 - DNA, 75 bp, synthetic construct
  source 1..75: mol_type = other DNA
gtaaaaaaggacgctgaagctgctaaacaggccgcatctgatgcagagcatgtcagggaggatattgacaccgcg

SEQ ID NO: 798131 - DNA, 75 bp, synthetic construct
  source 1..75: mol_type = other DNA
tttgaagcacaaaaaggcaaatacaccgtacacatcaagcaaaagaacggccccaagtgctgcgtgggtgacatt

SEQ ID NO: 798132 - DNA, 75 bp, synthetic construct
  source 1..75: mol_type = other DNA
ttatctgcgacactgaaaacggcgaatcgtttatcagagctggctgatgaaggtgaagaggctcagcaggaatcc

SEQ ID NO: 798133 - DNA, 75 bp, synthetic construct
  source 1..75: mol_type = other DNA
ttgattttttgtccggtacagtttattccggcgggctgaatgcatcaccggaggctggcggtattgttcaggcgg

SEQ ID NO: 798134 - DNA, 75 bp, synthetic construct
  source 1..75: mol_type = other DNA
tattgacctgcgcccggaagctctgaagaaattcgaggaactggctcaacaggcgcagcagagcgcggaagcggc

SEQ ID NO: 798135 - DNA, 75 bp, synthetic construct
  source 1..75: mol_type = other DNA
gattttctgtcctgggtaaggaatgcgacgccgggtgaatattttgttgagggtggcagtaaaatcatatccgga

SEQ ID NO: 798136 - DNA, 75 bp, synthetic construct
  source 1..75: mol_type = other DNA
aaactggctgattcctggctgaaaagagggaaaaattttggttcattaaaagaaattgacaatagaaagatcgaa

SEQ ID NO: 798137 - DNA, 75 bp, synthetic construct
  source 1..75: mol_type = other DNA
aaacctgtgagcgaaaacggtttaagtggagtcttgactgatcgtaataataaaataaaactcatcacgggcgtg

SEQ ID NO: 798138 - DNA, 75 bp, synthetic construct
  source 1..75: mol_type = other DNA
atttacaataaccaacgagcaacaaacattactacatctttatctgaaccacctgcacaaggtaaaagtaatgat

SEQ ID NO: 798139 - DNA, 75 bp, synthetic construct
  source 1..75: mol_type = other DNA
aagggaatactgtgtcggtgatatttcggtttaccacgattcaaagcctggcacgctgaatgattttctgacagc

SEQ ID NO: 798140 - DNA, 75 bp, synthetic construct
  source 1..75: mol_type = other DNA
aaaaggccgcatccggtgcagagcaggccagagcagatattgatactgcgttatctgcgacactgaaaacggcga

SEQ ID NO: 798141 - DNA, 75 bp, synthetic construct
  source 1..75: mol_type = other DNA
atctggaccggctgtatgtccggtcagtaacaacaggtatgacgtcacggcagacagccatgctggcaccggctg

SEQ ID NO: 798142 - DNA, 75 bp, synthetic construct
  source 1..75: mol_type = other DNA
cttcattactggcttcatgaaggatctgagcaaaaaaagaatcctttgcccatttggttttacccgcgataatgt

SEQ ID NO: 798143 - DNA, 75 bp, synthetic construct
  source 1..75: mol_type = other DNA
tcatcatttggcattctgctgatcagtggccttttattggtcaccccccgcaaaaacgtactgtatattcagcgg

SEQ ID NO: 798144 - DNA, 75 bp, synthetic construct
  source 1..75: mol_type = other DNA
cggtgaagagtttgccattattcttttcaatgcgggcttgcaggaagccgaagcgatagcagccagagttaagca

SEQ ID NO: 798145 - DNA, 75 bp, synthetic construct
  source 1..75: mol_type = other DNA
atacgcaatattgatggcttacctcatgttgatttcagccgtgttgataagttcttcactcacgccgacgccttt

SEQ ID NO: 798146 - DNA, 75 bp, synthetic construct
  source 1..75: mol_type = other DNA
atgttagttagtaaaagtaatggtcataacgttaatacagttttgggtagtggaagttgtaatgaaaacaattct

SEQ ID NO: 798147 - DNA, 75 bp, synthetic construct
  source 1..75: mol_type = other DNA
accacacagataaggtttcaactgtaactaaaaattctcagcaagttaaaggtcactatggagataagttgaaag

SEQ ID NO: 798148 - DNA, 75 bp, synthetic construct
  source 1..75: mol_type = other DNA
cgttagccagtcttatgctcaatcatcatttaaatattcatttcgttgttatctggtgccttttttctctcgctc

SEQ ID NO: 798149 - DNA, 75 bp, synthetic construct
  source 1..75: mol_type = other DNA
acaggcggtcaaagatgccgataagatagtccagaaagcggtcgataaacttgctgatgccgcaacgctgaccgg

SEQ ID NO: 798150 - DNA, 75 bp, synthetic construct
  source 1..75: mol_type = other DNA
acagagcggggagtacgacttttccgttcagccgggtgtgtacagcgttcgcctgacacaaagcgaacagcgcct

SEQ ID NO: 798151 - DNA, 75 bp, synthetic construct
  source 1..75: mol_type = other DNA
aaaatcacgctgataatgcagcacaaagcgcacagcagaccgcgcaggatgtggaggcaacggtcaccgcccgtg

SEQ ID NO: 798152 - DNA, 75 bp, synthetic construct
  source 1..75: mol_type = other DNA
taaatgggtggttgacctttctctcgttagtgaaaatgacgaggtcgagttttggattgatgctgcgtgcaacga

SEQ ID NO: 798153 - DNA, 75 bp, synthetic construct
  source 1..75: mol_type = other DNA
agatgtattatgatacaacgctaggtcttccaatatggtataacacagtatcatctgaatggaagagggcggatg

SEQ ID NO: 798154 - DNA, 75 bp, synthetic construct
  source 1..75: mol_type = other DNA
gctgccaaaagcgagcagaacgcgaaagagcacaaggacgaggcgcaacggatagttgatgacctgaagggaagc

SEQ ID NO: 798155 - DNA, 75 bp, synthetic construct
  source 1..75: mol_type = other DNA
aataatgaagagctagttactgatggtgagcctgacgtagtatgtttaagcaagcaggagtgggaaaatcttctc

SEQ ID NO: 798156 - DNA, 75 bp, synthetic construct
  source 1..75: mol_type = other DNA
cgctgtcgcgtaaaccggaggtgacatggtacgggtgggacggtgacaggctgacgacggtacagaccggcacca

SEQ ID NO: 798157 - DNA, 75 bp, synthetic construct
  source 1..75: mol_type = other DNA
cgggttttacagttggaggtcatggttcgcctacatctatgagtgatgacagaatcaaaaaaggaagtgatctga

SEQ ID NO: 798158 - DNA, 75 bp, synthetic construct
  source 1..75: mol_type = other DNA
tggacgccctacaagggaatttcccgtatgcaacagacccggcgggaaaccggctgccggacccggaactgcatc

SEQ ID NO: 798159 - DNA, 75 bp, synthetic construct
  source 1..75: mol_type = other DNA
tcagccaactgaactggaaatacagtaacgccgccattcttaaaggcgccgttaactgggagctgaatccatggt

SEQ ID NO: 798160 - DNA, 75 bp, synthetic construct
  source 1..75: mol_type = other DNA
tgcgcgcgggagcggtgagtgcggagagtgaggcatggcttgcgcagtgcgggctgacggcggaacagatggccg

SEQ ID NO: 798161 - DNA, 75 bp, synthetic construct
  source 1..75: mol_type = other DNA
tctcgctaatgatgggcgtgccgggaaggctctgagcgatgggcagttaataaattctcaggctgaaatgtgtta

SEQ ID NO: 798162 - DNA, 75 bp, synthetic construct
  source 1..75: mol_type = other DNA
gaagagaacccgcatcacctgccccagccgtaccggctgccggggcagcagtatgataaggagtcggggctgtac

SEQ ID NO: 798163 - DNA, 75 bp, synthetic construct
  source 1..75: mol_type = other DNA
aaaagacttggctgtaaatgaacatgggttgacatgtccattaacacaagattgctcaaatagatgtattgatta

SEQ ID NO: 798164 - DNA, 75 bp, synthetic construct
  source 1..75: mol_type = other DNA
tccaaccccatggggctactagctcatagtattgtaaaattaatttgtaaggaagctgcatcagagacgtatcgc

SEQ ID NO: 798165 - DNA, 75 bp, synthetic construct
  source 1..75: mol_type = other DNA
cgatagggttgaaggggggaataaatctatacacgtatccactggtaccaatacgttacactgatccactggggt

SEQ ID NO: 798166 - DNA, 75 bp, synthetic construct
  source 1..75: mol_type = other DNA
ccggagaggaaacttcatctttaccactgtgaccaccgtggactgccgcaggcgctcatcaccccggaaggcgaa

SEQ ID NO: 798167 - DNA, 75 bp, synthetic construct
  source 1..75: mol_type = other DNA
tcaaggacattaggataacatccgagcagtactttaatgcgggggtgatactttttaatatggagatgtgtagaa

SEQ ID NO: 798168 - DNA, 75 bp, synthetic construct
  source 1..75: mol_type = other DNA
gcgttggcgggatggtgatgccgggtagtgtgcagcgcgatcccaattcgctgaaagtgaccttcaccatttacg

SEQ ID NO: 798169 - DNA, 75 bp, synthetic construct
  source 1..75: mol_type = other DNA
aattctctacggcaagcgtgaaactcagcagatgccggaagtcggtcagcgtctgcgcgttggcgggatggtgat

SEQ ID NO: 798170 - DNA, 75 bp, synthetic construct
  source 1..75: mol_type = other DNA
gggaacaggtttccgtaataagtgggtcctacagcatactacaaatacaacacaaaaatacacattacaacccga

SEQ ID NO: 798171 - DNA, 75 bp, synthetic construct
  source 1..75: mol_type = other DNA
gatattggcagcattatccttgtgcggctacgccttttggcgtttgttgcactattgtccattacccataaccgg

SEQ ID NO: 798172 - DNA, 75 bp, synthetic construct
  source 1..75: mol_type = other DNA
ttaatgataatgaaacaacactaaatgacttctctgttgttgtgaagtttaaaaacacgaaaaccaaattcagta

SEQ ID NO: 798173 - DNA, 75 bp, synthetic construct
  source 1..75: mol_type = other DNA
ttcatgttgctaacgataacgctgcacttgatgtgcgtcgcgccgctacgtctgttggcgatacaatagatgttt

SEQ ID NO: 798174 - DNA, 75 bp, synthetic construct
  source 1..75: mol_type = other DNA
cgacaagctatcattcttttattcctgataatggcggtccaaaaatactcaaaaaaacagatgctaaatatattg

SEQ ID NO: 798175 - DNA, 75 bp, synthetic construct
  source 1..75: mol_type = other DNA
gatttaagaagaggcggtggtggatgggggcgaataaaatacgttatcaaacaattaatcgcaaatggatgtgat

SEQ ID NO: 798176 - DNA, 75 bp, synthetic construct
  source 1..75: mol_type = other DNA
gaaaagttctttcagataaagaacttgatgaaatgcacacttgggtagaagatgaaactacagaaaattcatgga

SEQ ID NO: 798177 - DNA, 75 bp, synthetic construct
  source 1..75: mol_type = other DNA
ggagtctgaaaaaaatataacggcatatgaaagatcaaaaattcatgtccactatgtccctgcttaccgagatcc

SEQ ID NO: 798178 - DNA, 75 bp, synthetic construct
  source 1..75: mol_type = other DNA
atgcagttgaatggtctgaacagatgagttcaacggttgatgaggttgcagaatcaatcggaaaccagttccaag

SEQ ID NO: 798179 - DNA, 75 bp, synthetic construct
  source 1..75: mol_type = other DNA
cggaaatttattttgcaaaagttgtcattcttggtgaaggtgacagcgaagagattgttataccgaaaatagcac

SEQ ID NO: 798180 - DNA, 75 bp, synthetic construct
  source 1..75: mol_type = other DNA
aatgcctaaccctcttagcatgtacgcggtcgatgctgttgccgctattgcagaggtgagaggctggaacgcctg

SEQ ID NO: 798181 - DNA, 75 bp, synthetic construct
  source 1..75: mol_type = other DNA
ccagcatactggaaaatcctctgacaataaaaagcgtccgatattggtgtacattattggcaatggctttcccgg

SEQ ID NO: 798182 - DNA, 75 bp, synthetic construct
  source 1..75: mol_type = other DNA
tatgcctaatgattatgacatcacacaggaacttatcaataaatatgacgacgtaagactttatttttgtgcaaa

SEQ ID NO: 798183 - DNA, 75 bp, synthetic construct
  source 1..75: mol_type = other DNA
gaagatacccgagacatggctatgttaagtttaaagatgattacagaggaatataaaacatttgaattccaataa

SEQ ID NO: 798184 - DNA, 75 bp, synthetic construct
  source 1..75: mol_type = other DNA
gatgccggtactgccaacggaacttatcaaaatcaagaccgttttccgatcttttaccgtgttggtactggtacg

SEQ ID NO: 798185 - DNA, 75 bp, synthetic construct
  source 1..75: mol_type = other DNA
tttagtagggtatctcttgttagtggtcgccctactgtaattctttctgatgaaaatcaggttaacccagataat

SEQ ID NO: 798186 - DNA, 75 bp, synthetic construct
  source 1..75: mol_type = other DNA
tattgaaccgcaggttgagcttgtctacggcacgttgtcaggtaatacctttgactggcaatacaacggaatgga

SEQ ID NO: 798187 - DNA, 75 bp, synthetic construct
  source 1..75: mol_type = other DNA
atgtcaaacatcacaatctcccatccggaagtggtcaccgggcatacggacgttatctgctccaccagtatccga

SEQ ID NO: 798188 - DNA, 75 bp, synthetic construct
  source 1..75: mol_type = other DNA
ataaattgcgtcagaaagtacccggtttacgtaacgttgctttaacggcaccgtacttccatcgcggtgacgtgc

SEQ ID NO: 798189 - DNA, 75 bp, synthetic construct
  source 1..75: mol_type = other DNA
aacgttgaggatgcctgccacgccgccatgcttcagggtagccaacctgtaagtaagcgcgaacaggttcgccgt

SEQ ID NO: 798190 - DNA, 75 bp, synthetic construct
  source 1..75: mol_type = other DNA
gcattatttctgataagttgcgagtagactatctcaagagatatgtatctgcagttattgaagcaaaaaagaagg

SEQ ID NO: 798191 - DNA, 75 bp, synthetic construct
  source 1..75: mol_type = other DNA
tggtcatcgactcgttgctagtggtcaggtcacccccgttttcggagtaatgaaaaaaacatttgccgatccagc

SEQ ID NO: 798192 - DNA, 75 bp, synthetic construct
  source 1..75: mol_type = other DNA
gattgaaactatcgcgctgattgctatctgtctgacggtggggaaaattgttgcgcaacttttggctggcactgc

SEQ ID NO: 798193 - DNA, 75 bp, synthetic construct
  source 1..75: mol_type = other DNA
caaaacaagtactggcgctgcctttaaaaaccctcacccctgctgatctcaaggcaagtaagatgggcgatttgg

SEQ ID NO: 798194 - DNA, 75 bp, synthetic construct
  source 1..75: mol_type = other DNA
acttaaatttacgcgtagtttaaatgatatgcgtcagcagttttcaccaactcgtgaggatagcccttctcactc

SEQ ID NO: 798195 - DNA, 75 bp, synthetic construct
  source 1..75: mol_type = other DNA
cacacgctcacgcactgattactcatctggatgtcagcaaagctgaagccttaccgggcgttgttcacgttatta

SEQ ID NO: 798196 - DNA, 75 bp, synthetic construct
  source 1..75: mol_type = other DNA
tacgcaacagcgatgatggattcgggtttgccggttctgacgcaattatctgtaacggtaatatcgttaacgcgt

SEQ ID NO: 798197 - DNA, 75 bp, synthetic construct
  source 1..75: mol_type = other DNA
acgaggaagattttgaaacagatgatttgatatcaaaaaaaacgagagtgagatttatgatgaaaatgacgatca

SEQ ID NO: 798198 - DNA, 75 bp, synthetic construct
  source 1..75: mol_type = other DNA
gcctgtaaaaattgagtttgttcttggaaagaaaataatgaatctatatgaaatagacgatctctgtgcaaaaag

SEQ ID NO: 798199 - DNA, 75 bp, synthetic construct
  source 1..75: mol_type = other DNA
atgttcggtctgagaaaagtaaatggaaacactcattcctttgaaaccacttttcaaaattggaaagaaaagggt

SEQ ID NO: 798200 - DNA, 75 bp, synthetic construct
  source 1..75: mol_type = other DNA
tcaagcgatgaccgtgtagctgaattaatgccagaagctgagcagcattatgttagccaaggcgtttcagataga

SEQ ID NO: 798201 - DNA, 75 bp, synthetic construct
  source 1..75: mol_type = other DNA
gttaaagtaggcgatgcggtaaatggcctggatgctaatattcgcaaaggcgatacgacagtctccatccctgtg

SEQ ID NO: 798202 - DNA, 75 bp, synthetic construct
  source 1..75: mol_type = other DNA
tattgtttttgacatttacagttcatgcaattcctgtagagcttaacaatgtaccgcttcgggagtttgtatcat

SEQ ID NO: 798203 - DNA, 75 bp, synthetic construct
  source 1..75: mol_type = other DNA
gctctggtccgcgccggaaaggatgatgaatacttcagtaaatctgagtcttttctggacaatgtatggaaggca

SEQ ID NO: 798204 - DNA, 75 bp, synthetic construct
  source 1..75: mol_type = other DNA
gacaggacagagatcgtgaatattttgagcgcatatttcagtcagcaaacatcaatttcatcattggctcaggag

SEQ ID NO: 798205 - DNA, 75 bp, synthetic construct
  source 1..75: mol_type = other DNA
gattaccggactttcggcagagcaaatgcaggcattagagcagcccttgcctgaccgtgagcacgattcatggct

SEQ ID NO: 798206 - DNA, 75 bp, synthetic construct
  source 1..75: mol_type = other DNA
cggcttttatggaggcacggcaccgcccggtgtcgcggaatatgtgaacaacggaggaaaacatcatgcaatatg

SEQ ID NO: 798207 - DNA, 75 bp, synthetic construct
  source 1..75: mol_type = other DNA
ggagccagaggcgaaaaaggagagccgggagctcccggaggacctccgggaccaaaaggtgacactggccccaga

SEQ ID NO: 798208 - DNA, 75 bp, synthetic construct
  source 1..75: mol_type = other DNA
taaaagatcatgattttttgaaggtgtttaccaatgcgtcatatttaaccatatcacaaggggtatcttatttga

SEQ ID NO: 798209 - DNA, 75 bp, synthetic construct
  source 1..75: mol_type = other DNA
tgttttcaaaacattcttcagagcattaagtccttacgattacacactgtattgcaggaagtgggtaaaacccaa

SEQ ID NO: 798210 - DNA, 75 bp, synthetic construct
  source 1..75: mol_type = other DNA
acgccactcatcagagttgaaaccgccaccggtgagctggcgaaaacgcagcgccgcagcctggcggataccctt

SEQ ID NO: 798211 - DNA, 75 bp, synthetic construct
  source 1..75: mol_type = other DNA
cggggtatgccctttcagaaccgttgctgaagtcggtaatactgacggtcagtaaggacacatacgggctgtttt

SEQ ID NO: 798212 - DNA, 75 bp, synthetic construct
  source 1..75: mol_type = other DNA
ggtccggctggtccacagggcgctaccggccccagaggaccacaaggggaaaaagggggtaaaggtgaccccggc

SEQ ID NO: 798213 - DNA, 75 bp, synthetic construct
  source 1..75: mol_type = other DNA
tcatggcatacaacgcctcgcaggtgtttcgggcagcagggctgttcttttaaataaaaccgtactgggtgtcag

SEQ ID NO: 798214 - DNA, 75 bp, synthetic construct
  source 1..75: mol_type = other DNA
tcctggccttgatcgtcgtctggtgaacgcactgcttatgtgtgacgagtctccctgcgtgatagcacccgcaaa

SEQ ID NO: 798215 - DNA, 75 bp, synthetic construct
  source 1..75: mol_type = other DNA
tgcaccacgactcggcaaacttggcgatcgaatcggacccgaaaagatcctgattacagcgctgatcttttctgt

SEQ ID NO: 798216 - DNA, 75 bp, synthetic construct
  source 1..75: mol_type = other DNA
cacgacctgaccggcaaacttatccgcagcgaggatgaggggctggtcacccactggcactatgacgaagcagac

SEQ ID NO: 798217 - DNA, 75 bp, synthetic construct
  source 1..75: mol_type = other DNA
ggcaaatgattacgcttctgccgcgctgggtattggtaaagatatgggggcgctgggcgcgatttcttttgacgt

SEQ ID NO: 798218 - DNA, 75 bp, synthetic construct
  source 1..75: mol_type = other DNA
agttaacgatgccatgcagacacagtcacgttttatcgccgatgcggcccatgagttacgtaccccgctaacggc

SEQ ID NO: 798219 - DNA, 75 bp, synthetic construct
  source 1..75: mol_type = other DNA
ggttatcggcaatatgggaggttctgcgtctacagaatacatcaacgatcgaataggaaaatctttgagtgataa

SEQ ID NO: 798220 - DNA, 75 bp, synthetic construct
  source 1..75: mol_type = other DNA
cgtatctattcagataattgtggtggaattaaacatatagaatatatacacaatgaattgaataagcctttatct

SEQ ID NO: 798221 - DNA, 75 bp, synthetic construct
  source 1..75: mol_type = other DNA
aacgatacagcatcacaaagaatatttgactctctaatattgaataatccgggactagcattagatataacaatg

SEQ ID NO: 798222 - DNA, 75 bp, synthetic construct
  source 1..75: mol_type = other DNA
tcggcattcttcatatccccggtatatgggtatcatccacaccaatcaataacgaaagcaatatccaaaaaaaat

SEQ ID NO: 798223 - DNA, 75 bp, synthetic construct
  source 1..75: mol_type = other DNA
ttattttattgttagcgtaaaaaacaagaaagtttattacttgtatgatatagacgaatgcgcaaattttacgat

SEQ ID NO: 798224 - DNA, 75 bp, synthetic construct
  source 1..75: mol_type = other DNA
atacaaagcgagattaactacaccatgccctgagctagataaattaatcatctctattcaagatttttgtgggca

SEQ ID NO: 798225 - DNA, 75 bp, synthetic construct
  source 1..75: mol_type = other DNA
atctgggtaggatgagacgttgttttagtcgtcgtaaaacaatgcgccctgcatttcccgagcgccagggcggga

SEQ ID NO: 798226 - DNA, 75 bp, synthetic construct
  source 1..75: mol_type = other DNA
tacgctcaaattcatacgttttgaggatgtaaacgatctcaaggcagcaatgaaaaaccctgaaacggtagaggc

SEQ ID NO: 798227 - DNA, 75 bp, synthetic construct
  source 1..75: mol_type = other DNA
aaatccacgtctgaaacatccgtggtacaggaagcggaaaaacaggagtctgtgcagcagaacgtttcggctcat

SEQ ID NO: 798228 - DNA, 75 bp, synthetic construct
  source 1..75: mol_type = other DNA
gaatctgtacgtaatgatgataaatcgcgtgatgcagtgccggaacagcctgttaagtcagaaactgtttctcaa

SEQ ID NO: 798229 - DNA, 75 bp, synthetic construct
  source 1..75: mol_type = other DNA
agcacaacgggtgagaatcccggtagaacataaacccgatataatcatctggaataatgaagcatttagcaagga

SEQ ID NO: 798230 - DNA, 75 bp, synthetic construct
  source 1..75: mol_type = other DNA
atcttcaccacgtcgtgatagtcgggtgtcattccaactgcccgataatgcaatcccattccatatttccagtga

SEQ ID NO: 798231 - DNA, 75 bp, synthetic construct
  source 1..75: mol_type = other DNA
ctcagggcgaaaaaatcctggttcatggcaccgcatgaaatgatcatgcttgggagccagatatccagtagtagc

SEQ ID NO: 798232 - DNA, 75 bp, synthetic construct
  source 1..75: mol_type = other DNA
ttgctttacttcaaaagagaataatctcagtccatctgaaatgttagtcaatgccgacaaagcgttatatcaagc

SEQ ID NO: 798233 - DNA, 75 bp, synthetic construct
  source 1..75: mol_type = other DNA
atgcgtcggaccgcatcacgcaccggacggtgaacggcgacccggcggagcagtggcagtatgatgagtacgggt

SEQ ID NO: 798234 - DNA, 75 bp, synthetic construct
  source 1..75: mol_type = other DNA
gccggtgacctgaccgccgtcattgccccggacggcagcagaaacgggacacagtacgatgcgtggggaaaggcc

SEQ ID NO: 798235 - DNA, 75 bp, synthetic construct
  source 1..75: mol_type = other DNA
aacctgccagccgcgccgctggtacgctatggctggacgccgcgcggcgaactggcggcggtgtatgaccgcagc

SEQ ID NO: 798236 - DNA, 75 bp, synthetic construct
  source 1..75: mol_type = other DNA
ttcacctggcgctgaccacgcaggcgcagcgggcggaagccttccgtaaacagcgcgccacgtctttatcttccc

SEQ ID NO: 798237 - DNA, 75 bp, synthetic construct
  source 1..75: mol_type = other DNA
gcgagccacaggtggagagccgctacctctatgacccgctgggccgccggacgggaaaacgggtgtggcggcggg

SEQ ID NO: 798238 - DNA, 75 bp, synthetic construct
  source 1..75: mol_type = other DNA
tacggctatgacgataaaggccgcctgacgggcgaacggcagacggtggagaacccggagacgggggagatgctg

SEQ ID NO: 798239 - DNA, 75 bp, synthetic construct
  source 1..75: mol_type = other DNA
gaaggcatcagcctttaccgccgctatgacaaccgtggccggttaacctcggtgaaagacgcacagggccgtgaa

SEQ ID NO: 798240 - DNA, 75 bp, synthetic construct
  source 1..75: mol_type = other DNA
tcgagagccgatacctttacgacccgctgggtcgccggacagggaaacgggtgtggcgtcgcgagcgtgacctga

SEQ ID NO: 798241 - DNA, 75 bp, synthetic construct
  source 1..75: mol_type = other DNA
gcttgcattcggtttagcaaaaaattatccagattatgcaacgcttttacagacatcggaagacgagttgtatgc

SEQ ID NO: 798242 - DNA, 75 bp, synthetic construct
  source 1..75: mol_type = other DNA
cgcagaatacgatgaatggggcaacctgctgaatgaagagaacccgcatcagctgcagcagcttatccggctgcc

SEQ ID NO: 798243 - DNA, 75 bp, synthetic construct
  source 1..75: mol_type = other DNA
accgcctgatacagcagcgcggctttgacgggcggacgcagcgttaccgttatgacctgaccgggaaactcacgc

SEQ ID NO: 798244 - DNA, 75 bp, synthetic construct
  source 1..75: mol_type = other DNA
gtgaaatccgttatgagtacagcgccgcaggcgacctgacagcaacgatatcaccggacggtaaacgcagcacca

SEQ ID NO: 798245 - DNA, 75 bp, synthetic construct
  source 1..75: mol_type = other DNA
cagggcagaactcagagggcttctggcgataagaaacaagcaggaacgggaggttgctagagggtacattatatt

SEQ ID NO: 798246 - DNA, 75 bp, synthetic construct
  source 1..75: mol_type = other DNA
tggaacgaatgaaagagagactgccaccgtatctcatcacggtactggaaaaccagtataagcggttgaatgagc

SEQ ID NO: 798247 - DNA, 75 bp, synthetic construct
  source 1..75: mol_type = other DNA
aacggatgccgtggacagccgcagcatgcctgattggttgcctcgcgatatcagccattcctccgctgaatggtt

SEQ ID NO: 798248 - DNA, 75 bp, synthetic construct
  source 1..75: mol_type = other DNA
acgtagtaccttcccactgcaactgtttggtttccattacaaatcccgtacgcactcgacctacggcaacattga

SEQ ID NO: 798249 - DNA, 75 bp, synthetic construct
  source 1..75: mol_type = other DNA
actgccctggattattgcatcgtggccggagggcgacattcgcaccgtcatgcctcgcggagaccgccccctcac

SEQ ID NO: 798250 - DNA, 75 bp, synthetic construct
  source 1..75: mol_type = other DNA
tctcctgaagattatgcagcggctgaagagcagggcacagtagttgctatcgtgcacagccatcctggtgacggc

SEQ ID NO: 798251 - DNA, 75 bp, synthetic construct
  source 1..75: mol_type = other DNA
gaaacccggggcggttcattactggagtttggtgaaaccatccacaaaggtcgggcagcgatggaacgggagttc

SEQ ID NO: 798252 - DNA, 75 bp, synthetic construct
  source 1..75: mol_type = other DNA
agacgaacatttacagcagaggaaaaagcctctgtttttgaactatggaagaacggaacaggcttcagtgaaata

SEQ ID NO: 798253 - DNA, 75 bp, synthetic construct
  source 1..75: mol_type = other DNA
gtgttcgcggcgtaattgatgaagctgacgttaaatcaggcaaagttaaaatctacgcgccagccggtgatgctg

SEQ ID NO: 798254 - DNA, 75 bp, synthetic construct
  source 1..75: mol_type = other DNA
aatatgaccatcattgaaggcaaagagggtattaccgtcgttgatccccttgtttcagcagaaacagccaaagtg

SEQ ID NO: 798255 - DNA, 75 bp, synthetic construct
  source 1..75: mol_type = other DNA
cgtgggggggctcgctgtggcactgcaacagtatgaccggtgataaacccggagaagctcattcatcaggctgga

SEQ ID NO: 798256 - DNA, 75 bp, synthetic construct
  source 1..75: mol_type = other DNA
agcagtggccagcgtacggaaaaaacattttccctgccggtgatgctctaccgcggtgtgttcagagccggtgaa

SEQ ID NO: 798257 - DNA, 75 bp, synthetic construct
  source 1..75: mol_type = other DNA
tttttgttgctattttaaccagccttgccacctgggtagttccggtggggatgtttgacagtcaggaagtgcagt

SEQ ID NO: 798258 - DNA, 75 bp, synthetic construct
  source 1..75: mol_type = other DNA
atctttaccgtctgatgcgcggctatgcggaaggggggtatgtgggtggtgccggaagtccggcgcagatgcggc

SEQ ID NO: 798259 - DNA, 75 bp, synthetic construct
  source 1..75: mol_type = other DNA
tctgaagaacgcgagcagcagccacaagaagcgcagcaacagaagccggtaacagagaaagacgtgacaactggt

SEQ ID NO: 798260 - DNA, 75 bp, synthetic construct
  source 1..75: mol_type = other DNA
agtctctcatgatgaacgcttatcatgaagatgaatataatttttatgcggaagcgcatcttccaaaaataaaac

SEQ ID NO: 798261 - DNA, 75 bp, synthetic construct
  source 1..75: mol_type = other DNA
gctggccgctgtatgaatcacgcctgaagggaaagctgtgcacgttatcagcaagcgttacactcagcgcattga

SEQ ID NO: 798262 - DNA, 75 bp, synthetic construct
  source 1..75: mol_type = other DNA
agatcaggtgggaaaagcattaataaatctcagttgttattgcagcaaaatgaatacggttatttatcaacggct

SEQ ID NO: 798263 - DNA, 75 bp, synthetic construct
  source 1..75: mol_type = other DNA
tgggggagttattaaccattatttgaaacatcttgatgccatacaggagcacattaataataaatacaatcttgt

SEQ ID NO: 798264 - DNA, 75 bp, synthetic construct
  source 1..75: mol_type = other DNA
cacattgttattcctgaagttaatctggtgacagggagtaagctgaatccaagaggaatgacagaacattatata

SEQ ID NO: 798265 - DNA, 75 bp, synthetic construct
  source 1..75: mol_type = other DNA
tctttagcgatgtccttcactgccgcaccggaaaatcgggtaaaagtggcgggtttgctgattcccgcaacctta

SEQ ID NO: 798266 - DNA, 75 bp, synthetic construct
  source 1..75: mol_type = other DNA
tgcaagagttcagtctgagcgccgagccgctgaaatcgttgttcccggaaggcggttttgccctgcacggtaact

SEQ ID NO: 798267 - DNA, 75 bp, synthetic construct
  source 1..75: mol_type = other DNA
gaagtttgcgtgaagtcggagcagaaattcgagccgggcggtggctgtaccgcgatgtcagagaatggctttttg

SEQ ID NO: 798268 - DNA, 75 bp, synthetic construct
  source 1..75: mol_type = other DNA
gcgggcagaaaatacccggctggtctcattacttgaagctcatgggattgaatggcgacgtaaaccgcagagccc

SEQ ID NO: 798269 - DNA, 75 bp, synthetic construct
  source 1..75: mol_type = other DNA
gctcatcaagttgaacattatctcccgcagacaccggttgaagccctggaaaaaacgccagtgctccctgcggga

SEQ ID NO: 798270 - DNA, 75 bp, synthetic construct
  source 1..75: mol_type = other DNA
tgcggtggcctacaccatggctgcgaccagtacgcgtaatctccaggaaggtgacgatcctgaccgtgggctgcg

SEQ ID NO: 798271 - DNA, 75 bp, synthetic construct
  source 1..75: mol_type = other DNA
aacttcttatcgtatgccgctgaattagcgggagaaggtgatgaagataccctggccttcacccgagacgagcgc

SEQ ID NO: 798272 - DNA, 75 bp, synthetic construct
  source 1..75: mol_type = other DNA
aactaaatttagattctttgaatgttgtgaggtctgaaataccgcagatgctttctgcgaatgaaagattgaaaa

SEQ ID NO: 798273 - DNA, 75 bp, synthetic construct
  source 1..75: mol_type = other DNA
gccgggaggcgctccagcagctctggcaggaacatggcatggtgactgcactttatccagagctcgcggaacgtt

SEQ ID NO: 798274 - DNA, 75 bp, synthetic construct
  source 1..75: mol_type = other DNA
cagatgaaagcccagggctacaccgaggagcagattgatgaatatgtaaacatggaaacggcgtaccgtgatgca

SEQ ID NO: 798275 - DNA, 75 bp, synthetic construct
  source 1..75: mol_type = other DNA
gtgataacggtcgcattattccgggccgcgatattggcggcggtggcggcatcacgctgaacgtgacaaacaaca

SEQ ID NO: 798276 - DNA, 75 bp, synthetic construct
  source 1..75: mol_type = other DNA
ttaacaagcgacgccgttttttgtgaacagcaggaattatatcctattaagattagaactataaccattgaaaaa

SEQ ID NO: 798277 - DNA, 75 bp, synthetic construct
  source 1..75: mol_type = other DNA
aggtatatcacccaggatcccattgggctggaggggggatggaatttatacatttatccgttgagtccggttatg

SEQ ID NO: 798278 - DNA, 75 bp, synthetic construct
  source 1..75: mol_type = other DNA
ggtacggtcaacaaatcgccgttcaccgggaagaaggcatcagcacttacagcagttataacccgcgtggccaac

SEQ ID NO: 798279 - DNA, 75 bp, synthetic construct
  source 1..75: mol_type = other DNA
taagcgcgctctggcaggtgctgccggaagatgttcgcctgagtccgcatgtgtacctggcgacaaacagccttc

SEQ ID NO: 798280 - DNA, 75 bp, synthetic construct
  source 1..75: mol_type = other DNA
gcaaaccagaattgtgaaaatgcaagaaatgcattaaaacaaataaacagaaagaaaaccatctcaagcatgttt

SEQ ID NO: 798281 - DNA, 75 bp, synthetic construct
  source 1..75: mol_type = other DNA
tcccgttaactgcattgatattcattttaactggatgtaacgaaaaggtttacgatgttgattattatgttaata

SEQ ID NO: 798282 - DNA, 75 bp, synthetic construct
  source 1..75: mol_type = other DNA
ggtgtatgatgttatgtaaaactgcacaaatagatccagatatgtcacacatttggggcggttctctttttgggt

SEQ ID NO: 798283 - DNA, 75 bp, synthetic construct
  source 1..75: mol_type = other DNA
acgattgagaatacagcgatgcgcttgatgcagagagaatcaaccaggcccggaggaatgctccagggacgccgc

SEQ ID NO: 798284 - DNA, 75 bp, synthetic construct
  source 1..75: mol_type = other DNA
ggcggcacgactaactgaggcggtggacgtattccgtctgaacaaacattctgtgtcggcagaacctcgcggagc

SEQ ID NO: 798285 - DNA, 75 bp, synthetic construct
  source 1..75: mol_type = other DNA
cccttgaagaacaggcggcacgattaactgaggcggtggacgtattccgtctgaacaaacattctgtgtcggcag

SEQ ID NO: 798286 - DNA, 75 bp, synthetic construct
  source 1..75: mol_type = other DNA
acggtgacaagcgtctctcgccaaaagagagtgaagttctgcgcctgtttgcggaaggcttcctggtgaccgaga

SEQ ID NO: 798287 - DNA, 75 bp, synthetic construct
  source 1..75: mol_type = other DNA
aaggtagcaatggtgctgccgggcgagttggaagccaaagataagcgcattgcagagttgacagatgcgcttacg

SEQ ID NO: 798288 - DNA, 75 bp, synthetic construct
  source 1..75: mol_type = other DNA
ttgagcaggaaggtgtcagtgcagacagacccgttcgctatcgggaagagtgggtaacgttgcaggatgcttttg

SEQ ID NO: 798289 - DNA, 75 bp, synthetic construct
  source 1..75: mol_type = other DNA
gatgcgtcgcgaaagcaacgagcgtctggccgattttgcggtggctgatgtttctctgttctggctactcaatgc

SEQ ID NO: 798290 - DNA, 75 bp, synthetic construct
  source 1..75: mol_type = other DNA
cggcgtcaaaaagttaaatacgcagatgactaaaacatcagccgcagtcaaaaccaacctttccccggcaatccg

SEQ ID NO: 798291 - DNA, 75 bp, synthetic construct
  source 1..75: mol_type = other DNA
ccgccatccagaaaactgcatcaatgcgccgacagcaaatcatcaaagacgaggcagatacgttattcaacaatc

SEQ ID NO: 798292 - DNA, 75 bp, synthetic construct
  source 1..75: mol_type = other DNA
gcacgcaaagcaaaacaggaagaagccgaacgccagcgcaaggccaaacagttagcggcgcagaaagaacaggcc

SEQ ID NO: 798293 - DNA, 75 bp, synthetic construct
  source 1..75: mol_type = other DNA
agcgcggggccaagaaagctgattccggcatcaagaaactgaatacgcagatgaccaaaacgtctgccgcagtca

SEQ ID NO: 798294 - DNA, 75 bp, synthetic construct
  source 1..75: mol_type = other DNA
catcgcattcggtggcggacgctacaacggcggtgcggttaatggtggcaaactttatagggtcggtgagcgcgg

SEQ ID NO: 798295 - DNA, 75 bp, synthetic construct
  source 1..75: mol_type = other DNA
taagccttcaaaaagcgctggcagaggcaaacgccttacctttcccggctaatcttccggcctatgcgcaagcta

SEQ ID NO: 798296 - DNA, 75 bp, synthetic construct
  source 1..75: mol_type = other DNA
gcgcagcttcggcggggaggcctgtgaacttgccaccgcctggaataccagcggccagctacagagcaggcacct

SEQ ID NO: 798297 - DNA, 75 bp, synthetic construct
  source 1..75: mol_type = other DNA
gtgtggctgacgcacgacccggcatacccggaaagcctgcccggtgcgccactggcgcggtacacgtatacggaa

SEQ ID NO: 798298 - DNA, 75 bp, synthetic construct
  source 1..75: mol_type = other DNA
ttaccactatgacctgaccggaaaactcacgcagagtgaagacgaggggcttatcaccctctggcactacgatgc

SEQ ID NO: 798299 - DNA, 75 bp, synthetic construct
  source 1..75: mol_type = other DNA
cggtccactacggctatgacgataaaggccgcctgacgggtgaacggcagacggtggagaacccggagacagggg

SEQ ID NO: 798300 - DNA, 75 bp, synthetic construct
  source 1..75: mol_type = other DNA
gctggaccgcctggtacagcagggcggctttgacgggcggacgcaacgttatcattatgacctgaccggaaaact

SEQ ID NO: 798301 - DNA, 75 bp, synthetic construct
  source 1..75: mol_type = other DNA
gtgaccaccgggggctgccgctggcgctcatcagtaccgaaggagcaacggaatggcgtggggaatatgatgaat

SEQ ID NO: 798302 - DNA, 75 bp, synthetic construct
  source 1..75: mol_type = other DNA
cctgacggagcagcgcggctttgatggcaggacacagcgttaccggtacagcgccacagggcagctcatccgcag

SEQ ID NO: 798303 - DNA, 75 bp, synthetic construct
  source 1..75: mol_type = other DNA
caccctctggcactacgatgcgtcggaccgcatcacgcaccggacggtgaacggcgacccggcagagcagtggca

SEQ ID NO: 798304 - DNA, 75 bp, synthetic construct
  source 1..75: mol_type = other DNA
ccgatatgaatacgaccgcttcggccagatgacggcggtccaccgcgaggaaggcatcagcctttaccgccgcta

SEQ ID NO: 798305 - DNA, 75 bp, synthetic construct
  source 1..75: mol_type = other DNA
gaatagtagagcatctttattttgttcaactgaattaaactcgaaatcacaatcgcctgcattaggtttgggaca

SEQ ID NO: 798306 - DNA, 75 bp, synthetic construct
  source 1..75: mol_type = other DNA
taccggctgcatatggcgtcgggcgcggtgacagcggtgacggggccggacggcaggacggtgcggtatggctat

SEQ ID NO: 798307 - DNA, 75 bp, synthetic construct
  source 1..75: mol_type = other DNA
ccacaccacggcggcgaacctggatatcgatatcccgtatgcgacggacccggcaggaaaccggctgccggaccc

SEQ ID NO: 798308 - DNA, 75 bp, synthetic construct
  source 1..75: mol_type = other DNA
accgcgtgtcggtccactacggctatgacgataaaggccgcctgacgggtgaacggcagacggtggagaacccgg

SEQ ID NO: 798309 - DNA, 75 bp, synthetic construct
  source 1..75: mol_type = other DNA
cgggcaggctggagagcgtgcgcaccctcgcaccggacctggatatccgcatcccgtatgcctccgacccggcgg

SEQ ID NO: 798310 - DNA, 75 bp, synthetic construct
  source 1..75: mol_type = other DNA
tgcaaaacagcagcagcggtacgatgatcgataacaatgcgaccgggttcatagcatctgataaaaacctgtcac

SEQ ID NO: 798311 - DNA, 75 bp, synthetic construct
  source 1..75: mol_type = other DNA
tggatcagcggtaaaggtgatgttgatgtcacggtgaataacggcaacctgtacaaccgcaatactattgcggct

SEQ ID NO: 798312 - DNA, 75 bp, synthetic construct
  source 1..75: mol_type = other DNA
taacttcttgcgttataacggtgaagttttcggtattactgacaacgttggtggcattgtgggtaaagaaggtgt

SEQ ID NO: 798313 - DNA, 75 bp, synthetic construct
  source 1..75: mol_type = other DNA
ggatggtttacgcagcagccggaaatatgaccgtcagggccgactggcagaagagatctcgcgcaacggtaacat

SEQ ID NO: 798314 - DNA, 75 bp, synthetic construct
  source 1..75: mol_type = other DNA
cattgacagagcatgggatgctcaactcaggctttgtaagaggtatcgaaaacttcaggccaaaggaaagaatgt

SEQ ID NO: 798315 - DNA, 75 bp, synthetic construct
  source 1..75: mol_type = other DNA
gcgcggttatttcaaagacaggacgatgatctgcgtccgtcacaaagagctaccgcaggagattcagccatggcg

SEQ ID NO: 798316 - DNA, 75 bp, synthetic construct
  source 1..75: mol_type = other DNA
tggtgcgcggcggcgtggcgaaactggatgaaggtcaccggctggccgcactctggcaggcgctgccggaagaac

SEQ ID NO: 798317 - DNA, 75 bp, synthetic construct
  source 1..75: mol_type = other DNA
cgaacgcggctggctgacagacatcagccatatcagcgaagggcaccgggtgacggtgcattacgggtatgatga

SEQ ID NO: 798318 - DNA, 75 bp, synthetic construct
  source 1..75: mol_type = other DNA
ccactaccactacgacagccagcaccggctggtgttttacacgcggatacagcatgaggagccactggtcgagag

SEQ ID NO: 798319 - DNA, 75 bp, synthetic construct
  source 1..75: mol_type = other DNA
tcaataacaacggcggacagattgcgtctaatggcaacgtctccctgtcaagttacagcacgatcgacgactatg

SEQ ID NO: 798320 - DNA, 75 bp, synthetic construct
  source 1..75: mol_type = other DNA
ttcaaccattaatgggatgatggaagttgcaggggataaagcggatctgattattgccaacccgaatggtattac

SEQ ID NO: 798321 - DNA, 75 bp, synthetic construct
  source 1..75: mol_type = other DNA
cattacgaatacgaccgctttggtcagatgatggcggtacaccgtgaggaaggcatcagcacgtacaatacctat

SEQ ID NO: 798322 - DNA, 75 bp, synthetic construct
  source 1..75: mol_type = other DNA
attacgagataaaggtggcactgaaagccctgttcgaccagcgcatgaccggacgagagcgtgaaaccaacagcc

SEQ ID NO: 798323 - DNA, 75 bp, synthetic construct
  source 1..75: mol_type = other DNA
atgtgtctatgtcgaaggcaaagaacatcgctcagacagagcaggtcggcgcgctgcgtgaagctcaatggaatg

SEQ ID NO: 798324 - DNA, 75 bp, synthetic construct
  source 1..75: mol_type = other DNA
cgattttgccagtttcgcacgctttcactttctccggggctggcgtcggcggtgtttctgctggcctttttcggt

SEQ ID NO: 798325 - DNA, 75 bp, synthetic construct
  source 1..75: mol_type = other DNA
cgccgctgagttggccgacctgttacaggttgtgcaatctattctggatgacgagcttctcgatggtggtagtca

SEQ ID NO: 798326 - DNA, 75 bp, synthetic construct
  source 1..75: mol_type = other DNA
ggggctgaataccggcttgctatggctgtcagcgctaaagccaacgacgcgcacctggcacgccagccgccacgg

SEQ ID NO: 798327 - DNA, 75 bp, synthetic construct
  source 1..75: mol_type = other DNA
accagatatcggcggccaggctgacaacgttcagtgactggaaggtcatcagcgatacagcccgcggcgatctga

SEQ ID NO: 798328 - DNA, 75 bp, synthetic construct
  source 1..75: mol_type = other DNA
aatccaaacttcatagccaaccagatgggacatgcgaatgcccagatggtttacaatgtttacggtgcatggatg

SEQ ID NO: 798329 - DNA, 75 bp, synthetic construct
  source 1..75: mol_type = other DNA
cagatagaagtaaagctgcgagagtatggccggacaagcactcactcatgcagctttgttttcaatcctcagata

SEQ ID NO: 798330 - DNA, 75 bp, synthetic construct
  source 1..75: mol_type = other DNA
gcgcaggcacaacaacaactcggcaaacgcgatatttatcaacgtagcggcatccagtttctgcccttcaatacg

SEQ ID NO: 798331 - DNA, 75 bp, synthetic construct
  source 1..75: mol_type = other DNA
aaagaagccagtaaattgattgccgcaaaaatgaaaaaaggatatcaagaaactccagactttaacttcatggat

SEQ ID NO: 798332 - DNA, 75 bp, synthetic construct
  source 1..75: mol_type = other DNA
gctcgggttccggcggctcatccggcagtggtggttcaggttctggctccggtggttcatccggtagcggtggct

SEQ ID NO: 798333 - DNA, 75 bp, synthetic construct
  source 1..75: mol_type = other DNA
agtaccgtttcccggaaacattgacgaaccagtcccgttggttcggtctgtatctcgatgaactaatcccggccg

SEQ ID NO: 798334 - DNA, 75 bp, synthetic construct
  source 1..75: mol_type = other DNA
caataaaagaaatatataatggagatcctgatttcattttcgataaaatatcacgtaacctcatacatacggtaa

SEQ ID NO: 798335 - DNA, 75 bp, synthetic construct
  source 1..75: mol_type = other DNA
aaagtgacttctcggctgagcgatgcgctgcgtaatggccgagtctggcaactagcgattatctacctgacggta

SEQ ID NO: 798336 - DNA, 75 bp, synthetic construct
  source 1..75: mol_type = other DNA
ccaatcattaatttattcttattgtatttatttgtgtcaatgcttccttttctaaatattaggttgatgtttgtt

SEQ ID NO: 798337 - DNA, 75 bp, synthetic construct
  source 1..75: mol_type = other DNA
ggatgaaggtgataatacgtctgaatatctgacaatacacaaagacattattaataaaaatataatccataatgg

SEQ ID NO: 798338 - DNA, 75 bp, synthetic construct
  source 1..75: mol_type = other DNA
actatgccgacccaattgctttccggtacggcgctggctgcggggattggttttgtaaacctgtttggcgcagtc

SEQ ID NO: 798339 - DNA, 75 bp, synthetic construct
  source 1..75: mol_type = other DNA
cacattcttttggcttgatgacacaccggagcaggcacgttttctgagtaaagaagaaaaaacgttgcttatcaa

SEQ ID NO: 798340 - DNA, 75 bp, synthetic construct
  source 1..75: mol_type = other DNA
tttccggcgcgctgctggagatgcatggatttatgggacatcccggctggttctggatgtttgtgattgaaggat

SEQ ID NO: 798341 - DNA, 75 bp, synthetic construct
  source 1..75: mol_type = other DNA
taccaacgggtttcggttaaaaacctcaaaggagtgatgaattacatcagatatctgcaggagcgtcattcccgg

SEQ ID NO: 798342 - DNA, 75 bp, synthetic construct
  source 1..75: mol_type = other DNA
tatcacatgctgaatatcacattgagaataatactccctatgtcaccatatccgatgacaatgaattcagattaa

SEQ ID NO: 798343 - DNA, 75 bp, synthetic construct
  source 1..75: mol_type = other DNA
aaaagacttcaaaatcgccaggcgaaatatcaaaatgaaattaatcaactatctgcaccaggtgttaattttgat

SEQ ID NO: 798344 - DNA, 75 bp, synthetic construct
  source 1..75: mol_type = other DNA
gaaattcgagcttttgaaagcagcgagtggcaggcaaagtgctttagtggagagttgctcgtcccctacagccat

SEQ ID NO: 798345 - DNA, 75 bp, synthetic construct
  source 1..75: mol_type = other DNA
ttctatcgtcagatctctgcggagtgcatttggtattactgggcttaaattccctgtaatggaggtaattgagtt

SEQ ID NO: 798346 - DNA, 75 bp, synthetic construct
  source 1..75: mol_type = other DNA
cagcaaacgtctgtacgataagtatgcggaaatacgcgtgatcatggccgatatctttgaggagaattaccgctg

SEQ ID NO: 798347 - DNA, 75 bp, synthetic construct
  source 1..75: mol_type = other DNA
acaaaacagcagcagttgtccggacctcactacaaggttgactccatcagggagtcggtaatgactccaacttat

SEQ ID NO: 798348 - DNA, 75 bp, synthetic construct
  source 1..75: mol_type = other DNA
gccgatggtgaatgggttaataatccggggaatgaacgtacctcgctgaaaggaaaactgcgcgggcagaaaatt

SEQ ID NO: 798349 - DNA, 75 bp, synthetic construct
  source 1..75: mol_type = other DNA
ttgaactcaatatgccgccgatgaatggtgccgagtggctggccctgttccagaaaggcgctgcggagagtgtcg

SEQ ID NO: 798350 - DNA, 75 bp, synthetic construct
  source 1..75: mol_type = other DNA
ttatttccggtgtgtcttttggcgcttttgcacagcagggtggtttccaggggccagaagcagagcgttcaacag

SEQ ID NO: 798351 - DNA, 75 bp, synthetic construct
  source 1..75: mol_type = other DNA
tgcctgacaaaagcatacaagcagcgcctgaaaacgttgaaccatctttatgacgcgattaataaaccactctga

SEQ ID NO: 798352 - DNA, 75 bp, synthetic construct
  source 1..75: mol_type = other DNA
atgcaaaattacccgtagcaaaaggtatctccgcacatatgcaagaacacagccttaaaaactcagatgaaataa

SEQ ID NO: 798353 - DNA, 75 bp, synthetic construct
  source 1..75: mol_type = other DNA
atttaatgtggattacgatttacactggcgcaaagcaccctggcagccagatgaagcgacgttgaatggcatcat

SEQ ID NO: 798354 - DNA, 75 bp, synthetic construct
  source 1..75: mol_type = other DNA
ccgtggaaacggtatcgctttcaggcaataaacgccgcagtgtactgaaccttgacggtcagttagtcgattaca

SEQ ID NO: 798355 - DNA, 75 bp, synthetic construct
  source 1..75: mol_type = other DNA
aaaatgcaatcattgcaggatgggtcaatgtaatcaccatggggcagggctggaaaggaactgttggatggaatg

SEQ ID NO: 798356 - DNA, 75 bp, synthetic construct
  source 1..75: mol_type = other DNA
cgcaaacagcttcacggattctaagtctgttacggagtgcattgaaagaagcatggttctccgatccaaaaggtg

SEQ ID NO: 798357 - DNA, 75 bp, synthetic construct
  source 1..75: mol_type = other DNA
ccttccccattcgcatcgctgttacggttggatgtactgtaacaatacctacagcagactggaagccagctaaca

SEQ ID NO: 798358 - DNA, 75 bp, synthetic construct
  source 1..75: mol_type = other DNA
cgactttaggcagtgtcccggcattttctggcctttttatagggcagatgaccggaagtgcttacacttataagt

SEQ ID NO: 798359 - DNA, 75 bp, synthetic construct
  source 1..75: mol_type = other DNA
gaagcgcatcaggcttttatcatcaagtatcatcagcaaacgcaaaacctgaattaaattaccctatacggatcg

SEQ ID NO: 798360 - DNA, 75 bp, synthetic construct
  source 1..75: mol_type = other DNA
cgaaacatcgaaatatctgttcggtattggtgcggcggttctggtttatttcgggataaaaaaactgaaaaaagg

SEQ ID NO: 798361 - DNA, 75 bp, synthetic construct
  source 1..75: mol_type = other DNA
atgctgaatcagaagctggcagattatgtcccaatgatgtcccatggtcaccaaagtgacacaagagacttatta

SEQ ID NO: 798362 - DNA, 75 bp, synthetic construct
  source 1..75: mol_type = other DNA
ttgaaaccctgaaaagtcaggctgaaatgacaagatttggcactcaataccagattgacgtcaaactgcgggagt

SEQ ID NO: 798363 - DNA, 75 bp, synthetic construct
  source 1..75: mol_type = other DNA
cgccaccgcaaatcatatcagtcgagacatacttatgcctgctggtcgttgacagccggtgccaacccggcattc

SEQ ID NO: 798364 - DNA, 75 bp, synthetic construct
  source 1..75: mol_type = other DNA
gtttcgactacgcagcacagttccctgagtcccctaacctgaaacactttggtctggggaaaagagagataacca

SEQ ID NO: 798365 - DNA, 75 bp, synthetic construct
  source 1..75: mol_type = other DNA
ccagccatgataccgccagcgcggttatcgcctcgccgttaaacggttcacgcgctgcttatctctcttctggca

SEQ ID NO: 798366 - DNA, 75 bp, synthetic construct
  source 1..75: mol_type = other DNA
ggattgatgtcgaggaggcgctgcgccaacttgatcgtttacccgtttcaatgcactgctggcagggcgatgatg

SEQ ID NO: 798367 - DNA, 75 bp, synthetic construct
  source 1..75: mol_type = other DNA
tgatcagattatggggctgccggaagcaaaggggcgtgagcaactggcacagatgctggcaggtcaaccggggat

SEQ ID NO: 798368 - DNA, 75 bp, synthetic construct
  source 1..75: mol_type = other DNA
tcctcagcaggctgttcagcttgatgctgatggtatgcaactggctgtgactgactatatggcgggcggtcagcg

SEQ ID NO: 798369 - DNA, 75 bp, synthetic construct
  source 1..75: mol_type = other DNA
caggaaacactttttgatcgctttatggcacagcatgctgccagtgcggtttccggtggcggaactgccgggcgc

SEQ ID NO: 798370 - DNA, 75 bp, synthetic construct
  source 1..75: mol_type = other DNA
aaaagttcatttttaccactgcgaccaccggggcctgccgctggcgctcatcagcgaagacggcaatacggcgtg

SEQ ID NO: 798371 - DNA, 75 bp, synthetic construct
  source 1..75: mol_type = other DNA
ctggcggcagcccctgctgctggtgctgcaggcacaggcgatcagattatggcgttaaacaaccactcagtgacg

SEQ ID NO: 798372 - DNA, 75 bp, synthetic construct
  source 1..75: mol_type = other DNA
tcaggcaggcattgatgcaggcctggctgatcaactgattaatgctgcagatgccgttgaagtgatggtttctgt

SEQ ID NO: 798373 - DNA, 75 bp, synthetic construct
  source 1..75: mol_type = other DNA
atgaatcgttctgactcacctaaaaaacaacctaagccatttggagttaatggacagagagtggcaatattgcca

SEQ ID NO: 798374 - DNA, 75 bp, synthetic construct
  source 1..75: mol_type = other DNA
gatgggaatgacctggggaagctacttcggcgtcgatttcactcaggacgcggtggcaggtagcggtctgacaat

SEQ ID NO: 798375 - DNA, 75 bp, synthetic construct
  source 1..75: mol_type = other DNA
ctgcgtgaacagctcgatagcttaattaattctcatcaatcagcagaaaatgttgccattacggaggcagtataa

SEQ ID NO: 798376 - DNA, 75 bp, synthetic construct
  source 1..75: mol_type = other DNA
cgaccttacagaacggctggcgcgtgtgttgtttgtggcgaatatctgggggcggctcaatgagcgtcacgagta

SEQ ID NO: 798377 - DNA, 75 bp, synthetic construct
  source 1..75: mol_type = other DNA
ggatcatgcaggcgtttcatataatgtttattctgttgattatggatgctacaactcgttaaatattgctaaaag

SEQ ID NO: 798378 - DNA, 75 bp, synthetic construct
  source 1..75: mol_type = other DNA
actgggttgaggatgtaagcgcaggtaataactgcgtggcgatcaccctgggttacgtacagaaaacggcagcag

SEQ ID NO: 798379 - DNA, 75 bp, synthetic construct
  source 1..75: mol_type = other DNA
cacgaatggtttatgcaggccgttattttcgcaacaatccgtttacaaaaaatgcagcatataagcactactggc

SEQ ID NO: 798380 - DNA, 75 bp, synthetic construct
  source 1..75: mol_type = other DNA
gccgggcctaatgtattacgtaaaggcaagttactggaaagagttattgagagacttgaaaaggaaggcgcgata

SEQ ID NO: 798381 - DNA, 75 bp, synthetic construct
  source 1..75: mol_type = other DNA
ttttgcatccaaacttccgaataatgttgcacgtctggccgcgctgctgagttactatactgaaggtgaatgcgc

SEQ ID NO: 798382 - DNA, 75 bp, synthetic construct
  source 1..75: mol_type = other DNA
ggtgagtttcctgacctggaactatttcatcaatgcgatgggaatgacctggggaagctacttcggcgtcgattt

SEQ ID NO: 798383 - DNA, 75 bp, synthetic construct
  source 1..75: mol_type = other DNA
atgaaaccactgctggatgtgttgatgatcctcgatgccttagaaaaagaaggcagttttgcggcggcgtcggcc

SEQ ID NO: 798384 - DNA, 75 bp, synthetic construct
  source 1..75: mol_type = other DNA
atctgggttacattaccacctactagagaaatcttcttcgctattaaggattaaggctctcgttgtacgctcaca

SEQ ID NO: 798385 - DNA, 75 bp, synthetic construct
  source 1..75: mol_type = other DNA
agagtgactttgacgattcggccgtagccacggatctcaatggattaggaatacacctcaaacaagccgggagcg

SEQ ID NO: 798386 - DNA, 75 bp, synthetic construct
  source 1..75: mol_type = other DNA
ataagggtaggttggaaaaagaatctatattgtcggatcatcattatggtttacgtggagaaaatctattcttta

SEQ ID NO: 798387 - DNA, 75 bp, synthetic construct
  source 1..75: mol_type = other DNA
caggaatctgttttttgtattttttgtgcgtctctgtagttacttgttatttatacactatgtatgttaaagacc

SEQ ID NO: 798388 - DNA, 75 bp, synthetic construct
  source 1..75: mol_type = other DNA
gcgtcacgagttgatgatcctctgactaaagaagcaatccacaaaaatatcgtcgccagcttcagcagcaagcaa

SEQ ID NO: 798389 - DNA, 75 bp, synthetic construct
  source 1..75: mol_type = other DNA
atcttttcccacttacggattttagtccaagaaaaggaagggagaatttagaagcttcttatcttgacggtagat

SEQ ID NO: 798390 - DNA, 75 bp, synthetic construct
  source 1..75: mol_type = other DNA
atgagttaccccgtcgtgaaggggaaatataccggtttggcggtgatgagtttgctattatttattatgagaaag

SEQ ID NO: 798391 - DNA, 75 bp, synthetic construct
  source 1..75: mol_type = other DNA
aaaaggatacgcaatagttttgctgactttcaaaaaccagaatatatttatgatctaggtccctatatcattagc

SEQ ID NO: 798392 - DNA, 75 bp, synthetic construct
  source 1..75: mol_type = other DNA
aggcatgaaacccgtagacatcaaaaacatgggttttcagtgcgtaatgctcactgaaaaaatgatggaagagat

SEQ ID NO: 798393 - DNA, 75 bp, synthetic construct
  source 1..75: mol_type = other DNA
aactttacaagcacaacggactgatcacgattctgcaaataagcgcagctacaccaggctggtgggttgaaacag

SEQ ID NO: 798394 - DNA, 75 bp, synthetic construct
  source 1..75: mol_type = other DNA
agtttgggcatattgcaaatgcgccaggtggtgtggagcggttgcgggaattggtactccaccttgctgtatctg

SEQ ID NO: 798395 - DNA, 75 bp, synthetic construct
  source 1..75: mol_type = other DNA
gccacggcttttgatagccgcttctacatgaaaaatgcctctcacgatcccagcgaccaaatcttcctgatgcaa

SEQ ID NO: 798396 - DNA, 75 bp, synthetic construct
  source 1..75: mol_type = other DNA
accgacgtaattaatattttcgcagcggagctggaaaagtccattgatcgcgctgtgcgacgggcggctaaaaaa

SEQ ID NO: 798397 - DNA, 75 bp, synthetic construct
  source 1..75: mol_type = other DNA
atttaacaacagattttttccatatgaaaaattcagttatgtcaaaactattaaaacactttccgtcaaaattcg

SEQ ID NO: 798398 - DNA, 75 bp, synthetic construct
  source 1..75: mol_type = other DNA
tcccctcgtcattgcttgaaactatttttgatattgaggaatgcacacgagccccgggggaaatgattgcattaa

SEQ ID NO: 798399 - DNA, 75 bp, synthetic construct
  source 1..75: mol_type = other DNA
ccggtaaaggcaacagtgttttcagcgcacagcgtcttttccttaacgcaccgggttcacttcaggccggtggcg

SEQ ID NO: 798400 - DNA, 75 bp, synthetic construct
  source 1..75: mol_type = other DNA
ttgaaaagctgttgcttatcggggccgtgatcggcctggggcaactgatggtcagcaatgagcgaatcacaaccc

SEQ ID NO: 798401 - DNA, 75 bp, synthetic construct
  source 1..75: mol_type = other DNA
ttgccttctgatgcgggaagcaatattacttaccgaacaataaatgattatggtgcacttacccccaaaatgacg

SEQ ID NO: 798402 - DNA, 75 bp, synthetic construct
  source 1..75: mol_type = other DNA
atgtgtatccaccttaacttaatgatttttaccaaaatcattaggggattcatcagggctaattatgttgtgctg

SEQ ID NO: 798403 - DNA, 75 bp, synthetic construct
  source 1..75: mol_type = other DNA
attaatggcggttcacaggtagttaatgagggcggtctggctgaaaactcggtgcttaatgacggcggcacactc

SEQ ID NO: 798404 - DNA, 75 bp, synthetic construct
  source 1..75: mol_type = other DNA
ttctgtaaacggtattagtgaattagcgttaatacattcactttcagagctagggcatcggattactgtttttga

SEQ ID NO: 798405 - DNA, 75 bp, synthetic construct
  source 1..75: mol_type = other DNA
ttgcgaaaaagtatgggtaataatgccatattagctgcaggggtagcaaagaagatttcagagttaagatccccg

SEQ ID NO: 798406 - DNA, 75 bp, synthetic construct
  source 1..75: mol_type = other DNA
aggcaatgatgaaaaagattcttcagttgagcgccaatatcttactactgggatcaacgatggcgaacttgtcat

SEQ ID NO: 798407 - DNA, 75 bp, synthetic construct
  source 1..75: mol_type = other DNA
tttttagaattaattttttcacacccttataaaaacccgacatttgatgagtttgccatgtttatggcctttaat

SEQ ID NO: 798408 - DNA, 75 bp, synthetic construct
  source 1..75: mol_type = other DNA
acagcaaaacacgccacgcaatgatatttgggcgaagttttttctgaggcaggaaaacagttcccgtgcgcaggt

SEQ ID NO: 798409 - DNA, 75 bp, synthetic construct
  source 1..75: mol_type = other DNA
caggaaaacagctcccgtgcgcaggttgatgaagcattacgcgtctattatgcactcgaccccgatgcgttagca

SEQ ID NO: 798410 - DNA, 75 bp, synthetic construct
  source 1..75: mol_type = other DNA
agtatctgagtacggcgatgaaacaaaaaatttggcaacgtgttttatggcatcgaaaacatcatcctgaagcgg

SEQ ID NO: 798411 - DNA, 75 bp, synthetic construct
  source 1..75: mol_type = other DNA
agtcgatacccgcagtatatatcgtgaactgggcgcaacgctgagttacaacatgcgtctggggaacggtatgga

SEQ ID NO: 798412 - DNA, 75 bp, synthetic construct
  source 1..75: mol_type = other DNA
agatactcttttccctactgagcaaattgccagaagagtctctgaaaggatggggtcagttcaaaatcagtataa

SEQ ID NO: 798413 - DNA, 75 bp, synthetic construct
  source 1..75: mol_type = other DNA
gccaacggcagttatcgcagcaacgggctgggcggtcacattgaaaccgggatgcgatttaccgatggtaactga

SEQ ID NO: 798414 - DNA, 75 bp, synthetic construct
  source 1..75: mol_type = other DNA
ggcagcctgagttcacagataaaacactctccaggaaacccggggcggttcagattgtccagaaggaggctaaaa

SEQ ID NO: 798415 - DNA, 75 bp, synthetic construct
  source 1..75: mol_type = other DNA
ggaactctcaaactgccagcttcgtcatgatggcggcgcggcggataaagatgaagttcggatggtgaatgtgcg

SEQ ID NO: 798416 - DNA, 75 bp, synthetic construct
  source 1..75: mol_type = other DNA
tagaagaaacgctgccctggctttcctcttttggcgctgacccaacgggtgggatgacccgtttactttattcgc

SEQ ID NO: 798417 - DNA, 75 bp, synthetic construct
  source 1..75: mol_type = other DNA
aattcaggactggtttaatgaattgcacgacgaaaataatttaatgaaggagggtaatgactccaacttattgat

SEQ ID NO: 798418 - DNA, 75 bp, synthetic construct
  source 1..75: mol_type = other DNA
agattcgagtattgtagaaaacactatcattaaaaatggaggtgaccaaagaacaattaagagccatgcgctgga

SEQ ID NO: 798419 - DNA, 75 bp, synthetic construct
  source 1..75: mol_type = other DNA
ctaagcatgttgagcaacaatccggcggcgcattaattgcttccacgacttccggaacacttatcgaaggaacca

SEQ ID NO: 798420 - DNA, 75 bp, synthetic construct
  source 1..75: mol_type = other DNA
aataatgtcacggcgagtataccttttattcgccagtttaatctgttcatcaacaagaacagccatttgaaaaag

SEQ ID NO: 798421 - DNA, 75 bp, synthetic construct
  source 1..75: mol_type = other DNA
acatcaatggcggcacgcaaaccgttcagaattatggtaaggcgatcaataccgatatcgtctctggcctacaac

SEQ ID NO: 798422 - DNA, 75 bp, synthetic construct
  source 1..75: mol_type = other DNA
caccttttccattgccggcaatttatcgaccaatgcgttgctggaaaatggcggtaatttattggtattagcagg

SEQ ID NO: 798423 - DNA, 75 bp, synthetic construct
  source 1..75: mol_type = other DNA
tgggtcaggactccgccacaaaggttaactctggcgggcaatatacccttgggcggtcaaaagatgagtttcagg

SEQ ID NO: 798424 - DNA, 75 bp, synthetic construct
  source 1..75: mol_type = other DNA
gtggcgttaaaaatgacagaatgcacatcttgtcaccacaaataaacttatttgataaagaaatacagaatcgaa

SEQ ID NO: 798425 - DNA, 75 bp, synthetic construct
  source 1..75: mol_type = other DNA
tcgaaaaatgaagtggtcgctgacggcaatgatagcgccacaatgaccgcgacagtccgggatgcaaaaggcaac

SEQ ID NO: 798426 - DNA, 75 bp, synthetic construct
  source 1..75: mol_type = other DNA
gagttggagttagctcatgagcctataaacgtaattaatgctgaaagtgttgaagctgccgtaaacgagccagaa

SEQ ID NO: 798427 - DNA, 75 bp, synthetic construct
  source 1..75: mol_type = other DNA
ataaaggccgtctgacgggcgaacggcagactgacggagaagacggaccgcatcccgacgggtgtgatacggacg

SEQ ID NO: 798428 - DNA, 75 bp, synthetic construct
  source 1..75: mol_type = other DNA
attaaaatggttgccggataacgatgtggacgctgtattgtgggcctgggaatctctgaaaaaacaccagtccgg

SEQ ID NO: 798429 - DNA, 75 bp, synthetic construct
  source 1..75: mol_type = other DNA
tgagttcgatttttcacaaatatttagtctggcgggaactgttttatctatgtcagtagattatccttataatgt

SEQ ID NO: 798430 - DNA, 75 bp, synthetic construct
  source 1..75: mol_type = other DNA
aaagatcagttcgacaatgaggtgaataatcttccggtaacattcagctcagcctcttcaggactcaccctgacc

SEQ ID NO: 798431 - DNA, 75 bp, synthetic construct
  source 1..75: mol_type = other DNA
cgctgattgccctgaaatggtgggatgtagactggccccctgaatctccagacaaccagtatcacttaaataagt

SEQ ID NO: 798432 - DNA, 75 bp, synthetic construct
  source 1..75: mol_type = other DNA
ccggcgctataacgccaggtatcccgagcggggaggtgcgaaaaaggattcaggaagcctgactcccactcagca

SEQ ID NO: 798433 - DNA, 75 bp, synthetic construct
  source 1..75: mol_type = other DNA
aaaccggcgggaaaggcaaagccgcttcccatgccgattatattgcgcgtgagggaaaatatgcccgtgaaaaag

SEQ ID NO: 798434 - DNA, 75 bp, synthetic construct
  source 1..75: mol_type = other DNA
ccctattgcggagatagtggacgagccaacacctgaacttgatgctcgaagcgctgagaccaccgatatagctcc

SEQ ID NO: 798435 - DNA, 75 bp, synthetic construct
  source 1..75: mol_type = other DNA
catgcgatagccgcatggtttttcggcatacaggaggtagaaattgcgttatcgggtaataaccgagtggcaaaa

SEQ ID NO: 798436 - DNA, 75 bp, synthetic construct
  source 1..75: mol_type = other DNA
atggttatctctctggctggtatcgtcgcgcaatcacgctatacgggggatgatattaacgcactgatggaaacg

SEQ ID NO: 798437 - DNA, 75 bp, synthetic construct
  source 1..75: mol_type = other DNA
atttactgtcgttgccatatttaataatggcttcgattatcataaagcttaaagttaaaagtataattgatgatt

SEQ ID NO: 798438 - DNA, 75 bp, synthetic construct
  source 1..75: mol_type = other DNA
gcgcaacagccaacggttcatatcgtggaaagacgacattgttggccgttttggtaggtggatggcttcttgggc

SEQ ID NO: 798439 - DNA, 75 bp, synthetic construct
  source 1..75: mol_type = other DNA
cgggaagcattccttctgacgcaataccgtgtgatgcaaaaagcgcaacagcaacatgcccgctgaaaccatttg

SEQ ID NO: 798440 - DNA, 75 bp, synthetic construct
  source 1..75: mol_type = other DNA
ctgcgcgcccgcgcccgacgctatgtccgcaaatacggcagaccctctctcatcatgctggactatctgcagctt

SEQ ID NO: 798441 - DNA, 75 bp, synthetic construct
  source 1..75: mol_type = other DNA
tatatcaattgtttggatttgcagcaataaaaagaaaaattttaaacttttttttcaatattaagaataaaaaga

SEQ ID NO: 798442 - DNA, 75 bp, synthetic construct
  source 1..75: mol_type = other DNA
gcgtgtatcggttatgatcaaatatccggggttccacgttttacgtttggtcaaatcagcctgttacaaggggtg

SEQ ID NO: 798443 - DNA, 75 bp, synthetic construct
  source 1..75: mol_type = other DNA
ctgggctcagaacgtcagcaaatccggcgatcaggtcgtcatggacgtttacatcaacaaggctgttgctgagac

SEQ ID NO: 798444 - DNA, 75 bp, synthetic construct
  source 1..75: mol_type = other DNA
ctaacgagcagttccgcaccgactttcccgagttcgccgataaaacccgctaccctgacccctcagtgaatttct

SEQ ID NO: 798445 - DNA, 75 bp, synthetic construct
  source 1..75: mol_type = other DNA
cacttaatctgatcggtaaaaaaacagatattgaaaaacagatgtatggtaagtttttaaaatataaaactgata

SEQ ID NO: 798446 - DNA, 75 bp, synthetic construct
  source 1..75: mol_type = other DNA
cttatgaggctgagcaggccgtactgggcggactgatgcttgataacgaccggtgggatgaggtgatactgcaaa

SEQ ID NO: 798447 - DNA, 75 bp, synthetic construct
  source 1..75: mol_type = other DNA
gtgggctcagaacgtcagcaaggccaacgacaaggtcgtgatggacgtttacgtcaataaggctgtggctgacac

SEQ ID NO: 798448 - DNA, 75 bp, synthetic construct
  source 1..75: mol_type = other DNA
ctctaccggccttctcaccaacaaagagaagaagtcgggcgagtcgaaggagaaaaagtacacctggatcgcccg

SEQ ID NO: 798449 - DNA, 75 bp, synthetic construct
  source 1..75: mol_type = other DNA
acccagcgcactatgcggatgccattcgttataatgctcgaacgcctctgcaaggttctttgctgccgttaaccc

SEQ ID NO: 798450 - DNA, 75 bp, synthetic construct
  source 1..75: mol_type = other DNA
ttaacgacggctttatctttctggggcgcaggattatccgcaaacgcagtcgttacggcggtatgcgggtggtca

SEQ ID NO: 798451 - DNA, 75 bp, synthetic construct
  source 1..75: mol_type = other DNA
atcaatcacggagctgattatgcgccgggctggcgacgcgactacaatacgaaaaataagcaaccggcttttgca

SEQ ID NO: 798452 - DNA, 75 bp, synthetic construct
  source 1..75: mol_type = other DNA
taaaatcatcacggatacgggctgcggaaatattcatctcgccggcgctgtcattgaggtgatggggataaagtc

SEQ ID NO: 798453 - DNA, 75 bp, synthetic construct
  source 1..75: mol_type = other DNA
atcaggatgagccgctgacgaataacgggttctggccagatctgaacctgaaggactttcaggcgcagcggtcac

SEQ ID NO: 798454 - DNA, 75 bp, synthetic construct
  source 1..75: mol_type = other DNA
aaatcaaaaatggcgtaccgacggtaggagtcatcgacacatccggaaaacctgtcgttgtagcccaggacaaac

SEQ ID NO: 798455 - DNA, 75 bp, synthetic construct
  source 1..75: mol_type = other DNA
gatttaagatcaccaccaggtaatcggtatgaggaactgtcagggaagctaaatggctattcatcagtaagggtg

SEQ ID NO: 798456 - DNA, 75 bp, synthetic construct
  source 1..75: mol_type = other DNA
aatgaaccggctctatggctttaccaagtttattattgtggtgccgtccatcgccattaaagaaggtgtgcagaa

SEQ ID NO: 798457 - DNA, 75 bp, synthetic construct
  source 1..75: mol_type = other DNA
taaaaaacaaaagaaaaacaaatattgaactaatacctactgatagtttaattctggcagataattattttggtt

SEQ ID NO: 798458 - DNA, 75 bp, synthetic construct
  source 1..75: mol_type = other DNA
gctaacagatgtgcgactaaaatctataacatgtactgtgaatttatactattatgtaaaaaaaatctcagtatc

SEQ ID NO: 798459 - DNA, 75 bp, synthetic construct
  source 1..75: mol_type = other DNA
gccccatacagcacagattgtgtcggtgctgaaaaaggtatccggtaacctgaacatcaagaaccgtgatgacaa

SEQ ID NO: 798460 - DNA, 75 bp, synthetic construct
  source 1..75: mol_type = other DNA
atggccaatgaatcctacgagcaatttgcagagcaattgcagaaggaaattgaaaacgaagaaggtatcaagttt

SEQ ID NO: 798461 - DNA, 75 bp, synthetic construct
  source 1..75: mol_type = other DNA
ggtggccgcgatgtatatgacggctacattattgatgacatctactgcgaacagggcaatgaatacatcagcttt

SEQ ID NO: 798462 - DNA, 75 bp, synthetic construct
  source 1..75: mol_type = other DNA
ttgtttccgtactttgccggattgttcgttgcacactacatgacgctctgggcggcagacagccgggcgatgctg

SEQ ID NO: 798463 - DNA, 75 bp, synthetic construct
  source 1..75: mol_type = other DNA
aattgattgtggtgatattagtgctaaagatgcaaaaagcacacagaaagcctggaattgtcgtcactccagaca

SEQ ID NO: 798464 - DNA, 75 bp, synthetic construct
  source 1..75: mol_type = other DNA
ttgcagacacagggataactgatcgtgtcaatgacataataaatgacagattctggagtgatgggaaaaaacccg

SEQ ID NO: 798465 - DNA, 75 bp, synthetic construct
  source 1..75: mol_type = other DNA
cttcaatatttctggttcggtatttgtcgaacaggaagttgattccagcattcgtgccagcgcgcaggggctctt

SEQ ID NO: 798466 - DNA, 75 bp, synthetic construct
  source 1..75: mol_type = other DNA
ctaacagtattcatagcagcgcaggtaatgactccaacttattgatagtgttttatgttcagataatgcccgatg

SEQ ID NO: 798467 - DNA, 75 bp, synthetic construct
  source 1..75: mol_type = other DNA
gcagctatttgcaacgggcggttattcctctgaaaggcgaactgaccgtaggtgatgattatactgcaggcgatt

SEQ ID NO: 798468 - DNA, 75 bp, synthetic construct
  source 1..75: mol_type = other DNA
tcaattttgttgagataacgccagagaaggggattgccgcctgtttgacgactgaaagcctggatgcaatgggcg

SEQ ID NO: 798469 - DNA, 75 bp, synthetic construct
  source 1..75: mol_type = other DNA
ttagctcaacaattggattcttttccttaagtgctattgcagctacaggaccttcaattaattcaaaaacattaa

SEQ ID NO: 798470 - DNA, 75 bp, synthetic construct
  source 1..75: mol_type = other DNA
gtgctctggaagttgtgttcataacaaaacgcccccgaccatcaaggccgagggcagttaagatatcaaaaaccc

SEQ ID NO: 798471 - DNA, 75 bp, synthetic construct
  source 1..75: mol_type = other DNA
ctggcaaatgttcttggttgcgacccgatgtggctgttaaccggtaaaccaacagcgggagatacttgcgcatga

SEQ ID NO: 798472 - DNA, 75 bp, synthetic construct
  source 1..75: mol_type = other DNA
gaacggcgctacccggcagcaggtagccgatgtgataggtgtagacgtgaaaacaatctacaagtacctcccggc

SEQ ID NO: 798473 - DNA, 75 bp, synthetic construct
  source 1..75: mol_type = other DNA
atggataaaaaagaactctcagaaaaaaaaataattaatggagggtggtattgtctatttaattatacaggtagt

SEQ ID NO: 798474 - DNA, 75 bp, synthetic construct
  source 1..75: mol_type = other DNA
gcctgaccagtggcagtggtgaaaacagccgcctggtgaccagcgctatcactgccgacacggagcaccgtttca

SEQ ID NO: 798475 - DNA, 75 bp, synthetic construct
  source 1..75: mol_type = other DNA
ttgtgacctcgttgaaaccgataatagttgtgtggagaactgtttaaaagggaagtttaaagaggtaaggccgcg

SEQ ID NO: 798476 - DNA, 75 bp, synthetic construct
  source 1..75: mol_type = other DNA
tgattggaatcacctttgtttattttatgtgctggttacaaataaagtgtgtgtttagtgttattttaagcaact

SEQ ID NO: 798477 - DNA, 75 bp, synthetic construct
  source 1..75: mol_type = other DNA
gcgcatattactttacgccgccgcaaattcgataacgtatacggtggacagcacagccgttattacgtcgaatgc

SEQ ID NO: 798478 - DNA, 75 bp, synthetic construct
  source 1..75: mol_type = other DNA
gagcacgtacttgtcttcgacggccttgtgcctgttatatgttcccttcgccccggtgatgtgtttgccgtcgct

SEQ ID NO: 798479 - DNA, 75 bp, synthetic construct
  source 1..75: mol_type = other DNA
tcgataacgacccgcttgttatccggctgcgcgagatcatgcgccgcgcgaacggagggcaggactggcggcctg

SEQ ID NO: 798480 - DNA, 75 bp, synthetic construct
  source 1..75: mol_type = other DNA
aaaactgccaagactggtctaatgattctttagaaacatgtaagatgaagtgctccggaaataacattggacgtt

SEQ ID NO: 798481 - DNA, 75 bp, synthetic construct
  source 1..75: mol_type = other DNA
ggtagtcgcgcgccagaagccattatgcaggaggagatgcgaagatattatactgtcgccacattttcaggtatt

SEQ ID NO: 798482 - DNA, 75 bp, synthetic construct
  source 1..75: mol_type = other DNA
cagtatatcaaaagacagatctttcgaaattcgttaaagctattgaatctgttgtcaatcaaacaaagttgccac

SEQ ID NO: 798483 - DNA, 75 bp, synthetic construct
  source 1..75: mol_type = other DNA
cagtccaatcatccgaaaagaactggataaattaatctataaacccctgcagactgaaaaaccatccacgttctc

SEQ ID NO: 798484 - DNA, 75 bp, synthetic construct
  source 1..75: mol_type = other DNA
agctgggcatgcagatagatggccttgataaacagattaacagcgtggcacggcagagcgaaaactgtaagcgcc

SEQ ID NO: 798485 - DNA, 75 bp, synthetic construct
  source 1..75: mol_type = other DNA
tggtgaatcggtgaaggtctggcgctataaaaatgccgtctggtcactgaccaaagccctgctgattgaggggta

SEQ ID NO: 798486 - DNA, 75 bp, synthetic construct
  source 1..75: mol_type = other DNA
ggagataaacggcgagagcgtgaaggtgtatcgctaccgtcgtgcggtttattccattgcccgcgccctggtgat

SEQ ID NO: 798487 - DNA, 75 bp, synthetic construct
  source 1..75: mol_type = other DNA
gaaaaacacgcctgacggcaaaacgatagtttcccctgaaaaattcccggggcgttcatcaacaaatcattctat

SEQ ID NO: 798488 - DNA, 75 bp, synthetic construct
  source 1..75: mol_type = other DNA
tgcttgtgggtactttatatctcggatatgtatttgatgtgcatcacattatgtcgattcttgaatacatccttg

SEQ ID NO: 798489 - DNA, 75 bp, synthetic construct
  source 1..75: mol_type = other DNA
ttttttgcattggcgatcaaagtattttggagtaatcataaatcactgctttttaaaactcttgatggagatatc

SEQ ID NO: 798490 - DNA, 75 bp, synthetic construct
  source 1..75: mol_type = other DNA
aatgtattttaggtattatttttcagggagttgggaggaatatagaatgcttccgacatttttatctgtgagaat

SEQ ID NO: 798491 - DNA, 75 bp, synthetic construct
  source 1..75: mol_type = other DNA
ttgtctcctcagttctgttggttgctttaacgaatggtgcttatgcagccacttctacaaccgttaatatcgtag

SEQ ID NO: 798492 - DNA, 75 bp, synthetic construct
  source 1..75: mol_type = other DNA
gcaccgggcaaggccaccgtatcgatattttacccacgccgcccgccacgctggccccggagattttcccggacc

SEQ ID NO: 798493 - DNA, 75 bp, synthetic construct
  source 1..75: mol_type = other DNA
cagatgatttacgacgcaggacgcgagtacccaagaccagaactggtcgcgaacgtgctgcgtccgctgcgcagt

SEQ ID NO: 798494 - DNA, 75 bp, synthetic construct
  source 1..75: mol_type = other DNA
gacctggattatccctctgctgatatacgagcgaagatcagtaaagatatagaaggtggtatccctggctattag

SEQ ID NO: 798495 - DNA, 75 bp, synthetic construct
  source 1..75: mol_type = other DNA
catcattcagacgcagccaggacaaagtgcgcaggatattgcgcgggaggtggcacgccagcttgatgaacgtga

SEQ ID NO: 798496 - DNA, 75 bp, synthetic construct
  source 1..75: mol_type = other DNA
atttataatgctgaagttgctggatgggataagttacggcaacgattgcttgatgccagaaataaaatcacctct

SEQ ID NO: 798497 - DNA, 75 bp, synthetic construct
  source 1..75: mol_type = other DNA
tggtatttactcccagcaaaggttggaatggaccctttggcaagatttgcatacaaatggtcagttagttagaca

SEQ ID NO: 798498 - DNA, 75 bp, synthetic construct
  source 1..75: mol_type = other DNA
atggtttccccccaggcactggaagccagacgtaaggtcatcaaagagacaatccttagctggcttttggttgac

SEQ ID NO: 798499 - DNA, 75 bp, synthetic construct
  source 1..75: mol_type = other DNA
ccggggaccggggcatgtgctgaatggcgacaatacagacgaaaacaaacagccgaatctgggcaaagacggtaa

SEQ ID NO: 798500 - DNA, 75 bp, synthetic construct
  source 1..75: mol_type = other DNA
aagcatcctcggcacgatattgcaggaaaacggggtgaccgagtggagtccgctgttcagcgagccgcatccttc

SEQ ID NO: 798501 - DNA, 75 bp, synthetic construct
  source 1..75: mol_type = other DNA
tcattgaaatcctttactctctaaagaataaatattgtattaagctattaagcgctcaggatcgggcatttattt

SEQ ID NO: 798502 - DNA, 75 bp, synthetic construct
  source 1..75: mol_type = other DNA
atactcattctttaaaatttattaactgtcatttttttaatgttgatatgataagagttaatttcagcaaatgtc

SEQ ID NO: 798503 - DNA, 75 bp, synthetic construct
  source 1..75: mol_type = other DNA
tttttaatatgataaacaatatatctgatcaagcgtcatcatttccatgcacacaattgaatcaaagtgataatt

SEQ ID NO: 798504 - DNA, 75 bp, synthetic construct
  source 1..75: mol_type = other DNA
tgaatatattgactggaatgcaatttcatataagacattaccgcacgacccggcagagattctttttcagtctgt

SEQ ID NO: 798505 - DNA, 75 bp, synthetic construct
  source 1..75: mol_type = other DNA
ggtgcgttggaaaaatgcgcaaagtgcgacagcgttggtccgaagtttttcactacgcaattgcaacgggccggg

SEQ ID NO: 798506 - DNA, 75 bp, synthetic construct
  source 1..75: mol_type = other DNA
ggcagaaggaaagaaccctagtgaggttcgaaaagagcaaaagctggctctacaaacagagtcagagaacgcctt

SEQ ID NO: 798507 - DNA, 75 bp, synthetic construct
  source 1..75: mol_type = other DNA
tatattgaagaagtgttgctttgaaaacggcagtttaggtgatgttaaaataacaaatagcaatgtaataaacag

SEQ ID NO: 798508 - DNA, 75 bp, synthetic construct
  source 1..75: mol_type = other DNA
tttttaatatgataaacaatatatctgatcaagcatcatcatttccaggcacacaactgaatcaaagtgataatt

SEQ ID NO: 798509 - DNA, 75 bp, synthetic construct
  source 1..75: mol_type = other DNA
gcgaattacaagtttcgatgcaatcactattactcaaagcaggtttaaacacagaacaggttgcgcaactggagt

SEQ ID NO: 798510 - DNA, 75 bp, synthetic construct
  source 1..75: mol_type = other DNA
aagcatattgaaaaaatgttgttttgaaaacggcagtttaggtgatgttaaaataacaaatagcaatatagtaaa

SEQ ID NO: 798511 - DNA, 75 bp, synthetic construct
  source 1..75: mol_type = other DNA
acgtaaagattgcagcggatgctttccttgacattcttttctctcttaaaaataaatattgcattaaactattaa

SEQ ID NO: 798512 - DNA, 75 bp, synthetic construct
  source 1..75: mol_type = other DNA
acgtaatgtatcgaatgggaaacttgaaagacaaaaatttcttttcccactggactatgagaataaattacaaca

SEQ ID NO: 798513 - DNA, 75 bp, synthetic construct
  source 1..75: mol_type = other DNA
aatttgtatttaccagaaaagataaggggcatataacaggtgcatatcagtcggcccttagtgttaataaggacc

SEQ ID NO: 798514 - DNA, 75 bp, synthetic construct
  source 1..75: mol_type = other DNA
aacagcgatcaggaagaacgcacaacaacaaccagaacaacaacagtacaggcaaacgacataaccagcgttctg

SEQ ID NO: 798515 - DNA, 75 bp, synthetic construct
  source 1..75: mol_type = other DNA
ttaatggcgagctggcggaaattgccgatatcagccttgttcttaccctgaatgctgccggtcgtggcttcattt

SEQ ID NO: 798516 - DNA, 75 bp, synthetic construct
  source 1..75: mol_type = other DNA
cgatataagccttgttcttaccctgaatgctgccggtcgtggcttcatttctgttaacaatctgtcacccgaaca

SEQ ID NO: 798517 - DNA, 75 bp, synthetic construct
  source 1..75: mol_type = other DNA
acccgtaccgaggtgagcaccctctgcatcagccagtttcgctacagcgcacaaatccgcccttcttccgtggtg

SEQ ID NO: 798518 - DNA, 75 bp, synthetic construct
  source 1..75: mol_type = other DNA
accggaatgaactgctgcatggagaaacgctttacctggataatccaagatccaacaaaaaaggaagaaccgtgc

SEQ ID NO: 798519 - DNA, 75 bp, synthetic construct
  source 1..75: mol_type = other DNA
atataaaaacatgagaagaaagttaaaatgcttcaggactaaaattcttgataatagcaagtgtatcttacatgt

SEQ ID NO: 798520 - DNA, 75 bp, synthetic construct
  source 1..75: mol_type = other DNA
acaggcacacccaccaacagtggtgaatttaccggtgatgccagacagtcatcctccctgcgggaaaaataccgc

SEQ ID NO: 798521 - DNA, 75 bp, synthetic construct
  source 1..75: mol_type = other DNA
atcgaattttaattagttttgatgtggtgactgcaggcaaaaaaaatcccgccggagaaagcggggaagtgaaat

SEQ ID NO: 798522 - DNA, 75 bp, synthetic construct
  source 1..75: mol_type = other DNA
aactccagatgaaccacaaggaaagcaacagtgttcgtgctgcctatacacataaggccaaactgtcaacgacgg

SEQ ID NO: 798523 - DNA, 75 bp, synthetic construct
  source 1..75: mol_type = other DNA
ttaatggcgaacgggtggaaattgccgatataagccttgttcttaccctgaatgctgccggtcgtggcttcattt

SEQ ID NO: 798524 - DNA, 75 bp, synthetic construct
  source 1..75: mol_type = other DNA
ctgaaggggggatggaatttttatcagtatccgctgaatccggttcagtatatagattcaatgggactggcatca

SEQ ID NO: 798525 - DNA, 75 bp, synthetic construct
  source 1..75: mol_type = other DNA
gatggcgtacgcctgaatctggcgggggtgagtggttctgccgaccttagccagttccctattgcgcttgtccag

SEQ ID NO: 798526 - DNA, 75 bp, synthetic construct
  source 1..75: mol_type = other DNA
gctggcagtggagatatctggctatctggttacggggtgttttcatcagagcaggcgcgtaaagactggcaaaac

SEQ ID NO: 798527 - DNA, 75 bp, synthetic construct
  source 1..75: mol_type = other DNA
ataaccacactatcggcattggtgctcatgcccattctgtcattattggtccccacggacacaccatcaccgtta

SEQ ID NO: 798528 - DNA, 75 bp, synthetic construct
  source 1..75: mol_type = other DNA
atgatgacctactgcgcacgcatcgttgctatcgggctgtttgtcgccgacggactggcagacaggacgcttatc

SEQ ID NO: 798529 - DNA, 75 bp, synthetic construct
  source 1..75: mol_type = other DNA
actgtattcaattttaaaacaaacatcattatatacaaagataattttctttttgatgcttttggcgagtctttc

SEQ ID NO: 798530 - DNA, 75 bp, synthetic construct
  source 1..75: mol_type = other DNA
aatcaacaaaagttttacaaatagaaataagcgcagaggttctaaaggccgtataccgtcaaagcaatacaaatt

SEQ ID NO: 798531 - DNA, 75 bp, synthetic construct
  source 1..75: mol_type = other DNA
ttgttcatgatcagttctgccagccggtgatcgaccgcagagttaaaggcttccagctccgcaggggtaagttta

SEQ ID NO: 798532 - DNA, 75 bp, synthetic construct
  source 1..75: mol_type = other DNA
gctatcgccaacgcggtgtataacgccaccggtattcgggtacgcgattatcccatcactctggataagctgctc

SEQ ID NO: 798533 - DNA, 75 bp, synthetic construct
  source 1..75: mol_type = other DNA
cccaataacaccacgcaccgccccgccacccttcagcacctgcgtattggtgctgaccagagcgggaaaatcacc

SEQ ID NO: 798534 - DNA, 75 bp, synthetic construct
  source 1..75: mol_type = other DNA
atccgctcccggcggatttgtcctactcaggagagcgttcaccgacaaacaacagataaaacgaaaggcccagtc

SEQ ID NO: 798535 - DNA, 75 bp, synthetic construct
  source 1..75: mol_type = other DNA
ctgctgatcctgcccggcgatcggctgctgctggcgagccatgactacctggtgaccgccgtgggtaaagaggca

SEQ ID NO: 798536 - DNA, 75 bp, synthetic construct
  source 1..75: mol_type = other DNA
caagagagataggaatagagcgtgcttatcttcaaaagaagataaaagagttagggataaaagaagaggttaagg

SEQ ID NO: 798537 - DNA, 75 bp, synthetic construct
  source 1..75: mol_type = other DNA
gcggtgaaacgtccggttaaagtgatgctcccccgcccctctattcccaataacaccacgcaccgccccgccacc

SEQ ID NO: 798538 - DNA, 75 bp, synthetic construct
  source 1..75: mol_type = other DNA
atgctggcggcattggtacagtgggcgtggaaggtggagcgcttaataatctggcttatgtgtttggtacatctt

SEQ ID NO: 798539 - DNA, 75 bp, synthetic construct
  source 1..75: mol_type = other DNA
tttcacgataaatgcacttcataataaatacggaggattgttcttaagacactattctaatgaaatgcaaacagc

SEQ ID NO: 798540 - DNA, 75 bp, synthetic construct
  source 1..75: mol_type = other DNA
ccgtttatactgggggttctcagaatcgaaaaatacttgcctgcttatgaaattatcaaggttgcttccttgttt

SEQ ID NO: 798541 - DNA, 75 bp, synthetic construct
  source 1..75: mol_type = other DNA
attgtcgggatctgcacagccattttcgttgccagcgtattgtggttaagttcgttagccgccagtcgtatgagc

SEQ ID NO: 798542 - DNA, 75 bp, synthetic construct
  source 1..75: mol_type = other DNA
ttgtgatgaactccccctatgcgctggagaatgaacctaccacctatatttcctacccgataaaggaaattatca

SEQ ID NO: 798543 - DNA, 75 bp, synthetic construct
  source 1..75: mol_type = other DNA
agtgtttagtatgtgtattatactttttttatttgctaaaaaaaatgaagatctctttctttttctttctctcac

SEQ ID NO: 798544 - DNA, 75 bp, synthetic construct
  source 1..75: mol_type = other DNA
gggcggccaaagatttatactagtaacaaatgttatggcattaataacattatgtcttttatcatttgtttttaa

SEQ ID NO: 798545 - DNA, 75 bp, synthetic construct
  source 1..75: mol_type = other DNA
cggcggtaatccatttactgccatggtgattggtggagcgttagtgcatccattaattctgactgctttcgagaa

SEQ ID NO: 798546 - DNA, 75 bp, synthetic construct
  source 1..75: mol_type = other DNA
atggtggtggaaagcggtggccagtttcaggtggtcataggtaaccatgtggccgatgtcttcctggcggttaac

SEQ ID NO: 798547 - DNA, 75 bp, synthetic construct
  source 1..75: mol_type = other DNA
ctgaacaacgagctgacttaccaactaatataaaagatattcaaagcctgtatcaaaaaatgacgaagttatata

SEQ ID NO: 798548 - DNA, 75 bp, synthetic construct
  source 1..75: mol_type = other DNA
attgtcgggatctgcacagccattttcgttgccagcgtattgtggttaagttcgttagccgccagtcgtatcacc

SEQ ID NO: 798549 - DNA, 75 bp, synthetic construct
  source 1..75: mol_type = other DNA
attgtcgggatctgcacagccattttcgttgccagcgtattgtggttaagttcgttagccgccagtcgtataaac

SEQ ID NO: 798550 - DNA, 75 bp, synthetic construct
  source 1..75: mol_type = other DNA
ctttcagctccaaatctcaggataaacatgcgcttttccccatttttactgcgagttggcgagctcatcgtataa

SEQ ID NO: 798551 - DNA, 75 bp, synthetic construct
  source 1..75: mol_type = other DNA
gtggcggatccggaaggtggcgaacgcgcggtcatcaccttagatggcaaatatctgccgaccaaaccgttctga

SEQ ID NO: 798552 - DNA, 75 bp, synthetic construct
  source 1..75: mol_type = other DNA
actgctgaatatgcacatgaattacctgaacttaccaatcactctgcacttgcgcatgcctctctctgccttgag

SEQ ID NO: 798553 - DNA, 75 bp, synthetic construct
  source 1..75: mol_type = other DNA
gtcgagagccgctacctctacgacccgctgggacggcgaatggcgaaacgggtatggcggcgggagcgtgacctg

SEQ ID NO: 798554 - DNA, 75 bp, synthetic construct
  source 1..75: mol_type = other DNA
accactaccactacgacagccagcaccgtctggtgttctacacgcggatacagcatggcgagccactggtcgaga

SEQ ID NO: 798555 - DNA, 75 bp, synthetic construct
  source 1..75: mol_type = other DNA
gttaattattggttaaatagtttgccaataaagataataaaattaagcaaaaatgtcggtttgggtcaggccctg

SEQ ID NO: 798556 - DNA, 75 bp, synthetic construct
  source 1..75: mol_type = other DNA
gttatagctaaatggaaaaaatgtttacctataaaaataatttcattggataaaaatgttgggttgggtaatgct

SEQ ID NO: 798557 - DNA, 75 bp, synthetic construct
  source 1..75: mol_type = other DNA
caaccccggttatcgcttgtcatagccgtacaccggaagtgttccggctagccgccaaccacagcaagcagcaac

SEQ ID NO: 798558 - DNA, 75 bp, synthetic construct
  source 1..75: mol_type = other DNA
tgattcactcgtctgctttcagacgattacaatccaaaacacaggttcttggtctgggtgaaagtgatttctacc

SEQ ID NO: 798559 - DNA, 75 bp, synthetic construct
  source 1..75: mol_type = other DNA
tgatgatgttaagttattcaaaacggtaaaaactaccgcgttgaataagcacaagaaaacaatatataaagcact

SEQ ID NO: 798560 - DNA, 75 bp, synthetic construct
  source 1..75: mol_type = other DNA
cagcgcttgatcgccgggatcttgccagatctgctggtgaaaggcggcgactataaaccagaagagattgccggg

SEQ ID NO: 798561 - DNA, 75 bp, synthetic construct
  source 1..75: mol_type = other DNA
catgccaaaccccaccaataagcagaaagagtacggtgggctgtatgaggccgacaacggcgtcatggtcaccgg

SEQ ID NO: 798562 - DNA, 75 bp, synthetic construct
  source 1..75: mol_type = other DNA
gctactaccagcgccatgacctgcacatcattgacaccaaatactggaacatctcaggcgcgggtgccggtatcg

SEQ ID NO: 798563 - DNA, 75 bp, synthetic construct
  source 1..75: mol_type = other DNA
tgacggctctaacgacaatgaaaccaccttcggcgacgatgcgcagttcgggttgcgtcagctgaatctgcagat

SEQ ID NO: 798564 - DNA, 75 bp, synthetic construct
  source 1..75: mol_type = other DNA
gtggcgatatattaagagtgaattttatttagcaaaagtgaaaattgaatataatatccaaagtgttccttatgc

SEQ ID NO: 798565 - DNA, 75 bp, synthetic construct
  source 1..75: mol_type = other DNA
tcgagacaattgggcatcttgggaaatttgtgccttgaaaatggcttaccgcccatcaactgcattgttgtcaac

SEQ ID NO: 798566 - DNA, 75 bp, synthetic construct
  source 1..75: mol_type = other DNA
tgcaacaaaatttatcccgggcgtagcccctataacttttacccaagcccatactaacgttgacgaacaagacca

SEQ ID NO: 798567 - DNA, 75 bp, synthetic construct
  source 1..75: mol_type = other DNA
tcgaaattatcaggcgaatacctgactgtgcaactgagccatttctctgcaaatgtgacgatggtgagctttatg

SEQ ID NO: 798568 - DNA, 75 bp, synthetic construct
  source 1..75: mol_type = other DNA
cgatggcattatcagcgcgattaacttcaaactcgacgttaagaaagtggcggacccggaaggtggcgaacgtgc

SEQ ID NO: 798569 - DNA, 75 bp, synthetic construct
  source 1..75: mol_type = other DNA
acggcaccggtctggcagaagcctttgtgaccgcggctttgctgggtcagcaggcgcttcctgccgacgccgccc

SEQ ID NO: 798570 - DNA, 75 bp, synthetic construct
  source 1..75: mol_type = other DNA
gctctctcatttgccgagcttgccgacggcaccggtctggcagaagccttcgtgaccgctgctttgctggggcag

SEQ ID NO: 798571 - DNA, 75 bp, synthetic construct
  source 1..75: mol_type = other DNA
cgaaagatttggtggaagtgctaacaggcgtcagcaatagcattggaaatgatcaaaaaaagagcaacccaacaa

SEQ ID NO: 798572 - DNA, 75 bp, synthetic construct
  source 1..75: mol_type = other DNA
aggactctccctaggattcttcccgtttcgatattacgaatttgctataatttacagcgaaacaatgtcaattta

SEQ ID NO: 798573 - DNA, 75 bp, synthetic construct
  source 1..75: mol_type = other DNA
aaaaaactgaggaattctcagtattaatgtctttatattgtaacgaaaaacctgaatttttaaatcaatgcttaa

SEQ ID NO: 798574 - DNA, 75 bp, synthetic construct
  source 1..75: mol_type = other DNA
atgatcctctattacatctaatccgaagcaatattatgaaacccacagctgtatatgctgattatattaataaca

SEQ ID NO: 798575 - DNA, 75 bp, synthetic construct
  source 1..75: mol_type = other DNA
ttttaaccagtcatcacggaataataagaaatgaagaaaatgaatgttattgtctaggtgctttgcaggttccat

SEQ ID NO: 798576 - DNA, 75 bp, synthetic construct
  source 1..75: mol_type = other DNA
cgcttaccgttatgtcatcccgaaaccgatccgcaggggtttaaagcattacgccaggcctatgaagaggcgctg

SEQ ID NO: 798577 - DNA, 75 bp, synthetic construct
  source 1..75: mol_type = other DNA
taaaaaaatcattgatataaattcagttaatatttgtagtgatgataaaaatataaaattgagagttaatagtac

SEQ ID NO: 798578 - DNA, 75 bp, synthetic construct
  source 1..75: mol_type = other DNA
cagtaaataaaataaaagataagaataaaaaaatcattgatataaattcagttaatatttgtagtgatgataaaa

SEQ ID NO: 798579 - DNA, 75 bp, synthetic construct
  source 1..75: mol_type = other DNA
ccagcattatcaaaatcagtttaacggtgctggttataggttatgctctcggcaaaatcgcgatgttgtttagtt

SEQ ID NO: 798580 - DNA, 75 bp, synthetic construct
  source 1..75: mol_type = other DNA
tgagcgactcgcgctcgtttgagaacgccattcttgagcgggatatgcgcatgaaaaaggcgggctggatcgtgg

SEQ ID NO: 798581 - DNA, 75 bp, synthetic construct
  source 1..75: mol_type = other DNA
cttgcgggaacggtcaataatgaactcgggtatcagttatttcgtgattttgcagaaaataaggggatgttccgc

SEQ ID NO: 798582 - DNA, 75 bp, synthetic construct
  source 1..75: mol_type = other DNA
ttattaagcaagggaaagatcataagaccatatctgaagaatctaaatccacaccaacttgtcgctgattgcatt

SEQ ID NO: 798583 - DNA, 75 bp, synthetic construct
  source 1..75: mol_type = other DNA
caatgggctatggagcgggaaggtttgcaagaaaacctgcaaaaaaaactgcacgacgtcctggaagaaaaccgg

SEQ ID NO: 798584 - DNA, 75 bp, synthetic construct
  source 1..75: mol_type = other DNA
agtcttcagccttatttagttattaataaagacgctgtgacgccatgtacgtttctgggcgaccaaaccggcgat

SEQ ID NO: 798585 - DNA, 75 bp, synthetic construct
  source 1..75: mol_type = other DNA
cgtagggataataattatcagtttattgtgacaattaatagtaaaaattacggttgctctcttgataatactgat

SEQ ID NO: 798586 - DNA, 75 bp, synthetic construct
  source 1..75: mol_type = other DNA
cggaaaattatcgccgttaggtcaatcgtttattgagtcgttattcttcaaacgcaaagcatgggcgtggtggaa

SEQ ID NO: 798587 - DNA, 75 bp, synthetic construct
  source 1..75: mol_type = other DNA
gattatattttttcgcatcttttgagtccggtgctcacgtttacaaagtagtggcctggtcagaaaatgagaatg

SEQ ID NO: 798588 - DNA, 75 bp, synthetic construct
  source 1..75: mol_type = other DNA
gggcaaagtgaacatacaggtggacaacaataccatcatcacgttggggactcccctgaatcagcaacataacga

SEQ ID NO: 798589 - DNA, 75 bp, synthetic construct
  source 1..75: mol_type = other DNA
ctgctaccgctcaaaaccaccaccgtggagctgtacacgctcgaccgtcagaccgggcgcatcgagcgcgtcacc

SEQ ID NO: 798590 - DNA, 75 bp, synthetic construct
  source 1..75: mol_type = other DNA
ttgcaaaggctttaggtctgactgaaaaacagcttttcgataagatgaaaaatggtgatgttaaagcctctgatg

SEQ ID NO: 798591 - DNA, 75 bp, synthetic construct
  source 1..75: mol_type = other DNA
tttatcagctttcaggctgtattagccagttatcagaagattatggaagttggccttcaacgtgcatcatcggaa

SEQ ID NO: 798592 - DNA, 75 bp, synthetic construct
  source 1..75: mol_type = other DNA
taaatgcttcagtcagagaagcaattgctaaagctaaaggtcatacatccaccagcattaatggtgacagagcag

SEQ ID NO: 798593 - DNA, 75 bp, synthetic construct
  source 1..75: mol_type = other DNA
aaagtgcacctgacgccagctcagttatccatgctactggaggggatcgcgtggcaacatcccaaacggacagaa

SEQ ID NO: 798594 - DNA, 75 bp, synthetic construct
  source 1..75: mol_type = other DNA
ccaatacaacaacagataacgtaaataaaaagaatgggaagccatcaagatttaatcttgggaatattctattag

SEQ ID NO: 798595 - DNA, 75 bp, synthetic construct
  source 1..75: mol_type = other DNA
tacaggtgaccgagcagtaagagcagcttatcaggctaacatgtctaagcttaaaggttttgaccctgtattaca

SEQ ID NO: 798596 - DNA, 75 bp, synthetic construct
  source 1..75: mol_type = other DNA
ccccgcccctctattcccaataacaccacgcaccgccccgccacccttcagcacttgcgtatcggtgccgaccag

SEQ ID NO: 798597 - DNA, 75 bp, synthetic construct
  source 1..75: mol_type = other DNA
attttggtggcacgggaagataataagaatgcagaaaacgtgaaggaatttctgcaatcttatcaatcacccgaa

SEQ ID NO: 798598 - DNA, 75 bp, synthetic construct
  source 1..75: mol_type = other DNA
gcattaacagcattatcacagatggctggtaagggtcagattatggctgaagagcttaaggggcaattagctgaa

SEQ ID NO: 798599 - DNA, 75 bp, synthetic construct
  source 1..75: mol_type = other DNA
atgggtgcggcactgatggaggagctggcggtggatgaccgtttgggctacttcgttaatcacgatatggcgggg

SEQ ID NO: 798600 - DNA, 75 bp, synthetic construct
  source 1..75: mol_type = other DNA
atcgggcatgcgtgctcatattctacgtagggataataattatcagtttattgtgacaattaatagtaaaaatta

SEQ ID NO: 798601 - DNA, 75 bp, synthetic construct
  source 1..75: mol_type = other DNA
tatccaggggggacttaatctgcctttctttggcagcgacttcccgctgtcgaaagccgatatcattttcaacca

SEQ ID NO: 798602 - DNA, 75 bp, synthetic construct
  source 1..75: mol_type = other DNA
gtgcggaaatctgtaccccttcccgcttgcccttcggcatgattattcatctgagccggatactgccagacagta

SEQ ID NO: 798603 - DNA, 75 bp, synthetic construct
  source 1..75: mol_type = other DNA
gcgtgatgtgacgctgaacccggaagccatggttgctgaacggatttactgggcagaagatgaatctgtcgcccg

SEQ ID NO: 798604 - DNA, 75 bp, synthetic construct
  source 1..75: mol_type = other DNA
gaaagctggtcgtgtcccgtggtatttaacccccttaatcgccagaccatggggggaagctggtcgggtactgtg

SEQ ID NO: 798605 - DNA, 75 bp, synthetic construct
  source 1..75: mol_type = other DNA
ggctctgctgagtggtggcattaagcccagccagtttttctggcatatctgggggcagacctgtatgagctttcc

SEQ ID NO: 798606 - DNA, 75 bp, synthetic construct
  source 1..75: mol_type = other DNA
catgttgcggatcgtatctctacggttgaaagaactcgatgaactgtacgccaagtacatgggacggcggattaa

SEQ ID NO: 798607 - DNA, 75 bp, synthetic construct
  source 1..75: mol_type = other DNA
caatgccaccagggataaagccccgcaacattgcgcctcaccggataacgccggcttggtgtggatactacgtct

SEQ ID NO: 798608 - DNA, 75 bp, synthetic construct
  source 1..75: mol_type = other DNA
gcaggaatcattccggtgacaccgggagcaaaagagcatcagctcagggagctggttaataaattacgcgatgtg

SEQ ID NO: 798609 - DNA, 75 bp, synthetic construct
  source 1..75: mol_type = other DNA
gaaaacaaaacgcggctgaagcaacagggctgcgacaatctgctggcaggcatgagcagcgacggtaattcatgg

SEQ ID NO: 798610 - DNA, 75 bp, synthetic construct
  source 1..75: mol_type = other DNA
cgccatgtgataataaatttttgccgtaaaaactacagtcaaaaaagagagtctgttaattgggtgatggaaaca

SEQ ID NO: 798611 - DNA, 75 bp, synthetic construct
  source 1..75: mol_type = other DNA
tataaaagaacgattaagtaattcacaacttattgaattggacgagtgcttgagattgtatagaaaaaagggggg

SEQ ID NO: 798612 - DNA, 75 bp, synthetic construct
  source 1..75: mol_type = other DNA
aagccgcgcgcgatgccgttggctgcgcggattcttttgttcgtgaaagaccctggtgtagcgtgggtacagcag

SEQ ID NO: 798613 - DNA, 75 bp, synthetic construct
  source 1..75: mol_type = other DNA
atgccgcagccaacgttgatgaccgactggatatgtatcgccacatcaggaccgaccgttgacggccgcgaaatt

SEQ ID NO: 798614 - DNA, 75 bp, synthetic construct
  source 1..75: mol_type = other DNA
tcgttatttttctgtttcgacagattacagacctaaacttgaagcactattagcatgttcacaaatgttaggtat

SEQ ID NO: 798615 - DNA, 75 bp, synthetic construct
  source 1..75: mol_type = other DNA
cttttgatgatcagcgaaaacgttacattataggaccgataacagtctctattgatgaaatgaccaatgctctcg

SEQ ID NO: 798616 - DNA, 75 bp, synthetic construct
  source 1..75: mol_type = other DNA
cggttgccatcttgataataccgatattaattggtgcagcattgtttatttacttaataatatgacagtaaatga

SEQ ID NO: 798617 - DNA, 75 bp, synthetic construct
  source 1..75: mol_type = other DNA
attcagaaaaatatagtatgctatcgggcatgcgtgctcatattctacgtaggaataataattatcagtttattg

SEQ ID NO: 798618 - DNA, 75 bp, synthetic construct
  source 1..75: mol_type = other DNA
gaaggagaaaatttccttagccagttgcttaatatagaagatgaagttctcaacgtattgctaagggaaaacttt

SEQ ID NO: 798619 - DNA, 75 bp, synthetic construct
  source 1..75: mol_type = other DNA
atgaaacttggaactgtggcaggtactaacgacagtataacgactatcgcaacaaatgatatggtgcaagagcat

SEQ ID NO: 798620 - DNA, 75 bp, synthetic construct
  source 1..75: mol_type = other DNA
aagacctcagtcagtttgatcgatctgctgaaaaagctcagcgttgaagccgctctcaatgcagagatgacacac

SEQ ID NO: 798621 - DNA, 75 bp, synthetic construct
  source 1..75: mol_type = other DNA
acgcaatgtttaacatatccgtagaacaggcagaagcaagtagggtagaccttgaacacggtgagggcgattttc

SEQ ID NO: 798622 - DNA, 75 bp, synthetic construct
  source 1..75: mol_type = other DNA
atgccgcagccaacgttgatgaccgactggacatgcatcgccacatcagggccgaccgctgacggtcgcgaaatt

SEQ ID NO: 798623 - DNA, 75 bp, synthetic construct
  source 1..75: mol_type = other DNA
aagagacattgttttagaaagtcttcagccttatttggttattaataaagacgcagtcacgccatgtacgtttct

SEQ ID NO: 798624 - DNA, 75 bp, synthetic construct
  source 1..75: mol_type = other DNA
agagagcgtgaggcattttctaccgatttcgaggatggggtcatatttggttataacgacgcaattagtgaatgc

SEQ ID NO: 798625 - DNA, 75 bp, synthetic construct
  source 1..75: mol_type = other DNA
tgaaattatcgcttcacttaatgagttaaaaactaggttaagtactcttcatgtaaacttggagcaatttataaa

SEQ ID NO: 798626 - DNA, 75 bp, synthetic construct
  source 1..75: mol_type = other DNA
gtaatagatggtatctattctgtttacaacgcaacagtagcagctaataatgcaagttcgaaaaacaacagaagg

SEQ ID NO: 798627 - DNA, 75 bp, synthetic construct
  source 1..75: mol_type = other DNA
ccattacgacctaatgatgtttgtattgatattgatgacttattttatgaggatgaaggtggtggggcctgtaat

SEQ ID NO: 798628 - DNA, 75 bp, synthetic construct
  source 1..75: mol_type = other DNA
tacatataaagctacctttccgcgaagctggtatagataaacctggtgttattgatatcctagaatcatcagggc

SEQ ID NO: 798629 - DNA, 75 bp, synthetic construct
  source 1..75: mol_type = other DNA
acctgaggtttatgaatttttaggtaaacttgaaggatttcttggtaaaaaaattaagtatttaaatccagaccg

SEQ ID NO: 798630 - DNA, 75 bp, synthetic construct
  source 1..75: mol_type = other DNA
gccgcaggcgacctggccggggaaatcaccggcgtgacggacggtgccgggcgggagttccgtctggtactgacc

SEQ ID NO: 798631 - DNA, 75 bp, synthetic construct
  source 1..75: mol_type = other DNA
atgaatacgaccgcttcggccagatgacggcggttcaccgcgaggaaggtatcagcctttaccgccactatgaca

SEQ ID NO: 798632 - DNA, 75 bp, synthetic construct
  source 1..75: mol_type = other DNA
gcagagaggatggggagatgtatgtcaaaaccaatgtggttgagctgccgctggccgggctggttcgcttcattc

SEQ ID NO: 798633 - DNA, 75 bp, synthetic construct
  source 1..75: mol_type = other DNA
tggtggcgggccagtacacgctggcgctatggctgaacctggatggaagctggacggcggtggtctgggggcatc

SEQ ID NO: 798634 - DNA, 75 bp, synthetic construct
  source 1..75: mol_type = other DNA
atggctacaccgttacggtacgcattaatctttttgctgtgggcgatggtggcggtgatttatgcaccactgatc

SEQ ID NO: 798635 - DNA, 75 bp, synthetic construct
  source 1..75: mol_type = other DNA
caacgtggtgaacccgttcgcctcacagctcacgttcatgagcgacaaaacccgcacccggcgcgaccacatgaa

SEQ ID NO: 798636 - DNA, 75 bp, synthetic construct
  source 1..75: mol_type = other DNA
ctctcccctttattcagcttgtctatttcatttcctctgaaaagaaactaactattcacattgtgcagatgtttc

SEQ ID NO: 798637 - DNA, 75 bp, synthetic construct
  source 1..75: mol_type = other DNA
tgaaggtaatatctttggcggtactggtcaggccgaatttaacaaaaatttttacgctggccgcgtcaccaaaac

SEQ ID NO: 798638 - DNA, 75 bp, synthetic construct
  source 1..75: mol_type = other DNA
ccaaccagggaaaaagccgcatcgacactaaccagtgtattgacagtaagaacattgacatttatacccctgagc

SEQ ID NO: 798639 - DNA, 75 bp, synthetic construct
  source 1..75: mol_type = other DNA
caaccatctttaagagggttacaaatttccccgaaagcccgctccctcatcctctggacagaacgcggagcagcc

SEQ ID NO: 798640 - DNA, 75 bp, synthetic construct
  source 1..75: mol_type = other DNA
atcattggagttccattatccgagtggtattttggtaacaataatgcaatatcatcaaaaatacttttaatactt

SEQ ID NO: 798641 - DNA, 75 bp, synthetic construct
  source 1..75: mol_type = other DNA
gacctgaccgccgtcattgcccggacggcagcagaaacgggacacagtacgatgcgtggggaaaagccatctgta

SEQ ID NO: 798642 - DNA, 75 bp, synthetic construct
  source 1..75: mol_type = other DNA
aacggcggttttgttgcggcggaaaaatagctggcagacagccgccgcgaaggcatttttgcacatggcgttgga

SEQ ID NO: 798643 - DNA, 75 bp, synthetic construct
  source 1..75: mol_type = other DNA
tgaagaacttctaaataacgatataaatgcgcgagaagaatggaatttaacattcaaattgaaaaacgacccaag

SEQ ID NO: 798644 - DNA, 75 bp, synthetic construct
  source 1..75: mol_type = other DNA
gggtggtttttacttcattggattctcggtgtttgttgtgtaggctggtattcagttagactaaggcattatttt

SEQ ID NO: 798645 - DNA, 75 bp, synthetic construct
  source 1..75: mol_type = other DNA
ataagtcttaaagttaaaaaagatggaggcccggcaatatatggtcatgaaaggatcgggaaaggaggtaaaccc

SEQ ID NO: 798646 - DNA, 75 bp, synthetic construct
  source 1..75: mol_type = other DNA
agttcatggctgctaattcagaattgctggctcttgttgaggaatacaacgagatagccagccgtgtaggcatgg

SEQ ID NO: 798647 - DNA, 75 bp, synthetic construct
  source 1..75: mol_type = other DNA
gcaagtattgccgcaataggttgggctgttttggattccggttctctccgggctaagtacttaccctataaaatc

SEQ ID NO: 798648 - DNA, 75 bp, synthetic construct
  source 1..75: mol_type = other DNA
tcactaccgatgtgacagagcaacaaatcacccagcttaagcagaaaacatacgcagcaatgaccagggatctgg

SEQ ID NO: 798649 - DNA, 75 bp, synthetic construct
  source 1..75: mol_type = other DNA
agcgggcgaacgattcgtctcactgatgcgggagaagtctggcgacagtacgccagccgggcgttacaggaactg

SEQ ID NO: 798650 - DNA, 75 bp, synthetic construct
  source 1..75: mol_type = other DNA
cattactgatccacttcgataaacacggtcaggtcgacttcacggaaaaagtacccgccgatgcgatggtatgca

SEQ ID NO: 798651 - DNA, 75 bp, synthetic construct
  source 1..75: mol_type = other DNA
ctctttccccaattacacacaaccaaattcccgttatcactaccgagttactggcacagttttacggtacagatt

SEQ ID NO: 798652 - DNA, 75 bp, synthetic construct
  source 1..75: mol_type = other DNA
tctccagcataagatcctcgccatcgcggaagaagaaggtgtgcgccaggcagcgtatgcgctcaagctgttgca

SEQ ID NO: 798653 - DNA, 75 bp, synthetic construct
  source 1..75: mol_type = other DNA
tggtgtcgataccacgcttgccgaccttacggctgccagccggggcagtgtctggcttaacagcaataattcctg

SEQ ID NO: 798654 - DNA, 75 bp, synthetic construct
  source 1..75: mol_type = other DNA
gctgcgaaagatgccgttctgtatcttgacggcaaactagaaaccccggtgatcgtaaaagccctcgcaagaaga

SEQ ID NO: 798655 - DNA, 75 bp, synthetic construct
  source 1..75: mol_type = other DNA
tgccgggacgcaggggttcaggtaccacgctgaataaccactttgcggtaataccggcagacagaacatggcggc

SEQ ID NO: 798656 - DNA, 75 bp, synthetic construct
  source 1..75: mol_type = other DNA
ctgtcatatttggcggataacgcattaatcgtggatacgtgcccgcaaggaaatttatcatatttttttgacaat

SEQ ID NO: 798657 - DNA, 75 bp, synthetic construct
  source 1..75: mol_type = other DNA
ccaataaagaaatgtgaattcagaaagtacataaacaacgacttcactagcaatgataagatcattcaagaaatg

SEQ ID NO: 798658 - DNA, 75 bp, synthetic construct
  source 1..75: mol_type = other DNA
ccgtagcatgcgaaacgctgttgagagagatgtctttggtgtcttacctgacacatcattagtatcggagctact

SEQ ID NO: 798659 - DNA, 75 bp, synthetic construct
  source 1..75: mol_type = other DNA
acttcgtcatcgtctgaacgaacttgaattggaatcggtaacgaaaaaagacactgataatatggctcgtaatgt

SEQ ID NO: 798660 - DNA, 75 bp, synthetic construct
  source 1..75: mol_type = other DNA
ccgggaacccgctggcggtggctgccgcgcacgcggtgctcaatattatcgacaaagaatcactctgcgaacgcg

SEQ ID NO: 798661 - DNA, 75 bp, synthetic construct
  source 1..75: mol_type = other DNA
gccaacttgttcgctggattgcttcatggcatctatttcatttggacaaaaatactttaccaaaggataatttgc

SEQ ID NO: 798662 - DNA, 75 bp, synthetic construct
  source 1..75: mol_type = other DNA
accagacgacggtaggcggcatcatgaatacctcggtggcgttgttgcagtcctcacaggtagggctgcataaat

SEQ ID NO: 798663 - DNA, 75 bp, synthetic construct
  source 1..75: mol_type = other DNA
atgtaagaatactggagtggtgctttaataaaagcatgcaatattctgatgatacaaaaaagataaagcatgcat

SEQ ID NO: 798664 - DNA, 75 bp, synthetic construct
  source 1..75: mol_type = other DNA
gtgaattgttggtgtatccaggtggggaagccagcaattgtgagattaatcagggcggcgtttttatgctggccg

SEQ ID NO: 798665 - DNA, 75 bp, synthetic construct
  source 1..75: mol_type = other DNA
ccgatactggaagaacagtggtcatggcttgaagagctggaaccgcaatgttctccgggaagggcattacacaaa

SEQ ID NO: 798666 - DNA, 75 bp, synthetic construct
  source 1..75: mol_type = other DNA
ctgtcagaagtattactgtcgtcctgggtagagtgggattttgataagaaattatggcgcgttcccgctgatcat

SEQ ID NO: 798667 - DNA, 75 bp, synthetic construct
  source 1..75: mol_type = other DNA
gtgggaaaaaagtctgcgcgaagaagcagggttttaacagatgatgaaatcagagatttatggcgaagtattaat

SEQ ID NO: 798668 - DNA, 75 bp, synthetic construct
  source 1..75: mol_type = other DNA
ccaggagcagagcgcatcaaaatttgaaccgctttcctcggatgcaaacaacctggacggtctgaacatccactg

SEQ ID NO: 798669 - DNA, 75 bp, synthetic construct
  source 1..75: mol_type = other DNA
gttttcccttcttcaactaatgcaagtagcattttcctgaagcccaataagcaatataaacctgatattttagta

SEQ ID NO: 798670 - DNA, 75 bp, synthetic construct
  source 1..75: mol_type = other DNA
gcaagtccggcaagatggtgagtcattctatcttgaaaataaattaagtgataatcatgctagaaatataggtgt

SEQ ID NO: 798671 - DNA, 75 bp, synthetic construct
  source 1..75: mol_type = other DNA
tccagacacccgaagatatttgtgtacagttaaaaaaaatgacacatcctgtcacaataagaacaacagatattg

SEQ ID NO: 798672 - DNA, 75 bp, synthetic construct
  source 1..75: mol_type = other DNA
ggccgcctgctggaatggcacaccaccaccgggcaattgcggcgctgggccatgccgatggcgatgctcagcggc

SEQ ID NO: 798673 - DNA, 75 bp, synthetic construct
  source 1..75: mol_type = other DNA
tcgctggcggaacacaccgaatgcgccggggagcgcctctacgccgggatggacgtgcgcatggtacaaatcccc

SEQ ID NO: 798674 - DNA, 75 bp, synthetic construct
  source 1..75: mol_type = other DNA
acgtggtcctgggcagaaaatcgtggctgttcgccggttcgcagatggcgggagaacgtgccgcgcaaataatga

SEQ ID NO: 798675 - DNA, 75 bp, synthetic construct
  source 1..75: mol_type = other DNA
tccgtggccgcgcggagaaaaacttattgctgatgcgctggagatagctccagagatcatctggccttccagata

SEQ ID NO: 798676 - DNA, 75 bp, synthetic construct
  source 1..75: mol_type = other DNA
ctgatatgacagagcagcaaatcatgcaacttaatggatttgcccctatatttccagacatctgttatcacttaa

SEQ ID NO: 798677 - DNA, 75 bp, synthetic construct
  source 1..75: mol_type = other DNA
agggcggattcagcggacccaaaccggggttatcatcagttgcgcaggccaaatcatttcgtgatgatgcatggg

SEQ ID NO: 798678 - DNA, 75 bp, synthetic construct
  source 1..75: mol_type = other DNA
atgtttaccactacgatgaatacggcagactgacggagaagacggaccgcatcccggcgggtgtgatacggacgg

SEQ ID NO: 798679 - DNA, 75 bp, synthetic construct
  source 1..75: mol_type = other DNA
tttaagaaaggagtcatatcctctgaaaagaaaatgtcccacaggtacagatagagttgctgcttatcatactca

SEQ ID NO: 798680 - DNA, 75 bp, synthetic construct
  source 1..75: mol_type = other DNA
gatgctgcgttagatgctttgaaagaaacgcagaatagatctctatgtaatgatatggaatactctggtattgtc

SEQ ID NO: 798681 - DNA, 75 bp, synthetic construct
  source 1..75: mol_type = other DNA
tgcgaccaccggggcctgccgctggcgctcatcagcgaagacggcaatacggcgtggcgcggggagtatgatgaa

SEQ ID NO: 798682 - DNA, 75 bp, synthetic construct
  source 1..75: mol_type = other DNA
cagacggtggagaacccggagacgggggaactgctgtggcagcatgagacgaaacacgcatacaacgagcagggg

SEQ ID NO: 798683 - DNA, 75 bp, synthetic construct
  source 1..75: mol_type = other DNA
ctggtactacgatgaatcggaccgtatcactcaccgcacggtgaacggcgaaccggcagagcagtggcagtatga

SEQ ID NO: 798684 - DNA, 75 bp, synthetic construct
  source 1..75: mol_type = other DNA
gcttcgcgccgctcatccgcatcgaaacagacaacggtgaacgggagaaagcgcagtgccgcagcctggcggaga

SEQ ID NO: 798685 - DNA, 75 bp, synthetic construct
  source 1..75: mol_type = other DNA
tctcgcaacacctgatggacgatttgaggcgcttaataataaaggagaatatatttttatcagaaatagtgtccc

SEQ ID NO: 798686 - DNA, 75 bp, synthetic construct
  source 1..75: mol_type = other DNA
atgaatggggcaacctgcttaatgaggagaacccgcatcatgtgtatcagccgtaccgtctgccagggcagcagc

SEQ ID NO: 798687 - DNA, 75 bp, synthetic construct
  source 1..75: mol_type = other DNA
cagcctggcggagaagctgcagcaggaagggagcgaggacgggcacggcgtggtatttccggctgaactggtgcg

SEQ ID NO: 798688 - DNA, 75 bp, synthetic construct
  source 1..75: mol_type = other DNA
gtgaacggcgacccggcagagcagtggcagtatgacggccacggctggctgagagaaatcagccacctgagcgaa

SEQ ID NO: 798689 - DNA, 75 bp, synthetic construct
  source 1..75: mol_type = other DNA
ccagaccgggcaggtgctgaaactcctcttgttcttactgatatgactggaggagtgactatttattatgatcct

SEQ ID NO: 798690 - DNA, 75 bp, synthetic construct
  source 1..75: mol_type = other DNA
ctgatttataatgcatctttaatatattttgcatgggctgtactaatcgaagcactattatcggcaatatgccta

SEQ ID NO: 798691 - DNA, 75 bp, synthetic construct
  source 1..75: mol_type = other DNA
ttttaaagagggtgaggttgagtggaagactttgggggaagtggctcagtttaagcgaggaacggcaattaccca

SEQ ID NO: 798692 - DNA, 75 bp, synthetic construct
  source 1..75: mol_type = other DNA
tctcagatagtcatacagcgttatcaaatgtatttatacggattaaggacaaaagaacgccttgcggtaattact

SEQ ID NO: 798693 - DNA, 75 bp, synthetic construct
  source 1..75: mol_type = other DNA
aggatgttgctgttgttgagaatatgaactggatgcaggcactgcgttttgtggctgcaaaaggacatcagaaat

SEQ ID NO: 798694 - DNA, 75 bp, synthetic construct
  source 1..75: mol_type = other DNA
tccagatttacacgttcataaccctgatattgtgcgggctagtgcaatattttaccggcatgcaggccgttctct

SEQ ID NO: 798695 - DNA, 75 bp, synthetic construct
  source 1..75: mol_type = other DNA
cttttgcaaatgagaaaaggaaatactccaagggaactaaagtaattgatgtgtctgcatcggatatggcgaaaa

SEQ ID NO: 798696 - DNA, 75 bp, synthetic construct
  source 1..75: mol_type = other DNA
ttaccccgtgaaatagaactacgccagaagcagtacgagtactatcgtgatttactgttcagcttcccgaaacca

SEQ ID NO: 798697 - DNA, 75 bp, synthetic construct
  source 1..75: mol_type = other DNA
tgcccgcatgtcaaaaatcgtcgatacagacgaggcctggtcgttcttcgaaaaaatggagcaggcgtattttcg

SEQ ID NO: 798698 - DNA, 75 bp, synthetic construct
  source 1..75: mol_type = other DNA
ggtctggatttatcgccagtatcttagaggtgcattacccatgaagagaaactggaatggcgaatttactcacga

SEQ ID NO: 798699 - DNA, 75 bp, synthetic construct
  source 1..75: mol_type = other DNA
attttaaatcaagcactggtgaattgttgtcatcagttcgtagtgtggtcattgattcaacaccatggttttttg

SEQ ID NO: 798700 - DNA, 75 bp, synthetic construct
  source 1..75: mol_type = other DNA
ttgcgtactcagtcagctaaacaacttattgaagagctggaaaaagaaactatgcagaattgcatagtttcactg

SEQ ID NO: 798701 - DNA, 75 bp, synthetic construct
  source 1..75: mol_type = other DNA
ttctgcaaacagctcaacggtgtaaacactcgtcagattaatgcgttccttgaagagcgtaactggctgtatgac

SEQ ID NO: 798702 - DNA, 75 bp, synthetic construct
  source 1..75: mol_type = other DNA
ctgctgctgaagcgtggattgaagccaaaaaatccgaacgccttgctctcgggtatgcagagcgtcaggctcgct

SEQ ID NO: 798703 - DNA, 75 bp, synthetic construct
  source 1..75: mol_type = other DNA
ccgacaaaacgcagaaaccttttctgaagcgagtgcttgaattcaaaaagcgagtggagtcgaagctgaaccctc

SEQ ID NO: 798704 - DNA, 75 bp, synthetic construct
  source 1..75: mol_type = other DNA
tctggaaaggttgttggaaaatgatcctaaagcaaaggctgaatgggatgccacatttaaattgaaagatgaccc

SEQ ID NO: 798705 - DNA, 75 bp, synthetic construct
  source 1..75: mol_type = other DNA
gctgcagtattacacttgcggtagtagatttcattagcttaactctatctctatatttagccttaggtgtactat

SEQ ID NO: 798706 - DNA, 75 bp, synthetic construct
  source 1..75: mol_type = other DNA
aattggtcaatatggaatgatattgcgatactatttaaaacggttagtgtcgtaattaaaaaggatggggcttac

SEQ ID NO: 798707 - DNA, 75 bp, synthetic construct
  source 1..75: mol_type = other DNA
tgaatcaacagaaagtgagactcgcaacaattggttacgtgagttcatgattaaaggctatagatatgtttcggt

SEQ ID NO: 798708 - DNA, 75 bp, synthetic construct
  source 1..75: mol_type = other DNA
aaattggtttgtgggctcgcaatgcttggatcattggtagtgggaaaaatgcaattgatgcattcaaagccatac

SEQ ID NO: 798709 - DNA, 75 bp, synthetic construct
  source 1..75: mol_type = other DNA
ccagagcgaagttcgtaatgcatggctgcgtaattttatgattaaaggttatcggtatatttcggttattccagc

SEQ ID NO: 798710 - DNA, 75 bp, synthetic construct
  source 1..75: mol_type = other DNA
atgaagtaatgatatttcgtgtacagcagaatctggcgaaatggtcatcgcggactctaaaacgcttgtttgata

SEQ ID NO: 798711 - DNA, 75 bp, synthetic construct
  source 1..75: mol_type = other DNA
aaaaattggtctatgtggaatgatatagccatacttttaaaaactgtcatagttgtgcttaaaaaagatggtgca

SEQ ID NO: 798712 - DNA, 75 bp, synthetic construct
  source 1..75: mol_type = other DNA
atatctagtgaggaaaatatgccggagctttctaagtttaataatatacctatattgtcaaacgatattaattgg

SEQ ID NO: 798713 - DNA, 75 bp, synthetic construct
  source 1..75: mol_type = other DNA
attgctggcgaagctaatagccaacaagttagtgctatcgcagggatccctgtgattaatcctgatgctgaatgg

SEQ ID NO: 798714 - DNA, 75 bp, synthetic construct
  source 1..75: mol_type = other DNA
ggcctctggcaggtaagtgggcgcagtgatgttgactatgaaaccagaatttattttgacgtttggtatgttaaa

SEQ ID NO: 798715 - DNA, 75 bp, synthetic construct
  source 1..75: mol_type = other DNA
agttgggcgacattgcattggttattgggattatgttgcgtagcctggtatggtatacgcctccgtcattatttc

SEQ ID NO: 798716 - DNA, 75 bp, synthetic construct
  source 1..75: mol_type = other DNA
attagtgttaaagtaaaaaaagatggtggaccatctatctatggccatgaaagggttgggaaaggtggaaaatca

SEQ ID NO: 798717 - DNA, 75 bp, synthetic construct
  source 1..75: mol_type = other DNA
cgtgttgcaattgaatatggcggcagcgtatacgatattgataatttacgaattgttacccccagactacacgat

SEQ ID NO: 798718 - DNA, 75 bp, synthetic construct
  source 1..75: mol_type = other DNA
ttaaggtcgcggaagcgcttcaggacacgctcactcctgaaggtctggttggaataatgtcttctggacaggcaa

SEQ ID NO: 798719 - DNA, 75 bp, synthetic construct
  source 1..75: mol_type = other DNA
tgacctgacgctaacaagtaaaaatgccttagagattctttcagatgacatcaacctggttaatgggcgctatag

SEQ ID NO: 798720 - DNA, 75 bp, synthetic construct
  source 1..75: mol_type = other DNA
cgtttacttttctaatgaagaaaatactcatcagtgcaatatgtaccagatggctcagaattatgaatttcccga

SEQ ID NO: 798721 - DNA, 75 bp, synthetic construct
  source 1..75: mol_type = other DNA
tatagatgaagcccacaatattttgtctaatacttcttttcgggaaacggaaagttggagagattatcgtctgga

SEQ ID NO: 798722 - DNA, 75 bp, synthetic construct
  source 1..75: mol_type = other DNA
aatatttatctaacaagtctaaccctgaacatatttcaccagttataaatagaatgagtgctaaccgtaaagata

SEQ ID NO: 798723 - DNA, 75 bp, synthetic construct
  source 1..75: mol_type = other DNA
tcaaagtgaggttcgtaatacatggttgcgtaattttatgataaaaggctttagatatgtatcagtaatacctac

SEQ ID NO: 798724 - DNA, 75 bp, synthetic construct
  source 1..75: mol_type = other DNA
gagaaaaacgcggggataattttgttgctgaaagcgggtgaaaacggtaacgccgctgccacccttgaaacctac

SEQ ID NO: 798725 - DNA, 75 bp, synthetic construct
  source 1..75: mol_type = other DNA
tcagagtgagatacgtaacacttggttacgcaatttcatgattaaaggttatagatttgtttctgtaattcctac

SEQ ID NO: 798726 - DNA, 75 bp, synthetic construct
  source 1..75: mol_type = other DNA
caccggtgaaccggatgagcttcagctggcacgatattttgaatatcagaccagtcaacaagtacaatgggcatc

SEQ ID NO: 798727 - DNA, 75 bp, synthetic construct
  source 1..75: mol_type = other DNA
ggtaaacggctcactaccgcaatcagtgctggcccgtggccagcgctttaatggtgacgcggaagtgatgactta

SEQ ID NO: 798728 - DNA, 75 bp, synthetic construct
  source 1..75: mol_type = other DNA
tatagccagattgtcacagagtgtcgtatgcgttacgccgtacagatgttattgatggataacaaaaatatcact

SEQ ID NO: 798729 - DNA, 75 bp, synthetic construct
  source 1..75: mol_type = other DNA
gcaactgaacggtgcggtgattgcgtccacggcaacggcagataaaaacaggctggataccggcacactgggctt

SEQ ID NO: 798730 - DNA, 75 bp, synthetic construct
  source 1..75: mol_type = other DNA
aagcggtgaagcaagtcataccttttgaaggcaatgaaaagtcttttgaaacaatattgaaacagctaaacaggt

SEQ ID NO: 798731 - DNA, 75 bp, synthetic construct
  source 1..75: mol_type = other DNA
gtgaggtgaataaggctgcaaatgtgacagcccatgccgtggtgaatgctgcactggcggtggcacagggaaata

SEQ ID NO: 798732 - DNA, 75 bp, synthetic construct
  source 1..75: mol_type = other DNA
gagaactgaatgcgttgaaggctgcgcaggataaatatgggcctgttccggcggatgcgacggaagaacagcggc

SEQ ID NO: 798733 - DNA, 75 bp, synthetic construct
  source 1..75: mol_type = other DNA
gcgcctcctacgcctttgccctggtatcggtcgcggcgattattcagcctgacggcagcgggcgcgtcgcgctgg

SEQ ID NO: 798734 - DNA, 75 bp, synthetic construct
  source 1..75: mol_type = other DNA
ccgcacattgaaaccgccctgcttcccggtgagcttatcgttgcggtgacgttacctccgccgctcggcggaaaa

SEQ ID NO: 798735 - DNA, 75 bp, synthetic construct
  source 1..75: mol_type = other DNA
ctggtataacggtggcttaacgccaaatgaatcagagcggctgttccacgaacagtcaggtcgtgtggccaaaat

SEQ ID NO: 798736 - DNA, 75 bp, synthetic construct
  source 1..75: mol_type = other DNA
atgaatattattacaccggagaataatttatgttttcatgtggataatccgacgggtgtgccagtgatgccacct

SEQ ID NO: 798737 - DNA, 75 bp, synthetic construct
  source 1..75: mol_type = other DNA
ggctgaattaagcaaaacaacgctttattttaccgaaggcgggaacggtattccgcccacttatccggggccgga

SEQ ID NO: 798738 - DNA, 75 bp, synthetic construct
  source 1..75: mol_type = other DNA
aatacttccaaacgatgtacgacatggaacggcaaatcaacgcaaacctgccggttggcggccttcccaacgttg

SEQ ID NO: 798739 - DNA, 75 bp, synthetic construct
  source 1..75: mol_type = other DNA
gaacatgaaaggcgtcatgaatgacaaaacccgcttccacgccgacaagtgggtagggtacagcaaggtgcttgc

SEQ ID NO: 798740 - DNA, 75 bp, synthetic construct
  source 1..75: mol_type = other DNA
cgagcacccgatgcactctgaggcttactggaaagcgtattgccagcggcttaaacatctttctaacctcaaaat

SEQ ID NO: 798741 - DNA, 75 bp, synthetic construct
  source 1..75: mol_type = other DNA
cctggaaaagcggtgaagcaagtcataccttttgaaggcaatgaaaagtcttttgaaacaatattgaaacagcta

SEQ ID NO: 798742 - DNA, 75 bp, synthetic construct
  source 1..75: mol_type = other DNA
ataatcctctggggctggctgacaactggtttgtcagcgggggacggagcagtgacttttcggtgtcacatgatg

SEQ ID NO: 798743 - DNA, 75 bp, synthetic construct
  source 1..75: mol_type = other DNA
aatttaatctcagcgattcagttttggatttgttctaaatggcatccctctttctcaaaaataatagtatatcat

SEQ ID NO: 798744 - DNA, 75 bp, synthetic construct
  source 1..75: mol_type = other DNA
agtctcgttttaaaacaatatcttttatcgaagtctcatcctctattattgcagtgattgtagcaattactatgg

SEQ ID NO: 798745 - DNA, 75 bp, synthetic construct
  source 1..75: mol_type = other DNA
cgttggtgattcatgctttagagatcaatctggacgctcttattatttatgccaatggcatctttattatgattt

SEQ ID NO: 798746 - DNA, 75 bp, synthetic construct
  source 1..75: mol_type = other DNA
ccctgttctggtattgttttggcggttggtgtactgctgaactgcaccgccgttcagggttttattcacgttaca

SEQ ID NO: 798747 - DNA, 75 bp, synthetic construct
  source 1..75: mol_type = other DNA
gattacacgtattcatggagtgactacctcagcaccattgataaccggggctggcagtggcgttccacgggagac

SEQ ID NO: 798748 - DNA, 75 bp, synthetic construct
  source 1..75: mol_type = other DNA
aatacagaacgacagaacccgcatccagacgatttatcagccgggagcttcacgccactcatcagagttgaaacc

SEQ ID NO: 798749 - DNA, 75 bp, synthetic construct
  source 1..75: mol_type = other DNA
tgtacctggattgattgctgcaaacagcattactaacagtgcttaccagttcggttatgatatggatgctattgt

SEQ ID NO: 798750 - DNA, 75 bp, synthetic construct
  source 1..75: mol_type = other DNA
ccgacattatcgccggactgaaaaaacgtggcacttcactgtcagcactttcgcgtcaggcagggctggcatctt

SEQ ID NO: 798751 - DNA, 75 bp, synthetic construct
  source 1..75: mol_type = other DNA
ggaatatgctttcccagttttttaaaatgcttgtccaattaattaatgttatttatttagctaaaataatacctc

SEQ ID NO: 798752 - DNA, 75 bp, synthetic construct
  source 1..75: mol_type = other DNA
tcgcaactaggtcactttatccaatattaagtaaacaacaaagtaataatcagcatatatcaaaaatatatttaa

SEQ ID NO: 798753 - DNA, 75 bp, synthetic construct
  source 1..75: mol_type = other DNA
aatctgatgtctgctatacaattctggcttgcatcaaattggaaaccttctattagggtttttattaattataaa

SEQ ID NO: 798754 - DNA, 75 bp, synthetic construct
  source 1..75: mol_type = other DNA
caaaaataagaattttagagactttagtaaaagttaatggtgtgaaatttatacctgatgctgctagggcaagtt

SEQ ID NO: 798755 - DNA, 75 bp, synthetic construct
  source 1..75: mol_type = other DNA
agcatgtgcactgggctactatttcactcttatatttgtctgattgttaacacttactatacaaaaaaaatgacc

SEQ ID NO: 798756 - DNA, 75 bp, synthetic construct
  source 1..75: mol_type = other DNA
ttgcgatcttgttttatgtaggcctttatttatcaacaccattaattgcaaatttttatcatcaacctgaacttg

SEQ ID NO: 798757 - DNA, 75 bp, synthetic construct
  source 1..75: mol_type = other DNA
cttgtaccattgcatatattggagcattgcatataagtgatgatgcactattacaagtgctattgatggtcgtaa

SEQ ID NO: 798758 - DNA, 75 bp, synthetic construct
  source 1..75: mol_type = other DNA
aaatcttgtttcaaattatattcagaaaaaaattgataactttggaactagagatatagacgttaaagtctctat

SEQ ID NO: 798759 - DNA, 75 bp, synthetic construct
  source 1..75: mol_type = other DNA
ggggtagaacggcaacttttagataactcttgcggcatatcctctctggcttacgtacttaacaaatattttaag

SEQ ID NO: 798760 - DNA, 75 bp, synthetic construct
  source 1..75: mol_type = other DNA
ttattctctgctagatctggcatcaacatcccgaacacttggaatatcaactattggactaaaactatctattaa

SEQ ID NO: 798761 - DNA, 75 bp, synthetic construct
  source 1..75: mol_type = other DNA
cagccaattgcgcggtctattttgtttcattatgaacatggtctatcagaacctaaaatttataacgtccctcct

SEQ ID NO: 798762 - DNA, 75 bp, synthetic construct
  source 1..75: mol_type = other DNA
aggagcttgatagatttataatgagaggtcttttcgaaagaattagaaagcttgaagaatcgttataccaaagat

SEQ ID NO: 798763 - DNA, 75 bp, synthetic construct
  source 1..75: mol_type = other DNA
ggtgatctttggcagtttagagatcaggagcttgatagatttataatgagaggtcttttcgaaagaattagaaag

SEQ ID NO: 798764 - DNA, 75 bp, synthetic construct
  source 1..75: mol_type = other DNA
gccgaaaacattcgcaacggcaaatatccctatatcgtcgatgcctttatgataacgcgggaaaatacgacgtca

SEQ ID NO: 798765 - DNA, 75 bp, synthetic construct
  source 1..75: mol_type = other DNA
aggttcaacaacctatgtccgcagtcaggacggaagctctctggccgatgagtatatcaacctcgctggaacgct

SEQ ID NO: 798766 - DNA, 75 bp, synthetic construct
  source 1..75: mol_type = other DNA
agggtctacggtatatccatactcagagacagtacctgtgtgttttatttttgtaactgctgggcagtccaacgc

SEQ ID NO: 798767 - DNA, 75 bp, synthetic construct
  source 1..75: mol_type = other DNA
tcacgtctcggcgtaagcaccaaagatttgcagcagtggaacaaactgcgcggatctaagctgaagccaggccaa

SEQ ID NO: 798768 - DNA, 75 bp, synthetic construct
  source 1..75: mol_type = other DNA
gtcatcatgcatgacaccaacgtacgtgagcgcggctttggggtattccagcttctggatgagcttaagcagcag

SEQ ID NO: 798769 - DNA, 75 bp, synthetic construct
  source 1..75: mol_type = other DNA
tttgctttctggttaatcgataccctgcaacctcgtaagattgttgaactgggcacccattacggcagctcctat

SEQ ID NO: 798770 - DNA, 75 bp, synthetic construct
  source 1..75: mol_type = other DNA
agagagtgctgcagaacgtattgctgcttcagggttgtttgatgaactctggtatcaacatcgttacccggaggt

SEQ ID NO: 798771 - DNA, 75 bp, synthetic construct
  source 1..75: mol_type = other DNA
ttacgctttagccgtaaagaccgtttgcagttaaatatttcacaatcacttaatgactttggctcgctttatatc

SEQ ID NO: 798772 - DNA, 75 bp, synthetic construct
  source 1..75: mol_type = other DNA
cgcaaggctctatcaatcctttacttcactacatactgcacggaaaggcagaacagcgtcattgcctgccagaca

SEQ ID NO: 798773 - DNA, 75 bp, synthetic construct
  source 1..75: mol_type = other DNA
cggcagcgagcaatcctcagagatgatgagcctgtacggtctctcagataatccatctgcgaccagacaggtaca

SEQ ID NO: 798774 - DNA, 75 bp, synthetic construct
  source 1..75: mol_type = other DNA
gtgcggccacgatggaagcacagagcgacatttacgaccggacaaaaggccgtctggcgatacccggcgcattcg

SEQ ID NO: 798775 - DNA, 75 bp, synthetic construct
  source 1..75: mol_type = other DNA
acaggccaaaaatgacattgatgctgcgctgaccggcactctgaaaacggctaaccatctgtctgaaatcgcagc

SEQ ID NO: 798776 - DNA, 75 bp, synthetic construct
  source 1..75: mol_type = other DNA
atgcttattactggagtgtttttaaaatcgctgaggcctttgggcttcaccgggacacagtaaaaaacggctcct

SEQ ID NO: 798777 - DNA, 75 bp, synthetic construct
  source 1..75: mol_type = other DNA
agagcagcaacagagtcgcatcacgagccaggagcaagctcgccatcaactggagcaacaggtcaataccctgac

SEQ ID NO: 798778 - DNA, 75 bp, synthetic construct
  source 1..75: mol_type = other DNA
gtgtatctgaaacgggactggcgcgacgagtactgtgttggcgacattgctgtatacgacgactcaaagcccggc

SEQ ID NO: 798779 - DNA, 75 bp, synthetic construct
  source 1..75: mol_type = other DNA
ttatccgttttgacactaagagtgatttcctggcctgggtaaggaatgcgctgccaggtgaatattccgttgctg

SEQ ID NO: 798780 - DNA, 75 bp, synthetic construct
  source 1..75: mol_type = other DNA
gggctgccaatcaactttctccgggcgatattactgagttaatgaccggaaaaactatagtccaccagaagaagc

SEQ ID NO: 798781 - DNA, 75 bp, synthetic construct
  source 1..75: mol_type = other DNA
tatcattgataatatttccgacctaaaagatattgataaaacacagcagttgtctcttcatctggatgatggtta

SEQ ID NO: 798782 - DNA, 75 bp, synthetic construct
  source 1..75: mol_type = other DNA
gctatctcagcagcatgatgcattttttatcaggtgtgccacgcctgattttcttgttcgcaccgttatgtccta

SEQ ID NO: 798783 - DNA, 75 bp, synthetic construct
  source 1..75: mol_type = other DNA
catcgtcttggctacagctccgcgtatttacgctatccattggctgcgggtcttgcaactgaaacattatcggca

SEQ ID NO: 798784 - DNA, 75 bp, synthetic construct
  source 1..75: mol_type = other DNA
caaaacactgtttatggtgcattagcgatgaactggccagaagataaaatcaccatctggttattagatgacggt

SEQ ID NO: 798785 - DNA, 75 bp, synthetic construct
  source 1..75: mol_type = other DNA
tgctgggttattttcaggtttgtttcccgcttaaccgcgagagcttgccattgccagcagatccaacacactggc

SEQ ID NO: 798786 - DNA, 75 bp, synthetic construct
  source 1..75: mol_type = other DNA
taaacaaaatccttttggttgttgctatactgctatgttttgtttttttatcaattgttgaacagccccttggat

SEQ ID NO: 798787 - DNA, 75 bp, synthetic construct
  source 1..75: mol_type = other DNA
tgttggttctatctcatggaaaaataagtatggggctggagccaagactaaagggtttatcgaggttcatgagta

SEQ ID NO: 798788 - DNA, 75 bp, synthetic construct
  source 1..75: mol_type = other DNA
taccctcgtcttaagcttgctcgaaacctgttgaaggatgatggcattatatttatttcaatagatgataatgag

SEQ ID NO: 798789 - DNA, 75 bp, synthetic construct
  source 1..75: mol_type = other DNA
gcgttatccttgataatatctccgacgtaaaaaatattgttaaaacacagcggttgtctctttatctggatgata

SEQ ID NO: 798790 - DNA, 75 bp, synthetic construct
  source 1..75: mol_type = other DNA
ttctattgaacaaaagcaggtgcgtttttctccccgtattgatgtttctttcaagggcgttatacaactggaaga

SEQ ID NO: 798791 - DNA, 75 bp, synthetic construct
  source 1..75: mol_type = other DNA
agatctgctttggatgaggtgggtggcattgcagtcgaaacagtaacggaagatgcgcatacgtcgttacgtttg

SEQ ID NO: 798792 - DNA, 75 bp, synthetic construct
  source 1..75: mol_type = other DNA
catatttaaatcaacacacagctactatcttgacgaaaagataatcggaagaaaaccgcggaataaaataattgg

SEQ ID NO: 798793 - DNA, 75 bp, synthetic construct
  source 1..75: mol_type = other DNA
cgattctgaaacgcttgcggcaacgccaaaggcggtaaaggtcgcgtatgaccttgctaacgggaaatacactgc

SEQ ID NO: 798794 - DNA, 75 bp, synthetic construct
  source 1..75: mol_type = other DNA
acagcaattgtcacgctgatcctgacgaaggatagttatcctgtcactatcggcgcaggtgggggcggcggtgtt

SEQ ID NO: 798795 - DNA, 75 bp, synthetic construct
  source 1..75: mol_type = other DNA
cctgcgctacctggtacgtttcacgctggtggatgtggcaacaggtgagtgggctacctggtcgccggtgaatta

SEQ ID NO: 798796 - DNA, 75 bp, synthetic construct
  source 1..75: mol_type = other DNA
taccttccgaggttcagatagcattaaatatttgttctcagagcaaattacacttatcagaagatttttttgata

SEQ ID NO: 798797 - DNA, 75 bp, synthetic construct
  source 1..75: mol_type = other DNA
ggcattttactggcttcagaaagaagaaagcagattttcgccattagttaaaagcgccgatctcaggcaatttaa

SEQ ID NO: 798798 - DNA, 75 bp, synthetic construct
  source 1..75: mol_type = other DNA
atgaatttaaatcaaaaaatatagatgatattggaatatttgcattggcaatgtgtaatggagaatcaattaacg

SEQ ID NO: 798799 - DNA, 75 bp, synthetic construct
  source 1..75: mol_type = other DNA
atcgcgccgactggctggtgctggatggacaggatccttacctggcggcagcccgcccccctgaaattctcaacc

SEQ ID NO: 798800 - DNA, 75 bp, synthetic construct
  source 1..75: mol_type = other DNA
gacggtattttccccggcgtcgattatttggcacagcgcggtcactggggtattggttccgacagccatgtttca

SEQ ID NO: 798801 - DNA, 75 bp, synthetic construct
  source 1..75: mol_type = other DNA
gatttaaaaaataaccatggcgataaaataaatgagaagaataacaataaacacattacttactttcccgttgat

SEQ ID NO: 798802 - DNA, 75 bp, synthetic construct
  source 1..75: mol_type = other DNA
gttcaactcagtagcgccaccaacagcgattcagaaacgctggcggcaacaccaaaggcggtaaaggcagcctat

SEQ ID NO: 798803 - DNA, 75 bp, synthetic construct
  source 1..75: mol_type = other DNA
tagaccgactggaacgtgaatcaaatgctaaaatttttctacctaaggaggccaaacagataaaaagtaaaaagt

SEQ ID NO: 798804 - DNA, 75 bp, synthetic construct
  source 1..75: mol_type = other DNA
atagaaaacatttatcctgtgtgtaaggttcacaataataacacatcttatagcgggcaattaaagccagaatgg

SEQ ID NO: 798805 - DNA, 75 bp, synthetic construct
  source 1..75: mol_type = other DNA
ggtttggcagtcagcgtattgcggctgatgttctgaggctgagaaaggccggaatgccggtggtgaccacgaccg

SEQ ID NO: 798806 - DNA, 75 bp, synthetic construct
  source 1..75: mol_type = other DNA
gttgatccttccgggcatggcaccgtcaatatgcgcgcctggccagttaatctggtcggtggtgagctggaaaca

SEQ ID NO: 798807 - DNA, 75 bp, synthetic construct
  source 1..75: mol_type = other DNA
acctgtaccactgcgaccatcgcggcctgccgctggcgctcatcagcacggaaggggcaacagcgtggtgcgcag

SEQ ID NO: 798808 - DNA, 75 bp, synthetic construct
  source 1..75: mol_type = other DNA
actgctcgcagggtttgttatgccgcttctatccggtagaaaacacaaggatgcgtttttctaacttcttgatat

SEQ ID NO: 798809 - DNA, 75 bp, synthetic construct
  source 1..75: mol_type = other DNA
ttgtggtttcgctggcttatggcatcgctacccgcacaattcgacgtcaggcggatttaccgcatttaatgattg

SEQ ID NO: 798810 - DNA, 75 bp, synthetic construct
  source 1..75: mol_type = other DNA
gtgtttaacggctttgagctgataagccagcagttcagccgggtacggcagccgcacccgtccgtggccccgcag

SEQ ID NO: 798811 - DNA, 75 bp, synthetic construct
  source 1..75: mol_type = other DNA
gaacatacactaagtgacacatttcttcagattgttgagtgtgttaatttaaatataggacttattgcaaaagat

SEQ ID NO: 798812 - DNA, 75 bp, synthetic construct
  source 1..75: mol_type = other DNA
cggaaatacctacgggggcggcagtaacaatctggaaaacacgctggcgctggcgaagcgcgtgaaggcccaggg

SEQ ID NO: 798813 - DNA, 75 bp, synthetic construct
  source 1..75: mol_type = other DNA
tggtagttacagcaatatgatttccgtgcgtctgaatgacccgcgcggcactggttatacgcaactatggctaag

SEQ ID NO: 798814 - DNA, 75 bp, synthetic construct
  source 1..75: mol_type = other DNA
gcacttcctgcttattttgactttgcgcctcttctgctcgcagtgaaaaatgctctcgaacaaaagcaaaacggt

SEQ ID NO: 798815 - DNA, 75 bp, synthetic construct
  source 1..75: mol_type = other DNA
gtgagcattaatacctctggcggtaacggtttgcgtgttcaatcagacgaccttgtgaacggaatcggggaaggg

SEQ ID NO: 798816 - DNA, 75 bp, synthetic construct
  source 1..75: mol_type = other DNA
tgcaaaaataggagacttaattcccgaaggtgtaagattcgttaggcttgatggcgcccttatgatgatgagcac

SEQ ID NO: 798817 - DNA, 75 bp, synthetic construct
  source 1..75: mol_type = other DNA
gccgtctggtttttcaggacggtttttccagtatctgtagctgctgcgatgaaccccgaacacatggcagagtgt

SEQ ID NO: 798818 - DNA, 75 bp, synthetic construct
  source 1..75: mol_type = other DNA
tgtatgctggacagtggcaggatgcagaatccgggctgtgctataaccggttccggtattacgaaccggagagcg

SEQ ID NO: 798819 - DNA, 75 bp, synthetic construct
  source 1..75: mol_type = other DNA
ttatatgatgaggtatttaccaaaaagaaatatgagagagaaaacataaaaattgcttttttagggttaccaaca

SEQ ID NO: 798820 - DNA, 75 bp, synthetic construct
  source 1..75: mol_type = other DNA
tttttatagatgtattatattaaaactacttggttttgaaaacataaaatatgttactcatgccgatttggaaaa

SEQ ID NO: 798821 - DNA, 75 bp, synthetic construct
  source 1..75: mol_type = other DNA
gactgaactgacgatgaactcgttaattgcccgcacggggccgcaacacttttctgttctctggcatcagacagg

SEQ ID NO: 798822 - DNA, 75 bp, synthetic construct
  source 1..75: mol_type = other DNA
gccgctggataaatgcgagctacggcactggctggcctgttttgaccaggtggcaaagcgaacacctgttactgc

SEQ ID NO: 798823 - DNA, 75 bp, synthetic construct
  source 1..75: mol_type = other DNA
gagcctgacaacaaatatttaaagcgtttaactcatgaagacgttgaagttgagtttatgacaatagacataaca

SEQ ID NO: 798824 - DNA, 75 bp, synthetic construct
  source 1..75: mol_type = other DNA
cattggattttttttcattacataacaaggttgccattgtaactggggccgcgggtgaactgggaagaggcttat

SEQ ID NO: 798825 - DNA, 75 bp, synthetic construct
  source 1..75: mol_type = other DNA
acgagatgatggaatggatcttgttctatttcatgatggagtgacgggcgcgtttaaagttaaggttgacatatc

SEQ ID NO: 798826 - DNA, 75 bp, synthetic construct
  source 1..75: mol_type = other DNA
tacggcaggcgcatccgtcggtggccccgcagtgggtgacgcggacgaatcatgcggtgagcgacctgacgggcc

SEQ ID NO: 798827 - DNA, 75 bp, synthetic construct
  source 1..75: mol_type = other DNA
acccggacccgcgcggggaactggacccggaagccgaccccggcctgctgtatgctggacagtggcaggatgcag

SEQ ID NO: 798828 - DNA, 75 bp, synthetic construct
  source 1..75: mol_type = other DNA
cgttgacgatggcgggccgggctgtctgggcgtcatcaaaattattttctacatttttatctttgccggtttgat

SEQ ID NO: 798829 - DNA, 75 bp, synthetic construct
  source 1..75: mol_type = other DNA
cgcggatctcactcacgcgtgatacagaacatcccttatggccattatatttagttgccaaacaattagtgcagg

SEQ ID NO: 798830 - DNA, 75 bp, synthetic construct
  source 1..75: mol_type = other DNA
atgatcctaagcagcaaaatgaaaaacctgtagataagcttaatcagaagcaagaaagtgcgattaagaagatcg

SEQ ID NO: 798831 - DNA, 75 bp, synthetic construct
  source 1..75: mol_type = other DNA
tgggacggcgaccggctgacgacggtacagaccgataccaagcgtatccagacggtataccagccggggagcttc

SEQ ID NO: 798832 - DNA, 75 bp, synthetic construct
  source 1..75: mol_type = other DNA
cgatgcgtggggaaaggcggtcagcaccacacaggacgggctgacgcgcagtatggagtatgacgcggcaggacg

SEQ ID NO: 798833 - DNA, 75 bp, synthetic construct
  source 1..75: mol_type = other DNA
tgacgtggagccgctacgggcagttacagaccttcaccgactgctcaggctatgaaacccgttatgaatatgacc

SEQ ID NO: 798834 - DNA, 75 bp, synthetic construct
  source 1..75: mol_type = other DNA
aatattacggataagggttacgtcacgagttcaatcgtcgccattttaggctatcaggcgggcagtaatggctag

SEQ ID NO: 798835 - DNA, 75 bp, synthetic construct
  source 1..75: mol_type = other DNA
gagttacggtacgggctcattaaatattacggataagggttacgtcacgagttcaatcgtcgccattttaggcta

SEQ ID NO: 798836 - DNA, 75 bp, synthetic construct
  source 1..75: mol_type = other DNA
tacggacggacgacgagcggacccaccactaccactacgacagccagcaccggctggtgttttacacgcggatac

SEQ ID NO: 798837 - DNA, 75 bp, synthetic construct
  source 1..75: mol_type = other DNA
aatttaagcatgtttcgcatgacgaaaaaccggcaggcaatgactgtgttgaagtgcatgaaaagattggagtgg

SEQ ID NO: 798838 - DNA, 75 bp, synthetic construct
  source 1..75: mol_type = other DNA
ggggcggcggtcgcgatccactgttcctcgcagagcactttattccgttcctcaacgaccatatcaagccattac

SEQ ID NO: 798839 - DNA, 75 bp, synthetic construct
  source 1..75: mol_type = other DNA
gacagatgaacttcagggttccatgcaggctctgggggtgaaaagcagcattgagcgccgttctttgcagaacgc

SEQ ID NO: 798840 - DNA, 75 bp, synthetic construct
  source 1..75: mol_type = other DNA
atgacgctggtagaaagccgtcatccacgtcatctggaactaagcactcagttgctcgacgccatcatgccgttt

SEQ ID NO: 798841 - DNA, 75 bp, synthetic construct
  source 1..75: mol_type = other DNA
cagcagcccggtcacaggtggcagcattctcggggataaaaccagaatgactgaactggcgcgttccgatgcagc

SEQ ID NO: 798842 - DNA, 75 bp, synthetic construct
  source 1..75: mol_type = other DNA
gctgtatcattttgcgcgcgccgagtggatccaaagtcttctccgcaggtcacgatattcacgaactgccgtctg

SEQ ID NO: 798843 - DNA, 75 bp, synthetic construct
  source 1..75: mol_type = other DNA
taataaaaataatgattcctcaattgaatttcaaattggtaatcaaggaactggggaggcgactattcgcgaggg

SEQ ID NO: 798844 - DNA, 75 bp, synthetic construct
  source 1..75: mol_type = other DNA
gtattgcatttagttactacgattataaagcttataatttcaatattgaaaaaacagagtttgttgttatccata

SEQ ID NO: 798845 - DNA, 75 bp, synthetic construct
  source 1..75: mol_type = other DNA
atacatcaggtaagccatcagaatactttggccttcctgcatcctttgcattagagattgatggtttccctgttc

SEQ ID NO: 798846 - DNA, 75 bp, synthetic construct
  source 1..75: mol_type = other DNA
taacgctgccggatatccggtatataacggacagattgccaaattcgttaccgtgcaaggccattctatggctgt

SEQ ID NO: 798847 - DNA, 75 bp, synthetic construct
  source 1..75: mol_type = other DNA
attttcacgggacaacgtaatgtcctccaatattttccttatttcccgagggaaactattgcaacctattaaaga

SEQ ID NO: 798848 - DNA, 75 bp, synthetic construct
  source 1..75: mol_type = other DNA
tttacgctgggtaataccggcggtttcgttgatcttgggacctatgagtatgtcctgaaaagcgacggcaacagc

SEQ ID NO: 798849 - DNA, 75 bp, synthetic construct
  source 1..75: mol_type = other DNA
acccgaacccgaacccgaacccgaacccgaacccgaacccgaacccgaacccgaacccgaacccgaacccgaacc

SEQ ID NO: 798850 - DNA, 75 bp, synthetic construct
  source 1..75: mol_type = other DNA
tattcactctatgactgcggaaaaataaacagtgttagggccattcgactgtatgaaagcctgtgccagtaccgt

SEQ ID NO: 798851 - DNA, 75 bp, synthetic construct
  source 1..75: mol_type = other DNA
tgtaaataacaaccagacaagcaaggtgacgggaactgataccgaagaagtcgtcaaaaaacagagtattaaaat

SEQ ID NO: 798852 - DNA, 75 bp, synthetic construct
  source 1..75: mol_type = other DNA
taataaaaataacgattcctcaattgaatttcaaattggtaatcaaggaacgggggaagcgactattcgcgaggg

SEQ ID NO: 798853 - DNA, 75 bp, synthetic construct
  source 1..75: mol_type = other DNA
gggcacgtttcccggtaaaaatgctccaggggccagataaaaaaacaaagggcagaaacgtgatcaactttggcc

SEQ ID NO: 798854 - DNA, 75 bp, synthetic construct
  source 1..75: mol_type = other DNA
tgcggtaatcttttacccgaaagaagggagttttgactgcgtcgcgcgcccctggctaacagaggctggcagccg

SEQ ID NO: 798855 - DNA, 75 bp, synthetic construct
  source 1..75: mol_type = other DNA
atgggcgagttaaaaacaacccatacgataatgacaatgacaataagtaccgcgaaaaaatcagtcaacattagt

SEQ ID NO: 798856 - DNA, 75 bp, synthetic construct
  source 1..75: mol_type = other DNA
gtggggacgtcatccggtatgcttatgataatccgcacagtgaattaccggccacgacaacagatgcgacgggca

SEQ ID NO: 798857 - DNA, 75 bp, synthetic construct
  source 1..75: mol_type = other DNA
aaactggaacaccggtcattacaggttggtatttctcgtaacttaatcagtcaatttaacgaagacgccatggtt

SEQ ID NO: 798858 - DNA, 75 bp, synthetic construct
  source 1..75: mol_type = other DNA
aggaatcagcctagacaggcttttaacatcgagcagcgcaccatcaggaactctcgatacactgtataaaaagtt

SEQ ID NO: 798859 - DNA, 75 bp, synthetic construct
  source 1..75: mol_type = other DNA
gcagacaagaggtcatcaacaaagcaatacaaatcgaacaaaccaatgaagtacaaacccagattggtgagatgc

SEQ ID NO: 798860 - DNA, 75 bp, synthetic construct
  source 1..75: mol_type = other DNA
tgatgagatgggcagaacccgtgtcacgttaggtaaagggcgccggggcaatcagttacccgatcctgaacactg

SEQ ID NO: 798861 - DNA, 75 bp, synthetic construct
  source 1..75: mol_type = other DNA
ccagagcggatgcccggatagaccgggcatttgccgaagagatgccggcaattatttttgttgcaggtgagcggc

SEQ ID NO: 798862 - DNA, 75 bp, synthetic construct
  source 1..75: mol_type = other DNA
ctaaagcagatgcccggattaaccgggcgtttgccgaagaagtccctgcatgcctgcaaacgggtgaaggcccgc

SEQ ID NO: 798863 - DNA, 75 bp, synthetic construct
  source 1..75: mol_type = other DNA
ttgtagagctgccgccaccgtgggattcgtggctggatatcgtggttacgggttatccggacaatagagacccag

SEQ ID NO: 798864 - DNA, 75 bp, synthetic construct
  source 1..75: mol_type = other DNA
caagcagtattggttatggccctggttcagtaggtctgtccgttgggcaagatgggtttggtttttccttctcta

SEQ ID NO: 798865 - DNA, 75 bp, synthetic construct
  source 1..75: mol_type = other DNA
agcaaaaacaacaaaaaaattcttgctgaaacgaattggtataaaaaaatcccagccttactaaaatcttttaca

SEQ ID NO: 798866 - DNA, 75 bp, synthetic construct
  source 1..75: mol_type = other DNA
attcattatgaaaaagagttgatggcatataaagatcaactggcgacagcgaccggcgttcgtgacgtggctctg

SEQ ID NO: 798867 - DNA, 75 bp, synthetic construct
  source 1..75: mol_type = other DNA
cgctgaccgtcgccttgtgtctctttcacgtcccggctcaggccggtattcccgtttttgatgaagtagccaacg

SEQ ID NO: 798868 - DNA, 75 bp, synthetic construct
  source 1..75: mol_type = other DNA
atgccagtgcaaaccagtatcgacggcggggtggtaacctggacgggaaccgtaattgccaaccatctgtataac

SEQ ID NO: 798869 - DNA, 75 bp, synthetic construct
  source 1..75: mol_type = other DNA
tgtcatttgatgagatgttcattgatattggcgcgaacagtcgcgatgaggtggaaaaacgcggtgtggcgatgg

SEQ ID NO: 798870 - DNA, 75 bp, synthetic construct
  source 1..75: mol_type = other DNA
tgacggtggtgtacgtccgctcggtattccggccgtgtcggaccggatcgcccagatggtcgttaagcagatact

SEQ ID NO: 798871 - DNA, 75 bp, synthetic construct
  source 1..75: mol_type = other DNA
atggcgggcgaggctgccgtgtccgaccccatcggcctggcatgggcagcctccctggcctcgatcgcggtggcg

SEQ ID NO: 798872 - DNA, 75 bp, synthetic construct
  source 1..75: mol_type = other DNA
tggtcggtgttttgctgagacttctaacttcctgtttttgttggtgttgtccttacaccgtccaatcatgattgg

SEQ ID NO: 798873 - DNA, 75 bp, synthetic construct
  source 1..75: mol_type = other DNA
attatgacccgctgcaggggaggtatatcactcaggatccgattgggctgaaggggggatggaatttttatcagt

SEQ ID NO: 798874 - DNA, 75 bp, synthetic construct
  source 1..75: mol_type = other DNA
gtgccgggtgctgaggacgtactgccagcgccgctgccgccgtaccgggtgcttaccgggctggcagaccgtttc

SEQ ID NO: 798875 - DNA, 75 bp, synthetic construct
  source 1..75: mol_type = other DNA
ctcccccctgctctcaaatctgttcctgcactatgcctttgatatgtggatgcaacgtcagtttcccggcgttcc

SEQ ID NO: 798876 - DNA, 75 bp, synthetic construct
  source 1..75: mol_type = other DNA
accgagaagcaagctccaaagcatcggatggagtgtcaaaagcggcctttcccgatccgtgctggacaccacctc

SEQ ID NO: 798877 - DNA, 75 bp, synthetic construct
  source 1..75: mol_type = other DNA
aactggataattattataagaattgcgatgatgatatgccagcggtagctggaaaagcatttactgaagatgaag

SEQ ID NO: 798878 - DNA, 75 bp, synthetic construct
  source 1..75: mol_type = other DNA
gatggtggggcgggattcaggttgattatcggggaatacggctcaggtaagacattctttttaagcgttgtacgc

SEQ ID NO: 798879 - DNA, 75 bp, synthetic construct
  source 1..75: mol_type = other DNA
agcccacatctgtgggctttcatgttaccaggagccgcggctcctttgcgtatccttttatgtctcctcaccgtc

SEQ ID NO: 798880 - DNA, 75 bp, synthetic construct
  source 1..75: mol_type = other DNA
ttgtttccgtactttgccgggttgttcgttgcgcactacatgacgctctgggcggcagacagcagagcgatgctg

SEQ ID NO: 798881 - DNA, 75 bp, synthetic construct
  source 1..75: mol_type = other DNA
agaaattaaagaattaggtaaattagcaaagagagctgccgatgagttagaatcagcaataaaagcaaccactcc

SEQ ID NO: 798882 - DNA, 75 bp, synthetic construct
  source 1..75: mol_type = other DNA
ttaggggtaatttatggagaactatttaaattagaagttaaagagtatctcccgatgctagcagttggtttggtg

SEQ ID NO: 798883 - DNA, 75 bp, synthetic construct
  source 1..75: mol_type = other DNA
ttaggggtgatttatggagaactatttaaactagaagttaaagaatatcttccgatgcttgcaattggtttggtt

SEQ ID NO: 798884 - DNA, 75 bp, synthetic construct
  source 1..75: mol_type = other DNA
gagacggcgcagggcatcctgacccatcagtacgatgaactcagcaaccggactgccaccacctttccggacggc

SEQ ID NO: 798885 - DNA, 75 bp, synthetic construct
  source 1..75: mol_type = other DNA
ggagtgatccgtgccctgcagcgtgatccggacaatggtgccctgacgtcgcgtctggcgggagaactggccatg

SEQ ID NO: 798886 - DNA, 75 bp, synthetic construct
  source 1..75: mol_type = other DNA
gtattacaaccgccaccgctattatgacccgctgcaggggcgatatatcactcaggatccgattgggctgaaagg

SEQ ID NO: 798887 - DNA, 75 bp, synthetic construct
  source 1..75: mol_type = other DNA
gatcatgacgcaactaaggttatgagtgaaaacacggtaaacagcgcattgcgtgcgatgggctatgacacgaaa

SEQ ID NO: 798888 - DNA, 75 bp, synthetic construct
  source 1..75: mol_type = other DNA
gcgcatagtgatcgctgtgtcccgttggtagatggtgcttatggttttgtattggctgactttatgtcgcttgtg

SEQ ID NO: 798889 - DNA, 75 bp, synthetic construct
  source 1..75: mol_type = other DNA
gcccacagtgaccgctgtgtcccgctggtcgatggcgcttatggttttgtattggctgactttatgtcgcttgtg

SEQ ID NO: 798890 - DNA, 75 bp, synthetic construct
  source 1..75: mol_type = other DNA
agtacgatgacatcaagtccaaccttcgggaagctgtagcgactgagcatctgactgtagaccagcatcgctata

SEQ ID NO: 798891 - DNA, 75 bp, synthetic construct
  source 1..75: mol_type = other DNA
ctaatactggtcgtgtatatggtcatgatgaccctaaaggcacagggcatggttctttgcctcatataaatatta

SEQ ID NO: 798892 - DNA, 75 bp, synthetic construct
  source 1..75: mol_type = other DNA
tggaatcagtccggcacgctgtttgaaggcattgaacgctgggccgagcgcaaagcgttattaacccatgacgat

SEQ ID NO: 798893 - DNA, 75 bp, synthetic construct
  source 1..75: mol_type = other DNA
cgtttagacatacagttgcgacccagttaaaacaacatggggtcgagctagcgtatgctcaggcgattatgggtc

SEQ ID NO: 798894 - DNA, 75 bp, synthetic construct
  source 1..75: mol_type = other DNA
gtcatgctggcctgcagcaccatggccggtgcggcggagaatgaacgcagtacgttcggtctctccctgccacag

SEQ ID NO: 798895 - DNA, 75 bp, synthetic construct
  source 1..75: mol_type = other DNA
ggtgaaaaccgcatttcaattaaagatgttaactctttaacctctctttcaaaatcagaaaataatcacaattat

SEQ ID NO: 798896 - DNA, 75 bp, synthetic construct
  source 1..75: mol_type = other DNA
ttaccagtgtcttaaaacaaattgcatttgatttagcatgcagaactatacagcagaatactccacaaaaaaaat

SEQ ID NO: 798897 - DNA, 75 bp, synthetic construct
  source 1..75: mol_type = other DNA
atcaattattctcctgtagaagatattttgaataagcacaggaaacagtcaatagaatttttagtttcagcaatt

SEQ ID NO: 798898 - DNA, 75 bp, synthetic construct
  source 1..75: mol_type = other DNA
tggcatggtgctaaacgtccggttattggcaaacttctcaggatgggggctgacaaaactctcgcaacgtataac

SEQ ID NO: 798899 - DNA, 75 bp, synthetic construct
  source 1..75: mol_type = other DNA
aaaacaaaatgaattctcacgaactttattttgaaaaaataaaaaagaacaaaacacatggcaggatctgtccac

SEQ ID NO: 798900 - DNA, 75 bp, synthetic construct
  source 1..75: mol_type = other DNA
agtgaagtgattgatgctgttatcgcaggccagaatcaggcttacagggaactaagaagaataagagataatatt

SEQ ID NO: 798901 - DNA, 75 bp, synthetic construct
  source 1..75: mol_type = other DNA
ctaccatgcgttgttctggctggcgatagggatgttgggtattgcgatgatttgcctgctgtttattaaagatat

SEQ ID NO: 798902 - DNA, 75 bp, synthetic construct
  source 1..75: mol_type = other DNA
ggtaacggccggagtgattaaggcgctgcaacgggatccggataatgcggcactgaccggacgtctggccggtga

SEQ ID NO: 798903 - DNA, 75 bp, synthetic construct
  source 1..75: mol_type = other DNA
ctgtgtgaatgcaacggagtgtaccagcggggatgaagatcagcagccggggacctctgttgccggaacggggtt

SEQ ID NO: 798904 - DNA, 75 bp, synthetic construct
  source 1..75: mol_type = other DNA
atcgagaatttatacaatagttgatatcaattattctcctgtagaagatattttgaataagcacaggaaacagtc

SEQ ID NO: 798905 - DNA, 75 bp, synthetic construct
  source 1..75: mol_type = other DNA
ccgaaaatgggacggagctaaatgagacgctaccaaagctcagtccgctgaatcctcagtacaaaacgaaaaagc

SEQ ID NO: 798906 - DNA, 75 bp, synthetic construct
  source 1..75: mol_type = other DNA
aaatgtcgcggcactgaatatcaacttatcggatgcagacgcaacattgatgagggaaatggcagaggccctgga

SEQ ID NO: 798907 - DNA, 75 bp, synthetic construct
  source 1..75: mol_type = other DNA
ggtcctcgctgaccgtgacggcttggcgttccactcgtttagacatacggtcgccactcagttaaaacagcatgg

SEQ ID NO: 798908 - DNA, 75 bp, synthetic construct
  source 1..75: mol_type = other DNA
cacgaggtgcagactcggctaattggtctggatgagggggtaggtaaactgcaaatcactctggtgatggttcac

SEQ ID NO: 798909 - DNA, 75 bp, synthetic construct
  source 1..75: mol_type = other DNA
gcatcatcatcaatgcgggccagtcgcgcagcctgtgttatgaggcgctaggttgcgccaaacgtggtgactttg

SEQ ID NO: 798910 - DNA, 75 bp, synthetic construct
  source 1..75: mol_type = other DNA
aatgaaaatacaggttttattgccgtcgcagctccagcgattttctttgctgttggatatttccttaaaaaagag

SEQ ID NO: 798911 - DNA, 75 bp, synthetic construct
  source 1..75: mol_type = other DNA
ggtcgacggtgtagtcgccgtgcgcgatgccgatcccggcacgaccatcgtcgcgggccaggccgtggtggaagt

SEQ ID NO: 798912 - DNA, 75 bp, synthetic construct
  source 1..75: mol_type = other DNA
gataaaggctttattactcacatgccaaaaagtaaggaggatgcagtcagcatcatcacgcagatagaggcgaaa

SEQ ID NO: 798913 - DNA, 75 bp, synthetic construct
  source 1..75: mol_type = other DNA
tctttgccgaaacgctaattagtctgaagtggccgatattgtcgattggcatggtgctggcgttcgccttcgtca

SEQ ID NO: 798914 - DNA, 75 bp, synthetic construct
  source 1..75: mol_type = other DNA
cgttactctgctggtttttggcgtgctcacttactacgttatcgggccggtgatgtccgacctcatgggcgggct

SEQ ID NO: 798915 - DNA, 75 bp, synthetic construct
  source 1..75: mol_type = other DNA
tgctcggttcaatgctgatcccgttcgttactctgctggttttcggcgtgctcacttactacgttatcggaccgg

SEQ ID NO: 798916 - DNA, 75 bp, synthetic construct
  source 1..75: mol_type = other DNA
cgccaatcattaagacgacgcgagaaacaattaaaatatttcttgatgctggtgaactggtgagggttagcgacc

SEQ ID NO: 798917 - DNA, 75 bp, synthetic construct
  source 1..75: mol_type = other DNA
caccgatgaaggatcggtcaatgagaaacaggaaacatttattgtaccgatgcgtaatgctggcgagctgacgct

SEQ ID NO: 798918 - DNA, 75 bp, synthetic construct
  source 1..75: mol_type = other DNA
cgacaaagccctgctcggcacccagtcgggtgcgggattcctcggcgcggtggtgctggggctggcgattggcta

SEQ ID NO: 798919 - DNA, 75 bp, synthetic construct
  source 1..75: mol_type = other DNA
ttgcgacgttcattgcgcccaaactgtttacccgacaggaaaaagaggctgccagtagtgccattgtggtcggtg

SEQ ID NO: 798920 - DNA, 75 bp, synthetic construct
  source 1..75: mol_type = other DNA
ccgaggggggatgcttctgtactgtgtctgacactaccactgtcggcagggacgatgccggcagcgcttcagctc

SEQ ID NO: 798921 - DNA, 75 bp, synthetic construct
  source 1..75: mol_type = other DNA
ctatctgttagtgctccagaagtaaaaccagaagtaaaaccagaagttacgcctagcattaccatagcgagcctc

SEQ ID NO: 798922 - DNA, 75 bp, synthetic construct
  source 1..75: mol_type = other DNA
gtgtggatacgcacgaaatcactgtatacgcacttcatgaagagccagtacttcgaccagctgggccagtcggtg

SEQ ID NO: 798923 - DNA, 75 bp, synthetic construct
  source 1..75: mol_type = other DNA
ggtgatgttgaaaacataaagtacaatattgccaccattagaatgcctgaagaattgatgcttaaattggcggac

SEQ ID NO: 798924 - DNA, 75 bp, synthetic construct
  source 1..75: mol_type = other DNA
taatgaccaagcctcagcgtccctatctgttagtgctcctcaaaagcctagcattcctgaagataaacccagcgt

SEQ ID NO: 798925 - DNA, 75 bp, synthetic construct
  source 1..75: mol_type = other DNA
gcatgaggcgtatcgaagcgggagacagtcagtcactgatagattatgtcgatcgttttgagggtattaatcggc

SEQ ID NO: 798926 - DNA, 75 bp, synthetic construct
  source 1..75: mol_type = other DNA
gcagcactcaaggcaatccatgcggatgaccctacagcctcctatgaggatatgaggggccatctacgggatgtc

SEQ ID NO: 798927 - DNA, 75 bp, synthetic construct
  source 1..75: mol_type = other DNA
gaataattactctatttatccatctttgcaggatacccatgaagttgtcagagatgatccagaaacgatttgtac

SEQ ID NO: 798928 - DNA, 75 bp, synthetic construct
  source 1..75: mol_type = other DNA
gccgatttctgaggaactggagaaaaaagttaaagaggaggccagcgccaaattattcaaagttgattatgagaa

SEQ ID NO: 798929 - DNA, 75 bp, synthetic construct
  source 1..75: mol_type = other DNA
tataaacgggggggcagcagaatataacggcattgtctggactgcgaaaggcggatttgtggatacagcacatgt

SEQ ID NO: 798930 - DNA, 75 bp, synthetic construct
  source 1..75: mol_type = other DNA
aatagcgatcatgaacttgttatgcgcgcattggatacgtatctgtgctacttcagaaataaaaatctgagtaac

SEQ ID NO: 798931 - DNA, 75 bp, synthetic construct
  source 1..75: mol_type = other DNA
tttattcaatttattgatttgctttttgaaaacggaagtgttgaagagaaaaacttagcatttgacctttatcac

SEQ ID NO: 798932 - DNA, 75 bp, synthetic construct
  source 1..75: mol_type = other DNA
tcaggatgaaaattgaactgactgaaggtagtggtttttctaaaagtctttctgacagtcagattgagatgcata

SEQ ID NO: 798933 - DNA, 75 bp, synthetic construct
  source 1..75: mol_type = other DNA
tgcagaaattggtgaggcgatggctcgggctgtcgtaaaacctgcctcccgtgcacgtaaacgtctttcgtttga

SEQ ID NO: 798934 - DNA, 75 bp, synthetic construct
  source 1..75: mol_type = other DNA
cggtaagtgattttcgacgcgacttcccgcagtttgctgacccggcaaaatatcccgacgcccaaatcgggttcc

SEQ ID NO: 798935 - DNA, 75 bp, synthetic construct
  source 1..75: mol_type = other DNA
cccgacacactgcccggtaccgaatacggccccgacaggggtatccgcctttcggcggtgtggctgatgcacgac

SEQ ID NO: 798936 - DNA, 75 bp, synthetic construct
  source 1..75: mol_type = other DNA
cgaaacgcatcgtcgaactggaaaacctgctgctggtggatgtgaccgaaaccgtctggcctgctgaggtgggaa

SEQ ID NO: 798937 - DNA, 75 bp, synthetic construct
  source 1..75: mol_type = other DNA
ttttcatttagttcagttaccaatagttctatattagaggatgtatcacttattgcatatccagaaaccaattct

SEQ ID NO: 798938 - DNA, 75 bp, synthetic construct
  source 1..75: mol_type = other DNA
atgcacagtgggggattcccgccggcacggtgcagatgctcgaccggctggaaagtgaaatcctggctgaccggg

SEQ ID NO: 798939 - DNA, 75 bp, synthetic construct
  source 1..75: mol_type = other DNA
cgagcagaaaaacctgggtgatgcttccgttatcaataatggcctgctcaccatctccactgagcgtagctgggt

SEQ ID NO: 798940 - DNA, 75 bp, synthetic construct
  source 1..75: mol_type = other DNA
ctcattgtcgagtggtcatgggagcaggcaaatagttcctcataccttgattgacaatggcttgagatggcatgt

SEQ ID NO: 798941 - DNA, 75 bp, synthetic construct
  source 1..75: mol_type = other DNA
tgttggagaatatatctataatttttctggttttttgaagtgtattaatgaaaatacttctgaatgttatcatca

SEQ ID NO: 798942 - DNA, 72 bp, synthetic construct
  source 1..72: mol_type = other DNA
atgcgctacgcttatcaggccttgtattatccctccagtgcagagaaaatcggccagttttctctgcctgca

SEQ ID NO: 798943 - DNA, 75 bp, synthetic construct
  source 1..75: mol_type = other DNA
agtcaattgcgttgttgtttattgccttaaatattgcatcactaccaacatatgctggcgtaagtaaaactttta

SEQ ID NO: 798944 - DNA, 75 bp, synthetic construct
  source 1..75: mol_type = other DNA
aaagtccgaatggctgcgggttcacagggaaaaagtggcagtgtcagaataatttactttctggcgacggaagag

SEQ ID NO: 798945 - DNA, 75 bp, synthetic construct
  source 1..75: mol_type = other DNA
gcggtagcggtgatgtcatcgtcatgatggtggcggagaatacccacgatgcttttatgcagggactgaataaac

SEQ ID NO: 798946 - DNA, 75 bp, synthetic construct
  source 1..75: mol_type = other DNA
gttattttggtagcattgagatttctcttgaagataacatacttcatgggaaaattcagtgtgtaaacgatgttg

SEQ ID NO: 798947 - DNA, 75 bp, synthetic construct
  source 1..75: mol_type = other DNA
ttcctcaatggagtgtggatgctggtctaattagagcaggttcattaatagaaaagtattttcgtttctttgaga

SEQ ID NO: 798948 - DNA, 75 bp, synthetic construct
  source 1..75: mol_type = other DNA
ttcctcagtgggtaattgatgaagggttaattagagaggattctcttatatgcagatattttagattttttgaga

SEQ ID NO: 798949 - DNA, 75 bp, synthetic construct
  source 1..75: mol_type = other DNA
atcaatcctatctacagaaatatcttaactgatttatttgaacaaaaacatcgtaaagaagttgaagatttacta

SEQ ID NO: 798950 - DNA, 75 bp, synthetic construct
  source 1..75: mol_type = other DNA
tggtatggtgacgttagcgtgtattccgaccgcagtattttattttttaccgctggcaatcggtaaatttaatgg

SEQ ID NO: 798951 - DNA, 75 bp, synthetic construct
  source 1..75: mol_type = other DNA
caggcattacaggagagtttcacttctcgtcaggctgaaagcgctattttttatcctggacccaaatgtgcaact

SEQ ID NO: 798952 - DNA, 75 bp, synthetic construct
  source 1..75: mol_type = other DNA
gcgcggggcgttctgacgccctgcttaatgcccaacttgcatttgctttgaacggctattcctttgatggattgg

SEQ ID NO: 798953 - DNA, 75 bp, synthetic construct
  source 1..75: mol_type = other DNA
gattcttgaggacaaaatgatgacatgtgagtcttcacaagcgtcattcagtgaatataatgcccccctctcaga

SEQ ID NO: 798954 - DNA, 75 bp, synthetic construct
  source 1..75: mol_type = other DNA
gagttaagaaataatgcatttaatactgtgaatgctgattataatattgaatgtatggcatcgaggtttgaagat

SEQ ID NO: 798955 - DNA, 75 bp, synthetic construct
  source 1..75: mol_type = other DNA
gctgctggcagtatggttgcctttctccggcaccagttacggcattgccgggctgctaatgctggcggtcagtca

SEQ ID NO: 798956 - DNA, 75 bp, synthetic construct
  source 1..75: mol_type = other DNA
ttatcttcctccagttacggtgctgtcgggatcatattactgatgctctgtcacaggatatacaggacgacgcac

SEQ ID NO: 798957 - DNA, 75 bp, synthetic construct
  source 1..75: mol_type = other DNA
ggggggggggggggggggggggggggatttcgttttaagagcaatgatgagttttgccgacagaagtccgaaaca

SEQ ID NO: 798958 - DNA, 75 bp, synthetic construct
  source 1..75: mol_type = other DNA
tagataaggagactggtctcgacgcatttcgattgaagcgaataaaaccaaaaatatttagtgagttacaagaaa

SEQ ID NO: 798959 - DNA, 75 bp, synthetic construct
  source 1..75: mol_type = other DNA
gatccgttgcattcatcccctatcgtcagcgcaccggcgaaactttcagtgctggatgctaatggcagcctgttg

SEQ ID NO: 798960 - DNA, 75 bp, synthetic construct
  source 1..75: mol_type = other DNA
gcggtaccttgcagttacaacatatatcgccagaacgttcatacattctgggtaaagatgctgaaggcggcgttt

SEQ ID NO: 798961 - DNA, 75 bp, synthetic construct
  source 1..75: mol_type = other DNA
acgcttaccagcgagcaggatgcagttctgcgctatggtcaggtggaagtaccgctcccgccgggagccgacgtt

SEQ ID NO: 798962 - DNA, 75 bp, synthetic construct
  source 1..75: mol_type = other DNA
atctctgtcggcatgtcgctcaacctcggggtgctttatacccatctgttgtgggtagtgataagtgtggttgtg

SEQ ID NO: 798963 - DNA, 75 bp, synthetic construct
  source 1..75: mol_type = other DNA
cagtttgcacagtatgtaatgaaacacgcgccacaggatgcagaagctattctgacaaacaccagttcaccggag

SEQ ID NO: 798964 - DNA, 75 bp, synthetic construct
  source 1..75: mol_type = other DNA
ctggggcgtaacaatgtgcgcaccagttccagcctgtcatttatcagctacgaccaggcgctctccagcgaacct

SEQ ID NO: 798965 - DNA, 75 bp, synthetic construct
  source 1..75: mol_type = other DNA
cgtatttcttcaacaaaaatatgtcgacctatgttgattataaaatcaacctgattgatgaaagcgactttaccc

SEQ ID NO: 798966 - DNA, 75 bp, synthetic construct
  source 1..75: mol_type = other DNA
agtggtggcgcaatatcaattcgacttcggcttgcgcccatcactcgcttacctgaaatcgaaaggcagagatct

SEQ ID NO: 798967 - DNA, 75 bp, synthetic construct
  source 1..75: mol_type = other DNA
ggctggtattaataagtatggcttggacatttggtatgttggcgatgcaaggggaaggtttaatcagtgcacttg

SEQ ID NO: 798968 - DNA, 75 bp, synthetic construct
  source 1..75: mol_type = other DNA
ccgcctgccagaaaatgccgtcgccggaggttatgagttacgcctggcttaccgcaaacaggtctatagcagcag

SEQ ID NO: 798969 - DNA, 75 bp, synthetic construct
  source 1..75: mol_type = other DNA
tcgaattaacctcgtcgctgaaaggtaaacctgtttctgcgcagctaacggtaggcgtggtcgatgaaatgatct

SEQ ID NO: 798970 - DNA, 75 bp, synthetic construct
  source 1..75: mol_type = other DNA
tcgttctaccacctgctcgctatgtgcgttcctatgcacctgcgcagcaaagcgttgcggcaggtagcgaatgga

SEQ ID NO: 798971 - DNA, 75 bp, synthetic construct
  source 1..75: mol_type = other DNA
cggctgggtattggtgcagtgttgggatatttgctggcggggattgcgattggcccgtgggggctggggtttatt

SEQ ID NO: 798972 - DNA, 75 bp, synthetic construct
  source 1..75: mol_type = other DNA
gtttacgctaccggaggatattttgaagggggaactgagagaactaaatttcaatttaaacaatgaattaacttc

SEQ ID NO: 798973 - DNA, 75 bp, synthetic construct
  source 1..75: mol_type = other DNA
ggctcgtgcgatttgttacggacaacgcggagagatcagaaagcgttatcgtgaagggcaggaagatcaactggg

SEQ ID NO: 798974 - DNA, 75 bp, synthetic construct
  source 1..75: mol_type = other DNA
gcgcctgaacatattattaccggcccctggaaacgcctggtatacgatgcggagggccggatacagcgtgccggt

SEQ ID NO: 798975 - DNA, 75 bp, synthetic construct
  source 1..75: mol_type = other DNA
cgtggtttgtgcgcctgttctctcctgacaagaagacgctgggagctatcggtgaagacctgcgcaaggtcgccg

SEQ ID NO: 798976 - DNA, 75 bp, synthetic construct
  source 1..75: mol_type = other DNA
aaatttaaagaggttatccataaaaacaagataaaaacatattctctggatgatgaattgagtaatatctttggt

SEQ ID NO: 798977 - DNA, 75 bp, synthetic construct
  source 1..75: mol_type = other DNA
gaatctggtgctcgagcgcaagatttgcacatcagtttatgtgcggtattgatggctgaagcctgtaatatcgga

SEQ ID NO: 798978 - DNA, 75 bp, synthetic construct
  source 1..75: mol_type = other DNA
agatcctaccgtttttgaaattcgcattaatcgctttcaggaagttatctgcgacacgttcagcggccgcagggt

SEQ ID NO: 798979 - DNA, 75 bp, synthetic construct
  source 1..75: mol_type = other DNA
atcaactacgccctgaactattcgaaggccgtacattgctggtgtggtgcggtgaaaatcgaacctccgcccaac

SEQ ID NO: 798980 - DNA, 75 bp, synthetic construct
  source 1..75: mol_type = other DNA
cgtgcgcagttctgagcggatgcagtttgctggcgtgttgagtcagggcggtgagtttgcctttgtcctcttttc

SEQ ID NO: 798981 - DNA, 75 bp, synthetic construct
  source 1..75: mol_type = other DNA
tgagctgggtgaaacagaactacatccgagcagaaacgctggtcagcgccaatgcgcggctggttgattttcagt

SEQ ID NO: 798982 - DNA, 75 bp, synthetic construct
  source 1..75: mol_type = other DNA
accattgacgtagtggtgcatatggagaaacggaagattaaagaaatctacttcgatcctgaatataaaatgcag

SEQ ID NO: 798983 - DNA, 75 bp, synthetic construct
  source 1..75: mol_type = other DNA
tgatattttcagcgtcaggggtatccgcaaccgggacaatggtcctgaacgcaccgatggtctgcgcaatatgat

SEQ ID NO: 798984 - DNA, 75 bp, synthetic construct
  source 1..75: mol_type = other DNA
gacctgaatattccgttctttgtggatgagggaaacaaaaagctggtcttctggtttgtacgtgttgatgacgaa

SEQ ID NO: 798985 - DNA, 75 bp, synthetic construct
  source 1..75: mol_type = other DNA
gttgatgacgaagggtatccggaaatagcccgctgcacggagcgggagtttgcgaacattcttgccggtatcagc

SEQ ID NO: 798986 - DNA, 75 bp, synthetic construct
  source 1..75: mol_type = other DNA
cttttttgatctcagcggaatatcgctgcccggagagattatctcccgcccctttacgctgcgccttcgctttga

SEQ ID NO: 798987 - DNA, 75 bp, synthetic construct
  source 1..75: mol_type = other DNA
cgggcaacattacccacagccggatctggcgttgtctcccgccggtttcagcgccagggaatccctgttgccatc

SEQ ID NO: 798988 - DNA, 75 bp, synthetic construct
  source 1..75: mol_type = other DNA
gccggacagctgcaggcttaccgctcccctgaccgtttcacgcggtgagcaggtgatgaatccggggcaggacag

SEQ ID NO: 798989 - DNA, 75 bp, synthetic construct
  source 1..75: mol_type = other DNA
cggtaatttacttttctcaccggcaggtgctgctgaaatctctccaaatataccgagcgatcccaccaagttggc

SEQ ID NO: 798990 - DNA, 75 bp, synthetic construct
  source 1..75: mol_type = other DNA
ggtaacaaaagtgctaggagcgttcgcaaaaatatccggccttccgatacccccctggcttaaattatggggatt

SEQ ID NO: 798991 - DNA, 75 bp, synthetic construct
  source 1..75: mol_type = other DNA
taccccacgccaatgatccaggctcgactgaattttgctgatgccctgctgagtgagtcgcgctttggtgtggat

SEQ ID NO: 798992 - DNA, 75 bp, synthetic construct
  source 1..75: mol_type = other DNA
ggatacgtttttactcaggaacctcttgcagcaaaccttattgataaaaagctagacggatatcgtgatgtttta

SEQ ID NO: 798993 - DNA, 75 bp, synthetic construct
  source 1..75: mol_type = other DNA
gccacgggcctgcggcattggttgacgcaaaactcagtagcggcgaatacctgataaaagggaaaaatgtggcgg

SEQ ID NO: 798994 - DNA, 75 bp, synthetic construct
  source 1..75: mol_type = other DNA
atggatttgacctcagcgaccctgttaacgcctggtactggaacgaaaccgattttcagcagcgcctggcaacaa

SEQ ID NO: 798995 - DNA, 75 bp, synthetic construct
  source 1..75: mol_type = other DNA
ccgcacctgcaaatcgagaaagagctggccagcggcgaactgattgacttaacgccagggctatttcaacgccgg

SEQ ID NO: 798996 - DNA, 75 bp, synthetic construct
  source 1..75: mol_type = other DNA
atgaaatggttaaaaagttactggctgccgctttcggttctggcgcttcttgtgatggttgatgtgatttttcct

SEQ ID NO: 798997 - DNA, 75 bp, synthetic construct
  source 1..75: mol_type = other DNA
atcaccgcgggcaactttgcgctgaatgcgacagtggccggctctgaaatcagcaataccacgctgacggccacc

SEQ ID NO: 798998 - DNA, 75 bp, synthetic construct
  source 1..75: mol_type = other DNA
cagggaaagtggccatgccttttcacatccagcgacaccactggtgaaaaagatttcgaggaattttttaccgac

SEQ ID NO: 798999 - DNA, 75 bp, synthetic construct
  source 1..75: mol_type = other DNA
tcttttcaactctcgtcttaacagcattaaagtgttggatcctcgtggtataagccataatggtgaagagaccat

SEQ ID NO: 799000 - DNA, 75 bp, synthetic construct
  source 1..75: mol_type = other DNA
cctgttttttacgataacagaagattaccttcattacacgatatagctagtgattgtatagaccgaactactcag

SEQ ID NO: 799001 - DNA, 75 bp, synthetic construct
  source 1..75: mol_type = other DNA
tgacaaatattagtcaaaataatattggtgaaaaaatagccattgattctgaagcgttatataggactaaaacat

SEQ ID NO: 799002 - DNA, 75 bp, synthetic construct
  source 1..75: mol_type = other DNA
agattcgccacaataacaaatgcgtgattctggaactgctgtaccggcaaaagcgcgccaataaatcaacgctgg

SEQ ID NO: 799003 - DNA, 75 bp, synthetic construct
  source 1..75: mol_type = other DNA
ggcagagcagtggcagtacgacgagcacggctggctgacagaaatcagccacctgagcgaaggccatcaggtggc

SEQ ID NO: 799004 - DNA, 75 bp, synthetic construct
  source 1..75: mol_type = other DNA
tgacgcgcagtatggagtatgacctcgccggacgcatcaccacgctgaccaacgagaacggcagccggagtgagt

SEQ ID NO: 799005 - DNA, 75 bp, synthetic construct
  source 1..75: mol_type = other DNA
cttatataaaagatccaattatacgcagttatatccattctggtgaagataacaagttcgatgattttatgcgtc

SEQ ID NO: 799006 - DNA, 75 bp, synthetic construct
  source 1..75: mol_type = other DNA
cctgagttaagaaaagaactaagaagagttcttaattctgcaaaaaaaacatatcaaccgaaacaggatgattcg

SEQ ID NO: 799007 - DNA, 75 bp, synthetic construct
  source 1..75: mol_type = other DNA
gcgatcttgttacttgggactgtaggtgcaggtaaaacaacatttcttcattacatgagaaaggttagaataaaa

SEQ ID NO: 799008 - DNA, 75 bp, synthetic construct
  source 1..75: mol_type = other DNA
aattatcaccacactgattctggcgatcggattgctgtacgacgattaccagacgtggaaagagggcggtaaaag

SEQ ID NO: 799009 - DNA, 75 bp, synthetic construct
  source 1..75: mol_type = other DNA
cctgattatcctgccggctgaaaatgggtttgatgcgctgcgccgtcaggttccggtacgttattcggtacgtgg

SEQ ID NO: 799010 - DNA, 75 bp, synthetic construct
  source 1..75: mol_type = other DNA
cgtgaaggcatgggcgcgcgagtcaccgccagccacaccacggcaatgcactcctataacggggcgtatacctca

SEQ ID NO: 799011 - DNA, 75 bp, synthetic construct
  source 1..75: mol_type = other DNA
aagttgatgctgtaatgtatgagatgaccagggaacaatttattgctgcgtcattgccagatagcatgattgtta

SEQ ID NO: 799012 - DNA, 75 bp, synthetic construct
  source 1..75: mol_type = other DNA
atggaaattttatctgtaatgaattctgttgtgaccagattacgtgaacagaatcccgaaatggacgtatttatt

SEQ ID NO: 799013 - DNA, 75 bp, synthetic construct
  source 1..75: mol_type = other DNA
aggagaagcctctgatggctgtataattctggatttaccttatcgcaaggttattgctgccagtactgataaaat

SEQ ID NO: 799014 - DNA, 75 bp, synthetic construct
  source 1..75: mol_type = other DNA
cacgttcattttatttaaatggtagctatcagttcaatgccagatattctggcagaccgggttttaaagatgact

SEQ ID NO: 799015 - DNA, 75 bp, synthetic construct
  source 1..75: mol_type = other DNA
gcggcatacagaccgcaaaatcagtggataaggtttcagccagttacgacgcaagcgcaactctggaccctaatg

SEQ ID NO: 799016 - DNA, 75 bp, synthetic construct
  source 1..75: mol_type = other DNA
ttggtgaaatactggattgcaactttggtaactatcctgttagccagaatggacagttcagcaccacgtattacg

SEQ ID NO: 799017 - DNA, 75 bp, synthetic construct
  source 1..75: mol_type = other DNA
aggtgttttaatgctggacgattcggtcaatttgcagatgatggagactgatccagcaccgctggatgaacgagt

SEQ ID NO: 799018 - DNA, 75 bp, synthetic construct
  source 1..75: mol_type = other DNA
caatccaacaaagcactctgccagtttctcggttacagtcaggaagagctgcgcggactcacctttcagcaactg

SEQ ID NO: 799019 - DNA, 75 bp, synthetic construct
  source 1..75: mol_type = other DNA
cggtgaagcttgcagaattcctcaacaacccggcaaacacgggaaatatcgtagacagtggagacaaatactaca

SEQ ID NO: 799020 - DNA, 75 bp, synthetic construct
  source 1..75: mol_type = other DNA
gaagatcgccagcatgccgaaaaagtgattcgttgcaatcacgctcgccctttaagctggaatttcgcattgccg

SEQ ID NO: 799021 - DNA, 75 bp, synthetic construct
  source 1..75: mol_type = other DNA
atgatttttatttgttggcagaacggaaaacattacgttttgtccatacttatatcatgcttatcgaatatatcg

SEQ ID NO: 799022 - DNA, 75 bp, synthetic construct
  source 1..75: mol_type = other DNA
tgaatgccataaagagacaggagctcattgacgccgactttcagcgcctcagaaagctcatctggccggaggatg

SEQ ID NO: 799023 - DNA, 75 bp, synthetic construct
  source 1..75: mol_type = other DNA
atggatgaagaaagggtgttttcactcagctatgaacaactaacccggtttacggaacgacgcatccgggaatgc

SEQ ID NO: 799024 - DNA, 75 bp, synthetic construct
  source 1..75: mol_type = other DNA
aatgaacatactggcgcggtcaaatcctccttaatgtatgaaaaaaggtttgttgatgcattgcaacaggcacct

SEQ ID NO: 799025 - DNA, 75 bp, synthetic construct
  source 1..75: mol_type = other DNA
cataccgtaaaaggcgcaaatattcagtcagatattccaggtgctgagccggaacaatatgcacaggctacgaaa

SEQ ID NO: 799026 - DNA, 75 bp, synthetic construct
  source 1..75: mol_type = other DNA
cccggagcagaaggctttctgaatcgcctgggcgtacagacccgtgatgccagcggtaacatgcgtgacatggct

SEQ ID NO: 799027 - DNA, 75 bp, synthetic construct
  source 1..75: mol_type = other DNA
aacactggtggctaaaaggagaaaagtacgttcgactaaaaacgcgcatcaaaaaaacttttaaatcagatgctt

SEQ ID NO: 799028 - DNA, 75 bp, synthetic construct
  source 1..75: mol_type = other DNA
gtatccaaagcggcattgatggcgatcgggcagggcgtcaggagggcggcatgaggcgacaacgacgaagtatca

SEQ ID NO: 799029 - DNA, 75 bp, synthetic construct
  source 1..75: mol_type = other DNA
cgccgccgatatgcgtggtatggctgtgggtactgctggtggtgtaaatagcggcatacagaccgcaaaatcagt

SEQ ID NO: 799030 - DNA, 75 bp, synthetic construct
  source 1..75: mol_type = other DNA
tgcgaagataaagagttcgctggtttaatatgtaaggataatagtggcagatatttctcaacagcacctaaccga

SEQ ID NO: 799031 - DNA, 75 bp, synthetic construct
  source 1..75: mol_type = other DNA
cggtggcgtatctctttttcgaccagccacacgcctgtttctggcaatggaatgaacatactggcgcggtcaaat

SEQ ID NO: 799032 - DNA, 75 bp, synthetic construct
  source 1..75: mol_type = other DNA
catgaacatactggcgcagtcaaatcctccttaatgtatgaaaaaaggttaattgaagcattgcaacaggcgcct

SEQ ID NO: 799033 - DNA, 75 bp, synthetic construct
  source 1..75: mol_type = other DNA
tagtggtatcgatgtcattccagccgaccctcgcttatcaaccgtttcaactgataagctacctagtacaaacaa

SEQ ID NO: 799034 - DNA, 75 bp, synthetic construct
  source 1..75: mol_type = other DNA
ttatcatcttatccggagtcttccgcaggaggtcaggcgaatgctgaacgtcagccgggaaacatcgcttgtccg

SEQ ID NO: 799035 - DNA, 75 bp, synthetic construct
  source 1..75: mol_type = other DNA
tcagggctactgctctgatatgacgcgcactttgctggtgaatggcgaaggggtgcgccgaatctcacccgctgt

SEQ ID NO: 799036 - DNA, 75 bp, synthetic construct
  source 1..75: mol_type = other DNA
agtctgaactcaatgcgaaactggttagcgccacgccggatgtgctgcggcaaatcaaaacgccagaggaggtgg

SEQ ID NO: 799037 - DNA, 75 bp, synthetic construct
  source 1..75: mol_type = other DNA
caggagtgcgttagcgcatccaacccgctttctttgcccgtggcgctatgcggggctgtgacctatgccgtcatt

SEQ ID NO: 799038 - DNA, 75 bp, synthetic construct
  source 1..75: mol_type = other DNA
tgctatcggcattgaagttcatgaagatccgcgtttttcaccgcgggacaccacgacgctacagccaggcatgtt

SEQ ID NO: 799039 - DNA, 75 bp, synthetic construct
  source 1..75: mol_type = other DNA
gcagaaaaaacctcttttgacaccattgtcgccagtggctggcgtggggcgctgccgcacggcaaagccagcgac

SEQ ID NO: 799040 - DNA, 75 bp, synthetic construct
  source 1..75: mol_type = other DNA
gcaggttgacgatgccgcgcgccgggtcattacagaagcaggttatggcgactatttcggtcataacaccggtca

SEQ ID NO: 799041 - DNA, 75 bp, synthetic construct
  source 1..75: mol_type = other DNA
gaaaaataaagtttagtagcattgatcgttgttgtggttggattgaaataaaaccggggcatttagttgagcata

SEQ ID NO: 799042 - DNA, 75 bp, synthetic construct
  source 1..75: mol_type = other DNA
ctactcgggtattatttcttcttcaggacataacgaagaagactacgatgatgatgttatttcatttttcatcca

SEQ ID NO: 799043 - DNA, 75 bp, synthetic construct
  source 1..75: mol_type = other DNA
atagcatcaataagagtccctttcactagagaaaatagtcaaactatctttgcgaactataaatacaataatgga

SEQ ID NO: 799044 - DNA, 75 bp, synthetic construct
  source 1..75: mol_type = other DNA
cacggtgctctttggttttgggggcggttttgtcgtggtgccatttgtttatcaactgatgctgcggcagtctga

SEQ ID NO: 799045 - DNA, 75 bp, synthetic construct
  source 1..75: mol_type = other DNA
ccatccgagcattgaaagcaaaaaagacatcgttctatgtctggagcaacagctctcaacgtggcactggacgac

SEQ ID NO: 799046 - DNA, 75 bp, synthetic construct
  source 1..75: mol_type = other DNA
caggcacagctcgcagcaatctctgcaattcgccccggcgtgcgctgccagcaggttgacgacgccgcgcgccgg

SEQ ID NO: 799047 - DNA, 75 bp, synthetic construct
  source 1..75: mol_type = other DNA
ttggtctgctacaacaccctcttaaccttaatcggcgaggacttgtgcgagcgacggtcgctatgaataacggcc

SEQ ID NO: 799048 - DNA, 75 bp, synthetic construct
  source 1..75: mol_type = other DNA
tcggttgtacatacctgagaataaacaatcagtactcaaagcgtatatagataaacccgtttgttttggtattcg

SEQ ID NO: 799049 - DNA, 75 bp, synthetic construct
  source 1..75: mol_type = other DNA
atcaggccattgcgctggtagtggccgagaccttcgaacaggcgcgagcggcggcctcgctggtgcaggcgcact

SEQ ID NO: 799050 - DNA, 75 bp, synthetic construct
  source 1..75: mol_type = other DNA
gccagcaccgcctggtgttctacacgcggatacagcatggcgagccactggtcgagagccgctacctctacgacc

SEQ ID NO: 799051 - DNA, 75 bp, synthetic construct
  source 1..75: mol_type = other DNA
aagttcatttttaccactgcgaccaccggggcctgccgctggcgctcatcagcgaagacggcaatacggcgtggc

SEQ ID NO: 799052 - DNA, 75 bp, synthetic construct
  source 1..75: mol_type = other DNA
aagcaaatttctcgccgatcgagcatgcgctaactctgttgatacgccgagatatcaattcgctgcgtacacgcg

SEQ ID NO: 799053 - DNA, 75 bp, synthetic construct
  source 1..75: mol_type = other DNA
gtgattaccgaggcaggatttggcgactattttggtcacaacaccggtcatgctattggcattgaagtacacgaa

SEQ ID NO: 799054 - DNA, 75 bp, synthetic construct
  source 1..75: mol_type = other DNA
ttgaagatgtcgtactggttaccccgcaaggcgccgaagtgctgtatgccacgccgaaaacagtgttgctcacgg

SEQ ID NO: 799055 - DNA, 75 bp, synthetic construct
  source 1..75: mol_type = other DNA
gcagaaaaagcctcttttgacaccattgtcgccagtggctggcgcggagcgctaccgcacggtaaagccagcgac

SEQ ID NO: 799056 - DNA, 75 bp, synthetic construct
  source 1..75: mol_type = other DNA
tattcttcgctgtctggcgggtggcaagcgtgttgttttcatcaccccgcttcgtgcgctttctgcacaaacaga

SEQ ID NO: 799057 - DNA, 75 bp, synthetic construct
  source 1..75: mol_type = other DNA
atgatggagccccgatttataaatttccaagccgctctgaaccacatgacattctcctgcataacaacttcctga

SEQ ID NO: 799058 - DNA, 75 bp, synthetic construct
  source 1..75: mol_type = other DNA
aaataattattttgaaagagggataaaggaatttaactcacgatttactttgggagactttttaacaaaaaatga

SEQ ID NO: 799059 - DNA, 75 bp, synthetic construct
  source 1..75: mol_type = other DNA
gatggggagctattgctggtattgagtaatctcatcgggagtgactatttttctcctttgcagttactgaaatta

SEQ ID NO: 799060 - DNA, 75 bp, synthetic construct
  source 1..75: mol_type = other DNA
cgcagtacagtgacgccgggcggggctgtctgcagatataacgatattattccggctgaccactgtctgcatgat

SEQ ID NO: 799061 - DNA, 75 bp, synthetic construct
  source 1..75: mol_type = other DNA
catggcatatggtgaaggccttccgctgccggagacatatgaccgtcggacccgcgtattaagcagctggcgcgc

SEQ ID NO: 799062 - DNA, 75 bp, synthetic construct
  source 1..75: mol_type = other DNA
aaagcccgaggtagcgcgtgatgaaccagtgatggaatgcctgcggatccccgctttatccacctcgctggagac

SEQ ID NO: 799063 - DNA, 75 bp, synthetic construct
  source 1..75: mol_type = other DNA
attgcaaaaaataatcttcttattaaatttaataataatttattgtttttgtttttgactatttcaacaatatcg

SEQ ID NO: 799064 - DNA, 75 bp, synthetic construct
  source 1..75: mol_type = other DNA
ttttatctgtagatgaattgtcacgttatttatttgtctggttaacatttattggcgcgattgtgggtgatgctg

SEQ ID NO: 799065 - DNA, 75 bp, synthetic construct
  source 1..75: mol_type = other DNA
aggacatgaaaggctccgatacgttcaaagacctgatcgagaacgcggtggacagcaatgaaaaaattgctggca

SEQ ID NO: 799066 - DNA, 75 bp, synthetic construct
  source 1..75: mol_type = other DNA
atcccttcgaactatgatccaatagcgcggacttatagcggaacatgggacgggacgtttaaatggggctggacg

SEQ ID NO: 799067 - DNA, 75 bp, synthetic construct
  source 1..75: mol_type = other DNA
ttacagcagcaggaaaacgatggggatattgtcggcactacggttcagtaccatattgatctggcggtggacggt

SEQ ID NO: 799068 - DNA, 75 bp, synthetic construct
  source 1..75: mol_type = other DNA
atgacatttaaacactatgacgtggtcagggcggcgtcgccgtcagaccttgcggatgcgcttgctcaaaaaatt

SEQ ID NO: 799069 - DNA, 75 bp, synthetic construct
  source 1..75: mol_type = other DNA
ttccggcggaccactgtctgcatgatgtgcaggatatgagccgtcttaaccatccgaaagcggacctgtcaaagg

SEQ ID NO: 799070 - DNA, 75 bp, synthetic construct
  source 1..75: mol_type = other DNA
ataaacgtcaacgcacaggctatagcagatgtaaacggtaacctcagcgcgatgtataacatcaaggtgggggtg

SEQ ID NO: 799071 - DNA, 75 bp, synthetic construct
  source 1..75: mol_type = other DNA
gaagacggaccgcatcccggcgggtgtgatacggacggacgacgagcggacccaccactaccactacgacagcca

SEQ ID NO: 799072 - DNA, 75 bp, synthetic construct
  source 1..75: mol_type = other DNA
atgtgctacaatggtttaaataatatgtttttccctctttgccagattaacaataaccactctgtcacaagtcca

SEQ ID NO: 799073 - DNA, 75 bp, synthetic construct
  source 1..75: mol_type = other DNA
tgtgccactcatactggcatgtcacaaactgagcataatattcaggaagtgtctatgaataccactgaagatact

SEQ ID NO: 799074 - DNA, 75 bp, synthetic construct
  source 1..75: mol_type = other DNA
tagcgtccagggaatgggtattaccattctccgtggtgaggaaaatatctccattaatagtgatatcctggtaac

SEQ ID NO: 799075 - DNA, 75 bp, synthetic construct
  source 1..75: mol_type = other DNA
acatgcctgccgggaaatcactctggcagaggccccggcctggctgctggattattcctggaacggtccggaaga

SEQ ID NO: 799076 - DNA, 75 bp, synthetic construct
  source 1..75: mol_type = other DNA
tgtacctctcatactggcatgtcacaaactgagaataatactcatgaagtagctatgaagattactgcagatatt

SEQ ID NO: 799077 - DNA, 75 bp, synthetic construct
  source 1..75: mol_type = other DNA
agtgatatcctggtaacactacagaaattctttgaagaagattgtgccactcatactggcatgtcacaaactgag

SEQ ID NO: 799078 - DNA, 75 bp, synthetic construct
  source 1..75: mol_type = other DNA
tggaataacacccgatatggcgctgaattttatcagttgatcacgatgtttggtgcaggcggtcgccagctatga

SEQ ID NO: 799079 - DNA, 75 bp, synthetic construct
  source 1..75: mol_type = other DNA
ttcccgaagatttacctttgttttctaaagtaaacttaaaaaatttccacaagagtattaccaattttgggtatg

SEQ ID NO: 799080 - DNA, 75 bp, synthetic construct
  source 1..75: mol_type = other DNA
tgactctgaatttcgaggcaaacttaatgagaaactgcctgctcatataaaattagccgatcatataaatagacc

SEQ ID NO: 799081 - DNA, 75 bp, synthetic construct
  source 1..75: mol_type = other DNA
attgggctgaaagggggatggaatttttatcagtatccgttgaatccgatctcaaatatagatccattaggatta

SEQ ID NO: 799082 - DNA, 75 bp, synthetic construct
  source 1..75: mol_type = other DNA
ctataagaaggtttgctgctgaaggtgtttatatttttgcttgggaggaaatattcaaatggttatgtcttcatg

SEQ ID NO: 799083 - DNA, 75 bp, synthetic construct
  source 1..75: mol_type = other DNA
ggaaaattgttgaacagggtaaacataaggagctgctttctgaaccagaaagtttatacagttacttatatcagt

SEQ ID NO: 799084 - DNA, 75 bp, synthetic construct
  source 1..75: mol_type = other DNA
taccgctacccaaaaaatttgacgatctggttttcccctggcttggcccgacgcgcaccagcgaactggccggtg

SEQ ID NO: 799085 - DNA, 75 bp, synthetic construct
  source 1..75: mol_type = other DNA
cgatgcatggggaaaggcggtcagcaccacgcagggcgggctgacgcgcagtatggaatacgacgctgcgggacg

SEQ ID NO: 799086 - DNA, 75 bp, synthetic construct
  source 1..75: mol_type = other DNA
gacgaaattttactataacgacgggaaccagttaacggcagtggtgtccccggacgggctggagagccgccgggc

SEQ ID NO: 799087 - DNA, 75 bp, synthetic construct
  source 1..75: mol_type = other DNA
atcaatcagacggcagcttcttacaatcaggcggtatacgaccataacgaagcgcaaaaatcggaccctgccaac

SEQ ID NO: 799088 - DNA, 75 bp, synthetic construct
  source 1..75: mol_type = other DNA
cggcatacagacgctggcgacctacgaacaggatgcgcgggggcggctgaccgaagcggatgcgcggctggacta

SEQ ID NO: 799089 - DNA, 75 bp, synthetic construct
  source 1..75: mol_type = other DNA
cgacaacatgaaagcgcgctgttggtacgaacaccatttcccgctgctgctcaagaaaaaagaaggccagatacc

SEQ ID NO: 799090 - DNA, 75 bp, synthetic construct
  source 1..75: mol_type = other DNA
actaccactacgacagccagcaccggctggtgttccacacgcggatacagcaaggggagccacaggtcgagagcc

SEQ ID NO: 799091 - DNA, 75 bp, synthetic construct
  source 1..75: mol_type = other DNA
actaccactacgacagccagcaccggctggtgttcaacacgcggatacagcaaggggagccaccggtcgagagcc

SEQ ID NO: 799092 - DNA, 75 bp, synthetic construct
  source 1..75: mol_type = other DNA
actaccactacgacagccagcaccgactggtgttcgacacgcggatacagcaaggggagccacgggtcgagagcc

SEQ ID NO: 799093 - DNA, 75 bp, synthetic construct
  source 1..75: mol_type = other DNA
ggagtacacccgcgaccgcctgcaccgggaaacagcgcgcagctttggtaacggaacgggcagtacagccgcata

SEQ ID NO: 799094 - DNA, 75 bp, synthetic construct
  source 1..75: mol_type = other DNA
gcatcccgtatgcgaccgacccggcgggaaaccgcctgccggacccggagctgcacccggacagcacgctcacgg

SEQ ID NO: 799095 - DNA, 75 bp, synthetic construct
  source 1..75: mol_type = other DNA
cctgaacagcctggtgtatgaccgtgactacgggtggaatgacaacggcgacctggtgcgcatcagcggcccgcg

SEQ ID NO: 799096 - DNA, 75 bp, synthetic construct
  source 1..75: mol_type = other DNA
gtgataacagatgtctggaaatataggggcaaatccaatgtcgaaggtggagaagtttacttaggtgtttttgaa

SEQ ID NO: 799097 - DNA, 75 bp, synthetic construct
  source 1..75: mol_type = other DNA
gtgatactggttgtctggagattcagggggccagtctataacgcacaattgctacaggtcggtgtattaggcaag

SEQ ID NO: 799098 - DNA, 75 bp, synthetic construct
  source 1..75: mol_type = other DNA
ttaagtgatactggttgtctggagattcagggggccagtctaatcaccaatgcgacgaaagtggagtttggtctt

SEQ ID NO: 799099 - DNA, 75 bp, synthetic construct
  source 1..75: mol_type = other DNA
gcaggactgtacgcgacctggtatcagaacgatgcgaatataacaaccttagcctgtgggggaatgtcggtgtgc

SEQ ID NO: 799100 - DNA, 75 bp, synthetic construct
  source 1..75: mol_type = other DNA
accaatggcctgaatgaactgagcaaagcagccggtcgaggctacaccagtattacacgagggttcgcacgatga

SEQ ID NO: 799101 - DNA, 75 bp, synthetic construct
  source 1..75: mol_type = other DNA
tggatgcgtcatgtcggagggcacgaacgtttcagggccggtgacggtcagctaaatactcaggctaaccgctat

SEQ ID NO: 799102 - DNA, 75 bp, synthetic construct
  source 1..75: mol_type = other DNA
caacgcgacgctgggcggcgataattcgcccaccgataaaatgaacgtgaaaggcgatataacaaccttagcctg

SEQ ID NO: 799103 - DNA, 75 bp, synthetic construct
  source 1..75: mol_type = other DNA
gtcgttgaaaagggtggcgagtggctaataaaaaataatgattcctcaattgaatttcaaattggcaatcaaggg

SEQ ID NO: 799104 - DNA, 75 bp, synthetic construct
  source 1..75: mol_type = other DNA
ggtgactacacctggaaaggccgtaactatcaggtaaacgggacgggcgacgtgtttatcgacgtgcctaaaccg

SEQ ID NO: 799105 - DNA, 75 bp, synthetic construct
  source 1..75: mol_type = other DNA
atgcctacctggttgggtggtatggcactggagtgcttaatattttggctggcggttgagggagagtactcggtt

SEQ ID NO: 799106 - DNA, 75 bp, synthetic construct
  source 1..75: mol_type = other DNA
tgtctataccaccattggtgttgcgggtgtcggaaacctcaatatcagcgatggcggtaagttcgtatcgcaaaa

SEQ ID NO: 799107 - DNA, 75 bp, synthetic construct
  source 1..75: mol_type = other DNA
tcgtgagcgcaaccgccaggacagatgtagagctggatggcgataatagccgctttgtggggcaattcaacattg

SEQ ID NO: 799108 - DNA, 75 bp, synthetic construct
  source 1..75: mol_type = other DNA
caggcttctggaataacacccgatatggcgctgaattttatcagctgatcacgatgttcggtgcgggcggtcgcc

SEQ ID NO: 799109 - DNA, 75 bp, synthetic construct
  source 1..75: mol_type = other DNA
ggagtacacgcgcgaccgcctgcaccgggagacggtgcgcagctttggtaacggaacgggcagtaatgccgcata

SEQ ID NO: 799110 - DNA, 75 bp, synthetic construct
  source 1..75: mol_type = other DNA
caataccagattatttatttaaagtaaataatatcaaagcagatttaggttttattcaatcgtcattgattctat

SEQ ID NO: 799111 - DNA, 75 bp, synthetic construct
  source 1..75: mol_type = other DNA
atgacctggtctttccatggcttgcaccgacgcgtaccagcgaactggacggtgctgtggtaacggatgaacaag

SEQ ID NO: 799112 - DNA, 75 bp, synthetic construct
  source 1..75: mol_type = other DNA
tggctcaggggctgtgggagctgatagacaacagccagcttgcggatgagatggcggagatgaagaccaccatca

SEQ ID NO: 799113 - DNA, 75 bp, synthetic construct
  source 1..75: mol_type = other DNA
ttgattctgtccggaggtcggacgcagtttgcgaagcttagggggaaagcgttaatcacggatgacggcgaagcg

SEQ ID NO: 799114 - DNA, 75 bp, synthetic construct
  source 1..75: mol_type = other DNA
tacttactgagtcgaaagttgtaaaagtgccaactcgtttcatttccgaaggtgaaacaattccagaatatttgt

SEQ ID NO: 799115 - DNA, 75 bp, synthetic construct
  source 1..75: mol_type = other DNA
cagctattgtaccaacgatcggtcgtgaaacggtatttgattcactaaagtcaattatatcgcaaacttataagg

SEQ ID NO: 799116 - DNA, 75 bp, synthetic construct
  source 1..75: mol_type = other DNA
tggtgaaggtgacgataaaacagcaaaaacgccgcagtgggcttcgcaaattaccggtatcccggtagaccgtat

SEQ ID NO: 799117 - DNA, 75 bp, synthetic construct
  source 1..75: mol_type = other DNA
attttgcttgttccttgcggaagaggtggttctggtttcactgttacaggctctgaaggccaatattatgaagag

SEQ ID NO: 799118 - DNA, 75 bp, synthetic construct
  source 1..75: mol_type = other DNA
aaaaaaccgtcgaacaatatggcaatgaggctgtatatattcagtactcttcggggattgttggcggcaatatga

SEQ ID NO: 799119 - DNA, 75 bp, synthetic construct
  source 1..75: mol_type = other DNA
atgtgttcctgaagcgactgtttgcggtgagtatcacctcgtccggcaatcccccgacgttttccctgacgccgg

SEQ ID NO: 799120 - DNA, 75 bp, synthetic construct
  source 1..75: mol_type = other DNA
actgtggtagccgctgtgcacttcgtctacatgttaaagataatgaagtgacctgtgtggaaactgacaataccg

SEQ ID NO: 799121 - DNA, 75 bp, synthetic construct
  source 1..75: mol_type = other DNA
ttaccggtatcccggtagaccgtatcatcaaactggcgcgtgaaattggcacaacaaaacccgcttatatctgct

SEQ ID NO: 799122 - DNA, 75 bp, synthetic construct
  source 1..75: mol_type = other DNA
ctgctgattttgtctggcggccggactcagtttgcccgggtaatgggtagggcgctgatttgtgatgatggcgaa

SEQ ID NO: 799123 - DNA, 75 bp, synthetic construct
  source 1..75: mol_type = other DNA
tgtttggcatgatgattcatatggaacatcatcaattgatattactggcagtggagatctaatatcattaggtgg

SEQ ID NO: 799124 - DNA, 75 bp, synthetic construct
  source 1..75: mol_type = other DNA
ctacgggtggaatgacaacggcgacctggtgcgcatcagcggcccgcgacagacgcgggaatacggctacagcgc

SEQ ID NO: 799125 - DNA, 75 bp, synthetic construct
  source 1..75: mol_type = other DNA
gtttgatgatgcgacagggagagaacaggtctacatccacgcgcagaagaacatggataccgaagtgctcaacga

SEQ ID NO: 799126 - DNA, 75 bp, synthetic construct
  source 1..75: mol_type = other DNA
tatggatatcaaagatattttatgcctaaaggtcctttcactggattcccatttgaatttcaagaggtaaagtaa

SEQ ID NO: 799127 - DNA, 75 bp, synthetic construct
  source 1..75: mol_type = other DNA
gtatgcgtatccgctgaatccagtgcaacacgttgatccattagggcttagtactatgataataggtaacggccc

SEQ ID NO: 799128 - DNA, 75 bp, synthetic construct
  source 1..75: mol_type = other DNA
cccggaaaatttacctgccgcgccactggtgtgctacgactggacgccacgcggtgagctggcggcggtgtatga

SEQ ID NO: 799129 - DNA, 75 bp, synthetic construct
  source 1..75: mol_type = other DNA
ggctgaccggcgttcacaccaccgcagcgaatctggatatccgcatcccgtatgccacggacccggcgggcaacc

SEQ ID NO: 799130 - DNA, 75 bp, synthetic construct
  source 1..75: mol_type = other DNA
gacgccgtgggcaggcttaaggcacagacggatgccgcaggcaggacaacagagtacagcccggatgtggtgacg

SEQ ID NO: 799131 - DNA, 75 bp, synthetic construct
  source 1..75: mol_type = other DNA
aactgtggtgccacacaacctgtaccggatgcgcctgtgccgaaagatttaccccccggaatgccggatatgcgg

SEQ ID NO: 799132 - DNA, 75 bp, synthetic construct
  source 1..75: mol_type = other DNA
ctgtcgactttaatattagtgataaatcatttaaatgggttcagatcggtgaatcttttaaatttgtttgtggtc

SEQ ID NO: 799133 - DNA, 75 bp, synthetic construct
  source 1..75: mol_type = other DNA
ttttaaaactattatcaatgatcaaagcgggctttatagcctttcatcaaaaagttacgcgcaagaggctttgtc

SEQ ID NO: 799134 - DNA, 75 bp, synthetic construct
  source 1..75: mol_type = other DNA
cggccttagtctgttgggacttagtttgcatttcaatctggcggtatgggggatcacattgatcgccgcattggc

SEQ ID NO: 799135 - DNA, 75 bp, synthetic construct
  source 1..75: mol_type = other DNA
caatgcaggcatggtttaccacccttatcactgcgggattgaatttcctttttgactggcttcctcaattagcct

SEQ ID NO: 799136 - DNA, 75 bp, synthetic construct
  source 1..75: mol_type = other DNA
ggtgccatgacgatgaatgctcttacagctaaagctaatttgacaacacagccaggtactatcttgactctggat

SEQ ID NO: 799137 - DNA, 75 bp, synthetic construct
  source 1..75: mol_type = other DNA
atggtgttcagtcctcaaagtccgttgacaaggtaagtgtcagttatgacaccagcgcgacgctgaatcctgatg

SEQ ID NO: 799138 - DNA, 75 bp, synthetic construct
  source 1..75: mol_type = other DNA
gacccttgcccgagtacgaaggaggccagacttgagctgttgtggacgcgtcagaatatgctggggcatgaaacg

SEQ ID NO: 799139 - DNA, 75 bp, synthetic construct
  source 1..75: mol_type = other DNA
gaagcagaacatttacttctgaataactgtaacgcagatactcagcgtaaattaagcaatctactgctgaaacgc

SEQ ID NO: 799140 - DNA, 75 bp, synthetic construct
  source 1..75: mol_type = other DNA
tgcgcactacaaccaatgtcttatcgatctagacaataagctattaaaaaacataaatattcgtattgatgcttt

SEQ ID NO: 799141 - DNA, 75 bp, synthetic construct
  source 1..75: mol_type = other DNA
gcttatgatgtaagtctcgaggtttttattagcaaaattgaaaagttatctatatataaagttgatgattatcct

SEQ ID NO: 799142 - DNA, 75 bp, synthetic construct
  source 1..75: mol_type = other DNA
aatatggtcaaatatatggccgagatgcgttgattttaactggaacagagttaaatctgtatccatttaacttta

SEQ ID NO: 799143 - DNA, 75 bp, synthetic construct
  source 1..75: mol_type = other DNA
tcgggtgattaccgaggcaggttttagccactatttcggtcataacaccggtcatgctatcggcattgaagttca

SEQ ID NO: 799144 - DNA, 75 bp, synthetic construct
  source 1..75: mol_type = other DNA
aatgaggtttttgagtactattatgatatatatgaggatatctatgattccgggcgcggtgatagcgcgcaggat

SEQ ID NO: 799145 - DNA, 75 bp, synthetic construct
  source 1..75: mol_type = other DNA
ggatattatgatagaaaaaatgacatatttgaggttttaacatataatcgcagaatcgctcctactgaacatgag

SEQ ID NO: 799146 - DNA, 75 bp, synthetic construct
  source 1..75: mol_type = other DNA
cacgtatggttatcgtcgggtatgggcgctgcttcgcagacaggcagaacttgatggtatgtctgcgatcaatgc

SEQ ID NO: 799147 - DNA, 75 bp, synthetic construct
  source 1..75: mol_type = other DNA
tcgaaatgcaattttgtctgatattacgcctgtgtgttgctttaatggcaaaagcggataaaaaagttgttattt

SEQ ID NO: 799148 - DNA, 75 bp, synthetic construct
  source 1..75: mol_type = other DNA
tgaaaaatcattaaaacctgtgagcgaaaacggtttaagtggagtattgactgatcgtaataataaaataaaact

SEQ ID NO: 799149 - DNA, 75 bp, synthetic construct
  source 1..75: mol_type = other DNA
ggggaacatcttgaaacggtattcaaatataaaaatggcgatgatgtccgggagatagccaaaattaacattact

SEQ ID NO: 799150 - DNA, 75 bp, synthetic construct
  source 1..75: mol_type = other DNA
ggataaattgaacaagttgcggaatgcacttgcacatagcattgactctccaagagctgccgaagtcttcaagtc

SEQ ID NO: 799151 - DNA, 75 bp, synthetic construct
  source 1..75: mol_type = other DNA
gtcatcgggtcggtttgttttaacaaaagatgtaatcgatatatgtaattcttctgaagaaaagcatgcggaagt

SEQ ID NO: 799152 - DNA, 75 bp, synthetic construct
  source 1..75: mol_type = other DNA
gaagggcaacggggagtatacaggcaaggagaagaaaaacaggctatctttgatattatgtccgatgggaatcag

SEQ ID NO: 799153 - DNA, 75 bp, synthetic construct
  source 1..75: mol_type = other DNA
agcctcaagataaaatcgatagctataattcagcactgcaagctttttccattttttgttcatctacgttgacac

SEQ ID NO: 799154 - DNA, 75 bp, synthetic construct
  source 1..75: mol_type = other DNA
aaacggcgtggttacaaaccacagccacttaagcggtttatatacctaagtcaaatgggaagtctcgtccccttg

SEQ ID NO: 799155 - DNA, 75 bp, synthetic construct
  source 1..75: mol_type = other DNA
gcatccagacggtttatcagccggggagcttcacgccactcatcagagttgaaactgccaccggtgagctggcga

SEQ ID NO: 799156 - DNA, 75 bp, synthetic construct
  source 1..75: mol_type = other DNA
gatccgaacccagctacaaaagaagactcgctaaagcttctgcatgtacgccaaatgcgtattgggtacgacacg

SEQ ID NO: 799157 - DNA, 75 bp, synthetic construct
  source 1..75: mol_type = other DNA
atgagactgacgcaatacaaaaaagagatcctcagttacttcactcccgacaatctggcgtgggttactgccgaa

SEQ ID NO: 799158 - DNA, 75 bp, synthetic construct
  source 1..75: mol_type = other DNA
gaaggggcgcttcgcgtgctgtcgcggctggggtgcgcggctggcccccgcgttcggctcttcaggccgtgccac

SEQ ID NO: 799159 - DNA, 75 bp, synthetic construct
  source 1..75: mol_type = other DNA
ggtcagtgcatccgcgaagaaaggcaaggcgggtaactggctgctggactcggcggatatcaccattgtgaatgg

SEQ ID NO: 799160 - DNA, 75 bp, synthetic construct
  source 1..75: mol_type = other DNA
cgcatgggtcttactgccggtaaacgcaaatcaaaagacgacagcgccgcaaggccaaagagcaggagtaaccac

SEQ ID NO: 799161 - DNA, 75 bp, synthetic construct
  source 1..75: mol_type = other DNA
tggctaacattcatttatccacgtctttatattgctcgtgaacttctacgtgaagatggcgttatatttatctcg

SEQ ID NO: 799162 - DNA, 75 bp, synthetic construct
  source 1..75: mol_type = other DNA
cagttatcaagcatccttggtcaccctgatgtattcagcaatcctaagaatgtaaattatttaaagtatattttt

SEQ ID NO: 799163 - DNA, 75 bp, synthetic construct
  source 1..75: mol_type = other DNA
agcagggtgttaacaccaacctgctgggcaaagaaaccaaactcaaaaccaataccacttatcaggtcatgctgt

SEQ ID NO: 799164 - DNA, 75 bp, synthetic construct
  source 1..75: mol_type = other DNA
aatgatacatggggacatcctgctggtgacagagtcattctggctgttgtcgatatattaaaacaaggcatccgc

SEQ ID NO: 799165 - DNA, 75 bp, synthetic construct
  source 1..75: mol_type = other DNA
tcttaggaattataagttatcagtgggtatattattgggggttttttcatcacaaatagacaggctctttatgtc

SEQ ID NO: 799166 - DNA, 75 bp, synthetic construct
  source 1..75: mol_type = other DNA
atatgccaagacacagaaaggcagagagccaaggtttgaaaccttaactggtatatggcatggagtaacccactg

SEQ ID NO: 799167 - DNA, 75 bp, synthetic construct
  source 1..75: mol_type = other DNA
tttctctggcagcatgaccattcccgccctgtggggcagtgtacggtgcgccgggtcagcgaagggctggaaatc

SEQ ID NO: 799168 - DNA, 75 bp, synthetic construct
  source 1..75: mol_type = other DNA
gatctgaagccctggaagtggcccgtcgtcagtatccggatgacagacgtctgcatcatgtcctgaaatcggcag

SEQ ID NO: 799169 - DNA, 75 bp, synthetic construct
  source 1..75: mol_type = other DNA
tgattacctgcgtccgcagaccattatcgggcgatttggtcagggcgggatccctgcacttcgtcaggtgccgtt

SEQ ID NO: 799170 - DNA, 75 bp, synthetic construct
  source 1..75: mol_type = other DNA
tacaaagatcaagcgggtggtgacccaagagagattggtacagttggcagtgacacttacaccatcgctgcagca

SEQ ID NO: 799171 - DNA, 75 bp, synthetic construct
  source 1..75: mol_type = other DNA
agagacgcaatcaaccggaacgattcagggtacagtgccgtggataactcgtagcgcgacagaaacgagcgatgc

SEQ ID NO: 799172 - DNA, 75 bp, synthetic construct
  source 1..75: mol_type = other DNA
cgtgaacacagaactgaattatggcctcttgaccgatacaaatatatagacaaagacggcatctatactggtagt

SEQ ID NO: 799173 - DNA, 75 bp, synthetic construct
  source 1..75: mol_type = other DNA
tgacgggcatatgcatctctggtatctcagccgaatggcagaaatgttcagtaaattaattgttgtttctgtttt

SEQ ID NO: 799174 - DNA, 75 bp, synthetic construct
  source 1..75: mol_type = other DNA
gacgtgcgcaggcgattgccgaagacaggtgtttcgcgataccgcgtgccgtcttacatgcgctgacgcgcatta

SEQ ID NO: 799175 - DNA, 75 bp, synthetic construct
  source 1..75: mol_type = other DNA
gttgcaggaagaactttgtagcgttgttgaggcatccggtgccagtctggagaaggcgcggcacgaccagctgct

SEQ ID NO: 799176 - DNA, 75 bp, synthetic construct
  source 1..75: mol_type = other DNA
tcctatctcattataatggaagtgattatttaagagaacagttaaattctattctcaaccagaatgcagataatt

SEQ ID NO: 799177 - DNA, 75 bp, synthetic construct
  source 1..75: mol_type = other DNA
cgcagcaaactgattgtttcgccacagggataccgatattcctctgttctgtctggcggggaaaaaggattatcc

SEQ ID NO: 799178 - DNA, 75 bp, synthetic construct
  source 1..75: mol_type = other DNA
ccgttttacacaggaaaaagagaaccgttatccactggataacggggtgttttcatttcagcgaacagtgattga

SEQ ID NO: 799179 - DNA, 75 bp, synthetic construct
  source 1..75: mol_type = other DNA
ttgtttccgtactttgccggattgttcgttgtgcactacatgacgctctgggcggctgacagcagggcgatgctg

SEQ ID NO: 799180 - DNA, 75 bp, synthetic construct
  source 1..75: mol_type = other DNA
cgggcgcatagagggaaagtggccgttggagaaagtaaccagcggtggtgctccgacggcttcgagttcagctgt

SEQ ID NO: 799181 - DNA, 75 bp, synthetic construct
  source 1..75: mol_type = other DNA
caaaccaggtaatgaaaacaagagctgggattactggggaagtgcctcggcaggcattaccggagcactggctcc

SEQ ID NO: 799182 - DNA, 75 bp, synthetic construct
  source 1..75: mol_type = other DNA
aattcataaccattattttaggtttctttattggttattcattgttaagtggttcctccattattgagcattcat

SEQ ID NO: 799183 - DNA, 75 bp, synthetic construct
  source 1..75: mol_type = other DNA
tgagcaacaccagcgaggatgtgaaggcacggcaaaaatatcagctgaaccaagcggcaacaggtgcactccgcg

SEQ ID NO: 799184 - DNA, 75 bp, synthetic construct
  source 1..75: mol_type = other DNA
gcttcagagttttcatctggatttattaaagaactcaataaaccgaaaggttcgtcagaggataagaaaaaatga

SEQ ID NO: 799185 - DNA, 75 bp, synthetic construct
  source 1..75: mol_type = other DNA
cgaggcacttcactgggcagcaagtaccggtggatatgacagtgaaaccgtgcaggacgtcatgctgggtgcagt

SEQ ID NO: 799186 - DNA, 75 bp, synthetic construct
  source 1..75: mol_type = other DNA
gtattgatgttattgtgcgctgggtagataagattcagttatatgccagagaaccccgtaatatgccagcgtcag

SEQ ID NO: 799187 - DNA, 75 bp, synthetic construct
  source 1..75: mol_type = other DNA
cactccggcatgtcagtgaagtctcccggaacaatgttgattttcatctggtgctggagctggggcagtgtgtat

SEQ ID NO: 799188 - DNA, 75 bp, synthetic construct
  source 1..75: mol_type = other DNA
tggcgtgatgcccttgctaacggtgttcgggatgaactggttcgccggggaataatgaaaattaagggaaataaa

SEQ ID NO: 799189 - DNA, 75 bp, synthetic construct
  source 1..75: mol_type = other DNA
tgccgacaccacagattattgaaacgccggattttgaggtcatcctggcggaggtgaaagaaagcatgattacgg

SEQ ID NO: 799190 - DNA, 75 bp, synthetic construct
  source 1..75: mol_type = other DNA
ctgagcgtcacaagaaatatcctgacgtcacactggacaatcttgacggatacattgctgccattcagaacacgg

SEQ ID NO: 799191 - DNA, 75 bp, synthetic construct
  source 1..75: mol_type = other DNA
aatgtaaaaaacccacaagattatcctattctggttcaatcgaaaatatataataacaatgatagtgctgataat

SEQ ID NO: 799192 - DNA, 75 bp, synthetic construct
  source 1..75: mol_type = other DNA
ttgaaaaagcgaaagaactaggtattaccattttcagtagtccatttgactttactgcagttgatctactagagg

SEQ ID NO: 799193 - DNA, 75 bp, synthetic construct
  source 1..75: mol_type = other DNA
tactcaccatatgtcattgctgaattgtccgcaaatcacaatggtgatataaatcgtgctttcaaaattatggag

SEQ ID NO: 799194 - DNA, 75 bp, synthetic construct
  source 1..75: mol_type = other DNA
actatctttaccggtatgaccgtcacggcaggctgacagagaaaaccgacctcatcccggaaggggttatccgca

SEQ ID NO: 799195 - DNA, 75 bp, synthetic construct
  source 1..75: mol_type = other DNA
gtggttctttacctgattattaaatgtgctaatcagaaagaggaagtggtgaccaggaaatcagagaagcaacag

SEQ ID NO: 799196 - DNA, 75 bp, synthetic construct
  source 1..75: mol_type = other DNA
caaacacatgttgttcatgctgaaggtgattgtagtgcatgcttatctgatggagttgattcatgaaaatcaagc

SEQ ID NO: 799197 - DNA, 75 bp, synthetic construct
  source 1..75: mol_type = other DNA
atttagagcatgtgttaggaaaaaaattcttgacagatctacctgcaggcacagctttaactttcgatattatcg

SEQ ID NO: 799198 - DNA, 75 bp, synthetic construct
  source 1..75: mol_type = other DNA
aaagaaagaagtgaatagcagtttttccattccgggtttaacgtcttatcagccaacgtatatagttgacgaata

SEQ ID NO: 799199 - DNA, 75 bp, synthetic construct
  source 1..75: mol_type = other DNA
taaacaaaaaaatgcggattcaaccgcaaagctgtaccaacagattgctaagctgcatttatctggccgtttgcc

SEQ ID NO: 799200 - DNA, 75 bp, synthetic construct
  source 1..75: mol_type = other DNA
acgccagcggcatctttgtcattcgtccgctgaaaggcgagggcgggcgtaacggcaagattgccaatatctatc

SEQ ID NO: 799201 - DNA, 75 bp, synthetic construct
  source 1..75: mol_type = other DNA
tcgcctgggcggtctgtcatctgttcagacatggaatggtcccggctggtctgacaggtcaggttatgtcgttac

SEQ ID NO: 799202 - DNA, 75 bp, synthetic construct
  source 1..75: mol_type = other DNA
taaagtgggcaatccgccgaaaccggttggcttcatcgcttctgaaaatgtggttttcggcatcgagctgaactg

SEQ ID NO: 799203 - DNA, 75 bp, synthetic construct
  source 1..75: mol_type = other DNA
catcatcgaatgaccagcgtatacgtattctgaaaggtgccataagtcttattcaacagcgccccttaaccggtt

SEQ ID NO: 799204 - DNA, 75 bp, synthetic construct
  source 1..75: mol_type = other DNA
tgaccgtaattccgttatcagactgcaggctcgctctgcttaccatgatggtgagcgctcctccgttcgcaagaa

SEQ ID NO: 799205 - DNA, 75 bp, synthetic construct
  source 1..75: mol_type = other DNA
attcatgcggctgaatttgtttccagaacctataccgattcatatcagttaggagatggggagctgcttgtttgt

SEQ ID NO: 799206 - DNA, 75 bp, synthetic construct
  source 1..75: mol_type = other DNA
tcgttgcacactacatgacgctctgggcggcagacatccgggcgatgctggctggcggaccgggcggttcaacca

SEQ ID NO: 799207 - DNA, 75 bp, synthetic construct
  source 1..75: mol_type = other DNA
atccgtcaggcgttattcctgatatgcgtggctggacgattaagggcaagcccggcagtggtcgtgccgtattgt

SEQ ID NO: 799208 - DNA, 75 bp, synthetic construct
  source 1..75: mol_type = other DNA
ccgtacatatccgttcgcggcgggatactgattctgccaactggtctgaatgggcgcaggtctatacgtcaaaag

SEQ ID NO: 799209 - DNA, 75 bp, synthetic construct
  source 1..75: mol_type = other DNA
caaccgcgcaatttatttcgtggctggagagtcagggagcatttaaccatccttactggatgtgcaaaggctcat

SEQ ID NO: 799210 - DNA, 75 bp, synthetic construct
  source 1..75: mol_type = other DNA
gacggcagcgcaaggtacaaacagcacgcagatcgcaaatacagcctttgttaaggcagctataactgcacttat

SEQ ID NO: 799211 - DNA, 75 bp, synthetic construct
  source 1..75: mol_type = other DNA
gaatgggcggctattccaacgacgttatttgctggctggttgagtgataaattatttcatggtcgccgtatgcca

SEQ ID NO: 799212 - DNA, 75 bp, synthetic construct
  source 1..75: mol_type = other DNA
tatcgcgatatccacaaactgtttaaacgccaggaagttgcgcctatatcttcaggtctgatgttccgcctgatg

SEQ ID NO: 799213 - DNA, 75 bp, synthetic construct
  source 1..75: mol_type = other DNA
cgcgatcatcatcgggtactggttgatattactaatgcagtgctgtcacatcttgatctcgacgatctgatcgct

SEQ ID NO: 799214 - DNA, 75 bp, synthetic construct
  source 1..75: mol_type = other DNA
ttgccccgccacaaggaataacaattgaagcggtaaacggaatgctcgcggagcggttagcacagaaacacggca

SEQ ID NO: 799215 - DNA, 75 bp, synthetic construct
  source 1..75: mol_type = other DNA
tacgggacatgatggaatgcgttcgctatcaaagccgcattcatgttcctggtattagcggtgacttcggattgc

SEQ ID NO: 799216 - DNA, 75 bp, synthetic construct
  source 1..75: mol_type = other DNA
ctaataaaaatattttcatattacatagcaaaaaaagtaattgttttaacttcgcatgattataatttattaact

SEQ ID NO: 799217 - DNA, 69 bp, synthetic construct
  source 1..69: mol_type = other DNA
atgtcactcttttctttgtttgcttcaggcgaaactcttttttctgagcacagtctccggcggcaggct

SEQ ID NO: 799218 - DNA, 75 bp, synthetic construct
  source 1..75: mol_type = other DNA
atcccgaccgaggcgctacgccagttgatgtcgtgggattggccgggcaacgtgcgcgagctggaaaacgtgatt

SEQ ID NO: 799219 - DNA, 75 bp, synthetic construct
  source 1..75: mol_type = other DNA
ctaccacactgaaatattttgtcgaagcctatccagagagaatcactgttcaagcgtgggaacgcctagtcaatg

SEQ ID NO: 799220 - DNA, 75 bp, synthetic construct
  source 1..75: mol_type = other DNA
ggtggttaccttgctactcgccatcttattgatttaggacataaaaacatcggtttgataggtggcccggatttt

SEQ ID NO: 799221 - DNA, 75 bp, synthetic construct
  source 1..75: mol_type = other DNA
ccaatggcattgttgccgggccccgtggcgcggcgacgcgattagggatgaagcgcaccacgctgctgtcacgaa

SEQ ID NO: 799222 - DNA, 75 bp, synthetic construct
  source 1..75: mol_type = other DNA
ttgccgccaccaaccgtgatttgtggcaaatggttgaagatcgccagtttcgcagcgatctcttttatcgcctga

SEQ ID NO: 799223 - DNA, 75 bp, synthetic construct
  source 1..75: mol_type = other DNA
gctacgcgaccgtccggaagatatccctcttttagcaaaacatttcacgcaaaaaatggcgcgccatatgaatcg

SEQ ID NO: 799224 - DNA, 75 bp, synthetic construct
  source 1..75: mol_type = other DNA
tgcctgtttcaactgccgttgcgacagtcattaaaactaaacaggttgaatttcaacttcaggttggtgttccac

SEQ ID NO: 799225 - DNA, 75 bp, synthetic construct
  source 1..75: mol_type = other DNA
gcgcgtaccatctttgcggaaggcgcagaacgcatgcgcagggatgaagaccgcagctacaataaattcctgcgc

SEQ ID NO: 799226 - DNA, 75 bp, synthetic construct
  source 1..75: mol_type = other DNA
gtggtgctcagcgaagaatcccggctgcgtggcggagaagatgcgcagtttactggctggccttccgggatgtcg

SEQ ID NO: 799227 - DNA, 75 bp, synthetic construct
  source 1..75: mol_type = other DNA
ctgcctgaaagatgagaaaaaagccctgatgcagcagctactgactggcaaacgtcgtgttaaggtcgatgaggc

SEQ ID NO: 799228 - DNA, 75 bp, synthetic construct
  source 1..75: mol_type = other DNA
cgcactttggcgcgatcgccatggaacgacagcgtcaaaatgacgttgctgagttttcgcaagagcttcagagca

SEQ ID NO: 799229 - DNA, 75 bp, synthetic construct
  source 1..75: mol_type = other DNA
gcgtgaaacattttacgaagactgaaatgagcacggcatttttaatcttcgaatgggcggcgattccaactacat

SEQ ID NO: 799230 - DNA, 75 bp, synthetic construct
  source 1..75: mol_type = other DNA
tttccgctgccgacgctgaaatctccacgctggagaaaaaactcgcctgcctgaaagacgagaaaaaagccctga

SEQ ID NO: 799231 - DNA, 75 bp, synthetic construct
  source 1..75: mol_type = other DNA
ttgtaatatcgctaagggaaaagctctaagcgctagtgatttggaggttggtgattttccagttattgcaggagg

SEQ ID NO: 799232 - DNA, 75 bp, synthetic construct
  source 1..75: mol_type = other DNA
cctgcctgaaagatgagaaaaaagccctgatgcaacagctactgactggcaaacgtcgtgttaaggtcgatgagg

SEQ ID NO: 799233 - DNA, 75 bp, synthetic construct
  source 1..75: mol_type = other DNA
gatcaaaactattctcgacaatcaaaagcgcctggacagtaaagggaatattaaacgctgtcgggttccgggtga

SEQ ID NO: 799234 - DNA, 75 bp, synthetic construct
  source 1..75: mol_type = other DNA
aatgtactcctggagatattcttctaagtgtcagggcacctgtaggtactgttgcactttctcaacataaagcat

SEQ ID NO: 799235 - DNA, 75 bp, synthetic construct
  source 1..75: mol_type = other DNA
acgtaaaaatgatgctgccgaacatcctattttaacaatatcatctttgtccggatttgtccggcaggatgagcg

SEQ ID NO: 799236 - DNA, 75 bp, synthetic construct
  source 1..75: mol_type = other DNA
cgcctgagcagttcagggcaacctttccgcagttcgctgacgatacaaagtaccccacgccaatgattcaggctc

SEQ ID NO: 799237 - DNA, 75 bp, synthetic construct
  source 1..75: mol_type = other DNA
caacaaaccaccaggacaccgaacttcagcgaatcgcgctcgaatcagcagggtgcgaacacataatggaagagc

SEQ ID NO: 799238 - DNA, 75 bp, synthetic construct
  source 1..75: mol_type = other DNA
tgcaggcagccgcagaccatcatctggaaatttgcggcggtggcacgcacccgtttcagaaatggcagcgtcagg

SEQ ID NO: 799239 - DNA, 75 bp, synthetic construct
  source 1..75: mol_type = other DNA
atgcttctcaaagatccagcattccggactgcttatgaagctgagagtcagaacccacaatccggttaccagatt

SEQ ID NO: 799240 - DNA, 75 bp, synthetic construct
  source 1..75: mol_type = other DNA
gaagaagtggtgtttgattctcgtgtatcaggtacagatttaccaactaactggatgaacaggcctgattggtga

SEQ ID NO: 799241 - DNA, 75 bp, synthetic construct
  source 1..75: mol_type = other DNA
caacgttggcctgctgccaggataacgggcgtcgactcatctccggcgatgattgccgaagcgcgcagtgctttg

SEQ ID NO: 799242 - DNA, 75 bp, synthetic construct
  source 1..75: mol_type = other DNA
gttgttaataaaggtatcaataaacaaatattaaaaaatattaactgtcataaagttttgcttctaagaaatact

SEQ ID NO: 799243 - DNA, 75 bp, synthetic construct
  source 1..75: mol_type = other DNA
atgacgcccgtggaatatattttaaaagagaataaaaattgcaatatgtggtggacccatacacctccttgcaat

SEQ ID NO: 799244 - DNA, 75 bp, synthetic construct
  source 1..75: mol_type = other DNA
taccagaatgctatttctacacggttgatgatgattttgctcaggcagtgctggagcttcatacacgatgggcaa

SEQ ID NO: 799245 - DNA, 75 bp, synthetic construct
  source 1..75: mol_type = other DNA
taccagaatgctatttctatactgtcgatgatgattttgcgcaggcggtgctggatctacatacccagtgggcaa

SEQ ID NO: 799246 - DNA, 75 bp, synthetic construct
  source 1..75: mol_type = other DNA
atcgctttatggctgggatattttactggccggtacggcatggccaggtaaagagattggttatgccaacgccga

SEQ ID NO: 799247 - DNA, 75 bp, synthetic construct
  source 1..75: mol_type = other DNA
aaacaaatttcatgtggtggaaaatgacggcggttcgctggaagcgatcgccaaaaaatataacgtcggctttct

SEQ ID NO: 799248 - DNA, 75 bp, synthetic construct
  source 1..75: mol_type = other DNA
atgatcaaaacgcgtttttctcgctggctaacgttttttacgttcgccgctgccgtggcgctggcgctaccggca

SEQ ID NO: 799249 - DNA, 75 bp, synthetic construct
  source 1..75: mol_type = other DNA
tgctatttctatacggttgatgatgattttgccgaagcggtactggatctttatgtccggtgggaaagtaaatcc

SEQ ID NO: 799250 - DNA, 75 bp, synthetic construct
  source 1..75: mol_type = other DNA
atggtccgttctgacggttctgaaaggcctgtgtaaagctggtgggtcaatattcttttctggccgtagccgtgg

SEQ ID NO: 799251 - DNA, 75 bp, synthetic construct
  source 1..75: mol_type = other DNA
aaaatgtgcgggcatggctttatgccgcagagtttaaagcaaaaactcgtcatggtcgcgcctgtggcaaagggg

SEQ ID NO: 799252 - DNA, 75 bp, synthetic construct
  source 1..75: mol_type = other DNA
aaaatgtccgcgcatggttatatgccgcagaatttaaagcgaaaactcgccacggtcgcgcctgtggtaaaggtg

SEQ ID NO: 799253 - DNA, 75 bp, synthetic construct
  source 1..75: mol_type = other DNA
gtcgggcaacacatctctatattgacggcaatccgtcaaagtttttgcaaggtcactctgttatcggctccgatg

SEQ ID NO: 799254 - DNA, 75 bp, synthetic construct
  source 1..75: mol_type = other DNA
tcgttttggcggtaaagaaaagatgcttgctttagggaaataccctgaagtgtcgctggctgatgccagggctcg

SEQ ID NO: 799255 - DNA, 75 bp, synthetic construct
  source 1..75: mol_type = other DNA
atgacatacttttatttcaaattagacagaactcagacaaataaatatttcaccaaatatcaacagactgtttta

SEQ ID NO: 799256 - DNA, 75 bp, synthetic construct
  source 1..75: mol_type = other DNA
cggattgcgcttaaagccgttcgccatggacgtaatcagtgagttttatttttctggttctctgcctgcgggctg

SEQ ID NO: 799257 - DNA, 75 bp, synthetic construct
  source 1..75: mol_type = other DNA
attatttacgacgatctgaaacccggcgaagaaatcggaatggtgaagtcggatcgcccaaatcctaaccttgaa

SEQ ID NO: 799258 - DNA, 75 bp, synthetic construct
  source 1..75: mol_type = other DNA
tttaactgtgctgtttattcatctctgaagacaatagatatgaaatatatattcagccaatggcagcagagggat

SEQ ID NO: 799259 - DNA, 75 bp, synthetic construct
  source 1..75: mol_type = other DNA
aagtccgtagctacctctggttttttatctggttttttgtttttaactgtgccgtatattcttctctgaagacaa

SEQ ID NO: 799260 - DNA, 75 bp, synthetic construct
  source 1..75: mol_type = other DNA
ctgaaattgatgaaaacagcagactggggctggtctttgatactgaccccgtcaacgacaaaggaggcaacaact

SEQ ID NO: 799261 - DNA, 75 bp, synthetic construct
  source 1..75: mol_type = other DNA
gtcaacgacaaaggaggcaacagtgccggaactgaacaacagcgtcagcaggccaccgacagcagcatgaagaat

SEQ ID NO: 799262 - DNA, 75 bp, synthetic construct
  source 1..75: mol_type = other DNA
ccggactgaatcaggggtttttcttgatgagtggggaagaccgaaaaatatatctggtttataaaaattatccgg

SEQ ID NO: 799263 - DNA, 75 bp, synthetic construct
  source 1..75: mol_type = other DNA
tgaagatgttgcgatcaaacgcagcgtcgctttatggctgggatattctgctggcaggcactgcatggccaggaa

SEQ ID NO: 799264 - DNA, 75 bp, synthetic construct
  source 1..75: mol_type = other DNA
ttacaggcacaaagccgcgccatcgacgccaaagagatcctgatgaagcgcaaaatcactgccgcaccggtggta

SEQ ID NO: 799265 - DNA, 75 bp, synthetic construct
  source 1..75: mol_type = other DNA
agaacgcgaagcctgcccgatgcatcttgcgccgacctccagcaccgtcaataccctgatgatgggcgacgcgct

SEQ ID NO: 799266 - DNA, 75 bp, synthetic construct
  source 1..75: mol_type = other DNA
catctgatgcgccgtgatgacgctatcccgcaggtagcgttaaccgccagcgtgatggatgcgatgctggaactc

SEQ ID NO: 799267 - DNA, 75 bp, synthetic construct
  source 1..75: mol_type = other DNA
gggataggcctgagtggagcaactggttcggcttttcagatgctgtcgatgccgtggttgacagaattgctgatt

SEQ ID NO: 799268 - DNA, 75 bp, synthetic construct
  source 1..75: mol_type = other DNA
caggtagattaaaattgattgctttcaattttatgatttttgtttttttggttagagttcctggatttcccttta

SEQ ID NO: 799269 - DNA, 75 bp, synthetic construct
  source 1..75: mol_type = other DNA
gtggtgccggctactggattagttggtcggtgatgttcctgtactggcctgtggcgcttcctttatatgtcgatt

SEQ ID NO: 799270 - DNA, 75 bp, synthetic construct
  source 1..75: mol_type = other DNA
ggcaatctccctggctggtttgcccttgaactgatggcgcaaaccgtcggcgtctggtctggctggcatcgccac

SEQ ID NO: 799271 - DNA, 75 bp, synthetic construct
  source 1..75: mol_type = other DNA
cctgttccgctgactagagaacgtgctgcatggattgttcgtgtaacaaacatgcgtattgaactgattaaaggt

SEQ ID NO: 799272 - DNA, 75 bp, synthetic construct
  source 1..75: mol_type = other DNA
caaccgtccaaacgatttatggattcggacaaaagtcaggtaatgccatgagaaaatccgcagaatatttgcagc

SEQ ID NO: 799273 - DNA, 75 bp, synthetic construct
  source 1..75: mol_type = other DNA
caaaatcactgccgcaccggtggtggatgaaaacggcaaactcaccggcgcaattaacctgcaggatttctatca

SEQ ID NO: 799274 - DNA, 75 bp, synthetic construct
  source 1..75: mol_type = other DNA
aaagaaatcctgatgaaacgcaaaatcaccgccgcaccggtagtggatgaaaacggcaaactcaccggcgcaatt

SEQ ID NO: 799275 - DNA, 75 bp, synthetic construct
  source 1..75: mol_type = other DNA
gagattttaaaaacaataaagaaattacaaccctatttagacttctttttggaggaaaaactgccacacttataa

SEQ ID NO: 799276 - DNA, 75 bp, synthetic construct
  source 1..75: mol_type = other DNA
ggcgtacgatatgcagttcagtctgaatggcagttcatggaaaccggtgagcaatactgcctattactacacctt

SEQ ID NO: 799277 - DNA, 75 bp, synthetic construct
  source 1..75: mol_type = other DNA
tgcagaactggaagcacgggaaataaaaccagccaaaggtgaagttcttgtcgttgtttctggttttactggttg

SEQ ID NO: 799278 - DNA, 75 bp, synthetic construct
  source 1..75: mol_type = other DNA
gtgtgccggttcaatggactaatgtcgatgcagaaaagcgtatgagcggcgctgactggctgacagcgattgaga

SEQ ID NO: 799279 - DNA, 75 bp, synthetic construct
  source 1..75: mol_type = other DNA
catgtacacagttgatgctgttgcagctattgcagaggtgagaggctggaacgcctgccgtgcagccatgcttaa

SEQ ID NO: 799280 - DNA, 75 bp, synthetic construct
  source 1..75: mol_type = other DNA
catcattcgcgaagcggctaaacaccacgaagtcggcctgcatgcctgggatcaccacgcatggcaggcccggag

SEQ ID NO: 799281 - DNA, 75 bp, synthetic construct
  source 1..75: mol_type = other DNA
ttaacgaggattaccacacggtaatggcatacaaagtttctgaggtcatcgctgcaatccgcgccgctggcattc

SEQ ID NO: 799282 - DNA, 75 bp, synthetic construct
  source 1..75: mol_type = other DNA
actggcacacttcaggatgcctttgatctggaggcgctaaaggccctcgatatcattgtgacctgtcagggcggc

SEQ ID NO: 799283 - DNA, 75 bp, synthetic construct
  source 1..75: mol_type = other DNA
tttcgattccaatggataacgccatttctctgcgtacggtagatgataacggctgggttggcgaagtcagcgctt

SEQ ID NO: 799284 - DNA, 75 bp, synthetic construct
  source 1..75: mol_type = other DNA
ttctctgcgtacggtagatgataacggctggtttggcgaagtcagcgcttcaggagagattcatgttcaggcgac

SEQ ID NO: 799285 - DNA, 75 bp, synthetic construct
  source 1..75: mol_type = other DNA
cagatggataagaccacagtcaaattttcgattccaatggataacgccatttctctgcgtacggtagatgataac

SEQ ID NO: 799286 - DNA, 75 bp, synthetic construct
  source 1..75: mol_type = other DNA
acgcctgtcgtgccgctatgcttcagagtcaaggtaattgcattaaggatggttggataagctgtagtgagagaa

SEQ ID NO: 799287 - DNA, 75 bp, synthetic construct
  source 1..75: mol_type = other DNA
gattacctgctgtataaattcaaccgtttccaggcctgccgctatgggctggaaggcgtcattaccgatccgcac

SEQ ID NO: 799288 - DNA, 75 bp, synthetic construct
  source 1..75: mol_type = other DNA
ccagcagtacatcaaatcccgcgaccaggagaacgaggaaattgctcttacggttgggaagctgcgcgttgagct

SEQ ID NO: 799289 - DNA, 75 bp, synthetic construct
  source 1..75: mol_type = other DNA
tatggtgccacaggccagcgcatgggcgataaaccgtgtggcacagaaagcggtctcggttgccacccggcaggt

SEQ ID NO: 799290 - DNA, 75 bp, synthetic construct
  source 1..75: mol_type = other DNA
cacaggcatttgaggatgcccgtaaaagcgtcattgataacgagatgccgaaacagctggggtatgccctgaaac

SEQ ID NO: 799291 - DNA, 75 bp, synthetic construct
  source 1..75: mol_type = other DNA
gggggctgcacaggtcagaatgacccggcgtggtggcaggttacattaccgtggcagtgtgctgaaagtgggaaa

SEQ ID NO: 799292 - DNA, 75 bp, synthetic construct
  source 1..75: mol_type = other DNA
cgcaggcatttacggaagccagtcggcatattgctgaaacggagatgccgaaacaactgggttatgcactgaagc

SEQ ID NO: 799293 - DNA, 75 bp, synthetic construct
  source 1..75: mol_type = other DNA
atgctggatggccaggactggcgtgacgctgggttgcgctacacctcgcagctcgatttgctgccttttggttag

SEQ ID NO: 799294 - DNA, 75 bp, synthetic construct
  source 1..75: mol_type = other DNA
aacctggtgaaggggataccttttcggattgtgaaagaacgtgtgcgggtactgaaagccaccccgacaggaaaa

SEQ ID NO: 799295 - DNA, 75 bp, synthetic construct
  source 1..75: mol_type = other DNA
tcttgctgcatatcgtggccgcgtaatgacacggatcgcggtcgagctttccttgctaacttttgtgcgttccag

SEQ ID NO: 799296 - DNA, 75 bp, synthetic construct
  source 1..75: mol_type = other DNA
ttgtatcttgaggtttcggcaaagggttctaaatattggcgcatgaaataccgacgtccctctgacaaaaaagag

SEQ ID NO: 799297 - DNA, 75 bp, synthetic construct
  source 1..75: mol_type = other DNA
tgatcactattctggcagacccttaactcgattggctgttgaactcactttgttggtcttcattcgttcaagtga

SEQ ID NO: 799298 - DNA, 75 bp, synthetic construct
  source 1..75: mol_type = other DNA
ttaccgactcggccctacgtttgctactgacgttcgcacctggcttgcagagatgtcacaccgggaccttgctcg

SEQ ID NO: 799299 - DNA, 75 bp, synthetic construct
  source 1..75: mol_type = other DNA
gctcgccaacgtgaaaccaataatctacgcgctatttatcgctggcatccacaatttgctggcggcgaatttatt

SEQ ID NO: 799300 - DNA, 75 bp, synthetic construct
  source 1..75: mol_type = other DNA
actcaaatccagccagcgatatggctggtgcactatcgacaaccaaagcgcgccattatcctgctttaccttcta

SEQ ID NO: 799301 - DNA, 75 bp, synthetic construct
  source 1..75: mol_type = other DNA
gaacacaacacggcggcgtgctggtgaaggactgagagtgggaaaatactttttccggggggcatttgttcagca

SEQ ID NO: 799302 - DNA, 75 bp, synthetic construct
  source 1..75: mol_type = other DNA
ataccgtgctgcatcatgatgttcgccattaccccgataatattatcaacatggcgaatcaggcggggttcgata

SEQ ID NO: 799303 - DNA, 75 bp, synthetic construct
  source 1..75: mol_type = other DNA
tcgcttttactcaattattatgaaaattaatcttccattcatacactggtcacggattagcaatgataagcgcct

SEQ ID NO: 799304 - DNA, 75 bp, synthetic construct
  source 1..75: mol_type = other DNA
tcaggatgtatgtcgtttatgttattgcgtttattatcctctttttattgttcttctgttcagcaataaataaaa

SEQ ID NO: 799305 - DNA, 75 bp, synthetic construct
  source 1..75: mol_type = other DNA
acgccaaggccgaagcactgttacgcgttctcgatcgggcctttacctttacggctgaactgggcggattacgta

SEQ ID NO: 799306 - DNA, 75 bp, synthetic construct
  source 1..75: mol_type = other DNA
agactttcgtccgacggaagacgaagaagtgctctataaacaggtttcctcttatttgcagcgggacgatctact

SEQ ID NO: 799307 - DNA, 75 bp, synthetic construct
  source 1..75: mol_type = other DNA
gtatcagcctgtattcatggtgtacatttggcacaacatttaatgatggttttgcaatcagtatccttcagacag

SEQ ID NO: 799308 - DNA, 75 bp, synthetic construct
  source 1..75: mol_type = other DNA
aactggtcagggggcgcgtcaggatgctgagtgccagcccttccggaaaaatgtatgccaggatccgcattaacc

SEQ ID NO: 799309 - DNA, 75 bp, synthetic construct
  source 1..75: mol_type = other DNA
cgcatcattgccgcggaaatgccgaaacagctggggtatgccctgaaacagcaactgaggatacatttgggatga

SEQ ID NO: 799310 - DNA, 75 bp, synthetic construct
  source 1..75: mol_type = other DNA
gcaatctgaacagtcttgatacccgtatggtgccgcaggccagcgcatgggcagtaaaccgggttgctgcaaaag

SEQ ID NO: 799311 - DNA, 75 bp, synthetic construct
  source 1..75: mol_type = other DNA
gtaagtgtgatgcagctggttgcgccgctggtgatttttatccccgtatttgcctttctcggcgtcaatggcgta

SEQ ID NO: 799312 - DNA, 75 bp, synthetic construct
  source 1..75: mol_type = other DNA
tcatcatttctctgctgtgcggctttgctggcgcgaacttcgcatccagtatggcaaacatcagcttcttctttc

SEQ ID NO: 799313 - DNA, 75 bp, synthetic construct
  source 1..75: mol_type = other DNA
ggtagctcgctggcattaacgggttcgccagtcggcgcaatgaaggtatttttgattttctatatcgcctgcgta

SEQ ID NO: 799314 - DNA, 75 bp, synthetic construct
  source 1..75: mol_type = other DNA
tttggtgtgcagaatgacctccttgaatcaaatcctgcatgcgatatggctggagcgcttttaagcgttaaagca

SEQ ID NO: 799315 - DNA, 75 bp, synthetic construct
  source 1..75: mol_type = other DNA
ctgagcatttggacgaacgtcgattgatggtacagtggtgggctgattatttggaagagaataaactaagaatga

SEQ ID NO: 799316 - DNA, 75 bp, synthetic construct
  source 1..75: mol_type = other DNA
ccttactaacttttgtacgttccagtgagttacgtttcgcgcgatgggatgagttcgacttcgataaatctcttt

SEQ ID NO: 799317 - DNA, 75 bp, synthetic construct
  source 1..75: mol_type = other DNA
aaattggtcaattgcgtagtgttatgctgcaccgcccaaatttaagtctgaaacgtttgacaccatcgaattgtc

SEQ ID NO: 799318 - DNA, 75 bp, synthetic construct
  source 1..75: mol_type = other DNA
atacggcgtggagtcgctgcataaaaccttcgccctggcgcaaaaatacgaccgtctcatcgacgttcactgtga

SEQ ID NO: 799319 - DNA, 75 bp, synthetic construct
  source 1..75: mol_type = other DNA
cccggttattttgctgacaaacgctctggattcgcgttttagtaaagacgccagtatcgtcatccacgttccgcg

SEQ ID NO: 799320 - DNA, 75 bp, synthetic construct
  source 1..75: mol_type = other DNA
acatggtcgcagggaattttgattacgtgcaggcgggaatgccgaaaaagaaaaaacggacgctttcgccagact

SEQ ID NO: 799321 - DNA, 75 bp, synthetic construct
  source 1..75: mol_type = other DNA
gaaaccattgctcgtgaatggcatgccagtaacaagcgatggagtgaagatcatcgatcgcgcgttcttcgctat

SEQ ID NO: 799322 - DNA, 75 bp, synthetic construct
  source 1..75: mol_type = other DNA
gcatggatttagaacaatggcgcgctgtgctttgggtgagtcagggttgtggagtgatgatgcaatagaacgtca

SEQ ID NO: 799323 - DNA, 75 bp, synthetic construct
  source 1..75: mol_type = other DNA
ggcgtatacctgcaaaacgagaagaaattaaaggcgtgcggtactcataccgtggcatgaagatgaaagaggagc

SEQ ID NO: 799324 - DNA, 75 bp, synthetic construct
  source 1..75: mol_type = other DNA
catgacatcttcgcaaatacgctgcgcgatcagggggtggaagtcctgctgttaacagacctcctgacacaaacc

SEQ ID NO: 799325 - DNA, 75 bp, synthetic construct
  source 1..75: mol_type = other DNA
cagattagtggtgataaagagctactctttccgggggatcatgacgcaactaaagttatgagtgaaaacacggta

SEQ ID NO: 799326 - DNA, 75 bp, synthetic construct
  source 1..75: mol_type = other DNA
atatggtggtggatacccacacgtctaatgactttattatgaagccgctaccgaatcatttatttacccgcgata

SEQ ID NO: 799327 - DNA, 75 bp, synthetic construct
  source 1..75: mol_type = other DNA
atgcactcctataacggggcgtatacctcacgcctgttccgcttgctgaaaatgtccggtattaactttgtcgcc

SEQ ID NO: 799328 - DNA, 75 bp, synthetic construct
  source 1..75: mol_type = other DNA
gatggttcaatggtgggcagactatttagatcataacaaatcagaatctataactccctatgaatatgcggcatt

SEQ ID NO: 799329 - DNA, 75 bp, synthetic construct
  source 1..75: mol_type = other DNA
ctactgtgacgcttgctcaggcaagagcaaaacgcgatgaagccaaaaagctattagtgcagggcattgatccaa

SEQ ID NO: 799330 - DNA, 75 bp, synthetic construct
  source 1..75: mol_type = other DNA
ctacaaaatggccgatggcggtggtttgtatctcgaggtttcggccaagggttctaaatactggcgcatgaaata

SEQ ID NO: 799331 - DNA, 75 bp, synthetic construct
  source 1..75: mol_type = other DNA
tgggctgattatattgatgctaataagaatggatctgtcacaccatatgattttgcgcgtatgcatggaaaataa

SEQ ID NO: 799332 - DNA, 75 bp, synthetic construct
  source 1..75: mol_type = other DNA
agaccgcaaagccaaaagataaaacctataaaatggccgatggtggcggtttgtacctcgaggtttctgtcaaag

SEQ ID NO: 799333 - DNA, 75 bp, synthetic construct
  source 1..75: mol_type = other DNA
gccggttccctgagtttcttgcacgtcttgctgcatatcgtggccgcgtaatgacacggatcgcggtcgagcttt

SEQ ID NO: 799334 - DNA, 75 bp, synthetic construct
  source 1..75: mol_type = other DNA
taaggttatgagtgaaaatacggtaaacaatgcattgcgtgtaatgggatatgacacaaaaacagaagtatgtgg

SEQ ID NO: 799335 - DNA, 75 bp, synthetic construct
  source 1..75: mol_type = other DNA
ggcggtaaggtgattgccagtacacaaccggcacaaaccactgtatatctggatcagccggaagccattgactac

SEQ ID NO: 799336 - DNA, 75 bp, synthetic construct
  source 1..75: mol_type = other DNA
acgtcgcggcatcacgcgcgttaaagagatgctggagtccggcattaacgtctgctttggtcacgatgatgtctt

SEQ ID NO: 799337 - DNA, 75 bp, synthetic construct
  source 1..75: mol_type = other DNA
atgacacgaaaaccgaggtctgtgggcatggatttaggacgatggcgcgtggtgcgcttggtgaatcaggattat

SEQ ID NO: 799338 - DNA, 75 bp, synthetic construct
  source 1..75: mol_type = other DNA
tgagttgcgtttcgcgcgttgggatgagttcgacttcgataaatctctttggcgtatacctgcaaagcgagaaga

SEQ ID NO: 799339 - DNA, 75 bp, synthetic construct
  source 1..75: mol_type = other DNA
ggagtgatgatgcgatagaacgtcaattgagccattcagaacgtaacaatgtacgcgcagcttatattcatactt

SEQ ID NO: 799340 - DNA, 75 bp, synthetic construct
  source 1..75: mol_type = other DNA
acgaaggtgcactgtgctatatcactgaagtcacagtgaaaatcttcaaatttacgccggaaaacaatctcttct

SEQ ID NO: 799341 - DNA, 75 bp, synthetic construct
  source 1..75: mol_type = other DNA
atcgaaacctggtttaacaacctgaactggggaccggataaagtggctgccgaacgtgtgcagatcctcaaaacc

SEQ ID NO: 799342 - DNA, 75 bp, synthetic construct
  source 1..75: mol_type = other DNA
atggcaccgtcacacgcattaaaaacgtgccacgccgcgcggctggcccggacattcgccacatcatcatcggta

SEQ ID NO: 799343 - DNA, 75 bp, synthetic construct
  source 1..75: mol_type = other DNA
gtgtcgagttgcttgataaagaaaccacgcgtaaggacgttccatccctgcgtttgggtaaagtgagcatcgcga

SEQ ID NO: 799344 - DNA, 75 bp, synthetic construct
  source 1..75: mol_type = other DNA
atcggtgcgtgtgcgcgatgaacatcgtgtgctgcatgtgatcccgcaagagtatgcgattgactatcaggaagg

SEQ ID NO: 799345 - DNA, 75 bp, synthetic construct
  source 1..75: mol_type = other DNA
actggcagaggtgatcgagccgcgctataccgagctgctcaacctggtcaacgaagagatattgcagttgcagga

SEQ ID NO: 799346 - DNA, 75 bp, synthetic construct
  source 1..75: mol_type = other DNA
cctgaaaatcaccatgaaattggcagcggtaatattggtggtcaatacgtgatggacgatgttcaaggccactgg

SEQ ID NO: 799347 - DNA, 75 bp, synthetic construct
  source 1..75: mol_type = other DNA
aactgaaaacagcctggatgccgaacaaggtttagttttaccgccgtttgtggagccgcatattcacctggacac

SEQ ID NO: 799348 - DNA, 75 bp, synthetic construct
  source 1..75: mol_type = other DNA
cgcaccgtgaaggcatgggtgcgcgagtcaccgccagccacaccacggcaatgcactcctataacggggcgtata

SEQ ID NO: 799349 - DNA, 75 bp, synthetic construct
  source 1..75: mol_type = other DNA
cagatgggcggcctggtggcgacccgcagtatcgggcagttctccacactctacggcgcaatcgaagatatggtc

SEQ ID NO: 799350 - DNA, 75 bp, synthetic construct
  source 1..75: mol_type = other DNA
aacggtgtgccgcgtaccggcgcttccgccaccgaaggtgggctggaaactgtcgtagaaaactcggtggtgctc

SEQ ID NO: 799351 - DNA, 75 bp, synthetic construct
  source 1..75: mol_type = other DNA
gatggtgaagaaggtgcttatgcgatgggttatgaggatgggcgtgacaaaacggtaattgcagtaatgaaagct

SEQ ID NO: 799352 - DNA, 75 bp, synthetic construct
  source 1..75: mol_type = other DNA
cccattaatttcaccacacaactggtgctcgatggtcaggtcgtggcggaggcagtgaacaaatacaaccttcag

SEQ ID NO: 799353 - DNA, 75 bp, synthetic construct
  source 1..75: mol_type = other DNA
acaggctaatgcggaaccagaacaacaggtcgatccgcgcaaagctgccatcgaagccgctattgcccgtgccaa

SEQ ID NO: 799354 - DNA, 75 bp, synthetic construct
  source 1..75: mol_type = other DNA
gccaatgcggaaccagaagaacaggttgatccacgcaaagccgccgtcgaagctgctattgcccgtgccaaagca

SEQ ID NO: 799355 - DNA, 75 bp, synthetic construct
  source 1..75: mol_type = other DNA
ggaaccagaagaacaggtcgatccgcgcaaagccgccgtcgaagcggctattgcccgcgccaaagcgcgcaagcg

SEQ ID NO: 799356 - DNA, 75 bp, synthetic construct
  source 1..75: mol_type = other DNA
ggagacatctggcatcccttgttaatggatttgtcgctgtttgcgatttgcgtttgctttgccctggcaatactg

SEQ ID NO: 799357 - DNA, 75 bp, synthetic construct
  source 1..75: mol_type = other DNA
ggtgacatctggcatcccttgttaatggatttatcgctgtttgcgatttgcgtttgccttgccctggcaatactg

SEQ ID NO: 799358 - DNA, 75 bp, synthetic construct
  source 1..75: mol_type = other DNA
gtgaagtttatgctcaatgcaacaggattgcccttacaagatctggtattcggtgcgtccgtctactttcctccg

SEQ ID NO: 799359 - DNA, 75 bp, synthetic construct
  source 1..75: mol_type = other DNA
caataggtggtggtattgcagcaggtgctgccattatggcgcagccggtcaaaaagcagatgagctacgaacgcc

SEQ ID NO: 799360 - DNA, 75 bp, synthetic construct
  source 1..75: mol_type = other DNA
caaaactccttgaaggctttggtgtcgggaaactggttgcagaccaacaggcgttaaaagcgttgctggcttacc

SEQ ID NO: 799361 - DNA, 75 bp, synthetic construct
  source 1..75: mol_type = other DNA
ccaccgttctgaatatggcaattgcagcgggcaaagaaggcagctttgaactgagcgacatggcccgctggttat

SEQ ID NO: 799362 - DNA, 75 bp, synthetic construct
  source 1..75: mol_type = other DNA
cgacgcgctgaacggttatctgcaaggcaacgcccggtatctggcggatgcctccagacctacttcccggcgtgg

SEQ ID NO: 799363 - DNA, 75 bp, synthetic construct
  source 1..75: mol_type = other DNA
aagcgcgcaagcatgggctggatccgatagacgcgctttccagcctgatagataaaatcgttgccaacgataaac

SEQ ID NO: 799364 - DNA, 75 bp, synthetic construct
  source 1..75: mol_type = other DNA
gttgaggcgctgggaggaagacaggaaaaaagccgcagctgatgccctgccatcaccggcgcaggtcaacaaagc

SEQ ID NO: 799365 - DNA, 75 bp, synthetic construct
  source 1..75: mol_type = other DNA
ttattaacgcccggttacccggcaaagaggggctgtggcagattcatcttcacgacggaaaaatcagcgccattg

SEQ ID NO: 799366 - DNA, 75 bp, synthetic construct
  source 1..75: mol_type = other DNA
cgcattatcacatccgctcaacaagcggatatcactgtggcggatggtagccacgtcattaacttttgtgccaat

SEQ ID NO: 799367 - DNA, 75 bp, synthetic construct
  source 1..75: mol_type = other DNA
gaagaataatgatagtagtgcaaaattttgctatgtgaaagatttacagttttatgttcagtatattcctgagct

SEQ ID NO: 799368 - DNA, 75 bp, synthetic construct
  source 1..75: mol_type = other DNA
agaagccttaaaggaagtcaattgcagtgagtatttaattaaaaaaacaattaccaccattgatggttttaccat

SEQ ID NO: 799369 - DNA, 75 bp, synthetic construct
  source 1..75: mol_type = other DNA
ttctcgtccgtatctgttctctaactcgctggcaccggccattgttgcggcttccatcaaagtcctggagatggt

SEQ ID NO: 799370 - DNA, 75 bp, synthetic construct
  source 1..75: mol_type = other DNA
catgaatactgtgatgtgatgggccgggtcgatatcatcaccggcacactcggtaaagccttaggcggcgcttct

SEQ ID NO: 799371 - DNA, 75 bp, synthetic construct
  source 1..75: mol_type = other DNA
tctctatggacggcgtgattgccaacctgaaaggggtttgcgatctcgcggataaatacgacgctttggtgatgg

SEQ ID NO: 799372 - DNA, 75 bp, synthetic construct
  source 1..75: mol_type = other DNA
gtcttagtaatattggattttttggtagagaaaggatctgttgttggttatatgtcacgggaaaatattctgtga

SEQ ID NO: 799373 - DNA, 75 bp, synthetic construct
  source 1..75: mol_type = other DNA
attactttaaaagatatttacttagtagtgaccagaatctattaaaaagacttactttcttattgaggcttgctt

SEQ ID NO: 799374 - DNA, 75 bp, synthetic construct
  source 1..75: mol_type = other DNA
gttcgattattagaactaatcaaaaatccattttatctaagtgaatatttgaggttctataccggtgaaagcatc

SEQ ID NO: 799375 - DNA, 75 bp, synthetic construct
  source 1..75: mol_type = other DNA
ggcgatcaacttaaatatctggtgccggacgatatgatctacatcgctgagattgattctgcaccctgcgcgttt

SEQ ID NO: 799376 - DNA, 75 bp, synthetic construct
  source 1..75: mol_type = other DNA
gagaaaattaggagaacaagacagctgaaagaggagttattagtaatattggagtttttggtggagaaaggatca

SEQ ID NO: 799377 - DNA, 75 bp, synthetic construct
  source 1..75: mol_type = other DNA
agccaagatacgaaatgttggggagggaaattattagtgagaactatcggcaaggtatttatgatgtaaaaaaaa

SEQ ID NO: 799378 - DNA, 75 bp, synthetic construct
  source 1..75: mol_type = other DNA
cgtctgtgggcgaacgcgcgtcagttccgtgagcaaatgtcggcggcgggctttaccctggcgggagccgatcac

SEQ ID NO: 799379 - DNA, 75 bp, synthetic construct
  source 1..75: mol_type = other DNA
ctgtttaccctgtcggtgctggcactggcgttaggcattgcttttggtgcggtagaactgtttgacgtctccttt

SEQ ID NO: 799380 - DNA, 75 bp, synthetic construct
  source 1..75: mol_type = other DNA
gttgccgatactaaactggcacctgaactggcggagctgggcgtcattttgctgatgttcggcgttggtctgcat

SEQ ID NO: 799381 - DNA, 75 bp, synthetic construct
  source 1..75: mol_type = other DNA
ttgtttggtcactcccagcgcacggcgttaaccatcgccgccagcctcgcgcaaattggtgagttcgcgtttatc

SEQ ID NO: 799382 - DNA, 75 bp, synthetic construct
  source 1..75: mol_type = other DNA
taaaaataaaattgactggagaaaaggcaataacgaaatattctattcaacaataaaaatgcctgatactataaa

SEQ ID NO: 799383 - DNA, 75 bp, synthetic construct
  source 1..75: mol_type = other DNA
tacgcgaggctacaggctggaaactcagggcaattggtgagccttcagaatcagattcgtttgtctcgcacctga

SEQ ID NO: 799384 - DNA, 75 bp, synthetic construct
  source 1..75: mol_type = other DNA
atctgttgccgcaagccgggcagaacctggtactggcaggtgcgattttgtcgattatgctcaacccggtcctgt

SEQ ID NO: 799385 - DNA, 75 bp, synthetic construct
  source 1..75: mol_type = other DNA
atggagcgttatattttttcaccgtccgcgaatatgttttatccggcctccctgcgcgccgtttacgagactacc

SEQ ID NO: 799386 - DNA, 75 bp, synthetic construct
  source 1..75: mol_type = other DNA
agcctgggtgccggaaaagtccgttatggaaatccgtgcgccgaaaaagggccaggagcaggacacgcctgccgc

SEQ ID NO: 799387 - DNA, 75 bp, synthetic construct
  source 1..75: mol_type = other DNA
gtactcaggatagccataaagagcttgagcagaaactggcggcattcctgggtatggaagatgcgattctctact

SEQ ID NO: 799388 - DNA, 75 bp, synthetic construct
  source 1..75: mol_type = other DNA
tgggtgaacgtgaaatcgcccgtactatgctggaactgctggaaacaccaccggctggcgaggtggtgacggggt

SEQ ID NO: 799389 - DNA, 75 bp, synthetic construct
  source 1..75: mol_type = other DNA
cccaacgtacggcattaaccatcgccgccagcctggcgcagattggtgagttcgcgtttatcctggcgggactgg

SEQ ID NO: 799390 - DNA, 75 bp, synthetic construct
  source 1..75: mol_type = other DNA
tgggatatctgttagcgggtgtgctggcaggaccattcactccgggctttgttgccgataccaagcttgcgccgg

SEQ ID NO: 799391 - DNA, 75 bp, synthetic construct
  source 1..75: mol_type = other DNA
caaaccaccgaagcgttttacaactctctgcgccatgccgaagccctgactttcggcctcaactgtgcgctgggg

SEQ ID NO: 799392 - DNA, 75 bp, synthetic construct
  source 1..75: mol_type = other DNA
cgagaacctcagcaacgaagagctgatccgcgaaaactatcagggcatccgcccggcaccaggctacccggcctg

SEQ ID NO: 799393 - DNA, 75 bp, synthetic construct
  source 1..75: mol_type = other DNA
gatctgatcctgattgaaaccgttttcgacacccttaacgccaaagcggcggtctttgcggtgaaaacggagttt

SEQ ID NO: 799394 - DNA, 75 bp, synthetic construct
  source 1..75: mol_type = other DNA
tagtaaaagagcgaaaaatatggcataagcagtatgctgctgaaaaacagagtaatcttccagcactgtgtatgt

SEQ ID NO: 799395 - DNA, 75 bp, synthetic construct
  source 1..75: mol_type = other DNA
atagaaatcatttccaaactacatcaactttataaaaattctcttattgactataaagctaaccttactcaacaa

SEQ ID NO: 799396 - DNA, 75 bp, synthetic construct
  source 1..75: mol_type = other DNA
ttggggaaaatactggtacagaaaaaaggatcattttttggattcattattcttccattttctatatacagaact

SEQ ID NO: 799397 - DNA, 75 bp, synthetic construct
  source 1..75: mol_type = other DNA
acgatatcggtaaaaatatcgttggcgtggtgctgcaatgtaataactacgaaattgtcgatctcggcgttatgg

SEQ ID NO: 799398 - DNA, 75 bp, synthetic construct
  source 1..75: mol_type = other DNA
caggcggagtggcgctcgtgggaagtgaataaacgtctggaatactcgttggtcaaaggcattaccgagtttatc

SEQ ID NO: 799399 - DNA, 75 bp, synthetic construct
  source 1..75: mol_type = other DNA
ccagatgaactgcgccagtacgtgcaggaactatcacggattgcggaatgctacgtcactgcgcacccgaacgcc

SEQ ID NO: 799400 - DNA, 75 bp, synthetic construct
  source 1..75: mol_type = other DNA
tgccgtcgggcgtacaaaatcctcaccgaagaggttggcttcccggctgaagatatcatcttcgacccgaacatc

SEQ ID NO: 799401 - DNA, 75 bp, synthetic construct
  source 1..75: mol_type = other DNA
tggataaattaagcgccgagaaaacgctgaatccacgcggtgtggttggtctgttcccggcaaaccgtgtgggcg

SEQ ID NO: 799402 - DNA, 75 bp, synthetic construct
  source 1..75: mol_type = other DNA
ggtgctggacggcggtatgggcaccatgatccagagttatcgtctgagcgaagccgattttcgcggcgagcgttt

SEQ ID NO: 799403 - DNA, 75 bp, synthetic construct
  source 1..75: mol_type = other DNA
aactgtgtattaacacctatcgtattgacgggcgtgaaatggcagaaacagaagtcgttcctattgacatgcctg

SEQ ID NO: 799404 - DNA, 75 bp, synthetic construct
  source 1..75: mol_type = other DNA
caacagcattcagagcaatcacctattgcggatggcaaaaactcgacaatgccgtcaccgctctggctaaaaact

SEQ ID NO: 799405 - DNA, 75 bp, synthetic construct
  source 1..75: mol_type = other DNA
tgatgatggcgtggtgtcccgtattgatctggatatccgccgcaccgggattaatgaactgggtaacagtatcac

SEQ ID NO: 799406 - DNA, 75 bp, synthetic construct
  source 1..75: mol_type = other DNA
cctgcggttcagaatgatcgcacggggtcgcgtctgtatctgttgcgacgcagcaagttgacaaataaaaccccg

SEQ ID NO: 799407 - DNA, 75 bp, synthetic construct
  source 1..75: mol_type = other DNA
agagtttacctgcgggcgatggcgggttgtctctggggcagggggttattgctgcggcgcgttggttagcgggtg

SEQ ID NO: 799408 - DNA, 75 bp, synthetic construct
  source 1..75: mol_type = other DNA
gtgcaacagcaaaactggagcgtgctggcgcgggccattgagcgtggaattaacgcgccgctggcgtcatcgtgt

SEQ ID NO: 799409 - DNA, 75 bp, synthetic construct
  source 1..75: mol_type = other DNA
gtttgtttgatgctgtagcggcggcactgggctgtgcgccagtgacgttaagttatgaaggtgaagcggcttgtg

SEQ ID NO: 799410 - DNA, 75 bp, synthetic construct
  source 1..75: mol_type = other DNA
atgcttcagcaagtcagtatggtttaattggaaatgcttctgtttcagcgggtaatatttcttttaatggttgca

SEQ ID NO: 799411 - DNA, 75 bp, synthetic construct
  source 1..75: mol_type = other DNA
cgaggagaagaaaaagagacagaggacaaagagcgcaagctggaacagcaacaggcaaatgcggaaccagaagaa

SEQ ID NO: 799412 - DNA, 75 bp, synthetic construct
  source 1..75: mol_type = other DNA
acggttcagatctctcccgtatggtaaatggtgtgaataagcaccgcagcggctacgacctgacgttttctgccc

SEQ ID NO: 799413 - DNA, 75 bp, synthetic construct
  source 1..75: mol_type = other DNA
tcagcgcagcaaactgaccaatcagctggtgcagacggtaaggggatatatccgcgaatgcctgcaatggatgat

SEQ ID NO: 799414 - DNA, 75 bp, synthetic construct
  source 1..75: mol_type = other DNA
tctgtggcgccgggatggtccggtaacaatttcttttaacgatttctggagcgtgattgcaaatggcggacagtg

SEQ ID NO: 799415 - DNA, 75 bp, synthetic construct
  source 1..75: mol_type = other DNA
cctctggcgtcgtgatggaacagtaatgatttcttttgatgatctgtggagtgcgataacgcatggcggacagtg

SEQ ID NO: 799416 - DNA, 75 bp, synthetic construct
  source 1..75: mol_type = other DNA
atgaacgtggtcggcgatctgtttggcgaagggaaaatgttcctgccacaggtggtcaaatcggcgcgtgtgatg

SEQ ID NO: 799417 - DNA, 75 bp, synthetic construct
  source 1..75: mol_type = other DNA
tgtgccgctggtacgcgcaccgcgtaatgcagcatctgtgcacggtgaatcgggaatggctggctacgactttgt

SEQ ID NO: 799418 - DNA, 75 bp, synthetic construct
  source 1..75: mol_type = other DNA
acaggtcgatccgcgcaaagctgccgtcgaagcggctattgcacgcgccaaagcgcgcaagctggaacagcaaca

SEQ ID NO: 799419 - DNA, 75 bp, synthetic construct
  source 1..75: mol_type = other DNA
aaagcacgcaagctggaacagcaacaacaggctaatgcggaaccagaagaacaggttgatccacgcaaagccgcc

SEQ ID NO: 799420 - DNA, 75 bp, synthetic construct
  source 1..75: mol_type = other DNA
gcaccggaaaaatgcttcatgcactgtttagccactaccgcagcggcagtatgcaaagtggcctgcgaatgcacg

SEQ ID NO: 799421 - DNA, 75 bp, synthetic construct
  source 1..75: mol_type = other DNA
atgataaagcctgtacccattttcctcgataccgatcccggtattgacgatgcggtcgccattgccgccgcgatt

SEQ ID NO: 799422 - DNA, 75 bp, synthetic construct
  source 1..75: mol_type = other DNA
cgactgtcggaggcaatgtctcggtgcataaaactacccgaaatgcgctgcaattgctgcatttctggaatgcgg

SEQ ID NO: 799423 - DNA, 75 bp, synthetic construct
  source 1..75: mol_type = other DNA
aagcacgcaagctggaacagcaacaggccaatgcggagccagaacaacaggtcgatccgcgcaaagctgccgtcg

SEQ ID NO: 799424 - DNA, 75 bp, synthetic construct
  source 1..75: mol_type = other DNA
ggcgatatctggcatccattgttaatggatttatcactgtttgctatttgtgtttgtctcgccctggcaatactg

SEQ ID NO: 799425 - DNA, 75 bp, synthetic construct
  source 1..75: mol_type = other DNA
gattgcccttacaagatctggtgcttggcgcatccatctactttcccccgttcttcaaagccttcgcgcttggat

SEQ ID NO: 799426 - DNA, 75 bp, synthetic construct
  source 1..75: mol_type = other DNA
cccgtgccaaagcacgcaagctggaacagcaacaggctaatgccgaaccagaacaacaggtcgatccgcgcaaag

SEQ ID NO: 799427 - DNA, 75 bp, synthetic construct
  source 1..75: mol_type = other DNA
agcacgcaagctggaacagcaacaggctaatgcggagccagaagaacagattgatccgcgcaaagctgccgtcga

SEQ ID NO: 799428 - DNA, 75 bp, synthetic construct
  source 1..75: mol_type = other DNA
gccaaagcacgcaagctggaaccgcaacaggctaatacggaaccagaacaacaggtcgatccgcgcaaagctgcc

SEQ ID NO: 799429 - DNA, 75 bp, synthetic construct
  source 1..75: mol_type = other DNA
gcggtagaaactcagggtgaatttacctcaggcacgacggttgttgatatcgacggttgcctgggcaaaccagcc

SEQ ID NO: 799430 - DNA, 75 bp, synthetic construct
  source 1..75: mol_type = other DNA
gaagactatgcccgccgtaaaggcatgagcgttgctgatgttgaacgctggctggcgccgaatctggggtatgac

SEQ ID NO: 799431 - DNA, 75 bp, synthetic construct
  source 1..75: mol_type = other DNA
aagtctactggggctatgcgccgaacgagaacctcagcaacgaagaactgatccgcgaaaactaccagggcatcc

SEQ ID NO: 799432 - DNA, 75 bp, synthetic construct
  source 1..75: mol_type = other DNA
ctgatatccccgtagcctgccgtttgtccggactggagccgctgaacattggcgacgatagtttgtttgttaacg

SEQ ID NO: 799433 - DNA, 75 bp, synthetic construct
  source 1..75: mol_type = other DNA
ggtctgcccaacgcctttggtgaatacgatctcgaccccgacacgatggcaaagcacatccgcgaatgggcggaa

SEQ ID NO: 799434 - DNA, 75 bp, synthetic construct
  source 1..75: mol_type = other DNA
gaagactatgcccgccgtaaaggtatgagcgtctcagatgttgagcgctggctggcaccgaatctggggtatgac

SEQ ID NO: 799435 - DNA, 75 bp, synthetic construct
  source 1..75: mol_type = other DNA
agcggcccgacggtgtatgtgcagaatgcctcgcgcaccgttggtgtggtagcggcgctgctttccgacactcag

SEQ ID NO: 799436 - DNA, 75 bp, synthetic construct
  source 1..75: mol_type = other DNA
aaagagaaacaggcccaggctacacagccgattgtgattaaagcgggcgaacgcccggataacagtgcaattatt

SEQ ID NO: 799437 - DNA, 75 bp, synthetic construct
  source 1..75: mol_type = other DNA
caccaaacgccgagtttaatatcgctgccgatccagaagcggctgcctgtgtcttccgtagcggcatcgaaatcg

SEQ ID NO: 799438 - DNA, 75 bp, synthetic construct
  source 1..75: mol_type = other DNA
cgacggttgcctgggcaaaccagccaatgtaaaggtggcattggatctgaatgtaaaaggcttccagcagtgggt

SEQ ID NO: 799439 - DNA, 75 bp, synthetic construct
  source 1..75: mol_type = other DNA
ccgaagcggcgatggtgcgttttctcaatctgattgccggtgaaccggatatcgctcgcgtgccgattatgatcg

SEQ ID NO: 799440 - DNA, 75 bp, synthetic construct
  source 1..75: mol_type = other DNA
tggtggcggcttatcgagagtccaccaaagcgctggtggaaggtggcgcggatctgatcctgattgaaaccgttt

SEQ ID NO: 799441 - DNA, 75 bp, synthetic construct
  source 1..75: mol_type = other DNA
gcagtacgagaagcccgtaaagcgcaagccagagcgaaacaggcagaactgcagcaaactaacgacgcagcaacc

SEQ ID NO: 799442 - DNA, 75 bp, synthetic construct
  source 1..75: mol_type = other DNA
tcaaagatcaactggaaaatcgggagaatgaaacccggcgttcattattcgagcattttgacgttgatgtggtcc

SEQ ID NO: 799443 - DNA, 75 bp, synthetic construct
  source 1..75: mol_type = other DNA
agcagctcaactcttggctccaggtactgctgatgctaatggtacagttacctatactgttagcgcaggcctgaa

SEQ ID NO: 799444 - DNA, 75 bp, synthetic construct
  source 1..75: mol_type = other DNA
acttatcataaagatactaacacatatacggcttctgcttcagttgatgcgactcaactggcggcattcctgaat

SEQ ID NO: 799445 - DNA, 75 bp, synthetic construct
  source 1..75: mol_type = other DNA
ttacagcgttaacaaggataacggctctgtgactgttgccgggtatgcttcagcgactgataccaataaagatta

SEQ ID NO: 799446 - DNA, 75 bp, synthetic construct
  source 1..75: mol_type = other DNA
gctagtctatccacacttgcagccaataataccaaagcgacaaccattgacattggcggtacctctatctccttt

SEQ ID NO: 799447 - DNA, 75 bp, synthetic construct
  source 1..75: mol_type = other DNA
agctcaagcttttgacaaattaaacactggtgacaaggttagtgtagtaactaaagatacttcaaacgtcactac

SEQ ID NO: 799448 - DNA, 75 bp, synthetic construct
  source 1..75: mol_type = other DNA
tcaccaacctgaacaacaccaccaccaacctgtctgaagcgcagtcccgtattcaggatgccgactatgcgaccg

SEQ ID NO: 799449 - DNA, 75 bp, synthetic construct
  source 1..75: mol_type = other DNA
tttgcccgccccggagacaccctggtgatctggcgactggatcgtctgagccgttccctaaaagacttgattgaa

SEQ ID NO: 799450 - DNA, 75 bp, synthetic construct
  source 1..75: mol_type = other DNA
caggaagagatgaaccgtagccagcagcagcttattaacattcgccaacatgaacagacgtatctcacccggacg

SEQ ID NO: 799451 - DNA, 75 bp, synthetic construct
  source 1..75: mol_type = other DNA
tcatcatccccaaaccggcgctgttggtagaggcagtgaagactatcgacgacatctttgcggtgatggaaaagg

SEQ ID NO: 799452 - DNA, 75 bp, synthetic construct
  source 1..75: mol_type = other DNA
agcgcagatcatccagcaggcaggtaactcggtgctgtccaaagctaaccaggttccgcagcaggttctgtctct

SEQ ID NO: 799453 - DNA, 75 bp, synthetic construct
  source 1..75: mol_type = other DNA
gcctcagagcgctctggcaaatgctggaacctctctcggttatgtcgtgaataccgtcgcaccgaatctttatca

SEQ ID NO: 799454 - DNA, 75 bp, synthetic construct
  source 1..75: mol_type = other DNA
gacgtaagggcggcaggccgaaaacactgagtaaggataaacaggcccttgctgttcaactctataacgagaaaa

SEQ ID NO: 799455 - DNA, 75 bp, synthetic construct
  source 1..75: mol_type = other DNA
tcaatattctcggtataagcccctacctgacgatggccttatggggaacgttgctgctctgtttcattcaggctc

SEQ ID NO: 799456 - DNA, 75 bp, synthetic construct
  source 1..75: mol_type = other DNA
atgctgatttcaatacccccggtgattattgaaggagagacgaaaacgactttattcccctggtatgtgtatcca

SEQ ID NO: 799457 - DNA, 75 bp, synthetic construct
  source 1..75: mol_type = other DNA
ctccctggctaaccagctgcggataacgatccccgggctgtccggtatttgccggtatgaaattaccggaaggcg

SEQ ID NO: 799458 - DNA, 75 bp, synthetic construct
  source 1..75: mol_type = other DNA
gcaaacaacacttttacttacaataccacctcaacagcggcagaactccaatcttacctgacgcctaaggcgggg

SEQ ID NO: 799459 - DNA, 75 bp, synthetic construct
  source 1..75: mol_type = other DNA
ggtggtcattctggtgggatcagccttaactggcacgctcatctgggaatggatcaaccccgtttccctgatggg

SEQ ID NO: 799460 - DNA, 75 bp, synthetic construct
  source 1..75: mol_type = other DNA
cttgtcggtaatgaaagtgcatgcgcgagcgctgaaaaaaatattccacttctcgtatatgaaaacgaaagccct

SEQ ID NO: 799461 - DNA, 75 bp, synthetic construct
  source 1..75: mol_type = other DNA
atgcataagtcagtcgcagaacatagtgatttaattccggatgaacatgagtggatatccagaaaacagaaatct

SEQ ID NO: 799462 - DNA, 75 bp, synthetic construct
  source 1..75: mol_type = other DNA
gcgtgaacgtactgtcaaaagatggctcgatgaaaattcaggtcggcgcgaacgatggcgaaacgattactattg

SEQ ID NO: 799463 - DNA, 75 bp, synthetic construct
  source 1..75: mol_type = other DNA
acgcgtatgaaagaaacggtgacggttgagccgaagaaagtcatcattctcgaaggcattttgttgctgacggat

SEQ ID NO: 799464 - DNA, 75 bp, synthetic construct
  source 1..75: mol_type = other DNA
gcgtgaaagtccttgctgaaaataatgaaatgaaaattcaggttggtgctaatgatggtgaaaccatcactatca

SEQ ID NO: 799465 - DNA, 75 bp, synthetic construct
  source 1..75: mol_type = other DNA
ctaaagctgcaaccaccgccgatcccctgaaagctctggacgaagccatcagctccatcgacaaatttcgctcct

SEQ ID NO: 799466 - DNA, 75 bp, synthetic construct
  source 1..75: mol_type = other DNA
tgcagctggtaaattcactaccgacgctgcaaccaaagccgcaaccaccaccgatccgctgaaagcccttgatga

SEQ ID NO: 799467 - DNA, 75 bp, synthetic construct
  source 1..75: mol_type = other DNA
ggatggactgaccaaaaaccatgatgcgacaggagctgttggtgtttatatcacgaccgcagatggcgcaactat

SEQ ID NO: 799468 - DNA, 75 bp, synthetic construct
  source 1..75: mol_type = other DNA
aaagcgcgatcaaacgcctctgggataaattctggagtagcggcattagcaatccgctcacagccattgaacaga

SEQ ID NO: 799469 - DNA, 75 bp, synthetic construct
  source 1..75: mol_type = other DNA
ctgactggtatggcgttccgcgttccgaccccgaacgtatccgtagttgacctgaccgttcgcctggaaaaagct

SEQ ID NO: 799470 - DNA, 75 bp, synthetic construct
  source 1..75: mol_type = other DNA
tcctggccgatgaaaaagagaatggtccggaagataccacgcaagatgacgatatgaagcagagcatcgtcaaat

SEQ ID NO: 799471 - DNA, 75 bp, synthetic construct
  source 1..75: mol_type = other DNA
cctctttctcagggagtttagtctccaggattcccggggcggttcactggaagcctttaactctgccgttgacaa

SEQ ID NO: 799472 - DNA, 75 bp, synthetic construct
  source 1..75: mol_type = other DNA
gctggcgcattaatgtctctcgcgccagccaagcagaagtcattcttgctactgtaagggggatcgttcgagggg

SEQ ID NO: 799473 - DNA, 75 bp, synthetic construct
  source 1..75: mol_type = other DNA
tgaagcagcgctcatagacgcttatcccggcttaactaacatcatgaacggtgctggcagtaatgagttcggtgc

SEQ ID NO: 799474 - DNA, 75 bp, synthetic construct
  source 1..75: mol_type = other DNA
tgttttatctgtgaactcaggctgccagatcatcgtttccgatggaagcataataagctttttctgcttctgccg

SEQ ID NO: 799475 - DNA, 75 bp, synthetic construct
  source 1..75: mol_type = other DNA
ccgggtataaaaacttcatgacggaagtcaacaatctgaacaaacgtatgggtgacctgcgtgacacaaacggtg

SEQ ID NO: 799476 - DNA, 75 bp, synthetic construct
  source 1..75: mol_type = other DNA
taaagcggaggctgataaagccgctgccgcgaaggctgacagtttcatgaatgccggggataaaaacttcatgac

SEQ ID NO: 799477 - DNA, 75 bp, synthetic construct
  source 1..75: mol_type = other DNA
tgatattggtgacgcttcccttctgcttaccggtacaccagtgaattcagatgatgctgcttttttaccgaccat

SEQ ID NO: 799478 - DNA, 75 bp, synthetic construct
  source 1..75: mol_type = other DNA
tgtcataccaacagattatctgaaccaggttatgcaggacgatttcgatgcccccgtggactttgtttccggact

SEQ ID NO: 799479 - DNA, 75 bp, synthetic construct
  source 1..75: mol_type = other DNA
tatgcgctttggtctggagtttgagaagtcagcctttggtaaatataacgtggataatgcggtaaacgcaaattt

SEQ ID NO: 799480 - DNA, 75 bp, synthetic construct
  source 1..75: mol_type = other DNA
agaacagggattgaactgggcaagaccttcagtggtaaggactggagtgtgacggcccgtgccgggaccagctgg

SEQ ID NO: 799481 - DNA, 75 bp, synthetic construct
  source 1..75: mol_type = other DNA
ccatatgcgcggtgaagtggcagcggctgatgatgacgagttactgagcaacaagctaaagcaaattagagaaat

SEQ ID NO: 799482 - DNA, 75 bp, synthetic construct
  source 1..75: mol_type = other DNA
ctggattgagccacaggcggaactggtctatggtgctgtatccggtaaacagttcagctggaaggaccacgggat

SEQ ID NO: 799483 - DNA, 75 bp, synthetic construct
  source 1..75: mol_type = other DNA
ccggggcttattttgacctgattggtaaatatctccatcacgacaatcagtacacggcgagttttgcgtctcttg

SEQ ID NO: 799484 - DNA, 75 bp, synthetic construct
  source 1..75: mol_type = other DNA
tatcgttaccacctgtcggaagaggcctgggtggagccacagatggagctggtttacggttctgtgtcaggaaaa

SEQ ID NO: 799485 - DNA, 75 bp, synthetic construct
  source 1..75: mol_type = other DNA
atataagcagagtacaaaaggaagtcgcaaatttacagaaacaactcgcggatgaaagccgcaaagaaacacaat

SEQ ID NO: 799486 - DNA, 75 bp, synthetic construct
  source 1..75: mol_type = other DNA
gcatgctgatgtctgtgggtctgaacgcagaggttcgtgacaacatccgttttggtctggagtttgagaaatcag

SEQ ID NO: 799487 - DNA, 75 bp, synthetic construct
  source 1..75: mol_type = other DNA
gtgtggatgtgggtaaatcgttctccggtaaggactggaaagtgacggcacgtgctggtcttggctatcagtttg

SEQ ID NO: 799488 - DNA, 75 bp, synthetic construct
  source 1..75: mol_type = other DNA
gcaacaacgtgaccactgatgcaggcgctggctttgagcaaacattgacggggctaacgcttggtatcgacagcc

SEQ ID NO: 799489 - DNA, 75 bp, synthetic construct
  source 1..75: mol_type = other DNA
caacaagcaaattatccatcgaaatggtaacagagccgataccagaccaaaaaatcttatgcaagtccgagactt

SEQ ID NO: 799490 - DNA, 75 bp, synthetic construct
  source 1..75: mol_type = other DNA
atgaaaccttggcatgaagatgttaggcgatattttacagaacaacttacctatgatgaatccagtgattccctg

SEQ ID NO: 799491 - DNA, 75 bp, synthetic construct
  source 1..75: mol_type = other DNA
ctgatatcttaaaattcagccccacactagtagataaaatggcattaaatacatcgataaataccattgatgaaa

SEQ ID NO: 799492 - DNA, 75 bp, synthetic construct
  source 1..75: mol_type = other DNA
tcccctggcaggtggaaaagcaggattcggcgttattcgcgctgtaccagcgaatgattgcgctgcgtaagaaaa

SEQ ID NO: 799493 - DNA, 75 bp, synthetic construct
  source 1..75: mol_type = other DNA
tcgggatgttgcgcgcctgcccctggcggtggtctggctgttcacctggcctggtgtaccgtgcatttattacgg

SEQ ID NO: 799494 - DNA, 75 bp, synthetic construct
  source 1..75: mol_type = other DNA
taaggatacttacaccggtgtggcgaagttcctcgacttcctcgcgaagccagaaaacgctgctgagtggcatca

SEQ ID NO: 799495 - DNA, 75 bp, synthetic construct
  source 1..75: mol_type = other DNA
aaacagaaccacttcatgataatacagttgtcataggtaatctaacgaagtcaaaacttatcaacctttatgaaa

SEQ ID NO: 799496 - DNA, 75 bp, synthetic construct
  source 1..75: mol_type = other DNA
gtgttctgagggcatggagcagcggaaagttaaggcaaattttatcgaacaattcgattcattactggtcaaaga

SEQ ID NO: 799497 - DNA, 75 bp, synthetic construct
  source 1..75: mol_type = other DNA
cttaggtccggcggcagagaaatacacagtaaaaatgagtggctgccactcttgcccgatccgttgtatgaccca

SEQ ID NO: 799498 - DNA, 75 bp, synthetic construct
  source 1..75: mol_type = other DNA
gggcaaactctgtgcgccacggtgccgataaatgaagcagcttctcttgaacaagggcagaatgccacggcttac

SEQ ID NO: 799499 - DNA, 75 bp, synthetic construct
  source 1..75: mol_type = other DNA
gatgtgttaagtgacgatgacgccctgccgctgaacagcctgctggccgcgatctcacgtttttcactgcaaacc

SEQ ID NO: 799500 - DNA, 75 bp, synthetic construct
  source 1..75: mol_type = other DNA
ggctttgctgaaagaagatcttttcctggtaggaactcaagattgcccggggcaaagcgttgatgttaatgctat

SEQ ID NO: 799501 - DNA, 75 bp, synthetic construct
  source 1..75: mol_type = other DNA
ttaaaaagggcgaccttgctgtcggcttgcaacaaggtattggtgatattgaaacccgactatcaggaaatgatt

SEQ ID NO: 799502 - DNA, 75 bp, synthetic construct
  source 1..75: mol_type = other DNA
gttcgtcgatcaagaatttgcccaaattaaacatgttctgcatggtatcagcctgttgggacagtgcccggacag

SEQ ID NO: 799503 - DNA, 75 bp, synthetic construct
  source 1..75: mol_type = other DNA
aaccattggaaaaaagtaatgtatcagtgcctagctagatctgagatttttttctcaatattaattaataatgaa

SEQ ID NO: 799504 - DNA, 75 bp, synthetic construct
  source 1..75: mol_type = other DNA
tccaccaacaggttgtggcaccatcttatgattgaccttgaaacaatgggcaaaaatcctgacgcaccaatagcc

SEQ ID NO: 799505 - DNA, 75 bp, synthetic construct
  source 1..75: mol_type = other DNA
atgcgcttttacaattacgggaatttatagacgaaaactccggtgagttttttgttcaggtctggggaaatggag

SEQ ID NO: 799506 - DNA, 75 bp, synthetic construct
  source 1..75: mol_type = other DNA
attatcggtgccaacatcaccaactgtaagttcagcgacttacagggcgacgctattgaatggaacgtggcgatt

SEQ ID NO: 799507 - DNA, 75 bp, synthetic construct
  source 1..75: mol_type = other DNA
ctctcagagggttgagacactctgttttgcttgcctgcagagaaaaaagtaaaattgctcaggaggttataaaaa

SEQ ID NO: 799508 - DNA, 75 bp, synthetic construct
  source 1..75: mol_type = other DNA
atgaacgttagatttatagtggaaccaattttttccttgcataataataaacttattgcaatggaggttttaagc

SEQ ID NO: 799509 - DNA, 75 bp, synthetic construct
  source 1..75: mol_type = other DNA
ttaaaaaagaagatatctatctctctcgttcagtaaataacagctatagcgccctttataatttgagctggacgt

SEQ ID NO: 799510 - DNA, 75 bp, synthetic construct
  source 1..75: mol_type = other DNA
gcagaaagaaaagatatgtacattatatctcgaccagggcatacaaaaaaccaaaatgtttatagatctcttagc

SEQ ID NO: 799511 - DNA, 75 bp, synthetic construct
  source 1..75: mol_type = other DNA
tataacgagtgtgaatgtacccttcttgacaattacaaacctcttgtttacaacactaaatttattgaagataat

SEQ ID NO: 799512 - DNA, 75 bp, synthetic construct
  source 1..75: mol_type = other DNA
gaaaaagaagctataagacaagacctacttacaaaatacaaagataaaaaaaacgttattgagcgtttaattaaa

SEQ ID NO: 799513 - DNA, 75 bp, synthetic construct
  source 1..75: mol_type = other DNA
atctttttatgcgaaatatcaaggtgatgcaggaatcctcagttggacccgcattgagcatgaactttgacatgc

SEQ ID NO: 799514 - DNA, 75 bp, synthetic construct
  source 1..75: mol_type = other DNA
gcaccttcctgacggcaagctccgcgcttgccttcctccatacccctttcgcccgcgcacttcctgcccgacaaa

SEQ ID NO: 799515 - DNA, 75 bp, synthetic construct
  source 1..75: mol_type = other DNA
atctttttatgcgaaatatcaaagtgatgcaggaatcctctgttggacccgcattgagcatgaacttcgacatgc

SEQ ID NO: 799516 - DNA, 75 bp, synthetic construct
  source 1..75: mol_type = other DNA
atgccgtctcctttgtggcactgactaacattgagatgaagcgtgcgtcgctggcgcttcacaataaaccgcaac

SEQ ID NO: 799517 - DNA, 75 bp, synthetic construct
  source 1..75: mol_type = other DNA
cgatttgtcttacaggacggcagccaggtgacaggggaggagggcggcagtatgcataacatcaccctggatgtg

SEQ ID NO: 799518 - DNA, 75 bp, synthetic construct
  source 1..75: mol_type = other DNA
atgccgtctcctttgtggcgctgactaacattgagatgaagcgtgcgtcgcttgagctacacaataaaccgcaac

SEQ ID NO: 799519 - DNA, 75 bp, synthetic construct
  source 1..75: mol_type = other DNA
cgtaaattcctctacgacaccaatgtcggtgcgggactgccggttattgagaacctgcaaaacttgctcagcgct

SEQ ID NO: 799520 - DNA, 75 bp, synthetic construct
  source 1..75: mol_type = other DNA
atcgatatcggcggcccaacgatggtgcgctccgccgccaagaaccataaagatgtcgcaatcgtggtgaagagc

SEQ ID NO: 799521 - DNA, 75 bp, synthetic construct
  source 1..75: mol_type = other DNA
ggttctatccgtgatgacgaagtgattgccgccgccgatgaacacggtattgcaatgctcttcaccgacatgcgc

SEQ ID NO: 799522 - DNA, 75 bp, synthetic construct
  source 1..75: mol_type = other DNA
gctgttctgctggaaggtggcgaagttcgtgaaatccaacgccattgtctatgccaaaaacaatatgaccatcgg

SEQ ID NO: 799523 - DNA, 75 bp, synthetic construct
  source 1..75: mol_type = other DNA
gtgtactccgcgaaaatcgccggtattaaagctgccgatgaaggcctggaagtgaaaggttcgtcaatggcttct

SEQ ID NO: 799524 - DNA, 75 bp, synthetic construct
  source 1..75: mol_type = other DNA
taccacggtgaaagcaaagaagctgccggtcgcttcccgcgcacgttgaacctgaacttcattaagaagcaggat

SEQ ID NO: 799525 - DNA, 75 bp, synthetic construct
  source 1..75: mol_type = other DNA
ttaaagctgccgatgaaggtctggaagtgaaaggttcctcgatggcttctgacgcgttcttcccgttccgcgacg

SEQ ID NO: 799526 - DNA, 75 bp, synthetic construct
  source 1..75: mol_type = other DNA
cgtcacgtcaaaccgcacggtatgttgtataaccaggcggcgaaagacgcacaactggcagacgccatcgccaga

SEQ ID NO: 799527 - DNA, 75 bp, synthetic construct
  source 1..75: mol_type = other DNA
cgccacgtcaaaccgcacggtatgttgtataaccaggcggcgaaagacgcacaactggcagatgccatcgccaga

SEQ ID NO: 799528 - DNA, 75 bp, synthetic construct
  source 1..75: mol_type = other DNA
cacggcaactacagcagtagcctgttattcgacaccgttccgctgaccgatccgctgatgacgctgcaaagcctt

SEQ ID NO: 799529 - DNA, 75 bp, synthetic construct
  source 1..75: mol_type = other DNA
ccgcctacgacagcatgattgccaactacttcggcagcatggtcccagcctatcacggtgaaagcaaagaagccg

SEQ ID NO: 799530 - DNA, 75 bp, synthetic construct
  source 1..75: mol_type = other DNA
gtgaaggaccggcgcgacctgatgacggcgcttgcgggttccatgctggatgcggttgagactaactttgaacaa

SEQ ID NO: 799531 - DNA, 75 bp, synthetic construct
  source 1..75: mol_type = other DNA
atgcccgcgcgtcctttcctgcatctcaccgaagatgacgtggagaagatggagaatacggctgagcagtatctg

SEQ ID NO: 799532 - DNA, 75 bp, synthetic construct
  source 1..75: mol_type = other DNA
cctggggatggttggtgcagaagaactgcgcgttgtcaccaaacgccagccgaccgaacaggaactgcgtgatgc

SEQ ID NO: 799533 - DNA, 75 bp, synthetic construct
  source 1..75: mol_type = other DNA
acggaaaagatccggaaatgagaaagcttgcgcaggacatcattaaagctcaaaaaggtgaaattgagcagatga

SEQ ID NO: 799534 - DNA, 75 bp, synthetic construct
  source 1..75: mol_type = other DNA
caactgacacattgcgtgaaatgcagcattataaacaactgagtcagcacggggctgacaactggaaaatcctgc

SEQ ID NO: 799535 - DNA, 75 bp, synthetic construct
  source 1..75: mol_type = other DNA
tgatgtaattactgcgttcccaaccgatgcgagattcaaagataaatactggcagtgcagtaaagaagagcgcac

SEQ ID NO: 799536 - DNA, 75 bp, synthetic construct
  source 1..75: mol_type = other DNA
tgttcaataccgatcaggttatcgaagtgtttgtgattggcgtcggtggcgttggcggtgcgctgctggagcaac

SEQ ID NO: 799537 - DNA, 75 bp, synthetic construct
  source 1..75: mol_type = other DNA
attgctttgatgatcattaatgtctgtgaaggctcaagcgtagtggcgcatgcaacggccagacccgaagtcttc

SEQ ID NO: 799538 - DNA, 75 bp, synthetic construct
  source 1..75: mol_type = other DNA
gcttgcgcaggacatcattaaagctcaaaaaggtgaaattgagcagatgaataaatggcttggcaatcaaaaata

SEQ ID NO: 799539 - DNA, 75 bp, synthetic construct
  source 1..75: mol_type = other DNA
tgattgtgaagcacgctaacccctgcggtgtcgccatcagcagcacgatccttgatgcttacgatcgcgcgtata

SEQ ID NO: 799540 - DNA, 75 bp, synthetic construct
  source 1..75: mol_type = other DNA
cacggcggtattctgggccgtcgcggtcaggacgatgccattatggaagaacatcagatccaacctatcgatatg

SEQ ID NO: 799541 - DNA, 75 bp, synthetic construct
  source 1..75: mol_type = other DNA
ctgcgcgtcgtcaccaaacgtcagccgactgaacaagagctgcgtgatgcgctgttctgctggaaagtggcgaag

SEQ ID NO: 799542 - DNA, 75 bp, synthetic construct
  source 1..75: mol_type = other DNA
tcgttggtcagcgcatgaaaagcgagcagatttctcttaaggaatctctgatggcttcatcaagagtatctgttt

SEQ ID NO: 799543 - DNA, 75 bp, synthetic construct
  source 1..75: mol_type = other DNA
ttgcgcgtggtcaccaaacgtcaaccaaccgagcaggaactgcgtgacgctctgttctgctggaaagtggcgaaa

SEQ ID NO: 799544 - DNA, 75 bp, synthetic construct
  source 1..75: mol_type = other DNA
gactctggaaactcgctttgacctcgccattaaagccttcgaacacactgccgcctacgacagcatgattgccaa

SEQ ID NO: 799545 - DNA, 75 bp, synthetic construct
  source 1..75: mol_type = other DNA
accctttatgccgttctggcaggtcacgctgctgatggggagcttatggggcatttcctggggatgtgcaatgtg

SEQ ID NO: 799546 - DNA, 75 bp, synthetic construct
  source 1..75: mol_type = other DNA
ttcggactgctcatggcctctttccactggtggcgcaggaaagttaaccggctgccatcatgggatgatgtgtaa

SEQ ID NO: 799547 - DNA, 75 bp, synthetic construct
  source 1..75: mol_type = other DNA
tatggggcatttcctggggatgtgcaatgtggtttatctactgggggccgtcaggaatggtggcaggtgaggcca

SEQ ID NO: 799548 - DNA, 75 bp, synthetic construct
  source 1..75: mol_type = other DNA
cctacgcaaacgcgttgctgatgtaccgcgccgtccgctgtttaccatgaaccgcgtggagaccaatctcacgtg

SEQ ID NO: 799549 - DNA, 75 bp, synthetic construct
  source 1..75: mol_type = other DNA
tttactacgtcacctacaaaacccgcctacgcaaacgcgttgctgatgtaccgcgccgtccgctgtttaccatga

SEQ ID NO: 799550 - DNA, 75 bp, synthetic construct
  source 1..75: mol_type = other DNA
tgtttgttgtctggctgctctgcacgctgtttattgccacgctgacctggtttgagtttcgccgtgtgcgcttta

SEQ ID NO: 799551 - DNA, 75 bp, synthetic construct
  source 1..75: mol_type = other DNA
tcttgctggatatctcccctgagatcgaaaagctggcggatgaactgtgtggtcgtggtcatcgctgtacggcgg

SEQ ID NO: 799552 - DNA, 75 bp, synthetic construct
  source 1..75: mol_type = other DNA
gctaaggaaaaagaagggcgcattgatattctggtgaataacgcaggcgtttgtcgtctgggcagtttcctcgat

SEQ ID NO: 799553 - DNA, 75 bp, synthetic construct
  source 1..75: mol_type = other DNA
tgaaaccgacctggacctggggcattacgagcgtttcattcgtaccaaaatgagccgccgcaacaacttcaccac

SEQ ID NO: 799554 - DNA, 75 bp, synthetic construct
  source 1..75: mol_type = other DNA
tctataacggtgattgcgcaatgacgactgcctcttctggttctcttgccagcattcgcgagtacgccaaattca

SEQ ID NO: 799555 - DNA, 75 bp, synthetic construct
  source 1..75: mol_type = other DNA
tcaccaaaggactacgtctgggcaacatgccgcagatcagagcgattgtggatgaagagcttgagagcgtgtgga

SEQ ID NO: 799556 - DNA, 75 bp, synthetic construct
  source 1..75: mol_type = other DNA
catcaaacgccgcagctatcgtcatttcagcgcgcaaaaaaccacgctggcacagttggggcaattgctgtcggg

SEQ ID NO: 799557 - DNA, 75 bp, synthetic construct
  source 1..75: mol_type = other DNA
taagtatcacggggggttttttgttcggactgctcatggcctctttccactggtggcgcaggaaagttaaccggc

SEQ ID NO: 799558 - DNA, 75 bp, synthetic construct
  source 1..75: mol_type = other DNA
cgggcatcgactcgtctccggcgatggttgccgaagcacgcagtgctttgccggactgccagtttgtggaagcag

SEQ ID NO: 799559 - DNA, 75 bp, synthetic construct
  source 1..75: mol_type = other DNA
atgcgcgaagttgcctgggaacaaaactacccggatcgcgggcgtgagccgttggctggcgttcatgcttactac

SEQ ID NO: 799560 - DNA, 75 bp, synthetic construct
  source 1..75: mol_type = other DNA
tcttgaacgctaccatcagatgctggaggagcagtatccgctgcaggagaacgggcagatactgctggcatttcc

SEQ ID NO: 799561 - DNA, 75 bp, synthetic construct
  source 1..75: mol_type = other DNA
gctgaattcatcgccagtgaatagggctatggaaagaggtgctgttcattcgaatagacctgatttacctcctgt

SEQ ID NO: 799562 - DNA, 75 bp, synthetic construct
  source 1..75: mol_type = other DNA
atgcgcaatctcaccattacgcggattaatgtcagccaggccaactacggtattttacgtcagggattccataat

SEQ ID NO: 799563 - DNA, 75 bp, synthetic construct
  source 1..75: mol_type = other DNA
aggcaatggtcgtgggcgttttgcgttgcaggatgggtgtaaagtggtgggggaggggagtctcaataatattac

SEQ ID NO: 799564 - DNA, 75 bp, synthetic construct
  source 1..75: mol_type = other DNA
taatacccaccttgcttataaattgcgcggtatccaaatctccgccgggaatgccgtctcctttgtgtcgctaac

SEQ ID NO: 799565 - DNA, 75 bp, synthetic construct
  source 1..75: mol_type = other DNA
tttgtacggactgcttatggcctctctccactggtggcgcaggaaagttaaccggctgccaccatgggatgatgt

SEQ ID NO: 799566 - DNA, 75 bp, synthetic construct
  source 1..75: mol_type = other DNA
cagcaaaaagatgtggcggagcaattatgcccctcctcttctgcgtattctctggcggctgggtatccggcttcc

SEQ ID NO: 799567 - DNA, 75 bp, synthetic construct
  source 1..75: mol_type = other DNA
tatccactgcaagagaacggacagatactgctggcatttccgcgtctttttattgttgcccggcgtatggagtaa

SEQ ID NO: 799568 - DNA, 75 bp, synthetic construct
  source 1..75: mol_type = other DNA
atcaccagatgccgtcacaccaggcgattatcgattgggtgactgccactggattacgtccgtggttacaggatc

SEQ ID NO: 799569 - DNA, 75 bp, synthetic construct
  source 1..75: mol_type = other DNA
atgccatttaaaaaactctccagacgcaacttcctgacggcaagttctgtgcttgccttcctccatacccctttc

SEQ ID NO: 799570 - DNA, 75 bp, synthetic construct
  source 1..75: mol_type = other DNA
gcactctgtaaaagagctgctctccatcggtatccagcctgacatcctgatttgtcgttcagatcgcgctgttcc

SEQ ID NO: 799571 - DNA, 75 bp, synthetic construct
  source 1..75: mol_type = other DNA
tgtcctgcgcattggtcgggatgatgatattaagtctggcactctggctgacatcgcccctgctctttgccgttg

SEQ ID NO: 799572 - DNA, 75 bp, synthetic construct
  source 1..75: mol_type = other DNA
gccgccagtgataccggccccgatgcgccgacccgcgtcagcgtggtagcaacaaccggttatctggctttcctc

SEQ ID NO: 799573 - DNA, 75 bp, synthetic construct
  source 1..75: mol_type = other DNA
ttcctcgtcgggccgccactgctgggctatctcggcgaacattatggattacgtagtgcaatgctggttgtactg

SEQ ID NO: 799574 - DNA, 75 bp, synthetic construct
  source 1..75: mol_type = other DNA
cggatgtgaatattctgcgcctggcgttctttggcccatttatcggtgccatcgcgcgatcggttggtggtgcta

SEQ ID NO: 799575 - DNA, 75 bp, synthetic construct
  source 1..75: mol_type = other DNA
tggccgagcgtcgaaaatttcaatatattttaaatttttacgagcgagttgctgtaagtattcgtgaaggtattt

SEQ ID NO: 799576 - DNA, 75 bp, synthetic construct
  source 1..75: mol_type = other DNA
gtacgcctgctatccgcgatattctttctgtttcgatcgctgaaatgggcggtgttctctttggtctgtcgatcg

SEQ ID NO: 799577 - DNA, 75 bp, synthetic construct
  source 1..75: mol_type = other DNA
tgatgtcgctctgtacgagggagcaaaccttcccacatcgccagttcgacagaagctccatttcatctatcaacc

SEQ ID NO: 799578 - DNA, 75 bp, synthetic construct
  source 1..75: mol_type = other DNA
ctgtctaatggcgttatcctagccgatgaggtgggactagggaaaaccattgaggccagcctgattttggcgcag

SEQ ID NO: 799579 - DNA, 75 bp, synthetic construct
  source 1..75: mol_type = other DNA
ttcttttatccaacaggtcgaacgcgataacgaactttattacaatgaagaagtagaaaaacttgaacgctggtc

SEQ ID NO: 799580 - DNA, 75 bp, synthetic construct
  source 1..75: mol_type = other DNA
taaagcggtcatttttaccgagtccgtgcgcacccaaacctggctagcgcaactgctttcagacaatgggtatga

SEQ ID NO: 799581 - DNA, 75 bp, synthetic construct
  source 1..75: mol_type = other DNA
ttcaccgtttagaaaataaaatgccagttttagatgccctgactgattatgaaaactatgatgattacagtgatg

SEQ ID NO: 799582 - DNA, 75 bp, synthetic construct
  source 1..75: mol_type = other DNA
aaccttcccccgtctcctccccctgccattatcagagataacatctgtcgaagaacagcctttgctgcctgcgtt

SEQ ID NO: 799583 - DNA, 75 bp, synthetic construct
  source 1..75: mol_type = other DNA
cctacttcttgccttctgtgtctggatgctatttagcgcagttactgttaatctcaataaaatcggttttaattt

SEQ ID NO: 799584 - DNA, 75 bp, synthetic construct
  source 1..75: mol_type = other DNA
gtttgaaaaacatcctcgaaagctttgccgattttgacgatgcggctaaaccgctttcagaccagacgctggcag

SEQ ID NO: 799585 - DNA, 75 bp, synthetic construct
  source 1..75: mol_type = other DNA
ccgctaactgacggtgaatttaaccgtatttttttgcacctgaccaaaggtaatgaagttatcgatcgcgctaaa

SEQ ID NO: 799586 - DNA, 75 bp, synthetic construct
  source 1..75: mol_type = other DNA
taacggcattcaggtatcacagcagatgctgcgggaactgaatctgggggatgcagtcccgcagtctgcgggcca

SEQ ID NO: 799587 - DNA, 75 bp, synthetic construct
  source 1..75: mol_type = other DNA
ctgccgttcctcgaagcgattcgccagatggctgttgaaattggccgtgagcacactctgtttatgcacctgacg

SEQ ID NO: 799588 - DNA, 75 bp, synthetic construct
  source 1..75: mol_type = other DNA
cctgcacagcggtttcggcattgcaaaaatcacagcagtggctggcgatggcctgacagcaactgccgatgtgat

SEQ ID NO: 799589 - DNA, 75 bp, synthetic construct
  source 1..75: mol_type = other DNA
gctcagttttatcaataaagatgaatggtgccagaacgagtttcaggttacccgtcaggttaagcaattcaacgc

SEQ ID NO: 799590 - DNA, 75 bp, synthetic construct
  source 1..75: mol_type = other DNA
gggggcagtggacggtatcggcagtggtgtagccaaaattggccaggagacaccgggtgccggcgctgtggcctc

SEQ ID NO: 799591 - DNA, 75 bp, synthetic construct
  source 1..75: mol_type = other DNA
gcaaaattattggctgggcatttgcagccggtgccgtggatggtattggcagtggcgtggctaaaatcggccagg

SEQ ID NO: 799592 - DNA, 75 bp, synthetic construct
  source 1..75: mol_type = other DNA
gtcgtaaacaaaacctcagaatggcgcttattggtctggggatcagtgcagtgggtggggctgcctggtatctgt

SEQ ID NO: 799593 - DNA, 75 bp, synthetic construct
  source 1..75: mol_type = other DNA
tctggcgaaaatggagcaacgggagcaggactaccggaccaaaattgaagagcaggagaatgaactggccatcct

SEQ ID NO: 799594 - DNA, 75 bp, synthetic construct
  source 1..75: mol_type = other DNA
gactaccgggcaaagattgaagaacaggagaatgaactggccattctgcgggctgaacaggaggccatgaaagag

SEQ ID NO: 799595 - DNA, 75 bp, synthetic construct
  source 1..75: mol_type = other DNA
caccgggtgccggcgctgtggcctctgtctctggcagtacggtgatgaacggtgcgctgggtggaggggcatctc

SEQ ID NO: 799596 - DNA, 75 bp, synthetic construct
  source 1..75: mol_type = other DNA
gaaggcagcgaggacgctgtttatttcgtggttaaccggaccatcaatgggcagacgaaacgttacatcgagcgc

SEQ ID NO: 799597 - DNA, 75 bp, synthetic construct
  source 1..75: mol_type = other DNA
gggcgaaatacgcatggaacagcgttaacggctacccgagcaccgttgtttactaccagcagaggctgtattttg

SEQ ID NO: 799598 - DNA, 75 bp, synthetic construct
  source 1..75: mol_type = other DNA
cggaggggaatatacgatatccggggaccagaataaggttctcacgccgtcggcgttttctttcagctcacaggg

SEQ ID NO: 799599 - DNA, 75 bp, synthetic construct
  source 1..75: mol_type = other DNA
agtgcccccgtttccctgacgcagaaggactgggaaaaccgtgattttacactgaagacgctgtcgctgaaaaat

SEQ ID NO: 799600 - DNA, 75 bp, synthetic construct
  source 1..75: mol_type = other DNA
caggtcatgcaggaagatttcgattcccccgtaaaactgacctccgggcagggacctctgaactggacatatgat

SEQ ID NO: 799601 - DNA, 75 bp, synthetic construct
  source 1..75: mol_type = other DNA
gctttgccggtggtgagattggaccgtcgttgtacgggcgtattgacatggcgaagtaccaggtggcattgcgca

SEQ ID NO: 799602 - DNA, 75 bp, synthetic construct
  source 1..75: mol_type = other DNA
gtttacttctactccacgtgatggtcacccgctgtttgcaggctttgtaaaagccgccagcgagttccagaaacg

SEQ ID NO: 799603 - DNA, 75 bp, synthetic construct
  source 1..75: mol_type = other DNA
agttggctgttgatattggtcgtgaacacgcgctgttcatgcacctgaccctggtgccgtacatggctgcgtctg

SEQ ID NO: 799604 - DNA, 75 bp, synthetic construct
  source 1..75: mol_type = other DNA
tgcgcgtgagaataatattccttatctgggcatttgcctgggtatgcaggtggcgttaattgattacgctcgcca

SEQ ID NO: 799605 - DNA, 75 bp, synthetic construct
  source 1..75: mol_type = other DNA
gtggggggcggtctgtatgcttcagcattgtttaactccggtgcctacattgatttgattggtaaatacattcac

SEQ ID NO: 799606 - DNA, 75 bp, synthetic construct
  source 1..75: mol_type = other DNA
gtcaacctggttatatccatgtgctgggcgacggtaatgtcagcgcaacgatgaacaaggtcaaagatgactccg

SEQ ID NO: 799607 - DNA, 75 bp, synthetic construct
  source 1..75: mol_type = other DNA
tgaaaccgacctggacttggggcactacgagcgtttcattcgtaccaaaatgagccgccgcaacaacttcaccac

SEQ ID NO: 799608 - DNA, 75 bp, synthetic construct
  source 1..75: mol_type = other DNA
ggacaacagccatatcatgctgggcagtaataaggtcattattgataaaaatgacagtacaggtaattacgtcaa

SEQ ID NO: 799609 - DNA, 75 bp, synthetic construct
  source 1..75: mol_type = other DNA
tttgagtccggtgcctatatcgatttgattggtaaatatattcaccatgacaatgattacacaggtaactttgcc

SEQ ID NO: 799610 - DNA, 75 bp, synthetic construct
  source 1..75: mol_type = other DNA
acgaagtggatactggacggttttaaagcggaggctgataaagccgctgccgcgaaggctgacagtttcatgaat

SEQ ID NO: 799611 - DNA, 75 bp, synthetic construct
  source 1..75: mol_type = other DNA
agagcagattgtcgcccgtgatgagaactcatggctgattgacggcggcactccgattgacgacgtcatgcgcgt

SEQ ID NO: 799612 - DNA, 75 bp, synthetic construct
  source 1..75: mol_type = other DNA
catatcaatgtttcttcatcttcagtcttgttctcagatgcatcgtcatttataaacagctccctgaatattcat

SEQ ID NO: 799613 - DNA, 75 bp, synthetic construct
  source 1..75: mol_type = other DNA
tcgaccttcagacattaaaagccagtgacatcaatgtaccggttaatactgtcagtatttttggggggagaggag

SEQ ID NO: 799614 - DNA, 75 bp, synthetic construct
  source 1..75: mol_type = other DNA
ttcgtggggataccgtggtggacgtctggaactgaatggtaataacctgacctttacccgtcttcaggcggctga

SEQ ID NO: 799615 - DNA, 75 bp, synthetic construct
  source 1..75: mol_type = other DNA
aatgaaaacactgtcgctgaaagacgctgacttccatctttcacgtaacgcctcgctgaacagtgacattaagtc

SEQ ID NO: 799616 - DNA, 75 bp, synthetic construct
  source 1..75: mol_type = other DNA
ctgcgcgactgtctctgaagaccagttactaattagcttccaggcaaaaggaggcaccgtgaatgttgttatgca

SEQ ID NO: 799617 - DNA, 75 bp, synthetic construct
  source 1..75: mol_type = other DNA
atgggatatgatttcctgacatcttttgcgacagtagcggcatgtattaataatatggggttaggtttcggggct

SEQ ID NO: 799618 - DNA, 75 bp, synthetic construct
  source 1..75: mol_type = other DNA
ttgcagtaatcatgaatgaatacgcgctggtcgtggggatcattacgctgaatgatgtgatgacaacactgatgg

SEQ ID NO: 799619 - DNA, 75 bp, synthetic construct
  source 1..75: mol_type = other DNA
gtgtggtttttcaacggcctggcaaacatgatcttccgtatctttaaattgccgatggtacgtaaagatgacatc

SEQ ID NO: 799620 - DNA, 75 bp, synthetic construct
  source 1..75: mol_type = other DNA
caggccaaccctggaatgttcttcaccgttgtgcaaattggtctgaacgcggtcgccattcttggtggtatcgtg

SEQ ID NO: 799621 - DNA, 75 bp, synthetic construct
  source 1..75: mol_type = other DNA
acggcacatgtgaaactccagccttggcaggataataagtggagcagggtgttgccacatttgcgtcaggataga

SEQ ID NO: 799622 - DNA, 75 bp, synthetic construct
  source 1..75: mol_type = other DNA
tttccaccggcaccgccgttgcgccggaagcgggcgcgacgctgattttacaggtcgccagcctgagcggcgggc

SEQ ID NO: 799623 - DNA, 75 bp, synthetic construct
  source 1..75: mol_type = other DNA
cattgccgaagaacggatgatcgccccgcaactgccggagtgcattctgcacgaactcaccgagcgcccgcaccc

SEQ ID NO: 799624 - DNA, 75 bp, synthetic construct
  source 1..75: mol_type = other DNA
gttcccgctcggcatcgacctgatcctgacctgcggcgagcgcctgctggctattccgcgaaccactcatgtgga

SEQ ID NO: 799625 - DNA, 75 bp, synthetic construct
  source 1..75: mol_type = other DNA
gcggccgtatgcataacatcaccctggatgtgcgcggttctgactgcatcatcaaagggttggcgatgagcggtt

SEQ ID NO: 799626 - DNA, 75 bp, synthetic construct
  source 1..75: mol_type = other DNA
taacattgagatgaagcgtgcgtcgctggagttacacaacaaaccgcaacatctttttatgcgaaatatcaatgt

SEQ ID NO: 799627 - DNA, 75 bp, synthetic construct
  source 1..75: mol_type = other DNA
ccaggcagtgaaaaactttgtcgtggcgaatatcacgggatcggattgtcggcaactgatccatgttgaaaatgg

SEQ ID NO: 799628 - DNA, 75 bp, synthetic construct
  source 1..75: mol_type = other DNA
atgagagcatcacagcccggcaaaatgccgggcttttttgtcagcaggagcagagaaaacagtatgacgcttgca

SEQ ID NO: 799629 - DNA, 75 bp, synthetic construct
  source 1..75: mol_type = other DNA
atgacgattgcagaacgtcttatacagaaaggttttgaaaaaggtgctcttgaagtggcgcgggaaatagcctgc

SEQ ID NO: 799630 - DNA, 75 bp, synthetic construct
  source 1..75: mol_type = other DNA
tggagaatcgcttttaaatatttcgtccttgccagcacaggctgagcatgctatttatgatatgtttgagagact

SEQ ID NO: 799631 - DNA, 75 bp, synthetic construct
  source 1..75: mol_type = other DNA
gacatcgagatcgttgcaatcaatgacctgttagacgctgattacatggcatacatgctgaaatatgactccact

SEQ ID NO: 799632 - DNA, 75 bp, synthetic construct
  source 1..75: mol_type = other DNA
agactggcgcggcggccgcggcgcttcccagaacatcatcccgtcctctaccggtgctgctaaagctgtaggtaa

SEQ ID NO: 799633 - DNA, 75 bp, synthetic construct
  source 1..75: mol_type = other DNA
atgacgcttgcagaacgtcttatacagaaaggtttcgacgaaggttttaaagaaggttttaaagaaggttttaaa

SEQ ID NO: 799634 - DNA, 75 bp, synthetic construct
  source 1..75: mol_type = other DNA
tgggcgcactgggcgaccgtatgttgattctggtgaacatcgaaaaactgctgaacagcgaagagatggcgctgt

SEQ ID NO: 799635 - DNA, 75 bp, synthetic construct
  source 1..75: mol_type = other DNA
ggtgccactgctggcgattgccactatcgccgcctggtttgggatgaacgatatcgccagttcacgcgcgtcaat

SEQ ID NO: 799636 - DNA, 75 bp, synthetic construct
  source 1..75: mol_type = other DNA
ccgcaggccgatggctcagtgatgtcgctggcgaacgccgcatggatttgggtgccactgctggcgattgccact

SEQ ID NO: 799637 - DNA, 75 bp, synthetic construct
  source 1..75: mol_type = other DNA
accaacctttatcgccgattcagggataaccatccggatggatacctgctccacatgatctactgggccgggttc

SEQ ID NO: 799638 - DNA, 75 bp, synthetic construct
  source 1..75: mol_type = other DNA
atcgttatcttttgcgcgactggaagccagaaaatccggccttctgggaaaataaaggaaaacatatagcacgaa

SEQ ID NO: 799639 - DNA, 75 bp, synthetic construct
  source 1..75: mol_type = other DNA
cgattggcgcggttggcggtttctttattccacaggcattcggtatgtcgctgaatatgaccggctcgccggtag

SEQ ID NO: 799640 - DNA, 75 bp, synthetic construct
  source 1..75: mol_type = other DNA
gcgcgatgaaagtgtttttaatcttttacatcatctgtgtactgctgacctggctggtctatggtcggcgaaagt

SEQ ID NO: 799641 - DNA, 75 bp, synthetic construct
  source 1..75: mol_type = other DNA
tgaattttctacctccaacacgctgcttatcaaaccccgtgatttcagcatcagtattatctctgaagtggtcaa

SEQ ID NO: 799642 - DNA, 75 bp, synthetic construct
  source 1..75: mol_type = other DNA
tgactgtttcatttcgttcattacgcacaacaaaagctgctgaccagcatgcggcaattggtgcaggtgctttag

SEQ ID NO: 799643 - DNA, 75 bp, synthetic construct
  source 1..75: mol_type = other DNA
cgaatctgcgcggtgttattgtgccgattgtcgacttacgaattaagttcagccaggtggatgtggactataacg

SEQ ID NO: 799644 - DNA, 75 bp, synthetic construct
  source 1..75: mol_type = other DNA
ttaagaatatttatcataaacaattatcacttgcaatttgctcatatgccaatgctttttctcgatatattaaca

SEQ ID NO: 799645 - DNA, 75 bp, synthetic construct
  source 1..75: mol_type = other DNA
acatactccatgcggaaggtattcactcacgaggtatggcaactcttaaaaagttaatagatgaaggcattgtta

SEQ ID NO: 799646 - DNA, 75 bp, synthetic construct
  source 1..75: mol_type = other DNA
tgataatctttgcgctaatctggcctgcaaccgcgctcagagcggcagtgagcaaaacaacctgggcggatgcac

SEQ ID NO: 799647 - DNA, 75 bp, synthetic construct
  source 1..75: mol_type = other DNA
tgttacggactcgtgaaaaactggcgttactggaacaacgcatcagcgaactggaagcgcgcaataatccggtag

SEQ ID NO: 799648 - DNA, 75 bp, synthetic construct
  source 1..75: mol_type = other DNA
gccaaaccctacaagcgcagctgacgcgtctcgatctggtaagccgcgaagaattcgacgttcagacgcaagtcc

SEQ ID NO: 799649 - DNA, 75 bp, synthetic construct
  source 1..75: mol_type = other DNA
ggcatatccgcatccggagcggctggctgactgtcaggttatccgcctgccttacgctcaggagtggctgacagc

SEQ ID NO: 799650 - DNA, 75 bp, synthetic construct
  source 1..75: mol_type = other DNA
aggcaccgtcacccgacaaatcgtcccttctgtaggatacggcaatatcaatattgaacacccagtggtgcgctc

SEQ ID NO: 799651 - DNA, 75 bp, synthetic construct
  source 1..75: mol_type = other DNA
ggtatgccctgtttgaaggaacgcctgaagctgagacgatggagtattcccctgtagtgttacgcctgtactttg

SEQ ID NO: 799652 - DNA, 75 bp, synthetic construct
  source 1..75: mol_type = other DNA
gaaatcctggctctgacgacgcatttttgtcagtcccttaattatggacgggcgcaactgctgacggccagcgcg

SEQ ID NO: 799653 - DNA, 75 bp, synthetic construct
  source 1..75: mol_type = other DNA
gacctatgccggtgactcccgtattgcgttgccctctacctccgggaatcataaagatgaaatcaatgctgctat

SEQ ID NO: 799654 - DNA, 75 bp, synthetic construct
  source 1..75: mol_type = other DNA
tctaatctggtcttccttatcgacacgtcggggtcaatgtattctgatgaacgcttacctctaattcagtcttct

SEQ ID NO: 799655 - DNA, 75 bp, synthetic construct
  source 1..75: mol_type = other DNA
caaaacccgttggcgacgtttagccttgacgtcgacaccggcagttatgcgaatgtacgccgttttctcaatcat

SEQ ID NO: 799656 - DNA, 75 bp, synthetic construct
  source 1..75: mol_type = other DNA
gagttcgatgtgcagacacaagtcctgttgcggactcgtgagaaactggcgttactggaacaacgcctcagtgaa

SEQ ID NO: 799657 - DNA, 75 bp, synthetic construct
  source 1..75: mol_type = other DNA
caggtattccgcctactacagttccggcaataacactggtcgagttgatcctggcatctacaccgaccctgattt

SEQ ID NO: 799658 - DNA, 75 bp, synthetic construct
  source 1..75: mol_type = other DNA
ccccatcggttcctaatacagtgattcctggtctggctgaagagaaaacagaaaaactctcccttaacgaggcaa

SEQ ID NO: 799659 - DNA, 75 bp, synthetic construct
  source 1..75: mol_type = other DNA
ggaaaagttttcccgactgataatcagattgattattttgacgatgtcccggtgacctgtatcgatatggcgatg

SEQ ID NO: 799660 - DNA, 75 bp, synthetic construct
  source 1..75: mol_type = other DNA
ctattccatgccgatcataaaaatcttattgcgaaggatatggacatggaggggcttaacgaagcccgtaagctg

SEQ ID NO: 799661 - DNA, 75 bp, synthetic construct
  source 1..75: mol_type = other DNA
gtgagcggttttattaatcgctcgcaggttgttaatgcggcttttacacacagcagcagtgatttttctcatatt

SEQ ID NO: 799662 - DNA, 75 bp, synthetic construct
  source 1..75: mol_type = other DNA
gaacgaggcaacccttacgcgatgatgagtctttttgaaatggcccaggcatcactggttgatcgtggtatcact

SEQ ID NO: 799663 - DNA, 75 bp, synthetic construct
  source 1..75: mol_type = other DNA
cggcgatatcaaagattttgccgatctgaaaggcaaagccgtagtcgtcacttccggcactacctctgaagtttt

SEQ ID NO: 799664 - DNA, 75 bp, synthetic construct
  source 1..75: mol_type = other DNA
gttactggaacagcgcatcagtgaattggaagcacgcaataatccagtagcagaagttcagtctcctccagccat

SEQ ID NO: 799665 - DNA, 75 bp, synthetic construct
  source 1..75: mol_type = other DNA
caccattgaagtggcctggctggatggtgtggacacgccatacattgatcagcaggaaggtttcaccactgacgg

SEQ ID NO: 799666 - DNA, 75 bp, synthetic construct
  source 1..75: mol_type = other DNA
cacgctcgcagatagtaaacgcggcattcaaccacagcagcagcgattttacttatatccttgctggtggcgctg

SEQ ID NO: 799667 - DNA, 75 bp, synthetic construct
  source 1..75: mol_type = other DNA
cactgggtaagacctcgaccccatcggataaaaccagtaacgcgcacatttacgcaggtaacggcaacattaccg

SEQ ID NO: 799668 - DNA, 75 bp, synthetic construct
  source 1..75: mol_type = other DNA
ttctctgttacacgccaggccattatcaacgatgacctgagccagctcacgaccattccacaggcaatggggcgt

SEQ ID NO: 799669 - DNA, 75 bp, synthetic construct
  source 1..75: mol_type = other DNA
ctatggcagatgttgtctatgtgcgtatttatgacgagatcggcgggtacggtgtaaaagcatcgacacttactg

SEQ ID NO: 799670 - DNA, 75 bp, synthetic construct
  source 1..75: mol_type = other DNA
ctatggcagatgttgtttatgtgcgtatttatgacgagatcggcgggtacggtgtaaatgcatcggcacttactg

SEQ ID NO: 799671 - DNA, 75 bp, synthetic construct
  source 1..75: mol_type = other DNA
tgctgacaggaaacacaaagctttctgacggtataccgctgttcagcaaaaaacacggaaatgatattgataacg

SEQ ID NO: 799672 - DNA, 75 bp, synthetic construct
  source 1..75: mol_type = other DNA
cagaaggcaaaaggggaagatccacagggttacagagcggaatttattcgcctgattggactggcgaaagatctg

SEQ ID NO: 799673 - DNA, 75 bp, synthetic construct
  source 1..75: mol_type = other DNA
atgcgtgattttcagaatgcctttgatgctgccctcgccggggtagacagtacgatcgttgaagttatggggctc

SEQ ID NO: 799674 - DNA, 75 bp, synthetic construct
  source 1..75: mol_type = other DNA
atgccgctcttgccggggtggacagcacaattgttgaagtgatgggtatcagtgcgcagttcacctccggtacac

SEQ ID NO: 799675 - DNA, 75 bp, synthetic construct
  source 1..75: mol_type = other DNA
tttcgctttaaggtttttcatcgtgatggcgaaccgtgtgaacgctgtggcagcatcattgagaaaaccacgctg

SEQ ID NO: 799676 - DNA, 75 bp, synthetic construct
  source 1..75: mol_type = other DNA
ttaatatttctgtcattggtgaataaagttagtgaaaacacaaaacagcgcaatttattttccaaaaaaatgact

SEQ ID NO: 799677 - DNA, 75 bp, synthetic construct
  source 1..75: mol_type = other DNA
gagcatcattgggaaaagcatacgaccaaatgaccttttagcacgcgttggcggcgaagagtttggcgtcttgct

SEQ ID NO: 799678 - DNA, 75 bp, synthetic construct
  source 1..75: mol_type = other DNA
tctctctgttatttatgagcaggtatagcgtgtccacttggtatattagtcgcactattgaagtagtcagtaagt

SEQ ID NO: 799679 - DNA, 75 bp, synthetic construct
  source 1..75: mol_type = other DNA
tgtgatggccgggccattacgcaaatggcaattcacatgggaagctgatcacgcatggattaattcgtcagagta

SEQ ID NO: 799680 - DNA, 75 bp, synthetic construct
  source 1..75: mol_type = other DNA
ccgggatgtagtgaaagtacctaaaggctaccacccggttgccaccatcgcgggttacgataactactatctgaa

SEQ ID NO: 799681 - DNA, 75 bp, synthetic construct
  source 1..75: mol_type = other DNA
agaagcaaaagtcactgccgaaactgatctggaactggctgtctgcagtgctcctggattcggtgaacttccggt

SEQ ID NO: 799682 - DNA, 75 bp, synthetic construct
  source 1..75: mol_type = other DNA
acggttattgtcgccgcgctttcgtaaccgtcagtttgccggattactgctcgatcaggcgtttctggctgggct

SEQ ID NO: 799683 - DNA, 75 bp, synthetic construct
  source 1..75: mol_type = other DNA
cgtgcgcagttcacctccggagcacaacgtggcggcgaagttcagggggtttttgacgatccggagtcgctgggt

SEQ ID NO: 799684 - DNA, 75 bp, synthetic construct
  source 1..75: mol_type = other DNA
cagcaagacgaaagcacgctggtggttaccgccagtaaacaatcttcccgctcggcatcagccaacaacgtctca

SEQ ID NO: 799685 - DNA, 75 bp, synthetic construct
  source 1..75: mol_type = other DNA
cactaaaaaagaaaacatttcatcttctgctgttttaacaacagccctgcatacttctcttctaaaaatcacaac

SEQ ID NO: 799686 - DNA, 75 bp, synthetic construct
  source 1..75: mol_type = other DNA
agcgtcttcagattattgagcgtctcgagtctttaaaagacgcaaaggatacagcagaagatgagttacaagatc

SEQ ID NO: 799687 - DNA, 75 bp, synthetic construct
  source 1..75: mol_type = other DNA
acggcgagatattctgggtggatcgtgtttctccggatgacggagggagttgttatctctggctcaaccgggggc

SEQ ID NO: 799688 - DNA, 75 bp, synthetic construct
  source 1..75: mol_type = other DNA
gcgatcgtgttggctatgaaacgcttggccgcatctggcagtggctgaaaggtccgtcaggcgagccacggcaag

SEQ ID NO: 799689 - DNA, 75 bp, synthetic construct
  source 1..75: mol_type = other DNA
tgcttataagtagtttgattttgtcaggatgtgggccggaacctgaggataagaaaagtcagcaacaacaaccca

SEQ ID NO: 799690 - DNA, 75 bp, synthetic construct
  source 1..75: mol_type = other DNA
aacggaataccgtcagattggttatgaaaagcgccaacttcgggtggaacattttaataacgacaacgttgatgc

SEQ ID NO: 799691 - DNA, 75 bp, synthetic construct
  source 1..75: mol_type = other DNA
gggcagttgcctccgccagatgcagtgcgggtggaggagatggtgaattactttccgtcagactgggttattaat

SEQ ID NO: 799692 - DNA, 75 bp, synthetic construct
  source 1..75: mol_type = other DNA
tgtttctccggatgatggagggagttgttatctctggctcaaccgtgggcaaccaccggcagttaaccggcgacg

SEQ ID NO: 799693 - DNA, 75 bp, synthetic construct
  source 1..75: mol_type = other DNA
tttgccggtagcggggtccgtattgaaggaagcaacccgtcattatttgtgcttacggatacggttcgttctgta

SEQ ID NO: 799694 - DNA, 75 bp, synthetic construct
  source 1..75: mol_type = other DNA
gtgtttcacggcctcagaatgaggcccactccacctcagcacaacaagtgtgtgtgcaaaaaacaaacagaacta

SEQ ID NO: 799695 - DNA, 75 bp, synthetic construct
  source 1..75: mol_type = other DNA
atccgacatggaataattcgcaaaaagtggactatatcgtggtgctcggaggtggttatacctggaacccgcagt

SEQ ID NO: 799696 - DNA, 75 bp, synthetic construct
  source 1..75: mol_type = other DNA
gcgatcgtgctggctatgaaacgctcggtcgcctatggcagtggttaaaaggatcctcaggcgagccacggcagg

SEQ ID NO: 799697 - DNA, 75 bp, synthetic construct
  source 1..75: mol_type = other DNA
agcgtggcggcgaggttcatggcgtttttgacgatccggagtcgctgggttttgccagtagtgggatccgtattg

SEQ ID NO: 799698 - DNA, 75 bp, synthetic construct
  source 1..75: mol_type = other DNA
ccgttgtgaatagtatggagccggcaagccctgaagctggtgaatatacctttacacaagaatatggtacttatg

SEQ ID NO: 799699 - DNA, 75 bp, synthetic construct
  source 1..75: mol_type = other DNA
cagcctgggcgcagaacaccgttgatggcgacgagatcaacctgttcgatatcctgccgctgtttcgtttaaacg

SEQ ID NO: 799700 - DNA, 75 bp, synthetic construct
  source 1..75: mol_type = other DNA
cggttcctggcagaaccacgcgatttccctcggcctgccgccaaatgccccggttaaaaagcagattgatgagtt

SEQ ID NO: 799701 - DNA, 75 bp, synthetic construct
  source 1..75: mol_type = other DNA
gaagacatacgatgagccgttcagcttccagatgagcgacggaacaaccattggttaccacatcggcgtagccta

SEQ ID NO: 799702 - DNA, 75 bp, synthetic construct
  source 1..75: mol_type = other DNA
ttgcatccggcagcaagtgggcgagtttatgcagcgtatggcggtgtttatgtctgtacggcgctcctgtggctg

SEQ ID NO: 799703 - DNA, 75 bp, synthetic construct
  source 1..75: mol_type = other DNA
ctctttatgactggacgggtgcgttgattgcgctttgcggcatgttgatcattgttgcgggctgggggcgcacgt

SEQ ID NO: 799704 - DNA, 75 bp, synthetic construct
  source 1..75: mol_type = other DNA
aaatatgggcattgatctatatttagatataaaaaaaatgccttcaagtcttatacaggagttacgtattgcagc

SEQ ID NO: 799705 - DNA, 75 bp, synthetic construct
  source 1..75: mol_type = other DNA
aaaaggatcgatgcagtcaaacgattctggttttcttcaataagatatggtgttgggaatagtgaaagtgacata

SEQ ID NO: 799706 - DNA, 75 bp, synthetic construct
  source 1..75: mol_type = other DNA
ggttttgatgtgccgtggggttcagaagtgatcctcgaaggggtcatcgaaagccgtaaacgcgaaatcgaaggg

SEQ ID NO: 799707 - DNA, 75 bp, synthetic construct
  source 1..75: mol_type = other DNA
agccctgcggggatcaccgacaagctgattatcgacgctaccacgcctgtcgccccggacaaccgtggtcactac

SEQ ID NO: 799708 - DNA, 75 bp, synthetic construct
  source 1..75: mol_type = other DNA
agccagccggtggtggatttgccggaaaccaaagcttgggctgaaaaactgaccactatgctggctgcacgtaaa

SEQ ID NO: 799709 - DNA, 75 bp, synthetic construct
  source 1..75: mol_type = other DNA
gttgaaaatagtgtttacctggcatataaagaaagtggtatggattcaatactagaatttgccaatgcaagaagt

SEQ ID NO: 799710 - DNA, 75 bp, synthetic construct
  source 1..75: mol_type = other DNA
gccatcaataaatggaacggcatactgccgcaatacatgaccagcggtgctaatacaccatttatccaggttaaa

SEQ ID NO: 799711 - DNA, 75 bp, synthetic construct
  source 1..75: mol_type = other DNA
cggactggtggttgtgcacccaatgaccgcgctgggccgcgaaatgggcctgcaagagatgacagggttctctaa

SEQ ID NO: 799712 - DNA, 75 bp, synthetic construct
  source 1..75: mol_type = other DNA
ggcatccatgctgctcggctttctcatccgtccgacgattcagccacaaggggcaagccgccagcaggagagcac

SEQ ID NO: 799713 - DNA, 75 bp, synthetic construct
  source 1..75: mol_type = other DNA
gaagacctacgatgaaccgttcagctttcagatgagtgacggcacaaccatcggctatcacatcggtgtggccta

SEQ ID NO: 799714 - DNA, 75 bp, synthetic construct
  source 1..75: mol_type = other DNA
gaagtcaagcaacgcgaagcagaagccaacatgctgcgcgcagaagctgccggacaggctgatgccattcgcaca

SEQ ID NO: 799715 - DNA, 75 bp, synthetic construct
  source 1..75: mol_type = other DNA
atgaagaaattcaaactctttcagattctcccgctttttgccgccatcctgctggttggctgcgatcgcgttgag

SEQ ID NO: 799716 - DNA, 75 bp, synthetic construct
  source 1..75: mol_type = other DNA
tgggctggtggtggtgcacccaatgacagagctgggccgtgaaatgggcctgcaagagatgacagggttctcaaa

SEQ ID NO: 799717 - DNA, 75 bp, synthetic construct
  source 1..75: mol_type = other DNA
ccaggtaatgtgggtatcaaagtcaacaaactgggcgacgacaaaggtgtcggtgaggtggtcggtgttggtcgc

SEQ ID NO: 799718 - DNA, 75 bp, synthetic construct
  source 1..75: mol_type = other DNA
gaaccccggtgttatggagttggaagcgatcaacaaatggaacggtacattaccgcagtatatgaccagtaatac

SEQ ID NO: 799719 - DNA, 75 bp, synthetic construct
  source 1..75: mol_type = other DNA
caaccgacaaatttatcgacggtggcaaatccgaattgcttgatgcagcccttaaagacattcaggaagaaatga

SEQ ID NO: 799720 - DNA, 75 bp, synthetic construct
  source 1..75: mol_type = other DNA
tttacgtattcccgaccttcaaacaaatgaagacctacgacgagccgttcacattccagatgagtgacggtactg

SEQ ID NO: 799721 - DNA, 75 bp, synthetic construct
  source 1..75: mol_type = other DNA
gaagccatcaataaatggaacggcacactgccgcagtacatgaccagcggtgccaacacaccatttattcaggtt

SEQ ID NO: 799722 - DNA, 75 bp, synthetic construct
  source 1..75: mol_type = other DNA
cccttgttctgctgaccaccggacttgtcggttgcgatcgcgttgagcctggtaatgtgggcatcaaagtaaaca

SEQ ID NO: 799723 - DNA, 75 bp, synthetic construct
  source 1..75: mol_type = other DNA
tacgaaatggcgggcgcgctacgcgaaagcccgtacccgatcgccaccgccccgctgaccggttttgatgtgccg

SEQ ID NO: 799724 - DNA, 75 bp, synthetic construct
  source 1..75: mol_type = other DNA
agttagctatcgcagtggataatattgtcaggccagagcgaacacggcagatgatcgttgatttttatcgccatt

SEQ ID NO: 799725 - DNA, 75 bp, synthetic construct
  source 1..75: mol_type = other DNA
agcagatagcgaacggctggcgcggtcagttagctatcgcagtggataatattgtcaggccagaacgtacacggc

SEQ ID NO: 799726 - DNA, 75 bp, synthetic construct
  source 1..75: mol_type = other DNA
gtggctggcggtgccgctctttgaacgacggcaccgtgatgtggagctgaccgctgctggagcgtggtttctcaa

SEQ ID NO: 799727 - DNA, 75 bp, synthetic construct
  source 1..75: mol_type = other DNA
taaaaagggcactattcgtgagggctatgccggatatcgccaactgaaagcaaaaaccggtttgtcagatgataa

SEQ ID NO: 799728 - DNA, 75 bp, synthetic construct
  source 1..75: mol_type = other DNA
ttgagttctttatgaatcgcttccgtttgctggaagccgcgccgcgcgtggagtttagccagtatactggccttt

SEQ ID NO: 799729 - DNA, 75 bp, synthetic construct
  source 1..75: mol_type = other DNA
ggtcgttatgccttccgggatatggggatgctaagctggagttgcgttgttgccagccaccacccgctggcgttg

SEQ ID NO: 799730 - DNA, 75 bp, synthetic construct
  source 1..75: mol_type = other DNA
cgcgccgatttactaccggaatggcaggcctttttgcatcagcattcgaaattcgcgtctgcaagttcagtgaaa

SEQ ID NO: 799731 - DNA, 75 bp, synthetic construct
  source 1..75: mol_type = other DNA
cgctttttcctacctatgcgcaagttaaggctatgatgaaagccgtctcaggctattccctgaaagcggtacgca

SEQ ID NO: 799732 - DNA, 75 bp, synthetic construct
  source 1..75: mol_type = other DNA
aacagcaggtggctaagcttctacctgaatggcaggaccgaatcggtgttcccctaacattctggggcatcaaaa

SEQ ID NO: 799733 - DNA, 75 bp, synthetic construct
  source 1..75: mol_type = other DNA
gacaaagtgaaacaatccattgagcgccttgctgaacgaaggattattcagcttcccccaatggggatttctgaa

SEQ ID NO: 799734 - DNA, 75 bp, synthetic construct
  source 1..75: mol_type = other DNA
acctcacatggccaacctaacaaacaggtgcgtctcgtttggtatatctatgcgcaacggtatcgcgatcatcac

SEQ ID NO: 799735 - DNA, 75 bp, synthetic construct
  source 1..75: mol_type = other DNA
gggctttatgtgtcgtttgcattgttaacatggcgcgctatttctcatcactacgcgcgttgttagtggtactgc

SEQ ID NO: 799736 - DNA, 75 bp, synthetic construct
  source 1..75: mol_type = other DNA
atgaacgcgttattacttctcgcggcgctttccagccagataacctttaatacaactcagcaaggtgacatgtac

SEQ ID NO: 799737 - DNA, 75 bp, synthetic construct
  source 1..75: mol_type = other DNA
agtctcttatcgcagcaaacccatttttgaatcgctctatctcggtatgccgtggacggaaatcgactacctgat

SEQ ID NO: 799738 - DNA, 75 bp, synthetic construct
  source 1..75: mol_type = other DNA
ccgctcgacccggataacttcggcaagcagaacgtcggtatctaccgcatggaagtgaagggcaagcgtaagctc

SEQ ID NO: 799739 - DNA, 75 bp, synthetic construct
  source 1..75: mol_type = other DNA
gcttaggtggaattatcctcgatgcactactctctggtaccttcagccagaaggaatatcacgacgctcttgaag

SEQ ID NO: 799740 - DNA, 75 bp, synthetic construct
  source 1..75: mol_type = other DNA
ctgcctgggcgcagaacaccgtcgatggcgacgagatcaatttgttcaatatcctgccgctgtttcgtttaaacg

SEQ ID NO: 799741 - DNA, 75 bp, synthetic construct
  source 1..75: mol_type = other DNA
gttttgcccgcgcagtaggcctgcgtgcgatgaccacaccacacggactgggctacgtgaagatggtgattatgg

SEQ ID NO: 799742 - DNA, 75 bp, synthetic construct
  source 1..75: mol_type = other DNA
ttttacaggcgcttgatgaccacggccagttactgaaaatcagcgaagaggtgaacgcggaaccggatctggcag

SEQ ID NO: 799743 - DNA, 75 bp, synthetic construct
  source 1..75: mol_type = other DNA
acgccttatccgccctacatgtgcaatcccgtaggctggataagacgcggcaagcgtcgcatccggcaattgcac

SEQ ID NO: 799744 - DNA, 75 bp, synthetic construct
  source 1..75: mol_type = other DNA
cgtgttgcaggaaaaaatggattacccacatgggcactaatacctccaccatcacatgaagaacttattcaagag

SEQ ID NO: 799745 - DNA, 75 bp, synthetic construct
  source 1..75: mol_type = other DNA
agtttaaatatttcccaggacgatcgggtgaaaatagttgaaccgccccgggaatcctggagactaaacttcctg

SEQ ID NO: 799746 - DNA, 75 bp, synthetic construct
  source 1..75: mol_type = other DNA
aactatcacttttaaggcaatgtttacgggaaataggttacttctggctaaaacagattcaaaaacttttgtaaa

SEQ ID NO: 799747 - DNA, 75 bp, synthetic construct
  source 1..75: mol_type = other DNA
tacagaataaattctatgtaaaaattaaatataaagaagatgttttcttcctcagaaaaaacaaagatcttttac

SEQ ID NO: 799748 - DNA, 75 bp, synthetic construct
  source 1..75: mol_type = other DNA
attcgcccgactgaaagacaattgttcttattaaactctgtctttgactttgtaaacgtagttggagatcttatc

SEQ ID NO: 799749 - DNA, 75 bp, synthetic construct
  source 1..75: mol_type = other DNA
acgatgagttctctctgtcttcctatgagttcctgaccaaggttatcaatcctgcccgtgaagaggccggggaga

SEQ ID NO: 799750 - DNA, 75 bp, synthetic construct
  source 1..75: mol_type = other DNA
tccttctggtctgccaggcggcatatgcggcaagcccgaccgacatcacggccgatcccaatctgacaggggcgg

SEQ ID NO: 799751 - DNA, 75 bp, synthetic construct
  source 1..75: mol_type = other DNA
gctttcaggcgataatgttaataataaaaatattatcttaagtctgatacactctctggaaacaacaagtgatat

SEQ ID NO: 799752 - DNA, 75 bp, synthetic construct
  source 1..75: mol_type = other DNA
tgttgatgtcctgaccagcaacaataccaatctgcaaatcagcttcgtccattcgcgctatcgtaatgaaaacgt

SEQ ID NO: 799753 - DNA, 75 bp, synthetic construct
  source 1..75: mol_type = other DNA
tgaccgacttccgtggaaggcatcgcgaggctgttttggtctccccaacccatccggtccgagccttgtggctga

SEQ ID NO: 799754 - DNA, 75 bp, synthetic construct
  source 1..75: mol_type = other DNA
gtacgctcaaaataatcgagcaacgcatattagcaaagcctaaacacccgtcaggctggcgaatgcagatcaacc

SEQ ID NO: 799755 - DNA, 75 bp, synthetic construct
  source 1..75: mol_type = other DNA
tttgataaaaacggcacggcaataagcctggaagaaaaaccgcttcaaccgaaaagcaactatgcagttacaggg

SEQ ID NO: 799756 - DNA, 75 bp, synthetic construct
  source 1..75: mol_type = other DNA
gatgggacgcggttatgcttggctggatacgggtacgcatcagagcctgattgaagcgagtaacttcattgcgac

SEQ ID NO: 799757 - DNA, 75 bp, synthetic construct
  source 1..75: mol_type = other DNA
atttatcatcggtgaagagtttatcggtggtgatgattgtgctttggttcttggtgataatatcttttacggtca

SEQ ID NO: 799758 - DNA, 75 bp, synthetic construct
  source 1..75: mol_type = other DNA
cccaacagacgggctgccttgtggaaataagtgtatggcgaatgaatcactggcggtgaacaatgaaaatcaccc

SEQ ID NO: 799759 - DNA, 75 bp, synthetic construct
  source 1..75: mol_type = other DNA
atgcatgaatgtttaaaaaataaaattcatcaaaaagggttatcccaagcaggtattgctcgtttgattggatta

SEQ ID NO: 799760 - DNA, 75 bp, synthetic construct
  source 1..75: mol_type = other DNA
aactccgacctgatatttatcctaacccaacagacggcttgcctgctgagtttcagactagcacacagccagcga

SEQ ID NO: 799761 - DNA, 75 bp, synthetic construct
  source 1..75: mol_type = other DNA
ggggtgacagccaatgcgttggccgaagagaagcagcgatgcctggagtccgggatggatagttgtctgtcgaag

SEQ ID NO: 799762 - DNA, 75 bp, synthetic construct
  source 1..75: mol_type = other DNA
gtgaaaaatgagtgggtttcattattgcaaccctactttaaacataaaattaatctttctgatagttcatatttt

SEQ ID NO: 799763 - DNA, 75 bp, synthetic construct
  source 1..75: mol_type = other DNA
ggtttgataagaaaactgaagagtttaaaggggaggagtattctaaagactttggtgatgatggttctgtcattg

SEQ ID NO: 799764 - DNA, 75 bp, synthetic construct
  source 1..75: mol_type = other DNA
agggaaaactacctacgcgcattaatgcagggatcgttcagtcatttaccgcaccgcggcttgagcattcaagaa

SEQ ID NO: 799765 - DNA, 75 bp, synthetic construct
  source 1..75: mol_type = other DNA
gctcggtaagcttgaacaatggggcattaacaaaggcagtaaggtgaaggacgtaaaattgtctacctcgcagct

SEQ ID NO: 799766 - DNA, 75 bp, synthetic construct
  source 1..75: mol_type = other DNA
gtaaagatctggaagacacgacactgcacctgcccggaggctctgttggttcaggcggttctgtccctgttcagc

SEQ ID NO: 799767 - DNA, 75 bp, synthetic construct
  source 1..75: mol_type = other DNA
tcgaagctgttaaaaacggtgtacctgctgctcaggtcccacatcttgagcccattctttccgctctctggctac

SEQ ID NO: 799768 - DNA, 75 bp, synthetic construct
  source 1..75: mol_type = other DNA
ttttttccccatcagcttcatacaaaaggcatataattgaactttattcgcaagacgagagcaagattattattt

SEQ ID NO: 799769 - DNA, 75 bp, synthetic construct
  source 1..75: mol_type = other DNA
acgattattgtcgccgcgctttcgtaaccgtcagtttgctggattactgctcgatcaggcgtttctggcaggact

SEQ ID NO: 799770 - DNA, 75 bp, synthetic construct
  source 1..75: mol_type = other DNA
acatcgagaaatgcggtggcctgacgcaaaaatcgggtaacgccagaattatcgtcattcgtcagaacggtgcgg

SEQ ID NO: 799771 - DNA, 75 bp, synthetic construct
  source 1..75: mol_type = other DNA
aaaactacctccgcgcattaatgcagggatcgttcagtcatttaccgcaccgcggcttgagcattcaagaaaacc

SEQ ID NO: 799772 - DNA, 75 bp, synthetic construct
  source 1..75: mol_type = other DNA
aagtctgcacaactccagatccttaaagagatttacggcgaagataccgggaatccactggcgaagaaaattgca

SEQ ID NO: 799773 - DNA, 75 bp, synthetic construct
  source 1..75: mol_type = other DNA
cacgccttgatcactcccgcaagccggatatggcgcgagaaaaacttgtgcaacttcttggcgatgttccccgga

SEQ ID NO: 799774 - DNA, 75 bp, synthetic construct
  source 1..75: mol_type = other DNA
cgacctgccgaaattaatggataccgctgttaacagagagagtggcgcaacggtttttgcctatcacgtaaatga

SEQ ID NO: 799775 - DNA, 75 bp, synthetic construct
  source 1..75: mol_type = other DNA
gacacggggacacatcaaagtcttattgaagcaagcaacttcattgcaacaattgaagaacgtcagggactgaaa

SEQ ID NO: 799776 - DNA, 75 bp, synthetic construct
  source 1..75: mol_type = other DNA
ctgtatttgcctatcatgtgcacgaccctgaacgttatggagttgtcgaatttgataatcaaggtaccgctattt

SEQ ID NO: 799777 - DNA, 75 bp, synthetic construct
  source 1..75: mol_type = other DNA
ctgttaatatgccggatgtgtgggccagtgaattgagccgggctggtgccggagcgaagcccgctggtgttactc

SEQ ID NO: 799778 - DNA, 75 bp, synthetic construct
  source 1..75: mol_type = other DNA
gacacggggacacatcaaagcctgattgaggcaagcaacttcattgctacaattgaagagcgtcaagggttgaaa

SEQ ID NO: 799779 - DNA, 75 bp, synthetic construct
  source 1..75: mol_type = other DNA
atgaaaacgcgtaaaggtattattttggcgggtgggtctggtactcgtctttatcctgtgacgatggcagtaagt

SEQ ID NO: 799780 - DNA, 75 bp, synthetic construct
  source 1..75: mol_type = other DNA
ttctgcccgtggcgaactggaaattaccgatattaaccgtatttatatggaacaaggacgtttgtctgtcgctat

SEQ ID NO: 799781 - DNA, 75 bp, synthetic construct
  source 1..75: mol_type = other DNA
aaatattgaagttccacaaggttgcacaattaatgagggaactagttttaccgttaatatgccggatgtctgggc

SEQ ID NO: 799782 - DNA, 75 bp, synthetic construct
  source 1..75: mol_type = other DNA
aacgttatctgcctctgaatactcagagcgtagcttcagaaaaaaggaaaactatgttctcattattgatgaaat

SEQ ID NO: 799783 - DNA, 75 bp, synthetic construct
  source 1..75: mol_type = other DNA
cttaacgatcgcatccaggttttatacgatagagaacatatgctggggcatgctttttttatccctgttgtgcag

SEQ ID NO: 799784 - DNA, 75 bp, synthetic construct
  source 1..75: mol_type = other DNA
aggattgataaaaaaattatatctgatgtttcattaagtaacgtattattggtgtcattatatgtcagccagatc

SEQ ID NO: 799785 - DNA, 75 bp, synthetic construct
  source 1..75: mol_type = other DNA
gcatccttttcttataattttggtactatagtggtttctgatgtcaacaaaaatgcgcctggcactgtattgcca

SEQ ID NO: 799786 - DNA, 75 bp, synthetic construct
  source 1..75: mol_type = other DNA
atgaataaaacaataacggcgcttgctatcatgatggcttcatttgccacaaacgcgtctgtattaccggaaact

SEQ ID NO: 799787 - DNA, 75 bp, synthetic construct
  source 1..75: mol_type = other DNA
aacaggggcatttatctgttgccatgatgggacgtggatatgcctggctggacacggggacacatcaaagtctta

SEQ ID NO: 799788 - DNA, 75 bp, synthetic construct
  source 1..75: mol_type = other DNA
tggattttcgtttctgccgggatttacaggcagctctgaggacagcgacaagacggatattatagttgttttgca

SEQ ID NO: 799789 - DNA, 75 bp, synthetic construct
  source 1..75: mol_type = other DNA
gctgggtgcccgttctgaaggtggtaatgcttttacactgaatgtgggcggccttaacgcgttttacagtctgat

SEQ ID NO: 799790 - DNA, 75 bp, synthetic construct
  source 1..75: mol_type = other DNA
tggcaggtggctcaggaactagattgtatcctgtaacaatggctgtaagtaagcagttgcttcctgtatttgata

SEQ ID NO: 799791 - DNA, 75 bp, synthetic construct
  source 1..75: mol_type = other DNA
gacacgggtacacatcaaagtcttattgaagcaagtaacttcattgccaccattgaagagcgtcagggactaaag

SEQ ID NO: 799792 - DNA, 75 bp, synthetic construct
  source 1..75: mol_type = other DNA
acagatattaaccgtatttatatggaacaaggacgtttgtctgtagccatgatgggacgtggttatgcctggttg

SEQ ID NO: 799793 - DNA, 75 bp, synthetic construct
  source 1..75: mol_type = other DNA
acgtataaaaactttggccgagccattaaagaaaaatgcatacggacaatacctgttgaaaatgattaacggtta

SEQ ID NO: 799794 - DNA, 75 bp, synthetic construct
  source 1..75: mol_type = other DNA
gcaggttaaggtattagccgaaccgctgaagaaaaacgcttatggtcagtatttgctgaaaatgattaaaggtta

SEQ ID NO: 799795 - DNA, 75 bp, synthetic construct
  source 1..75: mol_type = other DNA
atcgtaaaggatttattgacgcagagcaggttaaggtattagccgaaccgctgaagaaaaacgcttatggtcagt

SEQ ID NO: 799796 - DNA, 75 bp, synthetic construct
  source 1..75: mol_type = other DNA
tttgataataacggtacggcaattagcctggaagaaaaaccgctggaaccaaaaagtaactatgcggttactggg

SEQ ID NO: 799797 - DNA, 75 bp, synthetic construct
  source 1..75: mol_type = other DNA
gcaggtaaaagcattagctgagccgctgaaaaaaaatgcttatggccagtatctgctgaaaatgattaaaggtta

SEQ ID NO: 799798 - DNA, 75 bp, synthetic construct
  source 1..75: mol_type = other DNA
ttatcctgtgactatggctgtcagtaaacagctattacctatttatgataaaccgatgatctattacccgctctc

SEQ ID NO: 799799 - DNA, 75 bp, synthetic construct
  source 1..75: mol_type = other DNA
ggtggtgatgattgtgctttggttcttggtgataatatcttctacggccacgatctgccgaagttaatggacgta

SEQ ID NO: 799800 - DNA, 75 bp, synthetic construct
  source 1..75: mol_type = other DNA
ctgcagaccagtggcccgcactgggtaggggccgccagctatcttggtgaagaaatcacgatctatccgtatatc

SEQ ID NO: 799801 - DNA, 75 bp, synthetic construct
  source 1..75: mol_type = other DNA
gcaaatgagatggcagaaagagagttttactcaatattaaaaagtttgcgggaaaattccataagcaatatatag

SEQ ID NO: 799802 - DNA, 75 bp, synthetic construct
  source 1..75: mol_type = other DNA
aacagttacgagcattattattcacttgacaaagatagcaaattatttgtaaatgagatggcagatagagagttt

SEQ ID NO: 799803 - DNA, 75 bp, synthetic construct
  source 1..75: mol_type = other DNA
tacaccccggaggccattattgtcggaggggattatttcccggcctcggtcattcatttaattgataacctgaga

SEQ ID NO: 799804 - DNA, 75 bp, synthetic construct
  source 1..75: mol_type = other DNA
cgcccggcaccttccggcttgatattggtgtactggaaagtggcatcacagaggcaatgtatcaggaaatggaac

SEQ ID NO: 799805 - DNA, 75 bp, synthetic construct
  source 1..75: mol_type = other DNA
ctgcaaactagtggcccgcactgggtaggggtcgccagctatcttggtgaagaaatcacgatctatccgtatatc

SEQ ID NO: 799806 - DNA, 75 bp, synthetic construct
  source 1..75: mol_type = other DNA
aaaggtgttgaagatcgtacccgtaagctgatggaagttacccgtctgcgcgacacgccgatcctcacctttatg

SEQ ID NO: 799807 - DNA, 75 bp, synthetic construct
  source 1..75: mol_type = other DNA
gcaaaaacagctgctcaaagggctggtacagctttccgaagagggcgcagtgcaggtgttccgtccgatctccaa

SEQ ID NO: 799808 - DNA, 75 bp, synthetic construct
  source 1..75: mol_type = other DNA
gcggcaagctgtttaaaggcgtttaccacctttataaagatgaaacctatctctatcagagcggtaaaggccaca

SEQ ID NO: 799809 - DNA, 75 bp, synthetic construct
  source 1..75: mol_type = other DNA
gtaatttctatgaagcctgccagtcattctggtttgcccatgccattattcaacttgaatccaacgggcattcta

SEQ ID NO: 799810 - DNA, 75 bp, synthetic construct
  source 1..75: mol_type = other DNA
gtcaaggtaagatctggatccgtgtgttcccggacaaaccgatcactgaaaagccgctggcagtgcgtatgggta

SEQ ID NO: 799811 - DNA, 75 bp, synthetic construct
  source 1..75: mol_type = other DNA
ggcaagctgtttaaaggcgtttatcacctgtataaagatgaaacctatctctaccagagcggtaaaggtcacacc

SEQ ID NO: 799812 - DNA, 75 bp, synthetic construct
  source 1..75: mol_type = other DNA
tgatcgctgacgttaaaccgtgtagccgtcacatgctgggcatgagcctgcacttacagactaccggcccccttt

SEQ ID NO: 799813 - DNA, 75 bp, synthetic construct
  source 1..75: mol_type = other DNA
acttatttattttggggttacgcaatttttgttgttatcgggattgcgctgatagcctggtatcgaaccgcgaaa

SEQ ID NO: 799814 - DNA, 75 bp, synthetic construct
  source 1..75: mol_type = other DNA
ttgagtatcagagaaatagtgacgcagatagctatacccagggggatcactatcggtgttttgtactttgtgcgg

SEQ ID NO: 799815 - DNA, 75 bp, synthetic construct
  source 1..75: mol_type = other DNA
acactggcgctggccagactgtcggggttccgtcataaaacggtgaaggtgccggaatggagaaatgtcagcgtg

SEQ ID NO: 799816 - DNA, 75 bp, synthetic construct
  source 1..75: mol_type = other DNA
ctcataagcgaattctggtgaggaaaccggatggttttttttctatgaatttaccatttcaagtaattgagtatg

SEQ ID NO: 799817 - DNA, 75 bp, synthetic construct
  source 1..75: mol_type = other DNA
gcctggcagcagcagcattattcgcgcaccttcccttccggttcgttaatcgtcaatatgcctcagcgctggaat

SEQ ID NO: 799818 - DNA, 75 bp, synthetic construct
  source 1..75: mol_type = other DNA
ggcgtaatggctggcgttctgccaaccattaaagagctgcttacaggccagccactgcccacgctttcacttcat

SEQ ID NO: 799819 - DNA, 75 bp, synthetic construct
  source 1..75: mol_type = other DNA
tggccactgtgggtgctgacggcactgtttggctttgccgctgtactgatgagtctgcgtgctcgcaaacgttaa

SEQ ID NO: 799820 - DNA, 75 bp, synthetic construct
  source 1..75: mol_type = other DNA
cacgtaccggcaactggccgctgtgggtgctgacggcgctgtttggttttgccgctgtgctgatgagcctgcgtc

SEQ ID NO: 799821 - DNA, 75 bp, synthetic construct
  source 1..75: mol_type = other DNA
cgagtttgtcccgctggagtcgattctgcgtccgttagcgccgttctttgatctgccgatgtcgtcattcagccg

SEQ ID NO: 799822 - DNA, 75 bp, synthetic construct
  source 1..75: mol_type = other DNA
agaatggcaggaaacctacagccacagagaaattccgcccgtcagatgagcctgtgcaacacgcacaggcagcga

SEQ ID NO: 799823 - DNA, 75 bp, synthetic construct
  source 1..75: mol_type = other DNA
cgaggtgttgaccactaatgtgacaccgaccaccggactcacaccgtacgcacgtaccggcaactggccgctgtg

SEQ ID NO: 799824 - DNA, 75 bp, synthetic construct
  source 1..75: mol_type = other DNA
ggcctgcggcgattatttcgctgatggggcttcaggcgttgacctttaaccgccgtccactccagtctgccgcta

SEQ ID NO: 799825 - DNA, 75 bp, synthetic construct
  source 1..75: mol_type = other DNA
tagaatgtgcggacgcgaagaaattcgaagagttcaagcgtaagaacgaaagccaactggcgcttgatggcggcg

SEQ ID NO: 799826 - DNA, 75 bp, synthetic construct
  source 1..75: mol_type = other DNA
cgtcaccaaaggggccgagcgtatttccgaggtttcagcccgctttaccctggatgcgatgcccggtaagcagat

SEQ ID NO: 799827 - DNA, 75 bp, synthetic construct
  source 1..75: mol_type = other DNA
tgcggcgcagcattacccatccgttcgttcgcaagcaggagctgacggtgtatacgctgaataatgagctggaaa

SEQ ID NO: 799828 - DNA, 75 bp, synthetic construct
  source 1..75: mol_type = other DNA
gcggaagagaaaagcctcgaaacgctgacccgcaccatcaccgaaaccagcgagcagcaggtcagttgggaaacc

SEQ ID NO: 799829 - DNA, 75 bp, synthetic construct
  source 1..75: mol_type = other DNA
ttgcacaggaacgagcgctaaacatgttgcgccgtgactggaaggcaaacgacaccttcatggtgtactcgccaa

SEQ ID NO: 799830 - DNA, 75 bp, synthetic construct
  source 1..75: mol_type = other DNA
gctgatcatcgatgaagcacacatgaagcgtcgtgcgttacttgaggttatccgggacagagacatcagggttct

SEQ ID NO: 799831 - DNA, 75 bp, synthetic construct
  source 1..75: mol_type = other DNA
ggtttgccgtgggaagaaatcagttttgtatggcgtgatcaccctaactatgacccgtcacgactgattcagatt

SEQ ID NO: 799832 - DNA, 75 bp, synthetic construct
  source 1..75: mol_type = other DNA
agcgacactgatggcagtacgtatgcgtctgcgtcctatcctgatgacctctctcgcctttattctcggcgtatt

SEQ ID NO: 799833 - DNA, 75 bp, synthetic construct
  source 1..75: mol_type = other DNA
tcggcggttccacaggggcaatttatcgccagttttctatcaccattgtttcggcaatggcgctttccgtactgg

SEQ ID NO: 799834 - DNA, 75 bp, synthetic construct
  source 1..75: mol_type = other DNA
atcgaaccattgtcttaaagaagcaatggcgcactgcgccatgggcggatattgaagaaaaagaccatcctcagc

SEQ ID NO: 799835 - DNA, 75 bp, synthetic construct
  source 1..75: mol_type = other DNA
gccaaattccgtatgctgccagaagatgtcgataaactttacgtccgcagcgccaatggtgaaatggtgccattc

SEQ ID NO: 799836 - DNA, 75 bp, synthetic construct
  source 1..75: mol_type = other DNA
taatggcctggaagataccgcgcaattcaaacttgaagttgaccaggaaaaggcgcaggcattaggcgtttcgct

SEQ ID NO: 799837 - DNA, 75 bp, synthetic construct
  source 1..75: mol_type = other DNA
gctgtgggtatcggggtaatgggaggaatgaaccgccccgggtttcctggagagtgttttatctgtgaactcagg

SEQ ID NO: 799838 - DNA, 75 bp, synthetic construct
  source 1..75: mol_type = other DNA
gagataccggcaggcagtgaggcctggcgcatcatgcaggcaaagcaccaactccagaaaaatataaacagtctg

SEQ ID NO: 799839 - DNA, 75 bp, synthetic construct
  source 1..75: mol_type = other DNA
cctttgatggtgcattacagattgatcccaaaggtaatatttttctgccaaacgttggtccggtgaaagttgccg

SEQ ID NO: 799840 - DNA, 75 bp, synthetic construct
  source 1..75: mol_type = other DNA
acaaaaatcggatacgcaaaacatgagcggctttgacaataccccgccgcccgcaccgccggtggtcatgagccg

SEQ ID NO: 799841 - DNA, 75 bp, synthetic construct
  source 1..75: mol_type = other DNA
cagtcctccaccaaagaagaagccagcctgcgaatgcaggaagcgcaactgatcagccgctttgtggcgaaagca

SEQ ID NO: 799842 - DNA, 75 bp, synthetic construct
  source 1..75: mol_type = other DNA
aaaaacttcaaaccgagtatggttcagatatgttgaaattcgttataatccagtcatatattaataaattacttg

SEQ ID NO: 799843 - DNA, 75 bp, synthetic construct
  source 1..75: mol_type = other DNA
ctccctataaaaaggacataaaaaaaaccatacttcgtctggaacaagaaatggcaacaacttcggaagaaacaa

SEQ ID NO: 799844 - DNA, 75 bp, synthetic construct
  source 1..75: mol_type = other DNA
atggaaaataaattaagcagtaaatacattcatatgtatatgagtatatcccgagtgttcattcgtttgacaggc

SEQ ID NO: 799845 - DNA, 75 bp, synthetic construct
  source 1..75: mol_type = other DNA
gctcgcaatgccacttcatgaagcctgctggcgtctatgtctgccctaaatgtggccacaagccgcttgccggtg

SEQ ID NO: 799846 - DNA, 75 bp, synthetic construct
  source 1..75: mol_type = other DNA
aaccgtgcaccgcctaggttatccggactctatcgaatatgacgatcttccgggtaaatcagacgggatggagga

SEQ ID NO: 799847 - DNA, 75 bp, synthetic construct
  source 1..75: mol_type = other DNA
cagcatcagcccacgaaggcagagaaacaggcctggtggagtcagatcaaattctatcagcgtcagcgcgtatcg

SEQ ID NO: 799848 - DNA, 75 bp, synthetic construct
  source 1..75: mol_type = other DNA
ggcaagccgcagtctcaggaagcctatggttgcatgttgcgtaaagacgatccgcagttcaaaaagctgatggat

SEQ ID NO: 799849 - DNA, 75 bp, synthetic construct
  source 1..75: mol_type = other DNA
ctacgcaaggttgtttgcgccggggctgcatgtgctgtcgtataacgaagtgccggacgagctggagttgaagat

SEQ ID NO: 799850 - DNA, 75 bp, synthetic construct
  source 1..75: mol_type = other DNA
tgtttaactatgacgatattactcagctgcataaccgtttgtcgtcgatggcaccgcgactggcggaagatttga

SEQ ID NO: 799851 - DNA, 75 bp, synthetic construct
  source 1..75: mol_type = other DNA
ccaccgacaaatttatcgacggcggcaagtctgaactactggatgccgcacttaaagacattcaggaagagatga

SEQ ID NO: 799852 - DNA, 75 bp, synthetic construct
  source 1..75: mol_type = other DNA
tgtttccggacatggtaccaatcctattgtggagggctctcctgaatggatatctgatggaagagctgttgtgat

SEQ ID NO: 799853 - DNA, 75 bp, synthetic construct
  source 1..75: mol_type = other DNA
cgcgtggcgattgtggtagataaatcgacatggaccagggagttgattgagcgtaacggtaaatttggcatcgtt

SEQ ID NO: 799854 - DNA, 75 bp, synthetic construct
  source 1..75: mol_type = other DNA
aaaaccgcttcctttataggtcttcgaccgtatcgtcatctgcgtcttcgttcccggcaggtcccccggcgaacg

SEQ ID NO: 799855 - DNA, 75 bp, synthetic construct
  source 1..75: mol_type = other DNA
tggcgcgaggaccaacgtatcagccaggcgaagctgcttttgagcaccacccggatgcctatcgccactgtcggt

SEQ ID NO: 799856 - DNA, 75 bp, synthetic construct
  source 1..75: mol_type = other DNA
cgcgtggcgattgtggtagataaatcgacatggaccagggagttgattgaacgtaacggtaagtttggcatcgtt

SEQ ID NO: 799857 - DNA, 75 bp, synthetic construct
  source 1..75: mol_type = other DNA
agttatttctgcttcttcgaccatgatcgtgaatggaaaaaaggtagcacttgttggcgacgagattaattgtcc

SEQ ID NO: 799858 - DNA, 75 bp, synthetic construct
  source 1..75: mol_type = other DNA
agcggtaaagcgactgaccgtttgagtcattatttgtcccgcggtcgtttgttgtggctgacgccgttgatttct

SEQ ID NO: 799859 - DNA, 75 bp, synthetic construct
  source 1..75: mol_type = other DNA
attacgtggctgaatttaatttaagagaaaaacagttattacgcgaacagaataaaacgccttccaccggagaat

SEQ ID NO: 799860 - DNA, 75 bp, synthetic construct
  source 1..75: mol_type = other DNA
gaaagctctcgccgcgctgcagaaagggaagaaatttaccccggaaagcgtttctcgcctgttggaaaaaatcag

SEQ ID NO: 799861 - DNA, 75 bp, synthetic construct
  source 1..75: mol_type = other DNA
gccgctggcagtttgatgatgataagctcggtaatgactccaacttattgatagtgttttatgttcagataatgc

SEQ ID NO: 799862 - DNA, 75 bp, synthetic construct
  source 1..75: mol_type = other DNA
ggacgtgggcggtgggaagtgtgtcgggtcgtgaagaagataaatttaattgctacggcattccggtagtgagag

SEQ ID NO: 799863 - DNA, 75 bp, synthetic construct
  source 1..75: mol_type = other DNA
ctgggtgtcgagaacgatattgctctgctgaattatctctcttcagtgaccttaagtccggcagataaagactaa

SEQ ID NO: 799864 - DNA, 75 bp, synthetic construct
  source 1..75: mol_type = other DNA
cagcaattttgatatcgccagcgtggcgcagcatgtctgcctgtcgccgtcgcgtctgtcacatctgttccgcca

SEQ ID NO: 799865 - DNA, 75 bp, synthetic construct
  source 1..75: mol_type = other DNA
ccagtcatctcaactcttccagcaccagatattccctcgcttatttatcatttcagacgttggctcctgcagttt

SEQ ID NO: 799866 - DNA, 75 bp, synthetic construct
  source 1..75: mol_type = other DNA
gtgaatgcggacacctggacccgcctgcaggccttccgacatgctctggagctgacttcctgtgaggcttctctc

SEQ ID NO: 799867 - DNA, 75 bp, synthetic construct
  source 1..75: mol_type = other DNA
aagccggtggcgcacgtagcggggcagtgaaatccgctattggtttaggtctgctgttgtcggaaggcattggcg

SEQ ID NO: 799868 - DNA, 75 bp, synthetic construct
  source 1..75: mol_type = other DNA
cggggtatgcgtgttctggtgccatcatcactggcaacggccatgatacagcacggaacggctgaatatgcgtga

SEQ ID NO: 799869 - DNA, 75 bp, synthetic construct
  source 1..75: mol_type = other DNA
ggatgattacctcctgcctttaaaccgcgctgaacttgaagcatacaaagaaaacacgccagcggcactaaatga

SEQ ID NO: 799870 - DNA, 75 bp, synthetic construct
  source 1..75: mol_type = other DNA
tttactcactaattaattattatgaggatgattacctcctgcctttaaaccgcgctgaacttgaagcatacaaag

SEQ ID NO: 799871 - DNA, 75 bp, synthetic construct
  source 1..75: mol_type = other DNA
ctttcctcaatgagttagtggctatcgagtgggataaaggtaatgaatttttcccggcaaccagtatgcaggtag

SEQ ID NO: 799872 - DNA, 75 bp, synthetic construct
  source 1..75: mol_type = other DNA
ttcccagcgaccagtatgcagattgccaatattcaggcagggaccggcagtaacaacgttattcccggtgaactg

SEQ ID NO: 799873 - DNA, 75 bp, synthetic construct
  source 1..75: mol_type = other DNA
attcggggtaagggcgtggtgaaaaataatgggaaagaatttgtctgccgaccgggcgacattttgctctttcca

SEQ ID NO: 799874 - DNA, 75 bp, synthetic construct
  source 1..75: mol_type = other DNA
tgatccggtcgaagagatcaaagtcggttttgatattttgaaatcgctgcgtattcgttcgcgcggcatcaactt

SEQ ID NO: 799875 - DNA, 75 bp, synthetic construct
  source 1..75: mol_type = other DNA
tggctgacatccacttcgactatcgcattgcactgaaagtagcggaatacggcgtcgattgtctgcgtattaacc

SEQ ID NO: 799876 - DNA, 75 bp, synthetic construct
  source 1..75: mol_type = other DNA
aatattgatgttaaaatagaattcaatgatcttaaaagaaacagatgggtagctgaactttataaagaagatgct

SEQ ID NO: 799877 - DNA, 75 bp, synthetic construct
  source 1..75: mol_type = other DNA
cgccatttcccaagcctgtcgatcattgttctgaccatgaacaacaatccggcgattcttagtgcggtattggat

SEQ ID NO: 799878 - DNA, 75 bp, synthetic construct
  source 1..75: mol_type = other DNA
aacaagctgcgtcaggcgcatgtggaattactgggtgatttaaatgctctgttaccggcattacaacagccgtta

SEQ ID NO: 799879 - DNA, 75 bp, synthetic construct
  source 1..75: mol_type = other DNA
gcgcgcagctgcgtgatgaacatgcctggcgttacgaccatcccggtgacgctatctacgcgccgttgttgttaa

SEQ ID NO: 799880 - DNA, 75 bp, synthetic construct
  source 1..75: mol_type = other DNA
accacccttaccgataaccccgatttcctcatgttagccagcgccttcggcatccctggccaacacatcacccgt

SEQ ID NO: 799881 - DNA, 75 bp, synthetic construct
  source 1..75: mol_type = other DNA
gcgcacaactgcgtgatgaacatgcctggcgctacgatcaccccggagaggctatctacgcgccgttgttgttaa

SEQ ID NO: 799882 - DNA, 75 bp, synthetic construct
  source 1..75: mol_type = other DNA
cctgccacctgtacgctgaaagggctgggcgcagtagaagcagattatccgtactatctgggcatgctgggaatg

SEQ ID NO: 799883 - DNA, 75 bp, synthetic construct
  source 1..75: mol_type = other DNA
gtttttccaggaacgatatagcgaaaccacccttaccgataatcccgatttcctcatgttagccagcgccttcgg

SEQ ID NO: 799884 - DNA, 75 bp, synthetic construct
  source 1..75: mol_type = other DNA
gtgagtttgaccgctatctgctgttgccaaataacccgaatatggtcattgtcgacaccaaaatcgtcgctggcg

SEQ ID NO: 799885 - DNA, 75 bp, synthetic construct
  source 1..75: mol_type = other DNA
cgttggttttgaaagcggcggactggcggcggctcatgcggtgcataacggcctgaccgctatcccggacgcgca

SEQ ID NO: 799886 - DNA, 75 bp, synthetic construct
  source 1..75: mol_type = other DNA
tcactgtcgtacccgcgcatttctgcgcagaccggtatcagcaaaaccgccattttttctctggtgaggcgattt

SEQ ID NO: 799887 - DNA, 75 bp, synthetic construct
  source 1..75: mol_type = other DNA
atgaatgcacgaaaggcggtactggcagacaatccggaattgatcctgcgtgtgctacaactgagatttgacgag

SEQ ID NO: 799888 - DNA, 75 bp, synthetic construct
  source 1..75: mol_type = other DNA
cattttttctctggtgaggcgatttcaccagatattcgctgactggcctctttccggagaatattcctgcgtgca

SEQ ID NO: 799889 - DNA, 75 bp, synthetic construct
  source 1..75: mol_type = other DNA
ccgacatcattgcagctatccgggatgactggatggggcgtacgccggaggcacagcagcagacgctgattatgg

SEQ ID NO: 799890 - DNA, 75 bp, synthetic construct
  source 1..75: mol_type = other DNA
cccgacagtctgtgctgtgagctggttctgccggccggaactctcaggctgaaaggtgaactgacaccggcgtta

SEQ ID NO: 799891 - DNA, 75 bp, synthetic construct
  source 1..75: mol_type = other DNA
ggatgagggtaaaattgtcgaagactcgccgaaagacgctttcttcgatgatccgaaatcggaccgcgcaaaaga

SEQ ID NO: 799892 - DNA, 75 bp, synthetic construct
  source 1..75: mol_type = other DNA
atatacggactgggcggagagtctggttgagtatgcgtggaaaaaatggctggcggatgaaaacttcgcgcatca

SEQ ID NO: 799893 - DNA, 75 bp, synthetic construct
  source 1..75: mol_type = other DNA
aacactctccaggaaacccggggcggttcagagagtctggttgagtatgcgtggaaaaaatggctggcggatgaa

SEQ ID NO: 799894 - DNA, 75 bp, synthetic construct
  source 1..75: mol_type = other DNA
gaaccggtgcagcaaggtgaaatcaccgtcgatggcatcgtggttaacgataaaaaaaccgacctggcgaagctg

SEQ ID NO: 799895 - DNA, 75 bp, synthetic construct
  source 1..75: mol_type = other DNA
gaccgactgctcaaccgaagtgaaaaaaggcgaagtggtggtggtttgcggtccgtcaggttctggtaaatcgac

SEQ ID NO: 799896 - DNA, 75 bp, synthetic construct
  source 1..75: mol_type = other DNA
gcagcgtgtggcaattgctcgcgcattgtgtatggatcctattgcgatgctgttcgacgaacccacatcggcact

SEQ ID NO: 799897 - DNA, 75 bp, synthetic construct
  source 1..75: mol_type = other DNA
cacttttatggctggttttgctgatgcgttaattcaggttggatggttggtcgaaactaatggtgtgttgtcgct

SEQ ID NO: 799898 - DNA, 75 bp, synthetic construct
  source 1..75: mol_type = other DNA
caccagatattcgctgactggcctctttccggtgaatattcctgcgggcaactggcccgggctcttttcccgggg

SEQ ID NO: 799899 - DNA, 75 bp, synthetic construct
  source 1..75: mol_type = other DNA
caccaggtattcactgactggcctcttttcggggaatattcctgcgtgcaactggcccgggctctgttcccgggg

SEQ ID NO: 799900 - DNA, 75 bp, synthetic construct
  source 1..75: mol_type = other DNA
cctttatgtattattatttaggtgttgcttacaggtatgtactgttaacattcagcttctttgcatactttatat

SEQ ID NO: 799901 - DNA, 75 bp, synthetic construct
  source 1..75: mol_type = other DNA
gtgcaatggctagatactggaagatctatggtggcgctggggctgtatttaaaagtcgctatttttggtgtgctt

SEQ ID NO: 799902 - DNA, 75 bp, synthetic construct
  source 1..75: mol_type = other DNA
aaacccttcccttccggaagggagtttcgggattttgtggctggagtgcttgaggggagattatctggcggtact

SEQ ID NO: 799903 - DNA, 75 bp, synthetic construct
  source 1..75: mol_type = other DNA
ttctggcggctgctggcctgggttttcttgggcttggtgctcgcccgccaatggcggaatggggagccatgatcg

SEQ ID NO: 799904 - DNA, 75 bp, synthetic construct
  source 1..75: mol_type = other DNA
agcctactttaccggcgaaccgaccacggccgcgctgaaggtgtccttcttcggcccgttctacggcgggtataa

SEQ ID NO: 799905 - DNA, 75 bp, synthetic construct
  source 1..75: mol_type = other DNA
aggtcagcgccacttatgggaaacggaacgacggagggattagtgtacttaatcgtggatatgacccaacgaaaa

SEQ ID NO: 799906 - DNA, 75 bp, synthetic construct
  source 1..75: mol_type = other DNA
tacaacctgagcgccgatgccgccttccagcaatatgtgctgatgaccatcggcgacgggctggtggcgcagatc

SEQ ID NO: 799907 - DNA, 75 bp, synthetic construct
  source 1..75: mol_type = other DNA
gcaccgcgcctggcggaagatttaagcgcggcgctgaattacagccagttgctgaaagtgtaccgcgcgctgctg

SEQ ID NO: 799908 - DNA, 75 bp, synthetic construct
  source 1..75: mol_type = other DNA
ggcgcaattatcttaattgccagtctggcctttaatctgctgggtgatggcttgcgcgatgttctggagcctcaa

SEQ ID NO: 799909 - DNA, 75 bp, synthetic construct
  source 1..75: mol_type = other DNA
ttggtacggccctcaatacggggctggcgcttcttggttggtgctacatcatgttctgctcatggcggtggctgt

SEQ ID NO: 799910 - DNA, 75 bp, synthetic construct
  source 1..75: mol_type = other DNA
gcacgccattcgtcatcagtattcattggaaaacgttcgccagattgccaaagcactggacgatgcccgcgtgga

SEQ ID NO: 799911 - DNA, 75 bp, synthetic construct
  source 1..75: mol_type = other DNA
ttctggcggtgcgatgaacatgagcgatatccgtgaccgtttccgcgccctgaaagcagagctgaaaccagaaac

SEQ ID NO: 799912 - DNA, 75 bp, synthetic construct
  source 1..75: mol_type = other DNA
tctcagcgtctcagcgcgtcgtgacggcgtttggattgtgcgccggggcgttggtgtgtctgcggggtgttttgt

SEQ ID NO: 799913 - DNA, 75 bp, synthetic construct
  source 1..75: mol_type = other DNA
ttgggcgacggcactgcagctaatcgccctctccgcccggcagaatactcactcagccataagtcggcacgccgc

SEQ ID NO: 799914 - DNA, 75 bp, synthetic construct
  source 1..75: mol_type = other DNA
acgcggttattctcaagcaggagaaacatattcaggtgctgaacacgctgctcgcgagcctggcgaaaattccct

SEQ ID NO: 799915 - DNA, 75 bp, synthetic construct
  source 1..75: mol_type = other DNA
gtgtatacgctgaataatgagctggaaaatctgctcaccaacgtggtgaatcaggcgcaacagggcgggaaagtg

SEQ ID NO: 799916 - DNA, 75 bp, synthetic construct
  source 1..75: mol_type = other DNA
acatcagtataatcttgaattacctgtttttcaggatttggttgattgctgggtaaaaccatttcgtaatgggac

SEQ ID NO: 799917 - DNA, 75 bp, synthetic construct
  source 1..75: mol_type = other DNA
cgctgttgacaatcaactttattgtcgtcaccaaaggggccgagcgtatttccgaggtttctgcccgctttaccc

SEQ ID NO: 799918 - DNA, 75 bp, synthetic construct
  source 1..75: mol_type = other DNA
aaagaccctgtgctgctggtgccaccgcagttgcgccctttgctggcgcgctatgcgagattgtttgcgccgggg

SEQ ID NO: 799919 - DNA, 75 bp, synthetic construct
  source 1..75: mol_type = other DNA
atggtcaaaccaaactgggataactttaaagctaaatttagtgagaatcctcaaggtaattttgagtggttttgc

SEQ ID NO: 799920 - DNA, 75 bp, synthetic construct
  source 1..75: mol_type = other DNA
cacatggtgaaccacgctcagacgggggcaggtaaatcatcgtcagcagcattaaaaatgatattttttagtcga

SEQ ID NO: 799921 - DNA, 75 bp, synthetic construct
  source 1..75: mol_type = other DNA
tttttgaagatcgtaaccgaatgaaacgtcgcctgaaaactcagatgtcggatttatcgtctacggaaggacaat

SEQ ID NO: 799922 - DNA, 75 bp, synthetic construct
  source 1..75: mol_type = other DNA
tacaacctgagcgccaatgccgccttccagcagtatgtcctgatgaccattggtgacgggctggtagcgcagatc

SEQ ID NO: 799923 - DNA, 75 bp, synthetic construct
  source 1..75: mol_type = other DNA
cgccgggttgatcaaccaggcgcaggcgcaaacccggcgtaaagatgtcgccagcgaggccgatttctacggcgc

SEQ ID NO: 799924 - DNA, 75 bp, synthetic construct
  source 1..75: mol_type = other DNA
ggctggcggatgagcaagcgcccgcaagcggcggaggcggaagagaaaagcctcgaaacgctaacccgtacgatg

SEQ ID NO: 799925 - DNA, 75 bp, synthetic construct
  source 1..75: mol_type = other DNA
cgcagggtaacccactcacccagcgtattcgcggcgtgcggcaagtgatatccgacggcaacggcgtgctgctgc

SEQ ID NO: 799926 - DNA, 75 bp, synthetic construct
  source 1..75: mol_type = other DNA
atggcgaaaacaactaaatcgttcctcgcgctgctgcgcggcggtaatctcggcgtaccgctggttatactttgt

SEQ ID NO: 799927 - DNA, 75 bp, synthetic construct
  source 1..75: mol_type = other DNA
agttccagaacacgatgccgcaggtgaaggagcagatgaaagccgcaggtaaagacccggtgctgctggtgccgc

SEQ ID NO: 799928 - DNA, 75 bp, synthetic construct
  source 1..75: mol_type = other DNA
gaccagtgaactggaaatctggcatggtttactgcttatgtgggccgtctgtgctggtgtgattcacggcgtggg

SEQ ID NO: 799929 - DNA, 75 bp, synthetic construct
  source 1..75: mol_type = other DNA
gccaaatattatcggctgcctgttatggcctccgttttacttcctgccggggattctggcgggtgcggcgatcga

SEQ ID NO: 799930 - DNA, 75 bp, synthetic construct
  source 1..75: mol_type = other DNA
gcatgtttaccattctggtcggtcgttttgtcggcccgacgcgtccgctggtgccaatggtggcgggaatgttgg

SEQ ID NO: 799931 - DNA, 75 bp, synthetic construct
  source 1..75: mol_type = other DNA
ggattctggcgggtgcggcgatcgatattccagccggaatgcagagcggtgagtttaaatggttgctgctggcga

SEQ ID NO: 799932 - DNA, 75 bp, synthetic construct
  source 1..75: mol_type = other DNA
gcctaacctgctggttgttcccggtgatcgtattgtgggcgtggacagtgcgcagggaaccttcacgaataccgg

SEQ ID NO: 799933 - DNA, 75 bp, synthetic construct
  source 1..75: mol_type = other DNA
atgcaagcattgctggaacactttattacccaatccaccgtttattcgctgatggcggtggtattggtggctttt

SEQ ID NO: 799934 - DNA, 75 bp, synthetic construct
  source 1..75: mol_type = other DNA
tacccggtacggtgctgatggcggggctgggagcgctgattggcagcggcgagttaagtttctggcacgcctggc

SEQ ID NO: 799935 - DNA, 75 bp, synthetic construct
  source 1..75: mol_type = other DNA
aggcatgcaggcacaccggtgaggatgacgttggtattctggaacgtatcaggcttctgaagtgtttttacctgt

SEQ ID NO: 799936 - DNA, 75 bp, synthetic construct
  source 1..75: mol_type = other DNA
gatacatccctgcgccaggtggatgacgtcagcccacagcaggtcccgcgtcaggccggggcatgggttccggaa

SEQ ID NO: 799937 - DNA, 75 bp, synthetic construct
  source 1..75: mol_type = other DNA
accaacactggcatcgctccagcttgaatcaatcaatcccaaatggtcccagcaacaacaaaattctttcaagtg

SEQ ID NO: 799938 - DNA, 75 bp, synthetic construct
  source 1..75: mol_type = other DNA
agggcgtgaggaagataaattcaactgctacggcattccagtggtgaaaggtccggtactaagtttgccgctggt

SEQ ID NO: 799939 - DNA, 75 bp, synthetic construct
  source 1..75: mol_type = other DNA
cgaggaaaaatgtctggcgtggatggagtgccgcctgctacctgcgacttctgcgcaacaaaaatacgacacgct

SEQ ID NO: 799940 - DNA, 75 bp, synthetic construct
  source 1..75: mol_type = other DNA
aaaatcacacagacgatggtgagcagttgtacaacactgatgctacggatgatgttaaagcggtccgtgtgcgga

SEQ ID NO: 799941 - DNA, 75 bp, synthetic construct
  source 1..75: mol_type = other DNA
ctgagcaacacacagcctaacctgctggttgttcccggtgatcgtattgtgggcgtggacagtgcgcagggaacc

SEQ ID NO: 799942 - DNA, 75 bp, synthetic construct
  source 1..75: mol_type = other DNA
ccacgctaccaatatgctgaagattatgagttttggagtagattagcaaactacggaaaattctgtaatataaat

SEQ ID NO: 799943 - DNA, 75 bp, synthetic construct
  source 1..75: mol_type = other DNA
gcgaaccgttcttcaacaccatgtttacctggctgatggtgccgtttgcgctactgcttggtgtcggtcctctgg

SEQ ID NO: 799944 - DNA, 75 bp, synthetic construct
  source 1..75: mol_type = other DNA
ctgctttatatggggtacgtcggcttctcggtggcgtttgcttttgccattgcttctttgttgagcgggcgtctg

SEQ ID NO: 799945 - DNA, 75 bp, synthetic construct
  source 1..75: mol_type = other DNA
ggacccacgcaccgggccgtgcatgagatgcgtgaagcaggcgtggacgcccgcacactggccagttttctgagc

SEQ ID NO: 799946 - DNA, 75 bp, synthetic construct
  source 1..75: mol_type = other DNA
gtgagctgaagggggccatcaaagcgaaggagcagttcacggtgactgctctggaaaacggtgcgatacggttgc

SEQ ID NO: 799947 - DNA, 75 bp, synthetic construct
  source 1..75: mol_type = other DNA
ttctgcgccacgggttttatacagatcataacacgctaattgatgctgaactggttactgtgctttatgaaggag

SEQ ID NO: 799948 - DNA, 75 bp, synthetic construct
  source 1..75: mol_type = other DNA
atgttatttttctgtggttaccgtgtttgttattgttcttcttctttttcctcttcctcttctttccgttcctct

SEQ ID NO: 799949 - DNA, 75 bp, synthetic construct
  source 1..75: mol_type = other DNA
gaaggtaaggatgcggttcagcccctgatggctctgacgcctgcggcggtactgtcaggcctgacggcaggccag

SEQ ID NO: 799950 - DNA, 75 bp, synthetic construct
  source 1..75: mol_type = other DNA
cccgtgcagaaactctgttacccggagcgaccactgatgtctgggtgatggtcggacagacggaggcgctggatg

SEQ ID NO: 799951 - DNA, 75 bp, synthetic construct
  source 1..75: mol_type = other DNA
ggactgctgtgtctgtttgatcctcgctatcgtaagcgcgtgaacccgcagaaaactgcgccggaggctgtatga

SEQ ID NO: 799952 - DNA, 75 bp, synthetic construct
  source 1..75: mol_type = other DNA
tgaagagctggaaaacggcgcgtgggccgtgcgtctttactacaaaccatttgttcgctggatttgggcgggcgg

SEQ ID NO: 799953 - DNA, 75 bp, synthetic construct
  source 1..75: mol_type = other DNA
agtccttttctacagggacgaatatgaaaaatattttgattcgttaaaagatggcgatgaatgcttaagttttaa

SEQ ID NO: 799954 - DNA, 75 bp, synthetic construct
  source 1..75: mol_type = other DNA
aacatataaagccacattatcgcgcccttgatatggctgaacactggctaagggtggcgattaaggcaatagacc

SEQ ID NO: 799955 - DNA, 75 bp, synthetic construct
  source 1..75: mol_type = other DNA
gtgacggtacagcacggggagagcgtgagctggatgaggccattcaggaagcggtggcggacggtcggggtatcc

SEQ ID NO: 799956 - DNA, 75 bp, synthetic construct
  source 1..75: mol_type = other DNA
aacagcaccaagatataaagcgctggagatgacagagcacgccttaaaggtggctataaaggtgatagacatcac

SEQ ID NO: 799957 - DNA, 75 bp, synthetic construct
  source 1..75: mol_type = other DNA
cgtgagcttgagcttcacaccctgcatactgcaagcggtgggggtaataacgacggcattgagcgttataattgc

SEQ ID NO: 799958 - DNA, 75 bp, synthetic construct
  source 1..75: mol_type = other DNA
gtggggagcatggggaatttaacaaaatttaaacacgcttccccacttttcgacctgtatacaccccaaaaagtg

SEQ ID NO: 799959 - DNA, 75 bp, synthetic construct
  source 1..75: mol_type = other DNA
gcggcggcaaattttgccacgctgatagagcgggagattgccgaagcggaacaggtgacaaccatcaacgttaac

SEQ ID NO: 799960 - DNA, 75 bp, synthetic construct
  source 1..75: mol_type = other DNA
gtgacacagagaacatggcacgcctgggaaaatgcggagcaggtggatgtcaccgtctggatgcaaaatggcatc

SEQ ID NO: 799961 - DNA, 75 bp, synthetic construct
  source 1..75: mol_type = other DNA
ccgttctttaaaacgctgctggtggagcttgcgccggtgttcgactcgctcgataacaaaattattattaccggg

SEQ ID NO: 799962 - DNA, 75 bp, synthetic construct
  source 1..75: mol_type = other DNA
agttgagtcgggcattgcgtaacgtggcggacgccgaaacggcggcaaaagcggaagaccccattacgctgcctc

SEQ ID NO: 799963 - DNA, 75 bp, synthetic construct
  source 1..75: mol_type = other DNA
tcgcgctttgcgattcagggactccggcgtcacaccgactgggagcttgcgtgcaatcgccattacattacccat

SEQ ID NO: 799964 - DNA, 75 bp, synthetic construct
  source 1..75: mol_type = other DNA
agacgcctggccaacggcaatacctccgtcatgacggtggcggccgatctggctatgccaacgccagccatttct

SEQ ID NO: 799965 - DNA, 75 bp, synthetic construct
  source 1..75: mol_type = other DNA
accacgacggcggcaaactttgccacgctgacagaacgggagattgccgaagcggaacaggtgacaaccatcaac

SEQ ID NO: 799966 - DNA, 75 bp, synthetic construct
  source 1..75: mol_type = other DNA
tatcggctggctgattatcatcgtgtttaactgccaggcgggtacaccaggtgaaaaccggtttgggccagaccc

SEQ ID NO: 799967 - DNA, 75 bp, synthetic construct
  source 1..75: mol_type = other DNA
acgtaccgttccgctggcaaccatgctgggtactggtttagcaggtattgtttacatcgctgcgactcaggtgct

SEQ ID NO: 799968 - DNA, 75 bp, synthetic construct
  source 1..75: mol_type = other DNA
agtctgaataaacaggtcctgaacgcgctggcgcagagtggcggtgatatccggatttatacgccactggaggcc

SEQ ID NO: 799969 - DNA, 75 bp, synthetic construct
  source 1..75: mol_type = other DNA
ctgtctctgtgctgacccaggataaaagcccggtggccattctcagcggtcgcggaggtgcgcagaccctgcgtg

SEQ ID NO: 799970 - DNA, 75 bp, synthetic construct
  source 1..75: mol_type = other DNA
catgacagaggaccggcacattgaccttgcctacgccctgacggtgtacggtgtgcagggtgccagcgagcgttt

SEQ ID NO: 799971 - DNA, 75 bp, synthetic construct
  source 1..75: mol_type = other DNA
ctgatggccatgcgatcattaaaagtattctgctctgcctgtgggcctttgtgggtgtggaatccgcagcggtaa

SEQ ID NO: 799972 - DNA, 75 bp, synthetic construct
  source 1..75: mol_type = other DNA
ctgatggtcatgcgatcattaaaagtattctgctctgcctgtgggccttcgtgggtgttgaatccgcagctgtaa

SEQ ID NO: 799973 - DNA, 75 bp, synthetic construct
  source 1..75: mol_type = other DNA
agcattaccgccggaaaaagcgagagagattttatctcagtatgaaaataaggaacacaacctcccggcaaaaga

SEQ ID NO: 799974 - DNA, 75 bp, synthetic construct
  source 1..75: mol_type = other DNA
aatgttaggctggcaacgcgccggtggcgaaggcatcctgacgacaatctacggtattctggtgtttttaccatg

SEQ ID NO: 799975 - DNA, 75 bp, synthetic construct
  source 1..75: mol_type = other DNA
gcgggtacgccaggcgagaaccgctttggaccagatccaaaactggaaccttaaaacaaatctgctcgccggatg

SEQ ID NO: 799976 - DNA, 75 bp, synthetic construct
  source 1..75: mol_type = other DNA
gggcgggtaccagtgcatcacgcacggtactggccgcggttgggccacgagcactgaataaacaggtcctgaacg

SEQ ID NO: 799977 - DNA, 75 bp, synthetic construct
  source 1..75: mol_type = other DNA
caccggcgtggcggcgggcaccgtcgaaatcatcgttatgagcaatgacggtaactttgtggcgatctgcaaagt

SEQ ID NO: 799978 - DNA, 75 bp, synthetic construct
  source 1..75: mol_type = other DNA
ggcagcaacaggtccggcagtctgacggcggcaaaaccgcccacgacctgctgcacgagaaaagtgaccgcgagt

SEQ ID NO: 799979 - DNA, 75 bp, synthetic construct
  source 1..75: mol_type = other DNA
tgccgcgtaacgaaaccaacgatctggcgctgaaacttcctgtttgtcgcattgttaaacgcattcaactcactg

SEQ ID NO: 799980 - DNA, 75 bp, synthetic construct
  source 1..75: mol_type = other DNA
caccactgcaaacagcaggggctgcactttatccagccaggccgctttgttctgccgggggatatggcaggcgcg

SEQ ID NO: 799981 - DNA, 75 bp, synthetic construct
  source 1..75: mol_type = other DNA
gacatgcgtctggcgctgacgcagttgatgcaaagtttccactacgggcaacgtacgcttttccggcgcttgttc

SEQ ID NO: 799982 - DNA, 75 bp, synthetic construct
  source 1..75: mol_type = other DNA
accaacgccggaatgctgcgcgagcggtttaattattactgcgagaaagtggtgaaggggttctataaaaaccac

SEQ ID NO: 799983 - DNA, 75 bp, synthetic construct
  source 1..75: mol_type = other DNA
cggggccgatctctgggaagagctgatggcgcgtgcaggcaaagaagggacgccggtatttcttgtgggcggtaa

SEQ ID NO: 799984 - DNA, 75 bp, synthetic construct
  source 1..75: mol_type = other DNA
ttcatgcgcgactgccgtctggtgcatccagatgcgctgtatatgggcgttggcgggacttacgatgttttcacc

SEQ ID NO: 799985 - DNA, 75 bp, synthetic construct
  source 1..75: mol_type = other DNA
tacgttttaaatcgaacgattcgctgctacgccactttaaggatacctccacgctgtatctggagattgtggatt

SEQ ID NO: 799986 - DNA, 75 bp, synthetic construct
  source 1..75: mol_type = other DNA
caaagttgatccatccaaagttaccacggtgtttcagacctaccgcaaaggcgtggatgacattaccgacactga

SEQ ID NO: 799987 - DNA, 75 bp, synthetic construct
  source 1..75: mol_type = other DNA
ttccagatgagtgacggtacaaccatcggctatcacattggcgtggcctacaaagttgatccatccaaagttacc

SEQ ID NO: 799988 - DNA, 75 bp, synthetic construct
  source 1..75: mol_type = other DNA
gaaccccggtgttatggagctggaagccatcaataaatggaacggcacgctgccgcaatacatgaccagcggtgc

SEQ ID NO: 799989 - DNA, 75 bp, synthetic construct
  source 1..75: mol_type = other DNA
gaccatcgatcagcacgccaatatggtttcattactgcaacaactgattcaggatgcctggcaaaatgcggcgtt

SEQ ID NO: 799990 - DNA, 75 bp, synthetic construct
  source 1..75: mol_type = other DNA
cggatgtcgatgcctggggcgagtccaaactggcgcaggccgataagcacaccaatgccggaatgctgcgcgagc

SEQ ID NO: 799991 - DNA, 75 bp, synthetic construct
  source 1..75: mol_type = other DNA
atcacagaatgtgattaccggaatttatgcaagtaaagaatcctgcctccaggcaagagacgagcaaaaaatttc

SEQ ID NO: 799992 - DNA, 75 bp, synthetic construct
  source 1..75: mol_type = other DNA
tctggcaaacgctgggactggagtggctctaccgcctgctttcgcagccgagccgcattaagcgtcagcttcgtt

SEQ ID NO: 799993 - DNA, 75 bp, synthetic construct
  source 1..75: mol_type = other DNA
acatgcaggggatgcgtaaagcagatatcatcagacgactggaaaatgaactgggggaaacggcagaggatgtgt

SEQ ID NO: 799994 - DNA, 75 bp, synthetic construct
  source 1..75: mol_type = other DNA
ctttcagtccgtgacctgctgcctcacatgcaggggatgcgtaaagcagatatcatcagacgactggaaaatgaa

SEQ ID NO: 799995 - DNA, 75 bp, synthetic construct
  source 1..75: mol_type = other DNA
accgggcataccgatgcgatggcctacaaaaacaatatctacaacaactggaacctttcgggcgatcgcgcgctt

SEQ ID NO: 799996 - DNA, 75 bp, synthetic construct
  source 1..75: mol_type = other DNA
ccgatcatggcgatttacagttaagcgccgcgtcggtttatttcaaagcagcccgtagcgccagccaaagcctga

SEQ ID NO: 799997 - DNA, 75 bp, synthetic construct
  source 1..75: mol_type = other DNA
ccagcctcgtgctcggcctgatgctgtgctgcaccgcgcaggccaacgaccataaaatcctcggcgtcattgcca

SEQ ID NO: 799998 - DNA, 75 bp, synthetic construct
  source 1..75: mol_type = other DNA
tgccacgtaacgaaaccaacgatctggcgctgaaacttcctgtttgccgaattgttaaacgcatacaactctcag

SEQ ID NO: 799999 - DNA, 75 bp, synthetic construct
  source 1..75: mol_type = other DNA
aaatgctgacaacactcacgattttgatggtatttctctgtgtcggcagttatctgttaagtccaaaatggcagg

SEQ ID NO: 800000 - DNA, 75 bp, synthetic construct
  source 1..75: mol_type = other DNA
tgatgacggtttttctgataacaggtgagccacagaaagtgattaccggaatttatgccagtaaagaatcctgcc

SEQ ID NO: 800001 - DNA, 75 bp, synthetic construct
  source 1..75: mol_type = other DNA
atgaataacaacaccacggcaccgacctatacgctgcgtggcttacagttgattggttggcgtgatatgcagcat

SEQ ID NO: 800002 - DNA, 75 bp, synthetic construct
  source 1..75: mol_type = other DNA
ccgcgtcagcgcaaaacggtggtcgccgatggtattggccagggatataaagaagttcaggaaatcagccctaat

SEQ ID NO: 800003 - DNA, 75 bp, synthetic construct
  source 1..75: mol_type = other DNA
attatgaccacgccacgttagaaggtggtgatgtgctggtgattggtcggggggccgtgttgatcggcatgtctg

SEQ ID NO: 800004 - DNA, 75 bp, synthetic construct
  source 1..75: mol_type = other DNA
cgactgcgcggcgaaaatgctgaattatacgcggcgttggcaacggtgctttattaccaggaggggcagcatatg

SEQ ID NO: 800005 - DNA, 75 bp, synthetic construct
  source 1..75: mol_type = other DNA
agaagagattaagcgagcactgacagcattatcacagatggctagtaagggcaagattcaggctgaagagcttaa

SEQ ID NO: 800006 - DNA, 75 bp, synthetic construct
  source 1..75: mol_type = other DNA
gccgggaagttccggcaaaatgggcgtgtattcataaagtcattgatgaaattatcgccgataaaagcaacaacg

SEQ ID NO: 800007 - DNA, 75 bp, synthetic construct
  source 1..75: mol_type = other DNA
cagagaattaaatgacactcaaaaagctgtagctgatggtatcgcaaatggcctgttaagtgcattaaagggact

SEQ ID NO: 800008 - DNA, 75 bp, synthetic construct
  source 1..75: mol_type = other DNA
ttgtaaggtcaaaggtggaacccacagaccaagcattgactggtgacatgaactctttagccgctgttttatggg

SEQ ID NO: 800009 - DNA, 75 bp, synthetic construct
  source 1..75: mol_type = other DNA
gggattcggcctattacagtcacgaagacaactactatgccagcggttcgctggagtctcgctggctgggagatg

SEQ ID NO: 800010 - DNA, 75 bp, synthetic construct
  source 1..75: mol_type = other DNA
tcatggaaaggaatgtcgataaaactgtttccaagattgagcagcgtcttaaaaacactaaagcgtttaagatta

SEQ ID NO: 800011 - DNA, 75 bp, synthetic construct
  source 1..75: mol_type = other DNA
tcagcatggagataaggtggtgcagccgttggtgcaaaaactggataagcagcaggcgctttcgcagcgaatgcg

SEQ ID NO: 800012 - DNA, 75 bp, synthetic construct
  source 1..75: mol_type = other DNA
tcttcaacggtggcgggctgtcgccgttaaataaaataagcccgcctcatccgccgaaaccgactaccgtggcgg

SEQ ID NO: 800013 - DNA, 75 bp, synthetic construct
  source 1..75: mol_type = other DNA
tgctgctggacgcgaagaatccgcaaagcgcaggcaaccggcgcattgagattatggtgctaaccaaaagcgcct

SEQ ID NO: 800014 - DNA, 75 bp, synthetic construct
  source 1..75: mol_type = other DNA
ggaagtggtaaaagtcttggtgaacattttggcgacttgatgaaaagcatgtcaaacggtattgatgatttaacc

SEQ ID NO: 800015 - DNA, 75 bp, synthetic construct
  source 1..75: mol_type = other DNA
gagtggaaacattcacacaagatttaaaggttatcaaaccgtcagtaaatattcagcctcagacaatcaatatca

SEQ ID NO: 800016 - DNA, 75 bp, synthetic construct
  source 1..75: mol_type = other DNA
gtggaaaactgaaaggtgtagctggtggtgtaggtagtgaaccgccccgggtttcctggagagtgttttatctgt

SEQ ID NO: 800017 - DNA, 75 bp, synthetic construct
  source 1..75: mol_type = other DNA
tcccccagagtcatgagcgtcgtgctgccatgcaggccatcgcagaggtggaagcaaaatatgagcggggtaccc

SEQ ID NO: 800018 - DNA, 75 bp, synthetic construct
  source 1..75: mol_type = other DNA
cgaatcattatcccggaggaggtgacccgtagtgtgcaaaatgtggcggacgctgaagcagcagcaaaaacggaa

SEQ ID NO: 800019 - DNA, 75 bp, synthetic construct
  source 1..75: mol_type = other DNA
aaaaagaaatgatgcggaactaaaaaacagaaaaactaaacgggattatgattatgaacgcagggtttctgatat

SEQ ID NO: 800020 - DNA, 75 bp, synthetic construct
  source 1..75: mol_type = other DNA
ggaaccctttaaatgaattaataaacggggggatcagaatattccggctgaaacgccgtatgcgccgggagaaca

SEQ ID NO: 800021 - DNA, 75 bp, synthetic construct
  source 1..75: mol_type = other DNA
actccggagccggataataaaatcccggcaccagtgcagatacctgaacagataaatacactgccagacagtctg

SEQ ID NO: 800022 - DNA, 75 bp, synthetic construct
  source 1..75: mol_type = other DNA
catcaatgaggccattcatgccgcccggcatgagaagggggataccggtccggaagaacgcacgttcactgtcct

SEQ ID NO: 800023 - DNA, 75 bp, synthetic construct
  source 1..75: mol_type = other DNA
gcctgcacggtgaagagcgcctgctcaatgccgcgcggctgaccgggggacgtatcacagagcctgacgagttga

SEQ ID NO: 800024 - DNA, 75 bp, synthetic construct
  source 1..75: mol_type = other DNA
ccggatgcctatcgccaccgtcggtcgcaatgtcggttttgacgatcaactctatttctcgcgagtatttaaaaa

SEQ ID NO: 800025 - DNA, 75 bp, synthetic construct
  source 1..75: mol_type = other DNA
tgcgaccgagagttgtaaatcaattaggtacagggactgtttttcttaaggcagatcaattaccatctttaaaat

SEQ ID NO: 800026 - DNA, 75 bp, synthetic construct
  source 1..75: mol_type = other DNA
agcaaacgtgtcactgtacaggatatcggctggttttctccggggctgacagcacaggacctgcgggggaaaaag

SEQ ID NO: 800027 - DNA, 75 bp, synthetic construct
  source 1..75: mol_type = other DNA
tctgatatatattttgatctgttttttgtgttcgttgctgccggaacttttttatgggtgattatgcatagtatt

SEQ ID NO: 800028 - DNA, 75 bp, synthetic construct
  source 1..75: mol_type = other DNA
gctgcgcggcgagcgtcagttctgcaggcatattgccgtgtttgtgaaaacatcgccgttcgccgtaaatgagcc

SEQ ID NO: 800029 - DNA, 75 bp, synthetic construct
  source 1..75: mol_type = other DNA
atgttgaccgtagacgtagccgccgacattgtcgccagcggcattaaagtagtgattttgctggtttcggtactg

SEQ ID NO: 800030 - DNA, 75 bp, synthetic construct
  source 1..75: mol_type = other DNA
gtgaatgagaaaacggcgctgctgaagaagaaatccgccaccgagcttggcgagctggcaaccagtatcaacacc

SEQ ID NO: 800031 - DNA, 75 bp, synthetic construct
  source 1..75: mol_type = other DNA
ataactaccgggccgggatggtgatggagcattgggacgctgagaagaaaacgatgacacggcacaccattgacc

SEQ ID NO: 800032 - DNA, 75 bp, synthetic construct
  source 1..75: mol_type = other DNA
gttaaaacacttcacgaaggcgtcaaaaaaatgtgcctggtgcacattggaaataatctaccagcagaaaaaaaa

SEQ ID NO: 800033 - DNA, 75 bp, synthetic construct
  source 1..75: mol_type = other DNA
tgctggcggaaaacggtctggagggtgaaacgatggcccgctttattgcggccggtaaaaagtacccgtcaccgt

SEQ ID NO: 800034 - DNA, 75 bp, synthetic construct
  source 1..75: mol_type = other DNA
gagcgacatgattgccagtgtgcggcgttttgaaatgcagatgaaggtaataagcagcgtcgatgataacgcaag

SEQ ID NO: 800035 - DNA, 75 bp, synthetic construct
  source 1..75: mol_type = other DNA
ttgtaactaccgatgacattgttcacgaggttaatctggaaggaaagcgtattggctacgtaattaaaacagaaa

SEQ ID NO: 800036 - DNA, 75 bp, synthetic construct
  source 1..75: mol_type = other DNA
cgaagtcagcctggaaggaaagcgtattggctacgtgattaaaacagaaaataaagaaacccctttcactgtggt

SEQ ID NO: 800037 - DNA, 75 bp, synthetic construct
  source 1..75: mol_type = other DNA
tcctgaaaaattttccggttatggcttttccatagccccagagcagggggaacttatctacttactgtgccgggc

SEQ ID NO: 800038 - DNA, 75 bp, synthetic construct
  source 1..75: mol_type = other DNA
tgagcgttaccgggctggatgacccgcactgtgaaaatcagcggtgtggggcgtccgtatctggcagaggaaggc

SEQ ID NO: 800039 - DNA, 75 bp, synthetic construct
  source 1..75: mol_type = other DNA
aggtgtgaggcagggcagtgccaccgtggtgggcatgacttctgacggcgatctggtggcggcggcggtggtgac

SEQ ID NO: 800040 - DNA, 75 bp, synthetic construct
  source 1..75: mol_type = other DNA
tatatattaaatgacaatgcagagcctgattttttagattatattcgtaacccacagaatggttttatttctgta

SEQ ID NO: 800041 - DNA, 75 bp, synthetic construct
  source 1..75: mol_type = other DNA
aaaccctgaaagatcttggtggccctgttgattttattcttattgacggttttcctcttgctgacggcccaagcc

SEQ ID NO: 800042 - DNA, 75 bp, synthetic construct
  source 1..75: mol_type = other DNA
gatccacagaatggttttatttctataacattgccgataaaacgaggcacagagttagcactgaagataagttaa

SEQ ID NO: 800043 - DNA, 75 bp, synthetic construct
  source 1..75: mol_type = other DNA
acccggcaagatggattacacctcgcgcccgctggacgttgcattacagcaggacggctggctggccgtgcagac

SEQ ID NO: 800044 - DNA, 75 bp, synthetic construct
  source 1..75: mol_type = other DNA
atttacggtgttaccctgttcgaacatgatggtaaatctatcctcagcctttttgataagaagggttatccggta

SEQ ID NO: 800045 - DNA, 75 bp, synthetic construct
  source 1..75: mol_type = other DNA
atccggacaaatcttggcagcacgagtgctgtcagttttgatggcagctctgatgttacgccgggcgtgaccggc

SEQ ID NO: 800046 - DNA, 75 bp, synthetic construct
  source 1..75: mol_type = other DNA
catatgtggatgagaatgacgagttcacggacggtgagccagccacaggcgtgaagccgacgccgttgcttgctc

SEQ ID NO: 800047 - DNA, 75 bp, synthetic construct
  source 1..75: mol_type = other DNA
ttacaggcggtttactctgccgtcgcgatgggcggcagtatcgctatcatgaccgttttcgccggtttcctgtat

SEQ ID NO: 800048 - DNA, 75 bp, synthetic construct
  source 1..75: mol_type = other DNA
tgcggcgtagtgcgctggggcattatgggagcaactacggcgttgccgtggttgatagtggtgcaaattctgcat

SEQ ID NO: 800049 - DNA, 75 bp, synthetic construct
  source 1..75: mol_type = other DNA
ttgagtgaatcaggagaacccggttctcttgatgatatgtatcttgacattcaagcccgattacatggcggctac

SEQ ID NO: 800050 - DNA, 75 bp, synthetic construct
  source 1..75: mol_type = other DNA
atatagaggatataaatctatataggataaaggatgtttttaaaatatctattcctgttggtatctcatctctct

SEQ ID NO: 800051 - DNA, 75 bp, synthetic construct
  source 1..75: mol_type = other DNA
gagagacatgcataaagtattattaaaagcctatcgtggagcaatttgtattggcataatagtttatatcgggta

SEQ ID NO: 800052 - DNA, 75 bp, synthetic construct
  source 1..75: mol_type = other DNA
ctggcaaatgcctcgacaccgggttttcgcgcgcagttaaacgccttacgtgcggtgccggtggaagggctttct

SEQ ID NO: 800053 - DNA, 75 bp, synthetic construct
  source 1..75: mol_type = other DNA
aaatttcaaaaataattgataactttagcggaatcagggttgtatttactactactgctaatgaactaaagcttt

SEQ ID NO: 800054 - DNA, 75 bp, synthetic construct
  source 1..75: mol_type = other DNA
accctgcaggagaaagtctccggcctgcgcgtcgtgcaatcgcataatcagcaggaactggagggcgtcccgctg

SEQ ID NO: 800055 - DNA, 75 bp, synthetic construct
  source 1..75: mol_type = other DNA
atgaaagatattatatttaataaaagagagaaagaaaaaaacgaacttattgctaacatcttacaaggatactgt

SEQ ID NO: 800056 - DNA, 75 bp, synthetic construct
  source 1..75: mol_type = other DNA
tataaggaatgtgtatgcgaacccatcgataattatcgaaccctagtctacaactcaaaatatatagaagataat

SEQ ID NO: 800057 - DNA, 75 bp, synthetic construct
  source 1..75: mol_type = other DNA
gaccagtgaaatgctggtgaaattgctcgaccaggggaccgtaaagttaaacgatccgctaagtaaatatgctcc

SEQ ID NO: 800058 - DNA, 75 bp, synthetic construct
  source 1..75: mol_type = other DNA
aaaccatatacgcagttgtttgaagagcagattacccgtccgctggggatgaaagacaccacatacacaccatca

SEQ ID NO: 800059 - DNA, 75 bp, synthetic construct
  source 1..75: mol_type = other DNA
cgactcgcgagcaacgttggaaatacctttccaccgccaaactaaaagccgcaccgggtagtcaggctgcatatt

SEQ ID NO: 800060 - DNA, 75 bp, synthetic construct
  source 1..75: mol_type = other DNA
aatgctgttaacggcagtttttacaagctgacgtttgcgcccaccctcaaggcaggaggtctgggggacttcttc

SEQ ID NO: 800061 - DNA, 75 bp, synthetic construct
  source 1..75: mol_type = other DNA
cgttatccagatttttataatgaagaaatattcagggaggtgaccgaagagagagagtcaacatttaaagaactt

SEQ ID NO: 800062 - DNA, 75 bp, synthetic construct
  source 1..75: mol_type = other DNA
gctggcctgccggtttctgaagcgaccggttctatggtggttgatatcggtggtggtaccactgaagttgctgtt

SEQ ID NO: 800063 - DNA, 75 bp, synthetic construct
  source 1..75: mol_type = other DNA
acttaacccgtcgcatgcgggcggcgtgattaccctgcaacgccattaccaggggatagacagccgctggacaca

SEQ ID NO: 800064 - DNA, 75 bp, synthetic construct
  source 1..75: mol_type = other DNA
caaactgggcgtacgcattgatgaagccagcaaattaagcctgattttcaatagtgtggatatcaaagcagatga

SEQ ID NO: 800065 - DNA, 75 bp, synthetic construct
  source 1..75: mol_type = other DNA
attaatgaactttcataccgtgccgatgggcaaagcgggatgaactttggtttaaaaccgtccaccaacgataca

SEQ ID NO: 800066 - DNA, 75 bp, synthetic construct
  source 1..75: mol_type = other DNA
caacatcgatttaagcagtgtgcaaaatgtggaagtgctgcgtggccccttctctgctctgtatggcaacgcgtc

SEQ ID NO: 800067 - DNA, 75 bp, synthetic construct
  source 1..75: mol_type = other DNA
tcggcgatggcttgtttaccgctgcgttattccagaccgataccgatgatgaaatcgttgttgatagcagtagcg

SEQ ID NO: 800068 - DNA, 75 bp, synthetic construct
  source 1..75: mol_type = other DNA
gttccggtcactttcactactggcctgaactatgaaaacatgagtgaaaaccgcaagggttacaataacttccgc

SEQ ID NO: 800069 - DNA, 75 bp, synthetic construct
  source 1..75: mol_type = other DNA
acatctattccgatgcatggactgaacgccataaccagtctgaatcctatgtgattaatgctgccggaaagaaaa

SEQ ID NO: 800070 - DNA, 75 bp, synthetic construct
  source 1..75: mol_type = other DNA
ccgattcagatatgatttggaacaagatactgccagttaatgatgcaggactaagtactcgtcatcagctcacta

SEQ ID NO: 800071 - DNA, 75 bp, synthetic construct
  source 1..75: mol_type = other DNA
atgaaataagagaaaagttcaaaaatagcccatcaggagaactggagtatttgagccagctcagagagctttatg

SEQ ID NO: 800072 - DNA, 75 bp, synthetic construct
  source 1..75: mol_type = other DNA
aatatcaggcaatcaggagaagaactcccattatgagctcttcctagatgaattcgaaaaaaaacacattgaaaa

SEQ ID NO: 800073 - DNA, 75 bp, synthetic construct
  source 1..75: mol_type = other DNA
cgttcctgccccgggtatccggaagtgcagagcaggtattatgcctcgaaaacctaggtggcgtaaggaaaaaag

SEQ ID NO: 800074 - DNA, 75 bp, synthetic construct
  source 1..75: mol_type = other DNA
agtacagctccagcaggcaacaactcattctgagacgatggctgccagagtacaggttgccttcgattcaatttc

SEQ ID NO: 800075 - DNA, 75 bp, synthetic construct
  source 1..75: mol_type = other DNA
tacgctttcggccctacctgccagtggggtaatggatttagatctcggtatgagtgtggttggaatcgttcagta

SEQ ID NO: 800076 - DNA, 75 bp, synthetic construct
  source 1..75: mol_type = other DNA
gctgatgcctggcgtgcgttatgactatgacaactacctgtcaaaccacaatatctctccccgctttatgacgga

SEQ ID NO: 800077 - DNA, 75 bp, synthetic construct
  source 1..75: mol_type = other DNA
attacaccttcaaaacacgacttgactggcaaaaagttgaagtgggcaatttctcgcatcagccttacttcggtg

SEQ ID NO: 800078 - DNA, 75 bp, synthetic construct
  source 1..75: mol_type = other DNA
tccttaaacatggatttcacgcatcaaccgagcgggttggtgtgggcgaatacgctggcctggcaagaagcgcgt

SEQ ID NO: 800079 - DNA, 75 bp, synthetic construct
  source 1..75: mol_type = other DNA
gtgctgttccccaacttttcgctcggcgaagagtatgaacatgcgccgccggcgacgaatcgccaaatctcaccg

SEQ ID NO: 800080 - DNA, 75 bp, synthetic construct
  source 1..75: mol_type = other DNA
gcgagatgaaattttagcaaatagtgcgatcgccggtgtttatgcaaaatctgatgacggaaaatcagccattta

SEQ ID NO: 800081 - DNA, 75 bp, synthetic construct
  source 1..75: mol_type = other DNA
tggttgggatcatattagtgattatacccgtcacgatcatgacatctggtacaccgaactttcatgtacatatgg

SEQ ID NO: 800082 - DNA, 75 bp, synthetic construct
  source 1..75: mol_type = other DNA
tcgataatttattcgataaagaatacgttggttctgtcattgtcaatgagtcaaacgggcgatattacgaacctg

SEQ ID NO: 800083 - DNA, 75 bp, synthetic construct
  source 1..75: mol_type = other DNA
ctggaacgccagcctatgaaagagcgctgaataacgctgcgaatgccatcaggccgctgcttgccactgaggcaa

SEQ ID NO: 800084 - DNA, 75 bp, synthetic construct
  source 1..75: mol_type = other DNA
gatgccgtggagagggcaatgggggcagatttgaggaataacgcagcgcggtatttgggggctggagaggccgcc

SEQ ID NO: 800085 - DNA, 75 bp, synthetic construct
  source 1..75: mol_type = other DNA
gtttatgaaagccctatggccaggaatgcgctcttacgtctggcaaacaccaaagcaggaacgccagcctatgaa

SEQ ID NO: 800086 - DNA, 75 bp, synthetic construct
  source 1..75: mol_type = other DNA
ccgttgagctggcaaaacgcattaccgaggcactggcgatccccgtcattggcattggtgcgggtaacgtcactg

SEQ ID NO: 800087 - DNA, 75 bp, synthetic construct
  source 1..75: mol_type = other DNA
acgcttcgccaccatcactgcttacgattatagctttgcaaaattgtttgccgacgaaggaattaacgtcatgct

SEQ ID NO: 800088 - DNA, 75 bp, synthetic construct
  source 1..75: mol_type = other DNA
cgaagcactggcgatcccggttattggcattggcgcaggcaacgtcactgacgggcagatcctcgtgatgcacga

SEQ ID NO: 800089 - DNA, 75 bp, synthetic construct
  source 1..75: mol_type = other DNA
gttaatcgtcaatcttgatactcaccgtcccctcgtcctgcttcccggccgtgatcagcgtacgctggcgacctg

SEQ ID NO: 800090 - DNA, 75 bp, synthetic construct
  source 1..75: mol_type = other DNA
tacagacatatacctctgatacgtcttgttgccagtgagttgtcaccaaagaaatcacctgagccagaactgtct

SEQ ID NO: 800091 - DNA, 75 bp, synthetic construct
  source 1..75: mol_type = other DNA
caggcctccaaagcgagggcttctggacccatggagggagtggttaaaagagcaacgagaatgtggtaattataa

SEQ ID NO: 800092 - DNA, 75 bp, synthetic construct
  source 1..75: mol_type = other DNA
aatggttggaaagccagttgatacaagtggcgccataagagctatcgacggagcagtaaacgaacttgggaaact

SEQ ID NO: 800093 - DNA, 75 bp, synthetic construct
  source 1..75: mol_type = other DNA
tgcttcccggccgtgatcagcgtacgctggcgacctggttcagaaaatatccggaaatacaggttgtctcgcgtg

SEQ ID NO: 800094 - DNA, 75 bp, synthetic construct
  source 1..75: mol_type = other DNA
gtctgatgtgtgaaaaagaaccggagctgaaaatagcgcagcaactggcactcgagttctaccgtattctgaaaa

SEQ ID NO: 800095 - DNA, 75 bp, synthetic construct
  source 1..75: mol_type = other DNA
cgacaccgcacgacgcgctcccgcgcggcgggtgggggcggcgaagccgacccttggacttgtgacaataactgt

SEQ ID NO: 800096 - DNA, 75 bp, synthetic construct
  source 1..75: mol_type = other DNA
acttaatccgtcacatgcgggcggcgtgattactctgcaacgccattaccaggggatagacagccgctggacaca

SEQ ID NO: 800097 - DNA, 75 bp, synthetic construct
  source 1..75: mol_type = other DNA
tgcggcggatatctcattatcccgtccggtttcgtcttctgatgattacgataaattgtgtcgcacgtatcacat

SEQ ID NO: 800098 - DNA, 75 bp, synthetic construct
  source 1..75: mol_type = other DNA
cgcgcccccggcgcgggggcggtggggcggctggccgcccttggacttgtgacaataactttcctgttgatacat

SEQ ID NO: 800099 - DNA, 75 bp, synthetic construct
  source 1..75: mol_type = other DNA
ttatatgggcgatattatggcagatgatgaaaatacggccaaagcgccgtcttatactctcgtcggcttattcac

SEQ ID NO: 800100 - DNA, 75 bp, synthetic construct
  source 1..75: mol_type = other DNA
gcctggcgatgtcgattacaccgtctcaaccacgcgctttacgacccacggctatcgtgatcatagtggcgcaca

SEQ ID NO: 800101 - DNA, 75 bp, synthetic construct
  source 1..75: mol_type = other DNA
ccgtttttcccgcgctgcttgtcctttcccccaccgtttttgccgctgatgaacagaccatgattgtcagtgccg

SEQ ID NO: 800102 - DNA, 75 bp, synthetic construct
  source 1..75: mol_type = other DNA
ccgtggcgcagtggcgataccacgacgcgagagtatcgctggcagggcgataacctcacgcttatcaatatcaat

SEQ ID NO: 800103 - DNA, 75 bp, synthetic construct
  source 1..75: mol_type = other DNA
ctgcctgtagccacaactcttcacttcctccctttaccgccagtggttttgctgaagaccagggcgcggtacgta

SEQ ID NO: 800104 - DNA, 75 bp, synthetic construct
  source 1..75: mol_type = other DNA
ggctggaagcgcccgaaggttcgcaattactgttagtggcaaactctgatttctgtcgttggcaacccaacgaga

SEQ ID NO: 800105 - DNA, 75 bp, synthetic construct
  source 1..75: mol_type = other DNA
tgtcactcgtttcctgcgggttgttcgtgaccagcgggtcaatgaggtctgtcgtatgctcggcatactgaaccg

SEQ ID NO: 800106 - DNA, 75 bp, synthetic construct
  source 1..75: mol_type = other DNA
cgtgaccagcgggtcaatgaggtctgtcgcatgctcggcatactgaaccgcaacgcgccttatatttctgactgg

SEQ ID NO: 800107 - DNA, 75 bp, synthetic construct
  source 1..75: mol_type = other DNA
ctggcactcccgccagaatccccgctggattgaggcgggttgcccgactgttaaggattcacatacctggctgaa

SEQ ID NO: 800108 - DNA, 75 bp, synthetic construct
  source 1..75: mol_type = other DNA
aaacgcagccattgcaggctgggtgaatgtgttcagcatgggtaatggcctggcggggactgtgggctggaatgc

SEQ ID NO: 800109 - DNA, 75 bp, synthetic construct
  source 1..75: mol_type = other DNA
gggaactgaatgcgttgaaggctgcgcaggataaatatgggcctgttccggcggatgcgacggaagagcagcggc

SEQ ID NO: 800110 - DNA, 75 bp, synthetic construct
  source 1..75: mol_type = other DNA
gcgactggcggcaggggttgttattgcgctggcgcacgacgttatcattacgctgggtattttgtcgttattcca

SEQ ID NO: 800111 - DNA, 75 bp, synthetic construct
  source 1..75: mol_type = other DNA
agacggtctccacgctggcaactgttgctgccggtctggccggtggtctggtgggagactcgggggcttcagcgg

SEQ ID NO: 800112 - DNA, 75 bp, synthetic construct
  source 1..75: mol_type = other DNA
agaaagcaatgaatgagagggatgctgtagggctggctctggcaacaggtacagtggcactactccccggtagtg

SEQ ID NO: 800113 - DNA, 75 bp, synthetic construct
  source 1..75: mol_type = other DNA
cgggggccgggtttggatatggggttggcaattatgtggtgaagcctgttgcaaatacagcaggcaagtggataa

SEQ ID NO: 800114 - DNA, 75 bp, synthetic construct
  source 1..75: mol_type = other DNA
ggcactgaatcaggtaatgacgttcctgccccgggtatccggaagtgcagagcaggtattatgcctcgaaaacct

SEQ ID NO: 800115 - DNA, 75 bp, synthetic construct
  source 1..75: mol_type = other DNA
ttctgaaaacccaaaataaatcacagctaagcagctggttcactcgagtccacgaaagcggttcagcagaatttc

SEQ ID NO: 800116 - DNA, 75 bp, synthetic construct
  source 1..75: mol_type = other DNA
ttacaggcagtgaaaccatcgtcagggatgctgttgccaaatggcgtaaaggctggaacccaccagttactactg

SEQ ID NO: 800117 - DNA, 75 bp, synthetic construct
  source 1..75: mol_type = other DNA
gtggcacaggaatatactgttgaacaactaaaccatggccgtaaagtttatgactttatgcgctgggactactgg

SEQ ID NO: 800118 - DNA, 75 bp, synthetic construct
  source 1..75: mol_type = other DNA
atggcggcgctgctgtctatccttgtgtacgtaggtttccgctttgagtggcgactggcggcaggggtcgttatt

SEQ ID NO: 800119 - DNA, 75 bp, synthetic construct
  source 1..75: mol_type = other DNA
tctggcagacattgttgcggaatacgcccgtattcaaaaggaagaaacatcaaaaatattgtatcaatatcaagg

SEQ ID NO: 800120 - DNA, 75 bp, synthetic construct
  source 1..75: mol_type = other DNA
gatcgacaacaaagatcctctgtctggtgcaatttcaaatggtatcggttctgctgccgggtatggtatcggtaa

SEQ ID NO: 800121 - DNA, 75 bp, synthetic construct
  source 1..75: mol_type = other DNA
tcaaacccgacacccgtaaagcaattctctggtataaggaagcagctgaacaagggtatgctcatgctcaatata

SEQ ID NO: 800122 - DNA, 75 bp, synthetic construct
  source 1..75: mol_type = other DNA
atgtcgaagaattaccatattgctgttttacctggggatgggatcgggccggaagtcatgacccaggccctgaaa

SEQ ID NO: 800123 - DNA, 75 bp, synthetic construct
  source 1..75: mol_type = other DNA
tattgcccggagatgggatcgggccggaagtgatgacccaggcgctgaaagtgctggacgccgtgcgcaaccgct

SEQ ID NO: 800124 - DNA, 75 bp, synthetic construct
  source 1..75: mol_type = other DNA
ttgcagcaattacctgtattagccaacccaagaaaacgacgttgcgtgataaagccatggtgaattatgcctttg

SEQ ID NO: 800125 - DNA, 75 bp, synthetic construct
  source 1..75: mol_type = other DNA
tcgcaatttttatagttgcagcaattacctgtattagccaacccaagaaaacgacgttgcgtgataaagccatgg

SEQ ID NO: 800126 - DNA, 75 bp, synthetic construct
  source 1..75: mol_type = other DNA
tctacctgaaagggctgggagtcaaacccgatacccgtaaagcaattctctggtataaagaagccgctaaacaag

SEQ ID NO: 800127 - DNA, 75 bp, synthetic construct
  source 1..75: mol_type = other DNA
cgagcagagcaaagctgctcagatgcatggcgcagatgtactttcctgtaacgatgccccaggcggtgaagcctg

SEQ ID NO: 800128 - DNA, 75 bp, synthetic construct
  source 1..75: mol_type = other DNA
agtgggagcacagagcgggaagaatgctgctgagaataacctggttggtggcacagagtccgagcagagcaaagc

SEQ ID NO: 800129 - DNA, 75 bp, synthetic construct
  source 1..75: mol_type = other DNA
agcgaaaagtataaagtgtcagcctgtgtaaatcctctcgccaccctcccctgcattcagcaaaatcagactcca

SEQ ID NO: 800130 - DNA, 75 bp, synthetic construct
  source 1..75: mol_type = other DNA
gcccgcatcgcgtttgaatctgctcgtaaacgtcgccataaagtgacgtctatcgacaaagccaacgtgctgcaa

SEQ ID NO: 800131 - DNA, 75 bp, synthetic construct
  source 1..75: mol_type = other DNA
tcctctattttatggcgggagattgttaacgagatcgccacggaatatccggacatcgaactggcgcatatgtac

SEQ ID NO: 800132 - DNA, 75 bp, synthetic construct
  source 1..75: mol_type = other DNA
tatcagtcagggaattaaggccggggaaacgcaggaagaagaccgcaacgggcgcaatgtagcgggggatgtgtg

SEQ ID NO: 800133 - DNA, 75 bp, synthetic construct
  source 1..75: mol_type = other DNA
tcactcgagtccacgaaagcggatcagcagaatttcggtgcgtggcagcggggatggaagctgatgctgcagcta

SEQ ID NO: 800134 - DNA, 75 bp, synthetic construct
  source 1..75: mol_type = other DNA
gcagctctaatgttgattatcggctgggaaaaacgcttcttccgccgtgcggcaccgcagattgctaaggagatc

SEQ ID NO: 800135 - DNA, 75 bp, synthetic construct
  source 1..75: mol_type = other DNA
atgagctactactatgacctccgggccggcgatgaggagatgattctggagtggggacggcccgttaaattacgc

SEQ ID NO: 800136 - DNA, 75 bp, synthetic construct
  source 1..75: mol_type = other DNA
caagcagacggcgtcgggctcacgaatatttttttagagcctcatacgtccagcgaaaacagcgagtattcaaaa

SEQ ID NO: 800137 - DNA, 75 bp, synthetic construct
  source 1..75: mol_type = other DNA
tgccgcagcgctgtgggccaacaatgtcaaactgcgcatgccgcgcagccgtatccgcattatgcaggccatcat

SEQ ID NO: 800138 - DNA, 75 bp, synthetic construct
  source 1..75: mol_type = other DNA
tgctgcagcgctgtgggccaacaatgtcaaactacgcatgccgcgcagccgtatccgcattatgcaggccattat

SEQ ID NO: 800139 - DNA, 75 bp, synthetic construct
  source 1..75: mol_type = other DNA
tcatgtgggcgggaccaaacgcggtaattggtggtttactgtttggttttggcatcgtgctggcaggcggctgcg

SEQ ID NO: 800140 - DNA, 75 bp, synthetic construct
  source 1..75: mol_type = other DNA
catggtggtatttatacagacacagatatgatgcctgcatactctaaacaagtaatttttaaaattatgatgcag

SEQ ID NO: 800141 - DNA, 75 bp, synthetic construct
  source 1..75: mol_type = other DNA
gaaagaggtctgctggatttctccggaaacaaagtttttggaaaaatggtgctggatctgcgtcagtctcctcct

SEQ ID NO: 800142 - DNA, 75 bp, synthetic construct
  source 1..75: mol_type = other DNA
gcattatgagtggaatatcatttatgtcacgctgaaaacctgtggctggagccgaaatggccaaagcaaaacgcc

SEQ ID NO: 800143 - DNA, 75 bp, synthetic construct
  source 1..75: mol_type = other DNA
tgttgcgcgtgacgttgtccaggtcccaaagcagcgcagtatcgctgctgacggctctgttacctggtctggctg

SEQ ID NO: 800144 - DNA, 75 bp, synthetic construct
  source 1..75: mol_type = other DNA
gttgccgaaagagtctcgttactggttacgtgaaattttgttatgtgccgatgaagaaccctggcttgccgggcg

SEQ ID NO: 800145 - DNA, 75 bp, synthetic construct
  source 1..75: mol_type = other DNA
gttgccgaaagaatcccgttactggttacgtgagattttgttatgcgctgatggagaaccctggctcgccgggcg

SEQ ID NO: 800146 - DNA, 75 bp, synthetic construct
  source 1..75: mol_type = other DNA
tatctgtcccgcacagttctgactccagaacaggctgataacatacgaaaaattctgcagactcagggactatat

SEQ ID NO: 800147 - DNA, 75 bp, synthetic construct
  source 1..75: mol_type = other DNA
gcaacctattggccgcccgtacctgaccctcgccatcgacgtgttcacccgctgcgtgctcggcatggtcgtcac

SEQ ID NO: 800148 - DNA, 75 bp, synthetic construct
  source 1..75: mol_type = other DNA
gtgaacatatacaagtacattatgccgattcagatatgatctggaacaagctgctgccagttaatgatgctggac

SEQ ID NO: 800149 - DNA, 75 bp, synthetic construct
  source 1..75: mol_type = other DNA
acacatgctaacaccagaaaattttgaccagaggcttccacttagcgacgaacagaaaaatagccataaaacaga

SEQ ID NO: 800150 - DNA, 75 bp, synthetic construct
  source 1..75: mol_type = other DNA
tcactcgagtccacgaaagcggatcagcagaatttcggagcgtggctgcggggatggaagctgatgctgcagcta

SEQ ID NO: 800151 - DNA, 75 bp, synthetic construct
  source 1..75: mol_type = other DNA
tcactcgagtccacgaaagcggatcagcagaatttcggagcgtggcagcggggatggaagctgatgctgctgcta

SEQ ID NO: 800152 - DNA, 75 bp, synthetic construct
  source 1..75: mol_type = other DNA
aaatagcgcagcaactggcactcgagttctaccgtattctgaaaacccaaaataaatcacagctaagtagctcgt

SEQ ID NO: 800153 - DNA, 75 bp, synthetic construct
  source 1..75: mol_type = other DNA
taaaaacattatcaagaagatattaacagaaatatctaaaatgccagaagatagcatttttactaagatcaatac

SEQ ID NO: 800154 - DNA, 75 bp, synthetic construct
  source 1..75: mol_type = other DNA
cagcagaatactccacaaaaaaatattgattttattaatctatataatgaaataaggaagaaatacaacaacaac

SEQ ID NO: 800155 - DNA, 75 bp, synthetic construct
  source 1..75: mol_type = other DNA
ccaacagtaaatggccccggaccctgccggaaatccctgcgggagagtatgacaccattattctgggctacagtc

SEQ ID NO: 800156 - DNA, 75 bp, synthetic construct
  source 1..75: mol_type = other DNA
catctgccagctatgaccccctgaaccgtcagctcgtttaccggcttcaggagcattactcggaattcaggctga

SEQ ID NO: 800157 - DNA, 75 bp, synthetic construct
  source 1..75: mol_type = other DNA
aaaccacagtacttcccctgagagtgctcagcgatctgacaccggaatgcacagaacaggctatatcgttaaaag

SEQ ID NO: 800158 - DNA, 75 bp, synthetic construct
  source 1..75: mol_type = other DNA
gataaagttatatttaaagggcaaacactggatcgtctttatcatgaaggatatgtattttctgatatcaatacc

SEQ ID NO: 800159 - DNA, 75 bp, synthetic construct
  source 1..75: mol_type = other DNA
ggcgttattgcttctggtaatcgcaactttggtgaggcgtatggccgcgccggagatgtgattgcccggaaatgc

SEQ ID NO: 800160 - DNA, 75 bp, synthetic construct
  source 1..75: mol_type = other DNA
cagataactgccactacaggtaagttaaatctccaacaactcctggatggtgaaaaaggggaagagtttatgacg

SEQ ID NO: 800161 - DNA, 75 bp, synthetic construct
  source 1..75: mol_type = other DNA
ttaatgtgttagcacgttttttttattatatcgagcaagctaaagatataccttttgattactcaagctatgacg

SEQ ID NO: 800162 - DNA, 75 bp, synthetic construct
  source 1..75: mol_type = other DNA
aaaaatacttaagcaatgtttttatagggctccgattaaaggaggagatttttccgtaagtcttacaatgcaggc

SEQ ID NO: 800163 - DNA, 75 bp, synthetic construct
  source 1..75: mol_type = other DNA
tttgagcaggatcgcgcacgtcgttccaacgaagaacgcggcaaactggttactcgtatccagactgctgtgaaa

SEQ ID NO: 800164 - DNA, 75 bp, synthetic construct
  source 1..75: mol_type = other DNA
tatcgaacgtttagggctgcccgcggtgcgcattccgctcaatgagcgggaacggattcaggtagacgagcctta

SEQ ID NO: 800165 - DNA, 75 bp, synthetic construct
  source 1..75: mol_type = other DNA
ccagcggttcgattctgcatcataccttcgcagagatgtcattgaacgtcccggcacgggcagcgggttttggtt

SEQ ID NO: 800166 - DNA, 75 bp, synthetic construct
  source 1..75: mol_type = other DNA
cttcgcagagatgtcgctaaacgtcccggcacgggcggcgggttttggttttgcactgctggtagcgtttgtggt

SEQ ID NO: 800167 - DNA, 75 bp, synthetic construct
  source 1..75: mol_type = other DNA
gctggtttagcagctaccatctgggcggcaattgttccggcactgctggcccgcgcatcgcgtaaacgctttggc

SEQ ID NO: 800168 - DNA, 75 bp, synthetic construct
  source 1..75: mol_type = other DNA
aactactgctggcgctgatgggatgctgttttatttccggaattcagcctgccggggccatggatgtgaatataa

SEQ ID NO: 800169 - DNA, 75 bp, synthetic construct
  source 1..75: mol_type = other DNA
cgtcaccgtcgctgcttggcggcgtggtgataatcggcggcaccattattggcgcagggatgttttctctgccag

SEQ ID NO: 800170 - DNA, 75 bp, synthetic construct
  source 1..75: mol_type = other DNA
ccggcacgggcagcgggttttggttttgcactgttggtggcgtttgtggtgtggttgagcaccaaagccgtcagt

SEQ ID NO: 800171 - DNA, 75 bp, synthetic construct
  source 1..75: mol_type = other DNA
ggcgatggtgccgccgatgcctgccttttataaccatcccgaaacggtagatgacattgtccaccatgtggtagc

SEQ ID NO: 800172 - DNA, 75 bp, synthetic construct
  source 1..75: mol_type = other DNA
aatcaacctgattgataagagcgatttcacgaaagcatctggcgttgctaccgatgatatcgttgctgtaggatt

SEQ ID NO: 800173 - DNA, 75 bp, synthetic construct
  source 1..75: mol_type = other DNA
ttcggtttctccactacttatgagtatgaaggattcggtgtaggtgcaacctatgctaaatctgaccgcactaat

SEQ ID NO: 800174 - DNA, 75 bp, synthetic construct
  source 1..75: mol_type = other DNA
ctgaactttgctgctcagtatcagggtaaaaatgaccgcactgacgtaactgaagccaatggtgatggtttcggt

SEQ ID NO: 800175 - DNA, 75 bp, synthetic construct
  source 1..75: mol_type = other DNA
tgcgtcagaagccggttaaccgggccttaaaaccggggacggtgaccgccaaaattcgcgccatctggaaggtga

SEQ ID NO: 800176 - DNA, 75 bp, synthetic construct
  source 1..75: mol_type = other DNA
ctccgtccatgcggctcagccgatcactgaaccggagtttgcctctgatattgtcgatcgttatgccgatcatat

SEQ ID NO: 800177 - DNA, 75 bp, synthetic construct
  source 1..75: mol_type = other DNA
gaaacagaaaaaatccgctggtacctggggggcgattattcgccagccgctggcgtatgcacaaatgctgggggt

SEQ ID NO: 800178 - DNA, 75 bp, synthetic construct
  source 1..75: mol_type = other DNA
ataaacatagttctttctatttggttctttatcgtgagtcttgaaattcttgatgatgtaaaacggcaaataatt

SEQ ID NO: 800179 - DNA, 75 bp, synthetic construct
  source 1..75: mol_type = other DNA
accgctggggggcatgggctgctgcagaaaacagtggtgtggactggcaaccggtagccgctggcttcaaggggc

SEQ ID NO: 800180 - DNA, 75 bp, synthetic construct
  source 1..75: mol_type = other DNA
ggcctcgaacatcctcacgccaggcgctggcaaggattgccgcaggcccggaatttttctcaggagaatgaataa

SEQ ID NO: 800181 - DNA, 75 bp, synthetic construct
  source 1..75: mol_type = other DNA
atgcgtgatatgtatgaagtattagaccgttggggagcgtgggctgcggcagagaacagtggtgtggattggcaa

SEQ ID NO: 800182 - DNA, 75 bp, synthetic construct
  source 1..75: mol_type = other DNA
agatggcacaatcagaaaagaactacaaacagcattggggttcgttgatgggatgctatttatactttcagataa

SEQ ID NO: 800183 - DNA, 75 bp, synthetic construct
  source 1..75: mol_type = other DNA
atggggcgtgatatgtatgaggttttagaccgctggggggcatgggctgcagcagaaaatagtggtgttgattgg

SEQ ID NO: 800184 - DNA, 75 bp, synthetic construct
  source 1..75: mol_type = other DNA
tggcagatctgtttggtttcgacgactcggctgtgggccgcttgaaaacggcattgctgacctttgcccctcctg

SEQ ID NO: 800185 - DNA, 75 bp, synthetic construct
  source 1..75: mol_type = other DNA
ctgatccagatgatgaggctcctgacatgagaaacggcagtaagacctacctgaaccgccccggaaatcctggag

SEQ ID NO: 800186 - DNA, 75 bp, synthetic construct
  source 1..75: mol_type = other DNA
aaggcgtctccgggggcgatggttgcccctgatattgcacgtcagtaccttcagcgttttcgtcgtactctcata

SEQ ID NO: 800187 - DNA, 75 bp, synthetic construct
  source 1..75: mol_type = other DNA
agcgtttgtcagttatcaaaatccgctgaaacgggatttcgtctttaatattcctaatagtgcctgcggtttgtt

SEQ ID NO: 800188 - DNA, 75 bp, synthetic construct
  source 1..75: mol_type = other DNA
atggctgacattctgctgctcgataatatcgactcttttacgtacaacctggcagatcagttgcgcagcaatggt

SEQ ID NO: 800189 - DNA, 75 bp, synthetic construct
  source 1..75: mol_type = other DNA
agagccggactcatcaaactggtctttgctgaaccgaaaattcctgacgacctgcgagataatctggatgacaac

SEQ ID NO: 800190 - DNA, 75 bp, synthetic construct
  source 1..75: mol_type = other DNA
gctgacgatatgcaaaaactgcttcgcggtgctgaccaagatcatggtggaagttatgtttggatcggaggccaa

SEQ ID NO: 800191 - DNA, 75 bp, synthetic construct
  source 1..75: mol_type = other DNA
agaccttattttcattgataatgatggggaatcggacccgcaatgggaaggcttgggtagccgttacttgctgta

SEQ ID NO: 800192 - DNA, 75 bp, synthetic construct
  source 1..75: mol_type = other DNA
agatagaccatcgttcatacgagcgacaggggcttgagaaaacgcctggtattcacctcggaaagtctgcctgtg

SEQ ID NO: 800193 - DNA, 75 bp, synthetic construct
  source 1..75: mol_type = other DNA
agcgtaccggactgactcacgactacacccgcaaaagcggtgtggctgaagctgtgattctgacccccgcgacag

SEQ ID NO: 800194 - DNA, 75 bp, synthetic construct
  source 1..75: mol_type = other DNA
ttcagtatactttgcagaaaatgcgccagcgattgcaaaatgagcaatcgcaaagttcgtcatattctgttcata

SEQ ID NO: 800195 - DNA, 75 bp, synthetic construct
  source 1..75: mol_type = other DNA
ggtttatacccagcaattcgatgctcaggcagagcagatcgcgatgacattgccggaaggtgcccgggctggatt

SEQ ID NO: 800196 - DNA, 75 bp, synthetic construct
  source 1..75: mol_type = other DNA
actgatgacaaatcgtcaggcagcaatcagctatccacggaaagcggttcggcctcaataggagaaattcgtctt

SEQ ID NO: 800197 - DNA, 75 bp, synthetic construct
  source 1..75: mol_type = other DNA
tgtgcgataaatggcatccacgcggcgtttcattatttgaaaaagaattacatttcaggttgcgttatgacagtc

SEQ ID NO: 800198 - DNA, 75 bp, synthetic construct
  source 1..75: mol_type = other DNA
tttgatttattcaggaatagatgtatcacaacaggtgtaatgtacgaaatattaagtgttgtaagtgaatatatt

SEQ ID NO: 800199 - DNA, 75 bp, synthetic construct
  source 1..75: mol_type = other DNA
ggccacttaacagtcaatctgtaaataaatacattcttaacgttcagaatatctacaggaattctcctgttcctg

SEQ ID NO: 800200 - DNA, 75 bp, synthetic construct
  source 1..75: mol_type = other DNA
agattaatgcggatatcaataaaagattgggttccttcgatttgttcaggaataaatgtattaagacaggtgtaa

SEQ ID NO: 800201 - DNA, 75 bp, synthetic construct
  source 1..75: mol_type = other DNA
gacaccatcaccaaagatttgctgggcaaaggctggaacgtagtcaacggcatttccattgcctttgtgctctat

SEQ ID NO: 800202 - DNA, 75 bp, synthetic construct
  source 1..75: mol_type = other DNA
gcttgatgattctggaagctaacctgaattaccgaatcggttcgagttttgacaccatcaccaaagatttgctgg

SEQ ID NO: 800203 - DNA, 75 bp, synthetic construct
  source 1..75: mol_type = other DNA
aggatcgaattaaaccagttaaacggaaaataaaagagtttttgaacactttgatttattcagagtgtcatgtat

SEQ ID NO: 800204 - DNA, 75 bp, synthetic construct
  source 1..75: mol_type = other DNA
cgtgcgaatgttgctatggctcaggatgcttctcttagcttaagccagataagcagcgatctgttgaataaccct

SEQ ID NO: 800205 - DNA, 75 bp, synthetic construct
  source 1..75: mol_type = other DNA
tgatgttttggggcaggcaaaacagcgtgccaatattgccttggctcaggaggcatctcttaacctcagtcagat

SEQ ID NO: 800206 - DNA, 75 bp, synthetic construct
  source 1..75: mol_type = other DNA
ttagtgcccctcccggcgtgaacggtgtgcgactgacaccgcgcggctggtttgaatttaccgaagcctggcttc

SEQ ID NO: 800207 - DNA, 75 bp, synthetic construct
  source 1..75: mol_type = other DNA
attgaactcttttccaaagaagataaacccttctctggtgaaagttatgtacgtctgcaggttgaaatttttctt

SEQ ID NO: 800208 - DNA, 75 bp, synthetic construct
  source 1..75: mol_type = other DNA
ctgtttatatcaatgaagatggagacacttaccttattgaagagtacgaaaaaggcgagccgagcgaacacctca

SEQ ID NO: 800209 - DNA, 75 bp, synthetic construct
  source 1..75: mol_type = other DNA
gcgctttgtgcagccattatccatcatgaaaacggtagccagccatacagtgatcagcagttaactgatggtgtt

SEQ ID NO: 800210 - DNA, 75 bp, synthetic construct
  source 1..75: mol_type = other DNA
gatggccgcaacaaccttggcgtcatcagtctgaacttgccgcgtattgcactggaagcgaaaggcgatgagacc

SEQ ID NO: 800211 - DNA, 75 bp, synthetic construct
  source 1..75: mol_type = other DNA
tctggaagcaaaaggcgatgaagccactttctggaagctgctggatgaacgtctggtgctggcacgtaaggcgct

SEQ ID NO: 800212 - DNA, 75 bp, synthetic construct
  source 1..75: mol_type = other DNA
caactggctcgtgcttacatcgagtaccgtcacgatcgcgacattgaacgtgaaaaacgcggtcgcctgaaccag

SEQ ID NO: 800213 - DNA, 75 bp, synthetic construct
  source 1..75: mol_type = other DNA
tgaaaaacgcggtcgcctgaaccaggagatccgtggcctggtcgagcagaccaactcttcgttgctcaatgaaaa

SEQ ID NO: 800214 - DNA, 75 bp, synthetic construct
  source 1..75: mol_type = other DNA
gcaccgtaaaacagcggaagagtggagcattccggatgctgaaggctacgccaactctcgtaccatcaaagagtg

SEQ ID NO: 800215 - DNA, 75 bp, synthetic construct
  source 1..75: mol_type = other DNA
ccaactctcgtaccatcaaagagtgctacgacgccttccagtcgctggagtacgaagtaaataccctgcacaccg

SEQ ID NO: 800216 - DNA, 75 bp, synthetic construct
  source 1..75: mol_type = other DNA
atgacgaaaattattgcagtaaccgcatgtccttcaggtgttgcccatacctatatggcggcagaggcgctggaa

SEQ ID NO: 800217 - DNA, 75 bp, synthetic construct
  source 1..75: mol_type = other DNA
cttgatactcaccgtcccctcgtcctgcttcccggtcgtgatcagcgtacgctggcgacctggttcagaaaatat

SEQ ID NO: 800218 - DNA, 75 bp, synthetic construct
  source 1..75: mol_type = other DNA
aggttgtctcgcgtgatcgcagtggagtctatgcgacagcagcacgtgaaggtgcacctcaggccagacaggtgg

SEQ ID NO: 800219 - DNA, 75 bp, synthetic construct
  source 1..75: mol_type = other DNA
tcagcctgaacctgccgcgtattgcgctggaagcaaaaggcgatgaagccaccttctggaagctgctggatgaac

SEQ ID NO: 800220 - DNA, 75 bp, synthetic construct
  source 1..75: mol_type = other DNA
ccaacggtcagacgccgtttgtaacctttggttttggtctgggcaccagctgggagtcgcgcctgattcaggaat

SEQ ID NO: 800221 - DNA, 75 bp, synthetic construct
  source 1..75: mol_type = other DNA
cgccaacaaagacagcaaggtgattccaacccagcgcgacctgctggccgggatcgtggctaaacactatgcacg

SEQ ID NO: 800222 - DNA, 75 bp, synthetic construct
  source 1..75: mol_type = other DNA
ccatgacacctcccgtgtgtcggtgactcgccgcgtgtgcgggtatttaggcagtcctgatgcgcgtccgtttaa

SEQ ID NO: 800223 - DNA, 75 bp, synthetic construct
  source 1..75: mol_type = other DNA
catctgcgacgcaaactcggtagtgattttattcgtaccgtgcatggtattggctacacattaggtgagaaatga

SEQ ID NO: 800224 - DNA, 75 bp, synthetic construct
  source 1..75: mol_type = other DNA
attctgctcgatgcgtcaggtgatatttttctttacgggtttgaagactgcgtgactgattccgttcgtcgcatg

SEQ ID NO: 800225 - DNA, 75 bp, synthetic construct
  source 1..75: mol_type = other DNA
ctgattgatgtctaccggaaattgtcatgggattacagaaccaataatccctgccggctgggcaagaaaatcatc

SEQ ID NO: 800226 - DNA, 75 bp, synthetic construct
  source 1..75: mol_type = other DNA
gactctgttcatagttctcgtcagcgccggatacagcatctaccctgctccgggcagacgctatggcttgtattt

SEQ ID NO: 800227 - DNA, 75 bp, synthetic construct
  source 1..75: mol_type = other DNA
cactggcggtattctgctggcatttatggtggtggcactgttcattgcggatgtggccattcgtcatcctgaagg

SEQ ID NO: 800228 - DNA, 75 bp, synthetic construct
  source 1..75: mol_type = other DNA
gatctcaccttaccgggaatggatggccgcgatattttgcgcgagtggcgggataaaggtcagcgtgagccggta

SEQ ID NO: 800229 - DNA, 75 bp, synthetic construct
  source 1..75: mol_type = other DNA
tccaaagcgagggcttctggacccatggagggagtggttaaaagagcaacgagaatgtggtaattataacgccag

SEQ ID NO: 800230 - DNA, 75 bp, synthetic construct
  source 1..75: mol_type = other DNA
atggcgatgcagtcgacaaattattagctctgacggtataaccctccatctccacggaaaacgcaaaaaagcaca

SEQ ID NO: 800231 - DNA, 75 bp, synthetic construct
  source 1..75: mol_type = other DNA
gcagtcctgatgcgcgtccgtttaacgccggtaagcaggaagaagttaagcgccgcgttaaacatttgggcaatg

SEQ ID NO: 800232 - DNA, 75 bp, synthetic construct
  source 1..75: mol_type = other DNA
cgtttggtccaggactgctgctacgacccggatcgggatgcccacgaagctctgttgcgttccgggttcggcgga

SEQ ID NO: 800233 - DNA, 75 bp, synthetic construct
  source 1..75: mol_type = other DNA
ctgattgatgtctggcggaaattgtcatgggattacagaaccaataatccctgccgtctgggcaagagaatcatt

SEQ ID NO: 800234 - DNA, 75 bp, synthetic construct
  source 1..75: mol_type = other DNA
tctctctgttggtagaaacggccggcttgttgatgctctggcaggcaccgggagcgtgggtcgcattagcgggcg

SEQ ID NO: 800235 - DNA, 75 bp, synthetic construct
  source 1..75: mol_type = other DNA
gcaggaccatgtaggcctgataagcgtagcgcatcaggcagttttgcgtttgtcatcagtctcgaatatggtcga

SEQ ID NO: 800236 - DNA, 75 bp, synthetic construct
  source 1..75: mol_type = other DNA
ggcgcgataaatatgaacatcatctgctgttaaaaatggcgggcgatggcgtcggtgaagcaaaatcgtggctgg

SEQ ID NO: 800237 - DNA, 75 bp, synthetic construct
  source 1..75: mol_type = other DNA
aactgacgctggtgaaccatctggggattgatctgggcgaaacaccggagcagatccttagcaagctggatgacg

SEQ ID NO: 800238 - DNA, 75 bp, synthetic construct
  source 1..75: mol_type = other DNA
tggattatttcaaacaggccgaaggcgatttctttgtctgtacgccggaggaaggcagcaaagcgtttttacacc

SEQ ID NO: 800239 - DNA, 75 bp, synthetic construct
  source 1..75: mol_type = other DNA
tccgtccgccactggtactgccgtaacccggcttgttcacgtaaaatttttgccgagtcgcttgctcccttcgcc

SEQ ID NO: 800240 - DNA, 75 bp, synthetic construct
  source 1..75: mol_type = other DNA
ttaatcgtcaatcttgatactcaccgtcccctcgtcctgcttcccggccgtgatcagcgtacgctggcgacctgg

SEQ ID NO: 800241 - DNA, 75 bp, synthetic construct
  source 1..75: mol_type = other DNA
cagcaggtgttttatatcggtaccaaccagccagaagtgctgaccgaaatccgtcgccatattctggcgaatttt

SEQ ID NO: 800242 - DNA, 75 bp, synthetic construct
  source 1..75: mol_type = other DNA
acatggtcaaaattgaaggcggtgagtggctggtagaaaccgtacaaatgctgaccgaacgtgccgttcctgttt

SEQ ID NO: 800243 - DNA, 75 bp, synthetic construct
  source 1..75: mol_type = other DNA
cgtgaaacttaacgaggcgatcacagctgccgatgtcacgatgcgtaccgatgaaatcaaacgagagttgatgaa

SEQ ID NO: 800244 - DNA, 75 bp, synthetic construct
  source 1..75: mol_type = other DNA
tgaccgcgatctggcggcacgcctgcaaacgcatccatttttaggcccaaaactgacaatttatcagcaggatgc

SEQ ID NO: 800245 - DNA, 75 bp, synthetic construct
  source 1..75: mol_type = other DNA
ggcgcgataaatacgagcatcatctgctgttaaaaatggcgggcgatggcgtgggcgaagccaaatcgtggctgg

SEQ ID NO: 800246 - DNA, 75 bp, synthetic construct
  source 1..75: mol_type = other DNA
gtggtcatttaggtttaaccccacagtcagttaatatatttggcggctacaaagtacaagggcgtggcgatgaag

SEQ ID NO: 800247 - DNA, 75 bp, synthetic construct
  source 1..75: mol_type = other DNA
gttcagggtcatgactccaccctccctgtcactgtggaagatatcgcctaccacactgccgccgttcgtcgcggt

SEQ ID NO: 800248 - DNA, 75 bp, synthetic construct
  source 1..75: mol_type = other DNA
ggttcacaccaacagtcttcacaggcgttacaaaatttacaacgtcaactgggattaatcgccggaggtgaggcc

SEQ ID NO: 800249 - DNA, 75 bp, synthetic construct
  source 1..75: mol_type = other DNA
agcattatgacaccagcagaatacgagctgcttgtggtcagtgatttacccttttctgtggcgcttacactggcg

SEQ ID NO: 800250 - DNA, 75 bp, synthetic construct
  source 1..75: mol_type = other DNA
atctgacatcaagaatcaatacttctgacaaactaatgacacattacattaaacttattttagagggtaaactta

SEQ ID NO: 800251 - DNA, 75 bp, synthetic construct
  source 1..75: mol_type = other DNA
cacccgcaaaaaacggcatcagcgttggacagaggttatggccctgcataacaagggatgtagtttcagggaaat

SEQ ID NO: 800252 - DNA, 75 bp, synthetic construct
  source 1..75: mol_type = other DNA
gacgtaaacgcaaagccgaacatttagccggacggattgctgctgttcatgcgttgcggggatatggctataaat

SEQ ID NO: 800253 - DNA, 75 bp, synthetic construct
  source 1..75: mol_type = other DNA
ttcgtcgagaggatgagacatttgctgtgtactggcggataaaagaaaagagagtcataacgctgtgccaacacg

SEQ ID NO: 800254 - DNA, 75 bp, synthetic construct
  source 1..75: mol_type = other DNA
agcgactcgcagactgcggtttagccttttctctggcgctgacactggcattttccgccaaagagagcgcattta

SEQ ID NO: 800255 - DNA, 75 bp, synthetic construct
  source 1..75: mol_type = other DNA
gacttccttcagtgtcccgggtaagccgctggttgatgccctggagaataatcaggggcgaagaaaattatgcat

SEQ ID NO: 800256 - DNA, 75 bp, synthetic construct
  source 1..75: mol_type = other DNA
agttaccttgcggatggcgatgcagtcgacaaattattcgctctgacggtataaccctccatctccacggaaaac

SEQ ID NO: 800257 - DNA, 75 bp, synthetic construct
  source 1..75: mol_type = other DNA
gcacctcaggccagacaggtggccgatcgatggcatctgctaaaaaatattggcgatgcgcctgaacgaatgatg

SEQ ID NO: 800258 - DNA, 75 bp, synthetic construct
  source 1..75: mol_type = other DNA
atgcgacagcagcacgtgaaggtgcacctcaggccagacaggtggccgatcgatggcacctgctaaaaaatattg

SEQ ID NO: 800259 - DNA, 75 bp, synthetic construct
  source 1..75: mol_type = other DNA
ctccgttgcagtgctgatactcttcttcgcagggttatcaataccccggagacgaaacagtcaggcgcgcctcat

SEQ ID NO: 800260 - DNA, 75 bp, synthetic construct
  source 1..75: mol_type = other DNA
tcgtcagggatgctgttgccaaatggcgtaaagactggatcccacaggttactactgccgccagacttccttcag

SEQ ID NO: 800261 - DNA, 75 bp, synthetic construct
  source 1..75: mol_type = other DNA
atttgtacggtaatgaccatcgtggcctcacgcaaccgtggctggctgctgttgccgattgtttatgcctttgcg

SEQ ID NO: 800262 - DNA, 75 bp, synthetic construct
  source 1..75: mol_type = other DNA
atgatgtttataagtatttctctgattctgttagtgggctagatgttgagcttatagatgtttcttgcgagagtg

SEQ ID NO: 800263 - DNA, 75 bp, synthetic construct
  source 1..75: mol_type = other DNA
accgtttcttatttgtagttaggaataagaatggttgtgaactatcatgttcggcagaccttatgggaacaaggg

SEQ ID NO: 800264 - DNA, 75 bp, synthetic construct
  source 1..75: mol_type = other DNA
gctggcagctaagcctgctggcgagcgtggtaatcagtgccttttttctcaacacagcttacgcctggcaacaag

SEQ ID NO: 800265 - DNA, 75 bp, synthetic construct
  source 1..75: mol_type = other DNA
tttctcgacaacacatcctcttcttcctgatgaatataatttgatcaagttgtggcttaagcagaggaagttaat

SEQ ID NO: 800266 - DNA, 75 bp, synthetic construct
  source 1..75: mol_type = other DNA
aaaaaaagcctcgttaaaacagtaccttctgattcaaaatgtcagattcctacgttttcctcaattcttccataa

SEQ ID NO: 800267 - DNA, 75 bp, synthetic construct
  source 1..75: mol_type = other DNA
cgttgcgccacgcaaaaaggcagacgatgttatccaggggattatcaatcagcttgaggctctgactactgccgc

SEQ ID NO: 800268 - DNA, 75 bp, synthetic construct
  source 1..75: mol_type = other DNA
atggcaatgttcggttttcctcactggcagttaaaatcgacctctacagagagcggcgtgggcgcgccggatgaa

SEQ ID NO: 800269 - DNA, 75 bp, synthetic construct
  source 1..75: mol_type = other DNA
gcagtttgtatggcagtggacagattggtcacaccatcgttaatccggatggcgtcgtctgcgactgcgggcgtt

SEQ ID NO: 800270 - DNA, 75 bp, synthetic construct
  source 1..75: mol_type = other DNA
gagcaacattcaggtgatggcgctcggcaacctggtgggcgacgacattatggtgcagaccaccgccttgcaggt

SEQ ID NO: 800271 - DNA, 75 bp, synthetic construct
  source 1..75: mol_type = other DNA
taacaatagcgattatctgtatacgatggggttagtgccagattttaacgtaacaatcacaattgaaaccattga

SEQ ID NO: 800272 - DNA, 75 bp, synthetic construct
  source 1..75: mol_type = other DNA
gatagcgatcatcaacctgattacaacgatattttgtcgcaacgtattcaaagtagccaaagggcgctgggactg

SEQ ID NO: 800273 - DNA, 75 bp, synthetic construct
  source 1..75: mol_type = other DNA
gggaatacctttataactacgctaaaaagcaccaggcaaaaggcaatggatttggctatggtttggtagattcat

SEQ ID NO: 800274 - DNA, 75 bp, synthetic construct
  source 1..75: mol_type = other DNA
cgacataacgtgcgtctgcgtattattggcgataccagtcgctttaactcgcgtttgcaagaacgtattcgtaaa

SEQ ID NO: 800275 - DNA, 75 bp, synthetic construct
  source 1..75: mol_type = other DNA
aggtataaaagttaatttccgcggaacctccgtcacgctaagcagcaccagcgttgaaacggatgatcaggtttt

SEQ ID NO: 800276 - DNA, 75 bp, synthetic construct
  source 1..75: mol_type = other DNA
ttcgtatatggtgaaagcatccctgccgaatggagcctcacttgagaaacaactggaggctattgatgaaaaact

SEQ ID NO: 800277 - DNA, 75 bp, synthetic construct
  source 1..75: mol_type = other DNA
attatcagatatagaaaaagttaaaaaaggctatcagaaagaaatacgtgcacggagaaaaaagaaaagcggtaa

SEQ ID NO: 800278 - DNA, 75 bp, synthetic construct
  source 1..75: mol_type = other DNA
agcgtcactgtaagcgcagtcacgaccgctggtggaatgcaaacagtagatataacgctggtggcaggcccggca

SEQ ID NO: 800279 - DNA, 75 bp, synthetic construct
  source 1..75: mol_type = other DNA
gaagcgccagaagaagccatttccgaccttgcatggaaaaaacaccagatgccagcatggcatttaattaccgct

SEQ ID NO: 800280 - DNA, 75 bp, synthetic construct
  source 1..75: mol_type = other DNA
cggcatttatcatccaacggaattctccccgctatcgcattttgatgcgcgccgcgtcgatttttccctcgcgcg

SEQ ID NO: 800281 - DNA, 75 bp, synthetic construct
  source 1..75: mol_type = other DNA
taatgattcaggaaggccagtgttgggtgatcgacgatgtacgctatttaggcggcagcgttcatgccacggcgg

SEQ ID NO: 800282 - DNA, 75 bp, synthetic construct
  source 1..75: mol_type = other DNA
ccagtgttgggtcatcgacgatgtgcgctatttaggtggcagcgtgcacgccaaagcggggacattacgccagtc

SEQ ID NO: 800283 - DNA, 75 bp, synthetic construct
  source 1..75: mol_type = other DNA
atgttgtctgctactcaaccacttagcgaaaaattgccagcgcatggctgtcgtcatgttgcgatcattatggac

SEQ ID NO: 800284 - DNA, 75 bp, synthetic construct
  source 1..75: mol_type = other DNA
cacggagaaaaagaaaagcggtaaatgaagtgaactcactcactacaaaggttgtggggggagagtggatatctt

SEQ ID NO: 800285 - DNA, 75 bp, synthetic construct
  source 1..75: mol_type = other DNA
cggccacaagacattggcgtaagacattatcagatatagaaaaagttaaaaaaggctatcagaaagaaatacgtg

SEQ ID NO: 800286 - DNA, 75 bp, synthetic construct
  source 1..75: mol_type = other DNA
ataccggagatatcagttcgctcggctctacacaatacggatttggtgacgctttaacctctaatcaactggggg

SEQ ID NO: 800287 - DNA, 75 bp, synthetic construct
  source 1..75: mol_type = other DNA
gctgctgaccgccagcgccctgacagccgccgttggcaggcccgagcgctttgccagtggtcgccagctcagtgc

SEQ ID NO: 800288 - DNA, 75 bp, synthetic construct
  source 1..75: mol_type = other DNA
gggagacacgccgctgatgctggttatctggtccccggaagaaattcaggccctcgctgacggaatggatatttc

SEQ ID NO: 800289 - DNA, 75 bp, synthetic construct
  source 1..75: mol_type = other DNA
atgtacgttcgcgggcgtaaaatggtggcgtttctggtctgttgtgtcgcgctggcgataagcgcgatgtatgag

SEQ ID NO: 800290 - DNA, 75 bp, synthetic construct
  source 1..75: mol_type = other DNA
tggatgctttaatccatcggctaaagaggaacaatacatgccggctcagaaaacatattttggtatagatatgga

SEQ ID NO: 800291 - DNA, 75 bp, synthetic construct
  source 1..75: mol_type = other DNA
aatcacgataacgtcgatgcctgcttatcccgaatctggcgtggagattgcccaccgttcgttgtttgcacagca

SEQ ID NO: 800292 - DNA, 75 bp, synthetic construct
  source 1..75: mol_type = other DNA
tcggtgagctaagctctggtaagaatgcaccgaaaacggggggaggggcgaaagggaacaatgcttcgccagccg

SEQ ID NO: 800293 - DNA, 75 bp, synthetic construct
  source 1..75: mol_type = other DNA
tataatttgtggctggattatctggacgcactggaactggttgatacttccggtgcgccagatattgaatggcct

SEQ ID NO: 800294 - DNA, 75 bp, synthetic construct
  source 1..75: mol_type = other DNA
cttgctcttcaggatgaaataaaagaaaaagcggatgaaacagttcaggtttcccgggcttatacagataaaagt

SEQ ID NO: 800295 - DNA, 75 bp, synthetic construct
  source 1..75: mol_type = other DNA
gcgtggtgagataggcggtgtatacagagatgcccgtgctcatactgacagtcaggtcacagcagtacgtgatga

SEQ ID NO: 800296 - DNA, 75 bp, synthetic construct
  source 1..75: mol_type = other DNA
tgataatggcactcagtcacttgaaagtgcaagtgtgattgacagaaatggaaatgctaacggtgatggtagtgt

SEQ ID NO: 800297 - DNA, 75 bp, synthetic construct
  source 1..75: mol_type = other DNA
gaattgtcacttgagcttaaagctgattcgctggtggcaatgaaaccctatcccaacaagacctaccacgttggc

SEQ ID NO: 800298 - DNA, 75 bp, synthetic construct
  source 1..75: mol_type = other DNA
ttatcctggattctctggggtttgaacgtcatatcattgccagtaaaagctcatcagcaaattgttgtgctctag

SEQ ID NO: 800299 - DNA, 75 bp, synthetic construct
  source 1..75: mol_type = other DNA
catcttctcttgctcttcaggatgaaataaaagaaaaagcggatgaaacagttcaggtttcccgggcttatacag

SEQ ID NO: 800300 - DNA, 75 bp, synthetic construct
  source 1..75: mol_type = other DNA
caaaaagctggtgggctatgccgtacgctggaacagtctctctgaaattatctgggacgagttccgcgagcagtt

SEQ ID NO: 800301 - DNA, 75 bp, synthetic construct
  source 1..75: mol_type = other DNA
caccgctgcttcccaataacgtacgtgatgcgctggcgggcgagagcacacggccccgagtcagccgtctcggtg

SEQ ID NO: 800302 - DNA, 75 bp, synthetic construct
  source 1..75: mol_type = other DNA
tatatatggacgggcggttaattgtttcgacccgacaacgcaaagtgctggcgctggacgatgtggtgagcgatc

SEQ ID NO: 800303 - DNA, 75 bp, synthetic construct
  source 1..75: mol_type = other DNA
ggctctcttgtcgattacgtcagacatttaatggcggaagttaactccagccataaagatggtgaggtgcgctga

SEQ ID NO: 800304 - DNA, 75 bp, synthetic construct
  source 1..75: mol_type = other DNA
aaaacttgccggtaacataagatcgttcacacgaaaccaaatggtaaaaattgaacgtcaggccattattgaggc

SEQ ID NO: 800305 - DNA, 75 bp, synthetic construct
  source 1..75: mol_type = other DNA
ccgggttatttggcgtcaaccttggtgggatcccaggcggcgggtggcaattcggattttcaattttttgtattc

SEQ ID NO: 800306 - DNA, 75 bp, synthetic construct
  source 1..75: mol_type = other DNA
tcggacgcggtctggatgagattgacgcctgtattgcccgaaccggcgtgatggcagatgaaatcgctcaggtca

SEQ ID NO: 800307 - DNA, 75 bp, synthetic construct
  source 1..75: mol_type = other DNA
gtcgggattttgctctcccgcgccagcaaaatgccgggcagagacggagatattcttgcccgcttgacgacgctg

SEQ ID NO: 800308 - DNA, 75 bp, synthetic construct
  source 1..75: mol_type = other DNA
acattacaggaatgagctttggttttcgcgcattatgcgaggagtggagtatcgcgcaaaaaccgtatctgcgta

SEQ ID NO: 800309 - DNA, 75 bp, synthetic construct
  source 1..75: mol_type = other DNA
cgctgtacgagcataactatacccagctgctgggccgcactaaatccggcacgctggtgctgtccgaagacgata

SEQ ID NO: 800310 - DNA, 75 bp, synthetic construct
  source 1..75: mol_type = other DNA
cgaagccctgttacaacagcagcttcaggcacagtggcaaaccacctggcaacagcattttgccaccgcgccctg

SEQ ID NO: 800311 - DNA, 75 bp, synthetic construct
  source 1..75: mol_type = other DNA
aacgatgccagggcctttgatttacagctcacctaccgccctgtggaagacaatgccgccgagctatccgcgcgc

SEQ ID NO: 800312 - DNA, 75 bp, synthetic construct
  source 1..75: mol_type = other DNA
gcaaaatgccgggcagagacggagatattcttgcccgcttgacgacgctgccacaggcgctggccgctcatgcac

SEQ ID NO: 800313 - DNA, 75 bp, synthetic construct
  source 1..75: mol_type = other DNA
gggttatcgactgatcccgatggtcgattttcagcaggatggtgaactactgggtcgtattcgcagtattcgcaa

SEQ ID NO: 800314 - DNA, 75 bp, synthetic construct
  source 1..75: mol_type = other DNA
attcgcgatatgcgcaccattctcgaaacgctggcggaacatgcgcccatccagagcgatccacatgaattaacc

SEQ ID NO: 800315 - DNA, 75 bp, synthetic construct
  source 1..75: mol_type = other DNA
ttgctcggcctggtgcctggaatgccgaacctggtatttttgctgttcacggcgggattgctcgggctggcctgg

SEQ ID NO: 800316 - DNA, 75 bp, synthetic construct
  source 1..75: mol_type = other DNA
gcagttgggtaaaactgccgaatgggcagaattcctgcagcgcgcggtggaagagaacaccggtgccgatgctga

SEQ ID NO: 800317 - DNA, 75 bp, synthetic construct
  source 1..75: mol_type = other DNA
ctgagcacggcacaaccgcgcgtgattaccatcgaggccaccagcgaacaggaagcgcgtcagcaatctcctgat

SEQ ID NO: 800318 - DNA, 75 bp, synthetic construct
  source 1..75: mol_type = other DNA
ttgagtacggcacaaccgcgcgtgattaccatcgaggccatcagcgaacaggaagcccgccagcaatccccaact

SEQ ID NO: 800319 - DNA, 75 bp, synthetic construct
  source 1..75: mol_type = other DNA
gaagcgacgtggaacgatgtacaactggaagattctctgggaatggaagtgggttatcgactgatcccgatggtt

SEQ ID NO: 800320 - DNA, 75 bp, synthetic construct
  source 1..75: mol_type = other DNA
tgatacgtaacccgtctgtgtccccgcaagccattgccgaagccggatttaccgccactgtaagggcatgtgagg

SEQ ID NO: 800321 - DNA, 75 bp, synthetic construct
  source 1..75: mol_type = other DNA
tacggatgctgggcctgcggcaggaaggtatcagtgaagaaacacaaaatgacagctgtaagaaaatactgacgc

SEQ ID NO: 800322 - DNA, 75 bp, synthetic construct
  source 1..75: mol_type = other DNA
cagcttgccgcagttagtggtgctgtcgaatctggaactatcagataaccgacatatccgtatgacggcgacgat

SEQ ID NO: 800323 - DNA, 75 bp, synthetic construct
  source 1..75: mol_type = other DNA
tgacgccgaccttaacgccggattgattggtgaagatgaggcgaaaaaacgccgctccgaagtgactcaggaagc

SEQ ID NO: 800324 - DNA, 75 bp, synthetic construct
  source 1..75: mol_type = other DNA
agtgctgcaaaatctgctcgatgaaaaagtaccgattcgcgatatgcgcactattctcgaaacgctggcggaaca

SEQ ID NO: 800325 - DNA, 75 bp, synthetic construct
  source 1..75: mol_type = other DNA
ggaagcacgtcagcaatctcctgatggctgcgtgatggtattcgctgcccgtatccgtcagggggggagccatgc

SEQ ID NO: 800326 - DNA, 75 bp, synthetic construct
  source 1..75: mol_type = other DNA
atcaagcaagacgatgacgacccggacggcattttgcatgcgcgcctgatcaacatcctaagtcacggcaactat

SEQ ID NO: 800327 - DNA, 75 bp, synthetic construct
  source 1..75: mol_type = other DNA
gcggacagtttttcactactcgccatccccttctttgtgctggctggtgaaatcatgaatgccggtggcttgtcg

SEQ ID NO: 800328 - DNA, 75 bp, synthetic construct
  source 1..75: mol_type = other DNA
atcgcgccgccggacttatcggttctggcggtattattgcggccattatccctccttctattccactcattatct

SEQ ID NO: 800329 - DNA, 75 bp, synthetic construct
  source 1..75: mol_type = other DNA
atgtcttcgaattaccttacgccttccgatctcaaaaccattctccactccaaacgcgccaatatttattatctg

SEQ ID NO: 800330 - DNA, 75 bp, synthetic construct
  source 1..75: mol_type = other DNA
aatatccccattgcgaataccacggcgttgatgttggggatgggaacgtccgttacccaggcggcgatgcgtgaa

SEQ ID NO: 800331 - DNA, 75 bp, synthetic construct
  source 1..75: mol_type = other DNA
tatatcgacgatccgatttcgtcgctggatgaacacaacgccattgctgtcgccaatcacttggcgcagttgctc

SEQ ID NO: 800332 - DNA, 75 bp, synthetic construct
  source 1..75: mol_type = other DNA
taaatacatctggcgttttatcgccctgagcacggcacaaccgcgcgtaattcacatcgaggccaccagcgaaca

SEQ ID NO: 800333 - DNA, 75 bp, synthetic construct
  source 1..75: mol_type = other DNA
ttaccattgaggccaccagcgaacaggaagcatgccagcaatctcctgatggctgcgtgatggtattcgctgccc

SEQ ID NO: 800334 - DNA, 75 bp, synthetic construct
  source 1..75: mol_type = other DNA
ggaagcacgccagcaatccccagttggctgcgtgatggtattcgcggcccgtattcgtcagggggtgcgtcatgc

SEQ ID NO: 800335 - DNA, 75 bp, synthetic construct
  source 1..75: mol_type = other DNA
gcgatgatcatggcaagcctttctggttctgcggttgccgataccgctgccgtcgcggcactgttggtgccgatg

SEQ ID NO: 800336 - DNA, 75 bp, synthetic construct
  source 1..75: mol_type = other DNA
cgaagcaggcgcggttgccgccttctacgctctgttcgtctcggtggtggtctatcgcgagatgaccttctccac

SEQ ID NO: 800337 - DNA, 75 bp, synthetic construct
  source 1..75: mol_type = other DNA
atgatgtcagtggagtggtcgtacgtaaaaatggctcttcggataggcctttgatttatgcaaaagtatccgttc

SEQ ID NO: 800338 - DNA, 75 bp, synthetic construct
  source 1..75: mol_type = other DNA
aagtcctggcaaccgcgggaagccacacgctgaatgtgatgcaaaaaaggcgggcgggcagcccgccaggcccgg

SEQ ID NO: 800339 - DNA, 75 bp, synthetic construct
  source 1..75: mol_type = other DNA
aatcccagggattcagacacaatggatgtcagcaggaagtcagtataacccttatctgaaaatttcgtatcaggc

SEQ ID NO: 800340 - DNA, 75 bp, synthetic construct
  source 1..75: mol_type = other DNA
agcatgattccgtttgttaaacgccatgaagatcaggtaatgacattcctgatgattctgccgattgccctgtta

SEQ ID NO: 800341 - DNA, 75 bp, synthetic construct
  source 1..75: mol_type = other DNA
ggttaagttatattcaggggcgctggttagggaataccaaaacggtgaaaggctggctggcacagcttcctgcta

SEQ ID NO: 800342 - DNA, 75 bp, synthetic construct
  source 1..75: mol_type = other DNA
atggcctcgcaacaagccttgcaggatcgcatcttaaaggaaatcatcgaccgcattccgcaacgagaagtttct

SEQ ID NO: 800343 - DNA, 75 bp, synthetic construct
  source 1..75: mol_type = other DNA
gagtgggggaatccgcaggatccgcaatattacgagtacatgaaaagctacagcccgtatgacaacgtcaccgca

SEQ ID NO: 800344 - DNA, 75 bp, synthetic construct
  source 1..75: mol_type = other DNA
tgggaagagttaattccgccacgcgaaaacatcatgctggaagggtttacgctgtttaccgactggctggtggtt

SEQ ID NO: 800345 - DNA, 75 bp, synthetic construct
  source 1..75: mol_type = other DNA
atgacggtgctgtgtattgggctggtggcggtgtttacccgtggcatgatccagcggttattgattctcgtaggt

SEQ ID NO: 800346 - DNA, 75 bp, synthetic construct
  source 1..75: mol_type = other DNA
tcagcatcgcgctgggcgggattatcgcctgtgggctggtttataccgtcattggcctggtggtgatgaaaatcg

SEQ ID NO: 800347 - DNA, 75 bp, synthetic construct
  source 1..75: mol_type = other DNA
ttccctgcgcttatcgccgtccgtcagcacgtacacagaaaaacgcgaagacccgtacttcaaagccagttacga

SEQ ID NO: 800348 - DNA, 75 bp, synthetic construct
  source 1..75: mol_type = other DNA
gacagcttgttaatactggctggcgcactgattgcccagggggttatggattttctgccaacaatcgcgattctg

SEQ ID NO: 800349 - DNA, 75 bp, synthetic construct
  source 1..75: mol_type = other DNA
cccattaatttctcaggctgcgacactggacgtacgtggtggatatcgtagtggaagccacgcctatgagactcg

SEQ ID NO: 800350 - DNA, 75 bp, synthetic construct
  source 1..75: mol_type = other DNA
actcaaagtcagtgaggggtggaaaaatggatggtgggcaagtatggaaagtaatacctggaataccattcatga

SEQ ID NO: 800351 - DNA, 75 bp, synthetic construct
  source 1..75: mol_type = other DNA
cgcccggaattattccacggcgttatcgcccaggtaccgtttgttgatgttgtaacaacgatgcttgatgaatca

SEQ ID NO: 800352 - DNA, 75 bp, synthetic construct
  source 1..75: mol_type = other DNA
tcacatggattagctttctttcctacgcactgaccggtgcgttggttattgtcaccgggatggtgatgggaaata

SEQ ID NO: 800353 - DNA, 75 bp, synthetic construct
  source 1..75: mol_type = other DNA
ggaagtctacctccatgcctacaagactgtgtccgaggcacgcgctggcatcgcccgatatctgaacttctacaa

SEQ ID NO: 800354 - DNA, 75 bp, synthetic construct
  source 1..75: mol_type = other DNA
cagttcacctccatcgacttcaccgccgtgctgaagaggtcacagattgccatctcgatggatggcaagggtgcg

SEQ ID NO: 800355 - DNA, 75 bp, synthetic construct
  source 1..75: mol_type = other DNA
ttctccagcgcgatctataccaccatcatcaccctgggttcacagcagaccaaagtaccgtcgccaaaactggtt

SEQ ID NO: 800356 - DNA, 75 bp, synthetic construct
  source 1..75: mol_type = other DNA
gaagggcgtcagcgcggttcccgcctgttatttaccgactccttcttcagtatggccgggatgattttcccaatg

SEQ ID NO: 800357 - DNA, 75 bp, synthetic construct
  source 1..75: mol_type = other DNA
aaggcctgggcatgagcctgaacgacgcaggtacgctggtgagtaacttctggatgtcatatatggtcggcatgt

SEQ ID NO: 800358 - DNA, 75 bp, synthetic construct
  source 1..75: mol_type = other DNA
cagcattgcaagataaactgatctacgaagaaaaagacgatacctattacgtcagtttgcataaaacgacatcga

SEQ ID NO: 800359 - DNA, 75 bp, synthetic construct
  source 1..75: mol_type = other DNA
tgctggtaacgaccggtttacacgattcacaggtgcaatactgggaaccggcaaaatgggtggctaaattgcgcg

SEQ ID NO: 800360 - DNA, 75 bp, synthetic construct
  source 1..75: mol_type = other DNA
ctttggcttataccgtacccgtatgcgtgatgagcaacagtgggaagagttaattccgccacgcgataacattat

SEQ ID NO: 800361 - DNA, 75 bp, synthetic construct
  source 1..75: mol_type = other DNA
tcagccggaaggtcttgtcatggcggttgtcgatcacgatggaagcagccttctgcatcgaggcggtggaggagg

SEQ ID NO: 800362 - DNA, 75 bp, synthetic construct
  source 1..75: mol_type = other DNA
tcgatgtggtgacgacgatgcttgatgagtcgattccgctcactacgggcgagtttgaagagtgggggaatccgc

SEQ ID NO: 800363 - DNA, 75 bp, synthetic construct
  source 1..75: mol_type = other DNA
gtctacgccattgtgcatgttcgtggcggtggtgaactggggcagcagtggtacgaagatggcaagttcctgaaa

SEQ ID NO: 800364 - DNA, 75 bp, synthetic construct
  source 1..75: mol_type = other DNA
atgaccacctttacccaaaaagaactgattaaagaaatgaaagaacgcatcagcagcctcgacgtgcgagacgat

SEQ ID NO: 800365 - DNA, 75 bp, synthetic construct
  source 1..75: mol_type = other DNA
atgaccacctttacccaaaaagaactgattaaagaaatcaaagagcgcatcagcagcctcgacgtacgagacgat

SEQ ID NO: 800366 - DNA, 75 bp, synthetic construct
  source 1..75: mol_type = other DNA
atgaccacctttacccaaaaagaactgattaaagaaattaaagaccgcatcagcagcctcgacgttcgagacgat

SEQ ID NO: 800367 - DNA, 75 bp, synthetic construct
  source 1..75: mol_type = other DNA
tttgctatcgcaaccgccatcggttcgtggtttggcgcgcgctttactctgctgcctgttttccgtatccccgtg

SEQ ID NO: 800368 - DNA, 75 bp, synthetic construct
  source 1..75: mol_type = other DNA
attgagcgccgtgcttatgaaatcgcactcctatctctggaagtagagccagatgaacgcgaagcctatgaatta

SEQ ID NO: 800369 - DNA, 75 bp, synthetic construct
  source 1..75: mol_type = other DNA
gttgcgggaagccctttcgcaactggtggcggaacggctggtcacggtggtgaatcaaaaagggtatcgggtggc

SEQ ID NO: 800370 - DNA, 75 bp, synthetic construct
  source 1..75: mol_type = other DNA
gcactccgtatctaaaaacaattcattttaaaatgatcgcaaaaactctccctcaaataataagttttaatacag

SEQ ID NO: 800371 - DNA, 75 bp, synthetic construct
  source 1..75: mol_type = other DNA
atgacgacattccgttctgaacgactgacagtgacaaccgccccgtccagtgcggggcatcaccggagagatgag

SEQ ID NO: 800372 - DNA, 75 bp, synthetic construct
  source 1..75: mol_type = other DNA
gtgtgtgctgactattggtaattttgacggcgtgcatcgcggccatcgcgcgctgttgcagggcttgcaggaaga

SEQ ID NO: 800373 - DNA, 75 bp, synthetic construct
  source 1..75: mol_type = other DNA
atgaccacctttacccaaaaagaactgattaaagaaataaaagagcgcatcagcagcctcgacgtccgagacgat

SEQ ID NO: 800374 - DNA, 75 bp, synthetic construct
  source 1..75: mol_type = other DNA
tgacaacgtagatccgcccagtagcgacccccatgatcacgtcactgcgtattgtgacggggccaggctgacgta

SEQ ID NO: 800375 - DNA, 75 bp, synthetic construct
  source 1..75: mol_type = other DNA
cagccattttttagttatccacgcgttttaggccatgaaatatgtggggagattattgaatcaggaaaaaacatt

SEQ ID NO: 800376 - DNA, 75 bp, synthetic construct
  source 1..75: mol_type = other DNA
gtatccgcattatgcaggccattattggcggcattatcgctggttttggcgcgcgtctggcaatgggctgtaacc

SEQ ID NO: 800377 - DNA, 75 bp, synthetic construct
  source 1..75: mol_type = other DNA
tcaatcccacgcaggaagattttattgccgcgcttcgtgaggcctttggaggcgaactggcttgcgtagtactgg

SEQ ID NO: 800378 - DNA, 75 bp, synthetic construct
  source 1..75: mol_type = other DNA
tgattgtcaacgtcgccagcacgttgtggatcatctggcgattaatgtcttcgacccaacacaggaaggttttat

SEQ ID NO: 800379 - DNA, 75 bp, synthetic construct
  source 1..75: mol_type = other DNA
ttcttcgcgggaaatgtgtaccgcgagatctgaaagtgaacgaaacaaatgctgagtacctggtacgtaaattcg

SEQ ID NO: 800380 - DNA, 75 bp, synthetic construct
  source 1..75: mol_type = other DNA
tggcgctgatcgtccgtgcactggtgaaacatccgacgttgcttattctcgatgaaccactacaggggcttgatc

SEQ ID NO: 800381 - DNA, 75 bp, synthetic construct
  source 1..75: mol_type = other DNA
tgcaggcatttatcggggagctggacggcggcgtatttgaaaccaaaatcggcgcagttctcagtgaggtcgctt

SEQ ID NO: 800382 - DNA, 75 bp, synthetic construct
  source 1..75: mol_type = other DNA
ggctggcgttctctctggtacacatggggacaaaaagaaaccggagaatggcagtggacatttcaggtcggggac

SEQ ID NO: 800383 - DNA, 75 bp, synthetic construct
  source 1..75: mol_type = other DNA
atgctgaagagtaggggttattttaaaattatccatctggaaggatcgccattaacccgcatcgacgggatgatg

SEQ ID NO: 800384 - DNA, 75 bp, synthetic construct
  source 1..75: mol_type = other DNA
aagcgccatcggtattttcagttacgtacagttaggtgtagaaccgaaaatcatgtgggctggcccgaacgccgt

SEQ ID NO: 800385 - DNA, 75 bp, synthetic construct
  source 1..75: mol_type = other DNA
gtcggtctgggcaatgtgatcggctcaacgattctggcgtattactgggatgatttcgctccggcgctggccacc

SEQ ID NO: 800386 - DNA, 75 bp, synthetic construct
  source 1..75: mol_type = other DNA
gtgtcaactgaactgccaccagcaaatgaaagtgttttgttattcgatgctaacggagaaggctggctaattggc

SEQ ID NO: 800387 - DNA, 75 bp, synthetic construct
  source 1..75: mol_type = other DNA
ataaaacactctccaggaaacccggggcggttcagaaagtaaatgaaacagatgctgaatacctggtgcgtaaat

SEQ ID NO: 800388 - DNA, 75 bp, synthetic construct
  source 1..75: mol_type = other DNA
agccagaaattacaggagcctatttattctaatcgtacaccgaatgcccatgacagtaaaatgaaaaaagcgttg

SEQ ID NO: 800389 - DNA, 75 bp, synthetic construct
  source 1..75: mol_type = other DNA
gacaatctggctctggcagaaagtttactggggcacccgtttgccatctccgggcgtgtagtccacggtgatgaa

SEQ ID NO: 800390 - DNA, 75 bp, synthetic construct
  source 1..75: mol_type = other DNA
gcatctgggaggtgctctggttttttcagaagccttcagtgcggcacgactggcagagtgtgtggtccatcttcc

SEQ ID NO: 800391 - DNA, 75 bp, synthetic construct
  source 1..75: mol_type = other DNA
tatataccccctccccggataaagtcgccgccctgcatgaccagttcggcatcaacgccgcagaatcggcgcaag

SEQ ID NO: 800392 - DNA, 75 bp, synthetic construct
  source 1..75: mol_type = other DNA
ttccgctgctttggcgaagcggaagtaattgctgagccgatgatccacccggtggtcggtgtgagcggttcttcg

SEQ ID NO: 800393 - DNA, 75 bp, synthetic construct
  source 1..75: mol_type = other DNA
gggccaggtgaaatcaactcacgtcatcccacgtcctcataatgaggtagaaacgctgttgcctgtttatcaggc

SEQ ID NO: 800394 - DNA, 75 bp, synthetic construct
  source 1..75: mol_type = other DNA
atgcaacaagaagcgttaggaatggttgaaaccaaaggcttaactgccgccatagaggccgcagatgccatggtt

SEQ ID NO: 800395 - DNA, 75 bp, synthetic construct
  source 1..75: mol_type = other DNA
tcaggaagaagcggaaaaactgcgcgcgactgccgactatgaagtgaccagaacgctggcagaagcagagcgtca

SEQ ID NO: 800396 - DNA, 75 bp, synthetic construct
  source 1..75: mol_type = other DNA
gtttgatgacaaaggaaatctgcttcctgtgaatcgtccacctgaacattggactcggctttattccggctccac

SEQ ID NO: 800397 - DNA, 75 bp, synthetic construct
  source 1..75: mol_type = other DNA
cttgccggattgaagccggtgataaacaaatgacggtcaatatggggcaaatcagcagtaaccggtttcatgcgg

SEQ ID NO: 800398 - DNA, 75 bp, synthetic construct
  source 1..75: mol_type = other DNA
ggaatgtagcacggtggtgagtgaacgtgtgggcgtggcgtttcacggtgtcgcggatggtaaaaatccggatgt

SEQ ID NO: 800399 - DNA, 75 bp, synthetic construct
  source 1..75: mol_type = other DNA
cgggaaaaactgcgttatcttgcagagtgtggcgttgattacgtgctgtgcgtgcgttttgacaggcgttttgcg

SEQ ID NO: 800400 - DNA, 75 bp, synthetic construct
  source 1..75: mol_type = other DNA
cattgatgagattgtttgtactggtgcaaatctccatcatggtggtgtttatcttcctggtggttcagggactgc

SEQ ID NO: 800401 - DNA, 75 bp, synthetic construct
  source 1..75: mol_type = other DNA
gaagaagcccaacatgaaatggccgctgaagcggggattaattccgcgcgcattgatgaaatcgcagagtttttg

SEQ ID NO: 800402 - DNA, 75 bp, synthetic construct
  source 1..75: mol_type = other DNA
gtcggggcggtaaaagcggcaacagacgcaggtgccgcagctgcgcgtaacgtcggcgaagtaaaagccgtacac

SEQ ID NO: 800403 - DNA, 75 bp, synthetic construct
  source 1..75: mol_type = other DNA
ggtgatttgattaccagcatggggcagttacaacgtaacgctcgtgatttgcaggaatcggtgatgtcgatccgc

SEQ ID NO: 800404 - DNA, 75 bp, synthetic construct
  source 1..75: mol_type = other DNA
atgatgccgatggaatatgtctttagtcgctatccccggctggtgcgtgatctggcgggaaaactcggcaagcag

SEQ ID NO: 800405 - DNA, 75 bp, synthetic construct
  source 1..75: mol_type = other DNA
aggggctgcctgacggtccttttacccgcaaacatgccgaagccgttgccgcacagtaccggaacgtctttatcg

SEQ ID NO: 800406 - DNA, 75 bp, synthetic construct
  source 1..75: mol_type = other DNA
agcccaaaagagctgattcagattgcggagtacttccggactccactggcgactgcggttacgggcggcgatcgc

SEQ ID NO: 800407 - DNA, 75 bp, synthetic construct
  source 1..75: mol_type = other DNA
gccgctatccccggctggtgcgtgatctggcgggaaaactcggcaagcaggtagaactgacgctggtgggcagtt

SEQ ID NO: 800408 - DNA, 75 bp, synthetic construct
  source 1..75: mol_type = other DNA
ttatatctgccaagccttgcgtcaactggcattggaagcgaaaggcgaaacggtatccgcagtgacccgattaag

SEQ ID NO: 800409 - DNA, 75 bp, synthetic construct
  source 1..75: mol_type = other DNA
ggcgcagtaaaagccgccgttgacgcggggagcgccgccgcaagcgccgttggcgaagtgaaatcctgccatgtc

SEQ ID NO: 800410 - DNA, 75 bp, synthetic construct
  source 1..75: mol_type = other DNA
ctgatgtagcggatcataaggttgaaatgtggcgtacattttcttctgttgatgagctgggggagttatcgcccg

SEQ ID NO: 800411 - DNA, 75 bp, synthetic construct
  source 1..75: mol_type = other DNA
gtatggttttcccattagtggtgatcattatttctctatgaacaaaggacccgttttatcgcagacatattcttt

SEQ ID NO: 800412 - DNA, 75 bp, synthetic construct
  source 1..75: mol_type = other DNA
ccgcgaacaggcggaagctgttgccgcacagtaccggaacgtctttatcggggatgaccacggggaacattttcg

SEQ ID NO: 800413 - DNA, 75 bp, synthetic construct
  source 1..75: mol_type = other DNA
gtggcagaacggctggtcacggtggtgaatcaaaaagggtatcgggtggcgtctatgtcagagcaggagctgctc

SEQ ID NO: 800414 - DNA, 75 bp, synthetic construct
  source 1..75: mol_type = other DNA
acaagagtcatttgcgttaatcagccagaatcaacatgccccaactaaaacaaaaagaagcaaatcaagtaaatt

SEQ ID NO: 800415 - DNA, 75 bp, synthetic construct
  source 1..75: mol_type = other DNA
tcccctcgcctcggtattaatgaccaaaggcatggggatgggagctgtaatggcactcatcatcggtagcgcggg

SEQ ID NO: 800416 - DNA, 75 bp, synthetic construct
  source 1..75: mol_type = other DNA
cgaagcgattggttttgtggcgaagccgtaatatcaaaacgctcggacggtcccctcgcccctttggggagaggg

SEQ ID NO: 800417 - DNA, 75 bp, synthetic construct
  source 1..75: mol_type = other DNA
ctgggcactgaactgctatacctacttcggcgaactgagccgcatgacccagtttaaagataaatctgcgcgtta

SEQ ID NO: 800418 - DNA, 75 bp, synthetic construct
  source 1..75: mol_type = other DNA
atgattttttagctcttgataaaaagcttatggtgacgtcgatggattttgaaacgattagtgaacatttaatca

SEQ ID NO: 800419 - DNA, 75 bp, synthetic construct
  source 1..75: mol_type = other DNA
ccaaccgaacagtcggagcagataatgtagatgactatatatcgggcctttcaacattacggtatcgcaatagtg

SEQ ID NO: 800420 - DNA, 75 bp, synthetic construct
  source 1..75: mol_type = other DNA
gcgcgtaaagggcgcggttatttgctggcagcaatgttaggtgcagtgactccattttgcagttgctcaaccatt

SEQ ID NO: 800421 - DNA, 75 bp, synthetic construct
  source 1..75: mol_type = other DNA
agccataccgctcagtgctgttgttggtattccgctgtatattcgtgctgaggccgtaataccacttgcatcagt

SEQ ID NO: 800422 - DNA, 75 bp, synthetic construct
  source 1..75: mol_type = other DNA
atggaggcctgtggaggttctcagcactgggcacgtgaactgacaaagtctggtcataaagtccggttgttacag

SEQ ID NO: 800423 - DNA, 75 bp, synthetic construct
  source 1..75: mol_type = other DNA
gcgctggacgatgtggtgagcgatctggaagagggcactggtccgaccgattgcggggggtggctggttgatgtg

SEQ ID NO: 800424 - DNA, 75 bp, synthetic construct
  source 1..75: mol_type = other DNA
ttcctgcaacaggtgatgaaagatggcgcagaaaaagccagcgcgcacgcttcccgtacgctaaaagcggtgtac

SEQ ID NO: 800425 - DNA, 75 bp, synthetic construct
  source 1..75: mol_type = other DNA
aacgtatcagcgtgttgttcatcaatatcatctgaacaaccagctgttagctgttgcagcagcgagaatctgggc

SEQ ID NO: 800426 - DNA, 75 bp, synthetic construct
  source 1..75: mol_type = other DNA
acgtcatattgttgaatacaaaaattcagtatcaggtagttgcgccaccaagtgcggtgattctgaagcttcggt

SEQ ID NO: 800427 - DNA, 75 bp, synthetic construct
  source 1..75: mol_type = other DNA
ggcttatagctgaatcaccttctacgacccagcaacttatggcgtggctccaaagagcaaaacgctataaccgtg

SEQ ID NO: 800428 - DNA, 75 bp, synthetic construct
  source 1..75: mol_type = other DNA
acgataccgggcaatagtggtaggcgacacggcacaggcagccgcgtccacagcctcgcaaatactcgacgaaca

SEQ ID NO: 800429 - DNA, 75 bp, synthetic construct
  source 1..75: mol_type = other DNA
tcaatggcgtactcggtggttcctgggatgccctgactcaggggcgagcggatattattgttggcgcgatgcatg

SEQ ID NO: 800430 - DNA, 75 bp, synthetic construct
  source 1..75: mol_type = other DNA
gatagtggcgcgttaatcgagaagaaagtggtcgcccaaactctctttgaacccgtctggattggctggaatgaa

SEQ ID NO: 800431 - DNA, 75 bp, synthetic construct
  source 1..75: mol_type = other DNA
accgtttcacagagaatgtggcaggaaaagttgcagttgctgcaggtgggtcatccgcatcgtggaatgctggtg

SEQ ID NO: 800432 - DNA, 75 bp, synthetic construct
  source 1..75: mol_type = other DNA
gtgagtaaagtcgtacgcattattttcgaatacaaggagcacgttatccataaaaacgctgatggaacagtgcgc

SEQ ID NO: 800433 - DNA, 75 bp, synthetic construct
  source 1..75: mol_type = other DNA
ctatcatgtattaaaacgatcatcagtgacagcgggttacctgagactattgcacagcgttatcagcgagccgga

SEQ ID NO: 800434 - DNA, 75 bp, synthetic construct
  source 1..75: mol_type = other DNA
tgttttttgttgagattgtctcgtgctgttttcttgttgagctttttcatgatattgattcgttttttataaatc

SEQ ID NO: 800435 - DNA, 75 bp, synthetic construct
  source 1..75: mol_type = other DNA
acatttcaagaatcaacaaaaatgcctggcggagatgagttcttacagcgttttctgaccacagagcaagcaaga

SEQ ID NO: 800436 - DNA, 75 bp, synthetic construct
  source 1..75: mol_type = other DNA
aaatgaaagaacaccgtgatggagtacagatcgaagagaatggtattatcgtaggtctgcggcaaagaacgaatc

SEQ ID NO: 800437 - DNA, 75 bp, synthetic construct
  source 1..75: mol_type = other DNA
atggcggaacaagccaattcaggtacgccgtttcgtcagatgcaagagtggaacgcgcagcatggcaaaccgttt

SEQ ID NO: 800438 - DNA, 75 bp, synthetic construct
  source 1..75: mol_type = other DNA
gtcttctgaaagcgattgttatctgccatcccgttttattatccttccagctccattaaggcaaaaagtaaaaag

SEQ ID NO: 800439 - DNA, 75 bp, synthetic construct
  source 1..75: mol_type = other DNA
ctgtttcatctgacgcgttattgattgatatgtcgactattcatcccttacagaccgatgcattaatacgggaat

SEQ ID NO: 800440 - DNA, 75 bp, synthetic construct
  source 1..75: mol_type = other DNA
tattttccttctggatgaatatgtagataaaggcgtaatgaccagggtgcaggctgattttatttgtcgcgcaat

SEQ ID NO: 800441 - DNA, 75 bp, synthetic construct
  source 1..75: mol_type = other DNA
attattatctggaccggctggacacctgctgaccccattctctcgatactggtgtcgcttctggttctgcgtagc

SEQ ID NO: 800442 - DNA, 75 bp, synthetic construct
  source 1..75: mol_type = other DNA
tgggggatctgctgggttctgtcggcgctatcatcgcggcgttgattattatctggaccggctggacgcctgctg

SEQ ID NO: 800443 - DNA, 75 bp, synthetic construct
  source 1..75: mol_type = other DNA
ttgaaaaatatctgataggaggaataacagacgccacaaagggattaatgatgtcgtactcttctatgatgatgg

SEQ ID NO: 800444 - DNA, 75 bp, synthetic construct
  source 1..75: mol_type = other DNA
tttacattactatggacatggtgcgccatttacttggtatgtactggtttatctgtgaaggttaggggcctgatc

SEQ ID NO: 800445 - DNA, 75 bp, synthetic construct
  source 1..75: mol_type = other DNA
aactggccgggggagcagtaaaagaaaccggacgttccgcccgggacaacatccagggctggaaggatgcgaatg

SEQ ID NO: 800446 - DNA, 75 bp, synthetic construct
  source 1..75: mol_type = other DNA
gctggatattgctgaacttaagcgccgtatgtgtagagaaatcccggaagtgcgcaatgtgcatcatgtgcatgt

SEQ ID NO: 800447 - DNA, 75 bp, synthetic construct
  source 1..75: mol_type = other DNA
agtgataatatatggcaactattagatagtttatggaataacgcaaaagtattaggtaaaacattacatgacatg

SEQ ID NO: 800448 - DNA, 75 bp, synthetic construct
  source 1..75: mol_type = other DNA
gcatctgcgacggtcgcatagccttcgccatggcaggcgtcatacccgcaaaggcgaaagaggtatgaaccgccc

SEQ ID NO: 800449 - DNA, 75 bp, synthetic construct
  source 1..75: mol_type = other DNA
gccggaatcggatgagccatcagcgcgccacggcttacccgccagcgaaccgcgaattgtgctaaacaacggcgt

SEQ ID NO: 800450 - DNA, 75 bp, synthetic construct
  source 1..75: mol_type = other DNA
gaacaaatgatagcgcgtaatgaagcgcggatgctgacagatcaatcaacaccaaaactaccgccatcaattaaa

SEQ ID NO: 800451 - DNA, 75 bp, synthetic construct
  source 1..75: mol_type = other DNA
aaagcgcggaagtacgcgattgagcagatgatagcccggaacgaagcgcggaggctggcacagtcgagagaatcc

SEQ ID NO: 800452 - DNA, 75 bp, synthetic construct
  source 1..75: mol_type = other DNA
atgacaaacatgatctcatatcagggacttgttcgcaccttccctaatttaggtggctacctcgatggcgttatt

SEQ ID NO: 800453 - DNA, 75 bp, synthetic construct
  source 1..75: mol_type = other DNA
cggtacgacggggagccagtacgctgtgggaaatcagcgatgtcactgaaccctcagtaaagacagacaggattg

SEQ ID NO: 800454 - DNA, 75 bp, synthetic construct
  source 1..75: mol_type = other DNA
tggcccgccagatgaagcgtgatggtatggcctccgatattaaaattggcgatctgcctattcttaaaaactccg

SEQ ID NO: 800455 - DNA, 75 bp, synthetic construct
  source 1..75: mol_type = other DNA
cagccggtatacaccattcagtattacggccagtcgctggaatatacctcagaacaaatcctggctgataaatat

SEQ ID NO: 800456 - DNA, 75 bp, synthetic construct
  source 1..75: mol_type = other DNA
ctgacctggtcgaaatcctccctgaggcgcgtaaatttggtggttgttatgttttcggtattcagtcctatgccc

SEQ ID NO: 800457 - DNA, 75 bp, synthetic construct
  source 1..75: mol_type = other DNA
atctctggcagcgtcacgccgccgaaaacgatgattcctttgataacctcttctcttccgcgctgtcgctgttca

SEQ ID NO: 800458 - DNA, 75 bp, synthetic construct
  source 1..75: mol_type = other DNA
cgcagacgtaaacctgaaacagaggaagacaaagttggcgcgcccgctcctctgcctgaaccagaagaagcgcca

SEQ ID NO: 800459 - DNA, 75 bp, synthetic construct
  source 1..75: mol_type = other DNA
tgctgccggtgaaattggtgagaaggaaatcctcaaggccagcgagcagtattcttacggtgctgacccggtgcg

SEQ ID NO: 800460 - DNA, 75 bp, synthetic construct
  source 1..75: mol_type = other DNA
aaaatgtaacaaccgagttaataaagcttgggtacgaccagaacgcggctatgactggcgctgacatggcggtgg

SEQ ID NO: 800461 - DNA, 75 bp, synthetic construct
  source 1..75: mol_type = other DNA
actttcgagagagttcaaaatgtcaaagatggtaatactcttgcagcaataataaaccatgagggatgcccttta

SEQ ID NO: 800462 - DNA, 75 bp, synthetic construct
  source 1..75: mol_type = other DNA
cgtttgaaggcttattagttatcgatatgacgcatgtccttaatggacctttcggaactcaacttctttgtaata

SEQ ID NO: 800463 - DNA, 75 bp, synthetic construct
  source 1..75: mol_type = other DNA
attccttcatgggctgcacagattattgagcaggcctggttaagccaacaggacgatcttcaggccatcgcccgt

SEQ ID NO: 800464 - DNA, 75 bp, synthetic construct
  source 1..75: mol_type = other DNA
atgccagaaatcgcatccctacaacttttcaaaatactatctgatgaaacacgcctgggtatcgtactactgctc

SEQ ID NO: 800465 - DNA, 75 bp, synthetic construct
  source 1..75: mol_type = other DNA
acatggtaatgctaggtttgccggaaaacgggaattgcgtcgtttctggtatgaagggccagagaaggaggacag

SEQ ID NO: 800466 - DNA, 75 bp, synthetic construct
  source 1..75: mol_type = other DNA
ccagatcaacgatgatttgacgggatatggtcactgggagtaccagatccaggcaaacacgccggaaaatgaaaa

SEQ ID NO: 800467 - DNA, 75 bp, synthetic construct
  source 1..75: mol_type = other DNA
taagccggtgaactacgatgataccgaagccatcgataacctgcgctacatcatcagctaccttgccaaagaaga

SEQ ID NO: 800468 - DNA, 75 bp, synthetic construct
  source 1..75: mol_type = other DNA
ccttgatgattatggaggcatgggtaagggcgttgaaccttcatacacaacctgattatcaacggcattaccggt

SEQ ID NO: 800469 - DNA, 75 bp, synthetic construct
  source 1..75: mol_type = other DNA
ccgccaatggcgcagacgtggtgtaaggtgatgttagatacgcgcggcggcgtacggttgtcagagcagatccag

SEQ ID NO: 800470 - DNA, 75 bp, synthetic construct
  source 1..75: mol_type = other DNA
ccccgctttggtaacatgtccggtcaaatgcgtaccttcctcgaccagacgggcggcctgtgggcttccggcgca

SEQ ID NO: 800471 - DNA, 75 bp, synthetic construct
  source 1..75: mol_type = other DNA
ttgccaaactatctaaactggctgatgcagcatacgctacccggtcaggtgctgctccagtcatggcttacccgc

SEQ ID NO: 800472 - DNA, 75 bp, synthetic construct
  source 1..75: mol_type = other DNA
cggaactggccgcgtatgagatcgcctgcggcgttccttcgttgatatcgttcgaacatgccgatgctctgtttc

SEQ ID NO: 800473 - DNA, 75 bp, synthetic construct
  source 1..75: mol_type = other DNA
aggcggaactgagcgataacacgctggccctgtacgcgccaaaccgttttgtcctcgattgggtacgggacaagt

SEQ ID NO: 800474 - DNA, 75 bp, synthetic construct
  source 1..75: mol_type = other DNA
tcccgtttgccgggaaataccgcagcactgtctgaactgaatgcctccggcctgacgaccctgctgaatgcggtc

SEQ ID NO: 800475 - DNA, 75 bp, synthetic construct
  source 1..75: mol_type = other DNA
ttattgagaattatgagagcggtggaagtaaagcccagctgccgaatgtggatctgaaaaccatcaatcagaccg

SEQ ID NO: 800476 - DNA, 75 bp, synthetic construct
  source 1..75: mol_type = other DNA
tggctggagccggattatcaaattactgttccacgcgcatttaaaccggaaggagtcgaagatggatctgcgtga

SEQ ID NO: 800477 - DNA, 75 bp, synthetic construct
  source 1..75: mol_type = other DNA
acctttgagcttaattatgctcagatattccagcatctcgaatatatggctaaactctactcgaaaagtaatgct

SEQ ID NO: 800478 - DNA, 75 bp, synthetic construct
  source 1..75: mol_type = other DNA
gctgaaacagtttgatgtggtgcgcttcgcacagaaagcctgttccaatattcatattttgcgcttaatgcgtga

SEQ ID NO: 800479 - DNA, 75 bp, synthetic construct
  source 1..75: mol_type = other DNA
tcgatcgtgtcagtgaattgcaaattccggtgaatgctggctctgtcgatatgctcgaccaactaggccaggttt

SEQ ID NO: 800480 - DNA, 75 bp, synthetic construct
  source 1..75: mol_type = other DNA
caagaagggggcaaagtcgaaactcgcgccttgccggaggtaaaagctggcgattatttggttttgcatgatact

SEQ ID NO: 800481 - DNA, 75 bp, synthetic construct
  source 1..75: mol_type = other DNA
attgagaagcgaacggagaaccagctgctggttcaaagcctggtggaagcctgctccgggaccagcacccaggtt

SEQ ID NO: 800482 - DNA, 75 bp, synthetic construct
  source 1..75: mol_type = other DNA
gtttagtgaatgctttaggggtacgggtagccgtcaaccaggctggtttgacgctggtaagcaccagttggatca

SEQ ID NO: 800483 - DNA, 75 bp, synthetic construct
  source 1..75: mol_type = other DNA
atgccacattcactgttcagtactgataccgatctcaccgctgaaaatctgttgcgcttacccgcagaattcggc

SEQ ID NO: 800484 - DNA, 75 bp, synthetic construct
  source 1..75: mol_type = other DNA
acggatccagagttaattacaggacttttagctcaacgtctgataaaaaaactttgtccacattgttctctaact

SEQ ID NO: 800485 - DNA, 75 bp, synthetic construct
  source 1..75: mol_type = other DNA
gtggaaggaattgttagcggcttatctggacagagatgttggtgcctacatagatgaggtaagaaaaccgtccgg

SEQ ID NO: 800486 - DNA, 75 bp, synthetic construct
  source 1..75: mol_type = other DNA
gtgatgattgaagaaggaacaacgctggcgaatatcttttttgccattgagccttggaaggaactgctaaccgct

SEQ ID NO: 800487 - DNA, 75 bp, synthetic construct
  source 1..75: mol_type = other DNA
catatcaggcctggatgtccctgcaatatattgaatttgcactatttgccaggccggagaaggcgttcactgaac

SEQ ID NO: 800488 - DNA, 75 bp, synthetic construct
  source 1..75: mol_type = other DNA
aaattgaaacgatttgtcgatataacctgccggtgacgatcgttatttttaataatggcggcatctacagaggag

SEQ ID NO: 800489 - DNA, 75 bp, synthetic construct
  source 1..75: mol_type = other DNA
gatacaccatcaacaatgccggacgccgcctggtggtcgacccgattacgcgcattgaaggccacatgcgctgcg

SEQ ID NO: 800490 - DNA, 75 bp, synthetic construct
  source 1..75: mol_type = other DNA
ggatctcctttccaagcgtcgatcccgctcggtggcgcgtccgcgccagatggcgatgggcgctggcgaaagagc

SEQ ID NO: 800491 - DNA, 75 bp, synthetic construct
  source 1..75: mol_type = other DNA
gttaaaaccacacttccaattggaagggttgagtatgtcattgaggttggtagctgatctacctgctggtgttaa

SEQ ID NO: 800492 - DNA, 75 bp, synthetic construct
  source 1..75: mol_type = other DNA
tattgtaaaggtacaaattatgctgcattctttgcagtacaatcaataaataaacctagactttataatactgat

SEQ ID NO: 800493 - DNA, 75 bp, synthetic construct
  source 1..75: mol_type = other DNA
ggggttgagggcgggggattagtcgaatcattacccgcatataactatacttcgcacacaggagagcatgtatta

SEQ ID NO: 800494 - DNA, 75 bp, synthetic construct
  source 1..75: mol_type = other DNA
tgggtgacttctatttcgataatacacctcaggatattgatttgctagagcatatttcccatgttgcttccagtg

SEQ ID NO: 800495 - DNA, 75 bp, synthetic construct
  source 1..75: mol_type = other DNA
caaaccacggctatacaatactgatcaggctaatgcaaatgcaaaattatccagccaacttcagtatatattagc

SEQ ID NO: 800496 - DNA, 75 bp, synthetic construct
  source 1..75: mol_type = other DNA
aagctggttcaggccagcgttactgaaaatgtaaaatacacggtgttacactgtactaaaaaggaattgctcaaa

SEQ ID NO: 800497 - DNA, 75 bp, synthetic construct
  source 1..75: mol_type = other DNA
aattggtagcctgatgtggcatgcggcagaaaatgaggaatatgacgaaaaggctatgcgcattgacatgggtaa

SEQ ID NO: 800498 - DNA, 75 bp, synthetic construct
  source 1..75: mol_type = other DNA
gggtgaagtggcattctttatcgccaagcgtctacgctctaatgtgcgtgagctggaaggggcgctgaaccgtgt

SEQ ID NO: 800499 - DNA, 75 bp, synthetic construct
  source 1..75: mol_type = other DNA
gcggatggggctactgacaatatatcaatggctgttgcgtcaattggtagcctgatgtggcatgcgtcagaaaat

SEQ ID NO: 800500 - DNA, 75 bp, synthetic construct
  source 1..75: mol_type = other DNA
attatattcaattatatccaacaatagacatattaaccttcattttcaccttcttatatcaggcatagaagaaaa

SEQ ID NO: 800501 - DNA, 75 bp, synthetic construct
  source 1..75: mol_type = other DNA
ttttacgtcttctatcccgcacacctttatctgattctggctttacagctttacctgactacaaagggctatctg

SEQ ID NO: 800502 - DNA, 75 bp, synthetic construct
  source 1..75: mol_type = other DNA
aattttggtggcctgcggtggctatgggtgtatgtatctggctatattataagaagggaaggggagtatttattc

SEQ ID NO: 800503 - DNA, 75 bp, synthetic construct
  source 1..75: mol_type = other DNA
atcccatacgggtgagagactattacaatgtccgactgaggttgctatctcagaccgaagggaaaaagaactgtc

SEQ ID NO: 800504 - DNA, 75 bp, synthetic construct
  source 1..75: mol_type = other DNA
cagtcggtcgcgatattcttgctaaaacaagcacactggctgttatccaataccttggtttaagagaactcggaa

SEQ ID NO: 800505 - DNA, 75 bp, synthetic construct
  source 1..75: mol_type = other DNA
ggcagtggtaaatccaatctgcttgaagcattagcagctatcttctttcagttggaaattttgcgggtccgtcga

SEQ ID NO: 800506 - DNA, 75 bp, synthetic construct
  source 1..75: mol_type = other DNA
tcagcatcagccacccggactacaacacactcggtgcttctatcaacaagatcactatgaacacttttggcaaac

SEQ ID NO: 800507 - DNA, 75 bp, synthetic construct
  source 1..75: mol_type = other DNA
gggggcaccttgatatgactcaaaccaagggaacaccaacattcggaaaactccgcaatcctcaaggagagactt

SEQ ID NO: 800508 - DNA, 75 bp, synthetic construct
  source 1..75: mol_type = other DNA
aacattgagctaacggcggaagatttaaatcttgaacaaaccgtagaattagccttaggagcattacagaaaaac

SEQ ID NO: 800509 - DNA, 75 bp, synthetic construct
  source 1..75: mol_type = other DNA
cgccagactttcagcgcggggatcactggtacgctgaccgggaacgccgatactgcgacgaaattaaaatcagcc

SEQ ID NO: 800510 - DNA, 75 bp, synthetic construct
  source 1..75: mol_type = other DNA
catgatactttttagttctccaaacaaaactaatccttatgaacaaataagaatagaagcacagtgcaccagaaa

SEQ ID NO: 800511 - DNA, 75 bp, synthetic construct
  source 1..75: mol_type = other DNA
ataagaaatcaaataaagcaaatgtttcaattgttgccttgatttttacatatatctcaattattggttggagcc

SEQ ID NO: 800512 - DNA, 75 bp, synthetic construct
  source 1..75: mol_type = other DNA
cacaaacgccacaagcggcagtgacgagcaacgtcgcggccccagcacaggtggcgcatgcgcagccgcaacgtg

SEQ ID NO: 800513 - DNA, 75 bp, synthetic construct
  source 1..75: mol_type = other DNA
gtgcttacctgatcaacaggatgtggggcaagaaatgttaattaccactcatacgccgtttctaatttcagatag

SEQ ID NO: 800514 - DNA, 75 bp, synthetic construct
  source 1..75: mol_type = other DNA
tctcttattccataaatgataacaccaatagctatgtaaacagcggaaaggcccggttgcacggtgtggaatttg

SEQ ID NO: 800515 - DNA, 75 bp, synthetic construct
  source 1..75: mol_type = other DNA
gcacaggtgaaactttccggcagaaaagctggtcggtatttgctgaggatgagtggcatctcacggatgcacttg

SEQ ID NO: 800516 - DNA, 75 bp, synthetic construct
  source 1..75: mol_type = other DNA
ccctcgccaaatggtcacggcgaggtacggggttatctggtgaagcccgcaaaaatgagcggcaaaacgccagcc

SEQ ID NO: 800517 - DNA, 75 bp, synthetic construct
  source 1..75: mol_type = other DNA
tgagtttatgcaacgctatccgcaagcgacaggcaaagtgggtattactggattttgctatggcggtggtgtctc

SEQ ID NO: 800518 - DNA, 75 bp, synthetic construct
  source 1..75: mol_type = other DNA
atgaccgcgataaaacacccggtgctgctgtgggggcttcccgttgcagcacttattattttctggctgagtctg

SEQ ID NO: 800519 - DNA, 75 bp, synthetic construct
  source 1..75: mol_type = other DNA
aattattctacagccctccttttctctggagggcgttatcctttgaaatatccgtttattttgatgataattctc

SEQ ID NO: 800520 - DNA, 75 bp, synthetic construct
  source 1..75: mol_type = other DNA
tgtcacagcgactaaccgcgaaacccttgagcaacgttaccgtcacgggatctccaacctcaagctgaagcacgc

SEQ ID NO: 800521 - DNA, 75 bp, synthetic construct
  source 1..75: mol_type = other DNA
gaactggcctgcgcggtgccgttttatggtcgccaggctctggccgccgatgtggcgaaaattgaagcgccttta

SEQ ID NO: 800522 - DNA, 75 bp, synthetic construct
  source 1..75: mol_type = other DNA
agataacggcctgttactcgatgatctcttgcagtttagccaggatggtcagttccatctgatggggcgtcgtgg

SEQ ID NO: 800523 - DNA, 75 bp, synthetic construct
  source 1..75: mol_type = other DNA
taagcaatatcgttttatttccggtaaaagaggatgaccctctggatttgcccctatatttccagacatctgtta

SEQ ID NO: 800524 - DNA, 75 bp, synthetic construct
  source 1..75: mol_type = other DNA
caatggccgttacgtcgtcagcaaaccgttgagccatgaagtggtgcagccacagctggcatcaaactacacgct

SEQ ID NO: 800525 - DNA, 75 bp, synthetic construct
  source 1..75: mol_type = other DNA
acagaaattgtttgcgtgcaaaacgaatacaacattgcccatcgtgcggatgacgaattaattgattctttggct

SEQ ID NO: 800526 - DNA, 75 bp, synthetic construct
  source 1..75: mol_type = other DNA
cgcacttgcgggagaatatggctgcagggaaattagtgttatctgatgatgtgttggcaacactggacagcattg

SEQ ID NO: 800527 - DNA, 75 bp, synthetic construct
  source 1..75: mol_type = other DNA
ccattgcatgccgcaatgctctggtattctgagcaacttgccgcattaagccatacctaccgctatgcctttgtc

SEQ ID NO: 800528 - DNA, 75 bp, synthetic construct
  source 1..75: mol_type = other DNA
atactcttcctgtcaatgcaacatgcacttcagagataacagtaaacacacaaaaattctctgacatcctctact

SEQ ID NO: 800529 - DNA, 75 bp, synthetic construct
  source 1..75: mol_type = other DNA
accgagccaggtcggtaatgaatttgccgagaaatattacggcccggcaagtcaggtggtgcctgaatttgttga

SEQ ID NO: 800530 - DNA, 75 bp, synthetic construct
  source 1..75: mol_type = other DNA
tgtcattcatatgcatggggaattgctgaaagttcgttgttcgcaaagtggtcaggttctcgactggaccggaga

SEQ ID NO: 800531 - DNA, 75 bp, synthetic construct
  source 1..75: mol_type = other DNA
taactttggtacgccagaatacaacgaaccgggaagcggcggctttgttggtgacacactgctggttaacggtgt

SEQ ID NO: 800532 - DNA, 75 bp, synthetic construct
  source 1..75: mol_type = other DNA
ttcaactctggaagaggcaggggaaacactgtccgcagtgcggacaacccataaccaaccagaccggatggaata

SEQ ID NO: 800533 - DNA, 75 bp, synthetic construct
  source 1..75: mol_type = other DNA
atgctgtcgcgtcggggtcatcggttaagtcgttttcgtaaaaataaacgccgcctgcgcgagcgtttacgtcag

SEQ ID NO: 800534 - DNA, 75 bp, synthetic construct
  source 1..75: mol_type = other DNA
ctggtgacgcagaatatagacaacctgcatgaacgcgcaggtaataccaatgtcattcatatgcatggggaactg

SEQ ID NO: 800535 - DNA, 75 bp, synthetic construct
  source 1..75: mol_type = other DNA
gtatgaggattatactgattaaatccctcctgtcgcgaaaaatggcctgcgttattgccagacgtaataaaactt

SEQ ID NO: 800536 - DNA, 75 bp, synthetic construct
  source 1..75: mol_type = other DNA
gacactgtcatttttccgatattgtcttcattaattgactccgccatttctaaatttcaacaccaaatccccgtt

SEQ ID NO: 800537 - DNA, 75 bp, synthetic construct
  source 1..75: mol_type = other DNA
acatttatgaaacggaaaatctcagcgatcaaaaattactttatatagattgccgtagtacaaatgaaatcaaga

SEQ ID NO: 800538 - DNA, 75 bp, synthetic construct
  source 1..75: mol_type = other DNA
gcagcaatgctaaagcgcgtgaagcaatggcttatgcccagttcctcgctggcatggcattcaacaacgcatctc

SEQ ID NO: 800539 - DNA, 75 bp, synthetic construct
  source 1..75: mol_type = other DNA
aagatgcgtgtgggtttactaacccgattcaggcaactcacgaagaaattgtggcgatttatcgcgctgcgatgt

SEQ ID NO: 800540 - DNA, 75 bp, synthetic construct
  source 1..75: mol_type = other DNA
cgtgattgtgccgctgcaatgggcgtgaacgtgacaggtaaaaacgacgcggaaggtgctgaagcctgcattaac

SEQ ID NO: 800541 - DNA, 75 bp, synthetic construct
  source 1..75: mol_type = other DNA
atggggtttaatatcgtcacggtgaatgtgtcccagaccatcggggccattccctcgaatttgcagcagatgtcc

SEQ ID NO: 800542 - DNA, 75 bp, synthetic construct
  source 1..75: mol_type = other DNA
ggcgaaggttgggaaggtggtgtcccgttgttccttgacgagcaatcgcaccagttcctgcaacttgaatcagga

SEQ ID NO: 800543 - DNA, 75 bp, synthetic construct
  source 1..75: mol_type = other DNA
gttcacagataaaacactctccaggaaacccggggcggttcagtacatcggcacggcatcctacttcgaccctga

SEQ ID NO: 800544 - DNA, 75 bp, synthetic construct
  source 1..75: mol_type = other DNA
acttgaataagatgataatcaagccagccatcgccgaactgaacgaaaaaagcgatctggttgtaactgttgaga

SEQ ID NO: 800545 - DNA, 75 bp, synthetic construct
  source 1..75: mol_type = other DNA
tctaatttggccggaaatcttattgatatcggaagttttagtaatgtaaaaaatatagcggaggaaggcttaaat

SEQ ID NO: 800546 - DNA, 75 bp, synthetic construct
  source 1..75: mol_type = other DNA
ctggctgtgacggtagagccaatcaagaaggggcgaacggtggtcgctctgcgttttctgttcaaggaggacaaa

SEQ ID NO: 800547 - DNA, 75 bp, synthetic construct
  source 1..75: mol_type = other DNA
atgtctgatttgatagcctacaaatctaacgcccttatcgaggcaagttacaggctcaccttacaggaacagcgc

SEQ ID NO: 800548 - DNA, 75 bp, synthetic construct
  source 1..75: mol_type = other DNA
aaaaaaagcgacctggctgtaacggttgagacgatcaaaaaggggcgcacggttgtagccctgcattttcgcttc

SEQ ID NO: 800549 - DNA, 75 bp, synthetic construct
  source 1..75: mol_type = other DNA
cacgcagcttggttacgacgcactttctgttccctttggcggcggcaagggtgccaaacagcagtggattgaata

SEQ ID NO: 800550 - DNA, 75 bp, synthetic construct
  source 1..75: mol_type = other DNA
tctggaaggagaaaaacaaccatttaactatctggtcggtaagcctcagagcgaggtggatcttgaatgggaagc

SEQ ID NO: 800551 - DNA, 75 bp, synthetic construct
  source 1..75: mol_type = other DNA
catctagaatttactggtagcacgggcgttaaagtttacttctgcgatcctcagagtccctggcagcgaggaaca

SEQ ID NO: 800552 - DNA, 75 bp, synthetic construct
  source 1..75: mol_type = other DNA
taaattgactcttcaggaacagcgattcttgttactttgcattggtcgattgaagtcgggttctgatgcagaatc

SEQ ID NO: 800553 - DNA, 75 bp, synthetic construct
  source 1..75: mol_type = other DNA
taatcaagaatatatctagattatcaagaagttacagtataaggatatacgaactcctccagcagttccgcagta

SEQ ID NO: 800554 - DNA, 75 bp, synthetic construct
  source 1..75: mol_type = other DNA
gtcgttgggcgaattggcggtcgcgccttgcaactgccactgaattatcaggtgctgtacaccgagccagtatgc

SEQ ID NO: 800555 - DNA, 75 bp, synthetic construct
  source 1..75: mol_type = other DNA
cgttctgatcggcgcaagcctggcgctcgcgggcacgctgctgcaaaccctgacccacaacccaatggcctctcc

SEQ ID NO: 800556 - DNA, 75 bp, synthetic construct
  source 1..75: mol_type = other DNA
ggtagcgtcggtgtgttctggcgcaataacgaaacgccttcttatgctttaagtcagtttctgcactttttacag

SEQ ID NO: 800557 - DNA, 75 bp, synthetic construct
  source 1..75: mol_type = other DNA
atggcgaactgggcgcaaaaactaaaactacatcacctgcaaatgctggtggcgctgggtgaacagggtaatctg

SEQ ID NO: 800558 - DNA, 75 bp, synthetic construct
  source 1..75: mol_type = other DNA
gatctggtaagaaatccgattgctgcgttgtcggcggctgccgcaggaaaatctgcggcaaacgtcaccgttacg

SEQ ID NO: 800559 - DNA, 75 bp, synthetic construct
  source 1..75: mol_type = other DNA
atgggatttaatatcgtcacggtgaatgtgtcccagaccatcggggccataccctcgaatctgcaacagatggct

SEQ ID NO: 800560 - DNA, 75 bp, synthetic construct
  source 1..75: mol_type = other DNA
gaaatcgctgcgctgaaatattatatggaagatccgctccagcgtttttacgcttacctggtaccgcagacgtgg

SEQ ID NO: 800561 - DNA, 75 bp, synthetic construct
  source 1..75: mol_type = other DNA
gcttatctgcgataagctccagcaggtggaactgaagcgcgttccgcgcgtggagaatctgctctattttatgca

SEQ ID NO: 800562 - DNA, 75 bp, synthetic construct
  source 1..75: mol_type = other DNA
atgagcaataacgtactgacacaaactatcgttaccggcagtgacccgcgtggcctgccagagttcagcgccatc

SEQ ID NO: 800563 - DNA, 75 bp, synthetic construct
  source 1..75: mol_type = other DNA
ccagccagggacaactggtgatactcaacctgccaaagatagaacagaaaggcagcgtcggtgtgttctggcgca

SEQ ID NO: 800564 - DNA, 75 bp, synthetic construct
  source 1..75: mol_type = other DNA
tcactcagcctgcgctgtcgaaatggctgtcacaactcgaagatgagatcggcctcacactctttgagcggcaca

SEQ ID NO: 800565 - DNA, 75 bp, synthetic construct
  source 1..75: mol_type = other DNA
ggcgtgttaagtcgctggctgctgctgaagaataacgtcatgccagaggtggcaaccgggaccacggccgaaaaa

SEQ ID NO: 800566 - DNA, 75 bp, synthetic construct
  source 1..75: mol_type = other DNA
ggaaacacccgttgagtctctgttgacgcagtaccatgatgcccgtgcgcagaagcagaatacagatgcgctgga

SEQ ID NO: 800567 - DNA, 75 bp, synthetic construct
  source 1..75: mol_type = other DNA
ccggaagttaatcacaaggatggaaataaacttaataataaagttgaaaatcttgagtgggtaacgcgaacagaa

SEQ ID NO: 800568 - DNA, 75 bp, synthetic construct
  source 1..75: mol_type = other DNA
ctcatggcattaaaccaggaggatatgcatttgtcggtctgtatccaggtggcgggaaaagaccatcatataaaa

SEQ ID NO: 800569 - DNA, 75 bp, synthetic construct
  source 1..75: mol_type = other DNA
ctttggggtaatgtgggagtacagacaggtgataaggggtacagcgacacttcagccatgctgggcgttaaatat

SEQ ID NO: 800570 - DNA, 75 bp, synthetic construct
  source 1..75: mol_type = other DNA
ccgtcgaagccgctattgcccgtgccaaagcacgcaagctggaaccgcaacaggctaatacggaaccagaacaac

SEQ ID NO: 800571 - DNA, 75 bp, synthetic construct
  source 1..75: mol_type = other DNA
ggggcagccccacggatggccggtatggatcagcatgaacaggctattattgttcatgaaaccatgaacaatagt

SEQ ID NO: 800572 - DNA, 75 bp, synthetic construct
  source 1..75: mol_type = other DNA
agaatttggtgtttgtgcgcagacagtgtgcaacataaaaaacaaatcagcgtaccgacgttttttggaggggat

SEQ ID NO: 800573 - DNA, 75 bp, synthetic construct
  source 1..75: mol_type = other DNA
atgaaatatttttcagttttagatgtgctgatggcactgattgaaggtcgagtaagccgtaaccggattctacag

SEQ ID NO: 800574 - DNA, 75 bp, synthetic construct
  source 1..75: mol_type = other DNA
tggaagactggaggaaactatatatagatgacaaacttaactggaaagcaagtgatgttatatactggttgttta

SEQ ID NO: 800575 - DNA, 75 bp, synthetic construct
  source 1..75: mol_type = other DNA
atgcaaagaaaaacattactcgcagcccttatagctatcctgaatggaacggcataccaggctcatgcttattca

SEQ ID NO: 800576 - DNA, 75 bp, synthetic construct
  source 1..75: mol_type = other DNA
gagttccgcccgttcgtggaggtgaactggctgcacaacacccgtgattttggtacccgcatgaacggcgtgacg

SEQ ID NO: 800577 - DNA, 75 bp, synthetic construct
  source 1..75: mol_type = other DNA
tgccagtggcggggatataaaccttaaagggaccactatcaccacaaaaggagaacatagtgatggtgttttttc

SEQ ID NO: 800578 - DNA, 75 bp, synthetic construct
  source 1..75: mol_type = other DNA
caactggataagccagttgatgacgtcagccgtatgcttcgtcttatacgagcgcattacctcggtagacacccc

SEQ ID NO: 800579 - DNA, 75 bp, synthetic construct
  source 1..75: mol_type = other DNA
caaagcgcgcaaactggaacagcaacaggctaatgcggagccagaagaacaggttgatccgcgcaaagctgccgt

SEQ ID NO: 800580 - DNA, 75 bp, synthetic construct
  source 1..75: mol_type = other DNA
catggggaattcttcgctatcctggtcgccggtatcgacctttcgcttggcgcgattctggcgctttccggtatg

SEQ ID NO: 800581 - DNA, 75 bp, synthetic construct
  source 1..75: mol_type = other DNA
ttttccgtggcacttttccagaagatgaaaaaatcggacaattcgccggacaacctggcgcatgtttccgtgtag

SEQ ID NO: 800582 - DNA, 75 bp, synthetic construct
  source 1..75: mol_type = other DNA
tttttcgtggcaattttccagaagataaagaaattggacaattcgcaggtgaacgtggagtatgtttccgtgtag

SEQ ID NO: 800583 - DNA, 75 bp, synthetic construct
  source 1..75: mol_type = other DNA
attaaatttacccgccagatcgaatttatcgccacaggcgcaggcagtgaaagagcttctgttgtcagtgattag

SEQ ID NO: 800584 - DNA, 75 bp, synthetic construct
  source 1..75: mol_type = other DNA
atagctattgtacaattccacaaactaagttccgtaaatgggatgaaatggacgttttactctggaagttaggaa

SEQ ID NO: 800585 - DNA, 75 bp, synthetic construct
  source 1..75: mol_type = other DNA
gtgacaatgttgaagacaggcgaaacagctctggtggtccgtcaatgggcggtcccggtttccgtctgccaagcg

SEQ ID NO: 800586 - DNA, 75 bp, synthetic construct
  source 1..75: mol_type = other DNA
acgacaatccgatctgttttggcgaagagtcgctattttcacgcgttgatgaaattcgagtcctggagaaaaccg

SEQ ID NO: 800587 - DNA, 75 bp, synthetic construct
  source 1..75: mol_type = other DNA
tcgaaactgagctggatctcatcggtaaaatcggtttacaaaattacctgcaatcacaaataaaagttaaagatt

SEQ ID NO: 800588 - DNA, 75 bp, synthetic construct
  source 1..75: mol_type = other DNA
aacgggtacgcgcaatgaaatccgtgataaagcattgctgcaaataacttacattcatggacttcgcgtcagtga

SEQ ID NO: 800589 - DNA, 75 bp, synthetic construct
  source 1..75: mol_type = other DNA
atgggtaaaacctatcagcaaccgaagctggtcatgtaccgtggaatgacgcgtaccggctgcggggcgggccag

SEQ ID NO: 800590 - DNA, 75 bp, synthetic construct
  source 1..75: mol_type = other DNA
cggtgattctggctaccacagaagatacctgggggcagcaatttgagaagatggggaagacttatcagcaaccga

SEQ ID NO: 800591 - DNA, 75 bp, synthetic construct
  source 1..75: mol_type = other DNA
acttgagctggatggcgcgaagaatttgcgtgaggcaattggttatgccgatagcgttcatgattacgtcagccg

SEQ ID NO: 800592 - DNA, 75 bp, synthetic construct
  source 1..75: mol_type = other DNA
gaagataaccttgccgagctggtgttcgacacgccgctgtggctggcggataacgatcgcctggtgctgcgcgat

SEQ ID NO: 800593 - DNA, 75 bp, synthetic construct
  source 1..75: mol_type = other DNA
ttcaaattctggaatattttgaccggattggctttacgcgtcgccgtggaaatgatcatttattacgtgacgcat

SEQ ID NO: 800594 - DNA, 75 bp, synthetic construct
  source 1..75: mol_type = other DNA
agggatgcgcgaattgctgcaacagccgggctatattcaggccggttatagcttgctgaatgcaccggttgctgc

SEQ ID NO: 800595 - DNA, 75 bp, synthetic construct
  source 1..75: mol_type = other DNA
atatgcccaatcaccccgcgattaaggacacgtttactgcgaatcaactgaccagctctgcagaatttaaaaagc

SEQ ID NO: 800596 - DNA, 75 bp, synthetic construct
  source 1..75: mol_type = other DNA
tttacgtgaagcgcgtggccttgatactgacattctcaaaggttgttttacccagggcgcgtttgtccgtcatgg

SEQ ID NO: 800597 - DNA, 75 bp, synthetic construct
  source 1..75: mol_type = other DNA
gcttgttgaatgcgccggttgccgcccgctggcagcggaaaatcctcgacacattagcggcttatcatgagcagc

SEQ ID NO: 800598 - DNA, 75 bp, synthetic construct
  source 1..75: mol_type = other DNA
aggtttactaaattatcttataaaaagggaactaaaggtaaaaccataatggatgatgaattccttgggtttgct

SEQ ID NO: 800599 - DNA, 75 bp, synthetic construct
  source 1..75: mol_type = other DNA
ctctggttttagcattgataaacacgccgaactcaaagataagtatataatatcccgcgatggaaacaatagaaa

SEQ ID NO: 800600 - DNA, 75 bp, synthetic construct
  source 1..75: mol_type = other DNA
ttcatgcaggaaataaaaagaaaagaagagatcaacacaaatgaaatcaatgaactaagaaataaaacatcaagt

SEQ ID NO: 800601 - DNA, 75 bp, synthetic construct
  source 1..75: mol_type = other DNA
ggcagcgtatcgcgcttaacatcgcgggtgatgcggaaaaagagcagattaaccgtggcgactggctgcttgccg

SEQ ID NO: 800602 - DNA, 75 bp, synthetic construct
  source 1..75: mol_type = other DNA
agtcagatttgaatgcgtaaaaacaccgtccgcgcctgctggcaaagacggcagaatcagaattgtgaaatttgg

SEQ ID NO: 800603 - DNA, 75 bp, synthetic construct
  source 1..75: mol_type = other DNA
tacgttgcgtgccatcggttttctccggtggcacggtgttactcagcgggagttcagcccgcgcaagattgtaga

SEQ ID NO: 800604 - DNA, 75 bp, synthetic construct
  source 1..75: mol_type = other DNA
gtatgagatgaacgatgaggattatttcgaaatcaacagtgccagcgttaaaagtctgagcctaacgccatcact

SEQ ID NO: 800605 - DNA, 75 bp, synthetic construct
  source 1..75: mol_type = other DNA
ggaacgggtaaatcaacattgattgatttttgctggcggctgtgcggtcgtgacaactacgaaggcgttgatcca

SEQ ID NO: 800606 - DNA, 75 bp, synthetic construct
  source 1..75: mol_type = other DNA
cgttttacgctggctgacggcgtgtggtgggagcgcatcatagaccgaccgggacgcttcgcgcgcaaggcgaat

SEQ ID NO: 800607 - DNA, 75 bp, synthetic construct
  source 1..75: mol_type = other DNA
gtggggccactgaagggcgcatttactcaggagcgataccaggacaaggaaagcggcgaacaggccgctactgtg

SEQ ID NO: 800608 - DNA, 75 bp, synthetic construct
  source 1..75: mol_type = other DNA
cccagaatgggcttgccgttagtatcccgcaactggagcaggttgccgctattcaccatgtgaagatccaaacca

SEQ ID NO: 800609 - DNA, 75 bp, synthetic construct
  source 1..75: mol_type = other DNA
tcttcaggaggcgcgcaatattgctgtggagccactgaagggcgcatttactcaggagcgataccaggacaagga

SEQ ID NO: 800610 - DNA, 75 bp, synthetic construct
  source 1..75: mol_type = other DNA
tgtccagacaggcaaacgccggaaaaggagtagccgaagccagagaacctgaagtactgaaatgccggatattca

SEQ ID NO: 800611 - DNA, 75 bp, synthetic construct
  source 1..75: mol_type = other DNA
ttgcaaagaatcacgcgcagcttgtgggcttgctggaggcgcttgcacttgttgtaccggtgccggttgaacgta

SEQ ID NO: 800612 - DNA, 75 bp, synthetic construct
  source 1..75: mol_type = other DNA
cagctggataagttcatccagatgcgcctccctgaaatcaaagaggtaaagacgcagaatttcatcggctataac

SEQ ID NO: 800613 - DNA, 75 bp, synthetic construct
  source 1..75: mol_type = other DNA
tgtggccgtgaaaataactgcgcacatcagattgtcgtgaaagagctgtatccggatatctttgaagactggtca

SEQ ID NO: 800614 - DNA, 75 bp, synthetic construct
  source 1..75: mol_type = other DNA
ttgccaaaaatcacgcgcaacttatcgcgctggtcagggcgctgaaatgcgttattgatatcccggatgaatggc

SEQ ID NO: 800615 - DNA, 75 bp, synthetic construct
  source 1..75: mol_type = other DNA
ctacgaaatcaatgacgaggattattttgaaattgatggcataaacgcaaaaccattaagtaaaacaccaacatt

SEQ ID NO: 800616 - DNA, 75 bp, synthetic construct
  source 1..75: mol_type = other DNA
tgcggccgtgaaaacaactgcggccatcaggtcgttgtcaaagagcagtatcctgaaatctttgaggactggtct

SEQ ID NO: 800617 - DNA, 75 bp, synthetic construct
  source 1..75: mol_type = other DNA
atgctaacaaaatatgcccttgtggcagtcatagtgctgtgttgtacagtactgggattcacgctgatggtagac

SEQ ID NO: 800618 - DNA, 75 bp, synthetic construct
  source 1..75: mol_type = other DNA
cctcaagcagcaacttattctttggtaaagcatggacttaaagattgctttaagcttcgccccgacttgctgatt

SEQ ID NO: 800619 - DNA, 75 bp, synthetic construct
  source 1..75: mol_type = other DNA
aactgatgctctctgcacaactgcgacataacgcggtgaatcgccataagttttgtgtcgattatgatgagtata

SEQ ID NO: 800620 - DNA, 75 bp, synthetic construct
  source 1..75: mol_type = other DNA
atgctgacgaaatatgcccttgtggcagtcatagtgctgtgtttcacggtcctgggatttacgcttctggtcgga

SEQ ID NO: 800621 - DNA, 75 bp, synthetic construct
  source 1..75: mol_type = other DNA
atgctgacgaaatatgcccttgtggcagtcatagtgctgtgtttcacggtactgggatttacgcttctggtcggc

SEQ ID NO: 800622 - DNA, 75 bp, synthetic construct
  source 1..75: mol_type = other DNA
atgctgacgaaatatgcccttgtggcagtcatagtgctgtgtttaacggtactgggatttacgcttctggtcgga

SEQ ID NO: 800623 - DNA, 75 bp, synthetic construct
  source 1..75: mol_type = other DNA
tcgctgtgtgagtttacggtaaaggaacgtaatattgagtttaaggctgttctcgcttacgaaccgaagaagtag

SEQ ID NO: 800624 - DNA, 75 bp, synthetic construct
  source 1..75: mol_type = other DNA
cggtcatagtgctgtgtttgacagtgctgggatttacgcttctggtcggcgactcgctgtgtgagttcaccgtaa

SEQ ID NO: 800625 - DNA, 75 bp, synthetic construct
  source 1..75: mol_type = other DNA
cttctataaaggaagggatgctttcgcttaatggaataacttttgaagcatcaaggttttcaaaattacctgatt

SEQ ID NO: 800626 - DNA, 75 bp, synthetic construct
  source 1..75: mol_type = other DNA
acattaaaactatgggttgttccgtaccagataacagcaaaccgcggggagaggatgatgtgggtgaaggatgtg

SEQ ID NO: 800627 - DNA, 75 bp, synthetic construct
  source 1..75: mol_type = other DNA
tcagcgtatgcctttgcttgagatttttattcaccagtttttgcatagcgttagccaattacttaaacaaggttt

SEQ ID NO: 800628 - DNA, 75 bp, synthetic construct
  source 1..75: mol_type = other DNA
acgcctcgagcgtggtatggctcattacaacgagccaatggcatgggcgcaattgatcctgaggggaatgagccc

SEQ ID NO: 800629 - DNA, 75 bp, synthetic construct
  source 1..75: mol_type = other DNA
atgctgacgaaatatgcccttgtggcagtcatagtgctgtgtttgacggtactgggatttacgcttctggtcggg

SEQ ID NO: 800630 - DNA, 75 bp, synthetic construct
  source 1..75: mol_type = other DNA
tgctcaccatgtaccaccgcgccacttagcgcgattctgttgtatatcgcccaaagcggtaacatgtggctgggc

SEQ ID NO: 800631 - DNA, 75 bp, synthetic construct
  source 1..75: mol_type = other DNA
gcctttatcaccagcttacaggccaaacgtagctggatgcgcattgtacaaattatactgctggcggcggcgctg

SEQ ID NO: 800632 - DNA, 75 bp, synthetic construct
  source 1..75: mol_type = other DNA
catcgtactgggcggtaaacagcggctatccaccgccagagcattgctgctgacctttatttatgttcaggggat

SEQ ID NO: 800633 - DNA, 75 bp, synthetic construct
  source 1..75: mol_type = other DNA
gggcagtttgatatttcgttacggtgcaccattgaaaatgccacagatgcattaaatgctataaagaaagcgaat

SEQ ID NO: 800634 - DNA, 75 bp, synthetic construct
  source 1..75: mol_type = other DNA
atgcgttggcaagggcgacgtgaaagtgacaatgttgaagacaggcgcaacagctctggtggtccgtcaatgggc

SEQ ID NO: 800635 - DNA, 75 bp, synthetic construct
  source 1..75: mol_type = other DNA
ttgcccaggggtacgttatcgcccatgaagtcggtcatcatgtgcagaaactgttaggcatcgagccgaaagttc

SEQ ID NO: 800636 - DNA, 75 bp, synthetic construct
  source 1..75: mol_type = other DNA
ctgccgaaaagcggcccgtggatggaacaagtcaaaaccgcgtttggttttgtgatcctcgcactgccggtcttc

SEQ ID NO: 800637 - DNA, 75 bp, synthetic construct
  source 1..75: mol_type = other DNA
ctggtagttgccgccgcagggttacagttccaggcggcgctacagcacccatacgtgctcattggcctcgccatc

SEQ ID NO: 800638 - DNA, 75 bp, synthetic construct
  source 1..75: mol_type = other DNA
atgctgacgaaatatgcccttgtggcagtcatagtgctgtgtttgacggttctgggatttacgcttctggtcggt

SEQ ID NO: 800639 - DNA, 75 bp, synthetic construct
  source 1..75: mol_type = other DNA
cccctcttcactgcaaacgcgcctcacgctgatgagcaatcgccaacagggtggctcgcccggcggtgtgtttgt

SEQ ID NO: 800640 - DNA, 75 bp, synthetic construct
  source 1..75: mol_type = other DNA
ttttgccggattattcgacgcgccgggacgttcacaatttgtccccgcggatcaagcctttgcttttgattttca

SEQ ID NO: 800641 - DNA, 75 bp, synthetic construct
  source 1..75: mol_type = other DNA
gtccttggcctaccgacaattctcttttttgacggacaaggccaggagcatccacaagcacgcgtcacgggcttt

SEQ ID NO: 800642 - DNA, 75 bp, synthetic construct
  source 1..75: mol_type = other DNA
gcttaatggaataacttttgaagcatcaaggttttcaaaattacctgattcactcgcaaagttgccgcaaaataa

SEQ ID NO: 800643 - DNA, 75 bp, synthetic construct
  source 1..75: mol_type = other DNA
cagatgagtttcagccgttattgaataccgaaggcccggtgaaatatgtacgcccggatgtgagtcattttgagg

SEQ ID NO: 800644 - DNA, 75 bp, synthetic construct
  source 1..75: mol_type = other DNA
gcccggatgtcagccattttgaggcgaagaaactgcgccgtggcgattattcgccggagttgtttttggatttgc

SEQ ID NO: 800645 - DNA, 75 bp, synthetic construct
  source 1..75: mol_type = other DNA
cacgtattcgcgcgatcctgcgccgttcgcactggagcgagcaacagcaaaacaacgacaacggttcaccgacac

SEQ ID NO: 800646 - DNA, 75 bp, synthetic construct
  source 1..75: mol_type = other DNA
agtttcaaccattattaaataccgaaggtccggtgaaatatgttcgcccggatgtcagccattttgaagcgaaga

SEQ ID NO: 800647 - DNA, 75 bp, synthetic construct
  source 1..75: mol_type = other DNA
cgaagaagttgcgccgtggcgattattcgccggaattgtttttggatttacacggtctgacgcagctgcaggcca

SEQ ID NO: 800648 - DNA, 75 bp, synthetic construct
  source 1..75: mol_type = other DNA
agcaggaactgggcgcgttgattgccgcctgccgccgtgaacatgtgttttgcgcatgcgtaatgcacgggcacg

SEQ ID NO: 800649 - DNA, 75 bp, synthetic construct
  source 1..75: mol_type = other DNA
cttcaaccagatagcggtgaatgtcggttgtttaataagccattaaatgaatggtcaatcactgaactggcaaaa

SEQ ID NO: 800650 - DNA, 75 bp, synthetic construct
  source 1..75: mol_type = other DNA
atgaactttagacgcttgaaatacttcgtcaaaattgtagatattggtagcctgactcaggctgctgaagtattg

SEQ ID NO: 800651 - DNA, 75 bp, synthetic construct
  source 1..75: mol_type = other DNA
ttatcgccacaggcgcaggcagtgaaagagcttctgttgtcagtgattagtaatccagccatggaaaaaagacaa

SEQ ID NO: 800652 - DNA, 75 bp, synthetic construct
  source 1..75: mol_type = other DNA
ttagttttttaatactatggactgctgcagtgcatgcgacagtcagtatcgatattactgactggaatgactctg

SEQ ID NO: 800653 - DNA, 75 bp, synthetic construct
  source 1..75: mol_type = other DNA
aaaaaactctcatatagccacacttgtagaccgaaaaatgatcttacccagcaatagtggacacgcagctaagtg

SEQ ID NO: 800654 - DNA, 75 bp, synthetic construct
  source 1..75: mol_type = other DNA
gctggatattcaccatcaacaacatctgtttcgtttattacgccagttggttcgcgaacggcaatttaacgtctg

SEQ ID NO: 800655 - DNA, 75 bp, synthetic construct
  source 1..75: mol_type = other DNA
catgtaatggcatttcaccaggcaccgaaagagtacggcggagatgcagcgttgttagtgttgattgaagtggaa

SEQ ID NO: 800656 - DNA, 75 bp, synthetic construct
  source 1..75: mol_type = other DNA
aagtcgcgtcccgaacccggcagcaactctgtaacatcatgcgttacgccgtacaacagggattcactgaaaata

SEQ ID NO: 800657 - DNA, 75 bp, synthetic construct
  source 1..75: mol_type = other DNA
tcgcttcagtggcaaagagtcccgcgtcagtctgggtgcatatccgctggtttcacttgctgaagcaagacaaca

SEQ ID NO: 800658 - DNA, 75 bp, synthetic construct
  source 1..75: mol_type = other DNA
acccggcgcagcatctggaaggcgtcaccgcgccgccggttaagaatcactatcccgctctgccgctggagcggt

SEQ ID NO: 800659 - DNA, 75 bp, synthetic construct
  source 1..75: mol_type = other DNA
tggacttcgcgcaatggcctgtagcgccctggtagagtcggatctctggtcacgcgatacggtggaacggcaaat

SEQ ID NO: 800660 - DNA, 75 bp, synthetic construct
  source 1..75: mol_type = other DNA
gcctgtagcgccctggtggagtcggagctgtggtcacgcgatacggtggagcggcaaatgagccaccaggagcgt

SEQ ID NO: 800661 - DNA, 75 bp, synthetic construct
  source 1..75: mol_type = other DNA
gcgcagaatatcaacccggctcaacaacgcatggatgaaaaagccgccacttcaccggaaaagtgttttaaaacg

SEQ ID NO: 800662 - DNA, 75 bp, synthetic construct
  source 1..75: mol_type = other DNA
ggtctatgcgcctgaaggcacggcttccgccacagcggaaaccatgccccccctacccgacctgccggaaatgcg

SEQ ID NO: 800663 - DNA, 75 bp, synthetic construct
  source 1..75: mol_type = other DNA
ctacagccgctggaaaccggaatgcagatgatgcgcaccgcagacaccctctggccggaaagcctgcaacagcag

SEQ ID NO: 800664 - DNA, 75 bp, synthetic construct
  source 1..75: mol_type = other DNA
tggactggttcaatacccgcaccgggaatattctgcgccagcaggtgtccttttccgaaaatgatctgccgttgc

SEQ ID NO: 800665 - DNA, 75 bp, synthetic construct
  source 1..75: mol_type = other DNA
agcgatgatgcagtggtggtcggattatctggaagcatgccgagaatcttatgcaccgccttatacaattggtaa

SEQ ID NO: 800666 - DNA, 75 bp, synthetic construct
  source 1..75: mol_type = other DNA
agataacgggccggtacgttcagctgattttgagcatcctcgtaaaggtgcgagcggctggtgggagtggaagcc

SEQ ID NO: 800667 - DNA, 75 bp, synthetic construct
  source 1..75: mol_type = other DNA
tcgagtatgaaaaagtcgggacgatgcatcgtgtccgtatttttggtcgcatgggtgaaattgtcaaaagtgaat

SEQ ID NO: 800668 - DNA, 75 bp, synthetic construct
  source 1..75: mol_type = other DNA
gctgacgagccagtgctgggcgctgaaagagctggcaaaggatatctggaacaggccatggagcgaggaaagacg

SEQ ID NO: 800669 - DNA, 75 bp, synthetic construct
  source 1..75: mol_type = other DNA
cgatgctgaacatcgcaaatatgggctatttctcttctgaccggactattaaagagtacgccgatcttatctggc

SEQ ID NO: 800670 - DNA, 75 bp, synthetic construct
  source 1..75: mol_type = other DNA
cgatgctgaacattgccaatatgggctacttctcttctgaccgtactatcaaagagtacgctgatcatatctggc

SEQ ID NO: 800671 - DNA, 75 bp, synthetic construct
  source 1..75: mol_type = other DNA
ggtgcgaatgtcgagatgctggatcatgtcggtgctgacaatatctttatctttggtaacactgcggaagaagtg

SEQ ID NO: 800672 - DNA, 75 bp, synthetic construct
  source 1..75: mol_type = other DNA
ggttcgttcctttctgccggaagcaccgttgtgggtcgcggttaatgaacgggatcagccggttgggtttatgtt

SEQ ID NO: 800673 - DNA, 75 bp, synthetic construct
  source 1..75: mol_type = other DNA
atggttattagtattcgccgctcacagcatgaggaaggggaggaactcgttgcgatttggtgtcgatctgtcgat

SEQ ID NO: 800674 - DNA, 75 bp, synthetic construct
  source 1..75: mol_type = other DNA
atccagccgtagcctgttccggcatcgaatgttacccttatcgcctgatctttaagggggttatcgtggctgttc

SEQ ID NO: 800675 - DNA, 75 bp, synthetic construct
  source 1..75: mol_type = other DNA
tggcctgggtaaccagctacccggtacaacggctgatttccagaacatgatgcagatgctggtgcgtcaggggat

SEQ ID NO: 800676 - DNA, 75 bp, synthetic construct
  source 1..75: mol_type = other DNA
aataatgctcctgaaatattattgaatggtcctcttgttaatttaggattgccatctgatgtatttcatcaatca

SEQ ID NO: 800677 - DNA, 75 bp, synthetic construct
  source 1..75: mol_type = other DNA
tgattcattacgactggccgggaaatattcgtgagctggaaaacgcggtggaacgggcagtggtgctgctgaccg

SEQ ID NO: 800678 - DNA, 75 bp, synthetic construct
  source 1..75: mol_type = other DNA
tcctacactaaccacacgctgatgagcgaggcgctggaaacctggccggttgatatgctgggtaaaattctgccg

SEQ ID NO: 800679 - DNA, 75 bp, synthetic construct
  source 1..75: mol_type = other DNA
ggggatgaacggggagtcggcaggtaatgccctgcgaaaagttatccagtccggattaagcgttaagaaaatcag

SEQ ID NO: 800680 - DNA, 75 bp, synthetic construct
  source 1..75: mol_type = other DNA
cttgcgattctgaaactgggattgatgggcgtgggcggtgccatcagtattgtcagcaggatcatgtcgatgacg

SEQ ID NO: 800681 - DNA, 75 bp, synthetic construct
  source 1..75: mol_type = other DNA
gggttttaaggttacgggacgctctgaggtggacgatttggggaaaccgtatccgttgctgaatctggcgtatgt

SEQ ID NO: 800682 - DNA, 75 bp, synthetic construct
  source 1..75: mol_type = other DNA
ggatcaggcaggtgttaacggcattatgcgacaattctgtatccgtttactggcacaatcctcttatcagcttgt

SEQ ID NO: 800683 - DNA, 75 bp, synthetic construct
  source 1..75: mol_type = other DNA
tcagtcattattctggcgacatcattgactggtgtcaccgatgaacatgctatcggtaaagccttcaccgaatct

SEQ ID NO: 800684 - DNA, 75 bp, synthetic construct
  source 1..75: mol_type = other DNA
atgaaaattttaaaactgttaaccgccacaattctgctttccgccttcagccacagcgcgttcgccgacgagcag

SEQ ID NO: 800685 - DNA, 75 bp, synthetic construct
  source 1..75: mol_type = other DNA
aggaatcgctggcagcaagcgatcgggctacgcagtttggcgatggttgtttcaccaccgccagagttatcgacg

SEQ ID NO: 800686 - DNA, 75 bp, synthetic construct
  source 1..75: mol_type = other DNA
aggattcgctggcagcgagcgatcgggctacgcaatttggcgatggctgtttcaccacagccagaattatcgacg

SEQ ID NO: 800687 - DNA, 75 bp, synthetic construct
  source 1..75: mol_type = other DNA
gatgattgcgcttaatggctcgcccacctggcgtattgctcaggcgattattgagctgaatcaggccgatctcga

SEQ ID NO: 800688 - DNA, 75 bp, synthetic construct
  source 1..75: mol_type = other DNA
ttgagctgaatcaggccgatctcgacccgcatgcgttagcgcgtgaaaaaacagaagcagtaagaagtatgctgc

SEQ ID NO: 800689 - DNA, 75 bp, synthetic construct
  source 1..75: mol_type = other DNA
gaaggtgggttttaaggttacgggacgctctgaggtggacgatttggggaaaccgtatccgttgctgaatctggc

SEQ ID NO: 800690 - DNA, 75 bp, synthetic construct
  source 1..75: mol_type = other DNA
gtcgcggtgattatcgaccaacaactgttttcgccgattattcagtttgtgttgcaggcatctgaacatgctcag

SEQ ID NO: 800691 - DNA, 75 bp, synthetic construct
  source 1..75: mol_type = other DNA
tgaaacagctgttgttgttcatatttacccgtttgctgttaagtattcgctccaaaatgctgctgtcgctctctt

SEQ ID NO: 800692 - DNA, 75 bp, synthetic construct
  source 1..75: mol_type = other DNA
cgccgttactttgacacggtcgttgccgctgatcacgtcaaacaccataaacctgcgccagacacatttttgttg

SEQ ID NO: 800693 - DNA, 75 bp, synthetic construct
  source 1..75: mol_type = other DNA
tcggtaacgatatttatagctacgaaacaggcgcacactctgatttcgaatctattcgtgcggttgttcgcccgg

SEQ ID NO: 800694 - DNA, 75 bp, synthetic construct
  source 1..75: mol_type = other DNA
gtgaattcgcctccgggtatgcgggttatggaaacgcgatccagcggttttgatgtcagccatgatgttggctat

SEQ ID NO: 800695 - DNA, 75 bp, synthetic construct
  source 1..75: mol_type = other DNA
ctatcagcgtcatgatggatcagatggggatgaacggggagtcggcaggtaatgccctgcgaaaagttatccagt

SEQ ID NO: 800696 - DNA, 75 bp, synthetic construct
  source 1..75: mol_type = other DNA
atgagcgaaactaagaaaccaattccgcgcacttacctacacgttgaccctgaaattttcaagattttatttgct

SEQ ID NO: 800697 - DNA, 75 bp, synthetic construct
  source 1..75: mol_type = other DNA
gaaggctatttgctggcgctggcctactccacccaacgcggttacgggcgcaatcacccgttcgcaggcgaaatc

SEQ ID NO: 800698 - DNA, 75 bp, synthetic construct
  source 1..75: mol_type = other DNA
tcgcccagattgaacagcagcttaacctcgcggtagatcgcgtgatgaccgaaggcggcattgccgaccgcgaac

SEQ ID NO: 800699 - DNA, 75 bp, synthetic construct
  source 1..75: mol_type = other DNA
gcaaacaacgcctccggtgccacaggcccgaatcccttcatgattaataaagctaccgcgccaaaagttgatggt

SEQ ID NO: 800700 - DNA, 75 bp, synthetic construct
  source 1..75: mol_type = other DNA
gcgttactatcctgaactttacttcttttcgcgatacgacaggccagccggttgaagagtggcaggagggaaaga

SEQ ID NO: 800701 - DNA, 75 bp, synthetic construct
  source 1..75: mol_type = other DNA
gatgtgattgaactgctggacgagaacgtggagatggctctaacgcttgagaatctgcgtgttgagctggaagcc

SEQ ID NO: 800702 - DNA, 75 bp, synthetic construct
  source 1..75: mol_type = other DNA
ccgttcagccggtgatcaatcagggcgggacccgggccgacctgacattggtgccggttcagcaaactgctgtac

SEQ ID NO: 800703 - DNA, 75 bp, synthetic construct
  source 1..75: mol_type = other DNA
cgtattgggtcaatgccgtagtaggcgcgctgattgttagcggaattggctggttcgccgccaaaaataacgcag

SEQ ID NO: 800704 - DNA, 75 bp, synthetic construct
  source 1..75: mol_type = other DNA
ttcaaaaagaaatgtttatctacagctaccatccagcttcaaggatagagccttctgctgaaagttgcttgtctt

SEQ ID NO: 800705 - DNA, 75 bp, synthetic construct
  source 1..75: mol_type = other DNA
cggaagaagcgtcacagggtgggctggcgcttggtggcggactggcagcgggtctgacgctttccctgaaatctt

SEQ ID NO: 800706 - DNA, 75 bp, synthetic construct
  source 1..75: mol_type = other DNA
gaaggctatttgctggcgctggcctactccacccaacgcggttacgggcgcaatcacccgttcgcgggcgagatc

SEQ ID NO: 800707 - DNA, 75 bp, synthetic construct
  source 1..75: mol_type = other DNA
ctgcagttcagtggaaacggcagtggatgaaatgcagtctgtcgttgatcgtaaacgcagtacgcgtggcgatac

SEQ ID NO: 800708 - DNA, 75 bp, synthetic construct
  source 1..75: mol_type = other DNA
ctgggacgcgaccacgatcggcatttcgcttgccgcatttggcattctgcattcactcgcccaggcaatgatcac

SEQ ID NO: 800709 - DNA, 75 bp, synthetic construct
  source 1..75: mol_type = other DNA
gagattatgggagttcgccatcgccagtgggatcttgaaggcgtacagttccatccagaaagtattctcagcgaa

SEQ ID NO: 800710 - DNA, 75 bp, synthetic construct
  source 1..75: mol_type = other DNA
agttaattatgactcacagatggttgccatacctatagtaaaattaaaaaacaaagtgatagccagggctttaag

SEQ ID NO: 800711 - DNA, 75 bp, synthetic construct
  source 1..75: mol_type = other DNA
gacgcgatggcgggtcatcctttgatgacctggtgtcgtatattgtggtccgtgaccatgaagatatggataaaa

SEQ ID NO: 800712 - DNA, 75 bp, synthetic construct
  source 1..75: mol_type = other DNA
agtgggatctcgaaggggtgcaatttcatccggaaagtattcttagcgaacaggggcatcagttgctggctaatt

SEQ ID NO: 800713 - DNA, 75 bp, synthetic construct
  source 1..75: mol_type = other DNA
ctcgaacggcgtatttcggcggtttataaagacattcccggcggccagctgcttggcccaacctacgactacacc

SEQ ID NO: 800714 - DNA, 75 bp, synthetic construct
  source 1..75: mol_type = other DNA
tggcgcgtcaggggctggcgaagtttgaagaagatagcggcgcacagccggacgacatcacccgcacgccgccgg

SEQ ID NO: 800715 - DNA, 75 bp, synthetic construct
  source 1..75: mol_type = other DNA
attctttcacctggaacctctaccagtatttttgcgaactgggagctgatgtgctggttaagcgtaacgatgcgt

SEQ ID NO: 800716 - DNA, 75 bp, synthetic construct
  source 1..75: mol_type = other DNA
agtgggatcttgaaggtgtgcagttccacccggaaagcattctcagcgaacaggggcatcaattgctggtgaatt

SEQ ID NO: 800717 - DNA, 75 bp, synthetic construct
  source 1..75: mol_type = other DNA
tcactatgccggacgcttgccgattcttggcgtctgcctcggtcatcaggcaatggcgcaggcatttggcggcaa

SEQ ID NO: 800718 - DNA, 75 bp, synthetic construct
  source 1..75: mol_type = other DNA
cgcgggctggttgctggtagcggaatttattttcactctggcgatggccctgaaatgctacccgctgctccccgg

SEQ ID NO: 800719 - DNA, 75 bp, synthetic construct
  source 1..75: mol_type = other DNA
accaccacggcaatggcggtaatgctgatgatatttcggctggtgtctccggttcacctcccaaaaactttgtca

SEQ ID NO: 800720 - DNA, 75 bp, synthetic construct
  source 1..75: mol_type = other DNA
atgccatttccccgcagtaactacagagagaatcatgtaatgagcaaagaaaaaatgaaaatcaggcagcacggc

SEQ ID NO: 800721 - DNA, 75 bp, synthetic construct
  source 1..75: mol_type = other DNA
ctatattttcaacggtctgctgtcatccatttcggataacgtcttcgtggggacgatttatatcaacgaagcgaa

SEQ ID NO: 800722 - DNA, 75 bp, synthetic construct
  source 1..75: mol_type = other DNA
atggagatctcctggggccgcgcgttatggcgcaattttttgggtcagtcacctgactggtacaaacttgccctt

SEQ ID NO: 800723 - DNA, 75 bp, synthetic construct
  source 1..75: mol_type = other DNA
agcagcaatggagagcggcgctatcagtatgaagcaatatgaactgctggccgtcgccattaacaccgggaccaa

SEQ ID NO: 800724 - DNA, 75 bp, synthetic construct
  source 1..75: mol_type = other DNA
atgtgcagcgtgcgtggaagtagaagcgtgtcgccatcatgatcaatgccagcatgaccactctgtacaggtgaa

SEQ ID NO: 800725 - DNA, 75 bp, synthetic construct
  source 1..75: mol_type = other DNA
gcaaaaatgggttttgccctgcggcataatgtgattgaagcgcacggattatgtgcagcgtgcgtggaagtagaa

SEQ ID NO: 800726 - DNA, 75 bp, synthetic construct
  source 1..75: mol_type = other DNA
gctatgtgctctgccatctgttcgatcagccaactcatacctccgcaatgtttatttgcgatcgctgcggcgcag

SEQ ID NO: 800727 - DNA, 75 bp, synthetic construct
  source 1..75: mol_type = other DNA
attagaggtcaaggcaaaggcaagaagccaacctcacgacaaccaagttctattgatatcctcaaagggatatgc

SEQ ID NO: 800728 - DNA, 75 bp, synthetic construct
  source 1..75: mol_type = other DNA
gaaccatcgccggtgtacttcagggatgcggtggctttttccagtctggcgctgtttgaggaacatccggatttc

SEQ ID NO: 800729 - DNA, 75 bp, synthetic construct
  source 1..75: mol_type = other DNA
tgtatgaaggtttcggccttcctccacttgaagcgatgcaacgtggctgtcccgtaatggcttctgaccgcgcaa

SEQ ID NO: 800730 - DNA, 75 bp, synthetic construct
  source 1..75: mol_type = other DNA
tccatttcggataacgtcttcgtggggacgatttatatcaacgaagcgaaagcggcaatggaaagtggcgctatc

SEQ ID NO: 800731 - DNA, 75 bp, synthetic construct
  source 1..75: mol_type = other DNA
tgatagcacggtactatcaacggtgcttgatggaaagacatttaataaatctaatgatacggatacaaaaacaga

SEQ ID NO: 800732 - DNA, 75 bp, synthetic construct
  source 1..75: mol_type = other DNA
ttaatcagtggaattcttgatataagattatcaaagttagcaaagaaatacggatgcaattattcacggtatgct

SEQ ID NO: 800733 - DNA, 75 bp, synthetic construct
  source 1..75: mol_type = other DNA
aaaaacggagcgccgagagtcatatcagcacctaccactaagctcaaagatattcaacgtagattagctgatgtt

SEQ ID NO: 800734 - DNA, 75 bp, synthetic construct
  source 1..75: mol_type = other DNA
gagggtacttcctatccaatagggatttcttattaaatccgattgtcgccactactttagctaaagccgcatgct

SEQ ID NO: 800735 - DNA, 75 bp, synthetic construct
  source 1..75: mol_type = other DNA
gggagtatcgaaaaactagagggaagatttgggtttattgaccagattgataaatttaataacatacaagataaa

SEQ ID NO: 800736 - DNA, 75 bp, synthetic construct
  source 1..75: mol_type = other DNA
ggttgactgttaataaaaaagtgaatgttggcaaagaatatgcaaaagtaacgcgtgcaatggctcattctcttt

SEQ ID NO: 800737 - DNA, 75 bp, synthetic construct
  source 1..75: mol_type = other DNA
gcatattcatgatgcgtttgaaaaaatgacatggcgaccggaacatcatacagctgatgatcttcatgccctgtt

SEQ ID NO: 800738 - DNA, 75 bp, synthetic construct
  source 1..75: mol_type = other DNA
ctatatcttcaacggtttgctgtcttccatttcggataacgtctttgtagggacgatttatatcaacgaagcaaa

SEQ ID NO: 800739 - DNA, 75 bp, synthetic construct
  source 1..75: mol_type = other DNA
tggtggagaagctgcgttggtttggctacggcgaaacgctgccggagaaagtccgcgaagtgctgcaacagtttg

SEQ ID NO: 800740 - DNA, 75 bp, synthetic construct
  source 1..75: mol_type = other DNA
gtcgtccgttagatctgttgcgcaaatggcatgaaaaaattgagaggtggatcttacagcaagcaaatattgtaa

SEQ ID NO: 800741 - DNA, 75 bp, synthetic construct
  source 1..75: mol_type = other DNA
ttatcagaactaacaccagagaacattgccgaatggctaagtacagagagacaaaatcggcctaccgtcactgct

SEQ ID NO: 800742 - DNA, 75 bp, synthetic construct
  source 1..75: mol_type = other DNA
tcgaagtaccaacaggtattgttgcgcagattatgggccataagcctagcgctcttgctgaaaagcactatcgcc

SEQ ID NO: 800743 - DNA, 75 bp, synthetic construct
  source 1..75: mol_type = other DNA
agccaggatttttctacaagggagaccccgttcaaaaccataaagggatgagattgggcaaagccgtcctggaca

SEQ ID NO: 800744 - DNA, 75 bp, synthetic construct
  source 1..75: mol_type = other DNA
cgtgatccaaaggtggcctcatgcggaatgtgagttccttatagaagttgatcccctgccatctcgttacaaaaa

SEQ ID NO: 800745 - DNA, 75 bp, synthetic construct
  source 1..75: mol_type = other DNA
aactggatggcttttcactgtattattgttgagaagtctaaagtagaaaaatcatatcatggtggggattatgat

SEQ ID NO: 800746 - DNA, 75 bp, synthetic construct
  source 1..75: mol_type = other DNA
gtgccagttaatagttccgattttatcgctttcgcaaaagattgtgaaaagcgtaacgacgaaattggttacaga

SEQ ID NO: 800747 - DNA, 75 bp, synthetic construct
  source 1..75: mol_type = other DNA
aaagagaaagacggttacagcaacagcagcaggaagagaattattcgtcgcccgtcccgcgctcgcgtgggccgt

SEQ ID NO: 800748 - DNA, 75 bp, synthetic construct
  source 1..75: mol_type = other DNA
gtggctggattacctagacgcactggaactggtggatacctccagtgctccagatattgaatggcctacacctcc

SEQ ID NO: 800749 - DNA, 75 bp, synthetic construct
  source 1..75: mol_type = other DNA
cgggaagaagatgctgatgctgtctcaatggtggtattaagcaaccgcaacacccatgcctggccggatgcgctt

SEQ ID NO: 800750 - DNA, 75 bp, synthetic construct
  source 1..75: mol_type = other DNA
caccgcaggtggtttcagaactggataccccagcagccgtgagcgtggtggatggcgaggagatgcgcctggcaa

SEQ ID NO: 800751 - DNA, 75 bp, synthetic construct
  source 1..75: mol_type = other DNA
ccgggatactgatgctgtcgctgtcatgcctgccgttgaccgccggggcggcagtggtgctgtataccacgcagg

SEQ ID NO: 800752 - DNA, 75 bp, synthetic construct
  source 1..75: mol_type = other DNA
ttatcgagaagaaaacccgctttatcgagctactgaatgaaaagcgccaggcgctgattacccatgctgtcacca

SEQ ID NO: 800753 - DNA, 75 bp, synthetic construct
  source 1..75: mol_type = other DNA
gtcgatatctctatagcaggcgtccaaaacttagaacgtggcgacgtaatgccgtcactggagataggtattgcc

SEQ ID NO: 800754 - DNA, 75 bp, synthetic construct
  source 1..75: mol_type = other DNA
attgaatacatcgaaagcaagttcgctattggcaaaaattcaatcccagtcaaataacactcaacaaaaaagata

SEQ ID NO: 800755 - DNA, 75 bp, synthetic construct
  source 1..75: mol_type = other DNA
tcaaacgggcgatattacgaacctgcacccgggcgaaattatggtgtcggcatgaatattgcgtggcgatttgag

SEQ ID NO: 800756 - DNA, 75 bp, synthetic construct
  source 1..75: mol_type = other DNA
gctttttggttctgaagatgcttacgatgaaaccaaatgtcacgaacggtgcaatagtgatccacacccaacgcc

SEQ ID NO: 800757 - DNA, 75 bp, synthetic construct
  source 1..75: mol_type = other DNA
ttcttcggtgcaggtccacagggggcactgaaacgcgaaatgttctctgacagggagtccctttatggctatgcg

SEQ ID NO: 800758 - DNA, 75 bp, synthetic construct
  source 1..75: mol_type = other DNA
ggtataatgctttttttcctgtggatatgattgataaatataaatcagagggatgggatttatcagacgctaagg

SEQ ID NO: 800759 - DNA, 75 bp, synthetic construct
  source 1..75: mol_type = other DNA
gcaaaccaaagatatgcgtaatgagcacgatcttatttgctcctgggtattcgacaaggatccgcagatcccggt

SEQ ID NO: 800760 - DNA, 75 bp, synthetic construct
  source 1..75: mol_type = other DNA
aacggtaagcaatggcctggcaaatctgctattggtcgtctgaaaggcgagaaactggcgcaatataatttgtgg

SEQ ID NO: 800761 - DNA, 75 bp, synthetic construct
  source 1..75: mol_type = other DNA
tgattaatcaggccaacgattatatgaacagtaaacaatggcctggtaaagcggctattggtcgcctgaaaggtg

SEQ ID NO: 800762 - DNA, 75 bp, synthetic construct
  source 1..75: mol_type = other DNA
atccgtcagcgtctgcagaaattacccggttataagccggttttcttcgaaccgaaaacagattatgcaccccgt

SEQ ID NO: 800763 - DNA, 75 bp, synthetic construct
  source 1..75: mol_type = other DNA
atgaagcgtctcaacgattacatgatgactgaacttattggtgcgaataacaaccatgtcgtgccaagtacgccg

SEQ ID NO: 800764 - DNA, 75 bp, synthetic construct
  source 1..75: mol_type = other DNA
tactactatcttcccaaatggccccaaagattttgaagataaggacgatggtcgcgtcattggtaatctggttgg

SEQ ID NO: 800765 - DNA, 75 bp, synthetic construct
  source 1..75: mol_type = other DNA
cctttcgatgaagcaaataaattagtctttgctacgggaccattaacgggctccggcgcaccttgtagctcacgt

SEQ ID NO: 800766 - DNA, 75 bp, synthetic construct
  source 1..75: mol_type = other DNA
ggtgaccttgctttagaagccaaattcttcaaagcgatcaccggtgaagagatgacccaggaaaaattagattta

SEQ ID NO: 800767 - DNA, 75 bp, synthetic construct
  source 1..75: mol_type = other DNA
ggctattggtcaggctggggaaaaccttgttcctctctctggcatgttgaatagccgtaaccacagcggtggtgc

SEQ ID NO: 800768 - DNA, 75 bp, synthetic construct
  source 1..75: mol_type = other DNA
ggatttccggggcggttcagctgccactcttgcccgatccgttgtatgacccaaatgaatattcctcgggtgaaa

SEQ ID NO: 800769 - DNA, 75 bp, synthetic construct
  source 1..75: mol_type = other DNA
aacaaagacggcaacaaattagatctgtacggcaaagtagatggtctgcactatttctctgacaacaaaagtcag

SEQ ID NO: 800770 - DNA, 75 bp, synthetic construct
  source 1..75: mol_type = other DNA
gatggattactcgcgagttatggcttctgctgatctgttgaagttaattgtggaaaactgcctcaaaaaacaact

SEQ ID NO: 800771 - DNA, 75 bp, synthetic construct
  source 1..75: mol_type = other DNA
tgcgggaaagccataccattgatgtactcatggggcgtctgcgcaaaaaaattcaggcgcaatatccgcaagaag

SEQ ID NO: 800772 - DNA, 75 bp, synthetic construct
  source 1..75: mol_type = other DNA
cgcgttatgatgggggatggtcatggcccagcggaaggatcgattgaggccagcctgaccgtgctggcagagatg

SEQ ID NO: 800773 - DNA, 75 bp, synthetic construct
  source 1..75: mol_type = other DNA
tctatcacttatgattacgaaggcttcggtatcggtgctgcagtttccagctccaaacgtactgatgatcagaac

SEQ ID NO: 800774 - DNA, 75 bp, synthetic construct
  source 1..75: mol_type = other DNA
actacttcaacaaaaacatgtccacctacgttgactacaaaatcaacctgctggacgacaaccagttcactcgtg

SEQ ID NO: 800775 - DNA, 75 bp, synthetic construct
  source 1..75: mol_type = other DNA
atgaaaatcctcagtaagctgcccacccttttttacactttcaggagtgtgttatggcatcttcaactttcttta

SEQ ID NO: 800776 - DNA, 75 bp, synthetic construct
  source 1..75: mol_type = other DNA
tgctgccgcatgttcaggtattcaacagcaaagtcgccgccgcacgtctgcgtgactgtgccgctgcaatgggcg

SEQ ID NO: 800777 - DNA, 75 bp, synthetic construct
  source 1..75: mol_type = other DNA
cttctgtaaatatgctgggggtgggatcgttatcgacagcaaccagaatgatggcggggtatggtttccgtcgaa

SEQ ID NO: 800778 - DNA, 75 bp, synthetic construct
  source 1..75: mol_type = other DNA
ttgcagctctacccggatgctgaactgcgggaaagtcacaccattgatgtattaatgggccgactgcgcaaaaaa

SEQ ID NO: 800779 - DNA, 75 bp, synthetic construct
  source 1..75: mol_type = other DNA
acatttacctgatattgccattgtcgatcttggcttgcctgatgaagatggtctgtcgctgatccgccgctggcg

SEQ ID NO: 800780 - DNA, 75 bp, synthetic construct
  source 1..75: mol_type = other DNA
ttaacgtgacaggtaaaaacgatgcggaaggtgcagaagcctgcatcaatgccatccgtgaactggcgaagaaag

SEQ ID NO: 800781 - DNA, 75 bp, synthetic construct
  source 1..75: mol_type = other DNA
cgcatcctggttgcccgcattttctccggcagagctgcaaaaagcggtacacgataatctacgtaatctcggcct

SEQ ID NO: 800782 - DNA, 75 bp, synthetic construct
  source 1..75: mol_type = other DNA
tgtcatttattcaagattttgaacggcaattcacatcaacaacactgacggtagatattgaagtatacaacggct

SEQ ID NO: 800783 - DNA, 75 bp, synthetic construct
  source 1..75: mol_type = other DNA
gatacctccgttaacttcccccgatgcaagcctggttgttggaaggacaaaaacccatttttgttcctgacttcg

SEQ ID NO: 800784 - DNA, 75 bp, synthetic construct
  source 1..75: mol_type = other DNA
gatacctccgttaacttccccccgatgcaagcctggttgttggaaggacaaaaacccatttttgttcctgacttc

SEQ ID NO: 800785 - DNA, 75 bp, synthetic construct
  source 1..75: mol_type = other DNA
tacatatgcataatgaaattgttgaagctctttccacgaaagggaaaattggtcttcttgttcttattatgttct

SEQ ID NO: 800786 - DNA, 75 bp, synthetic construct
  source 1..75: mol_type = other DNA
cagaagatgtagtatatagaaatgcttatcgaggctaccttgagtctggaaaactattagtatttagctcgttga

SEQ ID NO: 800787 - DNA, 75 bp, synthetic construct
  source 1..75: mol_type = other DNA
gaaataatagctgtaattttatttttttattgtatttaatcggtttgttgtttgtgccaattgatcttaatatca

SEQ ID NO: 800788 - DNA, 75 bp, synthetic construct
  source 1..75: mol_type = other DNA
ggttgcgcatttacgggagaatatggctgctgaaaaattgcatctttctgaggaagtgttgtctacgttggatgg

SEQ ID NO: 800789 - DNA, 75 bp, synthetic construct
  source 1..75: mol_type = other DNA
ccggcagagctgcaaaaagcggtgcacgataatctacgtaatctcgggctggacgtactggatgtggttaacctg

SEQ ID NO: 800790 - DNA, 75 bp, synthetic construct
  source 1..75: mol_type = other DNA
gtgggtaggatcaatctcgggctggacgtgctggatgtggttaacctgcgcgttatgatgggggatggtcatggc

SEQ ID NO: 800791 - DNA, 75 bp, synthetic construct
  source 1..75: mol_type = other DNA
gcttggaatggaccgtaacactggtaaacctttatccggggttgaccacatttgtcagtctatcgttgatatttt

SEQ ID NO: 800792 - DNA, 75 bp, synthetic construct
  source 1..75: mol_type = other DNA
cgaaccatgcgcactgcggggggcctatgggccggtcttcgataacactaacgcgaaggtgttcgttcgggacga

SEQ ID NO: 800793 - DNA, 75 bp, synthetic construct
  source 1..75: mol_type = other DNA
aagattctgtctcagtaaatcaggctcttaccgacaaatgtcacgaacggtgcaatagtgatccacacccaacgc

SEQ ID NO: 800794 - DNA, 75 bp, synthetic construct
  source 1..75: mol_type = other DNA
cacccaacctaaccccaccacggaaaacgtcgccgcaggtttgaaattacttaaagaaaataattgcgatagcgt

SEQ ID NO: 800795 - DNA, 75 bp, synthetic construct
  source 1..75: mol_type = other DNA
tgcatccggcaacgttgttgcctgcagtacgcagcaatattccggtatttgtcggctccagcaaagatccgcgcg

SEQ ID NO: 800796 - DNA, 75 bp, synthetic construct
  source 1..75: mol_type = other DNA
gcggaagttttcggcatactcgcgcggcataatatttcggtagacttaatcaccacgtcagaagtgagcgtggca

SEQ ID NO: 800797 - DNA, 75 bp, synthetic construct
  source 1..75: mol_type = other DNA
acgtaaagtgatgcgtactaatgaccgatttggtcgtgcagagccagacgtagccgcgctggcggaactgaccgc

SEQ ID NO: 800798 - DNA, 75 bp, synthetic construct
  source 1..75: mol_type = other DNA
cgtagccgtgaagcgctacaccacctgaatatacagcatctgcgacggtcgcatagccttcgtcatggcaggcgt

SEQ ID NO: 800799 - DNA, 75 bp, synthetic construct
  source 1..75: mol_type = other DNA
gttgtgggacgtcaaccgtattgatgtcaccgcgcagcaaggaacgtgggaacgctggacggtgcgcgcggacga

SEQ ID NO: 800800 - DNA, 75 bp, synthetic construct
  source 1..75: mol_type = other DNA
ttgatctctcccgccgtgaattatctattaatgacgaagtgatcaaactgaccgcgttcgaatacaccattatgg

SEQ ID NO: 800801 - DNA, 75 bp, synthetic construct
  source 1..75: mol_type = other DNA
tgcgggaaagccataccattgatgtactgatgggacgtctgcgcaaaaaaattcaggcacaatatccgcaagaag

SEQ ID NO: 800802 - DNA, 75 bp, synthetic construct
  source 1..75: mol_type = other DNA
taagatcaagctactgaggataaaagtcatgagataccgcaatcgggagcgctttaagccgggcttgatgttcca

SEQ ID NO: 800803 - DNA, 75 bp, synthetic construct
  source 1..75: mol_type = other DNA
cgcacatggtgcagtgctaagtattttcgtcggtgccattctctggctggcgggggcccgtgttggcgggcatga

SEQ ID NO: 800804 - DNA, 75 bp, synthetic construct
  source 1..75: mol_type = other DNA
ctagccgaaggtctggaaccggctgagcgtttcgaaaaactcgatgccattcgcaatattcagttcgctattctg

SEQ ID NO: 800805 - DNA, 75 bp, synthetic construct
  source 1..75: mol_type = other DNA
caccacctccgaagtgagcgtggcattaacccttgataccaccggttccacctccactggcgatacgttgctgac

SEQ ID NO: 800806 - DNA, 75 bp, synthetic construct
  source 1..75: mol_type = other DNA
aactgcctctccgtggttcagtatgcagtggatgttctcgaagttgaacatattattatctgtggccactatggt

SEQ ID NO: 800807 - DNA, 75 bp, synthetic construct
  source 1..75: mol_type = other DNA
tttcttattaattatatgttggcagtaacgaatgatatgaatgacttaattgcaaaaaaagaatttccagatgag

SEQ ID NO: 800808 - DNA, 75 bp, synthetic construct
  source 1..75: mol_type = other DNA
tctgccgatttgttgaagttgattgtggaaaattgtctcaagaagcaactcaattttgtcgttattaaagagaat

SEQ ID NO: 800809 - DNA, 75 bp, synthetic construct
  source 1..75: mol_type = other DNA
agaacgccgcgaccttgtggtatcacgccaatacccccaaccgcacggctcagcaggtctataacggccttgccg

SEQ ID NO: 800810 - DNA, 75 bp, synthetic construct
  source 1..75: mol_type = other DNA
ctggatgattttatcagttatcaagaaaatccgaatgaagtaacgcagaataagctggatggcgaatggtttccc

SEQ ID NO: 800811 - DNA, 75 bp, synthetic construct
  source 1..75: mol_type = other DNA
tatattgatgcgcatttatcagacgatttgcgtctggaagatgtcgcctcgcacgtttatctaagcccttattat

SEQ ID NO: 800812 - DNA, 75 bp, synthetic construct
  source 1..75: mol_type = other DNA
tttatcgccgtaccctctcatgcggtacgattcaggtaacccgcgaccagggtgaagtttcgctcgatgacctgt

SEQ ID NO: 800813 - DNA, 75 bp, synthetic construct
  source 1..75: mol_type = other DNA
ttgttattgcctcacataagcctggttttagcacttatctgctgggttcaacggcggctgccgtagtacgccatg

SEQ ID NO: 800814 - DNA, 75 bp, synthetic construct
  source 1..75: mol_type = other DNA
tcaactacagatgagcgatggtcgcccgttacatgtgatttctggcgatcagggattcctgcctgctcctgtatc

SEQ ID NO: 800815 - DNA, 75 bp, synthetic construct
  source 1..75: mol_type = other DNA
gggccgactatccgcgtctggaagggcgacgatgttaagcttatttacagcaaccgcctgacagaaaatgtctca

SEQ ID NO: 800816 - DNA, 75 bp, synthetic construct
  source 1..75: mol_type = other DNA
attttgagcataacttttatgatttcttcgatcctcccaaacctgcaggaagaaaaagaaagccgaaggcagtta

SEQ ID NO: 800817 - DNA, 75 bp, synthetic construct
  source 1..75: mol_type = other DNA
gttgtgggatgtcaatcgtattgatgtcaccgcgcagcaaggtacgtgggaacgctggacggtgcgggcagatga

SEQ ID NO: 800818 - DNA, 75 bp, synthetic construct
  source 1..75: mol_type = other DNA
gcacttcccgttctacttcaacagtcagacgctggaaatggcggaccgtggctcgatagggcaacttttggtcaa

SEQ ID NO: 800819 - DNA, 75 bp, synthetic construct
  source 1..75: mol_type = other DNA
acagtacaacgtgcgcactggtcatttacgccaggaacgcgcgcgtcggtttggggtatcaatggtcgctacctt

SEQ ID NO: 800820 - DNA, 75 bp, synthetic construct
  source 1..75: mol_type = other DNA
tgatctggtgtcgtatattgtggtccgtgaccatgaagagatggataaaaaataccagaaggttgaggcctgcga

SEQ ID NO: 800821 - DNA, 75 bp, synthetic construct
  source 1..75: mol_type = other DNA
tgaaggatttatccgccagcagttgcaggtagcagagggattcattgaggggtgtctctgcatgctgggtgtgag

SEQ ID NO: 800822 - DNA, 75 bp, synthetic construct
  source 1..75: mol_type = other DNA
ccgatgggcaactatttccactcgttgatgaccaccgcaccgctcaccggtgcgattggatttatcattattatg

SEQ ID NO: 800823 - DNA, 75 bp, synthetic construct
  source 1..75: mol_type = other DNA
tggcgtaaaaaccgctggtggcgtcatgataatggctatcatcgtggctgggataagcgtaaagcgtatgagcgt

SEQ ID NO: 800824 - DNA, 75 bp, synthetic construct
  source 1..75: mol_type = other DNA
tattcaaaattattatcggaaatgtgagtttgtgattagttcatctatttctcgttttggaggtcctgaaacctt

SEQ ID NO: 800825 - DNA, 75 bp, synthetic construct
  source 1..75: mol_type = other DNA
gtgcagaaggggtggtggtctgttatcgaggacaagttcaccattttgctggaatgtctgtgaattgtgtcgata

SEQ ID NO: 800826 - DNA, 75 bp, synthetic construct
  source 1..75: mol_type = other DNA
tttacgatgactcgttacctgaaaaagggcgcggtaacgttcgttggcgtacgctcattgagcaaatgcttagcc

SEQ ID NO: 800827 - DNA, 75 bp, synthetic construct
  source 1..75: mol_type = other DNA
gcaccgccgttactgcgtcagctggccgccatcgggaataacctgaatcagacagcgaggaaggtaaacagcggg

SEQ ID NO: 800828 - DNA, 75 bp, synthetic construct
  source 1..75: mol_type = other DNA
ccagcaggatcagcgtctggcttctgataaagcgggccatgttaagggctgttttttcctgtttagtcacagttc

SEQ ID NO: 800829 - DNA, 75 bp, synthetic construct
  source 1..75: mol_type = other DNA
gctccatccggggctggtcagaaacattgagaagcgaacggagaaccagctgctggttcaaagcctggtggaagc

SEQ ID NO: 800830 - DNA, 75 bp, synthetic construct
  source 1..75: mol_type = other DNA
gttcatcatcgcgaactcatgtgccgcatcttcgatggtaatgaagaggttagctcggcggagtatatgccgatg

SEQ ID NO: 800831 - DNA, 75 bp, synthetic construct
  source 1..75: mol_type = other DNA
gctggagacccgcgccactcgcatcttaaacggcgagcgtggcgcgaatgtgctggggagcatttatgaatggcc

SEQ ID NO: 800832 - DNA, 75 bp, synthetic construct
  source 1..75: mol_type = other DNA
gcgtcatgataatggctatcatcgtggctgggataagcgtaaagcgtatgagcgtggctatcgtgaaggctggcg

SEQ ID NO: 800833 - DNA, 75 bp, synthetic construct
  source 1..75: mol_type = other DNA
tgcggggaaattgtgtccttgtgtatgaaatgcatgatgagacaagtcatattgttgacacgatgaaagaaaaga

SEQ ID NO: 800834 - DNA, 75 bp, synthetic construct
  source 1..75: mol_type = other DNA
atctgcaggatatgtctccggaattagtgaaaatcctgggagggaaaaaggatgtttataaatacagtgaagagg

SEQ ID NO: 800835 - DNA, 75 bp, synthetic construct
  source 1..75: mol_type = other DNA
tttccagccgtgacgagtggcagaaaactgcgcatctgcttgagaaacaggggaagcaggagcagtcggatacca

SEQ ID NO: 800836 - DNA, 75 bp, synthetic construct
  source 1..75: mol_type = other DNA
acctggcagaaaccggatctgcaggcaaaggaacgttatgcgcgtatcaatgaggcgacccgtcgtgagaaagcg

SEQ ID NO: 800837 - DNA, 75 bp, synthetic construct
  source 1..75: mol_type = other DNA
attagagataaaaaatagcaatattcaagcaatccctaatttatcatctatcaagactttaaggagcatcaagtt

SEQ ID NO: 800838 - DNA, 75 bp, synthetic construct
  source 1..75: mol_type = other DNA
gagttgataatttgtttaatcacagatctctggaaaaaataacattgatagattttaaagaaaaaaaagagcatg

SEQ ID NO: 800839 - DNA, 75 bp, synthetic construct
  source 1..75: mol_type = other DNA
cttacaacaacaaccagtgccggatcctgttgatatcgcgactgaagcgctgacgtatatcaatccgtctcatgg

SEQ ID NO: 800840 - DNA, 75 bp, synthetic construct
  source 1..75: mol_type = other DNA
agcgtggctatcgtgaaggctggcgcgatcgtgatgatcatcgcggaaagggccgcggacatgggcatcgccatt

SEQ ID NO: 800841 - DNA, 75 bp, synthetic construct
  source 1..75: mol_type = other DNA
agcgtggctatcgtgaaggctggcgcgatcgtgacgatcatcgcggaaaaggccgcggacatggacaccgccatt

SEQ ID NO: 800842 - DNA, 75 bp, synthetic construct
  source 1..75: mol_type = other DNA
aaggacgcctcatcaaactggacaaccggcagatggcaatgtttctggtgatcctgatgcaggcgctgttccaca

SEQ ID NO: 800843 - DNA, 75 bp, synthetic construct
  source 1..75: mol_type = other DNA
gttcagtacgccgctggtcttttcggttcaggaggttaaggggctggaatacgaaacggtgatcctttacaatat

SEQ ID NO: 800844 - DNA, 75 bp, synthetic construct
  source 1..75: mol_type = other DNA
tcagtttttactctgtggtgatgccaatcagatagttcatccgagctttttctcatggagttcgctcaaaagtct

SEQ ID NO: 800845 - DNA, 75 bp, synthetic construct
  source 1..75: mol_type = other DNA
ggctttgtattgtgtggacaagtccgcctgcgtaatgatgatgtcgatttagtcgatattctgaatgtcgatgat

SEQ ID NO: 800846 - DNA, 75 bp, synthetic construct
  source 1..75: mol_type = other DNA
ggatgaccttcctttaatcaataaagaagaacaaccagataaaggattcggtgatgctgccaacttactgattta

SEQ ID NO: 800847 - DNA, 75 bp, synthetic construct
  source 1..75: mol_type = other DNA
actatgaacaccatctgatgttgaaaatgtccggtgagggtgtggccgaagcccaggcatggttaacggactatt

SEQ ID NO: 800848 - DNA, 75 bp, synthetic construct
  source 1..75: mol_type = other DNA
agccgcattcggtgattggctcttcgtgcatcggcgcgtcggttatcggcggtatctgtaataactccggcggtt

SEQ ID NO: 800849 - DNA, 75 bp, synthetic construct
  source 1..75: mol_type = other DNA
ctgttttctttatctcgacaaagatgctacctgccaatagttcaagtagtgttattatatctgtggttctgatgg

SEQ ID NO: 800850 - DNA, 75 bp, synthetic construct
  source 1..75: mol_type = other DNA
agaatttccccgcttattcgcaccttccttagttttaattgctctatgaaagggttctggtgggtgacctttttc

SEQ ID NO: 800851 - DNA, 75 bp, synthetic construct
  source 1..75: mol_type = other DNA
ttttagctttattaccttttctcgctgttgctggttatattatcttcgatcaaatattaaatgagtatgatagtt

SEQ ID NO: 800852 - DNA, 75 bp, synthetic construct
  source 1..75: mol_type = other DNA
atgaaagtgagtaaatatgtcgctatatttttctttgtttttattcagttaatcagtgttggtaaagtttttgct

SEQ ID NO: 800853 - DNA, 75 bp, synthetic construct
  source 1..75: mol_type = other DNA
gcccagcgacttttcagatgacctacatacctggtacttacaataatggcaatgtgtactttgcctggatgcgct

SEQ ID NO: 800854 - DNA, 75 bp, synthetic construct
  source 1..75: mol_type = other DNA
tggcctgtatgccatggcatttaaggactcgtggaacaaatgggaaccgattgccggatacggatgggaaagtac

SEQ ID NO: 800855 - DNA, 75 bp, synthetic construct
  source 1..75: mol_type = other DNA
cgatgcggacaaggtgctggagcggaacacccccgttgccgatgaggaatggtggcaggatttccgggccgcaat

SEQ ID NO: 800856 - DNA, 75 bp, synthetic construct
  source 1..75: mol_type = other DNA
ggtggcaggatttccgggccgcaatgctggaacttcaggcgcgccgcagggctgatagtgcagagtcagtggtaa

SEQ ID NO: 800857 - DNA, 75 bp, synthetic construct
  source 1..75: mol_type = other DNA
gccagcacgcgctcgatcagctcattatgcacagccaaccaacccacgcggtcgccgtttttgatgatgaaaacc

SEQ ID NO: 800858 - DNA, 75 bp, synthetic construct
  source 1..75: mol_type = other DNA
gattgcggagtgccagaacagcaatcctctttgcggaaaatgacctgaaaaatattgaactggagaaaaaatata

SEQ ID NO: 800859 - DNA, 75 bp, synthetic construct
  source 1..75: mol_type = other DNA
ttcggactctcttgcggtctggtttccccgagcgggaaaaattcgatcaactgttgctggaggcgcgggcgggga

SEQ ID NO: 800860 - DNA, 75 bp, synthetic construct
  source 1..75: mol_type = other DNA
caataccggctaccagctgcatcgccagctctccggtcagccggagaaaattctcgcccttgagatgggcggtaa

SEQ ID NO: 800861 - DNA, 75 bp, synthetic construct
  source 1..75: mol_type = other DNA
tcaaggcgtatcacgtgcgcacgggcgagcagcgcagcgaaatgccagacggtgcggcgagtttgcgccatcgcc

SEQ ID NO: 800862 - DNA, 75 bp, synthetic construct
  source 1..75: mol_type = other DNA
ggcagcaactggaagcgatgggtggacgacccctgcttgcgccgcgcttattacaagcagggacatcgttgctga

SEQ ID NO: 800863 - DNA, 75 bp, synthetic construct
  source 1..75: mol_type = other DNA
taccagctgcatcgccagctctccggtcagccggaaaaaatcctcgccctcgaaatgggcggcaataacccgctg

SEQ ID NO: 800864 - DNA, 75 bp, synthetic construct
  source 1..75: mol_type = other DNA
gagcctggagtcggactcgttaacgttacccacaacgcttaaccccgggcttgatttttctgatgaggtggtgcg

SEQ ID NO: 800865 - DNA, 75 bp, synthetic construct
  source 1..75: mol_type = other DNA
cggcggcattggcgcttccggcaatcatcgccccagcgcctggtatgccgcagattattgtgcctggccgatggc

SEQ ID NO: 800866 - DNA, 75 bp, synthetic construct
  source 1..75: mol_type = other DNA
tgctgaaaagtggagcgcagggcgatgcatttcttgctcgcctggttgccgtcagccagcgattaacgccgggca

SEQ ID NO: 800867 - DNA, 75 bp, synthetic construct
  source 1..75: mol_type = other DNA
tggcgatgcgctgtcgcactctattgtcccgggtgttgcgggggcatatatgctggggcttccgttttctctggg

SEQ ID NO: 800868 - DNA, 75 bp, synthetic construct
  source 1..75: mol_type = other DNA
cgttgagggcgtaccggatgaagaagtgttcgggccgctattgcgcgtctggcgttataacaccttcgatgaagc

SEQ ID NO: 800869 - DNA, 75 bp, synthetic construct
  source 1..75: mol_type = other DNA
accgtacaatttccccggacatctgcctaacgggcacatcgttccggcgttactggctggcaacacggtaatctt

SEQ ID NO: 800870 - DNA, 75 bp, synthetic construct
  source 1..75: mol_type = other DNA
gtcggcatttgtctctgccggacaacgttgcacctgcgcccgccgtttattgctgaaaagcggggcgcagggcga

SEQ ID NO: 800871 - DNA, 75 bp, synthetic construct
  source 1..75: mol_type = other DNA
acgccgccactttgcagaaaatacgcgccgccgactgctgttagacaccatcaagcctatcgaggtgaagcatgt

SEQ ID NO: 800872 - DNA, 75 bp, synthetic construct
  source 1..75: mol_type = other DNA
gcgcgtcagcaggagctgacgaccctgttccgcgatgtcggtaatcccgacaacatctacgccatgtcgcgcgat

SEQ ID NO: 800873 - DNA, 75 bp, synthetic construct
  source 1..75: mol_type = other DNA
ccgagaagatggcacgactgacggcgcagctgaaagatcagctggaagagagcgcgaagctggaagcacagatta

SEQ ID NO: 800874 - DNA, 75 bp, synthetic construct
  source 1..75: mol_type = other DNA
accggctgcagtttcgggtggccaggaaaaccctgattgagttactgaatgcagagaatgaactttacagtgtcg

SEQ ID NO: 800875 - DNA, 75 bp, synthetic construct
  source 1..75: mol_type = other DNA
tctgctcttccgtccctgttgaaagatgctcttttgcatgatccgtcagttatggaggcgcgtgcagaatccgtg

SEQ ID NO: 800876 - DNA, 75 bp, synthetic construct
  source 1..75: mol_type = other DNA
gagcggatgtgggtcgtcggcaaaaacgagttttaccacaaagaaactggacgccgccattttgcagaaaatacg

SEQ ID NO: 800877 - DNA, 75 bp, synthetic construct
  source 1..75: mol_type = other DNA
aagccgatctggtcgagtgcatggtcgcgctgccaggtcagttgtttaccaacacccaaatcccggcctgtatct

SEQ ID NO: 800878 - DNA, 75 bp, synthetic construct
  source 1..75: mol_type = other DNA
cgtccggtagcgcgtcagccgctggaagtggttcgtgacaaactggccgcgattactgactggaccgctgaaaac

SEQ ID NO: 800879 - DNA, 75 bp, synthetic construct
  source 1..75: mol_type = other DNA
ggaccgcaaggaaactcaccgtgcgccttatgtcaaagggaccttcaaggtgccgaagaattttccggtgagcaa

SEQ ID NO: 800880 - DNA, 75 bp, synthetic construct
  source 1..75: mol_type = other DNA
ggtgaagtgctgtttatcgacgcgcgccagattggttatatgaaagatcgcgtgttgcgcgactttacccgcgaa

SEQ ID NO: 800881 - DNA, 75 bp, synthetic construct
  source 1..75: mol_type = other DNA
ggcgaagtgttgtttatcgacgcgcgtcagattggctttatgaaagaccgcgtgctgcgtgattttagccgtgaa

SEQ ID NO: 800882 - DNA, 75 bp, synthetic construct
  source 1..75: mol_type = other DNA
aagcggatctggtggaatgtatggtggcgctgccagggcaactgtttaccaacacccaaatcccggcctgcatct

SEQ ID NO: 800883 - DNA, 75 bp, synthetic construct
  source 1..75: mol_type = other DNA
cgcacaacgtttacacccaatgcaatatttgctggtggggttgtcattggtgatgttttatttactcttgctggc

SEQ ID NO: 800884 - DNA, 75 bp, synthetic construct
  source 1..75: mol_type = other DNA
ttctgctttctgttcatagcgctctggcttctccattgtctactttactgaaggatgctcttcttcatgatccat

SEQ ID NO: 800885 - DNA, 75 bp, synthetic construct
  source 1..75: mol_type = other DNA
accgaggatattttacccggtattcgtggtgaaatgaatatattttcttcgggggctattgaggcggatgtgcgc

SEQ ID NO: 800886 - DNA, 75 bp, synthetic construct
  source 1..75: mol_type = other DNA
ataacggtcagacaaagtcggatggaaatggaaacgctcagacgtcaggagcaggcctctgccagagttgtggac

SEQ ID NO: 800887 - DNA, 75 bp, synthetic construct
  source 1..75: mol_type = other DNA
tcgcgtcgttgttaatggggcgtggcatgctgaaaaaagctggagcactcgcttttggcgctctgggggcaaaga

SEQ ID NO: 800888 - DNA, 75 bp, synthetic construct
  source 1..75: mol_type = other DNA
gacggtactcgtccctcagatgctgcaaccgttcgtcaggttgaccgtgtaaaagacagtgttgagcaactggct

SEQ ID NO: 800889 - DNA, 75 bp, synthetic construct
  source 1..75: mol_type = other DNA
cccgggcggagttaacttcggcacaatcccgcatagagcaggcaagctctgcacattggccagttgtcacagcta

SEQ ID NO: 800890 - DNA, 75 bp, synthetic construct
  source 1..75: mol_type = other DNA
tgatgttgagagtaaaaaggcggcgctgagagctcaagaacttgcccggtatccccggatagatttaacgggctc

SEQ ID NO: 800891 - DNA, 75 bp, synthetic construct
  source 1..75: mol_type = other DNA
cgatcaataccaattaactgaccgggcgactaagtatgccattctgctgattgcgctgacttttatggcgttctt

SEQ ID NO: 800892 - DNA, 75 bp, synthetic construct
  source 1..75: mol_type = other DNA
taggggcgttaatgaacggtgtttacttgcaggcggtattaaaaggttggcgcaacagcatgttgtttaccctgg

SEQ ID NO: 800893 - DNA, 75 bp, synthetic construct
  source 1..75: mol_type = other DNA
tgccagtcaggctgatgtagagagtaaaaaagcggcgctgaaagcgcaggagcttgcccggtatccccgggtgga

SEQ ID NO: 800894 - DNA, 75 bp, synthetic construct
  source 1..75: mol_type = other DNA
cggcataacgcaattcttaatgatcttaacaccatcagtattcacgaaaccgggcgggaatctgaatttgttcag

SEQ ID NO: 800895 - DNA, 75 bp, synthetic construct
  source 1..75: mol_type = other DNA
agacggaggatcagatgctccacggaatgctggattatctgtattcccagggaatgctcctgaaatggagcggag

SEQ ID NO: 800896 - DNA, 75 bp, synthetic construct
  source 1..75: mol_type = other DNA
aacagtgcggcgtacaccacgcagctgttttacggtgcgattcgcgcgatcccggaaggtcaatggcagtcctgt

SEQ ID NO: 800897 - DNA, 75 bp, synthetic construct
  source 1..75: mol_type = other DNA
aaggtgctgccgcgcatgacggcaccaatgctgaccgagcaggaggtcgccgcgctggaactgcctgaccttgtg

SEQ ID NO: 800898 - DNA, 75 bp, synthetic construct
  source 1..75: mol_type = other DNA
aaactccgaagtcgatgcactgattaaggtgctgccgcgcatgacggcaccgatgctgaccgagcaggaggtcgc

SEQ ID NO: 800899 - DNA, 75 bp, synthetic construct
  source 1..75: mol_type = other DNA
ctggcctcattaatctcggaacgagtaaaagaagttgcggctgatatccttagaaaagaaaaaacccgcgattaa

SEQ ID NO: 800900 - DNA, 75 bp, synthetic construct
  source 1..75: mol_type = other DNA
ccgttccagttggcggacagtgcgctcgacaaattgttccttgaagagtcttttgcggctggccttcatgcgctg

SEQ ID NO: 800901 - DNA, 75 bp, synthetic construct
  source 1..75: mol_type = other DNA
agcaaatatcgcttgtccatcgattctggattattccattctcaacgataacgactccatgtttaacacgccgcc

SEQ ID NO: 800902 - DNA, 75 bp, synthetic construct
  source 1..75: mol_type = other DNA
cgtcggtgatggaagtgagtcaccgtggcaaagagttcattcaggttgcagaggaagccgagaaggattttcgcg

SEQ ID NO: 800903 - DNA, 75 bp, synthetic construct
  source 1..75: mol_type = other DNA
atggagtttaactttccaccccaaaatcttgcggaggtatttggtttcttcgcagtgatgttcattgtgatgctg

SEQ ID NO: 800904 - DNA, 75 bp, synthetic construct
  source 1..75: mol_type = other DNA
ctggaaggggtcacccgtaacgctggtaaacacgccggtggggtggttatcgcgccgaccaaaattaccgatttt

SEQ ID NO: 800905 - DNA, 75 bp, synthetic construct
  source 1..75: mol_type = other DNA
agcgcggcaatcgtatcggtatctgcacgctggatgatcgttccgggcggctggaagtgatgttgtttactgacg

SEQ ID NO: 800906 - DNA, 75 bp, synthetic construct
  source 1..75: mol_type = other DNA
cagaacgactcgctgatgagcagtcagatcttgttaagaagatggtgtttgatacgctgaaggatttgtacaaaa

SEQ ID NO: 800907 - DNA, 75 bp, synthetic construct
  source 1..75: mol_type = other DNA
cgagttgcacgctaagattaagcagcgtgcaaaaatgaataacaggtctatcaattccgaaattgtggctacgat

SEQ ID NO: 800908 - DNA, 75 bp, synthetic construct
  source 1..75: mol_type = other DNA
ggcgtgcctacaaggacatgacgagatcggccgatcaaatcgacaaaatgagacgctggctgtttggccgacgca

SEQ ID NO: 800909 - DNA, 75 bp, synthetic construct
  source 1..75: mol_type = other DNA
aatcatggaggaatagcgcgacgattaatcaactttgcccgtattctcggcggtcgtctgccaggctcacttgct

SEQ ID NO: 800910 - DNA, 75 bp, synthetic construct
  source 1..75: mol_type = other DNA
ggattacaaggagacctggcggtcaccttacgttaaaggcacgtttaaagtgcccaaaaactttccggtcgacaa

SEQ ID NO: 800911 - DNA, 75 bp, synthetic construct
  source 1..75: mol_type = other DNA
accgatatctctgtcaaaactgatcaaaaagtcgtgaccctgagcggtttcgttgaaagccaggctcaggccgaa

SEQ ID NO: 800912 - DNA, 75 bp, synthetic construct
  source 1..75: mol_type = other DNA
cgaaaactctgctggctgtaatgttgacctctgccgtcgcgaccggctctgcctacgcagaaaacaacgcgcaga

SEQ ID NO: 800913 - DNA, 75 bp, synthetic construct
  source 1..75: mol_type = other DNA
ggcagggattatttacctggtcgttaacggcctgctgacgctgatgatgcgtctgatcgagcgcaaagcactggc

SEQ ID NO: 800914 - DNA, 75 bp, synthetic construct
  source 1..75: mol_type = other DNA
ggcggggattatttacctgatcgttaacggcctgctgacgctgatgatgcgtctgatcgagcgcaaagcactggc

SEQ ID NO: 800915 - DNA, 75 bp, synthetic construct
  source 1..75: mol_type = other DNA
ggcgggaattatttacctggtcgtcaacggcctgctgacactgatgatgcgtttgatcgagcgcaaagcgctggc

SEQ ID NO: 800916 - DNA, 75 bp, synthetic construct
  source 1..75: mol_type = other DNA
aaaattcgatgctaaatttgtaggaaaatataactcaacaacaggtgagacaaatataagtaggactagaaaagg

SEQ ID NO: 800917 - DNA, 75 bp, synthetic construct
  source 1..75: mol_type = other DNA
gatgggtatgtcatgggcaatgtcaaacgctgacgttcccttcctgattctcgatttgcttaacactatttctga

SEQ ID NO: 800918 - DNA, 75 bp, synthetic construct
  source 1..75: mol_type = other DNA
atgttaccggttttatggctcgaaagcgcagatgccgacctagataatataaccagctatattgcacgttttgac

SEQ ID NO: 800919 - DNA, 75 bp, synthetic construct
  source 1..75: mol_type = other DNA
atgttaccggttttatggctcgaaagcgcagatgccgacttggatgatataactagctatattgctcgttttgat

SEQ ID NO: 800920 - DNA, 75 bp, synthetic construct
  source 1..75: mol_type = other DNA
ccaccaagcgacagagtacctggcttgcgtgagattgtggcccaccctaactatattaattctataccgcgtaac

SEQ ID NO: 800921 - DNA, 75 bp, synthetic construct
  source 1..75: mol_type = other DNA
aagttgcaagcttattgggctttggtgggaaaaaggctgctgccaaagaagctggcgaattggctactcgcggtg

SEQ ID NO: 800922 - DNA, 75 bp, synthetic construct
  source 1..75: mol_type = other DNA
accaagttgtttgcgtcgaatcccttaaagtgaaaaacatgatccgtaacccgaagctgtctaaagcaatagctg

SEQ ID NO: 800923 - DNA, 75 bp, synthetic construct
  source 1..75: mol_type = other DNA
atgttcgctggagccgtccgttgccgtctgctccatccactgtcactatcaccagggatgctgccggacgatatt

SEQ ID NO: 800924 - DNA, 75 bp, synthetic construct
  source 1..75: mol_type = other DNA
gaactagagaataaatatggccttcctgaaggtactctttactcgattgctgcaactgaatcaggaggggatcct

SEQ ID NO: 800925 - DNA, 75 bp, synthetic construct
  source 1..75: mol_type = other DNA
cgccagcgcaaaagagctggaagagcttgcaggtattcgggaagctgttgaagatttgaaaggggggcgcgttgc

SEQ ID NO: 800926 - DNA, 75 bp, synthetic construct
  source 1..75: mol_type = other DNA
tgaatggccggggtatgcgtcgggaagtcgttcagggaacgctcgaagaacgtgcacgagggaaggggaccgcaa

SEQ ID NO: 800927 - DNA, 75 bp, synthetic construct
  source 1..75: mol_type = other DNA
gtgaacaacgaactgaactggcagactatcccgccgggaatggtgattaccgatgaaaacggcaagaaaaagcag

SEQ ID NO: 800928 - DNA, 75 bp, synthetic construct
  source 1..75: mol_type = other DNA
atattccttatggttcacttgctaccgcgatgacccaacaaccacaatcccgcgcccgtctgggcgcggctcgcg

SEQ ID NO: 800929 - DNA, 75 bp, synthetic construct
  source 1..75: mol_type = other DNA
atttcgatcaggagggtaatattatagtattgagtaaagataactcaattgcatataccgttcatgagcctgtgc

SEQ ID NO: 800930 - DNA, 75 bp, synthetic construct
  source 1..75: mol_type = other DNA
gcccgtaatataaaagctgccgggctggcagtgttagcccttggagagtctgtaattcctaagccgcttcatgtg

SEQ ID NO: 800931 - DNA, 75 bp, synthetic construct
  source 1..75: mol_type = other DNA
gcacaagccagcgccaaattaacggcactgaaaaaagaaccagaattcgcttggctgaatgacgtttcctgcgtc

SEQ ID NO: 800932 - DNA, 75 bp, synthetic construct
  source 1..75: mol_type = other DNA
cgaacatggcattgtggtgattgatgaaactgccgccgtcggctttaacctttctttaggaattggtttcgaagc

SEQ ID NO: 800933 - DNA, 75 bp, synthetic construct
  source 1..75: mol_type = other DNA
tgccagaaagtcaattgccgatgtgattcgtggcaatgacgataacagccgtagaaaaggtttttttaggcgtaa

SEQ ID NO: 800934 - DNA, 75 bp, synthetic construct
  source 1..75: mol_type = other DNA
actataaacaccatgaatataatattgaaacttcattagattttagttctcctttgccagagccggagcgagagc

SEQ ID NO: 800935 - DNA, 75 bp, synthetic construct
  source 1..75: mol_type = other DNA
acaatacacatcatgaatataatattgaaacttcattagattttagttctcctttgccagagccggagcgagagc

SEQ ID NO: 800936 - DNA, 75 bp, synthetic construct
  source 1..75: mol_type = other DNA
acaatatacaccatgaatataatattgaaacttcattagattttagttctcctttgccagagccggagcgagagc

SEQ ID NO: 800937 - DNA, 75 bp, synthetic construct
  source 1..75: mol_type = other DNA
accatatacaacatgaatataatattgaaacttcattagattttagttctcctttgccagagccggagcgagagc

SEQ ID NO: 800938 - DNA, 75 bp, synthetic construct
  source 1..75: mol_type = other DNA
accataaacatcatgaatataatattgaaacttcattagattttagttctcctttgccagagccggagcgagagc

SEQ ID NO: 800939 - DNA, 75 bp, synthetic construct
  source 1..75: mol_type = other DNA
actatacacaacatgaatataatattgaaacttcattagattttagttctcctttgccagagccggagcgagagc

SEQ ID NO: 800940 - DNA, 75 bp, synthetic construct
  source 1..75: mol_type = other DNA
atacgctggtcgaaacgcctgtggtagttgatttaattaagaaaacgatgttgcagattgaggcaggcgcaaagc

SEQ ID NO: 800941 - DNA, 75 bp, synthetic construct
  source 1..75: mol_type = other DNA
tggaaaaaaggcacaggtgacttatcgaaagaaaaccgtgagtacgcgatcaaggtcaatactcatcgtgctcgc

SEQ ID NO: 800942 - DNA, 75 bp, synthetic construct
  source 1..75: mol_type = other DNA
aaagaaagtcaggaggacaatgctcctaagactgaatatacccctaaaaaggctaatattgtcactcgtgttgta

SEQ ID NO: 800943 - DNA, 75 bp, synthetic construct
  source 1..75: mol_type = other DNA
catgaatataatattgaaacttcattagattttagttctcctttgccagagccagagccagagccagagccagag

SEQ ID NO: 800944 - DNA, 75 bp, synthetic construct
  source 1..75: mol_type = other DNA
agctatatctcttctgaaacttgatgtgtctgaaagaaattacgactcttctggcagaagaattatcaaacagac

SEQ ID NO: 800945 - DNA, 75 bp, synthetic construct
  source 1..75: mol_type = other DNA
gacaaacttggcacgattttaaagcaggactggggcactctcgaagaaattgaacaacaacaggtcactctgcaa

SEQ ID NO: 800946 - DNA, 75 bp, synthetic construct
  source 1..75: mol_type = other DNA
gaccgcagcgaaagcgggtattgcagcgagtgatggcgatgtgtcctacaacatgggcgttaacttcgagtttta

SEQ ID NO: 800947 - DNA, 75 bp, synthetic construct
  source 1..75: mol_type = other DNA
gcgttcgaaatatcgacgatctggaaaaaatttataagcttctcgtatcaggtaatgctgccaacttactgattt

SEQ ID NO: 800948 - DNA, 75 bp, synthetic construct
  source 1..75: mol_type = other DNA
tattctggatccgcattccgaagatcatctttaaacaaaaaggtttttcttcgccaatgtctggattgaatatag

SEQ ID NO: 800949 - DNA, 75 bp, synthetic construct
  source 1..75: mol_type = other DNA
ggaagatggcgtactggttatgcaattagaacagcgccgtttgttaatccgcgttcgaaatatcgacgatctgga

SEQ ID NO: 800950 - DNA, 75 bp, synthetic construct
  source 1..75: mol_type = other DNA
gtaaggatttcaaaccggaaattgtggatcatatggatactcaaaaagtgtttgaagagttcaatgaaattactc

SEQ ID NO: 800951 - DNA, 75 bp, synthetic construct
  source 1..75: mol_type = other DNA
ccgtcattttgctcgataacatgaccaacggctgtatcaataatctgcaaatggaacacggtatggacagttact

SEQ ID NO: 800952 - DNA, 75 bp, synthetic construct
  source 1..75: mol_type = other DNA
caccgcagcggcgaccgcgacggctaaccgtattccactgcttttgctgccgggagatgtgtacgcatctcgtca

SEQ ID NO: 800953 - DNA, 75 bp, synthetic construct
  source 1..75: mol_type = other DNA
acccgtgttcttggtggcttaagcgatggtacgcgtaacagtgatgcggcaactgttgggcagttaaaccggaaa

SEQ ID NO: 800954 - DNA, 75 bp, synthetic construct
  source 1..75: mol_type = other DNA
cgatcagtctactggcctggcgtttacccctggtgatagcccgtttgagaaaggcggtctggtagacaaaatcgg

SEQ ID NO: 800955 - DNA, 75 bp, synthetic construct
  source 1..75: mol_type = other DNA
atcacttggatttgaggatatcggcaatatgttgcaatcattttcgacggaaagtattgccctggccattgatag

SEQ ID NO: 800956 - DNA, 75 bp, synthetic construct
  source 1..75: mol_type = other DNA
ctttgcgatatacgatcagttcatcatgccccgacgcaacggccccaccctgctggcaattcctttgctccggcg

SEQ ID NO: 800957 - DNA, 75 bp, synthetic construct
  source 1..75: mol_type = other DNA
ctcggctttgatgccggggcgctggatatggatatcacccttggcggcatggatgcggggctgcttaaaaaatgg

SEQ ID NO: 800958 - DNA, 75 bp, synthetic construct
  source 1..75: mol_type = other DNA
acttcaacatgttctttgacggggataactatttcggcatggtgccggaaatcaccccggcgaagttaacccgca

SEQ ID NO: 800959 - DNA, 75 bp, synthetic construct
  source 1..75: mol_type = other DNA
ttattatatacagagaatgtttccctaatgtgggaaaatctttgctttatttggctacaataaaaataatggaat

SEQ ID NO: 800960 - DNA, 75 bp, synthetic construct
  source 1..75: mol_type = other DNA
agtgatgagtgtattcaggttaaggagtatgaaaataattattgtgcagatattatgcaagttgttaagtatcgg

SEQ ID NO: 800961 - DNA, 75 bp, synthetic construct
  source 1..75: mol_type = other DNA
gtttcggaagcgatggagcacttcgcctatttgccgaccggattgtatgtatttgcgtataaaaagatgtttatt

SEQ ID NO: 800962 - DNA, 75 bp, synthetic construct
  source 1..75: mol_type = other DNA
tgaacggctgaaaatgctggcagatgagcggctgtataaaagtaagaaaaacggcagggcgcagattagctggca

SEQ ID NO: 800963 - DNA, 75 bp, synthetic construct
  source 1..75: mol_type = other DNA
ccatataacaagaataataacgccccggtgaaaggatatattgacgcagcatctgaagcagcccgtacagttgcg

SEQ ID NO: 800964 - DNA, 75 bp, synthetic construct
  source 1..75: mol_type = other DNA
tgataaacagtgatgttcgtggcgtgtacaacaaggtgtatggcctggaaaaaacagaaattacaggtttcagcg

SEQ ID NO: 800965 - DNA, 75 bp, synthetic construct
  source 1..75: mol_type = other DNA
ttgcgggtctgtacattgattattttctttgccgcattggtggcagtgatatcgggtactgatgaatcccctaat

SEQ ID NO: 800966 - DNA, 75 bp, synthetic construct
  source 1..75: mol_type = other DNA
gcattcgttatcatagtgcaaaaggctatggagaaagtataaagtgggttccaaggaatatgcactcaatagcaa

SEQ ID NO: 800967 - DNA, 75 bp, synthetic construct
  source 1..75: mol_type = other DNA
gcaaagttgtatgaacttttgaatatagatagtaaggattgcttcaatgctaaaaccaaaaatattttaatgagg

SEQ ID NO: 800968 - DNA, 75 bp, synthetic construct
  source 1..75: mol_type = other DNA
gaggttatcaacaacattttattccaagtagaaaagaaatattctaatagtcgtgcgggggctattgaaaaggca

SEQ ID NO: 800969 - DNA, 75 bp, synthetic construct
  source 1..75: mol_type = other DNA
cgcattcaaatgaatgtactaccgttgaacggctgaaaatgctggcagatgagcggctgtataaaagtaagaaaa

SEQ ID NO: 800970 - DNA, 75 bp, synthetic construct
  source 1..75: mol_type = other DNA
tattgatactgcttttgcggtggcaaatattgctgaatatcggcgtagcgtggcaattgatctcatcaacacgct

SEQ ID NO: 800971 - DNA, 75 bp, synthetic construct
  source 1..75: mol_type = other DNA
tagctatccaaaggttaaaaaatttatctcatacagcaagggctatcgctgctatccgcgaaaatggtgaattag

SEQ ID NO: 800972 - DNA, 75 bp, synthetic construct
  source 1..75: mol_type = other DNA
ctaccacgaacaggaaatgtttcttacatacataatctcacgctggactatttttcctttccggaacgatttaac

SEQ ID NO: 800973 - DNA, 75 bp, synthetic construct
  source 1..75: mol_type = other DNA
agcaagaatttactatgataatgtatcttccttatgggaaattgaggtgaatttagacgtttttgaaggcgctaa

SEQ ID NO: 800974 - DNA, 75 bp, synthetic construct
  source 1..75: mol_type = other DNA
cccccatattcagagattaacggagtcttttgcttttttaagctcaagaattcatcagaggttagatgaggattt

SEQ ID NO: 800975 - DNA, 75 bp, synthetic construct
  source 1..75: mol_type = other DNA
tcggatttatattcccgtaatgaaatattcatctgggatataagtaaagtaacattacacagatatgaaaatagt

SEQ ID NO: 800976 - DNA, 75 bp, synthetic construct
  source 1..75: mol_type = other DNA
atttagacgtttttgatggggctaatttctctcttgattttataagattttatttaaatggtccgtcaacggtta

SEQ ID NO: 800977 - DNA, 75 bp, synthetic construct
  source 1..75: mol_type = other DNA
aacaataatcactctgtatcaatttttattgaatggattaaagaattacagatcacacccgtttcatcccgttta

SEQ ID NO: 800978 - DNA, 75 bp, synthetic construct
  source 1..75: mol_type = other DNA
ctcgtggaattgatattaaagttattctttcaaaggatgcatatatgcaccctgaatgtttcctgttttgttctt

SEQ ID NO: 800979 - DNA, 75 bp, synthetic construct
  source 1..75: mol_type = other DNA
tatttgaatggtccggcaacggttactggtataatatatacattattgtgcgatgaggtcgataatatcgttttg

SEQ ID NO: 800980 - DNA, 75 bp, synthetic construct
  source 1..75: mol_type = other DNA
aaatgtatatattcgtctaagcgatgatggtggttctgagtcacgtattatgacaggggatgtcctttccattga

SEQ ID NO: 800981 - DNA, 75 bp, synthetic construct
  source 1..75: mol_type = other DNA
cctgttgttaatctcttcgaaaaaaaaacagaaccattacgattatcggacagtcaagatgagtatcaggtaaat

SEQ ID NO: 800982 - DNA, 75 bp, synthetic construct
  source 1..75: mol_type = other DNA
gtgttgagttatactcaggggattctgtcagaatcgtaataacattaaaaagcagtgccgggaagtatgaacctg

SEQ ID NO: 800983 - DNA, 75 bp, synthetic construct
  source 1..75: mol_type = other DNA
tatctaaatggcccaacaatggttacaggtataatatatacattattgtgtgacgaagtcgataatatcgtttta

SEQ ID NO: 800984 - DNA, 75 bp, synthetic construct
  source 1..75: mol_type = other DNA
acctgcgggatattgagcaggggatggagcagattaatcgtctgcgtacggagccggtacagattgaaatatcgc

SEQ ID NO: 800985 - DNA, 75 bp, synthetic construct
  source 1..75: mol_type = other DNA
gcctgaaaggggtgattaccgatctgaacctcgctaccgatgctcctctgctgtttggcggtttgattgccgcta

SEQ ID NO: 800986 - DNA, 75 bp, synthetic construct
  source 1..75: mol_type = other DNA
ggtggtgctcgactggtttaacggccgccgcacaccgaacgctaaccaacgcctgaaaggggtgattaccgatct

SEQ ID NO: 800987 - DNA, 75 bp, synthetic construct
  source 1..75: mol_type = other DNA
tgcgccaatcgatgccgacggcaatgtgctggcgctacgcccggaattcgccgaaaacccaaacgcgatgtttgt

SEQ ID NO: 800988 - DNA, 75 bp, synthetic construct
  source 1..75: mol_type = other DNA
agaccatttagtggtgttgggtcatcaacaatggccacgttacgtaatgacaaattacatcatgttaacctaaat

SEQ ID NO: 800989 - DNA, 75 bp, synthetic construct
  source 1..75: mol_type = other DNA
ccctttaccagcgccgctaattttttccgcccatcctgtttgcccagggcgatacaccaatgggtgcggccatta

SEQ ID NO: 800990 - DNA, 75 bp, synthetic construct
  source 1..75: mol_type = other DNA
gaacctcgctaccgacgctccgctgctgttcggcggtttgattgctgccaccgcctttggcgcacgcgcaatcat

SEQ ID NO: 800991 - DNA, 75 bp, synthetic construct
  source 1..75: mol_type = other DNA
gcgggcagaagaataccggtacggggcagttaaatggtgtcctttcctttaataatccgctggggctggctgaca

SEQ ID NO: 800992 - DNA, 75 bp, synthetic construct
  source 1..75: mol_type = other DNA
gatactttctgcgacaggatggttcttcgaaagacccgaggtatcgaccttctctgtgtactcaatattagccac

SEQ ID NO: 800993 - DNA, 75 bp, synthetic construct
  source 1..75: mol_type = other DNA
tcggaacactgaatccggtattcacacgggggatgccctggttcggcgcagaaagcgaccacgggaaaaggggag

SEQ ID NO: 800994 - DNA, 75 bp, synthetic construct
  source 1..75: mol_type = other DNA
agtcaatggaagcggcactgaaaaccgtgcttgcagagcttagcgtcgaacagcgcgcagctgtggtcgggattg

SEQ ID NO: 800995 - DNA, 75 bp, synthetic construct
  source 1..75: mol_type = other DNA
tctgccggtactgaaggtccctgctttacggtgtcacgcattgttgtcagtggggccacccgactgacgtctgca

SEQ ID NO: 800996 - DNA, 75 bp, synthetic construct
  source 1..75: mol_type = other DNA
agtggccatgtttccggttcgttcactgccggactgcctctggtttacccggactggcttgcccctgaccatctc

SEQ ID NO: 800997 - DNA, 75 bp, synthetic construct
  source 1..75: mol_type = other DNA
atcactacccttcctcatgtattgtttcatttgaacctgatacgacctctagtggcatgacgtccatttataaag

SEQ ID NO: 800998 - DNA, 75 bp, synthetic construct
  source 1..75: mol_type = other DNA
ttgtgttattcagttcctgatattcaccctgcagagtttagttttgcagatagaagagaaatctttttttgggca

SEQ ID NO: 800999 - DNA, 75 bp, synthetic construct
  source 1..75: mol_type = other DNA
cattgacaatacgccgaaaaatagcgtcgttcctccgttgcagacgacgcaggagccgcagcagcaggttgcccg

SEQ ID NO: 801000 - DNA, 75 bp, synthetic construct
  source 1..75: mol_type = other DNA
tatcgacaacacgccaaaaaatagcgtcgttcctccgttgcagacgacgcaggagtcgcagcagcaggttgcgcg

SEQ ID NO: 801001 - DNA, 75 bp, synthetic construct
  source 1..75: mol_type = other DNA
gatcagcgtaatcgccgtattccgttagtgcgttttgaaagccgtttgtataaagatatttatcagaataattag

SEQ ID NO: 801002 - DNA, 75 bp, synthetic construct
  source 1..75: mol_type = other DNA
gattgaccagctgtatagcgttcagtgttcaggctgcgaacgttgatgagtacattactcaacttcccgctggtg

SEQ ID NO: 801003 - DNA, 75 bp, synthetic construct
  source 1..75: mol_type = other DNA
tgagctggatgtcgtgccaggcgacctgaaccgctttacgctgactggatgcctgccacaacgttccgagccgct

SEQ ID NO: 801004 - DNA, 75 bp, synthetic construct
  source 1..75: mol_type = other DNA
caatgaaagggctatggcgcaatcgccgtgcattcatgatggtgctaggctttactgctgcgggctcgctctgct

SEQ ID NO: 801005 - DNA, 75 bp, synthetic construct
  source 1..75: mol_type = other DNA
cgcaggcagaaatttctggtttttattatgacgggccggggattggcgttgagcgtgcgaccgggaaaatcaaaa

SEQ ID NO: 801006 - DNA, 75 bp, synthetic construct
  source 1..75: mol_type = other DNA
ccgcaagcctgaccatgactatgccgagctgcaggacaaaatcggtgtcatgtcgaagattggctataacggcac

SEQ ID NO: 801007 - DNA, 75 bp, synthetic construct
  source 1..75: mol_type = other DNA
ttatcgcctgtttgccaggctacgaaacaatcggtacctgggctccggcattattgcttcttgctcgtttattcc

SEQ ID NO: 801008 - DNA, 75 bp, synthetic construct
  source 1..75: mol_type = other DNA
gtttttacgcatcatttcagtatgtgacgttgattggcggacaactgctagcactactggttgtggtagttttac

SEQ ID NO: 801009 - DNA, 75 bp, synthetic construct
  source 1..75: mol_type = other DNA
ccgtgcattcatcatggttctcggctttacggctgcgggttctctttgtttctataccttcaccacctatatgca

SEQ ID NO: 801010 - DNA, 75 bp, synthetic construct
  source 1..75: mol_type = other DNA
caatatggtcgcgactttgaaaaaatctggcatcaaccaaatcgatggcaatgtgttgatagatacctccatttt

SEQ ID NO: 801011 - DNA, 75 bp, synthetic construct
  source 1..75: mol_type = other DNA
tgcagtggctgcactggacggcggctggctgcactctgacagagatgacccgtactcgtccggcacgctgtgggg

SEQ ID NO: 801012 - DNA, 75 bp, synthetic construct
  source 1..75: mol_type = other DNA
gtctgccggtactgaaggtccctgctttacggtgtcaagcattgttgtcagtggggccacccgactgacgtctgc

SEQ ID NO: 801013 - DNA, 75 bp, synthetic construct
  source 1..75: mol_type = other DNA
ttatgcgcaaggaaaattagttcgctgtgttgttggcgaggtttttgatgttgctgtggatattcgtaagtcatc

SEQ ID NO: 801014 - DNA, 75 bp, synthetic construct
  source 1..75: mol_type = other DNA
atacgccggggatatatcaccagccgggcctttctgacagagcaggacctttcagggggcgtactgcacataacg

SEQ ID NO: 801015 - DNA, 75 bp, synthetic construct
  source 1..75: mol_type = other DNA
ccggtacagattgaaatatcgcccggtgaccgtgagggatggtcggtggtgacactgacggcatcgccggaatgg

SEQ ID NO: 801016 - DNA, 75 bp, synthetic construct
  source 1..75: mol_type = other DNA
gtgtcacatgatgcgaggaattttgccgccggtgtcagtctgccgtatggctataccctggtggattacacgtat

SEQ ID NO: 801017 - DNA, 75 bp, synthetic construct
  source 1..75: mol_type = other DNA
gtcaacggtgtgggtaaaaccacgacgattggtaagctggcacgtcagtttgagcagcagggtaaatcggtgatg

SEQ ID NO: 801018 - DNA, 75 bp, synthetic construct
  source 1..75: mol_type = other DNA
ttgattgccgatgtgggcgtggaaaccacacgcaaaatcatcaccaatctgacagaaggcgcatcacgcaagcag

SEQ ID NO: 801019 - DNA, 75 bp, synthetic construct
  source 1..75: mol_type = other DNA
ggcaggcagaagcagaaacggtggagattgtcgacgcggcggaagaagaagcggcaaaagaagagattaccgacg

SEQ ID NO: 801020 - DNA, 75 bp, synthetic construct
  source 1..75: mol_type = other DNA
tgaccttcctgcccgcaccctgaagatggttttcccgggaatggaggggaaggttctgaacctgcgggatattga

SEQ ID NO: 801021 - DNA, 75 bp, synthetic construct
  source 1..75: mol_type = other DNA
tcgtaatcctgatggtaggcgtcaatggcgtgggtaaaaccacgactatcggtaagctggcgcgtcagtttgaac

SEQ ID NO: 801022 - DNA, 75 bp, synthetic construct
  source 1..75: mol_type = other DNA
aagacgtcaacgccgaagaggtttcgccagaagagtggcaggctgaagcggaaaccgtagagattgtcgaagcgg

SEQ ID NO: 801023 - DNA, 75 bp, synthetic construct
  source 1..75: mol_type = other DNA
gataggtcttgtggttactgcactggcgggcgtggcgctggttgtctggaaatactggcaacccatcaccgcatt

SEQ ID NO: 801024 - DNA, 75 bp, synthetic construct
  source 1..75: mol_type = other DNA
ggatcttaatgggtcttgcggtaatgatagtctgcggcattattgctaaacgccgtggctacccgctttcagaaa

SEQ ID NO: 801025 - DNA, 75 bp, synthetic construct
  source 1..75: mol_type = other DNA
cgcttatgcctcctcaggagggtgtggagccgacagcactagcggtgcgacaaattacagcagtgtggttgatga

SEQ ID NO: 801026 - DNA, 75 bp, synthetic construct
  source 1..75: mol_type = other DNA
cactggcgccagaaggatggctgcgtcaacgctacagccagatacagcatcgtgatgaaaacgatctgctgggaa

SEQ ID NO: 801027 - DNA, 75 bp, synthetic construct
  source 1..75: mol_type = other DNA
cgaaccgcttaagcctgtgttccagtggattggcgacaaagtgcaggcgctatggggctggtttactgatctgct

SEQ ID NO: 801028 - DNA, 75 bp, synthetic construct
  source 1..75: mol_type = other DNA
atctgctgacgcccgttaagtcgacctctgccgaactgcagagcgcagcggcaatggggcgacgattcggggagg

SEQ ID NO: 801029 - DNA, 75 bp, synthetic construct
  source 1..75: mol_type = other DNA
tgtttaatgaggcggtgggccgtcaggtggaattcgtccaggacaaccattcccagtcccagaaaggcgtattgc

SEQ ID NO: 801030 - DNA, 75 bp, synthetic construct
  source 1..75: mol_type = other DNA
acggttacggtgtcaaacgggaagcctttcatgaaactgagcttgttccgggggagaggcgtcgttcgccggaag

SEQ ID NO: 801031 - DNA, 75 bp, synthetic construct
  source 1..75: mol_type = other DNA
ggggtcaagcgggaagcttttcatgaaaccgagcttgttccgggggaggggagtcgtcctgcggaagaagtttga

SEQ ID NO: 801032 - DNA, 75 bp, synthetic construct
  source 1..75: mol_type = other DNA
atgaaaagagcgcctcttataacaggacttttgttgatatccacatcctgcgcttatgcctcctcaggagggtgt

SEQ ID NO: 801033 - DNA, 75 bp, synthetic construct
  source 1..75: mol_type = other DNA
ggcttcacctgtctgcgtatttccattgcctgggcgcgaatttttcctcaggcgatgaagccgaaccgaatgaag

SEQ ID NO: 801034 - DNA, 75 bp, synthetic construct
  source 1..75: mol_type = other DNA
tgcacctttcggataaaataagtaataaagaaaatattgagtgtgttttttttggacagagtgaacagccaaaag

SEQ ID NO: 801035 - DNA, 75 bp, synthetic construct
  source 1..75: mol_type = other DNA
cagagtatttccagacaacttcgggtgtatatcctaaaaaatacggacagtcctattacgcctgtgcccaaaaag

SEQ ID NO: 801036 - DNA, 75 bp, synthetic construct
  source 1..75: mol_type = other DNA
gttgcaatcagggatggtggataactttatcgaccgtaaacatggtcgcgaagaaatctcctatccggacgtaca

SEQ ID NO: 801037 - DNA, 75 bp, synthetic construct
  source 1..75: mol_type = other DNA
tgcgtacgctcaccatcatcaactgggcgctggagatgatcaacaagcggcgggcgaagaatggcgagccgccgc

SEQ ID NO: 801038 - DNA, 75 bp, synthetic construct
  source 1..75: mol_type = other DNA
gaagggttgatccttctttccggcggacgcatgggcgacgtcggacgcagtcttttgcgtggtaacagcgcgctg

SEQ ID NO: 801039 - DNA, 75 bp, synthetic construct
  source 1..75: mol_type = other DNA
gcggacatgtacggtcgcgatgcggtatcgcagatcatcaccttcggtacgatggcggcgaaagcggtgatccgc

SEQ ID NO: 801040 - DNA, 75 bp, synthetic construct
  source 1..75: mol_type = other DNA
gatggggagcgcgaaacgttgggtctgtacctgacgggtcacccgatcaaccagtatttaaaagagattgagcgt

SEQ ID NO: 801041 - DNA, 75 bp, synthetic construct
  source 1..75: mol_type = other DNA
tcagcggtgggcttaaaatgaccgctcgcgaagtgatggatattgacgaagcccgggaaaaatatgctcgcgggc

SEQ ID NO: 801042 - DNA, 75 bp, synthetic construct
  source 1..75: mol_type = other DNA
gggatgttaaaggtttctggaaagaattgtaatggcgaactagtctatttagatggggctgggcagacagtaaca

SEQ ID NO: 801043 - DNA, 75 bp, synthetic construct
  source 1..75: mol_type = other DNA
ggtttcggctttacaatcgacatcttgctaaataacgtacctggcattggcgcttggtttaaagaccctggtgct

SEQ ID NO: 801044 - DNA, 75 bp, synthetic construct
  source 1..75: mol_type = other DNA
cagtagcctgaatctgcaggcttctgatggaaaaattcataaaaactataaccgctgggtgcgtaacctagataa

SEQ ID NO: 801045 - DNA, 75 bp, synthetic construct
  source 1..75: mol_type = other DNA
actgcaatggtgatttggtgcatctggctggagcaggacagacggtaatatttaacgccagaacgtgcacagttg

SEQ ID NO: 801046 - DNA, 75 bp, synthetic construct
  source 1..75: mol_type = other DNA
aataacaaaacttggcatcgattgcaattacttcaccagcgcctggaattctgcatccggtacacttggtaatac

SEQ ID NO: 801047 - DNA, 75 bp, synthetic construct
  source 1..75: mol_type = other DNA
tcttttgatggtgttacaattgcggcatctgccgggtttgtttgccgtgtcacctgtaaacggacgataacccag

SEQ ID NO: 801048 - DNA, 75 bp, synthetic construct
  source 1..75: mol_type = other DNA
ccaaatatagatattgtttggcctgaaagagaaaatatagttttatcggaaaaggatataaatcaacctaattta

SEQ ID NO: 801049 - DNA, 75 bp, synthetic construct
  source 1..75: mol_type = other DNA
gcttactatgcggctattcgtgatgcgttaaatggcgatggtgaaaatccggttccggcaagccaggcaatccag

SEQ ID NO: 801050 - DNA, 75 bp, synthetic construct
  source 1..75: mol_type = other DNA
gatctggcaccgcatctgctcgatcaggccattacgttgtttggcttacctgtcagcatgaccgtggatttagca

SEQ ID NO: 801051 - DNA, 75 bp, synthetic construct
  source 1..75: mol_type = other DNA
acggttgtctctgagccgaagcatctgtttaacgatcccaacatagacctgattgtcattcctacacccaacgat

SEQ ID NO: 801052 - DNA, 75 bp, synthetic construct
  source 1..75: mol_type = other DNA
gaagtactttcagtccggttttcacttcccgctacgttactttgtctatattgggatcaccgccattgtgcgctt

SEQ ID NO: 801053 - DNA, 75 bp, synthetic construct
  source 1..75: mol_type = other DNA
atctactcggctgcgatcctgttactggtgatcaccctgtggctgtgtaattcgaaacggctgaagcgggagtaa

SEQ ID NO: 801054 - DNA, 75 bp, synthetic construct
  source 1..75: mol_type = other DNA
gcggttgtccctgagccgaagcatctctttaatgatcccagcatagatttaattgtcattcctacccccaacgat

SEQ ID NO: 801055 - DNA, 75 bp, synthetic construct
  source 1..75: mol_type = other DNA
ctggaatccctgtatcgccgtctggaagtgaaaaatcgcacccaggcggcaatgatgttaaatatctcctcctga

SEQ ID NO: 801056 - DNA, 75 bp, synthetic construct
  source 1..75: mol_type = other DNA
atgttggatggcgatcaagacggtgaattttgccagtggttattgcaaaaaaccgtggtgcaatttcctgatatt

SEQ ID NO: 801057 - DNA, 75 bp, synthetic construct
  source 1..75: mol_type = other DNA
aaaaaaacccagaatttagagtttttgataaagaaagaaaagaagtaagtaaaaattcgtttcagttaagaaccg

SEQ ID NO: 801058 - DNA, 75 bp, synthetic construct
  source 1..75: mol_type = other DNA
ctatacgggcgctgacttcacgagctttgaccatgacggcaatggcatcaacttcactatcagacatcaggccca

SEQ ID NO: 801059 - DNA, 75 bp, synthetic construct
  source 1..75: mol_type = other DNA
cagtcaggcagacgagttatggcaaaagctggaaagttaccctgaagccttagttatgctcgatggcgatcagga

SEQ ID NO: 801060 - DNA, 75 bp, synthetic construct
  source 1..75: mol_type = other DNA
agtcaatatttattcatggaatgaaagtcagtttacagcaacgtattccaggagtaggtattcagggcgtcggtc

SEQ ID NO: 801061 - DNA, 75 bp, synthetic construct
  source 1..75: mol_type = other DNA
actgtactcttcactgctttatcagcaaatgagcgcctggtgcagctatcataccttcgaaggtgctgccgcgtt

SEQ ID NO: 801062 - DNA, 75 bp, synthetic construct
  source 1..75: mol_type = other DNA
ttatgcgctgggaaccgagacgttccgcctggattactacagcgccatgcaagtgctggacagacttaattcact

SEQ ID NO: 801063 - DNA, 75 bp, synthetic construct
  source 1..75: mol_type = other DNA
ctcctacgcttgcgagtcagacactacgggtagaatttaatatacctttccctaaaaaagctgatattgccttgc

SEQ ID NO: 801064 - DNA, 75 bp, synthetic construct
  source 1..75: mol_type = other DNA
agaaggggcggcacgaccagctgcttaccgcgcttcgtgcgctgctgttaagccgcaagaatccgtttggtgata

SEQ ID NO: 801065 - DNA, 75 bp, synthetic construct
  source 1..75: mol_type = other DNA
aagagcaaataaaattgccgccgcagccagtcactgccattgtctacaccgcagccgcacacagcgccaatctct

SEQ ID NO: 801066 - DNA, 75 bp, synthetic construct
  source 1..75: mol_type = other DNA
tatgctaatccgctgctcgcgcacctgcctgcagtacaaaacaagcaggtttatgcgctgggaaccgagacgttc

SEQ ID NO: 801067 - DNA, 75 bp, synthetic construct
  source 1..75: mol_type = other DNA
gccgctgcacacagtgccaatctctggacgccggaatcagcacaaggcagatgctggaacaactcggctttacgc

SEQ ID NO: 801068 - DNA, 75 bp, synthetic construct
  source 1..75: mol_type = other DNA
ttatggccgggcgagtgaggccgatcggcaggcattactggaaaaaggaaatgtactcattcgcgctctggaatc

SEQ ID NO: 801069 - DNA, 75 bp, synthetic construct
  source 1..75: mol_type = other DNA
tcaaatcgattattgataaattaagtctggccggtaaaagcggcgaaggtctttatttcatcgataaagaacttt

SEQ ID NO: 801070 - DNA, 75 bp, synthetic construct
  source 1..75: mol_type = other DNA
tcaaatcgattattgataaattaagcctggcaggtaaaagcggcgaaggtctttatttcatcgataaagaactct

SEQ ID NO: 801071 - DNA, 75 bp, synthetic construct
  source 1..75: mol_type = other DNA
taaccggctttaattctgcttacagaactgcatcaaccagcgacaaggtgtcaatgacttacagttggtgggctg

SEQ ID NO: 801072 - DNA, 75 bp, synthetic construct
  source 1..75: mol_type = other DNA
aatgtgctcattcgcgctctggagtcaggaagccgcgtagggatggggatgcgaatgcaccatgtgcagcaacag

SEQ ID NO: 801073 - DNA, 75 bp, synthetic construct
  source 1..75: mol_type = other DNA
taacggcaaagctgtgccacaagtagatgcacaacaggctatttttatcgccgttgatgccagtgatctggttgc

SEQ ID NO: 801074 - DNA, 75 bp, synthetic construct
  source 1..75: mol_type = other DNA
tccgtcattcactggataaatctgccatcaaccgcgccgtcgacttgctcactcaggcaaaaaaatcgccttttt

SEQ ID NO: 801075 - DNA, 75 bp, synthetic construct
  source 1..75: mol_type = other DNA
gtgtggatgccgggcgacaattattatcttcacagggggatgcaataagaaatattgaggggttcgcagatggcg

SEQ ID NO: 801076 - DNA, 75 bp, synthetic construct
  source 1..75: mol_type = other DNA
gcattttcttctgaaaagtacccaaatctggcaaaggcttaccctactaataaattgcctgatttacgcggtgaa

SEQ ID NO: 801077 - DNA, 75 bp, synthetic construct
  source 1..75: mol_type = other DNA
gcactgcccgttggcgtgcccgttccgtggccatcagccacacctccaacggggtggctgaaatgcaatggtgca

SEQ ID NO: 801078 - DNA, 75 bp, synthetic construct
  source 1..75: mol_type = other DNA
ttgggagaagactctgcattacctgttggggtgcctgttccgtggccttcagccactccgcctacaggctggctg

SEQ ID NO: 801079 - DNA, 75 bp, synthetic construct
  source 1..75: mol_type = other DNA
aagaatccgtttggcgatatcaaatcggatggcacggtgaaaacggctctcgaaaaccttggtttgggagaaggc

SEQ ID NO: 801080 - DNA, 75 bp, synthetic construct
  source 1..75: mol_type = other DNA
atcggccggcacaacgtggggcttcgatattggtggctctaccagaacgacagtcaaagttcgtgttttaagaac

SEQ ID NO: 801081 - DNA, 75 bp, synthetic construct
  source 1..75: mol_type = other DNA
caggactggcatccggcgaatcacggcagctttgccagccagcacggcgtagagccttatacgccaggccaactc

SEQ ID NO: 801082 - DNA, 75 bp, synthetic construct
  source 1..75: mol_type = other DNA
gctacatatgccgctcaaacagttgcacgacaaaggcgtaaaagtgatgaccggcaccgacagcgttatcgacca

SEQ ID NO: 801083 - DNA, 75 bp, synthetic construct
  source 1..75: mol_type = other DNA
ctggtcgccttacggcctgggcgacatgctggaaaaagccaatctttatgcgcagctttatattcgtcctaacga

SEQ ID NO: 801084 - DNA, 75 bp, synthetic construct
  source 1..75: mol_type = other DNA
gagcaaggatatgcaacggaggatcatgctcacggattaccgtcaaaatcaaccgtagcaactgaccgctcaatt

SEQ ID NO: 801085 - DNA, 75 bp, synthetic construct
  source 1..75: mol_type = other DNA
cctgatttacgcggtgagtttatccgtggctgggatgatgggcgagggattgactctggtcgctctattttaagc

SEQ ID NO: 801086 - DNA, 75 bp, synthetic construct
  source 1..75: mol_type = other DNA
acaggcatgagtcctttttttacgcgggtatttcacgcaatgaaacaccattaaaaaatctttcaagttcagacg

SEQ ID NO: 801087 - DNA, 75 bp, synthetic construct
  source 1..75: mol_type = other DNA
agcaggaaataatagcgattatgttcctgcatcagcagataactccataacgggtactcaaaggacagcggagga

SEQ ID NO: 801088 - DNA, 75 bp, synthetic construct
  source 1..75: mol_type = other DNA
tgcaacggaggatcatgctcatggattaccgtcaagatccacgattgtgactgatgcaactattaatttctattt

SEQ ID NO: 801089 - DNA, 75 bp, synthetic construct
  source 1..75: mol_type = other DNA
cgcagaaggataagttcggcgcgggtaagaacggttttacccgtggtaacccccagaccggtgcgcctgccaccg

SEQ ID NO: 801090 - DNA, 75 bp, synthetic construct
  source 1..75: mol_type = other DNA
aatacccggaactggcaaaggcttatccgacaaataaattgcctgatttacgtggtgagtttattcgcggctggg

SEQ ID NO: 801091 - DNA, 75 bp, synthetic construct
  source 1..75: mol_type = other DNA
gtggaggcatccggtgctagtctggagaaggcgcaacacgaccagctgcttaccgcgcttcgtgcgctgctgtta

SEQ ID NO: 801092 - DNA, 75 bp, synthetic construct
  source 1..75: mol_type = other DNA
ccgcaagaatccgtttggtgatatcaaatcggacggcacggtaccaacggctctcgaaaaccttggtttgggaga

SEQ ID NO: 801093 - DNA, 75 bp, synthetic construct
  source 1..75: mol_type = other DNA
gtggaggcatccgttgccagcctagagaaggggcggcatgaccagttgcttaccgcacttcgcgcactgctgtta

SEQ ID NO: 801094 - DNA, 75 bp, synthetic construct
  source 1..75: mol_type = other DNA
gtggctgggatgatggacggggaattgatcctggccgccagttgcttgggtggcagaaaggtactttagttggtg

SEQ ID NO: 801095 - DNA, 75 bp, synthetic construct
  source 1..75: mol_type = other DNA
cacaaaccttggtttgggagaaggttcagcattacctgttggtgcacctgttccgtggccttcagagacacctcc

SEQ ID NO: 801096 - DNA, 75 bp, synthetic construct
  source 1..75: mol_type = other DNA
ctgaaaagtatcccaaactggcaaaggcctaccccaccaataaattaccggatttacgcggtgagtttattcgtg

SEQ ID NO: 801097 - DNA, 75 bp, synthetic construct
  source 1..75: mol_type = other DNA
agaaggggcggcacgaccagctacttaccgcgcttcgcgcgctgctgttaagccgcaagaatccgtttggcgata

SEQ ID NO: 801098 - DNA, 75 bp, synthetic construct
  source 1..75: mol_type = other DNA
ggctgaaatgcaacggtgccgctttttctgctgaagaatacccagaactggcaaaggcttacccgacaaataaat

SEQ ID NO: 801099 - DNA, 75 bp, synthetic construct
  source 1..75: mol_type = other DNA
atggtattagcgggacagcaaatagtgcaggtgggcaccaacaccagagttctggaccatatgcgaattacagta

SEQ ID NO: 801100 - DNA, 75 bp, synthetic construct
  source 1..75: mol_type = other DNA
tcgcctcgacggtgccgattggcacgctgcatatgccgctcaaacagttgcacgacaaaggcgtaaaagtgatga

SEQ ID NO: 801101 - DNA, 75 bp, synthetic construct
  source 1..75: mol_type = other DNA
tcaaatcggacggcacagtaccaacggctctcgaaaaccttggtttgggagaaggttcggcattacccgttggcg

SEQ ID NO: 801102 - DNA, 75 bp, synthetic construct
  source 1..75: mol_type = other DNA
tatctggcgctagtgcgtggtcagtggcagtcgcatgtcaagagcgtgcaagcgccgttgctgaaaaacattctg

SEQ ID NO: 801103 - DNA, 75 bp, synthetic construct
  source 1..75: mol_type = other DNA
ccgcagcgttgaagtttacccatccggggaccggtgaggtgatgcgtatcgaagcgccgatggatgaaggtttga

SEQ ID NO: 801104 - DNA, 75 bp, synthetic construct
  source 1..75: mol_type = other DNA
atgcgctatttcatactaatattcacattcgtgtgttcctttgttgcagcccaaccaactattgtcccatcatta

SEQ ID NO: 801105 - DNA, 75 bp, synthetic construct
  source 1..75: mol_type = other DNA
cagcaacaagttacggatcttacgagtagcttaaactcacaagaaaagaaagaactgacgcacaagttagaatct

SEQ ID NO: 801106 - DNA, 75 bp, synthetic construct
  source 1..75: mol_type = other DNA
ttcagcaatctatcttttagatttattcctgttctccgataaaattttttccattgctgtattttccttcttttt

SEQ ID NO: 801107 - DNA, 75 bp, synthetic construct
  source 1..75: mol_type = other DNA
cattgcctccggtgatattcaggcggtgaactacttcgtagcgcagaaatacaccgaagcgttacagcagatcgg

SEQ ID NO: 801108 - DNA, 75 bp, synthetic construct
  source 1..75: mol_type = other DNA
gcattaactcgcgtctgctgcatattgtcgatgaggccaccaacccgtgggggattaaagtcacccgtattgaaa

SEQ ID NO: 801109 - DNA, 75 bp, synthetic construct
  source 1..75: mol_type = other DNA
gatgggggaacacaagcgatgcaggattgccagcccctaattatggaacttttaaaacatataaacagtccgtag

SEQ ID NO: 801110 - DNA, 75 bp, synthetic construct
  source 1..75: mol_type = other DNA
gactgtaaacaccgaaaattattcaatatgggaatcagtagactcgtttaagggggcagtggtgcctttgaatcc

SEQ ID NO: 801111 - DNA, 75 bp, synthetic construct
  source 1..75: mol_type = other DNA
atgccagttacccgttatttctgcattttcataaacgttggtttgggagaaggttcggcattacccgttggagtg

SEQ ID NO: 801112 - DNA, 75 bp, synthetic construct
  source 1..75: mol_type = other DNA
ccaatctggcaaaggcctaccccaccaataaattaccggatttacggggcgaatttattcgcggctgggatgacg

SEQ ID NO: 801113 - DNA, 75 bp, synthetic construct
  source 1..75: mol_type = other DNA
ggaggctcagatagcggcggatttagcggcggggggggttcttctggaggtggcggcgcatccggccgctggtaa

SEQ ID NO: 801114 - DNA, 75 bp, synthetic construct
  source 1..75: mol_type = other DNA
gttaaacgttatggtgaaattagtggaaatgtaggtacagaaactcgccctcgcaacgttgcatttaattacatc

SEQ ID NO: 801115 - DNA, 75 bp, synthetic construct
  source 1..75: mol_type = other DNA
ttggtgttccgttcttctggccgtccgctgcaatgccagataccgtaatcgaaagctggtccggcatggtgtttt

SEQ ID NO: 801116 - DNA, 75 bp, synthetic construct
  source 1..75: mol_type = other DNA
atgcatcgtatagacacgaaaaccgcgcagaaggataagttcggcgcgggtaaaaacggttttacccgtggtaac

SEQ ID NO: 801117 - DNA, 75 bp, synthetic construct
  source 1..75: mol_type = other DNA
tttatttgcttctcatgggcactggtttgacaagtactatgcgctaacaggttttgatccaacgggaggtcggtt

SEQ ID NO: 801118 - DNA, 75 bp, synthetic construct
  source 1..75: mol_type = other DNA
ctctcgaaaaccttggtttgggagaaggctctgcattacctgttggtgtgcctgttccatggccttcagccacac

SEQ ID NO: 801119 - DNA, 75 bp, synthetic construct
  source 1..75: mol_type = other DNA
aaggagtaaacccaggaatactggctacatacggtgacgggggaatagttaaaacagacgaacccggtcttaagg

SEQ ID NO: 801120 - DNA, 75 bp, synthetic construct
  source 1..75: mol_type = other DNA
tgctgaagaatacccggaactggcaaaggcttatccgacaaataaattgcctgatttacgaggtgaatttattcg

SEQ ID NO: 801121 - DNA, 75 bp, synthetic construct
  source 1..75: mol_type = other DNA
attcagacaacagcggttccggtggaggctcaagtggcggcggatttagcggcgggggcggttcttctggcggtg

SEQ ID NO: 801122 - DNA, 75 bp, synthetic construct
  source 1..75: mol_type = other DNA
cttcgataattacccaattcccaacccggctattacagagggtggtgttgttgcggcaacgactaaacctgcagg

SEQ ID NO: 801123 - DNA, 75 bp, synthetic construct
  source 1..75: mol_type = other DNA
ggtgcgattgtcagtcataaccactattggggaatctggacttcacgaactaacgaccagactctggaaagtttt

SEQ ID NO: 801124 - DNA, 75 bp, synthetic construct
  source 1..75: mol_type = other DNA
ccccagacaggcacgcctgccaccgatctggatgatgactactttgacatgttgcaggaggagctttgcagcgtg

SEQ ID NO: 801125 - DNA, 75 bp, synthetic construct
  source 1..75: mol_type = other DNA
agcggcgcttactggaagaggtggtatacaccataacggagacagtgagaaaaacagcaaggcaaataacatgga

SEQ ID NO: 801126 - DNA, 75 bp, synthetic construct
  source 1..75: mol_type = other DNA
cgtctggagcattatgccggtcaggatgaagtcggtctgcgttataacagccaccgcacacggcgggaagagtac

SEQ ID NO: 801127 - DNA, 75 bp, synthetic construct
  source 1..75: mol_type = other DNA
cgccacacatgtggcggtgtacttcggctcttacctgaaaaagccaccggtgccgatgagtcggctggagcatta

SEQ ID NO: 801128 - DNA, 75 bp, synthetic construct
  source 1..75: mol_type = other DNA
gaaaaagccaccggtgccgatgagtcggctggagcattatgccggtcaggatgaaatcggtctgcgttacaacag

SEQ ID NO: 801129 - DNA, 75 bp, synthetic construct
  source 1..75: mol_type = other DNA
tgcggaagtcagatgcgttttacggggctgaagcggggttaccgactggcagaactggtcctgatgcatgagcga

SEQ ID NO: 801130 - DNA, 75 bp, synthetic construct
  source 1..75: mol_type = other DNA
ggttgacccgctgaagtgcattctgtacggaagtcagatgcgttttacggggctgaagcggggttaccgactggc

SEQ ID NO: 801131 - DNA, 75 bp, synthetic construct
  source 1..75: mol_type = other DNA
caaagcgagtaacatttgatgcttccagagttgttccaactgcaaacgaaaaccgtcctcgtaacattgccttta

SEQ ID NO: 801132 - DNA, 75 bp, synthetic construct
  source 1..75: mol_type = other DNA
agcattattaagctggcaggcagcaacatctttatcgcaatttggcggtaattatccagagggctccggccattc

SEQ ID NO: 801133 - DNA, 75 bp, synthetic construct
  source 1..75: mol_type = other DNA
ttaatggtctttttgctgttaaacaaacaaatggtttaggtggtgtttctgtagcaaaaagtacaaatgctgaaa

SEQ ID NO: 801134 - DNA, 75 bp, synthetic construct
  source 1..75: mol_type = other DNA
aaattgcctgatttacgcggtgaattcattcgtggctgggatgacgggcgtggtgtggattcagggcgaacaatc

SEQ ID NO: 801135 - DNA, 75 bp, synthetic construct
  source 1..75: mol_type = other DNA
atgccatttgcttgttatttcttcattttcataaacgttggtttgggagaaggctcagcattacccgttggtgtg

SEQ ID NO: 801136 - DNA, 75 bp, synthetic construct
  source 1..75: mol_type = other DNA
atgtcatctgctcgttatttctgcattttcataaacgttggtttgggagaaggttcggcattacccgttggcgtg

SEQ ID NO: 801137 - DNA, 75 bp, synthetic construct
  source 1..75: mol_type = other DNA
gaccacgctgatggggtacacacagtggtgctgttcatctccggactgcagccacataaaaaaggtctgcttccg

SEQ ID NO: 801138 - DNA, 75 bp, synthetic construct
  source 1..75: mol_type = other DNA
ctggaatcgcttcctggacagtcattaccggcggggctggaatgtcaacgtatcccgggtgatggataacgccac

SEQ ID NO: 801139 - DNA, 75 bp, synthetic construct
  source 1..75: mol_type = other DNA
acgcattaccgccgtggctggaatgtcagcgtatcccgggtgatggataatgccacccatgtggcggtgtactct

SEQ ID NO: 801140 - DNA, 75 bp, synthetic construct
  source 1..75: mol_type = other DNA
tggtgttgttcatcaccggactgttgccatacaaaaaaggtctgcttccgatgtaaaagtcgctcctgcccgcac

SEQ ID NO: 801141 - DNA, 75 bp, synthetic construct
  source 1..75: mol_type = other DNA
gagttcatggaaaggttctcctggcatgtagcagataaggggttccgtatggtgaggtactacggtttcctgagt

SEQ ID NO: 801142 - DNA, 75 bp, synthetic construct
  source 1..75: mol_type = other DNA
gagtccggtgaagcgccggttactggaagatgttgtgtacgtcataacggagacggtgagaaagacggcgatgca

SEQ ID NO: 801143 - DNA, 75 bp, synthetic construct
  source 1..75: mol_type = other DNA
gtgaaggctggcgcacagtggatacagtatctgctgagcctggtccccgactgcccgtggcagcatattgtgttc

SEQ ID NO: 801144 - DNA, 75 bp, synthetic construct
  source 1..75: mol_type = other DNA
ggaatcgcttcctggacacgcattaccgccgcggctggaatgtcaacatatccagggtgatggataacgccacac

SEQ ID NO: 801145 - DNA, 75 bp, synthetic construct
  source 1..75: mol_type = other DNA
ggaaacagcaaacgggactggaatcgcttcctggacccccactaccggagtggctggaatgtcaacgtatcccgg

SEQ ID NO: 801146 - DNA, 75 bp, synthetic construct
  source 1..75: mol_type = other DNA
ttactgtcccgaaaatacccggagctggtgataccggatgcgctggcagcagaaggaagcagtaaacgggaatgg

SEQ ID NO: 801147 - DNA, 75 bp, synthetic construct
  source 1..75: mol_type = other DNA
tactgtcacggaaatcccctgacctggtgataccggatgagctggcagcagaaggaatcgggagacgggaatgga

SEQ ID NO: 801148 - DNA, 75 bp, synthetic construct
  source 1..75: mol_type = other DNA
cgaggagaaaccggtgccagaggagaaaagggcgacccgggcggcccgccagggccgaagggtgacacaggcgct

SEQ ID NO: 801149 - DNA, 75 bp, synthetic construct
  source 1..75: mol_type = other DNA
tcagtgcgtccggtagtcattgaatcggtgacaaaaatcatggcgtgcgggactaccctgatggggtacacgcag

SEQ ID NO: 801150 - DNA, 75 bp, synthetic construct
  source 1..75: mol_type = other DNA
agcaacagaggcggcaggcagtgcgacggcggcatctcagagcaaaactactgctgaatccgctgcgacccgtgc

SEQ ID NO: 801151 - DNA, 75 bp, synthetic construct
  source 1..75: mol_type = other DNA
gctgtgcatgagtctttccaagctgggcctgccaggttcgcgctgcggcattattatcgccaatgaaaaaatcat

SEQ ID NO: 801152 - DNA, 75 bp, synthetic construct
  source 1..75: mol_type = other DNA
ccggaagatcgctgcctgattcataaacccgaaggagccattttcctctggctatggtttaaggatttgccaatt

SEQ ID NO: 801153 - DNA, 75 bp, synthetic construct
  source 1..75: mol_type = other DNA
gctatggtttaaggatttgcccattacgaccgagcagctctatcagcgcctgaaagcacgcggcgtgctgatggt

SEQ ID NO: 801154 - DNA, 75 bp, synthetic construct
  source 1..75: mol_type = other DNA
caaacgccaagactggtttctggtgttgagtttgatggttccaaagatattactttaaccgccgcgcatgtggct

SEQ ID NO: 801155 - DNA, 75 bp, synthetic construct
  source 1..75: mol_type = other DNA
tggtgagttcattcgtggctgggatgatgaacgtggtgtggatagtgggcgaactctgctttcagcgcaaggaga

SEQ ID NO: 801156 - DNA, 75 bp, synthetic construct
  source 1..75: mol_type = other DNA
gcgcctgaaagcacgcggcgtgctgatggtgccggggcacaacttcttcccagggctggataaaccgtggccaca

SEQ ID NO: 801157 - DNA, 75 bp, synthetic construct
  source 1..75: mol_type = other DNA
tggtggcgttggcgaatctggctgcggtgaggttgtacggcgaaatcgagttctggttcgcgatgatcaaagtca

SEQ ID NO: 801158 - DNA, 75 bp, synthetic construct
  source 1..75: mol_type = other DNA
ttctggttcgcgatgatcaaagttaccacgattatcgtgatgattgtcattggcctgggcgtgattttctttggc

SEQ ID NO: 801159 - DNA, 75 bp, synthetic construct
  source 1..75: mol_type = other DNA
catgacgataacgattcttcgctggatatctcgtacatgagtaacggaaataatattgactatggcggcgataag

SEQ ID NO: 801160 - DNA, 75 bp, synthetic construct
  source 1..75: mol_type = other DNA
tgctttatgcactggcgaaaaaccgtcagttaccggcggcgatggcaaaagtttctcgtcacggcgtgccggttg

SEQ ID NO: 801161 - DNA, 75 bp, synthetic construct
  source 1..75: mol_type = other DNA
ggtgaagcgaagaatccgcaggtgacgctgcgcagtgccgtaggcaaggtgctgtggcggatcctgattttctac

SEQ ID NO: 801162 - DNA, 75 bp, synthetic construct
  source 1..75: mol_type = other DNA
cgggtgtggcggtatcaatagccattctgttgattggttcgtgcctgaattacatcatccccaatccacagcgtg

SEQ ID NO: 801163 - DNA, 75 bp, synthetic construct
  source 1..75: mol_type = other DNA
aggagtaaaccctggaatactggctacatacggggacgggggaatagttaaaacagacgaacccggtttaaatgt

SEQ ID NO: 801164 - DNA, 75 bp, synthetic construct
  source 1..75: mol_type = other DNA
ccgttggtgtacctgttccgtggcccactgccacaccgccagcaggctggttaaagtgcgacgggcgcgccttta

SEQ ID NO: 801165 - DNA, 75 bp, synthetic construct
  source 1..75: mol_type = other DNA
gaataaaaataacaaacgaacagcgacaagactgagtaccagtattgtcggcacagcagaaacacgcccccgcaa

SEQ ID NO: 801166 - DNA, 75 bp, synthetic construct
  source 1..75: mol_type = other DNA
cattacccgttggcgtgcctgttccgtggccttccgccactccgccaacaggctggctgaaatgcaacggtgccg

SEQ ID NO: 801167 - DNA, 75 bp, synthetic construct
  source 1..75: mol_type = other DNA
aatggtgctgaatcagtgagttcacctgatgcctcctctttaattaaagaaaccagaccacggaacctggcattt

SEQ ID NO: 801168 - DNA, 75 bp, synthetic construct
  source 1..75: mol_type = other DNA
ttttcataaacgttggtttgggagaaggctctgcattacctgttggtgtgcctgttccgtggccttcagtcacac

SEQ ID NO: 801169 - DNA, 75 bp, synthetic construct
  source 1..75: mol_type = other DNA
tacggtgacgggggaatagttaaaacggacgaacccggtcttaaggtgccttcctcactacgagctattagctct

SEQ ID NO: 801170 - DNA, 75 bp, synthetic construct
  source 1..75: mol_type = other DNA
taactgaactgattgattatcttgattatggtaacaccggagcctattttgcccagccaacccagggaatgcaaa

SEQ ID NO: 801171 - DNA, 75 bp, synthetic construct
  source 1..75: mol_type = other DNA
tacccccaactggcgcttgcctatccgtcgctcagactgcctgatttgcgcggggagtttatccgtggctgggat

SEQ ID NO: 801172 - DNA, 75 bp, synthetic construct
  source 1..75: mol_type = other DNA
ccgttggcgtacctgttccgtggccttcagccacaccgccgacaggctggctgaaatgcaacggtgccgcttttt

SEQ ID NO: 801173 - DNA, 75 bp, synthetic construct
  source 1..75: mol_type = other DNA
cggttggggtgcctgttccgtggccttcagccactccgccaacaggctggttgaaatgcaacggtgccgcttttt

SEQ ID NO: 801174 - DNA, 75 bp, synthetic construct
  source 1..75: mol_type = other DNA
atgggcgaagcgtttgctcagtacgccctcagcagtgaaaaactgtatcgcgatatcgtcactgacaacgcagat

SEQ ID NO: 801175 - DNA, 75 bp, synthetic construct
  source 1..75: mol_type = other DNA
gttctctgactgatacagtcacccacgtgcgcgaaggttcagatgccatctacgttggtacgcgtgaaattactg

SEQ ID NO: 801176 - DNA, 75 bp, synthetic construct
  source 1..75: mol_type = other DNA
gacactggagtcagcttcctcccgaagagcaaatccgtttctgggaagactatgaagcgggaagggcaaccactt

SEQ ID NO: 801177 - DNA, 75 bp, synthetic construct
  source 1..75: mol_type = other DNA
cgagcagagcctgcgtatgcgtatgtcgcggcatcctttttacgtgcagaaacggacgttcgtcggtcgcaaata

SEQ ID NO: 801178 - DNA, 75 bp, synthetic construct
  source 1..75: mol_type = other DNA
atgcaggttgtctggctaaacgaccagcaaccgttactggtgatgttccttgctgatggtgcaggtagcgtttcg

SEQ ID NO: 801179 - DNA, 75 bp, synthetic construct
  source 1..75: mol_type = other DNA
aaccagaggttcggaacaacaaattcatcgaaaaaatactcgacgaattagaaggtgaggacggttacacaaaaa

SEQ ID NO: 801180 - DNA, 75 bp, synthetic construct
  source 1..75: mol_type = other DNA
tgaccggtaataatttaaatgttgaaaaaccagcacctgttgcttcagctacgccagcaccagccctgaatgtca

SEQ ID NO: 801181 - DNA, 75 bp, synthetic construct
  source 1..75: mol_type = other DNA
tgtggacatggttaaacttcacgaacagcagcagaagcggcttcgtgaaagtgaaatccgccagcagctcatccg

SEQ ID NO: 801182 - DNA, 75 bp, synthetic construct
  source 1..75: mol_type = other DNA
ccagcagattcatgagatggccgagtatctcaggaagcgcctgccgccggatgaagcctatttttgttccgatga

SEQ ID NO: 801183 - DNA, 75 bp, synthetic construct
  source 1..75: mol_type = other DNA
cggccagaaaacgctggtatctacagcgcagccaggatgcgctgaaacaccgtcgggcgaaagctgcagcccgca

SEQ ID NO: 801184 - DNA, 75 bp, synthetic construct
  source 1..75: mol_type = other DNA
cgagcagagcctgcgcatgcacatgtctctgcatcctttttacgtgcagaaacgaatgtatgccggtcgcaaata

SEQ ID NO: 801185 - DNA, 75 bp, synthetic construct
  source 1..75: mol_type = other DNA
agcagccattactggtgatgttccttgctgatggcgcaggtagcgtttcgcagggaggagaaggcgcgaagctcg

SEQ ID NO: 801186 - DNA, 75 bp, synthetic construct
  source 1..75: mol_type = other DNA
gccggaaaaacaacgtctcctcgatgctatctggccggttctggtcagcttcagtgatgcgggcacacatactgt

SEQ ID NO: 801187 - DNA, 75 bp, synthetic construct
  source 1..75: mol_type = other DNA
cacaaagcgtcgtcgcggtgagcactccactaaacccaaatgcgaaaatccgtcctggtatcgtcctgcgcgcta

SEQ ID NO: 801188 - DNA, 75 bp, synthetic construct
  source 1..75: mol_type = other DNA
gtgatcaccggcaatgccgaatccattgttgctggctggaaagaaggtaaagaacacatcagttacatggcatgg

SEQ ID NO: 801189 - DNA, 75 bp, synthetic construct
  source 1..75: mol_type = other DNA
taatcgaagaggccaaattaaaaatagcgattacgaaatgtcacccccattcagggatggcacggatagagggtg

SEQ ID NO: 801190 - DNA, 75 bp, synthetic construct
  source 1..75: mol_type = other DNA
taatcgaagaagcgaaattaaaaatagcgattgcgaaatgccaccccaattcagagatggcacaggtagagggcg

SEQ ID NO: 801191 - DNA, 75 bp, synthetic construct
  source 1..75: mol_type = other DNA
atgaagcctatttttgttccgatgaccatctgaagcgactggccatcagggagttgcgtcagcttgaactgacgc

SEQ ID NO: 801192 - DNA, 75 bp, synthetic construct
  source 1..75: mol_type = other DNA
ttggaaaaaaaagaaccagcaacagccgaaaaaaaatcactggagttgacgaagagcagcgcacacaaaatagct

SEQ ID NO: 801193 - DNA, 75 bp, synthetic construct
  source 1..75: mol_type = other DNA
actgcaaattaccggagaaggcgatggactacctgaagcggaacgaactgataagcgcggaggatgttttgcgat

SEQ ID NO: 801194 - DNA, 75 bp, synthetic construct
  source 1..75: mol_type = other DNA
tggcgatatcgctacgtgaaaaaaggcgttacggactctcagggggagtcgtgggttggtgactggaaatatgta

SEQ ID NO: 801195 - DNA, 75 bp, synthetic construct
  source 1..75: mol_type = other DNA
tgaaatactttttacgtaaagaaattgccaggcttgaagatgcagaatcacgatcatcagaaattccgttcggaa

SEQ ID NO: 801196 - DNA, 75 bp, synthetic construct
  source 1..75: mol_type = other DNA
gttgacgccccagctaacggggaaaggccaacagtggttgacgcgtaagctgcttgacgctggtttattaaagcc

SEQ ID NO: 801197 - DNA, 75 bp, synthetic construct
  source 1..75: mol_type = other DNA
atcagtctgatgaaattcccgttctggaatggctgggagtgcgcgtagtgacaactaagatccttgctaaggggt

SEQ ID NO: 801198 - DNA, 75 bp, synthetic construct
  source 1..75: mol_type = other DNA
cgatgccatctggccggttctggtcagcttcagtgatgccggcacacacaccgtggggatgagcgtcactcggct

SEQ ID NO: 801199 - DNA, 75 bp, synthetic construct
  source 1..75: mol_type = other DNA
acactccactaaacccaaatgcgaaaatccgtcctggtatcgtcctgagcgctataaggcgctgagcgggcagct

SEQ ID NO: 801200 - DNA, 75 bp, synthetic construct
  source 1..75: mol_type = other DNA
ccggaagttgtgcgcgaactggcgcggattgctctggcatcgctggaagcagaaccgatggcatggcgatatcgc

SEQ ID NO: 801201 - DNA, 75 bp, synthetic construct
  source 1..75: mol_type = other DNA
tctgcgccgtcgtggagaacactccaccaaacccaaatgcgaaaatccgtcgtggtttcgtcctgcacgctataa

SEQ ID NO: 801202 - DNA, 75 bp, synthetic construct
  source 1..75: mol_type = other DNA
gtttgatgaacggtttggtcttgcgccacagatgccgaaaaagttgcagaagatgacgcgtttccccaacgactc

SEQ ID NO: 801203 - DNA, 75 bp, synthetic construct
  source 1..75: mol_type = other DNA
ggcggttatttttttgcgctgccgggggtgaaggacacgaacgattatctcggaagcgcgttattgcgggtttaa

SEQ ID NO: 801204 - DNA, 75 bp, synthetic construct
  source 1..75: mol_type = other DNA
ggcgcgccactggggatgcagcacgaacatgatgtgccggattatgccagcgatccagaagggaaggtgattgcg

SEQ ID NO: 801205 - DNA, 75 bp, synthetic construct
  source 1..75: mol_type = other DNA
tttagcgagtggctggcgctgtttaagcaccggacaacctgggggatgattttaggtttctctggggttaactat

SEQ ID NO: 801206 - DNA, 75 bp, synthetic construct
  source 1..75: mol_type = other DNA
ggggcactgatggcgtcaatggatcagttccatattacggttcgtggttgtggcggacacggtgcgatcccgcac

SEQ ID NO: 801207 - DNA, 75 bp, synthetic construct
  source 1..75: mol_type = other DNA
cgtgcgctggaagcgggaagggtttatttccgatcacgcggcgcgtagtaaaggcaaagagacgccgattaattt

SEQ ID NO: 801208 - DNA, 75 bp, synthetic construct
  source 1..75: mol_type = other DNA
ccatcagatccacgaaaacccggagctgggattacaagaatttaaaaccagtgctttggtggcggaaaagctgcg

SEQ ID NO: 801209 - DNA, 75 bp, synthetic construct
  source 1..75: mol_type = other DNA
aaagccatcgacccggtgctggtcgcggcacatatcaccaccgcattacaaagtattgtgtcgcgcaatgtcgat

SEQ ID NO: 801210 - DNA, 75 bp, synthetic construct
  source 1..75: mol_type = other DNA
aggtggcgtgtaaaacgtttggtgaagatcgggccgagtttggcatcaagcctctgatgggcagtgaagatttct

SEQ ID NO: 801211 - DNA, 75 bp, synthetic construct
  source 1..75: mol_type = other DNA
agcgggaagggtttatttccgatcacgcggcgcgtagtaaaggcaaagagacgccgattaatttgctgggtttca

SEQ ID NO: 801212 - DNA, 75 bp, synthetic construct
  source 1..75: mol_type = other DNA
agttattcgttgggtgtcaccaattccgggcaactggatatgggactactgtttgtctgttaccaacacgatctg

SEQ ID NO: 801213 - DNA, 75 bp, synthetic construct
  source 1..75: mol_type = other DNA
tgtggggaatgatgctcggattcagtggcatcaactacactgcgtggctgtatctggcctggcttcctggttacc

SEQ ID NO: 801214 - DNA, 75 bp, synthetic construct
  source 1..75: mol_type = other DNA
ggttaaaccgcgtccacagttacaatttagcgagtggctggcgctgtttaagcatcggacaacctgggggatgat

SEQ ID NO: 801215 - DNA, 75 bp, synthetic construct
  source 1..75: mol_type = other DNA
acatgaacggtgaactccctatgaagaaaaactggaacggtgaatttaaacacgacaaagctatttacacaccgg

SEQ ID NO: 801216 - DNA, 75 bp, synthetic construct
  source 1..75: mol_type = other DNA
ggagttctacttcactcagcgggaaaacatcgatgttcagcgcgtactcactcgcaaggaactcgcgttgatggt

SEQ ID NO: 801217 - DNA, 75 bp, synthetic construct
  source 1..75: mol_type = other DNA
gaataatctgatggtcattgatggtattgaagttcgtcgtgatgcttatggccgttacagcctgaacgatctgca

SEQ ID NO: 801218 - DNA, 75 bp, synthetic construct
  source 1..75: mol_type = other DNA
atccagacctgcaaccctgggtacttttcacgagaattaacacgacaaaaccacgccacagaaaagcagcgattg

SEQ ID NO: 801219 - DNA, 75 bp, synthetic construct
  source 1..75: mol_type = other DNA
gtggatttgcgtctggaaggcacctgggttaaagccgacggtcagcagggatactttctgcaacgtatgactcca

SEQ ID NO: 801220 - DNA, 75 bp, synthetic construct
  source 1..75: mol_type = other DNA
cgacttcaacgccaacggcgaaaaagcggtcttcttcggtgcgatgtatgacctgaaaaactggaatcttccagg

SEQ ID NO: 801221 - DNA, 75 bp, synthetic construct
  source 1..75: mol_type = other DNA
tcgtgacagtaaagaaagctctgtaaagggttacgcgggtgataccgccatcaccagtgaaatcaaagccaaact

SEQ ID NO: 801222 - DNA, 75 bp, synthetic construct
  source 1..75: mol_type = other DNA
atgactatgacaagactgaagatttcgaaaactctgctggctgtaatgttgacctctgccgtcgcgaccggctct

SEQ ID NO: 801223 - DNA, 75 bp, synthetic construct
  source 1..75: mol_type = other DNA
cagggaaaatcatccgttttgggaaagtagacaaggtttactcaggcccagttgacgagatgttgcggaaacaca

SEQ ID NO: 801224 - DNA, 75 bp, synthetic construct
  source 1..75: mol_type = other DNA
ccttcgcaggttatcccgatgctgccggaagtgctctctaacggcctgtgctcgctcaacccgcaggtagaccgc

SEQ ID NO: 801225 - DNA, 75 bp, synthetic construct
  source 1..75: mol_type = other DNA
ggctaccattattcgatggaagagatgctgcaactgggtcagcactgttcgatggcggaacgtcgtgccgacgaa

SEQ ID NO: 801226 - DNA, 75 bp, synthetic construct
  source 1..75: mol_type = other DNA
gttaagcatctcgaagagttgcataacctctataaagtgctggataaagcccgtgaagaacgcggcgggatctca

SEQ ID NO: 801227 - DNA, 75 bp, synthetic construct
  source 1..75: mol_type = other DNA
atacacgagggagtattggtaacacaggcgggagcgaaacacgaccgcgcaatattgcattcaactttattgtga

SEQ ID NO: 801228 - DNA, 75 bp, synthetic construct
  source 1..75: mol_type = other DNA
agctctcgaaaaccttggtttgggagaaggctctgcattacctgttggtgtgcctgttccatggccttcagccac

SEQ ID NO: 801229 - DNA, 75 bp, synthetic construct
  source 1..75: mol_type = other DNA
tttaatttcaccagtaactctgtgggtgatggtgtgaattttgttgctgtcagaccgcgaaatattgcatttaac

SEQ ID NO: 801230 - DNA, 75 bp, synthetic construct
  source 1..75: mol_type = other DNA
taactaaccaccacggcaatggcggtaacgctgatgatatttcggctggtgtctccggttcacctcccaaaaact

SEQ ID NO: 801231 - DNA, 75 bp, synthetic construct
  source 1..75: mol_type = other DNA
caccaacgcttcatccacgaggaagtattggtaacacaggtggtagtgaaacccgcccccgcaatattgcattta

SEQ ID NO: 801232 - DNA, 75 bp, synthetic construct
  source 1..75: mol_type = other DNA
gttgttgccaacgatgggtatgattcaaaagaggaatgggaactggcgacaatcttcagaagagcatatacgcaa

SEQ ID NO: 801233 - DNA, 75 bp, synthetic construct
  source 1..75: mol_type = other DNA
atgaaacttaacgacagtaacttattccgccagaaggcgttgattaatggggaatggctggacgccaacaatggc

SEQ ID NO: 801234 - DNA, 75 bp, synthetic construct
  source 1..75: mol_type = other DNA
ctgcgcaactggttcaatttaatgatggagcatcaggacgatttagcgcgcctgatgaccctcgaacagggcaaa

SEQ ID NO: 801235 - DNA, 75 bp, synthetic construct
  source 1..75: mol_type = other DNA
agtacggcatcatcggcatcaacaccggcattatttccaatgaagtggccccgttcggcggcattaaagcctcgg

SEQ ID NO: 801236 - DNA, 75 bp, synthetic construct
  source 1..75: mol_type = other DNA
aatataggcggaggtgcgggacacgcaattaactctcatgatggcatcgccggaaaacagccaggattttcacga

SEQ ID NO: 801237 - DNA, 75 bp, synthetic construct
  source 1..75: mol_type = other DNA
accctgtgctggcgaaagtgtttccggcgctggcattacctgacgcacgcggtgatttcatccgtatctggggat

SEQ ID NO: 801238 - DNA, 75 bp, synthetic construct
  source 1..75: mol_type = other DNA
gaatcagagaacaacagcatatgggataaatgaaacccgtccacggaatattgcatttaactatatcgtgagggc

SEQ ID NO: 801239 - DNA, 75 bp, synthetic construct
  source 1..75: mol_type = other DNA
tccataaaggcgaaaaccctttagttgacagttacagtgctttttttgataacggccgtcggcagaaaaccgcgc

SEQ ID NO: 801240 - DNA, 75 bp, synthetic construct
  source 1..75: mol_type = other DNA
actgccgttggctcatgaattgctggcgcatgtgcgtaaccctgacacgcagccgcacagtattaacctgacgca

SEQ ID NO: 801241 - DNA, 75 bp, synthetic construct
  source 1..75: mol_type = other DNA
atttttctctcccgtctttgtggggcggggaatattcagattcgcactattggctatggcgagagttatatcaac

SEQ ID NO: 801242 - DNA, 75 bp, synthetic construct
  source 1..75: mol_type = other DNA
gggcgaggtactggcagtcgatctgttaaatctcaacgcttacgatcgccactttatcaatacgcttctcgggga

SEQ ID NO: 801243 - DNA, 75 bp, synthetic construct
  source 1..75: mol_type = other DNA
caggactggcacccagcgaatcacggcagttttgccagtcagcactgtgtagagccttatacgccaggtcaactc

SEQ ID NO: 801244 - DNA, 75 bp, synthetic construct
  source 1..75: mol_type = other DNA
aaccttggtttgggagaaggctctgcattacccgttggtgtccctgttccatggccttccgccactccgccaaca

SEQ ID NO: 801245 - DNA, 75 bp, synthetic construct
  source 1..75: mol_type = other DNA
gcaggaacacgatcagcgagaattccgaataacacaactactatagacaaaaccgatgaccttggattcgacgcc

SEQ ID NO: 801246 - DNA, 75 bp, synthetic construct
  source 1..75: mol_type = other DNA
cgaaattaatgcaattgtcgatgttcaaagtgtgagtggggctttttacggaggtacctcagtccggaataacat

SEQ ID NO: 801247 - DNA, 75 bp, synthetic construct
  source 1..75: mol_type = other DNA
cccggcgaatcacggcagttttgccagtcagcacggtgtagagccttatacgccaggccaactcgacggtttgcc

SEQ ID NO: 801248 - DNA, 75 bp, synthetic construct
  source 1..75: mol_type = other DNA
gtggaggcatccggtgccagcctggagaaggcgcggcacgaccagctgcttaccgcgcttcgtgcgctgctgtta

SEQ ID NO: 801249 - DNA, 75 bp, synthetic construct
  source 1..75: mol_type = other DNA
agacaggctgcgcgccgctgccgttatggcaggcggcaacgcataatacgctgccgacagattcgctgctaccac

SEQ ID NO: 801250 - DNA, 75 bp, synthetic construct
  source 1..75: mol_type = other DNA
tggggccaggaacgcaaccgaacgatgacagtttcagcatgaatccactgccgatcacctgtcaggtgaatgatg

SEQ ID NO: 801251 - DNA, 75 bp, synthetic construct
  source 1..75: mol_type = other DNA
gagaaggctctgcattacctgttggtgtgcctgttccatggccttcagccacaccgccaacaggctggctgaaat

SEQ ID NO: 801252 - DNA, 75 bp, synthetic construct
  source 1..75: mol_type = other DNA
gtgcgcaagctgtcgtttaccggctcgaccgaaattggccgccagttaatggaacagtgcgcgaaagacatcaaa

SEQ ID NO: 801253 - DNA, 75 bp, synthetic construct
  source 1..75: mol_type = other DNA
atgaaagatttaactttgaagtttcatgacaaactgcagtttaaggccttcctgtcatctcttggctgggaggac

SEQ ID NO: 801254 - DNA, 75 bp, synthetic construct
  source 1..75: mol_type = other DNA
atgaaagatttaactttgaagtttcatgacaaactgcagtttaaggccttcctgtcatctcttgactggggggag

SEQ ID NO: 801255 - DNA, 75 bp, synthetic construct
  source 1..75: mol_type = other DNA
catatgctaaagatgctctggcaccgcacatttctgcggaaaccatcgagtatcactacggcaagcatcatcaga

SEQ ID NO: 801256 - DNA, 75 bp, synthetic construct
  source 1..75: mol_type = other DNA
gctggtggcaccgcaatcccattgccggaagattatctatcccttgttcacgtcaccgacagcaatggccttttg

SEQ ID NO: 801257 - DNA, 75 bp, synthetic construct
  source 1..75: mol_type = other DNA
ggttatttaagatctgatagtggtgatgatagttattgggttattgatataaataatctggagtcataccaactc

SEQ ID NO: 801258 - DNA, 75 bp, synthetic construct
  source 1..75: mol_type = other DNA
actgcgtaaaaccttggttagttacaacatccttgacttctggctggtggggtactcgcttggcggacgggggcg

SEQ ID NO: 801259 - DNA, 75 bp, synthetic construct
  source 1..75: mol_type = other DNA
atggttggtgaagatctggttgttattaacggtcaattgtgcagcaaagatgtggcagccatgcttattagcaag

SEQ ID NO: 801260 - DNA, 75 bp, synthetic construct
  source 1..75: mol_type = other DNA
acgggtattgaactgaacgcccactatttcagcgtggcacaggcgcgccttacggggacggaacagaggagtgac

SEQ ID NO: 801261 - DNA, 75 bp, synthetic construct
  source 1..75: mol_type = other DNA
gcgttgcagctggtaaatgatgaagttccggtcgcagcacctgtggcctttaacggtcagactttattgaatcat

SEQ ID NO: 801262 - DNA, 75 bp, synthetic construct
  source 1..75: mol_type = other DNA
gcgagtaccttgcggggcacgtcgatagctattttgcggtgctggtgcgcgttggcctggcggcactcgtttttc

SEQ ID NO: 801263 - DNA, 75 bp, synthetic construct
  source 1..75: mol_type = other DNA
tttgccattggcatggtgggctataaacgcctgatggaaacccgcccgatgccacagcacaacgcctttgcgtgg

SEQ ID NO: 801264 - DNA, 75 bp, synthetic construct
  source 1..75: mol_type = other DNA
atgcttatcttgatgggaaatatcctactcaatacggcttaggaaaatataaaacctttacgcatattgattcca

SEQ ID NO: 801265 - DNA, 75 bp, synthetic construct
  source 1..75: mol_type = other DNA
tctacgcgcgtgttcaggagatagaagaaaaaatggcagccaaccgggccattatccctggtgccaccatttttt

SEQ ID NO: 801266 - DNA, 75 bp, synthetic construct
  source 1..75: mol_type = other DNA
tgaaagcggaaggtgaacgtcaatcggcattcttacaggccgaagcgcgtgaacgttgcccgcgccaccaaaatg

SEQ ID NO: 801267 - DNA, 75 bp, synthetic construct
  source 1..75: mol_type = other DNA
tacaggaggcgatcttctgcggattatggcgggtgcgcagacgtcgcggcgaaaagttgctggaggacaaactgg

SEQ ID NO: 801268 - DNA, 75 bp, synthetic construct
  source 1..75: mol_type = other DNA
atgaatgatggcagacagacgcctccgtcccccgaggcatggaaaatccggtttctggcgaacggtacacccggc

SEQ ID NO: 801269 - DNA, 75 bp, synthetic construct
  source 1..75: mol_type = other DNA
ttctctattgatagtgccattgaaacgaaaactgcaagtgaaacacgtcctcgtaatatcgcgtttaactttctg

SEQ ID NO: 801270 - DNA, 75 bp, synthetic construct
  source 1..75: mol_type = other DNA
aaatcactggaagagattattcgcagctctgaaggtggtgtattcaataacgccgctcaggtctggaaccacact

SEQ ID NO: 801271 - DNA, 75 bp, synthetic construct
  source 1..75: mol_type = other DNA
atgatgccattagaggccagcagcctgatggggtcgattgccgggattgctgagctggtgaaagacagcgccaac

SEQ ID NO: 801272 - DNA, 75 bp, synthetic construct
  source 1..75: mol_type = other DNA
tgcttcagacacgttgtctgattaatggcgaatgggttgaggctcaggatcgtggcgtaattgaagtcaataatc

SEQ ID NO: 801273 - DNA, 75 bp, synthetic construct
  source 1..75: mol_type = other DNA
gcgcggcgctggagcgcgaaggatcttctttactgggcagcgacgccggtgagctggctggtgcaggaaaaacag

SEQ ID NO: 801274 - DNA, 75 bp, synthetic construct
  source 1..75: mol_type = other DNA
ggcagcctgagttcacagataaaacactctccaggaaaaccggggcggttcaaaccggcaaccagcataaatacc

SEQ ID NO: 801275 - DNA, 75 bp, synthetic construct
  source 1..75: mol_type = other DNA
aatcaatgaattgatcgttatgggtctggctactgactattgcgtgaagtttaccgtgctggacgcgttacagtt

SEQ ID NO: 801276 - DNA, 75 bp, synthetic construct
  source 1..75: mol_type = other DNA
tgacataaatagtattatatttatatttaacacatttagtgtggagttgaacagtatacctaccaattatcatga

SEQ ID NO: 801277 - DNA, 75 bp, synthetic construct
  source 1..75: mol_type = other DNA
tatctgcggctcagtgctgatctggggctataattttcttgttctgtccgggacgaaagtggccggatttgttaa

SEQ ID NO: 801278 - DNA, 75 bp, synthetic construct
  source 1..75: mol_type = other DNA
gatccggtcgcctcattcgacctggcgatggctaccggcgctaagtttatccgcgagatatttaccggtgcctat

SEQ ID NO: 801279 - DNA, 75 bp, synthetic construct
  source 1..75: mol_type = other DNA
tctcacgaaggtgcgtccggaaaccactgcggcaatggcacgaatcatcgggcaattaatgagcgatatccgcat

SEQ ID NO: 801280 - DNA, 75 bp, synthetic construct
  source 1..75: mol_type = other DNA
gagatccagtattacggcaaaaccttccggatgaacgctgcccaggtactgcatgataaatatatgatctggtgc

SEQ ID NO: 801281 - DNA, 75 bp, synthetic construct
  source 1..75: mol_type = other DNA
agcggcggccacgctgtttgacgtcatgaacacccgtgcttttttccgttccccgagccataagattgcagagtt

SEQ ID NO: 801282 - DNA, 75 bp, synthetic construct
  source 1..75: mol_type = other DNA
cgtggccctggttatttgcctgatcaccttctttgttgtctcctggattctggggcgtcagggtaaacaacagag

SEQ ID NO: 801283 - DNA, 75 bp, synthetic construct
  source 1..75: mol_type = other DNA
gaatccgctggatgcccgctgtgccgcctgggatttgtggaaggagtgcctgacacagccggattttgataatac

SEQ ID NO: 801284 - DNA, 75 bp, synthetic construct
  source 1..75: mol_type = other DNA
atttgcgatcataatcatgtttataacaaatgcagatggatatttgactgcggcaaccaatgcattgcaaggcat

SEQ ID NO: 801285 - DNA, 75 bp, synthetic construct
  source 1..75: mol_type = other DNA
ctaacaactattattcttcaaatcatgaaaggggagtcatttggaacgatgaggaaattaacattgcctggccct

SEQ ID NO: 801286 - DNA, 75 bp, synthetic construct
  source 1..75: mol_type = other DNA
caattaggtcaggatatgttatctcttctaagtgcaggtattagcgtttatatcctctgggttggctatcaaata

SEQ ID NO: 801287 - DNA, 75 bp, synthetic construct
  source 1..75: mol_type = other DNA
cacaacagccacaacagccacaacagccacaacagccacaacagccacaacagccacaacagccacaacagccag

SEQ ID NO: 801288 - DNA, 75 bp, synthetic construct
  source 1..75: mol_type = other DNA
gcgatttccatccgtgctgtgctgaccaactacgtgaaagccatccgttacctgcaggggattgagcataacggt

SEQ ID NO: 801289 - DNA, 75 bp, synthetic construct
  source 1..75: mol_type = other DNA
tctgacctgttatgtcaccctgcccggaccgtatccggcagtaaaactctccctgaaatatcagacacgaccgaa

SEQ ID NO: 801290 - DNA, 75 bp, synthetic construct
  source 1..75: mol_type = other DNA
caacagccacaacagccacaacagcaacaacacctaaaaccgccacgacacccacaacagccactgtcatatata

SEQ ID NO: 801291 - DNA, 75 bp, synthetic construct
  source 1..75: mol_type = other DNA
ctgacgccactgcgtggtaaaccgcaaattcagtttacacaaaactggccgcgactcgatggtgctacggcggcg

SEQ ID NO: 801292 - DNA, 75 bp, synthetic construct
  source 1..75: mol_type = other DNA
tggttatcaggcttatttatataaacagcttaatcccggcgtcggtgtgcgtgaaaatattgatacctgggcctg

SEQ ID NO: 801293 - DNA, 75 bp, synthetic construct
  source 1..75: mol_type = other DNA
ttaatcaatgaagaatattctgagttgttagaaattgtttctcgagtaccagaggatgctagtttttataaaata

SEQ ID NO: 801294 - DNA, 75 bp, synthetic construct
  source 1..75: mol_type = other DNA
gtcgaatggtttttaacgccgcaggggcagagtctggtggaagatgtgggttatgtaccgttgcatacaacaatg

SEQ ID NO: 801295 - DNA, 75 bp, synthetic construct
  source 1..75: mol_type = other DNA
atgccttaatggtaacgcgggaaaatacgacgtcagagacacaaaaattggtggagtggtttttaacgccgcagg

SEQ ID NO: 801296 - DNA, 75 bp, synthetic construct
  source 1..75: mol_type = other DNA
atgcgttaagcgtaataccagaggattttcacgtttgggattatctggataactctcgtacgcaagaagcatata

SEQ ID NO: 801297 - DNA, 75 bp, synthetic construct
  source 1..75: mol_type = other DNA
ttaatttactcgctatttttgcacgtcctgaaatgaattttggttatattcaaggtggtaatgaaaagataaaag

SEQ ID NO: 801298 - DNA, 75 bp, synthetic construct
  source 1..75: mol_type = other DNA
ataacggtgagtccttcactattcgtgactggatgcggggtgtccgtgaagataagaaaaacggctggctgttta

SEQ ID NO: 801299 - DNA, 75 bp, synthetic construct
  source 1..75: mol_type = other DNA
ccgtcgtgtgtggtttttctgtgatgagttacccacgttacacaaactgccggatctggtggagatcctgccgga

SEQ ID NO: 801300 - DNA, 75 bp, synthetic construct
  source 1..75: mol_type = other DNA
aagggttgttagatgcggtaataggtctaccagataggttgctttttgggacagggataccaaccgccattttga

SEQ ID NO: 801301 - DNA, 75 bp, synthetic construct
  source 1..75: mol_type = other DNA
atacagtttgatgtagttgcatctaaccctccattcaatattatcggttggaatcatgatgatttaatacataat

SEQ ID NO: 801302 - DNA, 75 bp, synthetic construct
  source 1..75: mol_type = other DNA
ggctaaaatgaatatgattatgcataacgaaattaatagtcggatagaatggggggatataatatctagccctca

SEQ ID NO: 801303 - DNA, 75 bp, synthetic construct
  source 1..75: mol_type = other DNA
tcagaccacgcacctttgcaagcgccgccacaaaatacccagccaacagacaacaaaaaaatcactccccagcat

SEQ ID NO: 801304 - DNA, 75 bp, synthetic construct
  source 1..75: mol_type = other DNA
ccggagaacgtggtgacggcagttgaaaccaatgtgttgaggttgcatggacggttaagccgagaatacggtagt

SEQ ID NO: 801305 - DNA, 75 bp, synthetic construct
  source 1..75: mol_type = other DNA
tcagtacataaggtagtgtctgcggccagtgtgaatacaagtgctgcaggagcgcacactcatagtgttagcggc

SEQ ID NO: 801306 - DNA, 75 bp, synthetic construct
  source 1..75: mol_type = other DNA
tgctccagtgatatctcaggccagtagcggggataagatcgcggttatttccgttgcaacaactgaaacatggac

SEQ ID NO: 801307 - DNA, 75 bp, synthetic construct
  source 1..75: mol_type = other DNA
cactgacgcgcaaggagtttcagttactttggctactggcctccagagctggcgaaattatacccagaacggtta

SEQ ID NO: 801308 - DNA, 75 bp, synthetic construct
  source 1..75: mol_type = other DNA
ccgtgtctgcaaccgcacccaatttgctcccgggaaaaacgtcgaacaagttgaggaaaaactgctaaaagtagt

SEQ ID NO: 801309 - DNA, 75 bp, synthetic construct
  source 1..75: mol_type = other DNA
ttgaataccgctttcggctggccgaccattgctgtagatacccacattttccgtgtctgcaaccgcacccaattt

SEQ ID NO: 801310 - DNA, 75 bp, synthetic construct
  source 1..75: mol_type = other DNA
caccagaagagcgggaagaagtgaaggcgcgcattgtggaattcgtgcgcctgagcggacgagaaacttttcgac

SEQ ID NO: 801311 - DNA, 75 bp, synthetic construct
  source 1..75: mol_type = other DNA
tacgatgcgatgacctgtcagtttcgcgaaatgaaactgatgcgtaatccggggtgtgaggtgtgcgggcagtaa

SEQ ID NO: 801312 - DNA, 75 bp, synthetic construct
  source 1..75: mol_type = other DNA
ttttgccgcgaaggtaccgctggtttccggcgcggcaattcgtatggaaggtcaaatcaccgtctttacttatca

SEQ ID NO: 801313 - DNA, 75 bp, synthetic construct
  source 1..75: mol_type = other DNA
cgcgccctgaaattaaagccatcatcagtgaagcattcagcacggacaaggaaggcaacattaacaccgggcgcg

SEQ ID NO: 801314 - DNA, 75 bp, synthetic construct
  source 1..75: mol_type = other DNA
aggtcgtcggtagccgttcttatatccgcgtgtatgagcgtgttggtgattcggatgaatatcgtccgattgccc

SEQ ID NO: 801315 - DNA, 75 bp, synthetic construct
  source 1..75: mol_type = other DNA
tccatcagagcaggcgtatcgcgtatggcgtaagacaccggagaaggctgctgacccgacactgattcgaaagtt

SEQ ID NO: 801316 - DNA, 75 bp, synthetic construct
  source 1..75: mol_type = other DNA
gtttctatgccacgcttccctggcggccgttaactgtccaaccagaatgtccggcaacgcttaaggatgtgagcg

SEQ ID NO: 801317 - DNA, 75 bp, synthetic construct
  source 1..75: mol_type = other DNA
tcgataaaatcctgaatccgctggatgcccgctgtgccgcatgggatttgtggaaggagtgcctgacacagccgg

SEQ ID NO: 801318 - DNA, 75 bp, synthetic construct
  source 1..75: mol_type = other DNA
gccgcgaagaagtcagccagtgatgccagcacatctgcccgtgaggcggcaacccatgcaaccgatgctgcaggc

SEQ ID NO: 801319 - DNA, 75 bp, synthetic construct
  source 1..75: mol_type = other DNA
tccggatgaagccgggcgttacagtatggacgttgagtacggtcagtacagcgtcagtctgttggtggaaggatt

SEQ ID NO: 801320 - DNA, 75 bp, synthetic construct
  source 1..75: mol_type = other DNA
agagcgagctggcgaaaaaaatcggtattaagcaggcgacaatttccaatttcgaaaacaatcctgacaatacca

SEQ ID NO: 801321 - DNA, 75 bp, synthetic construct
  source 1..75: mol_type = other DNA
ggtaaggatatggagcgtcagacgctggtcagttattccgacattcagtccctgccagatctgacctgctatgtc

SEQ ID NO: 801322 - DNA, 75 bp, synthetic construct
  source 1..75: mol_type = other DNA
catccgtgctgtgctgaccaactacgtgaaagccatccgttacctgcaggggattgagcacagcggtgagtcttt

SEQ ID NO: 801323 - DNA, 75 bp, synthetic construct
  source 1..75: mol_type = other DNA
atgatccgttatctcgcagggctggggctggtgttgttatgccttagcgggacggccagagccgcttcgtctgaa

SEQ ID NO: 801324 - DNA, 75 bp, synthetic construct
  source 1..75: mol_type = other DNA
aatatcacctcagatgccgtatttaacttcttcgataacctgttacccgatagcccgattgtacgtgaccagatc

SEQ ID NO: 801325 - DNA, 75 bp, synthetic construct
  source 1..75: mol_type = other DNA
aatagggcgagacagcgttggtgccgtaacgttattacccgaaaatgaaaccataacgcgcccgataatggcatg

SEQ ID NO: 801326 - DNA, 75 bp, synthetic construct
  source 1..75: mol_type = other DNA
cagcagccacagcagccacagcagccacagcagccacagcagccacagcagccacagcagccacagcagccacag

SEQ ID NO: 801327 - DNA, 75 bp, synthetic construct
  source 1..75: mol_type = other DNA
acatcgccaaaaaacagccgctgaccctgctctactcagccaaaaacaccacgcagaaccatgcgctggtgctgg

SEQ ID NO: 801328 - DNA, 75 bp, synthetic construct
  source 1..75: mol_type = other DNA
ggctgatgcttctgtgtttgaccgggatgagcggcacggcacaggcggcttcagcggaatgtgaggggaattttg

SEQ ID NO: 801329 - DNA, 75 bp, synthetic construct
  source 1..75: mol_type = other DNA
gcggtgtcgcacggcagtttgaccgtctcgattaacgaaaccagcaacgtcagccagccgaatgcctttgcaggc

SEQ ID NO: 801330 - DNA, 75 bp, synthetic construct
  source 1..75: mol_type = other DNA
ttatggattaatatattttcttctgtacttcttgttcctgtatatgaagagattgtatttcgagggtgtcttttt

SEQ ID NO: 801331 - DNA, 75 bp, synthetic construct
  source 1..75: mol_type = other DNA
attttcagctgtcagcgccggaaataatacggataaatatacgggagattatcttcagaaactgtctggtgttca

SEQ ID NO: 801332 - DNA, 75 bp, synthetic construct
  source 1..75: mol_type = other DNA
cagcctggtggtcggcctcgacggcaccggtgataaaaaccaggtcaaattcaccaaccagaccatcaccaatat

SEQ ID NO: 801333 - DNA, 75 bp, synthetic construct
  source 1..75: mol_type = other DNA
cgtgggcagactattgatgtcaccgtctcgtcgattggtgatgccaaaagtattcgcggcggcaccttgctgctg

SEQ ID NO: 801334 - DNA, 75 bp, synthetic construct
  source 1..75: mol_type = other DNA
acgcagttgcacggcgcagatggtgaagtgtatgccctggcgcagggcagcgtggtggtcggcgggatgaacgcc

SEQ ID NO: 801335 - DNA, 75 bp, synthetic construct
  source 1..75: mol_type = other DNA
aagcgccgtgttctcctggcgctactcagctttctctgcggccttctcttctacaaaccaacagcatcaatcctt

SEQ ID NO: 801336 - DNA, 75 bp, synthetic construct
  source 1..75: mol_type = other DNA
ctacaaaccaactgcatccatccttatcggcgtagccagcctgatccctaccatcacgcaggactctttcgagaa

SEQ ID NO: 801337 - DNA, 75 bp, synthetic construct
  source 1..75: mol_type = other DNA
tcctgtcgatgctcagcttcctctgcggccttctcttctacaaacccacagcgtccattcttatcggcgtggcca

SEQ ID NO: 801338 - DNA, 75 bp, synthetic construct
  source 1..75: mol_type = other DNA
ttagctttctctgcggacttcttttctacaaaccagcagcatcaattcttatcggcatagccagcctgatcccta

SEQ ID NO: 801339 - DNA, 75 bp, synthetic construct
  source 1..75: mol_type = other DNA
agggattgttttctctgctggtgcattcgtgtcagcaatcgttgcagttcgaattggcatctggctctatcaccg

SEQ ID NO: 801340 - DNA, 75 bp, synthetic construct
  source 1..75: mol_type = other DNA
ctttaaatcagtggcttagtatgggttctctggctgcagtgatcgcaggagttccaccagaggtggcgcttggtg

SEQ ID NO: 801341 - DNA, 75 bp, synthetic construct
  source 1..75: mol_type = other DNA
aagtttatgccctggcgcagggcagcgtggtagtcggcgggatgaacgccaccggggccagcggttcgagcgtaa

SEQ ID NO: 801342 - DNA, 75 bp, synthetic construct
  source 1..75: mol_type = other DNA
agaaaatgaagaaataattttagatattgataccccagacgactttattaatgcgcaaaaaaggtatactaaaat

SEQ ID NO: 801343 - DNA, 75 bp, synthetic construct
  source 1..75: mol_type = other DNA
atgtcagccatcgactgtataattaccgccgcaggattatcatcaagaatggggcaatggaaaatgatgttaccc

SEQ ID NO: 801344 - DNA, 75 bp, synthetic construct
  source 1..75: mol_type = other DNA
aataaacttatcgcctttagcgatctgctggaaaaactggcgatcgccccggaaaacgtggcttacgttggggat

SEQ ID NO: 801345 - DNA, 75 bp, synthetic construct
  source 1..75: mol_type = other DNA
tgggggacgcggtgcctgcccgccgcttacaggaggccatcgatccggtgctggagccggtcattgatgccatca

SEQ ID NO: 801346 - DNA, 75 bp, synthetic construct
  source 1..75: mol_type = other DNA
ggtattccacagcccacgcccggtgaagccatattccgtgtccgtcagaacagtaatgaaccggccatgcctgac

SEQ ID NO: 801347 - DNA, 75 bp, synthetic construct
  source 1..75: mol_type = other DNA
ttttagtgtcaaaaccatgcctgatgcaggcaatccagcgacccaatgtcaccaatatgcgtcaggcactcctta

SEQ ID NO: 801348 - DNA, 75 bp, synthetic construct
  source 1..75: mol_type = other DNA
tttgagcgaactgcgactgcgtgacggcagccatgccggggtggcgtttcagccctttggctggatagtgcatca

SEQ ID NO: 801349 - DNA, 75 bp, synthetic construct
  source 1..75: mol_type = other DNA
accaaaatcaccagtgcggtgatgcagctcagtacggggatggatattcctgatccctgggtacgggagcagacc

SEQ ID NO: 801350 - DNA, 75 bp, synthetic construct
  source 1..75: mol_type = other DNA
cggcgtggcgctggcgcaatcgctggagtcgctggttaacgtacagggcgtgcgtgaaaaccaactggtcggcta

SEQ ID NO: 801351 - DNA, 75 bp, synthetic construct
  source 1..75: mol_type = other DNA
gatctcatcgactggccggtaatggaaaaagtgggtttaagcgtcgccgtggccgatgcgcatccactgttgatc

SEQ ID NO: 801352 - DNA, 75 bp, synthetic construct
  source 1..75: mol_type = other DNA
gatctcatcgactggccggtgatggaaaaagtgggcttaagcgttgccgttgccgatgcgcatccactgttgatt

SEQ ID NO: 801353 - DNA, 75 bp, synthetic construct
  source 1..75: mol_type = other DNA
gttatggcattcgttgtgcgctcacctctgatattgaagtcgctatcattaccgggcgaaaggctaaactggtag

SEQ ID NO: 801354 - DNA, 75 bp, synthetic construct
  source 1..75: mol_type = other DNA
tgcgtattggaatatggctctatcaccgctccgataatccacgcgacttaattccggggagaaaagacgatggta

SEQ ID NO: 801355 - DNA, 75 bp, synthetic construct
  source 1..75: mol_type = other DNA
aaacgggaatagccggtggagatttcgaggatgaattcgaagtggataatgatgcgacgcctgatgaaatacatg

SEQ ID NO: 801356 - DNA, 75 bp, synthetic construct
  source 1..75: mol_type = other DNA
cgcgtccggtgccatcggcgctggaaaaagcgccagccaaaaagaagcgtatcgctggaaggctaccactccagt

SEQ ID NO: 801357 - DNA, 75 bp, synthetic construct
  source 1..75: mol_type = other DNA
aacaggtggcgttaaatgcctggaaagaggagaacggcaacgcggtgtgcctgcatttacgttcctcccagcggc

SEQ ID NO: 801358 - DNA, 75 bp, synthetic construct
  source 1..75: mol_type = other DNA
atgcgaaaattcaaaataattattgaaacgggaatagctggtggagattttgaggatgtattcgaagtagatgat

SEQ ID NO: 801359 - DNA, 75 bp, synthetic construct
  source 1..75: mol_type = other DNA
acgaagcaaaaggaattttctttaaccactgcaattactcataccacgaaataaaagatgaagaggaaggacaaa

SEQ ID NO: 801360 - DNA, 75 bp, synthetic construct
  source 1..75: mol_type = other DNA
gaagtggatgatgatgcgacgcctgatgaaatacatgacgaagcaaaagatattttctttaactactgcaattac

SEQ ID NO: 801361 - DNA, 75 bp, synthetic construct
  source 1..75: mol_type = other DNA
tgttatcagagtgattggcctgcatttactgcgcttttctgatgtcaccgtggagcttgcccgtaaggaaggtga

SEQ ID NO: 801362 - DNA, 75 bp, synthetic construct
  source 1..75: mol_type = other DNA
actagaattggtatagcatggccaaagatggaaaaaattatattatcagataaagatcgtaagaatctttgttta

SEQ ID NO: 801363 - DNA, 75 bp, synthetic construct
  source 1..75: mol_type = other DNA
cagagcacggcgcatatcgcctgacggaactgaaacccggggaagtggccctgtataccgacgaaggcgcgaaaa

SEQ ID NO: 801364 - DNA, 75 bp, synthetic construct
  source 1..75: mol_type = other DNA
cgcaaatgccgccgcaaccgcaatctatacctcagcaggcgccgacggtaccgctctcagaaaccaccagccagg

SEQ ID NO: 801365 - DNA, 75 bp, synthetic construct
  source 1..75: mol_type = other DNA
tcgctggttgaagcgatggttgaagccaacggcgagcgtgtaatgtcgctgattaatgaagccgccgctcgtggt

SEQ ID NO: 801366 - DNA, 75 bp, synthetic construct
  source 1..75: mol_type = other DNA
aaactggctgaagcgttgagcacgttaaaaggttcaacggttgaactgactatcgttgaagatgataatcccgcg

SEQ ID NO: 801367 - DNA, 75 bp, synthetic construct
  source 1..75: mol_type = other DNA
agactggaatagctggtggagattttgaggatgtattcgaagtggatgatgatgctacaccggatgaaatacatg

SEQ ID NO: 801368 - DNA, 75 bp, synthetic construct
  source 1..75: mol_type = other DNA
ccatggcggctgtgtgaatacgctaaccactctgcgcccttcaccactggcgaagggaaacccgcagcacactaa

SEQ ID NO: 801369 - DNA, 75 bp, synthetic construct
  source 1..75: mol_type = other DNA
agattttccggagaacgtggtgacggcagttgaaaccaatgtgttgaggttgcacggtcggttaagccgagaata

SEQ ID NO: 801370 - DNA, 75 bp, synthetic construct
  source 1..75: mol_type = other DNA
tcagccgataatggtgcttaatcgccgcctgcgcaaaaacagcagccatagcgtctggtgcgatcataaacagac

SEQ ID NO: 801371 - DNA, 75 bp, synthetic construct
  source 1..75: mol_type = other DNA
aacatcataaaatcgaggagtcagatttaacaagatataaccgaatgctaagcttctctctgaagtggtcaacaa

SEQ ID NO: 801372 - DNA, 75 bp, synthetic construct
  source 1..75: mol_type = other DNA
ctaaaggtaatttactatccaattcaaatatacaatgaaaaggtaaatcaagaaagggatatagagtgttgttat

SEQ ID NO: 801373 - DNA, 75 bp, synthetic construct
  source 1..75: mol_type = other DNA
aaatgatggcgcaatactgccactccataatggcatccccggccatccgattttagtgtcaaaaccatgcctgat

SEQ ID NO: 801374 - DNA, 75 bp, synthetic construct
  source 1..75: mol_type = other DNA
ggccagcctcttttttatgcttctgaagattttatccagggagagttatttaaaattacagatacaccgtggtac

SEQ ID NO: 801375 - DNA, 75 bp, synthetic construct
  source 1..75: mol_type = other DNA
aaaagtgtatggcatcgattacattgctgaaaatatccagtatttaaatacaaaatccccggcaagcagtcccgc

SEQ ID NO: 801376 - DNA, 75 bp, synthetic construct
  source 1..75: mol_type = other DNA
gatgcgactcctgaggaaatagaaaacgaggcaattgatgttttctttaatcactgcaattactcaatttacgaa

SEQ ID NO: 801377 - DNA, 75 bp, synthetic construct
  source 1..75: mol_type = other DNA
ttatatagtgagaaaataaggaggaaagtattattcttatgtcctcccgaagaggatggcataaaatctgatgat

SEQ ID NO: 801378 - DNA, 75 bp, synthetic construct
  source 1..75: mol_type = other DNA
ccctgcgtctgcttactctgccgcgcttctgggcactgatattcttcgtggtcggaacctgcatttacggcgtat

SEQ ID NO: 801379 - DNA, 75 bp, synthetic construct
  source 1..75: mol_type = other DNA
ccggtctctcctgacgaagcattgctggatgcctggggtgacgtcaggtatatcgcttataaatggctgaacgct

SEQ ID NO: 801380 - DNA, 75 bp, synthetic construct
  source 1..75: mol_type = other DNA
tctgagtactccattacggttaaaagtgccggagaggaaggaaataaacgttattttattgcgtctgcacctgat

SEQ ID NO: 801381 - DNA, 75 bp, synthetic construct
  source 1..75: mol_type = other DNA
ccaagtttaaatataaagtggccattagcggaaaaacctatcctttccaaaaaggattctgagcaaaaaaaaata

SEQ ID NO: 801382 - DNA, 75 bp, synthetic construct
  source 1..75: mol_type = other DNA
ttaaagggataaataattatccggataagattactgttactgtggcactggaaattggtgggtatccgtcactgt

SEQ ID NO: 801383 - DNA, 75 bp, synthetic construct
  source 1..75: mol_type = other DNA
cttcgggatttcaatactccaccctttaagaaagagcctgatagctgggtccagccgggtctgacttatctcaaa

SEQ ID NO: 801384 - DNA, 75 bp, synthetic construct
  source 1..75: mol_type = other DNA
ttaaagggataaataattacccggataagattgctgttactgtggcactggaaactggtgggtatccgtcgctgt

SEQ ID NO: 801385 - DNA, 75 bp, synthetic construct
  source 1..75: mol_type = other DNA
gcattggtcgttgcatgggatatctgcaggtagcagctgagattgaaatgatggccagtggtgctgacaatgatg

SEQ ID NO: 801386 - DNA, 75 bp, synthetic construct
  source 1..75: mol_type = other DNA
gcgcatcgatgatgtggtggatttcctgaaaaacgcccgtgataacgaccagtatgtcgagtcaccgaccatccg

SEQ ID NO: 801387 - DNA, 75 bp, synthetic construct
  source 1..75: mol_type = other DNA
cctacggccagtatttcaactccgatgagccgtccctgcgggatgatgcccgaatggtggtgctggaactgggcg

SEQ ID NO: 801388 - DNA, 75 bp, synthetic construct
  source 1..75: mol_type = other DNA
cggtgatggccagccccaacggcaatctcgatgaagtgcatgaaggactgttactgcaggcggtcagggcatcct

SEQ ID NO: 801389 - DNA, 75 bp, synthetic construct
  source 1..75: mol_type = other DNA
cggatcgtgcaaacgctgacacaacgcggcgtgcatatcgaattcgtcggcactgttgcaaatagtcggtggtga

SEQ ID NO: 801390 - DNA, 75 bp, synthetic construct
  source 1..75: mol_type = other DNA
agtatgccgagtccccgaccatccgcagccgtctggatgaaatgatagtgctgctggaccagtacactgccaacg

SEQ ID NO: 801391 - DNA, 75 bp, synthetic construct
  source 1..75: mol_type = other DNA
tggctacaagtccctgtgtgagaacatgggcggggtgtatctggacggtgaaaccctgcgttttaacccgtttgc

SEQ ID NO: 801392 - DNA, 75 bp, synthetic construct
  source 1..75: mol_type = other DNA
gcgaaaatcgccaaagagcatcctggctgggaaattgtcactacgcagtttggctataacgatgccactaaatca

SEQ ID NO: 801393 - DNA, 75 bp, synthetic construct
  source 1..75: mol_type = other DNA
aaccataggtatgatagtgcgatatatatctgtgaggctttatcatctagagttaaaaattatcgggtcttgatg

SEQ ID NO: 801394 - DNA, 75 bp, synthetic construct
  source 1..75: mol_type = other DNA
tcttataagaaaatattacgacagttttgcaattgttggtaatgctccttctgaaattggtttaaataatggaga

SEQ ID NO: 801395 - DNA, 75 bp, synthetic construct
  source 1..75: mol_type = other DNA
atgccttctgaagatgaaaaaaaacgccgcgatgagcagtttgctgcgtttgacgattattgtcggaaagtgatg

SEQ ID NO: 801396 - DNA, 75 bp, synthetic construct
  source 1..75: mol_type = other DNA
cagtgcgctcacgcgtggaaaaaagtgaagccgacgcgcaggccatcaatgccgtcattccaccagcccgaatgc

SEQ ID NO: 801397 - DNA, 75 bp, synthetic construct
  source 1..75: mol_type = other DNA
gaacgtatcccggcacccgcgccagcgccaccatgattggcgacgatgaaaccaactggggcactaagtcgctgg

SEQ ID NO: 801398 - DNA, 75 bp, synthetic construct
  source 1..75: mol_type = other DNA
atgccactcattacacaaaatttccgcctcaatgcgctggcaaatcagtatgcggctgcactgcacaaccacata

SEQ ID NO: 801399 - DNA, 75 bp, synthetic construct
  source 1..75: mol_type = other DNA
atgaataaaaaatatgaactggttgtaaaagggataaatcattacccggataagatagctgttactgtggcactg

SEQ ID NO: 801400 - DNA, 75 bp, synthetic construct
  source 1..75: mol_type = other DNA
tcgaagtctagtaaaggtgttttacgcgggctacattatcaattagaaccttatgcacaaggaaaattggtgcgc

SEQ ID NO: 801401 - DNA, 75 bp, synthetic construct
  source 1..75: mol_type = other DNA
gatgttgaatcgcgtattgaaaaactggagtgctatatcgctgaattgaaaaaaagcaccccaacaaaaaatgag

SEQ ID NO: 801402 - DNA, 75 bp, synthetic construct
  source 1..75: mol_type = other DNA
ccggaaagtgatgagcagaaatctcgcagagtgtttcagtattcataatgataatttcagtgagctggaatggga

SEQ ID NO: 801403 - DNA, 75 bp, synthetic construct
  source 1..75: mol_type = other DNA
aaaaaatgaggtgcttgcagcagtgaaccgccccggttttcctggagagtgttttatctgtgaactcaggctgcc

SEQ ID NO: 801404 - DNA, 75 bp, synthetic construct
  source 1..75: mol_type = other DNA
gtccttcttcgtgatttcaatactccgccctttaagaaagagcctgatggctggctccagccggggctgaattat

SEQ ID NO: 801405 - DNA, 75 bp, synthetic construct
  source 1..75: mol_type = other DNA
gaacatcaccgatattgaccagtcagcagaacgtatccgtgaccagctgtcggtgatggccagccccaacggcaa

SEQ ID NO: 801406 - DNA, 75 bp, synthetic construct
  source 1..75: mol_type = other DNA
acacaaggagagtttaatgactattgcggaaagattgcggcaggaaggggaacaatccaaagccttgcatatagc

SEQ ID NO: 801407 - DNA, 75 bp, synthetic construct
  source 1..75: mol_type = other DNA
acaatccaaagccctgcatatagccaaaataatgcttgaatccggagtccctcttgcggacatcatgcgctttac

SEQ ID NO: 801408 - DNA, 75 bp, synthetic construct
  source 1..75: mol_type = other DNA
acagggaagatagccctgaagggattgtcaaggaaattaaagaatggcgagctgctaacggtaagccaggattta

SEQ ID NO: 801409 - DNA, 75 bp, synthetic construct
  source 1..75: mol_type = other DNA
ctgaaaaacgccagtgacagcgagcagtatgccgggtcaccgaccatccgcagccgtctggacgaaatgattgtg

SEQ ID NO: 801410 - DNA, 75 bp, synthetic construct
  source 1..75: mol_type = other DNA
tgatgctatcaaggaaacgcttagaaatgactataacggcgtgaatcttttttctgaaaacgttgcgcctcgcgc

SEQ ID NO: 801411 - DNA, 75 bp, synthetic construct
  source 1..75: mol_type = other DNA
tctataccgatgaaaacggtacgcttcgtgtcaggagtatgggggctgttgataaaaaaggatttacggatgaag

SEQ ID NO: 801412 - DNA, 75 bp, synthetic construct
  source 1..75: mol_type = other DNA
atgggggcgttacctgaccgcattattgaggccgcaggcactgcaaacgccagacagggtaagcgaactggcgtc

SEQ ID NO: 801413 - DNA, 75 bp, synthetic construct
  source 1..75: mol_type = other DNA
acggggataccaggtaacccgcaggggcgcggggtgattgaaaggcttaataaggaaattccccgggatgtggcc

SEQ ID NO: 801414 - DNA, 75 bp, synthetic construct
  source 1..75: mol_type = other DNA
gtatcaacttccgcagtattaccgatggcgtggatctcaaaacagccagcggccgctataactttcgtaacatcc

SEQ ID NO: 801415 - DNA, 75 bp, synthetic construct
  source 1..75: mol_type = other DNA
ctttcatttattacaatttacctccttataaattcaataaaacttcaaagggaggctaattccagcctgatcgat

SEQ ID NO: 801416 - DNA, 75 bp, synthetic construct
  source 1..75: mol_type = other DNA
tggttgtggccgtgtggttttgtttctcgctggtgtttattgctggtgtcctgtggcgcatcttagtggcgcaga

SEQ ID NO: 801417 - DNA, 75 bp, synthetic construct
  source 1..75: mol_type = other DNA
aaaatcgaagaggctaaacgcgagcttaccccggctattacgcagaaacctgactttaattttggatttggtctg

SEQ ID NO: 801418 - DNA, 75 bp, synthetic construct
  source 1..75: mol_type = other DNA
gttctcctggtctggcgaacaggccgaacggtttaatgccattacccgtgcctactatatgaacgcggctgagac

SEQ ID NO: 801419 - DNA, 75 bp, synthetic construct
  source 1..75: mol_type = other DNA
gccgtacagcaggggattatcaaatataacccggcgtatgatttggatggcgtcgtgacccctgttgtgacccag

SEQ ID NO: 801420 - DNA, 75 bp, synthetic construct
  source 1..75: mol_type = other DNA
ctaaacggtgactcagcttttgtctttcccggcgtacgttctccagataaaccaatgagtgaaaacaccatcaat

SEQ ID NO: 801421 - DNA, 75 bp, synthetic construct
  source 1..75: mol_type = other DNA
gctatgaactgggcaaagacatcactctggcgatggactgcgcagcttctgaattctacaaagacggtaaatacg

SEQ ID NO: 801422 - DNA, 75 bp, synthetic construct
  source 1..75: mol_type = other DNA
agaatggtggtgctggagctggggggactggaagaccgtccgtccctgctggttgcggtgatgttctccctgatt

SEQ ID NO: 801423 - DNA, 75 bp, synthetic construct
  source 1..75: mol_type = other DNA
atcctggagatggagaacctggtcaaaattatccgggcctccctgcagggggcttatatcgccacgcagaccgcg

SEQ ID NO: 801424 - DNA, 75 bp, synthetic construct
  source 1..75: mol_type = other DNA
actatatgaaagcagcagagacacagttcccgctgccggaggggatgaacctgccgctgaccctgcgtcactacc

SEQ ID NO: 801425 - DNA, 75 bp, synthetic construct
  source 1..75: mol_type = other DNA
atgccgctatgccagctggtcgcagcagcaacgatttcggggtgaacatgaagccggaaggctcaatgaaaatct

SEQ ID NO: 801426 - DNA, 75 bp, synthetic construct
  source 1..75: mol_type = other DNA
aaaaacgcccgggataacgaccagtatgccgagtccccgaccatccgcagccgtctggatgaaatgatagtgctg

SEQ ID NO: 801427 - DNA, 75 bp, synthetic construct
  source 1..75: mol_type = other DNA
gattacctgacgctgggcctgcgtgagaacggcaggaacagcacggcccgcatcctgaatttccatctggcccgt

SEQ ID NO: 801428 - DNA, 75 bp, synthetic construct
  source 1..75: mol_type = other DNA
ctgttggtactgctgcaggccagatcaaaacgggttccatgagccgttctgaccgtgttgctaaatacaaccagc

SEQ ID NO: 801429 - DNA, 75 bp, synthetic construct
  source 1..75: mol_type = other DNA
ctgggctgccaaaaggcatttatcagctttcagaagcacagcaggcatccaagaatgttcacccacattcacatg

SEQ ID NO: 801430 - DNA, 75 bp, synthetic construct
  source 1..75: mol_type = other DNA
gggtattatcagtatcgtcagcagttaaccgcgctgaacagcctgctgaatgagaacaatgccctgccgccgctg

SEQ ID NO: 801431 - DNA, 75 bp, synthetic construct
  source 1..75: mol_type = other DNA
ccaatatttcagcctgaagattgtcttaattgcgctggcctatacagctgtggcaattctgctatggacacgtct

SEQ ID NO: 801432 - DNA, 75 bp, synthetic construct
  source 1..75: mol_type = other DNA
atgcattccactgaagtccagactaaacccctttttagctggaaagccctgggttgggcactgctctacttttgg

SEQ ID NO: 801433 - DNA, 75 bp, synthetic construct
  source 1..75: mol_type = other DNA
tgctgtggacacgcctgcgcccggtctatattccaaagccgtggcgttatgttgtctcttttgccctgctttatg

SEQ ID NO: 801434 - DNA, 75 bp, synthetic construct
  source 1..75: mol_type = other DNA
cgtgctggcgccatttaaagaagtactggctgaccctgcaccgaaaaagttcatcatcgtgcacctgctgggaac

SEQ ID NO: 801435 - DNA, 75 bp, synthetic construct
  source 1..75: mol_type = other DNA
gattggcgagtcaacgcagcgtggccgcatgagcctgtacggttacccacgtaaaacaacgccggaactggatgc

SEQ ID NO: 801436 - DNA, 75 bp, synthetic construct
  source 1..75: mol_type = other DNA
ctggagatcgaatttgttcatctgggggagaaaacgcgtcggcgttttggggcgttaatattgctgtttgatgag

SEQ ID NO: 801437 - DNA, 75 bp, synthetic construct
  source 1..75: mol_type = other DNA
ggttttaagtttgtcggtaccacaatctgttactcctttatgcaggcatgtgggctggtgaatgatcatgtggtt

SEQ ID NO: 801438 - DNA, 75 bp, synthetic construct
  source 1..75: mol_type = other DNA
gagtcgtgacccgttcgaatgcgtgctgtgcggcggccggatggtataccgccgggccattgcggggctgaatgt

SEQ ID NO: 801439 - DNA, 75 bp, synthetic construct
  source 1..75: mol_type = other DNA
tctctgaccacggtgaagaggtttacgacacgccgccgcataaaacccaggggcgtaatgaggacaacccgacgc

SEQ ID NO: 801440 - DNA, 75 bp, synthetic construct
  source 1..75: mol_type = other DNA
ccggaaggtcaggggcggtttgatggcattacagggcatattcccactggattaaatgcgaaagagctggaagtg

SEQ ID NO: 801441 - DNA, 75 bp, synthetic construct
  source 1..75: mol_type = other DNA
tactacatgaaccagcaacgtacgcagagtgcgcgtgaatacgacaccaacgtgctgaaaccattccaggaagtg

SEQ ID NO: 801442 - DNA, 75 bp, synthetic construct
  source 1..75: mol_type = other DNA
gctaatttcaaagatgaatcaggtaacgaaccgcgcaccttagtgctggtgattggcgaatcgacccagcgtgga

SEQ ID NO: 801443 - DNA, 75 bp, synthetic construct
  source 1..75: mol_type = other DNA
ttttaatcgagtattcctcggtacggattctgcgccacatgcacgtcatcgcaaagagagcagctgcggctgcgc

SEQ ID NO: 801444 - DNA, 75 bp, synthetic construct
  source 1..75: mol_type = other DNA
acgacacattcatcgaactggtccgcgaagagcaacaggttgctgaaagcatcgcattgactgatgacacactgg

SEQ ID NO: 801445 - DNA, 75 bp, synthetic construct
  source 1..75: mol_type = other DNA
atgagtcatttattgaactggtacgcgaagagcagcaagttgctgagagtattgccctgacggatgacacactgg

SEQ ID NO: 801446 - DNA, 75 bp, synthetic construct
  source 1..75: mol_type = other DNA
ctgcacagtgatgccacggtcgggcaaccgaaggtggaatccgcccgtgacgccctgacgcggatcaacccacat

SEQ ID NO: 801447 - DNA, 75 bp, synthetic construct
  source 1..75: mol_type = other DNA
aaccgaaggttgaatctgcccgcgatgcactggcgcagattaatccacatatcgcaattacgccggtgaatgcgt

SEQ ID NO: 801448 - DNA, 75 bp, synthetic construct
  source 1..75: mol_type = other DNA
tacgtaatcaactgaacgctgggtgttttgccgcgaagataccgctgatttccggcgcggcaattcgcatggagg

SEQ ID NO: 801449 - DNA, 75 bp, synthetic construct
  source 1..75: mol_type = other DNA
tggatatctgatgatataaagctgataaaaaaaattagatgtaaaggttatgaggcatattacaaatatagtgtt

SEQ ID NO: 801450 - DNA, 75 bp, synthetic construct
  source 1..75: mol_type = other DNA
gcttcgacaggttcagaagaatatttatctgtattatgttgtcatcagtatggtccggaatgatgtggtttttta

SEQ ID NO: 801451 - DNA, 75 bp, synthetic construct
  source 1..75: mol_type = other DNA
gcaacaggcgctgactttcgccaacgaaaagaacccggatctgtatctgacgcagccgtcgctgatgaacatgat

SEQ ID NO: 801452 - DNA, 75 bp, synthetic construct
  source 1..75: mol_type = other DNA
tgacagaggaattatttggaatgatccagatattggtatcgaatggccaaaaataaaatcactgatactatctga

SEQ ID NO: 801453 - DNA, 75 bp, synthetic construct
  source 1..75: mol_type = other DNA
ggtactgccttccggtattcagctcattattccggtcatttccgttaataaaaccttatcggagatcccaccatg

SEQ ID NO: 801454 - DNA, 75 bp, synthetic construct
  source 1..75: mol_type = other DNA
ttcataccggtaatacccccctctctgtaaagaaaatcataaacagggggtcatcccagagaatcgaaatcattt

SEQ ID NO: 801455 - DNA, 75 bp, synthetic construct
  source 1..75: mol_type = other DNA
ccatggtgatgtatgcctttcgtgcggaacgcaaacacatttccgaaagcgaaacccgctttcggaacgcgatgg

SEQ ID NO: 801456 - DNA, 75 bp, synthetic construct
  source 1..75: mol_type = other DNA
atatcaaaagttcttgacgttatacgagggatcgccgagcaaacgaatttgttggcactcaacgcagcaattgag

SEQ ID NO: 801457 - DNA, 75 bp, synthetic construct
  source 1..75: mol_type = other DNA
ttctggctagcgaaggcaacaaagcgttcacctctgaagaattcactcacttcctggaagaactgaccaaacagt

SEQ ID NO: 801458 - DNA, 75 bp, synthetic construct
  source 1..75: mol_type = other DNA
atggctgatgaaaaacgaatcagacagattagagcgctggcagatgatgacccacgccgccagcggtacgccgag

SEQ ID NO: 801459 - DNA, 75 bp, synthetic construct
  source 1..75: mol_type = other DNA
atgctaaatccggatgagcgggtgataatagcaaagcgcccgcttaaaaaatgtgactcctggattgaggatgtt

SEQ ID NO: 801460 - DNA, 75 bp, synthetic construct
  source 1..75: mol_type = other DNA
cacaggcgtggatattacgattgccaactgcaaatcgacatactgggatgaaggcattgttcagcaactcattaa

SEQ ID NO: 801461 - DNA, 75 bp, synthetic construct
  source 1..75: mol_type = other DNA
ccgccaccattagccgtctttgtgcctgtggtgctgactttggatttgacccctatatcagtgatgtaccagatg

SEQ ID NO: 801462 - DNA, 75 bp, synthetic construct
  source 1..75: mol_type = other DNA
tattacgctaaccagttgttgggtgccggtagcgcttacatgagcagccagattgaaggccaggacagtaccgca

SEQ ID NO: 801463 - DNA, 75 bp, synthetic construct
  source 1..75: mol_type = other DNA
agcctgaaagatgacgaaggcgcatccctcaaaattcgcccgaatctgctggttgtgccaccggcgctggaagat

SEQ ID NO: 801464 - DNA, 75 bp, synthetic construct
  source 1..75: mol_type = other DNA
ccttctttgataccgaccacctttcggggggcaagtcggtctctaacaaaggcacgaaaaagcttgccgttacct

SEQ ID NO: 801465 - DNA, 75 bp, synthetic construct
  source 1..75: mol_type = other DNA
ccagcggtacgccgaactgttggcgcaggctggccgcatgactattccccggctgcatccgggcgatgctaatag

SEQ ID NO: 801466 - DNA, 75 bp, synthetic construct
  source 1..75: mol_type = other DNA
gggtttgaccattgagcaataccgggcaatgcacccggcttacagagaggataaagaagatgataaccacaatta

SEQ ID NO: 801467 - DNA, 75 bp, synthetic construct
  source 1..75: mol_type = other DNA
agttatcgaaaaggatgttctcatcgccgataaggtatatatatcagacaaccttcatgagtataaagatattca

SEQ ID NO: 801468 - DNA, 75 bp, synthetic construct
  source 1..75: mol_type = other DNA
tcagaagctccttacgccattatggatgatactggaaactaccagtgccctcattgccagcatcaatatcgtgat

SEQ ID NO: 801469 - DNA, 75 bp, synthetic construct
  source 1..75: mol_type = other DNA
gcctccagagctggcgaaattatacccagaacggttattgcgagtgaaatttggggaatcaatttcgatagtgat

SEQ ID NO: 801470 - DNA, 75 bp, synthetic construct
  source 1..75: mol_type = other DNA
tacttcggttcgaaagaagatctatatctcgcctgcgcccaatggattgccgatttcattggcgagcagttccgt

SEQ ID NO: 801471 - DNA, 75 bp, synthetic construct
  source 1..75: mol_type = other DNA
tcgtaaccgcgaacagcgagtgattggtctgctatgtatcaatatgaatcttgatgttcctttctcgcagattat

SEQ ID NO: 801472 - DNA, 75 bp, synthetic construct
  source 1..75: mol_type = other DNA
ctaggtattaatacagatggtgcttttgtaagagtcttatcatgcttgattgaaaccaataattgctcgctgcga

SEQ ID NO: 801473 - DNA, 75 bp, synthetic construct
  source 1..75: mol_type = other DNA
gatattatgctgccggacgtgaacggctgggatatcgtgcgcatgttacgctccgccaataaagggatgccgatt

SEQ ID NO: 801474 - DNA, 75 bp, synthetic construct
  source 1..75: mol_type = other DNA
caacaaactactattactcagaaagtgatagaggcataatatggaatgatccaatgttaaaaattcaatggccat

SEQ ID NO: 801475 - DNA, 75 bp, synthetic construct
  source 1..75: mol_type = other DNA
ggaagacgattgggacaatggcgtaaggaagggaaacttgacttcatactgtgatgtcatactattgatgtcata

SEQ ID NO: 801476 - DNA, 75 bp, synthetic construct
  source 1..75: mol_type = other DNA
cagttgggcacgcctgcgtcgtaagattcttgccgacgtgcgtcagctgcaacggctgttggaatatcaccaatc

SEQ ID NO: 801477 - DNA, 75 bp, synthetic construct
  source 1..75: mol_type = other DNA
acatgcggctcatcgacggaattaaaacagtatgccgatcagtcgtatgatctcgtcattaccgatccaccattt

SEQ ID NO: 801478 - DNA, 75 bp, synthetic construct
  source 1..75: mol_type = other DNA
gctgaaagtgggcgggcgcagtgccactatcgtgccgcagggcgtgctgtttggctccagtaaggcgcaccagtc

SEQ ID NO: 801479 - DNA, 75 bp, synthetic construct
  source 1..75: mol_type = other DNA
gctgatgagccagccgacaaaatgagctggtttgaagaaaaggtcttaaagccggtcaacgatgcgctggggtaa

SEQ ID NO: 801480 - DNA, 75 bp, synthetic construct
  source 1..75: mol_type = other DNA
atctgggtatcaaagagttgcgcagtctgcttggtgataaagcgatgctgacgctgattgtcttctcgtttacgg

SEQ ID NO: 801481 - DNA, 75 bp, synthetic construct
  source 1..75: mol_type = other DNA
acgccccgtgatgaactggacgacatgggggatgcggtgcctgcccgcctgttacaggaggccatagacccggtg

SEQ ID NO: 801482 - DNA, 75 bp, synthetic construct
  source 1..75: mol_type = other DNA
cgtctatgatgaaaataacaagccgtgtgggtatgttgctaatgattcttctctctctttctgccgcatgaatgc

SEQ ID NO: 801483 - DNA, 75 bp, synthetic construct
  source 1..75: mol_type = other DNA
attcgtgtggagtgtttgcttaacggtgtctatgacatggcagtagtttcccgcctggcggcggaaagttatctc

SEQ ID NO: 801484 - DNA, 75 bp, synthetic construct
  source 1..75: mol_type = other DNA
atatcaacaacgtggtatgtgcgatgcctttgccctatacccgcttgtacgaaggtttagcgagcggattgaaag

SEQ ID NO: 801485 - DNA, 75 bp, synthetic construct
  source 1..75: mol_type = other DNA
aatcaataacttaggatatgctgttaaagaaccagtatatcacttagacgaagaaatgacgctgactcttgtcac

SEQ ID NO: 801486 - DNA, 75 bp, synthetic construct
  source 1..75: mol_type = other DNA
actattctgattcaaaataaagcggctgaacgtctccgccagaatgttggatcactggaagtcttcggactgtaa

SEQ ID NO: 801487 - DNA, 75 bp, synthetic construct
  source 1..75: mol_type = other DNA
cgcaaatccgtagatagccattcaatgacgcgtttgttaggtgctaaaaagggcgctacgaaggttaaagaagca

SEQ ID NO: 801488 - DNA, 75 bp, synthetic construct
  source 1..75: mol_type = other DNA
gcgtctatgatgaaaataacaagccgtgtgggtatgttgctaatgattcttctctctctttctgccgcatgaatg

SEQ ID NO: 801489 - DNA, 75 bp, synthetic construct
  source 1..75: mol_type = other DNA
tgctcagttttgagcgcacctatcttgaccagtgtggacgtgaacaaaccgaatatcacttagacgaagaaatga

SEQ ID NO: 801490 - DNA, 75 bp, synthetic construct
  source 1..75: mol_type = other DNA
agctcaaaactgaatttgtcgagagaatcaataacttaggatatgctgttaaagaaccagtatatcacttagacg

SEQ ID NO: 801491 - DNA, 75 bp, synthetic construct
  source 1..75: mol_type = other DNA
cgatgattacccgatgcaacaattgctgcatgcggttgttgataaacatgccctgcttacccatcaacagcgtgt

SEQ ID NO: 801492 - DNA, 75 bp, synthetic construct
  source 1..75: mol_type = other DNA
gtgtcgatctctcttatcacgaaagtttgcaacgcatcgtcaaaggggatgtcgatgcggtgatctggaacgtgg

SEQ ID NO: 801493 - DNA, 75 bp, synthetic construct
  source 1..75: mol_type = other DNA
tggagttggggccgcacacctacgttggcgagcaccagttgatttgccgtaaaggcgagtccgcaaacgtgaagc

SEQ ID NO: 801494 - DNA, 75 bp, synthetic construct
  source 1..75: mol_type = other DNA
ctgctgttaaaactgcttccgtgtctctggttgttgataacaccaaaccgctgaccatgtctacccgtcagatcg

SEQ ID NO: 801495 - DNA, 75 bp, synthetic construct
  source 1..75: mol_type = other DNA
cagctgcgtcaccgcgccggacggcaatcacacagtctatatccgtgataacgggattggcatcggagaaccgaa

SEQ ID NO: 801496 - DNA, 75 bp, synthetic construct
  source 1..75: mol_type = other DNA
gaattgccaatgcagattttaccggtgacaatgcaagagacggtttacggcgaactgcactggcaaaatagtcac

SEQ ID NO: 801497 - DNA, 75 bp, synthetic construct
  source 1..75: mol_type = other DNA
gatgtcgagcgagctgcataaattgtaccgttcgctggaggcgtcagtagaagaaaagacccgcgatctccacga

SEQ ID NO: 801498 - DNA, 75 bp, synthetic construct
  source 1..75: mol_type = other DNA
atgccttcgacccggctttagagggcttacgccgaatatcgcgttggatgatgacgggaaatccttctgggtact

SEQ ID NO: 801499 - DNA, 75 bp, synthetic construct
  source 1..75: mol_type = other DNA
aaccgggcaggttagcacaggtactagccgcccggcggctatcacaaactcaattagctactatggtgggtgtat

SEQ ID NO: 801500 - DNA, 75 bp, synthetic construct
  source 1..75: mol_type = other DNA
caaccttccggcggcggcacgttagtgagtattagctttcgctctgcggagggtgaggaaagtcagctgatgtaa

SEQ ID NO: 801501 - DNA, 75 bp, synthetic construct
  source 1..75: mol_type = other DNA
gacaatgaaattaacatttaccgggatcgcatcgtgtcccgcgcacgcgatctggtccgtaatgacggctgggca

SEQ ID NO: 801502 - DNA, 75 bp, synthetic construct
  source 1..75: mol_type = other DNA
taaaagaagctggatctctgaaaggattatggcgcaatcgccgtgcattcatcatggttctcggttttaccgctg

SEQ ID NO: 801503 - DNA, 75 bp, synthetic construct
  source 1..75: mol_type = other DNA
aatattttggatcattcaccaacgggatgattaccggtacggtgcccattttggctgtgtggtttttttgcatgg

SEQ ID NO: 801504 - DNA, 75 bp, synthetic construct
  source 1..75: mol_type = other DNA
ccctggcgctggatgcgcaaatgcaggtgcatttgttgcaaattattcgcgaagcggtgctgaatgcgatgaagc

SEQ ID NO: 801505 - DNA, 75 bp, synthetic construct
  source 1..75: mol_type = other DNA
tggctttgcccagccggtgctgacggcgtttctggaagagctgcacgaagaagaggatttgccgctgcctgcagg

SEQ ID NO: 801506 - DNA, 75 bp, synthetic construct
  source 1..75: mol_type = other DNA
ctccttgaggcgtggaaaacactgacccgccgtcgtgatgagtttgcggttggctttgcccagccggtgctgacg

SEQ ID NO: 801507 - DNA, 75 bp, synthetic construct
  source 1..75: mol_type = other DNA
atgaatactgttactgttatgaatactgctgttaaaactgcttccgtgtctctggttgttgataacaccaaaccg

SEQ ID NO: 801508 - DNA, 75 bp, synthetic construct
  source 1..75: mol_type = other DNA
ggtgccgattttggctgtcagccagtgatgtcactaacctccagcctgattgccgtgcgtgagcataaagccgga

SEQ ID NO: 801509 - DNA, 75 bp, synthetic construct
  source 1..75: mol_type = other DNA
gctctacatccaacttagcccgaaatacaaccgcgtagccggtgcgcctgctcaggcagctggtaacaacgatct

SEQ ID NO: 801510 - DNA, 75 bp, synthetic construct
  source 1..75: mol_type = other DNA
ttctctgttcctgcaagcaatgcgtgtggctattccggccgtcatcgttgcgctgtctgttggtaccagcgaagt

SEQ ID NO: 801511 - DNA, 75 bp, synthetic construct
  source 1..75: mol_type = other DNA
ggtgccgattttggctgtcagccggtaatgtcattgacctccagcctgattgctgtgcgtgagcataaagccgga

SEQ ID NO: 801512 - DNA, 75 bp, synthetic construct
  source 1..75: mol_type = other DNA
gtctcgaagaagctctgcggcttagagcggggggcatcacgcaacctattttgttactggaaggtttttttgaag

SEQ ID NO: 801513 - DNA, 75 bp, synthetic construct
  source 1..75: mol_type = other DNA
cgtcagccggtgaatattgtcagccattttgcgcgcgcggatgagccaaaatgcggtgcaaccgagaaacaactc

SEQ ID NO: 801514 - DNA, 75 bp, synthetic construct
  source 1..75: mol_type = other DNA
acagcgacaatctgcgaagtatgacactggataaattgatggtaatggggaaaaagtcggctatatccgttgcta

SEQ ID NO: 801515 - DNA, 75 bp, synthetic construct
  source 1..75: mol_type = other DNA
ccatctccccgattatccacaaccaacttcccgtcctcaccaccgagttactcgcgaatctctatggcacagagc

SEQ ID NO: 801516 - DNA, 75 bp, synthetic construct
  source 1..75: mol_type = other DNA
tgatccacagcgacaacctgcgaagtatgacgttggataaattgatgctaatgggaaaaaagtcggctgtatctg

SEQ ID NO: 801517 - DNA, 75 bp, synthetic construct
  source 1..75: mol_type = other DNA
tgctgcagttgcgcctgacgccgctctggcttctatcatttctaccattctggttatcgcaggtcatcagagcat

SEQ ID NO: 801518 - DNA, 75 bp, synthetic construct
  source 1..75: mol_type = other DNA
aaggactgtaatcttctggtcagcaaaataatggcgcttactgaccctgggtatcgtcttgaccgtgacagatac

SEQ ID NO: 801519 - DNA, 75 bp, synthetic construct
  source 1..75: mol_type = other DNA
tttgctggtggttgcatatggggtcgagcaagcggcaaaagccttacgcggttctggcaaaaagcgtaagcggaa

SEQ ID NO: 801520 - DNA, 75 bp, synthetic construct
  source 1..75: mol_type = other DNA
acaccagcccagatgtcaagaacagagaaataaagctggaatggtcaggagataagagagatttaccaactgctg

SEQ ID NO: 801521 - DNA, 75 bp, synthetic construct
  source 1..75: mol_type = other DNA
gactgtaggtaacggtctgctgggtaaagtcattccgacagaaaatacaaccggttcggcagttgacgtgcagca

SEQ ID NO: 801522 - DNA, 75 bp, synthetic construct
  source 1..75: mol_type = other DNA
aaagtgatcccgacagaaaatactaccggttccgcagtcgatgttcagcatgagctggcggggctggtggagcag

SEQ ID NO: 801523 - DNA, 75 bp, synthetic construct
  source 1..75: mol_type = other DNA
caccgttggtaacggcctgctggggaaagtgatcccgacagaaaatacaaccggttcggcagtcgatgttcagca

SEQ ID NO: 801524 - DNA, 75 bp, synthetic construct
  source 1..75: mol_type = other DNA
gcgtgaaagcgtttattgccgggcgagcactggcaggcgcggcaaatccggcacaggtggctgcagatttccatg

SEQ ID NO: 801525 - DNA, 75 bp, synthetic construct
  source 1..75: mol_type = other DNA
tcagcaacctgctgctcgcgctggcgacactgctggcacttggctacccgctggctgatctgttaaaaaccgccg

SEQ ID NO: 801526 - DNA, 75 bp, synthetic construct
  source 1..75: mol_type = other DNA
ccatgaagattaccagattgttggcaatcagcgtctggactactccgatcgcgtcacggtggcgcgtctgctggg

SEQ ID NO: 801527 - DNA, 75 bp, synthetic construct
  source 1..75: mol_type = other DNA
tatttgaagaagctgtagggcggaaggttaatttcgtacaagataatcactcgagatcggttaaaggtgttttaa

SEQ ID NO: 801528 - DNA, 75 bp, synthetic construct
  source 1..75: mol_type = other DNA
tcgatctgattgagattttattttatctgaagaaaaagattcgtattatcctttttattataactatctgtatgg

SEQ ID NO: 801529 - DNA, 75 bp, synthetic construct
  source 1..75: mol_type = other DNA
gtatccgaacggtgatggctgtgtaactataagctcaccagaaataaataccctgctgccatttgcctggctctg

SEQ ID NO: 801530 - DNA, 75 bp, synthetic construct
  source 1..75: mol_type = other DNA
aaagtgatcccgacagaaaataccaccggttcggcagtcgatgttcagcatgagctggcggggctggtggatcag

SEQ ID NO: 801531 - DNA, 75 bp, synthetic construct
  source 1..75: mol_type = other DNA
agagtggcgttcggtggcaaagcggtagaggggaaaggatattattatccgccgacattgctgctggatgttcgc

SEQ ID NO: 801532 - DNA, 75 bp, synthetic construct
  source 1..75: mol_type = other DNA
ttctgccggtggtcgcatttgacacgctggaagaggctatctcaatggctaatgacagtgattacggcctgacct

SEQ ID NO: 801533 - DNA, 75 bp, synthetic construct
  source 1..75: mol_type = other DNA
cgcagcagcagtatcagcagccacaacagccagttgcgccacaaccgcaggataccctgcttcatccgctgttga

SEQ ID NO: 801534 - DNA, 75 bp, synthetic construct
  source 1..75: mol_type = other DNA
tctggcagggttcaggacgtaccatttttgcggaagcggcgtacctgatgcgtaatgaccccaaccgcagctaca

SEQ ID NO: 801535 - DNA, 75 bp, synthetic construct
  source 1..75: mol_type = other DNA
tttactggtggtgcaccacgctggaaggcatgcgggatttaatcaggtcccagccggtctatgagatccagtatt

SEQ ID NO: 801536 - DNA, 75 bp, synthetic construct
  source 1..75: mol_type = other DNA
agccaacctgagtacgcaactgcccggctgggtggttgcttcccagcctctgggaagcgctcaggacacgcttaa

SEQ ID NO: 801537 - DNA, 75 bp, synthetic construct
  source 1..75: mol_type = other DNA
cggcactgtggctggccggatgcagttccggtgaaataaacaaaaactattaccaattgcctgtcgtgcagggcg

SEQ ID NO: 801538 - DNA, 75 bp, synthetic construct
  source 1..75: mol_type = other DNA
tgcgctgggttatcttagcgaagccgagtttgacagctgggtacggccagaacagatggtcggcagtatgaaagc

SEQ ID NO: 801539 - DNA, 75 bp, synthetic construct
  source 1..75: mol_type = other DNA
ccgtcgtgtgtggttcttctgtgacgagttgcccacgctgcacaaactgccggacctggtggagatcctgccgga

SEQ ID NO: 801540 - DNA, 75 bp, synthetic construct
  source 1..75: mol_type = other DNA
gttatccgacgtcttgccaactatgcccgtcagcgtggtgatatggtggtgatttatgaccgttcgtgtgagttt

SEQ ID NO: 801541 - DNA, 75 bp, synthetic construct
  source 1..75: mol_type = other DNA
gagcacctgaaagccagcgagcagtattcttacggtgctgacccggtacgtgacggggtatcgaccggtaaggat

SEQ ID NO: 801542 - DNA, 75 bp, synthetic construct
  source 1..75: mol_type = other DNA
ataacggtgaacccttcaccatccgtgactggatgcggggtgtccgggaagatcagaaaaacggctggctgttta

SEQ ID NO: 801543 - DNA, 75 bp, synthetic construct
  source 1..75: mol_type = other DNA
aaaggcggagaggactcggatatccggattggcgacctgccgattatccgggattctgaaatcaagaacttttgt

SEQ ID NO: 801544 - DNA, 75 bp, synthetic construct
  source 1..75: mol_type = other DNA
ccttctttgttgtctcctggattctggggcgtcagggtaaacaacagagcgaaaatgaagtcacaggtggtcgtc

SEQ ID NO: 801545 - DNA, 75 bp, synthetic construct
  source 1..75: mol_type = other DNA
tcagaaaaataggttttaaaaaacttggaaaaaatgtcaaaataagtgaaaaagcgtcaatttataaccctgaaa

SEQ ID NO: 801546 - DNA, 75 bp, synthetic construct
  source 1..75: mol_type = other DNA
cgcaatataaagaggtcgatctcgcggcgcgtactgcggcggcctctccgcttgaactggtgctggtgctgttcg

SEQ ID NO: 801547 - DNA, 75 bp, synthetic construct
  source 1..75: mol_type = other DNA
tcaataaatgtatcgacattctcaatgcgctcaccagttcactggagtttgaaaccggcggcgagctggtggtta

SEQ ID NO: 801548 - DNA, 75 bp, synthetic construct
  source 1..75: mol_type = other DNA
atccaaattcagtaccgtggacacaaaattgacagggaaaaactgctgcgctatctggtttctttccgtcatcac

SEQ ID NO: 801549 - DNA, 75 bp, synthetic construct
  source 1..75: mol_type = other DNA
atggaattctgcacaaggtgacattttaagaaagtgtaggcttgtcgcaaaggagtatttagatgaaaataaccc

SEQ ID NO: 801550 - DNA, 75 bp, synthetic construct
  source 1..75: mol_type = other DNA
gacagttatggatacctgaaggatttgctcatgggtttttggtgctgagtgatactgcggaatttttatataaaa

SEQ ID NO: 801551 - DNA, 75 bp, synthetic construct
  source 1..75: mol_type = other DNA
tcaataaatgcatcgacattctcaatgcgctcaccagttcgctggagtttgaaaccggcggcgagctggtggtca

SEQ ID NO: 801552 - DNA, 75 bp, synthetic construct
  source 1..75: mol_type = other DNA
atcgcattaaaagcctttcatgaaacatcaagcattatttttgtaattgttggagtttggctagaagataatcgg

SEQ ID NO: 801553 - DNA, 75 bp, synthetic construct
  source 1..75: mol_type = other DNA
tcgtgctgtagaagagggcgcgagagtggcgcttggtggcaaagcggtagcggggaaagggtactattatccgcc

SEQ ID NO: 801554 - DNA, 75 bp, synthetic construct
  source 1..75: mol_type = other DNA
ggaagggggcaaagtccagcaactggctgaagtcgaagtggctttcacggcggactatattgattatatggcgga

SEQ ID NO: 801555 - DNA, 75 bp, synthetic construct
  source 1..75: mol_type = other DNA
cggcgcagctgggtgccgacgcgctgatcctcgccgacctcgccatgctggagtacgccgccgagcgttatccgc

SEQ ID NO: 801556 - DNA, 75 bp, synthetic construct
  source 1..75: mol_type = other DNA
gtgagtcgcccaacaccgtcggtgcatgttctccggctcgcttcgtgcgctggcaacaaacgccgcaggggctgg

SEQ ID NO: 801557 - DNA, 75 bp, synthetic construct
  source 1..75: mol_type = other DNA
atggaatacttagaaataaacggctggaaaatctgctttcacgagtgttttttaaagcagattacaggactaata

SEQ ID NO: 801558 - DNA, 75 bp, synthetic construct
  source 1..75: mol_type = other DNA
tctccatgtggctgtccattgccattcgtggtctgctggcaatgggagaaaaccgtaaccgtcgtgtgtggtttt

SEQ ID NO: 801559 - DNA, 75 bp, synthetic construct
  source 1..75: mol_type = other DNA
aagcggctttgttggtgctgggttactgtttgcaggaattagtggtttttgtggaatggcaaggttgttagataa

SEQ ID NO: 801560 - DNA, 75 bp, synthetic construct
  source 1..75: mol_type = other DNA
gtgcaacgagcgcgttgttatctgttaggcgaaacggcggtagtgctggagctggagccgccagtgacgttggca

SEQ ID NO: 801561 - DNA, 75 bp, synthetic construct
  source 1..75: mol_type = other DNA
tacttacggcggcggtgatgggccggatctggctgtggttgctgcgcattgtgggttgagcgaaaaacaggttgt

SEQ ID NO: 801562 - DNA, 75 bp, synthetic construct
  source 1..75: mol_type = other DNA
gggccgcactggttcccggactggtcagagccttgctgtgtagcagcgcagctctcgtcatcagtctgaccggca

SEQ ID NO: 801563 - DNA, 75 bp, synthetic construct
  source 1..75: mol_type = other DNA
aaaatctaaaattaaagcaataagttttacaggtatgtttaactattgtgggagaagctctgaggaatgcataaa

SEQ ID NO: 801564 - DNA, 75 bp, synthetic construct
  source 1..75: mol_type = other DNA
ttgccagtagcggtaaataaatctcaacccttgccgttaatgcgccaggtgcagatcgctgcgggtggtttaata

SEQ ID NO: 801565 - DNA, 75 bp, synthetic construct
  source 1..75: mol_type = other DNA
cacttgcgggcctgactcttggaaaatcaaccgattaccgggatacctatgacgccagcctactgcaaggcgttc

SEQ ID NO: 801566 - DNA, 75 bp, synthetic construct
  source 1..75: mol_type = other DNA
caaagatcagagccatattcgcgtagaccttttcattaataaaatgcctgaattgggccaacagatttgtcaatt

SEQ ID NO: 801567 - DNA, 75 bp, synthetic construct
  source 1..75: mol_type = other DNA
ggttttttataggtagccttgaagccatcatggtgatatgtatcagcattatgtttcttcttgtgcttatcaatg

SEQ ID NO: 801568 - DNA, 75 bp, synthetic construct
  source 1..75: mol_type = other DNA
agtctcgctttattgaaattccggtggtttacggtggtgcaggcggaccggatttggcggtggtcgcggcgcatt

SEQ ID NO: 801569 - DNA, 75 bp, synthetic construct
  source 1..75: mol_type = other DNA
acgtacccgcgtcgagtcgtggccaccacgcctgaaaaaggtctggccggagatgccgcaagaggcgagcagtgt

SEQ ID NO: 801570 - DNA, 75 bp, synthetic construct
  source 1..75: mol_type = other DNA
caaaacctgcgggctggcgctgtaatctggcctgtgattactgcttttacctggcgaaggggcagggggtgctgc

SEQ ID NO: 801571 - DNA, 75 bp, synthetic construct
  source 1..75: mol_type = other DNA
ggcagcatgacgctgagcgaagcttttaatctggattttgtccactacaggaaacaaatcacgacactggccccc

SEQ ID NO: 801572 - DNA, 75 bp, synthetic construct
  source 1..75: mol_type = other DNA
agaaggctctgcattacctgttggtgtgcctgttccatggccttcagccacaccgccaacaggctggctgaaatg

SEQ ID NO: 801573 - DNA, 75 bp, synthetic construct
  source 1..75: mol_type = other DNA
cttggtttgggagaaggtgctaactgggttatgttacctggaggaatgataattcagcgtgtttatcttggattt

SEQ ID NO: 801574 - DNA, 75 bp, synthetic construct
  source 1..75: mol_type = other DNA
acctttcgtattacggctcgggaatatgcatttatcgctgatattgatgtaacaggtgcttaccggcagttaaaa

SEQ ID NO: 801575 - DNA, 75 bp, synthetic construct
  source 1..75: mol_type = other DNA
ttcttgaaaaagattttcagttacaacgtgccattcatcaaattgaaagatatctgtacgcaacttttaaatatg

SEQ ID NO: 801576 - DNA, 75 bp, synthetic construct
  source 1..75: mol_type = other DNA
tagctttcaacttccggatgatgagattggttttattgcattgcatattttaaataactatgaaaattcatctga

SEQ ID NO: 801577 - DNA, 75 bp, synthetic construct
  source 1..75: mol_type = other DNA
gtgcaatatgcggagaacaatctcgaaaaaaatctcaatccatcgctactattgattcttgctgatcacatttcg

SEQ ID NO: 801578 - DNA, 75 bp, synthetic construct
  source 1..75: mol_type = other DNA
cggactatatcgattacatggcggagtgggcacggcgttatgaaggcgagattattcaaagcgatcgtccaggag

SEQ ID NO: 801579 - DNA, 75 bp, synthetic construct
  source 1..75: mol_type = other DNA
aaatcgtacagtaatgggagttctacattcgttatacttaatagcgggcagattgatgacttcgaaattaatgta

SEQ ID NO: 801580 - DNA, 75 bp, synthetic construct
  source 1..75: mol_type = other DNA
acaaatgtccgacggcgtatggttctggacattccagtatcctgtccgtatgcgtctggtcggccagacaaccag

SEQ ID NO: 801581 - DNA, 75 bp, synthetic construct
  source 1..75: mol_type = other DNA
tcacgcgtcattaatagtgggcaagtgtgtaactgtgcagaacgtgtttatgtacagaaaggcatttatgaggtg

SEQ ID NO: 801582 - DNA, 75 bp, synthetic construct
  source 1..75: mol_type = other DNA
gaactggggggtaaagcaccagctatcgtaatggacgatgccgatcttgaactggcagtcaaagccatcgttgat

SEQ ID NO: 801583 - DNA, 75 bp, synthetic construct
  source 1..75: mol_type = other DNA
tgtacagaaaggcatttatgatcagtttgtcaatcggctgggtgaagtgaaccgccccgggaatcctggagacta

SEQ ID NO: 801584 - DNA, 75 bp, synthetic construct
  source 1..75: mol_type = other DNA
cttatgcttccctggttgggcgtttttttagtctcattagtgggtggtgagtactggtggatagtcattataccc

SEQ ID NO: 801585 - DNA, 75 bp, synthetic construct
  source 1..75: mol_type = other DNA
ggaaacagaagtagcaagtgtgatggaaggaatgattaaagtcgttgccgaataccgtaatacaaacaacgcaat

SEQ ID NO: 801586 - DNA, 75 bp, synthetic construct
  source 1..75: mol_type = other DNA
cttatgctcccctggctgggcgttttgttagcctcattagtcggtggtgagtactggtggttagtcattatacct

SEQ ID NO: 801587 - DNA, 75 bp, synthetic construct
  source 1..75: mol_type = other DNA
tggtttttaacgccgcagggacagagtttggtggaagatgtaggttatgtcccgatgtataagacgctaccttaa

SEQ ID NO: 801588 - DNA, 75 bp, synthetic construct
  source 1..75: mol_type = other DNA
tgagtactggtggatggtcattattcccgttggggcgcatatcagtttttcgctgggatacgcctggccgaccag

SEQ ID NO: 801589 - DNA, 75 bp, synthetic construct
  source 1..75: mol_type = other DNA
atgcactaagcgttttgccggaagattttcacgaatgggaatatctggcgaactctcgtactcccgaagcatata

SEQ ID NO: 801590 - DNA, 75 bp, synthetic construct
  source 1..75: mol_type = other DNA
aggaaatcaacaaggaagcgattttactggaaccgaaagcagtcgcaggtgtcgccggaattacagttaaatcag

SEQ ID NO: 801591 - DNA, 75 bp, synthetic construct
  source 1..75: mol_type = other DNA
tgcaaatgccgtttgagccgtctcacgagaacatggctaatctgaaactgtacccggatcagccagtagaagttt

SEQ ID NO: 801592 - DNA, 75 bp, synthetic construct
  source 1..75: mol_type = other DNA
ttgtcgatgggcgcattattcgcgccttgcaggccaacttgttcgctgttctgcgcgacattctcttcgtctatg

SEQ ID NO: 801593 - DNA, 75 bp, synthetic construct
  source 1..75: mol_type = other DNA
gatgcagcagttaagcacccggcttgaacgcctgaatgaatcgcgcacgcgggaaattcagaaaatgcgggagct

SEQ ID NO: 801594 - DNA, 75 bp, synthetic construct
  source 1..75: mol_type = other DNA
actggaaccgaaagcggtcgcaggtgttgccggaattacagttaaatcaggcattgaggatttttctattattcc

SEQ ID NO: 801595 - DNA, 75 bp, synthetic construct
  source 1..75: mol_type = other DNA
atggctaaacgcgttacaaaattaaaggccgcagccgaggccgcaccacagacccgcgaagaagtcagccgcgat

SEQ ID NO: 801596 - DNA, 75 bp, synthetic construct
  source 1..75: mol_type = other DNA
tggtttttaacgccgcaggggcagagcttggtggaagatgtaggttatgtgccgatgtataaaacgttgcattaa

SEQ ID NO: 801597 - DNA, 75 bp, synthetic construct
  source 1..75: mol_type = other DNA
gatcgtctttaaagttaacggctttattgccctcgttctggtagctgccgtcgtcggatttgccgaagggatgga

SEQ ID NO: 801598 - DNA, 75 bp, synthetic construct
  source 1..75: mol_type = other DNA
catcatcgtccttgtcaggacaaaaggttatacccttgccgacatcagaagcacactgaaggaagccggttatga

SEQ ID NO: 801599 - DNA, 75 bp, synthetic construct
  source 1..75: mol_type = other DNA
atgttccgtgacactgtcaccgtttctggctgtcttttattgcgcccacttcggctcccggctgcctggcggcat

SEQ ID NO: 801600 - DNA, 75 bp, synthetic construct
  source 1..75: mol_type = other DNA
aatggtagcagcgctctctgtaacccactgttttctgccgccacatccagggcctactgccatcgcgactatctt

SEQ ID NO: 801601 - DNA, 75 bp, synthetic construct
  source 1..75: mol_type = other DNA
tacccctgttgtatgttggcgtaccaatggtagcagcgctctctgtaacccactgttttctgccgccacatccag

SEQ ID NO: 801602 - DNA, 75 bp, synthetic construct
  source 1..75: mol_type = other DNA
ctgggctctgccaccgtcgcggccattaccaccgcgggtgtggtgttgccgattatcaacgttacccatgccgat

SEQ ID NO: 801603 - DNA, 75 bp, synthetic construct
  source 1..75: mol_type = other DNA
ggcaacagttggtagaggatgtggggtatgtgccgttgttggtgtggccgacggtggttgcgctggctgcttgta

SEQ ID NO: 801604 - DNA, 75 bp, synthetic construct
  source 1..75: mol_type = other DNA
tgctgacgctgggggcgataataatatttttctctggtcgcgtgtgggacggtgatagcgcgccagaaaacagag

SEQ ID NO: 801605 - DNA, 75 bp, synthetic construct
  source 1..75: mol_type = other DNA
tgatattattttcgtggcgcaaccttccggtgggcaaaaaaaacgtgcaaaggaatctggtgtcactttgctgta

SEQ ID NO: 801606 - DNA, 75 bp, synthetic construct
  source 1..75: mol_type = other DNA
gggctgccgctacggtccgatgcgtgaaaacccggcttgcagcgaccgttccggtcgcgccgcccctgtcgcgcc

SEQ ID NO: 801607 - DNA, 75 bp, synthetic construct
  source 1..75: mol_type = other DNA
tatattgttgatgcatttatggtgacgcgtgaaaatcccacattggaaacgcaaaaattggtggattggttttta

SEQ ID NO: 801608 - DNA, 75 bp, synthetic construct
  source 1..75: mol_type = other DNA
ttttttagtacccggtttattaatcctggttggctggataatcgcgctgcatctggcagattatcaatttcacca

SEQ ID NO: 801609 - DNA, 75 bp, synthetic construct
  source 1..75: mol_type = other DNA
aatcattgatgacgccgctgaagtcgcccgtcagatgaaaaaatcgatgccgctggtgaaagaaaatcgccgtga

SEQ ID NO: 801610 - DNA, 75 bp, synthetic construct
  source 1..75: mol_type = other DNA
atatggagaagctggctaaatggaagccagaaaatgtggtggtagagcagtccccggccatttcgctaaaagaag

SEQ ID NO: 801611 - DNA, 75 bp, synthetic construct
  source 1..75: mol_type = other DNA
ggaaagggctgagacacaggaagatatgcgcgatagcctggctgggctggggccggaacctggcgaaaacgaggc

SEQ ID NO: 801612 - DNA, 75 bp, synthetic construct
  source 1..75: mol_type = other DNA
tatatcggggatgagcgcgtacctggcacaatgtattcttcggataacgaatggcaacgcgcagcactggaaact

SEQ ID NO: 801613 - DNA, 75 bp, synthetic construct
  source 1..75: mol_type = other DNA
ccaatactggaaatttactgaggaacgcatcaaacgcaacgatgatggtagcgttgtgctcgataaagacgataa

SEQ ID NO: 801614 - DNA, 75 bp, synthetic construct
  source 1..75: mol_type = other DNA
atatttctcagtcatgcaaaatgaaggtgaaggataaagccagtgtaaacgtcggcagggaaaaagcgctggaaa

SEQ ID NO: 801615 - DNA, 75 bp, synthetic construct
  source 1..75: mol_type = other DNA
gcaccgtgtgcaggactccccttcgaaaggtcagtccatcagggattcctcactgccagttcgtgcttgagcatc

SEQ ID NO: 801616 - DNA, 75 bp, synthetic construct
  source 1..75: mol_type = other DNA
acctgatggctcagggttacagcgatcagcgctggatgacctataagcaggcaactgctgcagatgcacaggtac

SEQ ID NO: 801617 - DNA, 75 bp, synthetic construct
  source 1..75: mol_type = other DNA
atgactgccgcggcagagcaaaaaattcccgggaactgttatcctgtcgacaaagttattcgcatgaacaataac

SEQ ID NO: 801618 - DNA, 75 bp, synthetic construct
  source 1..75: mol_type = other DNA
ttaaccctgccttgaataccttatcattcgttaaaatattaatagcgatgtgccgtatccctgaaaataattctg

SEQ ID NO: 801619 - DNA, 75 bp, synthetic construct
  source 1..75: mol_type = other DNA
ctggattaaagccctgcaggatgacccgatggaaatttttcgcgccgcagccgacgctgaaaaaattcaggggtt

SEQ ID NO: 801620 - DNA, 75 bp, synthetic construct
  source 1..75: mol_type = other DNA
gatggaaccaagcgctttgccaaaaacgcccgcaaagaagggtgttttcatgttgttggcggtctggacgcactt

SEQ ID NO: 801621 - DNA, 75 bp, synthetic construct
  source 1..75: mol_type = other DNA
cgggttgccaccaatggcggtgcgccaggataaaagctggaacagtattgaacgggccgaagccattctggaagc

SEQ ID NO: 801622 - DNA, 75 bp, synthetic construct
  source 1..75: mol_type = other DNA
catttcatgagattgtggctgaaaacctgatagcccagctcaaagagggtacggcgccatggcagaagccatgga

SEQ ID NO: 801623 - DNA, 75 bp, synthetic construct
  source 1..75: mol_type = other DNA
ctgcgtgacattctcttcgtttacgggcaaatccataacaccgttcgttttcccaacctgaatctcgacaactcc

SEQ ID NO: 801624 - DNA, 75 bp, synthetic construct
  source 1..75: mol_type = other DNA
attgccggtattaaggtgaataaaggtgctgaaagttttgaagtcgagccttttgaacaggacgccggactgaat

SEQ ID NO: 801625 - DNA, 75 bp, synthetic construct
  source 1..75: mol_type = other DNA
atggcaaaacgcgttacaaaattaaaggccgcagccgaggcggcaccgcagacccgtgaagaggtcagccgcgat

SEQ ID NO: 801626 - DNA, 75 bp, synthetic construct
  source 1..75: mol_type = other DNA
ctgcgcgagctaaatatctgcactggctgtggtccgggagcgatggaagctccgatgaaaggcgcggcggtcggt

SEQ ID NO: 801627 - DNA, 75 bp, synthetic construct
  source 1..75: mol_type = other DNA
atggacgacctgctacagggttttgttgcccagcatcgtatgaagttgccaggctcagcctacatcccttgctac

SEQ ID NO: 801628 - DNA, 75 bp, synthetic construct
  source 1..75: mol_type = other DNA
atggacgacctgcttcaggggtttgtcgcccagcatcgtatgaagttgcctggctctgcctatatcccttgctac

SEQ ID NO: 801629 - DNA, 75 bp, synthetic construct
  source 1..75: mol_type = other DNA
ccagaatgagcatgtgaatatcatcatgcagaccaacagcgcggttaaggcgctggccgccgttaacgaagggga

SEQ ID NO: 801630 - DNA, 75 bp, synthetic construct
  source 1..75: mol_type = other DNA
aaccgtcgccagcttacgttgtcacgaaacgttctctatgatgctcaaaatagcaatcaggatagtgatttttgg

SEQ ID NO: 801631 - DNA, 75 bp, synthetic construct
  source 1..75: mol_type = other DNA
aaccggcggcgtatcttgctcaccagaccgcctcgcgcaaactggaggctcatacgagcggtgataagccactcc

SEQ ID NO: 801632 - DNA, 75 bp, synthetic construct
  source 1..75: mol_type = other DNA
gttgcgtggtgaaaacctgtatttaaaaaacttgccgctaaacgggttttatcaggttgacgcgcgaagcatcaa

SEQ ID NO: 801633 - DNA, 75 bp, synthetic construct
  source 1..75: mol_type = other DNA
gcattcaatatggagatctgataaatgctcaaatttagatttacgggcaatcttcgaagatattacagcaaagtg

SEQ ID NO: 801634 - DNA, 75 bp, synthetic construct
  source 1..75: mol_type = other DNA
catgcagaacaaccgcaccaaagaagagttacgttggtcttccaagggaaatgtgatgtccgacgaagaaaaagc

SEQ ID NO: 801635 - DNA, 75 bp, synthetic construct
  source 1..75: mol_type = other DNA
gactgcccgctggtgttttttttgcggcatccctattcaccagccaattgtttgcagctaccgatagcgttaagc

SEQ ID NO: 801636 - DNA, 75 bp, synthetic construct
  source 1..75: mol_type = other DNA
ttctgaacaggtcgggcagtggggcgcgccaacgctggacgtttgggtgtgcgcaaagattttgccgagaaacat

SEQ ID NO: 801637 - DNA, 75 bp, synthetic construct
  source 1..75: mol_type = other DNA
ggaagatctgattggcaaacgcatcgccgtaccgtttatctctaccacccactacagcctgctggcggcgctgaa

SEQ ID NO: 801638 - DNA, 75 bp, synthetic construct
  source 1..75: mol_type = other DNA
gtggtcgcaaaagataaaaccgttacagatgtcaccgcgggtaatttcactgccccggcaacattcaccgtgact

SEQ ID NO: 801639 - DNA, 75 bp, synthetic construct
  source 1..75: mol_type = other DNA
gtagagaaaaataaaagcaaaaccgacatcactgccggtccgttttccgcacctgcaacattttctatcacctat

SEQ ID NO: 801640 - DNA, 75 bp, synthetic construct
  source 1..75: mol_type = other DNA
aaaggccctggtcaaattaactaaacgcgcaacgtgtgaaggaacggccaacgatgggcctgggtttgcaaacgg

SEQ ID NO: 801641 - DNA, 75 bp, synthetic construct
  source 1..75: mol_type = other DNA
ggcattcatcgcttttcaggcgcaggcggtgaacgtcaccgtggcgtatcaaacctcagccgaaccggcgaaagt

SEQ ID NO: 801642 - DNA, 75 bp, synthetic construct
  source 1..75: mol_type = other DNA
catcgggcattatctgaacataaaacactatcaataagttggagtcattaccccgcactggcattcatcgctttt

SEQ ID NO: 801643 - DNA, 75 bp, synthetic construct
  source 1..75: mol_type = other DNA
aaaagcgctatcgatgcccagcaaccgtatattgctaatcctgacgcgtggctgaaacagccggaaaatatcagc

SEQ ID NO: 801644 - DNA, 75 bp, synthetic construct
  source 1..75: mol_type = other DNA
gtgaacgtcaccgtggcgtatcaaacctcagccgaaccggcgaaagtggctcaggccgacaacacctttgctaaa

SEQ ID NO: 801645 - DNA, 75 bp, synthetic construct
  source 1..75: mol_type = other DNA
ttctcggcgcactggcgctgtgggcatttcaggcgcaggcggtggacgtcaccgtcgcgtatcaaacctctgcgg

SEQ ID NO: 801646 - DNA, 75 bp, synthetic construct
  source 1..75: mol_type = other DNA
gcgacggtggactggcgtaagtttgacagcggagccagcatcgtgcgggcgctggcttcaggcgatgtccaaatc

SEQ ID NO: 801647 - DNA, 75 bp, synthetic construct
  source 1..75: mol_type = other DNA
atgagccgaccacttctgcaactggccctcgaccactcatcacttgaagacgcacagcgcgacgtgacgctgtta

SEQ ID NO: 801648 - DNA, 75 bp, synthetic construct
  source 1..75: mol_type = other DNA
gattatccagcagtgtcgttttggctgcctcattgttcagcgtaccctcttatgcggcaacagacagcattggac

SEQ ID NO: 801649 - DNA, 75 bp, synthetic construct
  source 1..75: mol_type = other DNA
aaaaataaaaccgtaaacaatgtcactgcgggtaagttttctgcaccagccacatttacagtaacctataactaa

SEQ ID NO: 801650 - DNA, 75 bp, synthetic construct
  source 1..75: mol_type = other DNA
tccctattttgtttacctggcgtcgctgtggtatttcaccggaatgatgcgcttgcccgctgcttttgttggttc

SEQ ID NO: 801651 - DNA, 75 bp, synthetic construct
  source 1..75: mol_type = other DNA
gcgcaacatcgccagatttgtcgtaggaaagcatttttttaagctggaaggtaatgaattacgcgacttcaaaaa

SEQ ID NO: 801652 - DNA, 75 bp, synthetic construct
  source 1..75: mol_type = other DNA
ctacattgaaaaaagatgctactgtctatgaatttgaaaaaattatagaagatttttctttggagatattaggaa

SEQ ID NO: 801653 - DNA, 75 bp, synthetic construct
  source 1..75: mol_type = other DNA
tttggaataatggactctttaccgtgttaggtccagtaatgcttgctgcaactggttttctagtaaagcattttt

SEQ ID NO: 801654 - DNA, 75 bp, synthetic construct
  source 1..75: mol_type = other DNA
tatcgataaaaggcactgatggtaaagtaggaaaaatagaaatttatacagatacaggcgagcttatttttgaac

SEQ ID NO: 801655 - DNA, 75 bp, synthetic construct
  source 1..75: mol_type = other DNA
ccggacagccgcagtatgaacctgtctaatgcggtgtcggtagtggtgtatgaagcctggcgccagttggggtat

SEQ ID NO: 801656 - DNA, 75 bp, synthetic construct
  source 1..75: mol_type = other DNA
gcattcttgatgccctgcccgctgaacaaaaaattcgcattccaatggtgccggacagccgcagcatgaacctgt

SEQ ID NO: 801657 - DNA, 75 bp, synthetic construct
  source 1..75: mol_type = other DNA
tattatatcgccggactgattccgctttttccgacttttgcgctcatcgcgcattatattgttgccagcgaacgc

SEQ ID NO: 801658 - DNA, 75 bp, synthetic construct
  source 1..75: mol_type = other DNA
atggggctggtaatcaaagccgcgctcggtgcgctggtagtgctgttgattggtgttggtgttttagcaaaaacg

SEQ ID NO: 801659 - DNA, 75 bp, synthetic construct
  source 1..75: mol_type = other DNA
aaataaaactgcatgatagattatcaaaaaccgatatacttgacatcttagctgaacaaatgactatgcttgagg

SEQ ID NO: 801660 - DNA, 75 bp, synthetic construct
  source 1..75: mol_type = other DNA
ttttcaggcacaggcggtgaacgtcaccgtggcgtatcaaacctcagccgaaccggcgaaagtggctcaggccga

SEQ ID NO: 801661 - DNA, 75 bp, synthetic construct
  source 1..75: mol_type = other DNA
tacttatcctatcagatgcgtttttcatccagtataagcaatctgactgataactttttttcctggcgcatgctt

SEQ ID NO: 801662 - DNA, 75 bp, synthetic construct
  source 1..75: mol_type = other DNA
tggaattaactccagccagtgatttcaccccccggaacgagagaaaaaaaatccaccttcgccaactgacaggga

SEQ ID NO: 801663 - DNA, 75 bp, synthetic construct
  source 1..75: mol_type = other DNA
acgtattctactggcaagagcactgtataaaaaacctggtctattattactggacgaagcaaccagtcatcttga

SEQ ID NO: 801664 - DNA, 75 bp, synthetic construct
  source 1..75: mol_type = other DNA
ggagtgtagtgggggagtcagtgtcagtggttatgcaaatattaacacctcattttctggaacattagctacaaa

SEQ ID NO: 801665 - DNA, 75 bp, synthetic construct
  source 1..75: mol_type = other DNA
gactctgggattttttctaagtattgtgatttctgtaatgttttgccttgtcaaaaaaatggtagatgaatacca

SEQ ID NO: 801666 - DNA, 75 bp, synthetic construct
  source 1..75: mol_type = other DNA
tcgatctgattgagattttattttatctgaagaaaaagattcgtgttatcctttttattatagctatctgtatgg

SEQ ID NO: 801667 - DNA, 75 bp, synthetic construct
  source 1..75: mol_type = other DNA
aagtattgtgatttctgtaatgttttgccttgtcaaaaaaatggtagatgaataccaacaaaactctgggcagta

SEQ ID NO: 801668 - DNA, 75 bp, synthetic construct
  source 1..75: mol_type = other DNA
caatggtgctgttgtttctgtataacagagaaataaagctggaatggtcaggagataagagagatttaccaactg

SEQ ID NO: 801669 - DNA, 75 bp, synthetic construct
  source 1..75: mol_type = other DNA
ctgtatggatttatcattaccattccgacagttattgtcgcaggaccgctgttttctaaactgctaactcgcttt

SEQ ID NO: 801670 - DNA, 75 bp, synthetic construct
  source 1..75: mol_type = other DNA
gtcggggcattttctcgaaacccttaacggcattcagagtctgagaatcaacggtgtaactattcacagagaagc

SEQ ID NO: 801671 - DNA, 75 bp, synthetic construct
  source 1..75: mol_type = other DNA
ccagatgctgctgtcgctggcacgccagtgggccagtataactctgtccgtcaattttaacatgcagtggacagc

SEQ ID NO: 801672 - DNA, 75 bp, synthetic construct
  source 1..75: mol_type = other DNA
gagggctttccggagggcaaaaacaacgcattctgctggccagggctttgtacaagaaaccgggatttttattac

SEQ ID NO: 801673 - DNA, 75 bp, synthetic construct
  source 1..75: mol_type = other DNA
accgctaccatgggcgccttgctgaatgaaaaagccggcagcgggatggcgaaaggcattggcatccaggtgctg

SEQ ID NO: 801674 - DNA, 75 bp, synthetic construct
  source 1..75: mol_type = other DNA
atggtggtgggcaatgcttactgcttcgaaggaaataatattgactggtttatatgcctgtgcctctttcttgtg

SEQ ID NO: 801675 - DNA, 75 bp, synthetic construct
  source 1..75: mol_type = other DNA
tcatggcacacgctgcagcggaatatccgcgcgagtgctgcggcgtggtggcacagaaaagccgggttgagcgct

SEQ ID NO: 801676 - DNA, 75 bp, synthetic construct
  source 1..75: mol_type = other DNA
tcatgcaggtccaggccgataagtggaatcacgcgggaattctgctggagggaaatatgctgctgcaccacctgt

SEQ ID NO: 801677 - DNA, 75 bp, synthetic construct
  source 1..75: mol_type = other DNA
gccgctttccagaactcaccaaagcaaacctaccaggctgaaaaagcgcgcgatcgcaaactgtgcgccaacctg

SEQ ID NO: 801678 - DNA, 75 bp, synthetic construct
  source 1..75: mol_type = other DNA
agggttgtgcgttaccgcgatggctcggtgatcgatgttgtgcatcaggtgaaggaataagccatgcacctgctt

SEQ ID NO: 801679 - DNA, 75 bp, synthetic construct
  source 1..75: mol_type = other DNA
cggtaacccgtttcctggaagacaaaatgcgtagccgcgatattcgcgccgacttcgccctcggcggtattaccg

SEQ ID NO: 801680 - DNA, 75 bp, synthetic construct
  source 1..75: mol_type = other DNA
ccaatgcagccattttcaaaacgatcactggataagctggtgaaaacatacagcccggacggggctgtaaaatga

SEQ ID NO: 801681 - DNA, 75 bp, synthetic construct
  source 1..75: mol_type = other DNA
ctggtgaaattgtttatccggaaggggttatcggcatgcgaggggctatgaaaacacaaaaggctttccgcctgc

SEQ ID NO: 801682 - DNA, 75 bp, synthetic construct
  source 1..75: mol_type = other DNA
tatcgacgagcagaaagcctggcgtgattcagttcctgagtgcaacagggattatgtatttttgcagccacgtga

SEQ ID NO: 801683 - DNA, 75 bp, synthetic construct
  source 1..75: mol_type = other DNA
tccggcagacccacggtatcgagctctacgattaccgggtggattatccctggtgggaaaacgactacccggaca

SEQ ID NO: 801684 - DNA, 75 bp, synthetic construct
  source 1..75: mol_type = other DNA
ctggcatattgtgagctggccagagggggatttacgtaccattcagccacgcggggagctcccattgctggagcg

SEQ ID NO: 801685 - DNA, 75 bp, synthetic construct
  source 1..75: mol_type = other DNA
gggctattcttcttagtgtattgactgccagccaggcttatgctgcttgctctcgtgtcacttcgacgccgacca

SEQ ID NO: 801686 - DNA, 75 bp, synthetic construct
  source 1..75: mol_type = other DNA
aacagtcaccggacaaaacgggaagaatacctggtgatgagtttatggaaaggttctcctggcatgtggcggata

SEQ ID NO: 801687 - DNA, 75 bp, synthetic construct
  source 1..75: mol_type = other DNA
gttcatcggcaccgatgcgttaagcaaatcgatggcggaaatcattcaggctgatatgcgccagattggcgcgga

SEQ ID NO: 801688 - DNA, 75 bp, synthetic construct
  source 1..75: mol_type = other DNA
atgataatttttatgcgtattactcatcagataaatcaatatggaattgtctaaagaaatatagaattgatgaaa

SEQ ID NO: 801689 - DNA, 75 bp, synthetic construct
  source 1..75: mol_type = other DNA
caaccctttcttcctctatgtcgcttttactgaagtacacagcccactggcttcgccaaaacagtacctcgatat

SEQ ID NO: 801690 - DNA, 75 bp, synthetic construct
  source 1..75: mol_type = other DNA
tatgcgcccaagagatggtaacgatttcatagatgaacttacgccagagctttatgctaatactcaggaggtttt

SEQ ID NO: 801691 - DNA, 75 bp, synthetic construct
  source 1..75: mol_type = other DNA
taaaatttctggaagagcatttaattcttaatccacagcgctatgcccatcatgatgagacatctttaattacag

SEQ ID NO: 801692 - DNA, 75 bp, synthetic construct
  source 1..75: mol_type = other DNA
agcaggtcgccgacaccctgtttgccccttctgtgccctacgccaacctcggcctgaaaccgcgccagtacgatc

SEQ ID NO: 801693 - DNA, 75 bp, synthetic construct
  source 1..75: mol_type = other DNA
ggctttgattactcactggttaatacggcgggttttgttaccgacgctactctggataatgcgaaggagcgtccc

SEQ ID NO: 801694 - DNA, 75 bp, synthetic construct
  source 1..75: mol_type = other DNA
gagtatgtcagttcggaagtcgttaactggttggataacaaaaaggacagtaagcctttcttcctttatgtcgct

SEQ ID NO: 801695 - DNA, 75 bp, synthetic construct
  source 1..75: mol_type = other DNA
tagcttatgcgctgtgggaaggtatcggtattttatttattaccttgtttagggaaggtgcgaacaagtccctga

SEQ ID NO: 801696 - DNA, 75 bp, synthetic construct
  source 1..75: mol_type = other DNA
atcttaatgctggtggcgatcgacttgatcagccacaagctaaagatatgggttttgattattcgctggtcaata

SEQ ID NO: 801697 - DNA, 75 bp, synthetic construct
  source 1..75: mol_type = other DNA
tctggataatgcgaaggagcgtccccgttttggcatggtctatccaacgggttggttgcgtaacgggcaaccaac

SEQ ID NO: 801698 - DNA, 75 bp, synthetic construct
  source 1..75: mol_type = other DNA
ggactggatgcctacgctggcgaaaatgatgaacttcaaattaccgacggaccggacttttgatggcgaatcgtt

SEQ ID NO: 801699 - DNA, 75 bp, synthetic construct
  source 1..75: mol_type = other DNA
tatcaaaaaaagtcagaagcagaggatatcctcggaaaagcaaaagagcgttacgaggagcataaaggaaaattt

SEQ ID NO: 801700 - DNA, 75 bp, synthetic construct
  source 1..75: mol_type = other DNA
atcaattcctatggacccaacaatgtcagatgatgatgttaaatcagttataaacgccttaaatggttttatggg

SEQ ID NO: 801701 - DNA, 75 bp, synthetic construct
  source 1..75: mol_type = other DNA
aaataaataaacgtcaaaaacaagatttgctagaagcagtagaaagagtaatagattccggttggtatataatgg

SEQ ID NO: 801702 - DNA, 75 bp, synthetic construct
  source 1..75: mol_type = other DNA
taataacccactaattaagcttcctttgactgctcatgagtatagaaataatcaacaaagccatgtatggcatct

SEQ ID NO: 801703 - DNA, 75 bp, synthetic construct
  source 1..75: mol_type = other DNA
atgcagaaaacgttaatggccagtttgatcggccttgcagtttgcacagggaatgcttttagtcctgccttagcc

SEQ ID NO: 801704 - DNA, 75 bp, synthetic construct
  source 1..75: mol_type = other DNA
gctggctacgtaacgggcaacccactccacgagccgataaaatgagcggtgagtatgtcagttcggaagtcgtca

SEQ ID NO: 801705 - DNA, 75 bp, synthetic construct
  source 1..75: mol_type = other DNA
tgatcggccttgcagtttgcacagggaatgcttttaatccagtcgtagctgccgagactaaacaacccaatttag

SEQ ID NO: 801706 - DNA, 75 bp, synthetic construct
  source 1..75: mol_type = other DNA
cgcaaacgcaggcgctaagctggataattggcgtcagcgttttgctggcgatgattgggacgtttggcaatgtgt

SEQ ID NO: 801707 - DNA, 75 bp, synthetic construct
  source 1..75: mol_type = other DNA
ggtttttcaatcgcatcctgggccattattatccagcggacccgtattcttaacgcagcagcgcgcgaagccgaa

SEQ ID NO: 801708 - DNA, 75 bp, synthetic construct
  source 1..75: mol_type = other DNA
ttcttgaagattgtgcacaagcacatggtgcaatacgtgatggtcgcaaagctggagcttggggggatgctgcag

SEQ ID NO: 801709 - DNA, 75 bp, synthetic construct
  source 1..75: mol_type = other DNA
cgcaaacacaggcgttaagctgggtagttggcgtcagcgttttgctggcaatgattgggacgtttggtaatgtgt

SEQ ID NO: 801710 - DNA, 75 bp, synthetic construct
  source 1..75: mol_type = other DNA
caggcaaaaccgatcagtttttgggccagctttgctttgcagtttgtgaacgtcaaaattattttgtacggcatt

SEQ ID NO: 801711 - DNA, 75 bp, synthetic construct
  source 1..75: mol_type = other DNA
gcggggcatctgtttcagcgattgtttcgccagttaaatatcgtgctggcgctgctgctgatctattgcgcggta

SEQ ID NO: 801712 - DNA, 75 bp, synthetic construct
  source 1..75: mol_type = other DNA
aaagtgctggcagaaggcaacgcggatgagaaactggatcccgcgagcctgactaaaatcatgaccagctatgtg

SEQ ID NO: 801713 - DNA, 75 bp, synthetic construct
  source 1..75: mol_type = other DNA
gcgggcttaaccgtgctggttcgtcgcaacaccaaaaacgaccatcacgacggaggagacgatcatgagtcatga

SEQ ID NO: 801714 - DNA, 75 bp, synthetic construct
  source 1..75: mol_type = other DNA
aaactggacgatctttctaccggtgcgcgttccgaaaatattcaacacaccctgtataaaggcatgatgctacca

SEQ ID NO: 801715 - DNA, 75 bp, synthetic construct
  source 1..75: mol_type = other DNA
gcggctgctgaaaaccgcccgccaattccgggatcgctggggatgttgtacgactcgaccttgtgcgtaggctgc

SEQ ID NO: 801716 - DNA, 75 bp, synthetic construct
  source 1..75: mol_type = other DNA
gttctggcagcacaggcgggggctaaagttcatgtaattgatgtagggatagatactgcggagccaatacccgga

SEQ ID NO: 801717 - DNA, 75 bp, synthetic construct
  source 1..75: mol_type = other DNA
ccatcatcgaagctgcctgtgcgatatacaacaacatgggcgaacttgctgccagtaatattgttctaccgggga

SEQ ID NO: 801718 - DNA, 75 bp, synthetic construct
  source 1..75: mol_type = other DNA
cggcacaggggtcaacaaagaccaggaggagaacggctacgcgtacattaagaaacagtgtatgcactgcgtcga

SEQ ID NO: 801719 - DNA, 75 bp, synthetic construct
  source 1..75: mol_type = other DNA
cgacggtattagcctgaccgtgggcgaagtaacgtcaacacgtttctgcgtgcatttaattccagaaacgctgga

SEQ ID NO: 801720 - DNA, 75 bp, synthetic construct
  source 1..75: mol_type = other DNA
tgaaattggcggacacttaatgtcaggtcatattatgaccaccgctgaagtggcgaaaatattaacctcggaaaa

SEQ ID NO: 801721 - DNA, 75 bp, synthetic construct
  source 1..75: mol_type = other DNA
tgccagatgtcacccgctattaaaccttatcttattccttctcacttatcggcagaaaaaggggcgcgtattgcg

SEQ ID NO: 801722 - DNA, 75 bp, synthetic construct
  source 1..75: mol_type = other DNA
cgatattgcgcagcagctgcagcaccatatcggccggcgcccgctggttattttcaaggctttgttgaataaatc

SEQ ID NO: 801723 - DNA, 75 bp, synthetic construct
  source 1..75: mol_type = other DNA
gtataaaaatacttatggtggcaggttcgctgtataccgaattgcagactgtgttccgatgcgtgagaaacgccc

SEQ ID NO: 801724 - DNA, 75 bp, synthetic construct
  source 1..75: mol_type = other DNA
caaaatatgctcaggacaacaatctggcgccggtgcatcagagtggacgccaggagcaactggaaaatctggtaa

SEQ ID NO: 801725 - DNA, 75 bp, synthetic construct
  source 1..75: mol_type = other DNA
gccagccagggaaacctgttggggccgattctgtttttcgccgtttacctgcttatctttttcctgcgcgttggc

SEQ ID NO: 801726 - DNA, 75 bp, synthetic construct
  source 1..75: mol_type = other DNA
cagtacccacagcgtcgcgctgcagcaggatttcttcgataaagtcttcccgaacattttaccgatggcctacac

SEQ ID NO: 801727 - DNA, 75 bp, synthetic construct
  source 1..75: mol_type = other DNA
acaatgttgatttccgctaaaacaacgctgagggagcgatggcaagaagtacctgaagaggttaatagaacagga

SEQ ID NO: 801728 - DNA, 75 bp, synthetic construct
  source 1..75: mol_type = other DNA
acagaaatcgttaatattgcgaacaataatttcgtgagtatcacatctgatagtatcagcagtcagagtgggatt

SEQ ID NO: 801729 - DNA, 75 bp, synthetic construct
  source 1..75: mol_type = other DNA
cgcgatgaattcagaatgaagccggctcccggtgctgagccggtgaaatggtacaaaagcgcctatggcggcaag

SEQ ID NO: 801730 - DNA, 75 bp, synthetic construct
  source 1..75: mol_type = other DNA
tgccgatcacggcgtctgggaggaaggggtcgctatttctccaaaagaagtgacagccattcaggctgaaaatat

SEQ ID NO: 801731 - DNA, 75 bp, synthetic construct
  source 1..75: mol_type = other DNA
atgtcgcattcgagtttttccacaaactacatgtgccgttttattgcttccatgacgtggatgtttccccggaag

SEQ ID NO: 801732 - DNA, 75 bp, synthetic construct
  source 1..75: mol_type = other DNA
cgcagcgttattccggctggaatagcgaattgggccagcaaatcctgaaaaggccaaatgtcactggcagattta

SEQ ID NO: 801733 - DNA, 75 bp, synthetic construct
  source 1..75: mol_type = other DNA
cgatggatacgatggcgttggcattgaaaattgcagcacgcatgattgaagacggcgaattggataaacgcgtag

SEQ ID NO: 801734 - DNA, 75 bp, synthetic construct
  source 1..75: mol_type = other DNA
catgcagctattcagtttattgtcacaggacctgttggtaatgggaccattgataccagcaaactgattgctgac

SEQ ID NO: 801735 - DNA, 75 bp, synthetic construct
  source 1..75: mol_type = other DNA
atgaaataaaaaagctaccttcggcttgccctgacaatacggccctcttcccactaagagggccgctaaccttaa

SEQ ID NO: 801736 - DNA, 75 bp, synthetic construct
  source 1..75: mol_type = other DNA
gcggacgctaagaaattcgaagagttcaagcgtaagaacgaaagccaactggcgcttgatggcggcgataacctc

SEQ ID NO: 801737 - DNA, 75 bp, synthetic construct
  source 1..75: mol_type = other DNA
aacaaaaggcaaccgtgacgcgggcatatttcgcgaggaggaagaacgggccgcaaaccgcaacgactggatgta

SEQ ID NO: 801738 - DNA, 75 bp, synthetic construct
  source 1..75: mol_type = other DNA
ccccgagcaccattatggttgcactgattgtgattcataactgtgcggtgcttggattatttgctctggaaaaca

SEQ ID NO: 801739 - DNA, 75 bp, synthetic construct
  source 1..75: mol_type = other DNA
accaccttaattggtgtgctgccgacctatgcacaaattggtgtgtttgcgccaattttgctggtgacgctgcgt

SEQ ID NO: 801740 - DNA, 75 bp, synthetic construct
  source 1..75: mol_type = other DNA
aaagggcgttggcgacgtgaggccattcatgcactgatgcgattttcccggtgtgggcattttgctgtgataggt

SEQ ID NO: 801741 - DNA, 75 bp, synthetic construct
  source 1..75: mol_type = other DNA
acccagtgaggctattgtagtgcgctgccagacggtcaatcatcaggtgcaagtttccgtcgaaaaccccggtac

SEQ ID NO: 801742 - DNA, 75 bp, synthetic construct
  source 1..75: mol_type = other DNA
cttcaggctatcgcacgacgttttgatactgcggcaatgttgatccttgaagccaataacaccattgcaccagta

SEQ ID NO: 801743 - DNA, 75 bp, synthetic construct
  source 1..75: mol_type = other DNA
tggagatggaaaagcagcgtgggatctccatcactacgtctgtgatgcagtttccgtatcacgactgcctggtta

SEQ ID NO: 801744 - DNA, 75 bp, synthetic construct
  source 1..75: mol_type = other DNA
tgatgattatggtagccattgcactggcaaatcgttatgttctggtgccacggatggggcaagatgaagaccgtg

SEQ ID NO: 801745 - DNA, 75 bp, synthetic construct
  source 1..75: mol_type = other DNA
ctcttattgctcaaagccatcctggtgatgattatggtggtcattgcgctggctaatcgttatgttcttgtaccg

SEQ ID NO: 801746 - DNA, 75 bp, synthetic construct
  source 1..75: mol_type = other DNA
gcactgagccgggatgcaataagcgggtgaagtctggtaagtgcgatgagcacaagcgggaagcctggcgggcgg

SEQ ID NO: 801747 - DNA, 75 bp, synthetic construct
  source 1..75: mol_type = other DNA
gcaaagtctctatcgcacgctccaggcgcgctatccccaggcgataatcgatgtgatggcaccggcatggtgccg

SEQ ID NO: 801748 - DNA, 75 bp, synthetic construct
  source 1..75: mol_type = other DNA
acgtgatggcaccggcatggtgccgtccattattatcgcggatgccggaagttaacgaagctatccctatgcctc

SEQ ID NO: 801749 - DNA, 75 bp, synthetic construct
  source 1..75: mol_type = other DNA
ggcaaagcagctgattgatgaaggttatcaggtggttctgtttggctcggcgaaagatcatgaagcgggcaatga

SEQ ID NO: 801750 - DNA, 75 bp, synthetic construct
  source 1..75: mol_type = other DNA
gcagcggcactgaatcgtccgctggtcgcactgtatgggccaagcagcccggactttacgccgccgctttctcat

SEQ ID NO: 801751 - DNA, 75 bp, synthetic construct
  source 1..75: mol_type = other DNA
ctctcatcagaacgtccgatgattggcttttgcccgggtgcggagtttggtccggcaaaacgctggccacactac

SEQ ID NO: 801752 - DNA, 75 bp, synthetic construct
  source 1..75: mol_type = other DNA
taattgatgaaggttatcaggtggttctgtttggttcggcgaaagatcatgaagcgggcaatgagatactcgctg

SEQ ID NO: 801753 - DNA, 75 bp, synthetic construct
  source 1..75: mol_type = other DNA
caactgatgaaattgctcaacgcaccgacgctgtcctgcaatgctgtcagttaacagatgttgccagcgctcatc

SEQ ID NO: 801754 - DNA, 75 bp, synthetic construct
  source 1..75: mol_type = other DNA
ccgttatgccagatgcatcataaccagaagaccacgcagcaagaccccatcaccaaagcgaaccgtaaggcaggg

SEQ ID NO: 801755 - DNA, 75 bp, synthetic construct
  source 1..75: mol_type = other DNA
agaagaccacacagcaagacccaaccaccaaagcgaagcgcaaagcagggctgtaccgtgagcaggaagagcgtg

SEQ ID NO: 801756 - DNA, 75 bp, synthetic construct
  source 1..75: mol_type = other DNA
aattcattcccttggaacggcaaagccgctggaagaatatctacaggatggtgatgctgccaacttactgattta

SEQ ID NO: 801757 - DNA, 75 bp, synthetic construct
  source 1..75: mol_type = other DNA
tgctgccctgcaatgctgtcagttagcagacactgccagcgcgcatccgttagatctgcatagtgcgcagcgacg

SEQ ID NO: 801758 - DNA, 75 bp, synthetic construct
  source 1..75: mol_type = other DNA
cgtcatttctctcgtgtggtgcgactggaagatggtgtaatcaggaacgttaatccaccagacgatattcacccg

SEQ ID NO: 801759 - DNA, 75 bp, synthetic construct
  source 1..75: mol_type = other DNA
accgaatccaacctggacgccaactgcggggattcgtcagcgctcactggagcgtggcattaaattaccgccagt

SEQ ID NO: 801760 - DNA, 75 bp, synthetic construct
  source 1..75: mol_type = other DNA
tgaataaacttattatgaccgcatcggtaatcagcatcctgatcgtctttatcgtgctgttggcggtacataaag

SEQ ID NO: 801761 - DNA, 75 bp, synthetic construct
  source 1..75: mol_type = other DNA
agtttgcacgtgatgccatacccgataaagacgcgcggggcggcgaggtgtatctcctttccggcccgacgatta

SEQ ID NO: 801762 - DNA, 75 bp, synthetic construct
  source 1..75: mol_type = other DNA
acaactggtgctgtcgttcaaccatatgatcgagcgtatcgaggatgtctttacccgccagtccaatttctgtgc

SEQ ID NO: 801763 - DNA, 75 bp, synthetic construct
  source 1..75: mol_type = other DNA
aaagagagagccgttatcgtttgtttgtggatgtacagagtgacattattgacacgcccgggcgacggatggtta

SEQ ID NO: 801764 - DNA, 75 bp, synthetic construct
  source 1..75: mol_type = other DNA
gacgggcataaagtcgcggagctggcgcacctgatgccgatgcaactgataacgccagaagggtttactttactc

SEQ ID NO: 801765 - DNA, 75 bp, synthetic construct
  source 1..75: mol_type = other DNA
tggcgttatccagtacgcttgattccatccctttatccatgcagcgacagtttcctgatttaacaccgcgccatc

SEQ ID NO: 801766 - DNA, 75 bp, synthetic construct
  source 1..75: mol_type = other DNA
aatttgcgcgccagctcatcaccctacttgatacctctgatttaagttcgatgctgtcggtgatgctgccaactt

SEQ ID NO: 801767 - DNA, 75 bp, synthetic construct
  source 1..75: mol_type = other DNA
aaacatgatgtacaaggggttaatagccgtctagatgagattcaagcagcgattctacgggttaaattaaaatat

SEQ ID NO: 801768 - DNA, 75 bp, synthetic construct
  source 1..75: mol_type = other DNA
atggcgactgggcagacaaaccctggcgtggtgtgggggaatattatgccaataatcagctatctggatgcacag

SEQ ID NO: 801769 - DNA, 75 bp, synthetic construct
  source 1..75: mol_type = other DNA
tagccacggtaaaacggtgtatcactcccccgacgcgcccgatatccgcgagtttgcacgtgatgccatacccga

SEQ ID NO: 801770 - DNA, 75 bp, synthetic construct
  source 1..75: mol_type = other DNA
ttaaaagagattagcgccacacttgaacgggtacttaatcaccctgacgaaacgcaagcccgacgcttaatgacg

SEQ ID NO: 801771 - DNA, 75 bp, synthetic construct
  source 1..75: mol_type = other DNA
catcttcattacattaatgatttgatgaataaacttattatgaccgcatcgatcatcagcatcctgatcgtcttt

SEQ ID NO: 801772 - DNA, 75 bp, synthetic construct
  source 1..75: mol_type = other DNA
ggtgacacgttacgaacagctacgcccgtgggataaagaactgatcccgctggcggagcaaatcagcacctggcg

SEQ ID NO: 801773 - DNA, 75 bp, synthetic construct
  source 1..75: mol_type = other DNA
acagctggtactgtcgttcaaccatatgatcgagcgtattgaggatgtctttccccgccagtccaatttctcagc

SEQ ID NO: 801774 - DNA, 75 bp, synthetic construct
  source 1..75: mol_type = other DNA
aacaaccagttaatccccgaaaagaaaatgctcaatctggcagatgaagtcagcaaagtgttcgattttttcgag

SEQ ID NO: 801775 - DNA, 75 bp, synthetic construct
  source 1..75: mol_type = other DNA
ggatatcgctcatgaaattcgcacgccaatgactaatctggtgacacaaacagaaatcgccctcagccagtcacg

SEQ ID NO: 801776 - DNA, 75 bp, synthetic construct
  source 1..75: mol_type = other DNA
aacagcaaaacgttcagacaatgccatacacactgccagcaggctttacgcaatttaaagacaataaggctgtag

SEQ ID NO: 801777 - DNA, 75 bp, synthetic construct
  source 1..75: mol_type = other DNA
agccaataacactatcgccccggtgccaaaacctggtacgacgataactattccttcacaactgttattacctga

SEQ ID NO: 801778 - DNA, 75 bp, synthetic construct
  source 1..75: mol_type = other DNA
tacggtgcaagagggggataaaaaccttcaggccatcgcccgacgttttgatactgcggcaatgttgattctgga

SEQ ID NO: 801779 - DNA, 75 bp, synthetic construct
  source 1..75: mol_type = other DNA
catatgatcgagcgtattgaggatgtctttacccgccagtccaatttctcagcggatatcgcccacgaaattcgc

SEQ ID NO: 801780 - DNA, 75 bp, synthetic construct
  source 1..75: mol_type = other DNA
ttgacggcaaaccgatttatacgctctacattgcgctttcgatcgattttcatcttcattacatcaatgatttga

SEQ ID NO: 801781 - DNA, 75 bp, synthetic construct
  source 1..75: mol_type = other DNA
tggcacgatggcggatgtgaccttcaacagcatctttattaccgactggaaaaattacgccgcgattaacgaaat

SEQ ID NO: 801782 - DNA, 75 bp, synthetic construct
  source 1..75: mol_type = other DNA
tgccagacggtcgatcaccaggtgcaagttaccgtcgaaaaccccggtgcccattgcgcccgagcacttaccgcg

SEQ ID NO: 801783 - DNA, 75 bp, synthetic construct
  source 1..75: mol_type = other DNA
acctttcagaggtatggcaattgttcggtaatatgcctgacgatacagcattgaatgttgaattaacggcccttt

SEQ ID NO: 801784 - DNA, 75 bp, synthetic construct
  source 1..75: mol_type = other DNA
acaagttcgtggactggcattcaattcactgatcgacttcacgatcccgcaaccattctggcgtattgataattc

SEQ ID NO: 801785 - DNA, 75 bp, synthetic construct
  source 1..75: mol_type = other DNA
tggtagtatgccagatgatgcaaccctgagtgctgaagtttcggccctttatcttggtgtaagtgtcaaaacatt

SEQ ID NO: 801786 - DNA, 75 bp, synthetic construct
  source 1..75: mol_type = other DNA
tgttgggtattttgaggggcttgtactggcttgtaagatagagcaagagagacatattcttaaagatagctttta

SEQ ID NO: 801787 - DNA, 75 bp, synthetic construct
  source 1..75: mol_type = other DNA
gcaagttcgtggacttgcatttaactcattgagcgacttcacgattcctcaacctttctggcatattgataaaga

SEQ ID NO: 801788 - DNA, 75 bp, synthetic construct
  source 1..75: mol_type = other DNA
ggacctgaatacattcaatatcaagccgaagatagtaaagcccgtaatcagagagtaaattacttattaggggat

SEQ ID NO: 801789 - DNA, 75 bp, synthetic construct
  source 1..75: mol_type = other DNA
gtgacccacattcaccctggcaaaaaggcacatgcgaaaatatgaatggtttaattaggcaatatttacctaaag

SEQ ID NO: 801790 - DNA, 75 bp, synthetic construct
  source 1..75: mol_type = other DNA
acatttcctgatttggatcaaacaatgaatgtaagccatacaacgatttattcaacgatacgagcattaccaaag

SEQ ID NO: 801791 - DNA, 75 bp, synthetic construct
  source 1..75: mol_type = other DNA
taacttctatcagacattgcagcgtgaagggcattctcttatcacactggcatatcgtttttttcaggattacaa

SEQ ID NO: 801792 - DNA, 75 bp, synthetic construct
  source 1..75: mol_type = other DNA
gtgcgccaaacatccgtgaactatatgaaggaaacgggtttaaagtacatcatatggcagccagacggtcggtgt

SEQ ID NO: 801793 - DNA, 75 bp, synthetic construct
  source 1..75: mol_type = other DNA
atcatgctgccgcctttttgtaccttaatcggcactgttttaatggcgtaacgcggtacaaccaaaatggcgagt

SEQ ID NO: 801794 - DNA, 75 bp, synthetic construct
  source 1..75: mol_type = other DNA
catatggcagccagacggtcggtgtcctgcaaggcgtcaacacgtgtagttgctaacgatataattgcaataatg

SEQ ID NO: 801795 - DNA, 75 bp, synthetic construct
  source 1..75: mol_type = other DNA
aatgcgttagccagtagcatgacacaattacagagtaaatttgaaaatgatattagtgctgctataaggtcagaa

SEQ ID NO: 801796 - DNA, 75 bp, synthetic construct
  source 1..75: mol_type = other DNA
tcctgttcacctttgctgttgtcatgcaggtggctcttttcctgcagtctgctactgcccgtaatggtgttgcgg

SEQ ID NO: 801797 - DNA, 75 bp, synthetic construct
  source 1..75: mol_type = other DNA
ctttatggatgatgagacaagccagttgttatgctgtctggtccacgagaataatagaagctggacactaatgtt

SEQ ID NO: 801798 - DNA, 75 bp, synthetic construct
  source 1..75: mol_type = other DNA
agatattggtgtgggcggctgtagcagcggcaaatcataagctgcccaaacatgcaaaatctatcctgaatgtat

SEQ ID NO: 801799 - DNA, 75 bp, synthetic construct
  source 1..75: mol_type = other DNA
caaatcacaaacttagagtctcaaacggcagccaacatttccgcggcggtcacaactgaaacgacagcgagaacg

SEQ ID NO: 801800 - DNA, 75 bp, synthetic construct
  source 1..75: mol_type = other DNA
tgccatctcgctcttatctggtgcgtggcctaaaaattcgagtaccttcaaactataacgagtccagtaacactt

SEQ ID NO: 801801 - DNA, 75 bp, synthetic construct
  source 1..75: mol_type = other DNA
ggtcgtgcatacaaggttagggtgattcgtcttacagatgataacagtagccagtacctctacaacgacacatgg

SEQ ID NO: 801802 - DNA, 75 bp, synthetic construct
  source 1..75: mol_type = other DNA
atcaccgaagggacttatctctcaagccctggcaatctgtcagtaaaactgactgcaacatgggaagggaaatct

SEQ ID NO: 801803 - DNA, 75 bp, synthetic construct
  source 1..75: mol_type = other DNA
tggttaatatcatgcaggatagcccgtcagatccggtaatgatgtttactaactccaacgtcaaagatggattgt

SEQ ID NO: 801804 - DNA, 75 bp, synthetic construct
  source 1..75: mol_type = other DNA
ccagacaccaatgtctggctttgatttcgtcgaaacacctaaatcgatcaatatccaactaaagaaatctcatta

SEQ ID NO: 801805 - DNA, 75 bp, synthetic construct
  source 1..75: mol_type = other DNA
gcaatggctacgaaaatggaagaaattcgcgctgaaataaatgaggatatcagagcttcaatcactgaagaaaca

SEQ ID NO: 801806 - DNA, 75 bp, synthetic construct
  source 1..75: mol_type = other DNA
accgccggatgccccaacgtcattaacggccgttggggactatcgtaatgtgatactgaattgggttaatccaga

SEQ ID NO: 801807 - DNA, 75 bp, synthetic construct
  source 1..75: mol_type = other DNA
aactccaatttgggcactgaggcgatgacgaaagatgttctgtctttcctgaccgggaagatcacttcttcggaa

SEQ ID NO: 801808 - DNA, 75 bp, synthetic construct
  source 1..75: mol_type = other DNA
aggttacctggtcaaaggacgtagtctgatgcatgaaagtaaactgaaagacagtccttatctttttatttcgtg

SEQ ID NO: 801809 - DNA, 75 bp, synthetic construct
  source 1..75: mol_type = other DNA
cagaagcactgttatcaccagagcacagggaactgaggctcaggcaggtatgggataacaatccgatgccccgtg

SEQ ID NO: 801810 - DNA, 75 bp, synthetic construct
  source 1..75: mol_type = other DNA
gcttactggcgttcctgatattgcagagtggatgaatgacgaacttctttactggaaagataaaggatatccact

SEQ ID NO: 801811 - DNA, 75 bp, synthetic construct
  source 1..75: mol_type = other DNA
tcggaatagtcacgggcatcactacagccattggaactgcatgaacatcgacgacaacgtggacttcacagggat

SEQ ID NO: 801812 - DNA, 75 bp, synthetic construct
  source 1..75: mol_type = other DNA
tgtgtcccggatattttttatctgtatcagaaaatgacgggaagccgtcgtgaccgcaggagtgttcaggcgttg

SEQ ID NO: 801813 - DNA, 75 bp, synthetic construct
  source 1..75: mol_type = other DNA
tgcccggcacaaaggtcacggagccaggcgtggtcgcgccggtgataccggcagggttttatgcgccgctcacag

SEQ ID NO: 801814 - DNA, 75 bp, synthetic construct
  source 1..75: mol_type = other DNA
ggttcttgctgtatctagatggcaaaaagtcagatgcttacttgtttcccgagattactaatcgaagtcaggtaa

SEQ ID NO: 801815 - DNA, 75 bp, synthetic construct
  source 1..75: mol_type = other DNA
aaaactgaaagtttctgatgtgcggttggacgaggacagtcagagacattacataatgattggggatagtaaaac

SEQ ID NO: 801816 - DNA, 75 bp, synthetic construct
  source 1..75: mol_type = other DNA
cgtcacgtaccaagctaaaagccacagctacggttattacactcaagcagaaatgcgaaaattggtatgccactt

SEQ ID NO: 801817 - DNA, 75 bp, synthetic construct
  source 1..75: mol_type = other DNA
tatgacacgctgattaacgcctggcctttgtgggagtataaaaagcttcatgcggctatttctttaggtactatt

SEQ ID NO: 801818 - DNA, 75 bp, synthetic construct
  source 1..75: mol_type = other DNA
tacggcgctcgccgcattgtgcacagccttcgccacacatttattactgaagcgcgaaaaactaacgagcttacg

SEQ ID NO: 801819 - DNA, 75 bp, synthetic construct
  source 1..75: mol_type = other DNA
actgactttatctgaggcatggcagggatttctcagctttaaatctgattgggcaccgaagattaggcaaggcaa

SEQ ID NO: 801820 - DNA, 75 bp, synthetic construct
  source 1..75: mol_type = other DNA
cttaccactgctgagcgctggaacggtaaattacccgataccatgatccccggcagtacagttccgtttatctcc

SEQ ID NO: 801821 - DNA, 75 bp, synthetic construct
  source 1..75: mol_type = other DNA
acgacgctgatgcaaaccatccaggaacgtatcgcgcaagcatcgcaacaggaaggacgtcaccgttttccatgg

SEQ ID NO: 801822 - DNA, 75 bp, synthetic construct
  source 1..75: mol_type = other DNA
agtttaatggagccattactttacagccgggactggtacatcaggcaaatggcggcattctgatcatctctttgc

SEQ ID NO: 801823 - DNA, 75 bp, synthetic construct
  source 1..75: mol_type = other DNA
ggtggtttaaatgagaaaatcgaaggcttctttgctatttgccagcaacgtgagttaaccgggaaacaaggtgtc

SEQ ID NO: 801824 - DNA, 75 bp, synthetic construct
  source 1..75: mol_type = other DNA
atctaagtcttcacaatgaacttgtgaaggcggtagaggaaggtaaattcactatctgggcagtggatgatgtca

SEQ ID NO: 801825 - DNA, 75 bp, synthetic construct
  source 1..75: mol_type = other DNA
tgaggtttccggccacaccatccgcttacgtcacgcagtgagtgcagatgataattttgcgactttaacgcaagt

SEQ ID NO: 801826 - DNA, 75 bp, synthetic construct
  source 1..75: mol_type = other DNA
gtcagtaacccagtggtgtcgctgggtgacatttaccgccagacataatcacttacctgcaccgggagcggatgc

SEQ ID NO: 801827 - DNA, 75 bp, synthetic construct
  source 1..75: mol_type = other DNA
agaaacctcaatgttttcagcctgcaggaacaacagaatgtacgggaggtgctgacggctaggctgattgacctg

SEQ ID NO: 801828 - DNA, 75 bp, synthetic construct
  source 1..75: mol_type = other DNA
gggagtatgtggacagttttgattacccgcgacttcaggctctcgtcagcagcccagatgaaataaaaaacctgt

SEQ ID NO: 801829 - DNA, 75 bp, synthetic construct
  source 1..75: mol_type = other DNA
ggctgcgcggagaaaaccccgatagcaccgggcccattgtcatcggtgctgacgggattggggacgtgatgtgct

SEQ ID NO: 801830 - DNA, 75 bp, synthetic construct
  source 1..75: mol_type = other DNA
tgagatctccggccacaccatccggttacgtaatgccgttagtactgacgataattttgcaacattaacgcaagt

SEQ ID NO: 801831 - DNA, 75 bp, synthetic construct
  source 1..75: mol_type = other DNA
gggatgatgatcatgcaagcgttcctgatgtcggaactacagcttgagcaacagatccccttctcagcatcgctg

SEQ ID NO: 801832 - DNA, 75 bp, synthetic construct
  source 1..75: mol_type = other DNA
tgacacatgacgtggagcctgtaattgacatgctgaagtcggtcagaaagctgttcagtaatcttgtgaccgcct

SEQ ID NO: 801833 - DNA, 75 bp, synthetic construct
  source 1..75: mol_type = other DNA
acgtaataacaactattggcgaagcatgtgatcagtatgcgttaaacaatcctcgcaaatataactacgagcatg

SEQ ID NO: 801834 - DNA, 75 bp, synthetic construct
  source 1..75: mol_type = other DNA
aatcaggtaggcggcgttacagaaacagatctgatgcagcacctgatcgacactctcgcatctaacaaacgttct

SEQ ID NO: 801835 - DNA, 75 bp, synthetic construct
  source 1..75: mol_type = other DNA
aagagagtcgttactgggaaatgcggcaattattgcgctgatatatgcagcatcacattcattaccggtcaatgc

SEQ ID NO: 801836 - DNA, 75 bp, synthetic construct
  source 1..75: mol_type = other DNA
gaattaacagacgaagaattatcactcattcaaagtatggacggtgtttattttaatccacgtccacgcaaaaca

SEQ ID NO: 801837 - DNA, 75 bp, synthetic construct
  source 1..75: mol_type = other DNA
atgcggaaccaggcgaagaattgatcttcatacttgaagaaccaagcccagaattaacagacacagaattatcaa

SEQ ID NO: 801838 - DNA, 75 bp, synthetic construct
  source 1..75: mol_type = other DNA
gaattgacagacgaagaattatcaatcattcaaagtatggatggtgtttacttcaatccgcgcccacgcaaaaca

SEQ ID NO: 801839 - DNA, 75 bp, synthetic construct
  source 1..75: mol_type = other DNA
tacaggcattacgcgaagtggtggcctcaccgcatgtcgaactggcggtgcatttatttgctgacttagccctcg

SEQ ID NO: 801840 - DNA, 75 bp, synthetic construct
  source 1..75: mol_type = other DNA
gctgtgggctctgatgtgttacaccgcgctattactgctggaagtatatcaacatgtccccgcagacacggggtt

SEQ ID NO: 801841 - DNA, 75 bp, synthetic construct
  source 1..75: mol_type = other DNA
ttaccgggtgaaaggtggtcgtccggcgctggtggtggtgtttctctgtggtattgctgtgattggcgtgcaatt

SEQ ID NO: 801842 - DNA, 75 bp, synthetic construct
  source 1..75: mol_type = other DNA
cttccctgactatcttgtaataagtttattaagtatctatatttatttttgtgagctattcagaagccactggat

SEQ ID NO: 801843 - DNA, 75 bp, synthetic construct
  source 1..75: mol_type = other DNA
ccaactggtgatcgtttctttgaaatccatactaacgggagttggggagtttatgattcttcttctggacaatgg

SEQ ID NO: 801844 - DNA, 75 bp, synthetic construct
  source 1..75: mol_type = other DNA
caacctttatgggattgctggctaatcatgccggattaaacgggctgttacaggcgttacgcgaaatggtggcct

SEQ ID NO: 801845 - DNA, 75 bp, synthetic construct
  source 1..75: mol_type = other DNA
tcacggacagggtgtggtggctgaccagcgcttatgcccagtggtcaccggaccgtcttcatggtgtggaacaac

SEQ ID NO: 801846 - DNA, 75 bp, synthetic construct
  source 1..75: mol_type = other DNA
ctggtcggtgcttgtccgcgaagcagcacgctacactggtgaacaagaaacacttccgcttagcccgaattggat

SEQ ID NO: 801847 - DNA, 75 bp, synthetic construct
  source 1..75: mol_type = other DNA
tccttgtgcgaaggcaatagctttaccggcgagcagctaaacttaatgctacaacaacgggaatggcgcgaaggc

SEQ ID NO: 801848 - DNA, 75 bp, synthetic construct
  source 1..75: mol_type = other DNA
ttatagtgaatttgaagatacccttcagattatcgacgccgagtcagtaagccagtggtgtcgctgggtgacatt

SEQ ID NO: 801849 - DNA, 75 bp, synthetic construct
  source 1..75: mol_type = other DNA
gtggatcacttttcatccgtcgttgacagtaacaccacaccgctcattgtcagtgatgctggctttaaagtgcca

SEQ ID NO: 801850 - DNA, 75 bp, synthetic construct
  source 1..75: mol_type = other DNA
gtatttgatgcagctaacacatacaacactgagcttggtgtactggaacagacggcccaggcttacattgaatcg

SEQ ID NO: 801851 - DNA, 75 bp, synthetic construct
  source 1..75: mol_type = other DNA
atatttgcagtgtaagcgacgtaaagataaatctgttgagcccacccctttatattatctctggagtagggaggc

SEQ ID NO: 801852 - DNA, 75 bp, synthetic construct
  source 1..75: mol_type = other DNA
aagataaatcactgctgccatttttcagcgatgagcgggtgattcgtgcagctggcggcgctggtgcactgtctg

SEQ ID NO: 801853 - DNA, 75 bp, synthetic construct
  source 1..75: mol_type = other DNA
cactggtggaagagctttatcgattccgcgaccgtctgccggaaaaactgcgttatctggccgatgcgccacagc

SEQ ID NO: 801854 - DNA, 75 bp, synthetic construct
  source 1..75: mol_type = other DNA
ccagcattgactgcccgacttgtggtcgcaaaatggggattcgcacagcgagcaccggggtattccttggctgtt

SEQ ID NO: 801855 - DNA, 75 bp, synthetic construct
  source 1..75: mol_type = other DNA
cccgtagatatattcttcaaaaaactagtttcacctaaagatgatgaaagattatctaacgatgctgaaagagca

SEQ ID NO: 801856 - DNA, 75 bp, synthetic construct
  source 1..75: mol_type = other DNA
caacccggcgttacgtcatcgaacctggcagattgcgatggatggcagccagaaattgccacagcggatgttgga

SEQ ID NO: 801857 - DNA, 75 bp, synthetic construct
  source 1..75: mol_type = other DNA
ggcgctggcggtgctggcgttaattatcccttccctgctgacctggcagagcagaaagcataatccacaagctgc

SEQ ID NO: 801858 - DNA, 75 bp, synthetic construct
  source 1..75: mol_type = other DNA
tgatgcgtgagaaagggatgaatcgcagcgaatccgggcagctcgggttttcggttctgctgtttcaggatctgg

SEQ ID NO: 801859 - DNA, 75 bp, synthetic construct
  source 1..75: mol_type = other DNA
accacccgctggctgtatggaccggaaagactggtgcgctacaacggctcggcagcctatgaaattcagggcgaa

SEQ ID NO: 801860 - DNA, 75 bp, synthetic construct
  source 1..75: mol_type = other DNA
ggcgttttggtcaggtgattggtcgtttgctgatggcaaataaaatgcgcattaccgtgctggagcgggatatca

SEQ ID NO: 801861 - DNA, 75 bp, synthetic construct
  source 1..75: mol_type = other DNA
tggaaacgtccatcgatccatttaaaggcttgctgcttgggctattttttatctctgtcgggatgtcgctcaacc

SEQ ID NO: 801862 - DNA, 75 bp, synthetic construct
  source 1..75: mol_type = other DNA
cggtgatcccggcactggcgttagtgccgttgttggcgggttcggcagacgaacatttcgactggatgaagatcg

SEQ ID NO: 801863 - DNA, 75 bp, synthetic construct
  source 1..75: mol_type = other DNA
cgcttatccctcaggcgtgatccctgatatgcgtggctggacgattaagggcaaacctgccagtggtcgggccgt

SEQ ID NO: 801864 - DNA, 75 bp, synthetic construct
  source 1..75: mol_type = other DNA
aaggggcagaaaacaccgcccaggctatcgccctacgggcaaccaaagagctgggcacaattcgtgatgccacgg

SEQ ID NO: 801865 - DNA, 75 bp, synthetic construct
  source 1..75: mol_type = other DNA
cagttgttcgtataaaagatgtggctcgcgttgagatgggcagtgaagattataccgctatcggcaaacttaacg

SEQ ID NO: 801866 - DNA, 75 bp, synthetic construct
  source 1..75: mol_type = other DNA
ttatgggtggcttccttatcggcttcggcatctgtcgtgacttaattaagcaggaacttaaaaccaaaacactgt

SEQ ID NO: 801867 - DNA, 75 bp, synthetic construct
  source 1..75: mol_type = other DNA
gcgggcgcaactgcattttcgccgcctggatatgcgaatgctgcgggagttaatcccgatgcatgctgataccgt

SEQ ID NO: 801868 - DNA, 75 bp, synthetic construct
  source 1..75: mol_type = other DNA
tagagctggggcgcaagacgctggtcacgcttggcatgcatccgcatcaggcacagcgggcgcaactgcattttc

SEQ ID NO: 801869 - DNA, 75 bp, synthetic construct
  source 1..75: mol_type = other DNA
tcggttctgctgtttcaggatctggcggtgatccctgcgctggcgttagtgccgctgctggcgggatcggcagac

SEQ ID NO: 801870 - DNA, 75 bp, synthetic construct
  source 1..75: mol_type = other DNA
gttgctggtgacggtgacgctttccatgatgaccacgccgttgctgatgaagctggtggataaatggctatcccg

SEQ ID NO: 801871 - DNA, 75 bp, synthetic construct
  source 1..75: mol_type = other DNA
gcttcagtatgatgttcttaatgtatgctctgactgcggcatacatcagcggtgccggtgaattgttggcctcca

SEQ ID NO: 801872 - DNA, 75 bp, synthetic construct
  source 1..75: mol_type = other DNA
ctggctgcggccggtgttggttttagcgttacgttaatcttgttgattgggctttgggcgttgatgtgctacacg

SEQ ID NO: 801873 - DNA, 75 bp, synthetic construct
  source 1..75: mol_type = other DNA
gtatccttgccgtcgcagaatctggaaaagcttcggaaagccgtatcgtgggtatcgctcagccgcagcctgcag

SEQ ID NO: 801874 - DNA, 75 bp, synthetic construct
  source 1..75: mol_type = other DNA
gaccacaccgctgttgatgaagcttgtggataagtggctatcccgccagttcaacgccccggaaaaagaggatga

SEQ ID NO: 801875 - DNA, 75 bp, synthetic construct
  source 1..75: mol_type = other DNA
cggatttcgcctggcaggcggcggtggtcggtggcattggccttgcgatgtcttcaactgcaatggcgttgcaat

SEQ ID NO: 801876 - DNA, 75 bp, synthetic construct
  source 1..75: mol_type = other DNA
ttctcgcgccagggaagcccgacgcgaactggaagagattttccagcgtgaaatgcaacaagaacgacgccagtt

SEQ ID NO: 801877 - DNA, 75 bp, synthetic construct
  source 1..75: mol_type = other DNA
ggcgcagcgggcgcaactgcattttcgccgcctggatatgcggatgctgcgagagctcatcccaatgcatgccga

SEQ ID NO: 801878 - DNA, 75 bp, synthetic construct
  source 1..75: mol_type = other DNA
cgctgctgctggtgttgggttccgcattgtttatggatgcgctggggctgtcgatggcgctcggtacgtttattg

SEQ ID NO: 801879 - DNA, 75 bp, synthetic construct
  source 1..75: mol_type = other DNA
ggcattggccttgcgatgtcttcaactgcaatggcgttgcaattgatgcgtgagaaagggatgaatcgcagcgaa

SEQ ID NO: 801880 - DNA, 75 bp, synthetic construct
  source 1..75: mol_type = other DNA
gtttcgacggcgcagagccgcattgcgtgggcttgactgatcttgtgaccggagacgacggcagcagcatggcca

SEQ ID NO: 801881 - DNA, 75 bp, synthetic construct
  source 1..75: mol_type = other DNA
ccgctcaattgataccgcggcggcctataagaacgaagaaggcgtcggcaaagccctgaaaaataccgcactaaa

SEQ ID NO: 801882 - DNA, 75 bp, synthetic construct
  source 1..75: mol_type = other DNA
ccgttcccgctatcgaccattatgtcgaagcatggaaaggcatgatcgaattgcaaaaagagggattaatcaaaa

SEQ ID NO: 801883 - DNA, 75 bp, synthetic construct
  source 1..75: mol_type = other DNA
atgcgcatgtttaatccgccccatccgggcgaagttctgcacgattatctggagggagtgagcatcacccaggcg

SEQ ID NO: 801884 - DNA, 75 bp, synthetic construct
  source 1..75: mol_type = other DNA
gtgattggttatgcgatgtatatgggagtgtggcaaagcccggtgccggaggagttgtaccgacgcttaattccg

SEQ ID NO: 801885 - DNA, 75 bp, synthetic construct
  source 1..75: mol_type = other DNA
caaccctgaaagcctcgcgctacatgttcagagcattggcgttagtgctctggctgttgattgctttttcatccg

SEQ ID NO: 801886 - DNA, 75 bp, synthetic construct
  source 1..75: mol_type = other DNA
gtgaggaaaacttctgggtggaccgggttacgccggatgatggcggaagctgtcatctctggcttggacggggcg

SEQ ID NO: 801887 - DNA, 75 bp, synthetic construct
  source 1..75: mol_type = other DNA
atgttaaaaataagtttatacgtaataatattgttattttcctttcagattagtgcagccattactagcaaggaa

SEQ ID NO: 801888 - DNA, 75 bp, synthetic construct
  source 1..75: mol_type = other DNA
tcccgaagatgtgttaattactgacgaggtagtgagtaaaaaatggcagggcagagcggtagtgaccttctgtcg

SEQ ID NO: 801889 - DNA, 75 bp, synthetic construct
  source 1..75: mol_type = other DNA
tcgccatattggtattccgctggagaaagcgccaggggagtgggtacacagtgtggctgctccgcatgagctacc

SEQ ID NO: 801890 - DNA, 75 bp, synthetic construct
  source 1..75: mol_type = other DNA
accgactatttgcaacagtgccggtgatgtcattctggtgaagaagctcgaccgtcttggccgcgacaccgccga

SEQ ID NO: 801891 - DNA, 75 bp, synthetic construct
  source 1..75: mol_type = other DNA
tcaccaccgactatttgcaacagtgccgccgatatgatccaactgataaaggaatttgacgctcagggcgtggca

SEQ ID NO: 801892 - DNA, 75 bp, synthetic construct
  source 1..75: mol_type = other DNA
tgataagtttatcaccaccgactatttgcaacagtgccgcaaaccgtatatttaccgataaggcatccggcagtt

SEQ ID NO: 801893 - DNA, 75 bp, synthetic construct
  source 1..75: mol_type = other DNA
gccatggaagatgccctgtacgaaatcgcctccagcgcctgtttgcccgattatccctggatagcgccctgccgg

SEQ ID NO: 801894 - DNA, 75 bp, synthetic construct
  source 1..75: mol_type = other DNA
tgagcgtcagcaactgatgcaaagcgttaaccccgctctggtattgcgcaactggttggcgcaacgggcgattga

SEQ ID NO: 801895 - DNA, 75 bp, synthetic construct
  source 1..75: mol_type = other DNA
gggaaacggtagaatcaggcgcgatgttaatgcgcgtggcacaaagccatctgcgatttggtcacttcgaacact

SEQ ID NO: 801896 - DNA, 75 bp, synthetic construct
  source 1..75: mol_type = other DNA
cattgatgatgggatcagtaccgatggagaaatggggaagatgatcgtcaccattctatcagcagtggcacaagc

SEQ ID NO: 801897 - DNA, 75 bp, synthetic construct
  source 1..75: mol_type = other DNA
cagggtgtagcggttcggtttattgacgacgggatcagtaccgacggtgatatggggcaaatggtggtcaccatc

SEQ ID NO: 801898 - DNA, 75 bp, synthetic construct
  source 1..75: mol_type = other DNA
tgccggaaaaaccgcccctgatggtgaacatggtgttaatttagtccatttagaagatgttattggcgctatcac

SEQ ID NO: 801899 - DNA, 75 bp, synthetic construct
  source 1..75: mol_type = other DNA
cgcgtaatccggtgaccaacagtggacgagtattagaagaactcgaagactggctgcacaatttacccggtactt

SEQ ID NO: 801900 - DNA, 75 bp, synthetic construct
  source 1..75: mol_type = other DNA
tattgacgatgggatcagtacagatggtgatatgggacaaatggtggtgaccattctgtccgcagtggcacaagc

SEQ ID NO: 801901 - DNA, 75 bp, synthetic construct
  source 1..75: mol_type = other DNA
gattatgtttcagtcacggacgttgctgaacttatttaccagatcagctgtaaaaatgagtatagcatctacaat

SEQ ID NO: 801902 - DNA, 75 bp, synthetic construct
  source 1..75: mol_type = other DNA
cccggaacggcaactggaaggcgtcaaggttgatcgcgcttttagcgacaaggcatccggcagttcaacagaccg

SEQ ID NO: 801903 - DNA, 75 bp, synthetic construct
  source 1..75: mol_type = other DNA
actcagagagactaaattatatttagaatgtgaaagcaaaatagatagtttacttaatattataaaatatgaggt

SEQ ID NO: 801904 - DNA, 75 bp, synthetic construct
  source 1..75: mol_type = other DNA
ttcggtttgaaaaccggttacgacttcaaactgggtgatgctggttacgtgactccttacggcagcatttctggt

SEQ ID NO: 801905 - DNA, 75 bp, synthetic construct
  source 1..75: mol_type = other DNA
gaattcacttcaccggcatggagctgaacggagtgcagtgtaaggtcgatgcgtatggcgtggcttccgactcgt

SEQ ID NO: 801906 - DNA, 75 bp, synthetic construct
  source 1..75: mol_type = other DNA
atggctacagataaaggtaaagaaaccagaaaaatgatgctctacgtcggtggcgccgctgcagttgtggcgctt

SEQ ID NO: 801907 - DNA, 75 bp, synthetic construct
  source 1..75: mol_type = other DNA
cgaaaaagcgtgaccgtattcatcgtattcctgaagatcgcaaaaagaaaaaaggcaaacgtaagccgccattct

SEQ ID NO: 801908 - DNA, 75 bp, synthetic construct
  source 1..75: mol_type = other DNA
gcctgtttccacaacgcacgtactctcttctgcggtggcggggacgatggtagtggatggcggtgggttacagcg

SEQ ID NO: 801909 - DNA, 75 bp, synthetic construct
  source 1..75: mol_type = other DNA
gcagaggaaaaagcctctgtttttgaactatggaagaacggaacaggcttcagtgaaatagcgaatatcctgggt

SEQ ID NO: 801910 - DNA, 75 bp, synthetic construct
  source 1..75: mol_type = other DNA
aagcagtgactccatgcgctgggggattaatatgcctctgtactttgatttagtcagcagaacgaaagctgccct

SEQ ID NO: 801911 - DNA, 75 bp, synthetic construct
  source 1..75: mol_type = other DNA
cagaatcagacagttagcgcgcagagcatcagtcacaccgggcggaaggcgttgtagctataacgaaataatccc

SEQ ID NO: 801912 - DNA, 75 bp, synthetic construct
  source 1..75: mol_type = other DNA
ggtataacaaaagatttaatatcattattagttaatttcagtgcaatactaacagcattactgcttagcgttctt

SEQ ID NO: 801913 - DNA, 75 bp, synthetic construct
  source 1..75: mol_type = other DNA
ttgaagcggcgcgggcttactggaatgcgctaacggaagataaaaaatcagcgttccgttttcatcatatctcca

SEQ ID NO: 801914 - DNA, 75 bp, synthetic construct
  source 1..75: mol_type = other DNA
accagcatggtggcgacgatggctgcggcagaaagcggttggggtacgtcaaaactggcgcgtagcaacaacaac

SEQ ID NO: 801915 - DNA, 75 bp, synthetic construct
  source 1..75: mol_type = other DNA
ttcctcgatattatcggcggaatgctgggtccggtaattggtgtcatgatggcgcattattttgtggtgatgcgc

SEQ ID NO: 801916 - DNA, 75 bp, synthetic construct
  source 1..75: mol_type = other DNA
tcggcctggcgagttataccgggatgccggtttccactactcacgtactctcctcttctgtcgcggggacgatgg

SEQ ID NO: 801917 - DNA, 75 bp, synthetic construct
  source 1..75: mol_type = other DNA
ccaccggcaagtgcacgcagccagtaaagctgatgttcagcctcttccagcactgaccagtcatccggggagcag

SEQ ID NO: 801918 - DNA, 75 bp, synthetic construct
  source 1..75: mol_type = other DNA
tgcagtaactggcccagagataaagccgtgtttaaaccgctggatacagaagaagtctgctacgataattccatt

SEQ ID NO: 801919 - DNA, 75 bp, synthetic construct
  source 1..75: mol_type = other DNA
aaatcagatgtttttgatgcaaaccataacgtgtttgactacaaagtattacgaaagaactttaatgagcccctg

SEQ ID NO: 801920 - DNA, 75 bp, synthetic construct
  source 1..75: mol_type = other DNA
gttcgaagaactaatggatgcctaccggcgcgaggcaatggcaattatcgcccgctgggatctggctgatcagat

SEQ ID NO: 801921 - DNA, 75 bp, synthetic construct
  source 1..75: mol_type = other DNA
gttcgaagaactgatagattcctaccggcgcgaggcaatggcaattatcgcccgctgggatctggcggatcggat

SEQ ID NO: 801922 - DNA, 75 bp, synthetic construct
  source 1..75: mol_type = other DNA
tggaacagcagcacggcaaaattgatgttgattgcggctgtgtgagcactgaaacgcttatgcactggatgcgtg

SEQ ID NO: 801923 - DNA, 75 bp, synthetic construct
  source 1..75: mol_type = other DNA
cggcagcggcgtcctggcctccgcatccggcagcgcaagggattgtccagatgattggcatttttatcgacaccc

SEQ ID NO: 801924 - DNA, 75 bp, synthetic construct
  source 1..75: mol_type = other DNA
ccgcgccagtgcgtctgctggtggccggtatgggagatgcattgtcaacctggtttgaggcgagagccaatcagg

SEQ ID NO: 801925 - DNA, 75 bp, synthetic construct
  source 1..75: mol_type = other DNA
gcgactgctgaaggggaaactatccataatatgccattcgtagtaacagcgcaggacgttctttgcgcaatttta

SEQ ID NO: 801926 - DNA, 75 bp, synthetic construct
  source 1..75: mol_type = other DNA
attgctcagtgggcaaaattcagaacagagttagcctgaaattgcaaaaaacaggccagaaaaacttttttcagc

SEQ ID NO: 801927 - DNA, 75 bp, synthetic construct
  source 1..75: mol_type = other DNA
aagatgaactaatcaaaatagctaaagcatgcgccccgacaccagaagacatactggtatatatggggagagcca

SEQ ID NO: 801928 - DNA, 75 bp, synthetic construct
  source 1..75: mol_type = other DNA
tcacggtcgatcacgttgtagaagccgtttatatgatgtacggcgatgcaggaaagatcggccgcgtcagcgcca

SEQ ID NO: 801929 - DNA, 75 bp, synthetic construct
  source 1..75: mol_type = other DNA
agcatgaaaaatccgtggcagcataaggtgaccttaacccgcagcggccaggagtttacagtcaataacccgacg

SEQ ID NO: 801930 - DNA, 75 bp, synthetic construct
  source 1..75: mol_type = other DNA
atgtctgatttactttgctctgccaaattgggtgctatgacgctggcgttactgcttagcgctaccagtttgtct

SEQ ID NO: 801931 - DNA, 75 bp, synthetic construct
  source 1..75: mol_type = other DNA
gtacccgtttgatatttaatgaaagcgacaaatcaatcagcgtgacgctgcgcaataacgatccgaaactccctt

SEQ ID NO: 801932 - DNA, 75 bp, synthetic construct
  source 1..75: mol_type = other DNA
aaccgtccgtttaaccttgctttttatattgctgctgtctgttgctggcgctggaattgtctggactctctataa

SEQ ID NO: 801933 - DNA, 75 bp, synthetic construct
  source 1..75: mol_type = other DNA
gctccccgtcagtacaatggcggatatggtcggtgttgctggcgctgcactggccccgctggcaaaattgttacg

SEQ ID NO: 801934 - DNA, 75 bp, synthetic construct
  source 1..75: mol_type = other DNA
cggcgcaactggacaaactgcttcctcagacgggggacgaagaaaaaacaacaacacgacctgttcgtaagccct

SEQ ID NO: 801935 - DNA, 75 bp, synthetic construct
  source 1..75: mol_type = other DNA
gtgttattatcccgttatataatgcaggtaatgacttcaacgcttgcatggaatctttaatcgcgcaaacctgga

SEQ ID NO: 801936 - DNA, 75 bp, synthetic construct
  source 1..75: mol_type = other DNA
tttcgtgaaacgggagaaacctggcaatccatccccagcgatcgccttcgctcaaccggcgtattaaccggcccg

SEQ ID NO: 801937 - DNA, 75 bp, synthetic construct
  source 1..75: mol_type = other DNA
aaaatgatgttctggctgcgctggcgaacgctggccagaactggtgggggttcattcacgttctgccagctgacg

SEQ ID NO: 801938 - DNA, 75 bp, synthetic construct
  source 1..75: mol_type = other DNA
ggcatttaccgtcaataacccaacgccgtactacgtgattatcagcaacgccagtgcgcagaaaaacggtaatcc

SEQ ID NO: 801939 - DNA, 75 bp, synthetic construct
  source 1..75: mol_type = other DNA
gcgcgcaaaaaaatggcaatccggcagacggtttctcgccgatagtgatgtcgccaaaaacctccgcaccgctca

SEQ ID NO: 801940 - DNA, 75 bp, synthetic construct
  source 1..75: mol_type = other DNA
ccatgatgaacggtcaggtgaaggtacagggcatgccggatatcaacaagctgcctgccgaccgcgagagcgtgt

SEQ ID NO: 801941 - DNA, 75 bp, synthetic construct
  source 1..75: mol_type = other DNA
gccggaaacattgaagagctggaaaatatttcgcggttaacagagaatatactgtttcttgccagggcagataaa

SEQ ID NO: 801942 - DNA, 75 bp, synthetic construct
  source 1..75: mol_type = other DNA
ctttctcagggagtttagtctccaggatttccggggcggttcaatcttatcggatatccaggcaactgggagata

SEQ ID NO: 801943 - DNA, 75 bp, synthetic construct
  source 1..75: mol_type = other DNA
atgattctgaaagacgtgaatgaacacatggaaggtctgtttcaacgtttttctaaactgttacctttcagaatt

SEQ ID NO: 801944 - DNA, 75 bp, synthetic construct
  source 1..75: mol_type = other DNA
aaatataccgcttacttagcgaaacccaatcgatgttggcgggatattactgggtaatggaatatacaccagaca

SEQ ID NO: 801945 - DNA, 75 bp, synthetic construct
  source 1..75: mol_type = other DNA
gtgcagatatccggattttagatgaaatctattctcggtatgggcatatgaaccgatttgatctcgcaaatatga

SEQ ID NO: 801946 - DNA, 75 bp, synthetic construct
  source 1..75: mol_type = other DNA
tcctgtaagcacagtatgtgtatggaaatataccgcttacttagtgaaacccaaacgatgctggcgggatattac

SEQ ID NO: 801947 - DNA, 75 bp, synthetic construct
  source 1..75: mol_type = other DNA
aaagaacacggtattattctgggccgtagcaggcttcccgaaaaaagcaaccggggccgaccacgacacaactga

SEQ ID NO: 801948 - DNA, 75 bp, synthetic construct
  source 1..75: mol_type = other DNA
gtgttgacctcgctcatatggaacgggcccccctgccattcctgtcctgtatggtggatgactgtatcagtcgag

SEQ ID NO: 801949 - DNA, 75 bp, synthetic construct
  source 1..75: mol_type = other DNA
tgggggatatctggaggcggatcacggaaggggagggttattttcacctttgccgggctaaagacaaatacccgg

SEQ ID NO: 801950 - DNA, 75 bp, synthetic construct
  source 1..75: mol_type = other DNA
gggtaaatccagatacgttacctgtctattttaaccggatgatggatgttagtcaggatatcttgatcattcatg

SEQ ID NO: 801951 - DNA, 75 bp, synthetic construct
  source 1..75: mol_type = other DNA
atgaaataccgaccgctcaggcacaatatggtgagtttttcctgacatccagagggctggttgtcgtcaaccaaa

SEQ ID NO: 801952 - DNA, 75 bp, synthetic construct
  source 1..75: mol_type = other DNA
ttctggcgtgaattcggttgtattcctgtaagttgggaaccgctgtatgctcctgtaaatttagaaaaacacccc

SEQ ID NO: 801953 - DNA, 75 bp, synthetic construct
  source 1..75: mol_type = other DNA
atgaaagagaattggtttaaggagcggttaactaaagcaaaacaggattctaagctctggagcgcctttataggc

SEQ ID NO: 801954 - DNA, 75 bp, synthetic construct
  source 1..75: mol_type = other DNA
atgacctggccaattgtgacggtaaaccaggtaaaccagctgatgggcgaaaccaatgaggtggaacgcacactg

SEQ ID NO: 801955 - DNA, 75 bp, synthetic construct
  source 1..75: mol_type = other DNA
attagtcgaactattgagttgttcagcaagttaacagttatggcgatattcatgtgtcatgtattcagtgcgttg

SEQ ID NO: 801956 - DNA, 75 bp, synthetic construct
  source 1..75: mol_type = other DNA
gataatgcgctttataatgcgaaagaggctgggcgtaataaggttgttatgacggaggctgaaaatcttatgaac

SEQ ID NO: 801957 - DNA, 75 bp, synthetic construct
  source 1..75: mol_type = other DNA
accaccgactatttgcaacagtgccgccgatatgatccaactgataaaggaatttgacgctcagggcgtggcagt

SEQ ID NO: 801958 - DNA, 75 bp, synthetic construct
  source 1..75: mol_type = other DNA
acatcaacattcctgtgcgccataacgagcctgaaagcatcgataatattcgcggtgccctgcattatctggcga

SEQ ID NO: 801959 - DNA, 75 bp, synthetic construct
  source 1..75: mol_type = other DNA
atccgatctgggaagcgcgccggtactgacgtatgtcaacgactacggtggacgactgcctctctatttccagtg

SEQ ID NO: 801960 - DNA, 75 bp, synthetic construct
  source 1..75: mol_type = other DNA
gccggatggccgtctggcgaaagagccgttggcggatggcgtatctccacgtcagggtaaagacacccttggccc

SEQ ID NO: 801961 - DNA, 75 bp, synthetic construct
  source 1..75: mol_type = other DNA
gggcaacggatgcgccgaaaactgggcttcatgacggagcaaaaagaggataacgttttgctgagtgaattattc

SEQ ID NO: 801962 - DNA, 75 bp, synthetic construct
  source 1..75: mol_type = other DNA
atgtcaccactggcgcaggtttacagtggtcatcagttcggcgtctgggcgggccaactgggtgatgggcgcggc

SEQ ID NO: 801963 - DNA, 75 bp, synthetic construct
  source 1..75: mol_type = other DNA
tttactatcgccgcgagccggaaaaggttcgtcagttagctgactttgccattcgtcattactggtcacatcttg

SEQ ID NO: 801964 - DNA, 75 bp, synthetic construct
  source 1..75: mol_type = other DNA
tttgcaacagtgccgaggaaggtgatgtcattctggttaagaagctcgaccgtcttggccgcgacactgccgata

SEQ ID NO: 801965 - DNA, 75 bp, synthetic construct
  source 1..75: mol_type = other DNA
gatcatcaagggcgttatagctttgataatcaacctgccgtcgcgttgtggaatttacagcgtctggcgcagaca

SEQ ID NO: 801966 - DNA, 75 bp, synthetic construct
  source 1..75: mol_type = other DNA
aaataccgtctctggtttagcgatgttgtcgcacgtaccgcgtcgttaattgcccaatggcagacggtcggcttt

SEQ ID NO: 801967 - DNA, 75 bp, synthetic construct
  source 1..75: mol_type = other DNA
cgccgccgggtttaaaccgctggtgatgccaccgaaaacgtcacaaccgttaaaggcaaaaatggcgagcgcccc

SEQ ID NO: 801968 - DNA, 75 bp, synthetic construct
  source 1..75: mol_type = other DNA
ggaacaaaggattcattgttacgcagtaacgtgcaggcgtttctggataatgccggacaaaatgccatgatctgg

SEQ ID NO: 801969 - DNA, 75 bp, synthetic construct
  source 1..75: mol_type = other DNA
atcagctcaacacccacagcggaagcaagcgtgggatcgcctgcaccctgctgatggtgggcgagcatacaaaag

SEQ ID NO: 801970 - DNA, 75 bp, synthetic construct
  source 1..75: mol_type = other DNA
gggaatgcaggaagaagaagccctggcggattacctgacccgtgtgtctgccatccaggacgggattgcagagaa

SEQ ID NO: 801971 - DNA, 75 bp, synthetic construct
  source 1..75: mol_type = other DNA
gaacagcacaccgggcagtattgcggcacaccagaccctgtttgcccgtccgctgcgtgaaatgtccacggcggc

SEQ ID NO: 801972 - DNA, 75 bp, synthetic construct
  source 1..75: mol_type = other DNA
ctggtcgtctctgcaaccgtgctgtcaccatcgccgacagtccggcgcgggtgaaaacaggcgcgttgctgagca

SEQ ID NO: 801973 - DNA, 75 bp, synthetic construct
  source 1..75: mol_type = other DNA
gcgacccttcaggcgctggaagcacagcgctacagcgtgccgatgtggtatccggactatgacggcttttactgg

SEQ ID NO: 801974 - DNA, 75 bp, synthetic construct
  source 1..75: mol_type = other DNA
tgaatgcgaagatggacagcgtgccggtgctgacctacatcaacgactacggcgcgcggatgccgctgtacttca

SEQ ID NO: 801975 - DNA, 75 bp, synthetic construct
  source 1..75: mol_type = other DNA
ggttttttaccgccttacttgaccatcacatcaatcaaatgatggcacgctattcctgcctgcgggccttacgga

SEQ ID NO: 801976 - DNA, 75 bp, synthetic construct
  source 1..75: mol_type = other DNA
ccagcacacagaagaaagggccgacagccgccgggtttaaaccgctggtgatgccgccgaaaacgtcacagccgt

SEQ ID NO: 801977 - DNA, 75 bp, synthetic construct
  source 1..75: mol_type = other DNA
tacagtttacacattgctgagttaacaaataaaaatggccgagttgtctggaaaacctcatatgttaccataata

SEQ ID NO: 801978 - DNA, 75 bp, synthetic construct
  source 1..75: mol_type = other DNA
ggatatcgaccacttcaaaaaagtcaacgacacctgggggcatccggttggcgatcaggtgataaaaacagtggt

SEQ ID NO: 801979 - DNA, 75 bp, synthetic construct
  source 1..75: mol_type = other DNA
ggcgcacggatgccgctgtattttaaatgtggcggcgatacctgccaggtggacgcagagcagagccgcaaaggc

SEQ ID NO: 801980 - DNA, 75 bp, synthetic construct
  source 1..75: mol_type = other DNA
ctatcagtatatccacgtggcgtttcagggatcgtttgcctgtattaccgttggcttgatcgtcggggcgctggc

SEQ ID NO: 801981 - DNA, 75 bp, synthetic construct
  source 1..75: mol_type = other DNA
ctgacggttggtctgcgtgtaccggaagagcaggagcgagaagggctggatgtcaacagtcacggcgagaatgcc

SEQ ID NO: 801982 - DNA, 75 bp, synthetic construct
  source 1..75: mol_type = other DNA
ctgacggttggtctgcgtgtaccggaagagcaggagcgagaagggctggacgtcaacagccacggcgagaatgcc

SEQ ID NO: 801983 - DNA, 75 bp, synthetic construct
  source 1..75: mol_type = other DNA
caagcaaatcatggcgggcgttccgactagataccaccatcaaagataacgccatcacgttcccggcgctgagcc

SEQ ID NO: 801984 - DNA, 75 bp, synthetic construct
  source 1..75: mol_type = other DNA
gcgcgctggtgtccggtaccgtcacggttgccggggaaggctatgaaaccaaagtggtggatttcgggcgctctc

SEQ ID NO: 801985 - DNA, 75 bp, synthetic construct
  source 1..75: mol_type = other DNA
cagacagtgtgaatctgtatacttctgataaattaccgaagcaaaacgcagattttgaaatgtatggtttgttga

SEQ ID NO: 801986 - DNA, 75 bp, synthetic construct
  source 1..75: mol_type = other DNA
tacccgcaggaagccattaccgggcatgagctgggcgctgattatgacgttaccgcagaggaagcgctgacgagg

SEQ ID NO: 801987 - DNA, 75 bp, synthetic construct
  source 1..75: mol_type = other DNA
ttgcaaccaacgtttaacccgctgacggataatgttgtctcgctcgacctgacagcggggagcgaagaggacgcc

SEQ ID NO: 801988 - DNA, 75 bp, synthetic construct
  source 1..75: mol_type = other DNA
atggactcatatcgcctgttcaatgttgggctgcgccgcccggactgcgttatcaatttccgacaagctgcataa

SEQ ID NO: 801989 - DNA, 75 bp, synthetic construct
  source 1..75: mol_type = other DNA
gggcaacaacttcttcggcaacattaactggttgatgctaaaaaacatcgaactgacggcggtgatgggcagcat

SEQ ID NO: 801990 - DNA, 75 bp, synthetic construct
  source 1..75: mol_type = other DNA
ctggcgggtattttctgcaccatgacggaatcctggtatccgatcgccattatgatcatggcatattcagtgatt

SEQ ID NO: 801991 - DNA, 75 bp, synthetic construct
  source 1..75: mol_type = other DNA
gcgcagcgttagtgtttcatgaaatattttttcctgaatcatcaacggcaatggcgttaattctggcaatgggaa

SEQ ID NO: 801992 - DNA, 75 bp, synthetic construct
  source 1..75: mol_type = other DNA
cagcgtttcctgatgatgcagtcggcaccgattgtcatcccgtcccgtgtcaatgcgtgcctgtgcgcgtcggtg

SEQ ID NO: 801993 - DNA, 75 bp, synthetic construct
  source 1..75: mol_type = other DNA
tttgatctacaaatggtcatatggcgaaccgttgatccgattgatcatcgccgggccgatcctgatgggctgtat

SEQ ID NO: 801994 - DNA, 75 bp, synthetic construct
  source 1..75: mol_type = other DNA
gaaccgttgatcagactgatcatcaccgggccgatcctgatgggctgtatgtttttgatgcgcacccatcggctg

SEQ ID NO: 801995 - DNA, 75 bp, synthetic construct
  source 1..75: mol_type = other DNA
gagatccctttcgtggcgttatcactggcggtgctgttttacggtattcagtcgaacgcgttttacaccaaattt

SEQ ID NO: 801996 - DNA, 75 bp, synthetic construct
  source 1..75: mol_type = other DNA
aatgtaacctggagaatatctgccagacgttattgcaactgggtcagatggacccgaatacgccgccaacgcccg

SEQ ID NO: 801997 - DNA, 75 bp, synthetic construct
  source 1..75: mol_type = other DNA
atgctgacctgcgtgatcgtcgctaacccgaatgttggttcgtcgtatcagaaaatggcgctgcgttttggcggt

SEQ ID NO: 801998 - DNA, 75 bp, synthetic construct
  source 1..75: mol_type = other DNA
tgcaactctgggtaggctgcctgctggtgattctgatctcgatgacctttgagatcccttttgtggcgttatcgc

SEQ ID NO: 801999 - DNA, 75 bp, synthetic construct
  source 1..75: mol_type = other DNA
gccgtcgtcaggttgccctgcttatagcccttgttctggggattggtgctggcggtgccgggacatggatggtct

SEQ ID NO: 802000 - DNA, 75 bp, synthetic construct
  source 1..75: mol_type = other DNA
ggcaacacgacggacatgcttaaacacctgcaggacttcaggctgggggataccgtcgacccggctacaggccag

SEQ ID NO: 802001 - DNA, 75 bp, synthetic construct
  source 1..75: mol_type = other DNA
gtctggccttctgaggaaagcagcacgatcccgacctcctgccttgaggcgtgggcgacgctgatgctgaaaaaa

SEQ ID NO: 802002 - DNA, 75 bp, synthetic construct
  source 1..75: mol_type = other DNA
cttgcgtggtgcacgcagagggcaaatttttaatcgttgaagagacgattaatggtaaagcgttatggaaccagc

SEQ ID NO: 802003 - DNA, 75 bp, synthetic construct
  source 1..75: mol_type = other DNA
taatgcctctgttaccggcgataaaaataccgtcccgatgcagcttcgtctgaccggcaaagttcagatgcctaa

SEQ ID NO: 802004 - DNA, 75 bp, synthetic construct
  source 1..75: mol_type = other DNA
atgaagtcaccctggttttccaggatggcttccagcttgaaacgctggaagaagcccgcgcgaaagcggctgcac

SEQ ID NO: 802005 - DNA, 75 bp, synthetic construct
  source 1..75: mol_type = other DNA
ccgttaagtcggacaagttggttatctctgtggatacgctgagctatatccgcgtcccgattgactatcaggatg

SEQ ID NO: 802006 - DNA, 75 bp, synthetic construct
  source 1..75: mol_type = other DNA
taagtatgagagcgattttcaaatgttattctctaatgattttatttgcagtatcaggctgttcaatggcgagaa

SEQ ID NO: 802007 - DNA, 75 bp, synthetic construct
  source 1..75: mol_type = other DNA
acaaccgtctgccagaaatatggtacaccaaattatcccatcaaagaaccccgcgagatgaaggaaccagcaaca

SEQ ID NO: 802008 - DNA, 75 bp, synthetic construct
  source 1..75: mol_type = other DNA
ctgctgtggatattaacgggataaatcatacggataaggctataaattatatacacatcaatggttacggcggac

SEQ ID NO: 802009 - DNA, 75 bp, synthetic construct
  source 1..75: mol_type = other DNA
ggaatatacaatcagtgtttctggtggtgcgtacttcaccagtagtgatgtcggtgcgcaactacagttccctta

SEQ ID NO: 802010 - DNA, 75 bp, synthetic construct
  source 1..75: mol_type = other DNA
gccagacggaccaacgaatctttccgcatggatgagacttaagaataaagaattacctccttcagttcataacta

SEQ ID NO: 802011 - DNA, 75 bp, synthetic construct
  source 1..75: mol_type = other DNA
tctgccagaaatatggtacaccaaattatcctatcaaagaaccccgcgagatgaaggaacctgcaacatgtccag

SEQ ID NO: 802012 - DNA, 75 bp, synthetic construct
  source 1..75: mol_type = other DNA
gaacctccattgcctgcggcatcgactgatggcgcgcaagtaacagagtttcactgtcatccggcaaataccttt

SEQ ID NO: 802013 - DNA, 75 bp, synthetic construct
  source 1..75: mol_type = other DNA
atcgtgaaagcgctggcgctggtggaagtgcgcgtgctggatcatctcgtagtcgggaatgagacaatttcattt

SEQ ID NO: 802014 - DNA, 75 bp, synthetic construct
  source 1..75: mol_type = other DNA
tcccggacacctccgcagcgctggacagccggatctatttcgaccagaacggtgtactgagcaagcgatttggcc

SEQ ID NO: 802015 - DNA, 75 bp, synthetic construct
  source 1..75: mol_type = other DNA
taacagtaatattttaaacctaccactggcaacagtaagcgatattatggaatgtttgcatttagtcgcaagcgg

SEQ ID NO: 802016 - DNA, 75 bp, synthetic construct
  source 1..75: mol_type = other DNA
ttagttctgacgtggacctggcacaaagtcatttggacaagaaaattataaagatgcatggggattttcgacaga

SEQ ID NO: 802017 - DNA, 75 bp, synthetic construct
  source 1..75: mol_type = other DNA
ccagcatcctgatggcatgggtgtttactttaccggcggcaatttttctttctggtgggctgtactggatagcat

SEQ ID NO: 802018 - DNA, 75 bp, synthetic construct
  source 1..75: mol_type = other DNA
caggcagcaatgcggtgatactgttgctcttgaccgcagcgcactcgttgaatgcagtccggcgtataaactaat

SEQ ID NO: 802019 - DNA, 75 bp, synthetic construct
  source 1..75: mol_type = other DNA
tacccgcaggaagccatcaccgggcatgaactgggcgctgattatgatgttaccgcagaggaagcgctgacgagg

SEQ ID NO: 802020 - DNA, 75 bp, synthetic construct
  source 1..75: mol_type = other DNA
gttactggaagatttaatggaagccggaccactcaaagccacgccgtcgctgtcctttctcgggctggccgtgat

SEQ ID NO: 802021 - DNA, 75 bp, synthetic construct
  source 1..75: mol_type = other DNA
atgaaaaagccattaccacccgtattacgcgccgcgctgtatcgtcgcgccgtggcctgtgcatggctgacggta

SEQ ID NO: 802022 - DNA, 75 bp, synthetic construct
  source 1..75: mol_type = other DNA
tgatctggaggtgaagggcagaaccgcagggcaatcgctggagcctaccgctgttaagtcggataagctgattat

SEQ ID NO: 802023 - DNA, 75 bp, synthetic construct
  source 1..75: mol_type = other DNA
tacaggccgctgaaagccagcaaccaataccgcattgatcgcctgagtggtgatctggaggtgaagggcagaacc

SEQ ID NO: 802024 - DNA, 75 bp, synthetic construct
  source 1..75: mol_type = other DNA
cgtcatcaatcgccagtgggatgatgaacgcgaaatgacaatggtgatggactcatatcgcctgttcaacgttgg

SEQ ID NO: 802025 - DNA, 75 bp, synthetic construct
  source 1..75: mol_type = other DNA
ggtgatcccgtggctggcaaaaagctggacccattcggaagatggcaaaacctggaccttcaccctgcgtgatga

SEQ ID NO: 802026 - DNA, 75 bp, synthetic construct
  source 1..75: mol_type = other DNA
gaaactgaatcagtacgatgtcttcgtccgtaacgaaaactactggggcgaaaagccagcgattaaaaagatcac

SEQ ID NO: 802027 - DNA, 75 bp, synthetic construct
  source 1..75: mol_type = other DNA
ggtgatcccgtggctggcaaaaagctggactcattcagaagatggtaaaacctggaccttcaccctgcgtgatga

SEQ ID NO: 802028 - DNA, 75 bp, synthetic construct
  source 1..75: mol_type = other DNA
cgcggtggtggtggggattgcgctgcattcattgatggacggaaagctacgctacagtattgttttcaccctggt

SEQ ID NO: 802029 - DNA, 75 bp, synthetic construct
  source 1..75: mol_type = other DNA
aaaaatcgctgattgataacgcgttgtatggcacccagcaggtcgccgacaccctgtttgccccttccgtgccct

SEQ ID NO: 802030 - DNA, 75 bp, synthetic construct
  source 1..75: mol_type = other DNA
agcaggtcgccgacactctgtttgccccttctgtgccttacgctaatctcggcctgaaaccgcgccagtacgatc

SEQ ID NO: 802031 - DNA, 75 bp, synthetic construct
  source 1..75: mol_type = other DNA
attgaaaaacatcacgttagaatcacaaaaaaaagaagtggggagacgttgggtaatttcaaaaagtgggtagta

SEQ ID NO: 802032 - DNA, 75 bp, synthetic construct
  source 1..75: mol_type = other DNA
cacaacattatgctgcttatcagccacgacgagaaactttccgtcgtctctatcagcaacttctgccgatgatga

SEQ ID NO: 802033 - DNA, 75 bp, synthetic construct
  source 1..75: mol_type = other DNA
gagtgcggcatcgtgtctggactgggcggtgaaattaaccggcatgggtgatgttcccgctttaattactgcagc

SEQ ID NO: 802034 - DNA, 75 bp, synthetic construct
  source 1..75: mol_type = other DNA
cgatcagcatcgctgcagccaaccgattcgtaaatagaataaggggagggatggatctaggttactggcgaacac

SEQ ID NO: 802035 - DNA, 75 bp, synthetic construct
  source 1..75: mol_type = other DNA
attgaaaaacagtacattagagtcacaaaaaaaagaagtggggagacgttgggtaatttcaaaaagtggggaaca

SEQ ID NO: 802036 - DNA, 75 bp, synthetic construct
  source 1..75: mol_type = other DNA
gtggggggagtggggaatttaacaaaattgaaacataattacccactttcccacctgtatatacccaaaaaagtg

SEQ ID NO: 802037 - DNA, 75 bp, synthetic construct
  source 1..75: mol_type = other DNA
tatttgatgatattcactttgctaataaaaatataattcaaaagaatagttatacttgtcttttcttgggagttg

SEQ ID NO: 802038 - DNA, 75 bp, synthetic construct
  source 1..75: mol_type = other DNA
taaaactataattcaaaagattagttatacttgtcttttcttgggggtcgattgggaaagaaaaggtggtaaaac

SEQ ID NO: 802039 - DNA, 75 bp, synthetic construct
  source 1..75: mol_type = other DNA
caataatatatctatcggatacaacatatgatcaattaaaaaactattatccgaatttaaataaaaaaacaatta

SEQ ID NO: 802040 - DNA, 75 bp, synthetic construct
  source 1..75: mol_type = other DNA
ctgtcgttgggaacttcgggggtttattttgcagtaagcgaagggttcttaagcaagccggaaagtgccgtacac

SEQ ID NO: 802041 - DNA, 75 bp, synthetic construct
  source 1..75: mol_type = other DNA
tcagcggtcagcagctcgattaccgcacagggggagatgtggggccagcactgggtgcagcaaggctggcgcaga

SEQ ID NO: 802042 - DNA, 75 bp, synthetic construct
  source 1..75: mol_type = other DNA
aggcagttatatgggatcgatgttagactaaaaatttgtggatgtactccgaatcaaaagattttacctacttgg

SEQ ID NO: 802043 - DNA, 75 bp, synthetic construct
  source 1..75: mol_type = other DNA
atagaggctcagcgcaaagcgtatgagcttcacgctgataaattgttctggcacatcaggagcatttctgattaa

SEQ ID NO: 802044 - DNA, 75 bp, synthetic construct
  source 1..75: mol_type = other DNA
cccgtcgcagggaatgttgtccagttttgtcccgacggatagccagattatcggccaggtatataagtgcccgaa

SEQ ID NO: 802045 - DNA, 75 bp, synthetic construct
  source 1..75: mol_type = other DNA
aagaatatttatattcgattggtttctgaactcacgcagatgagtgatgaaactataaaatcgcaaatgttataa

SEQ ID NO: 802046 - DNA, 75 bp, synthetic construct
  source 1..75: mol_type = other DNA
catgcaatgaaatcgctccgttaatggaaaaacctgcacaaacagtggtgttatccaaaactcatacctacacag

SEQ ID NO: 802047 - DNA, 75 bp, synthetic construct
  source 1..75: mol_type = other DNA
agtccgttgttaatcagaacggggttgcgagagatcaaaaagttgagtggtgtaacggaagcgctgaattataac

SEQ ID NO: 802048 - DNA, 75 bp, synthetic construct
  source 1..75: mol_type = other DNA
attccgaaggtcagggacttggtctttctttagtcaaagcgattgccgaattgcatgggggaagtgctacgtatc

SEQ ID NO: 802049 - DNA, 75 bp, synthetic construct
  source 1..75: mol_type = other DNA
gtgccagctgattggtactgcgacaggtaagcaaagcaactggctttccgggcaacacggtgaagaaggcggttc

SEQ ID NO: 802050 - DNA, 75 bp, synthetic construct
  source 1..75: mol_type = other DNA
tggtgcgatgcgtggttatggcgcgccacaagtcgtatttgccgttgagtctatgcttgatgacgccgcgacagc

SEQ ID NO: 802051 - DNA, 75 bp, synthetic construct
  source 1..75: mol_type = other DNA
ctgtgccgaaggagcacagcaaaatgggcaatatcattcgcagacctatttttgagcaaattgaaccactgcttg

SEQ ID NO: 802052 - DNA, 75 bp, synthetic construct
  source 1..75: mol_type = other DNA
caatgggttgacctgcttaccgaagaagaaagagataatccacgccgagcaaggcaggtgctaagtcaactaagg

SEQ ID NO: 802053 - DNA, 75 bp, synthetic construct
  source 1..75: mol_type = other DNA
attaaaactcttcaaaaacaactgaaaccatggcaaccactggaaatcacaacaaaagatagctctcttaccgtt

SEQ ID NO: 802054 - DNA, 75 bp, synthetic construct
  source 1..75: mol_type = other DNA
ttcgacaaccttctgtcctcgatgaactccgatgcggcctattcatctatcactggctctatggccgcgctgctg

SEQ ID NO: 802055 - DNA, 75 bp, synthetic construct
  source 1..75: mol_type = other DNA
gcatgcatgacgccttccctaatcgtccggcatcttctatcacggttaagcaatgggttgacctgcttaccgaag

SEQ ID NO: 802056 - DNA, 75 bp, synthetic construct
  source 1..75: mol_type = other DNA
atattgcattgggacaattgggcaaaaaagataattgagattatgtatgagcataagaatagaagaaccaaatag

SEQ ID NO: 802057 - DNA, 75 bp, synthetic construct
  source 1..75: mol_type = other DNA
atcgactgctgccgttgggtcagcgccgaagaaattttacaggcgtcaaatctgcgttcgccactggtggcggaa

SEQ ID NO: 802058 - DNA, 75 bp, synthetic construct
  source 1..75: mol_type = other DNA
gaaatcccggaaggtaacttcttcggcaaaatcattgattacattaaattaatgttccatcactggtttggctaa

SEQ ID NO: 802059 - DNA, 75 bp, synthetic construct
  source 1..75: mol_type = other DNA
gtgttgcacgaaatcccggaatgtaacttcttcgggcaaatccttgattacattaaattaatgttccatcactgg

SEQ ID NO: 802060 - DNA, 75 bp, synthetic construct
  source 1..75: mol_type = other DNA
gaaataaaaccgccattatgtccgaactgaaaaaacatcttcctgctggctcgcgactggttgaacctttcgcgg

SEQ ID NO: 802061 - DNA, 75 bp, synthetic construct
  source 1..75: mol_type = other DNA
tgtttctaacagtgacacatcccttatccgttcgctgtatcgcaattttactcaccactacatcaaggcaaaacg

SEQ ID NO: 802062 - DNA, 75 bp, synthetic construct
  source 1..75: mol_type = other DNA
gttcctgtgcagtgatgatggagacggattacccaagctatctggtagcggatattaatcctgatttaatcaacc

SEQ ID NO: 802063 - DNA, 75 bp, synthetic construct
  source 1..75: mol_type = other DNA
ggagaaatacgctgccgctctggcaaccgcactcagccattctcccctgataacgcttgaagagatacccgcctc

SEQ ID NO: 802064 - DNA, 75 bp, synthetic construct
  source 1..75: mol_type = other DNA
ctacagcggcgtggactgggaaggcattcacacctgtatgctgacctgcgtgatcgtcgctaaccccaatatcgg

SEQ ID NO: 802065 - DNA, 75 bp, synthetic construct
  source 1..75: mol_type = other DNA
ctggcagaaagtcttgcgccgctacccgaaacgcggattgaaagagaggcgctggcgctgcaaaaactgaatgtc

SEQ ID NO: 802066 - DNA, 75 bp, synthetic construct
  source 1..75: mol_type = other DNA
gcatggatgatgtgaaggctagatatattgttacagggtgtgtagttgctatggggaaaaacactgtagaggaaa

SEQ ID NO: 802067 - DNA, 75 bp, synthetic construct
  source 1..75: mol_type = other DNA
atcggcggtgatttacacctttgtctggcctgaaagcgaagcgcgtgcactgccgcaaaaactggctggcgcgct

SEQ ID NO: 802068 - DNA, 75 bp, synthetic construct
  source 1..75: mol_type = other DNA
caattctggcgttgctgtttacgctactggtcatgccatggctggacaacattgtcgaattgctgctcgtactgg

SEQ ID NO: 802069 - DNA, 75 bp, synthetic construct
  source 1..75: mol_type = other DNA
atgagcaccatcctgaaatgggcgggaaataaaaccgcaattatgtccgaactgaaaaaatacctacctgctggc

SEQ ID NO: 802070 - DNA, 75 bp, synthetic construct
  source 1..75: mol_type = other DNA
atctcgatgtcgtggaaaccatttgtgaactgttggaagaactggctccggataaaccgcacggcgtggcgcact

SEQ ID NO: 802071 - DNA, 75 bp, synthetic construct
  source 1..75: mol_type = other DNA
ttctgtatctcaatcgtcatggttatcgtgggttatgtcgctataacaagagcgggtatttcaacattccctacg

SEQ ID NO: 802072 - DNA, 75 bp, synthetic construct
  source 1..75: mol_type = other DNA
ctgaaatctttaatgtcgatatacgtactattgatcgctggcaaactcaggggctccctcagatatctggtggag

SEQ ID NO: 802073 - DNA, 75 bp, synthetic construct
  source 1..75: mol_type = other DNA
gcaggagattgtggacaccgcgctggcgtaccagattccgcgcattatctttaccagctccacttcggtctacgg

SEQ ID NO: 802074 - DNA, 75 bp, synthetic construct
  source 1..75: mol_type = other DNA
ctgagatttttgatgttgatgtgcggactatatccacctggcaaaatcaggggctgccgctgatatcaggcggcg

SEQ ID NO: 802075 - DNA, 75 bp, synthetic construct
  source 1..75: mol_type = other DNA
gcgcgctgtattgcgtggcgaccaccgggaaagtcggtgaaacctataatattggtggtcacaacgagcgtaaga

SEQ ID NO: 802076 - DNA, 75 bp, synthetic construct
  source 1..75: mol_type = other DNA
gcagtgttggcgccgcagctgcaagccagaaagttgccgcagagttaatactaaagtccccgcttgattccatag

SEQ ID NO: 802077 - DNA, 75 bp, synthetic construct
  source 1..75: mol_type = other DNA
tgaaaatgaaatacgcgcttttgctgaaaagactcaacgcgcaacgtttatctgtgccagctatgacgaaacact

SEQ ID NO: 802078 - DNA, 75 bp, synthetic construct
  source 1..75: mol_type = other DNA
aaaactgtactggagatagatcgcgagcggcgacaatacaatcagagaacacctgatgacgggggcgatctggag

SEQ ID NO: 802079 - DNA, 75 bp, synthetic construct
  source 1..75: mol_type = other DNA
tctataaaaagattgccgctgattgcgaggcgtttatatctcgcgccagagttttatttgagatcgcaaacaggg

SEQ ID NO: 802080 - DNA, 75 bp, synthetic construct
  source 1..75: mol_type = other DNA
gttttatttaaggaagcaaacagggaggtggcttattacaacataaggcaggagtttaattactcaactgaaatt

SEQ ID NO: 802081 - DNA, 75 bp, synthetic construct
  source 1..75: mol_type = other DNA
ggcaacgtttatctgcgcgagctttgatgaaacgctggcgatgctgcaggtgggggatgtggtgtattgcgatcc

SEQ ID NO: 802082 - DNA, 75 bp, synthetic construct
  source 1..75: mol_type = other DNA
tcgtctggcacgcggttacagctactcagatcgcgtgcgctactactggccggacagccagattgataacgcttt

SEQ ID NO: 802083 - DNA, 75 bp, synthetic construct
  source 1..75: mol_type = other DNA
cagcaaaagcctgttctggtctgcgtcaggtgctggaaaacgtgatgctcgaccgcccggaatactggcaaagcc

SEQ ID NO: 802084 - DNA, 75 bp, synthetic construct
  source 1..75: mol_type = other DNA
accgaccgttttgaattcttcatcggtggtcgtgaaatcggtaatggttttagcgaattaaacgacgcagaagat

SEQ ID NO: 802085 - DNA, 75 bp, synthetic construct
  source 1..75: mol_type = other DNA
ggtagccagtgccattggttctctttataagatgaacgcgtcaatttctggtgctgaagtcggctgccagggtga

SEQ ID NO: 802086 - DNA, 75 bp, synthetic construct
  source 1..75: mol_type = other DNA
ttgctggacaagttcaggtaccgtgcattgagcgtaacgccattgcggcagtaaaagcggtgaacgctgcacgta

SEQ ID NO: 802087 - DNA, 75 bp, synthetic construct
  source 1..75: mol_type = other DNA
ggtcagcacgaagtggagttcccggttgatcagtgcatgaacttccatgctgacaacctttctctgcatgagaat

SEQ ID NO: 802088 - DNA, 75 bp, synthetic construct
  source 1..75: mol_type = other DNA
ctggtgccgtaacgtgctcagcccgtcgaagttgcgggaaaaatgggatgagctttccctgcgcttatcgccgtc

SEQ ID NO: 802089 - DNA, 75 bp, synthetic construct
  source 1..75: mol_type = other DNA
cagattggcgcggggatgagtaccgtcagaacggctatcgcacggctggaagcagaaggctggttaacgcgtaag

SEQ ID NO: 802090 - DNA, 75 bp, synthetic construct
  source 1..75: mol_type = other DNA
gcctggcgcatattctttccggtgccaacgtgaacttccacggcctgcgctacgtctcggaacgctgcgaactgg

SEQ ID NO: 802091 - DNA, 75 bp, synthetic construct
  source 1..75: mol_type = other DNA
ttatagcaaattcaatgttttttattttttcttttatcggtggtattagttattttaataaaaataaagtttttc

SEQ ID NO: 802092 - DNA, 75 bp, synthetic construct
  source 1..75: mol_type = other DNA
gattgacggtccgctgcgttctgtcacgcagtggctcacgcgtgtggtatcaaaggtgacggcgctggcgcaggc

SEQ ID NO: 802093 - DNA, 75 bp, synthetic construct
  source 1..75: mol_type = other DNA
acccatcaaggcgttttatatcggggtgttcaacgggattatggaacgactggctccgttgcgcgaaacctttga

SEQ ID NO: 802094 - DNA, 75 bp, synthetic construct
  source 1..75: mol_type = other DNA
ggttcgctctctctgaccggtaaaggccaccacacggatatcgccattattatgggtctggcaggtaacctaccg

SEQ ID NO: 802095 - DNA, 75 bp, synthetic construct
  source 1..75: mol_type = other DNA
tgctgtcagggtcctgccagcgctgtggggaatggtgacgggttccgtttctttactgggaggcgctatcggggc

SEQ ID NO: 802096 - DNA, 75 bp, synthetic construct
  source 1..75: mol_type = other DNA
ccttacccaaactgagaaaagaacttgaaggcgcgcgcggtgaggctgaacgcacggcaaaggttatggccaaca

SEQ ID NO: 802097 - DNA, 75 bp, synthetic construct
  source 1..75: mol_type = other DNA
ttatggctctcgttgatgcggcgggggacggctccctgcccaaactgagaaaagaacttgagggcgcacgcggtg

SEQ ID NO: 802098 - DNA, 75 bp, synthetic construct
  source 1..75: mol_type = other DNA
gcgcgtaatgatggaggataaactccccccagagaagcgacggaaaaatcgatgtcgcaaatccagggcgcgctg

SEQ ID NO: 802099 - DNA, 75 bp, synthetic construct
  source 1..75: mol_type = other DNA
ccgggatgcttgccaataatggtcttcgcggaagcgatgctggcacggccatgcgcgcaagtctgtcccgccttg

SEQ ID NO: 802100 - DNA, 75 bp, synthetic construct
  source 1..75: mol_type = other DNA
gccgcattgcccggtgttcttaatatggcgctggcaggtggcgtcgaactcggcgagacggcggatataggctcc

SEQ ID NO: 802101 - DNA, 75 bp, synthetic construct
  source 1..75: mol_type = other DNA
acccatcaaggcgttttatgccggggtgttcagtgggattatggaacggctggctccgttgcgcgaaacctttga

SEQ ID NO: 802102 - DNA, 75 bp, synthetic construct
  source 1..75: mol_type = other DNA
attgttgctgcgtttgtggctgcggcggttctcatctggaaatattgggaacccatcaaggcgttttatgccggg

SEQ ID NO: 802103 - DNA, 75 bp, synthetic construct
  source 1..75: mol_type = other DNA
agtgggcgtggcctgttctatggccgccgcaggcctggcggaactgctgggcggtagccctgctcaggtatgcat

SEQ ID NO: 802104 - DNA, 75 bp, synthetic construct
  source 1..75: mol_type = other DNA
tgtacctgcgtatcgcgccggaactgtacctcaagcgtctggtggtcggtggcttcgagcgtgtattcgaaatca

SEQ ID NO: 802105 - DNA, 75 bp, synthetic construct
  source 1..75: mol_type = other DNA
gcgctgcgtgagcaggcgttaaaacttggctctgaaacgcagttcaccgcaggcgatgccgccagtggacaggca

SEQ ID NO: 802106 - DNA, 75 bp, synthetic construct
  source 1..75: mol_type = other DNA
cttggttttgacattcttacccggtcaatgaatgtcgtcagggtgttgcctgcgctgtggggaatggtgacgggt

SEQ ID NO: 802107 - DNA, 75 bp, synthetic construct
  source 1..75: mol_type = other DNA
tggccggacagccagattgatgacgctttcgctcatctggttcgtaatctggcggattcaccaattccgctgccg

SEQ ID NO: 802108 - DNA, 75 bp, synthetic construct
  source 1..75: mol_type = other DNA
gtgcaggaacgtctgacccagcaaattcttattgcgctacaaacgctgctgggcaccaataacgtggctgtctct

SEQ ID NO: 802109 - DNA, 75 bp, synthetic construct
  source 1..75: mol_type = other DNA
tcataaaacggtgaaggtacctgaatggggaaatgtcagcgtggtactgcgtgagccttcggcagaagcctggta

SEQ ID NO: 802110 - DNA, 75 bp, synthetic construct
  source 1..75: mol_type = other DNA
tgcgtcgcagcgactgggatgcctatctccagtggggcgtagaggccttccgtatcaatgccgctgtagcgaaag

SEQ ID NO: 802111 - DNA, 75 bp, synthetic construct
  source 1..75: mol_type = other DNA
aacggttgtattacgggaaccttctgcagaagcttggttgcgctggcaggagatcgttaaagcaaaagatgatga

SEQ ID NO: 802112 - DNA, 75 bp, synthetic construct
  source 1..75: mol_type = other DNA
tgcaaccagtgccacaacaacgacctctcttggtggattgttcaaatccagtcagaatacgcgccacgagtttct

SEQ ID NO: 802113 - DNA, 75 bp, synthetic construct
  source 1..75: mol_type = other DNA
gtacctgtgaacaccattttgttaccatcgatggcaaagcgacggtggcttatatcccgaaagattcggtgatcg

SEQ ID NO: 802114 - DNA, 75 bp, synthetic construct
  source 1..75: mol_type = other DNA
ctgccgcacgggttccgtcttacccaggaatatctctggtatgaaaagcaggtacagcgcaacggtgagacggag

SEQ ID NO: 802115 - DNA, 75 bp, synthetic construct
  source 1..75: mol_type = other DNA
agccacacgggagaaagcgcctatctgacaggaaaagggttcgccggatacccggcctctctgaccggaagcgtg

SEQ ID NO: 802116 - DNA, 75 bp, synthetic construct
  source 1..75: mol_type = other DNA
aggaggtggcgcaggtgcttaatgtgccggatatgcaggaactgcctgttaagcctgccagacaaaaagccccta

SEQ ID NO: 802117 - DNA, 75 bp, synthetic construct
  source 1..75: mol_type = other DNA
agctgcgttatacaccgggtaaagttgtttttaacggacaggagatgagcgaagaagaatttatgtctcgtgccg

SEQ ID NO: 802118 - DNA, 75 bp, synthetic construct
  source 1..75: mol_type = other DNA
ggtggtgaatcatctactatagatgaagttcatattacgcactctcaggatgctgcacaaactatccaacttcat

SEQ ID NO: 802119 - DNA, 75 bp, synthetic construct
  source 1..75: mol_type = other DNA
ggcggtgaggccagcgccattcagtcagtacacatcacccatgttgaagatgccgccaatactttacgtacgcat

SEQ ID NO: 802120 - DNA, 75 bp, synthetic construct
  source 1..75: mol_type = other DNA
ttgccacagtcctgtgctaaggaaggtgcgaataagcaggtcatttcttcccaagctgactcgttgattaaaatt

SEQ ID NO: 802121 - DNA, 75 bp, synthetic construct
  source 1..75: mol_type = other DNA
ccgccgaatgtgacggcgaggtggttcgtcccaaagaacctaactggacagcctgggcaaacgaaattcgcctga

SEQ ID NO: 802122 - DNA, 75 bp, synthetic construct
  source 1..75: mol_type = other DNA
caaccggacacgcaaacggctgaacaggagtttttaactcgccatcctgatgcggttgtattcagccctaaaaag

SEQ ID NO: 802123 - DNA, 75 bp, synthetic construct
  source 1..75: mol_type = other DNA
cgacttgcgctccgtctggggcgcaccttatccgaactgcgccacagcctgagtgcgagcgaggcgatgatgtgg

SEQ ID NO: 802124 - DNA, 75 bp, synthetic construct
  source 1..75: mol_type = other DNA
tgcgtgaagctctgttctctctggcggcgattgaagaagaactggtgccagcaaaagcctgttctggtctgcgtc

SEQ ID NO: 802125 - DNA, 75 bp, synthetic construct
  source 1..75: mol_type = other DNA
atgggccaatgacgtgcgcataatgcggatgctggatggcagaactcacagacaaatctgcgaaatgtttggtcg

SEQ ID NO: 802126 - DNA, 75 bp, synthetic construct
  source 1..75: mol_type = other DNA
tgggcgaacagcgtgaagcgttgctggcggtcaccatcccggaagaaaaaggcagcttcctcaaattctgccagc

SEQ ID NO: 802127 - DNA, 75 bp, synthetic construct
  source 1..75: mol_type = other DNA
aatattgcacctactgcgtagtgccttacacccgtggtgaagaggtaagccgtccgtccgacgatattctgtttg

SEQ ID NO: 802128 - DNA, 75 bp, synthetic construct
  source 1..75: mol_type = other DNA
ctgactttaatggcgctcagggtgcagcaatattggcgcatcaacgttttttgccacagttctgtgctggtgatg

SEQ ID NO: 802129 - DNA, 75 bp, synthetic construct
  source 1..75: mol_type = other DNA
tgcgctttattgccgcctcatcttctgactttaatggcgctcagggtgcagcaatattggcgcatcaacattttt

SEQ ID NO: 802130 - DNA, 75 bp, synthetic construct
  source 1..75: mol_type = other DNA
tcataaaacggtgaaagtgccggaatgggggaatgtcagcgttgtgctgcgtgagccttcggcagaagcctggta

SEQ ID NO: 802131 - DNA, 75 bp, synthetic construct
  source 1..75: mol_type = other DNA
ggctgctggatattggcgccagtaagcggcaaatcgccgtcatcagtaaaacggatatgccggatgctgatgtcg

SEQ ID NO: 802132 - DNA, 75 bp, synthetic construct
  source 1..75: mol_type = other DNA
atgaaacgaattgcgtttgtgggtagcgtcggggcaggaaaaacaacgttatttaatgcgttgcaggggaattat

SEQ ID NO: 802133 - DNA, 75 bp, synthetic construct
  source 1..75: mol_type = other DNA
cggtgagcgtccgctggtggaagtggcgcaccgtctggcgatgggcgagccgattagtgaaatccgcgatgtgcg

SEQ ID NO: 802134 - DNA, 75 bp, synthetic construct
  source 1..75: mol_type = other DNA
ggaagcggcgctgcgtgaaaaccgcatgacgctggaagcgattcgtgtcacccagtcggaccgtgacctgtttaa

SEQ ID NO: 802135 - DNA, 75 bp, synthetic construct
  source 1..75: mol_type = other DNA
atctcaacgaaaaattgcgtgaacgtctggaacatgcggaagcagagcgtacccgtgctcgtgaagcactgcgtg

SEQ ID NO: 802136 - DNA, 75 bp, synthetic construct
  source 1..75: mol_type = other DNA
cgatcgccgtttgcgccatgatgacgcttacacgccgaataacgtcgcgggtaagcgcccggatcgtgcaacact

SEQ ID NO: 802137 - DNA, 75 bp, synthetic construct
  source 1..75: mol_type = other DNA
ttcggcgttactgctggcaacatggactcgatgatcaaccgttacacagccgatcgccgtttgcgccatgatgac

SEQ ID NO: 802138 - DNA, 75 bp, synthetic construct
  source 1..75: mol_type = other DNA
tggtggaagtggcgcaccgtctggcgatgggcgagccgattagtgaaatccgcgatgtgcgtaataccgcgatta

SEQ ID NO: 802139 - DNA, 75 bp, synthetic construct
  source 1..75: mol_type = other DNA
aaggtattccagaataccgagcacgttcatgtggttggtttacgtggctttgcgccgcagcttccagaaatgctt

SEQ ID NO: 802140 - DNA, 75 bp, synthetic construct
  source 1..75: mol_type = other DNA
gatattgatgaactggaagctctgcatcaggagctggaagcacgcattgcctctctttccgatagcgtgtctaac

SEQ ID NO: 802141 - DNA, 75 bp, synthetic construct
  source 1..75: mol_type = other DNA
gatccaaaacgtccggaacgtaaaattcagttcttcgtggcggtttatcagcatctgcgggaacgtattcgtcag

SEQ ID NO: 802142 - DNA, 75 bp, synthetic construct
  source 1..75: mol_type = other DNA
ttacgcatactcccagcagatgcagcgcgatgcccgtcagcaggcatttgccctgacggaagtggtgcagcgtcg

SEQ ID NO: 802143 - DNA, 75 bp, synthetic construct
  source 1..75: mol_type = other DNA
ctatctggaaatggaagttgaggttaaccgtggttccgatggctggctgcgcgcggagtctggcgcactgtcgac

SEQ ID NO: 802144 - DNA, 75 bp, synthetic construct
  source 1..75: mol_type = other DNA
atcgaagcttcgctgtacggtggtatctccagtgccattacccgttctctgcgtgactacctgctgccggaaaac

SEQ ID NO: 802145 - DNA, 75 bp, synthetic construct
  source 1..75: mol_type = other DNA
ggatttggcggtgaaattcatgttcatctgcataacgttgttacgcagaatccccgcgaactggcgaaactggtc

SEQ ID NO: 802146 - DNA, 75 bp, synthetic construct
  source 1..75: mol_type = other DNA
aagccacccgcaaatacggggaagttgaccgggtatcgttctttaaggacattgccggagaagaggctttcacat

SEQ ID NO: 802147 - DNA, 75 bp, synthetic construct
  source 1..75: mol_type = other DNA
agagaattgcagggggcaaggggagaggccgatcgcgttgcaaaagtaatggctgaaccgccccgggtttcctgg

SEQ ID NO: 802148 - DNA, 75 bp, synthetic construct
  source 1..75: mol_type = other DNA
atctggttgacggtccgctgcgttctgtcacgcagtggctcacgcgggtgcttgaaaaaatcacctcgctggcgc

SEQ ID NO: 802149 - DNA, 75 bp, synthetic construct
  source 1..75: mol_type = other DNA
gatatttttgtgccgacctacaacgaagatcttaatgtggtgaaaaacaccatttacgcctcgctgggcatcgac

SEQ ID NO: 802150 - DNA, 75 bp, synthetic construct
  source 1..75: mol_type = other DNA
gagcatccgtgttggcagcgtattcgcgcacaacataaaatcctgttcccccatatcaatgcctcacgtccgcgt

SEQ ID NO: 802151 - DNA, 75 bp, synthetic construct
  source 1..75: mol_type = other DNA
ccttcttcggtgaagggcatattccgtgtgctgacttctctggtttcctgggttgtatcgtttattccgcgccgc

SEQ ID NO: 802152 - DNA, 75 bp, synthetic construct
  source 1..75: mol_type = other DNA
caaaggtgacggcgctggcgcaggcccatcccgcactgacgcgccagctactgattgcaggcggtgcgttgctgg

SEQ ID NO: 802153 - DNA, 75 bp, synthetic construct
  source 1..75: mol_type = other DNA
accgatggagtccagcaaggaaacgctggataaatgtaccagtgctggcgagatattcggtaacgttcttggcgg

SEQ ID NO: 802154 - DNA, 75 bp, synthetic construct
  source 1..75: mol_type = other DNA
atcggaagcgggatcagccaggtgtttaactggtttaaatcgctgctgtcaccgatggagtccagcaaggaaacg

SEQ ID NO: 802155 - DNA, 75 bp, synthetic construct
  source 1..75: mol_type = other DNA
tctgtcccgccttgcatcaccgccaaaagctgcggctgatgcactgaaagagctgggggtgtcagttgctgacgc

SEQ ID NO: 802156 - DNA, 75 bp, synthetic construct
  source 1..75: mol_type = other DNA
gctccgctgcctccggcgctggtccctgttgttgcggccagctcccgcccggtggcggaggccatacgatcgcca

SEQ ID NO: 802157 - DNA, 75 bp, synthetic construct
  source 1..75: mol_type = other DNA
gccggagaagaggctttcacatcgtttatggcgctcgttgatgcagcgggtgacggttccttacccaaactgaga

SEQ ID NO: 802158 - DNA, 75 bp, synthetic construct
  source 1..75: mol_type = other DNA
aaagtcttccagaataccgaacacgttcacgtcgtcggcctgcgaggatttgcgccgcaactccctgaaacgctt

SEQ ID NO: 802159 - DNA, 75 bp, synthetic construct
  source 1..75: mol_type = other DNA
ccgcttttggttactccatcaacacactaacgatgttcgggatggtgcttgccatcgggctgctcgtcgatgatg

SEQ ID NO: 802160 - DNA, 75 bp, synthetic construct
  source 1..75: mol_type = other DNA
gcgatcctacaattgcccgtcgctcagtatccaaccattgcaccgcctgcggtttctgtttcagcaaactatccg

SEQ ID NO: 802161 - DNA, 75 bp, synthetic construct
  source 1..75: mol_type = other DNA
ctttcgttaccctgcaggacgttggcggtcgcattcagttgtacgttgcccgtgacgatctgccggaaggcgttt

SEQ ID NO: 802162 - DNA, 75 bp, synthetic construct
  source 1..75: mol_type = other DNA
taacaagtgtagggcaagcaattgctctagccgttatttcaagatacgtagaaagattggattataatatttggt

SEQ ID NO: 802163 - DNA, 75 bp, synthetic construct
  source 1..75: mol_type = other DNA
taacaagtgtagggcaagcaattgctctggctgttttttcaagatacgtaggaagattggattataatatttggt

SEQ ID NO: 802164 - DNA, 75 bp, synthetic construct
  source 1..75: mol_type = other DNA
gtggtttcttcggctggtttaataccaccttcgatcatagcgttaaccactacaccaacagcgtcggcaaaatcc

SEQ ID NO: 802165 - DNA, 75 bp, synthetic construct
  source 1..75: mol_type = other DNA
gctgcaaaaactggttgatgaaaaacacggccaggttgtttctgtgggtaaaattgctgacatctacgctaactg

SEQ ID NO: 802166 - DNA, 75 bp, synthetic construct
  source 1..75: mol_type = other DNA
gattactatctgaagaacgagaaagcgaacgttgaaagtgtctttacggttaacggctttagcttcagcggctag

SEQ ID NO: 802167 - DNA, 75 bp, synthetic construct
  source 1..75: mol_type = other DNA
aaccggcggcgggcctggggattaagctagcaaccggcgcgaatgctctcgataccgcgaaagccattaaggcaa

SEQ ID NO: 802168 - DNA, 75 bp, synthetic construct
  source 1..75: mol_type = other DNA
gctgtttgacgccaccatcaaagagatgaaagaagcgggtgataacaccatcgtcttcaccaacttcgttgactt

SEQ ID NO: 802169 - DNA, 75 bp, synthetic construct
  source 1..75: mol_type = other DNA
atctgacccgtctggggctggcgaaagcacacgaaggttctaccggtttcattccggcgggaatggacggcaacg

SEQ ID NO: 802170 - DNA, 75 bp, synthetic construct
  source 1..75: mol_type = other DNA
ggggccaccgtcgcgacgtcgcaggctatgccgcgggtctggaactgttcgaccgccgtctgccggaactgatgt

SEQ ID NO: 802171 - DNA, 75 bp, synthetic construct
  source 1..75: mol_type = other DNA
atgacatgacctgggattttatcagcaacgtcaatagcataacctgcaatgcgacgctctatgacgcgttgaaag

SEQ ID NO: 802172 - DNA, 75 bp, synthetic construct
  source 1..75: mol_type = other DNA
cgtctggatgaagcccaggaagccgcgcgttttgttcagcagttcggtaatcaactggcgaaactggaaccgatc

SEQ ID NO: 802173 - DNA, 75 bp, synthetic construct
  source 1..75: mol_type = other DNA
actgagcaataaccgttctcgtcgcaaccaactggagaaagcgcttactttttgcgaagcggagatggacaacct

SEQ ID NO: 802174 - DNA, 75 bp, synthetic construct
  source 1..75: mol_type = other DNA
ttcacctgggtgccgccgttcgatcatccgatggtgatcgccgggcaaggcacgctggcgctggaactgctccag

SEQ ID NO: 802175 - DNA, 75 bp, synthetic construct
  source 1..75: mol_type = other DNA
cgcgactggatgctcgttctatcgccacgctgtttgaattgtgtgaacgtttgcaaatgcagctcatcatcgcag

SEQ ID NO: 802176 - DNA, 75 bp, synthetic construct
  source 1..75: mol_type = other DNA
accagcagcagcgtattcagtttgagcaggcgaaagaaggcgttacggcgctgaaccgcattctgccgcgtctca

SEQ ID NO: 802177 - DNA, 75 bp, synthetic construct
  source 1..75: mol_type = other DNA
gtcacgcagcgcagttgagtcagtacaaccaggtgctgggcttcgctgaaaagttcttacgacaccaaaaaagag

SEQ ID NO: 802178 - DNA, 75 bp, synthetic construct
  source 1..75: mol_type = other DNA
gaatatgcagtgaagccgttactcgcccaaagcggcccgcttgacgatattgatgttgcactgcgtttgatttat

SEQ ID NO: 802179 - DNA, 75 bp, synthetic construct
  source 1..75: mol_type = other DNA
tgtacgccgatatcacgcatttttcccagttttggcattacctgaacgaacaggatgaaacgcccggatttgccg

SEQ ID NO: 802180 - DNA, 75 bp, synthetic construct
  source 1..75: mol_type = other DNA
ctggtcagaggcgcgttttagcggaatggtcaaaacggcgctgacgctggcagtaacgacaactttaaaggaatt

SEQ ID NO: 802181 - DNA, 75 bp, synthetic construct
  source 1..75: mol_type = other DNA
atttgatcgaaagaaaagtggatgtcgcgatacgcgccggtacgttaacggattccagcttacgagccaggccgt

SEQ ID NO: 802182 - DNA, 75 bp, synthetic construct
  source 1..75: mol_type = other DNA
atgaaagccacgtcggaagaactcgccatttttgtttcggtcgtcgaaagcggcagctttagccgggcagcggaa

SEQ ID NO: 802183 - DNA, 75 bp, synthetic construct
  source 1..75: mol_type = other DNA
cgtgcagtgagcacccgtatacgagcctttatcgatttccttagtgagcatataaaaacagctcccggaggagct

SEQ ID NO: 802184 - DNA, 75 bp, synthetic construct
  source 1..75: mol_type = other DNA
ccgtcgctggtactggccctgcccacactgtggtgagtattttcagccctgcggcgatgtggttgctggtttccg

SEQ ID NO: 802185 - DNA, 75 bp, synthetic construct
  source 1..75: mol_type = other DNA
ataaccggcatggtggatggcaaaagcgttaactggaaggagttagtgacagatgaacaataccacgcccattaa

SEQ ID NO: 802186 - DNA, 75 bp, synthetic construct
  source 1..75: mol_type = other DNA
acctgctggtcctcaggggcagcccggtcctcagggacctgctggcgaaaccggacccgcgggtgaacccgggcc

SEQ ID NO: 802187 - DNA, 75 bp, synthetic construct
  source 1..75: mol_type = other DNA
acgtcagtgacaacgctgagcaggctgttctgccggaaccagtctctctgcctgccagaaaaaagaaacgaaaaa

SEQ ID NO: 802188 - DNA, 75 bp, synthetic construct
  source 1..75: mol_type = other DNA
ggcgcgcaaaactgatcacccgtatacgcgtgaatgaatggttcagcgcgtatgcgatggcgggtgtggcttaca

SEQ ID NO: 802189 - DNA, 75 bp, synthetic construct
  source 1..75: mol_type = other DNA
tgggttatgcgtacaccctgaaaccggaagaagcgattaagtatttcgaaagcaagggatacgttatcggcttcc

SEQ ID NO: 802190 - DNA, 75 bp, synthetic construct
  source 1..75: mol_type = other DNA
cttccccgcgccagcatggagcaacgaaaaagtgaactgcttgagcagcgggcagagccagttccttcccgcagt

SEQ ID NO: 802191 - DNA, 75 bp, synthetic construct
  source 1..75: mol_type = other DNA
atccggccagctatccggaagactgggatgtcctgctgacggatgtttttcataaaagctggccgctggcctccg

SEQ ID NO: 802192 - DNA, 75 bp, synthetic construct
  source 1..75: mol_type = other DNA
atgccgacagctgacgatgttgacctgggttatgcgtacaccctgaaaccggaagaagcgatcaagtatttcgaa

SEQ ID NO: 802193 - DNA, 75 bp, synthetic construct
  source 1..75: mol_type = other DNA
agcagatggcgaacgtggctgaccggccttattttgagcgcgtggcggtgatggaccttcacacccgcccgaaac

SEQ ID NO: 802194 - DNA, 75 bp, synthetic construct
  source 1..75: mol_type = other DNA
cactgctggaatcaaaaggctggctgggtaaaaaactgattgtggacgaggacaccggcgaactgcatggcagac

SEQ ID NO: 802195 - DNA, 75 bp, synthetic construct
  source 1..75: mol_type = other DNA
cgaacggcgacaagctgggtagcgtacccaaaatgggcgctgatgaaacccgcgccgctatcgacgccgccaacc

SEQ ID NO: 802196 - DNA, 75 bp, synthetic construct
  source 1..75: mol_type = other DNA
gagataataatttaaacaggggaaaagatacagaaagatgtattgcccttattgattatgagaactgcagtaatc

SEQ ID NO: 802197 - DNA, 75 bp, synthetic construct
  source 1..75: mol_type = other DNA
aacataacctgctgattgccagcatcgacaccttaaagcgtccagcaagaatcaagaaaatactcgaagcccccc

SEQ ID NO: 802198 - DNA, 75 bp, synthetic construct
  source 1..75: mol_type = other DNA
ggacactgaatacgtttttgctgaatgaagagactgcggcggcgtatccgaaggcgctggtcgaactggaggccg

SEQ ID NO: 802199 - DNA, 75 bp, synthetic construct
  source 1..75: mol_type = other DNA
cgacatatactgatacttcctggaatgaatctggcgagataagtgatatttctgcgttacattactcgggatatg

SEQ ID NO: 802200 - DNA, 75 bp, synthetic construct
  source 1..75: mol_type = other DNA
attcgtgtaatgccaacacaggttgctatagatagttttaaaagtttaggtataaacccatcaccaatggcttat

SEQ ID NO: 802201 - DNA, 75 bp, synthetic construct
  source 1..75: mol_type = other DNA
tgatgaactgattcgtcggagggtgataaaagttaaagaaagcaaaattacctggtcatctttgagtgatcggaa

SEQ ID NO: 802202 - DNA, 75 bp, synthetic construct
  source 1..75: mol_type = other DNA
caaacctgcgtctgcgccaaccgtttatacgtgcaggacggcgtgtatgaccgctttgccgaaaaattacagcag

SEQ ID NO: 802203 - DNA, 75 bp, synthetic construct
  source 1..75: mol_type = other DNA
tcaccggttcggcgggcgcggtcggtaacgaactgaccagcaacccgctggtgcgcaaactgtcgtttaccggct

SEQ ID NO: 802204 - DNA, 75 bp, synthetic construct
  source 1..75: mol_type = other DNA
agtacggcatcgtcggcatcaataccgggattatttccaatgaagtggccccgttcggcggcatcaaagcctcgg

SEQ ID NO: 802205 - DNA, 75 bp, synthetic construct
  source 1..75: mol_type = other DNA
cccgtgatttaagccgcgtcttccgcgtgggcgaggcgctggaatacggcatcgtcggcatcaataccgggatta

SEQ ID NO: 802206 - DNA, 75 bp, synthetic construct
  source 1..75: mol_type = other DNA
cgtcggcatcaataccggcattatttccaatgaagtggccccgttcggcggcattaaagcctcgggtctgggtcg

SEQ ID NO: 802207 - DNA, 75 bp, synthetic construct
  source 1..75: mol_type = other DNA
tggagcatcaggacgatttagcgcgcctgatgaccctcgaacagggcaaaccactggctgaagcgaaaggcgaaa

SEQ ID NO: 802208 - DNA, 75 bp, synthetic construct
  source 1..75: mol_type = other DNA
ggatggaggggccggcagcggcgtttcagacctgggaacaactgatttttaagctgctggcggcagaagaagagt

SEQ ID NO: 802209 - DNA, 75 bp, synthetic construct
  source 1..75: mol_type = other DNA
ttcccggaagatatcgacggggaaggggacggattttcgcttgcttcaaaacgtaccaccacctttatgtcggcg

SEQ ID NO: 802210 - DNA, 75 bp, synthetic construct
  source 1..75: mol_type = other DNA
cgcggcgtctggttgcgtgaaggtgagcagattgacagagaagggaatgttagcggaacgccacgtcattcaagg

SEQ ID NO: 802211 - DNA, 75 bp, synthetic construct
  source 1..75: mol_type = other DNA
ctggagaaaacgtatccgctccagtccgatccggcccgcagaatgcctgtactggcaatggcggtggacagtggt

SEQ ID NO: 802212 - DNA, 75 bp, synthetic construct
  source 1..75: mol_type = other DNA
tggcgtcggcggtgggttatctggcaacggcgcaggcactgttagcgaggcttgaaacctcggttgccatctggt

SEQ ID NO: 802213 - DNA, 75 bp, synthetic construct
  source 1..75: mol_type = other DNA
ggatggagggtccggctgccgcgtttcagacctgggaacaactgatttttaagctgctggcggcagaggaagagt

SEQ ID NO: 802214 - DNA, 75 bp, synthetic construct
  source 1..75: mol_type = other DNA
gagccagtggcgatgtcgcgctgtggctggttcagacggatgcgtttaaggaccgtgtaaataatgccctgtggc

SEQ ID NO: 802215 - DNA, 75 bp, synthetic construct
  source 1..75: mol_type = other DNA
tcataacggagacagtgagaaaaacggcgatgcaaatcacctggagagggatgtatcagaggttactgaaggttg

SEQ ID NO: 802216 - DNA, 75 bp, synthetic construct
  source 1..75: mol_type = other DNA
gatgagtggagatgagttcatggaaaggttctcctggcatgtggcggataaggggttccgtatggtgaggtacta

SEQ ID NO: 802217 - DNA, 75 bp, synthetic construct
  source 1..75: mol_type = other DNA
tgccgatgagtcgtctggagcattatgccggtcaggatgaaatcggtctgcgttacaacagtcaccgaacaaaac

SEQ ID NO: 802218 - DNA, 75 bp, synthetic construct
  source 1..75: mol_type = other DNA
tctgctgagtctggtccccgactgcccgtggcagcatattgtgttcacgcttccctgccagtactggtccctggt

SEQ ID NO: 802219 - DNA, 75 bp, synthetic construct
  source 1..75: mol_type = other DNA
agccgcattgcagcggatgtgatactggaaatctgccatcaggcagatgtggagccggggatattcacggtgatc

SEQ ID NO: 802220 - DNA, 75 bp, synthetic construct
  source 1..75: mol_type = other DNA
gatgacgaagggtatccggaaatcgcccgctgcacggagcgggaatttgcgaccattcttgccggtatcagcgcc

SEQ ID NO: 802221 - DNA, 75 bp, synthetic construct
  source 1..75: mol_type = other DNA
aaggggcaattgaagtcgatgaaagcgaagtcgatctcgatgccatcagtgcgcaatccttgcggctggtgcgct

SEQ ID NO: 802222 - DNA, 75 bp, synthetic construct
  source 1..75: mol_type = other DNA
ttaaacaacatgcgtgacgagccgcgcagcgtgtcgccgggaatgtctaccgacgcgctgaatcaggaaattctc

SEQ ID NO: 802223 - DNA, 75 bp, synthetic construct
  source 1..75: mol_type = other DNA
ttcgcattggcgatacggtgacaattcgcgatctcaccggtagcgtgacgaaaattaacacccgcgccaccacca

SEQ ID NO: 802224 - DNA, 75 bp, synthetic construct
  source 1..75: mol_type = other DNA
ttgcaatctgactctgcacgactgaaggcgctcgttgatgaactggaattggcgcagctgtctgccaataaccgc

SEQ ID NO: 802225 - DNA, 75 bp, synthetic construct
  source 1..75: mol_type = other DNA
ctgagacgaaggcgcgtgagcattccagaacgcgtctttccaggacgtttcgccacagtccggaggtcagtaagc

SEQ ID NO: 802226 - DNA, 75 bp, synthetic construct
  source 1..75: mol_type = other DNA
aaacaaatctcacaagaactggagcaggcaaaagcggcgaagcccgcgcagccagaagtcgtagaggcgctccag

SEQ ID NO: 802227 - DNA, 75 bp, synthetic construct
  source 1..75: mol_type = other DNA
aaagccgtcaggcccagcaagagcaggagcgcgcccgcgagattgccgattcgctgaatcaactgccgcaacagc

SEQ ID NO: 802228 - DNA, 75 bp, synthetic construct
  source 1..75: mol_type = other DNA
ttcccgcccttccagatgcgtctggaaagcctcaacggtaagcaaacggggagaacattaacttctgcgggcaaa

SEQ ID NO: 802229 - DNA, 75 bp, synthetic construct
  source 1..75: mol_type = other DNA
aacaggggattcagattttcgagctgcgtatttacgccgctgagatgggtcaccgtatgccgctacgccatgaga

SEQ ID NO: 802230 - DNA, 75 bp, synthetic construct
  source 1..75: mol_type = other DNA
tctctgactcagtcacacgcgtggtgttgacgattccggctcctgccgatgccaacagtgaagaagtgacggaga

SEQ ID NO: 802231 - DNA, 75 bp, synthetic construct
  source 1..75: mol_type = other DNA
tgggaacgcttactggcaataccccgctcaatcaggcacaaaatttcgcgttgcagtctgactccgcacgcctga

SEQ ID NO: 802232 - DNA, 75 bp, synthetic construct
  source 1..75: mol_type = other DNA
tcgcgatcttactggcagtgtgacgaaaattaacacccgcgccaccactatcagcgactgggatcgcaaagagat

SEQ ID NO: 802233 - DNA, 75 bp, synthetic construct
  source 1..75: mol_type = other DNA
gcgccgctatttcacccgttttcttgaacgttcggcggctaaagtcggcaaagtcactcaggatcatttctggct

SEQ ID NO: 802234 - DNA, 75 bp, synthetic construct
  source 1..75: mol_type = other DNA
gccgctcggctatctcattaacgtgacggagtggtgggaaaacagtgacccgccaggcaccttccggcttgatat

SEQ ID NO: 802235 - DNA, 75 bp, synthetic construct
  source 1..75: mol_type = other DNA
accaacctgctgccaaacgtggtgatggcgtttgtcatcattcaggcgctgaaaattaccggcctgctcgactgg

SEQ ID NO: 802236 - DNA, 75 bp, synthetic construct
  source 1..75: mol_type = other DNA
atccaattgtttctatttttcaggcgacaggaaaaacaagaaatgaattatatgttaatattacttcggcggtct

SEQ ID NO: 802237 - DNA, 75 bp, synthetic construct
  source 1..75: mol_type = other DNA
ctgaacgatattattccgctggcagagtcatttattaaaaaatactccacggtgctggtgaaaaatatcaccctt

SEQ ID NO: 802238 - DNA, 75 bp, synthetic construct
  source 1..75: mol_type = other DNA
agtcagaacttgttttggggtggctggatcagtctggtgttacagaacgtctgtcccgtcagggagtgacggagg

SEQ ID NO: 802239 - DNA, 75 bp, synthetic construct
  source 1..75: mol_type = other DNA
ttcgctttaccaccagccatccgatcgaattcaccgacgatatcatcgaagtgtaccgcgacacgccggagctgg

SEQ ID NO: 802240 - DNA, 75 bp, synthetic construct
  source 1..75: mol_type = other DNA
agatgcaggacttcttcaccagtctgcaaacgctggtcagcaacgcggaagatccagcagcacgtcaggcgctga

SEQ ID NO: 802241 - DNA, 75 bp, synthetic construct
  source 1..75: mol_type = other DNA
aaatctgcaacgttttcagcagtattacctggcgaatgcgcaggttctgcagacggcaaacgcgatttttgatgc

SEQ ID NO: 802242 - DNA, 75 bp, synthetic construct
  source 1..75: mol_type = other DNA
caatctgcaacgttttcagcagtattacctggccaatgcacaggttctgcagacggcgaatgctatttttgatgc

SEQ ID NO: 802243 - DNA, 75 bp, synthetic construct
  source 1..75: mol_type = other DNA
ttggtaaagcagaaggactggtgaatcagtttaaaaccacagatcagtatctgcgtgaccaggacaaacaggtta

SEQ ID NO: 802244 - DNA, 75 bp, synthetic construct
  source 1..75: mol_type = other DNA
caacttgcaacgttttcagcagtactacctggcgaatgcgcaggttctgcagacggcgaacgccattttcgatgc

SEQ ID NO: 802245 - DNA, 75 bp, synthetic construct
  source 1..75: mol_type = other DNA
ctggcgctggcatttgccgaggctttcaatacccaacataacaagggatttgatgccaatggtaaggaagggcag

SEQ ID NO: 802246 - DNA, 75 bp, synthetic construct
  source 1..75: mol_type = other DNA
ccggtgcgggcaaagagtgcgtggcgaaatatattcactccgtagcctttggtgaaaacgcgccctatatcggcg

SEQ ID NO: 802247 - DNA, 75 bp, synthetic construct
  source 1..75: mol_type = other DNA
tagccgaagctacgcgtaaaaagggtctggcggaagcagaagcgcaacgtgcgctgaacgacgctatcaacgtac

SEQ ID NO: 802248 - DNA, 75 bp, synthetic construct
  source 1..75: mol_type = other DNA
ccagaatatgctgaaactggttatgggtatattgagagaggtgaactatctgtaccgcttcaagggcatgaaaat

SEQ ID NO: 802249 - DNA, 75 bp, synthetic construct
  source 1..75: mol_type = other DNA
cacgactcgtatgctggcctccgctatatttcgcaaaggttaccaatggccgtttcacgcggaacgaatgctgga

SEQ ID NO: 802250 - DNA, 75 bp, synthetic construct
  source 1..75: mol_type = other DNA
tatcaagattattcaggtcgatggtctgaatcgtggcagcgctgcgggtgatgcaaacacgggtaatgtgggggg

SEQ ID NO: 802251 - DNA, 75 bp, synthetic construct
  source 1..75: mol_type = other DNA
gaagttagttcaggagattatttaggtgaggatgatattgttcgtcaaaaagaacgttacaaaatagatgactaa

SEQ ID NO: 802252 - DNA, 75 bp, synthetic construct
  source 1..75: mol_type = other DNA
ctgattgactccttgctcaatgaaattggtgtttcaggcggctcactgacggcattgacctcacccttaacctca

SEQ ID NO: 802253 - DNA, 75 bp, synthetic construct
  source 1..75: mol_type = other DNA
cccgccgggcgctgctcaattaccgctggcccggcaacgtgcgccagctggagaacgccattcagcggggaatga

SEQ ID NO: 802254 - DNA, 75 bp, synthetic construct
  source 1..75: mol_type = other DNA
ttattccgctggcagagtcatttataaaaaagtactccacggtgctggtgaaaaatatcaccctttcagaatcta

SEQ ID NO: 802255 - DNA, 75 bp, synthetic construct
  source 1..75: mol_type = other DNA
ggaaaacatgctggaagctacattatttggctacgacaaaggcgcatttaccggcgcaattgccagtgtgccagg

SEQ ID NO: 802256 - DNA, 75 bp, synthetic construct
  source 1..75: mol_type = other DNA
tggactgaatcatcaaaggaaggatgggtacgtgaagatgcaccctggctagactttgatttgtgcagccattta

SEQ ID NO: 802257 - DNA, 75 bp, synthetic construct
  source 1..75: mol_type = other DNA
ctggcccggtaacgtgcgccaactggaaaacgccattcagcggggaatgattttaaatcgcgacggcgtaattta

SEQ ID NO: 802258 - DNA, 75 bp, synthetic construct
  source 1..75: mol_type = other DNA
gattgcctgcaccaataaaaaccttgaacaggaagtcgccgccgggcgttttcgtgaagatctctattatcgtct

SEQ ID NO: 802259 - DNA, 75 bp, synthetic construct
  source 1..75: mol_type = other DNA
cgtatgtcgatgcgagcgcgggagatatcgaaataccggataaactcctgacgagcgggtcgctgggcggcattc

SEQ ID NO: 802260 - DNA, 75 bp, synthetic construct
  source 1..75: mol_type = other DNA
atcggacggccctatctgccccgttcagccacggaacagcgtaaaagtgagctgcttgaacagcgtgcggagccg

SEQ ID NO: 802261 - DNA, 75 bp, synthetic construct
  source 1..75: mol_type = other DNA
ttgaccctataaatacattatctgcccgtgaatatgatgccgtagtgtttgttggtcctgcccgaacagggaaaa

SEQ ID NO: 802262 - DNA, 75 bp, synthetic construct
  source 1..75: mol_type = other DNA
cgaaattccaggattgcgtcattctggatggaggggccggctgcggcgtttcagacctgggaacaactgattttt

SEQ ID NO: 802263 - DNA, 75 bp, synthetic construct
  source 1..75: mol_type = other DNA
ttacgcgcgtggaaaagctgattcgaagtataacgtagataaagacagctggtcaggtggttactggcgtgatga

SEQ ID NO: 802264 - DNA, 75 bp, synthetic construct
  source 1..75: mol_type = other DNA
ctccgatggtcggtggtggtcgggaagacacacagaacaggctcagtgtgaatactctgatggtgaatacgtatt

SEQ ID NO: 802265 - DNA, 75 bp, synthetic construct
  source 1..75: mol_type = other DNA
ccaaatggcgttgtggtggcgcacatgaggcaccgccaacaacggggatcctgtcactgtataaccggggagacc

SEQ ID NO: 802266 - DNA, 75 bp, synthetic construct
  source 1..75: mol_type = other DNA
aaaagggcgacccgggcggcccgccagggccgaagggtgacacaggcgctaaaggagatgccggacctgctggcc

SEQ ID NO: 802267 - DNA, 75 bp, synthetic construct
  source 1..75: mol_type = other DNA
ttcagagcaacgtttcgttgatggtgaaggggcatgggcggataaatacaaaggcagtgacaaaagtgatacggt

SEQ ID NO: 802268 - DNA, 75 bp, synthetic construct
  source 1..75: mol_type = other DNA
atgaaaaaggttattgctgtttcagcgcttgctatggcgggcgtattttcagcccaggctctggctgatgagaac

SEQ ID NO: 802269 - DNA, 75 bp, synthetic construct
  source 1..75: mol_type = other DNA
tttccccggcgatctgtgccggatggtgtgcgttttattgaggcaacggttgacgtacagggcggtaaaaatcgc

SEQ ID NO: 802270 - DNA, 75 bp, synthetic construct
  source 1..75: mol_type = other DNA
ttgggggaggatgtttataagtataagggcggcgataagaacgatactgtatttggtgaaggccttgcggtgggc

SEQ ID NO: 802271 - DNA, 75 bp, synthetic construct
  source 1..75: mol_type = other DNA
agggcgaccctggcggcccgccggggccgaaaggtgacacaggcgctaaaggcgataccggacctgctggccctg

SEQ ID NO: 802272 - DNA, 75 bp, synthetic construct
  source 1..75: mol_type = other DNA
tcattgccgccgtgtgtgcatttgctgcaaatgcgagtgctgaggaaagtaaaaacgggttttatctaactggta

SEQ ID NO: 802273 - DNA, 75 bp, synthetic construct
  source 1..75: mol_type = other DNA
gcacccgtctcgagtgcggacatacctgggtgatgaatctgacctactcgcacacactggtgcccagcgggctgg

SEQ ID NO: 802274 - DNA, 75 bp, synthetic construct
  source 1..75: mol_type = other DNA
cggagtgcggatctaaggctgtgattcgcaaaactaaccgaaagcaccgccagattgcagatatttactgcgcat

SEQ ID NO: 802275 - DNA, 75 bp, synthetic construct
  source 1..75: mol_type = other DNA
atgcgagttctgaaaatcgaatgcccggaatgcggctcaaaggctgttattcgtaaaacaaaccggaagcaccgg

SEQ ID NO: 802276 - DNA, 75 bp, synthetic construct
  source 1..75: mol_type = other DNA
tcaacacccaacacaaagccggatttgatgccaacggcgatgcgggtgaagatttctttgctatcggtaagcccg

SEQ ID NO: 802277 - DNA, 75 bp, synthetic construct
  source 1..75: mol_type = other DNA
ctcgccgcgatggttcagtccggtgtcggaatagccattttgccggaacccatttgccagcgattagataaaaac

SEQ ID NO: 802278 - DNA, 75 bp, synthetic construct
  source 1..75: mol_type = other DNA
ataacggtgtgttaaagctgttgattgaacggatgcgcccagaagaaaaacagatggcgctggagctgttgcagg

SEQ ID NO: 802279 - DNA, 75 bp, synthetic construct
  source 1..75: mol_type = other DNA
gccataacgagtttcatccggataataattttaccattgatacgattaattcatccgtaatgcgtattcaaagaa

SEQ ID NO: 802280 - DNA, 75 bp, synthetic construct
  source 1..75: mol_type = other DNA
catccggataataattttaccattgatacgattaattcatccgtaatgcgtattcaaagaagtaacgctgatggt

SEQ ID NO: 802281 - DNA, 75 bp, synthetic construct
  source 1..75: mol_type = other DNA
acctgacactaccttccagcaacaccacctggtttaacttcctcgcctctcacgatggcatcgggctaaacccgc

SEQ ID NO: 802282 - DNA, 75 bp, synthetic construct
  source 1..75: mol_type = other DNA
acgggcagggaagggttaaagagctgattgatgcaattccaccagaggggcgggaaaaggctttagaattgctgc

SEQ ID NO: 802283 - DNA, 75 bp, synthetic construct
  source 1..75: mol_type = other DNA
ccaccatcaaagagatgaaagaagcgggtgataacaccatcgtcttcaccaacttcgttgacttcgactcttcct

SEQ ID NO: 802284 - DNA, 75 bp, synthetic construct
  source 1..75: mol_type = other DNA
atggtgtaccagttctcgctgccgccactggtgctgcatgcggtgcaaaaacagaacgttgaggcactttgtgcg

SEQ ID NO: 802285 - DNA, 75 bp, synthetic construct
  source 1..75: mol_type = other DNA
cagcggctgtgctacgtcaacgccatgttccacttcttgtcgggcattccacgactgatcttcctgactgcgccg

SEQ ID NO: 802286 - DNA, 75 bp, synthetic construct
  source 1..75: mol_type = other DNA
ttacttgatcaacatggatatatacatcaagtatcgaagcgtaacaacctttattcgttaacgcctaaaggaaat

SEQ ID NO: 802287 - DNA, 75 bp, synthetic construct
  source 1..75: mol_type = other DNA
tccgtcaggaaaaagttgttttttctttatcagaacagagaagaaggccgatgtcatgtacacgcatgaacagat

SEQ ID NO: 802288 - DNA, 75 bp, synthetic construct
  source 1..75: mol_type = other DNA
ccggggcatgaccgtcgtactgtggacgaaaaatttgagcagaagaaaagcgggctgacggttgccctttccggc

SEQ ID NO: 802289 - DNA, 75 bp, synthetic construct
  source 1..75: mol_type = other DNA
ctggcgagcaggaaggcaggcactggtgaatagctttacctcgaagaaagcttattgtgcccgttttggcatcga

SEQ ID NO: 802290 - DNA, 75 bp, synthetic construct
  source 1..75: mol_type = other DNA
cttcctgttattcatacagaagtggtgtaagtataaaagataatgcaattaatcatgtaagaaaaaagtttgtcg

SEQ ID NO: 802291 - DNA, 75 bp, synthetic construct
  source 1..75: mol_type = other DNA
tttcgaatttgacgaagaaatgagtttccaagccttaactcttgatagtatatatactcgttactctgatgatat

SEQ ID NO: 802292 - DNA, 75 bp, synthetic construct
  source 1..75: mol_type = other DNA
tgccagtggcgatgtggctggcgcggctgctggagctggtgccgggaagaacgttgttgagaataacctgctggg

SEQ ID NO: 802293 - DNA, 75 bp, synthetic construct
  source 1..75: mol_type = other DNA
gaagtgatcgcgtcagccattgcgaaaagcctctacccgggcgtagatccgtcgaaactgacagaagatcagaag

SEQ ID NO: 802294 - DNA, 75 bp, synthetic construct
  source 1..75: mol_type = other DNA
cagatggcagcttgtggataagcccggggtttacgcctcagtgtctgatcaataagggaactattccggcgactg

SEQ ID NO: 802295 - DNA, 75 bp, synthetic construct
  source 1..75: mol_type = other DNA
tgaacaggaacgtcagcaaatcagcatgttggccaccattgcctcaggtattgcgggcgggcttgcaggcaacag

SEQ ID NO: 802296 - DNA, 75 bp, synthetic construct
  source 1..75: mol_type = other DNA
caacgcaggacgggatatcaccgctgttgcgtcatccgttaccgcaaccggcaatatcagcgtgaatgccggtcg

SEQ ID NO: 802297 - DNA, 75 bp, synthetic construct
  source 1..75: mol_type = other DNA
ggtggtcgtaccgataacctgagtgaacaggaacgtcagcaaatcagcatgctggccaccattgcctcaggtatt

SEQ ID NO: 802298 - DNA, 75 bp, synthetic construct
  source 1..75: mol_type = other DNA
gggaagaacatcgcactaaagaatcagagacaaaggccagaaaggatttcgcggatttgctgggagaattattga

SEQ ID NO: 802299 - DNA, 75 bp, synthetic construct
  source 1..75: mol_type = other DNA
caaccggtttcgatgtctatttaaaagtgggggaaaatccactgccgcatatccatatcggacttaatctttttg

SEQ ID NO: 802300 - DNA, 75 bp, synthetic construct
  source 1..75: mol_type = other DNA
gctatgagcttggattggttgatcccgaactggatgatttcctgagtacacttgcgcaattacatcttacgtttg

SEQ ID NO: 802301 - DNA, 75 bp, synthetic construct
  source 1..75: mol_type = other DNA
gctaactttaaactactgtgcatgcccggtgttcagaatgttttaataacacagctatttaaagcccgattaata

SEQ ID NO: 802302 - DNA, 75 bp, synthetic construct
  source 1..75: mol_type = other DNA
gaattgttctttttttgattttgaacactaccctaaatttcagtttaacgaaaataaaaattattcaccatttat

SEQ ID NO: 802303 - DNA, 75 bp, synthetic construct
  source 1..75: mol_type = other DNA
cgtaatgatgatagtaatttgtttcagtttatttttcgacatgatgagactgttaaccctgagctgaaagaagtt

SEQ ID NO: 802304 - DNA, 75 bp, synthetic construct
  source 1..75: mol_type = other DNA
caaatccagcagcgaaatcaagttttatgctggtgggcagcgagtttatcgcgctaaagcggacgacgacatgat

SEQ ID NO: 802305 - DNA, 75 bp, synthetic construct
  source 1..75: mol_type = other DNA
gcgttttgccgcctgttattggcataacttctgctggaatggcgcggatatgtttggcgccggctcgtttgagcg

SEQ ID NO: 802306 - DNA, 75 bp, synthetic construct
  source 1..75: mol_type = other DNA
tcgacaaactgtggattgatattggtgccaaagacaaagacgacgctatacggatgggcattcaggtcggtacgc

SEQ ID NO: 802307 - DNA, 75 bp, synthetic construct
  source 1..75: mol_type = other DNA
gatttttgccctgccaccagaggctaccagtggtgtctttcgccagatcaggaaagaacatcgcaccaaagaatc

SEQ ID NO: 802308 - DNA, 75 bp, synthetic construct
  source 1..75: mol_type = other DNA
tatggcttcctgaagcagtttggtctggaaaatgagatcaaggtgaacattgaagccaaccacgccaccctagcg

SEQ ID NO: 802309 - DNA, 75 bp, synthetic construct
  source 1..75: mol_type = other DNA
acgtggcgtttgaatttttctacaagctcaacgtgccgtattactgcttccacgatgtcgacgtctcgccagaag

SEQ ID NO: 802310 - DNA, 75 bp, synthetic construct
  source 1..75: mol_type = other DNA
aaataccctggtgatgtacgagatcctcaaagccgggggattcaccaccggcggcctgaactttgacgccaaagt

SEQ ID NO: 802311 - DNA, 75 bp, synthetic construct
  source 1..75: mol_type = other DNA
tattgataaacttctcaagtttcctggagttaaatctgcctatccagtgccgattgtaattccagaacaaactga

SEQ ID NO: 802312 - DNA, 75 bp, synthetic construct
  source 1..75: mol_type = other DNA
gacacctttgatccgacgcatgatctggatgcgtactgcgattttgcttccggcaccatcaatatcgcgattatg

SEQ ID NO: 802313 - DNA, 75 bp, synthetic construct
  source 1..75: mol_type = other DNA
gctgacggtaggggatcccgcccgtgaatttaccatgacgcagtccgcgccgctgatggtgttgccggacccgga

SEQ ID NO: 802314 - DNA, 75 bp, synthetic construct
  source 1..75: mol_type = other DNA
aggcggtgaatgccgtgctgtatggcaaatacaccatggaaggggatcagtttgatactgtcgaggtggattttg

SEQ ID NO: 802315 - DNA, 75 bp, synthetic construct
  source 1..75: mol_type = other DNA
ccaggcaatcagaacacggtcggctttcgtacctataaatccgtttttgacttaggtccggcggcagagaaatac

SEQ ID NO: 802316 - DNA, 75 bp, synthetic construct
  source 1..75: mol_type = other DNA
ccgcgaaaaactggatacccgtcgcggctcaaattcacaactcgaaacggcagtgaaagatctgggcgcagtggt

SEQ ID NO: 802317 - DNA, 75 bp, synthetic construct
  source 1..75: mol_type = other DNA
cgaaaaccacatcgtcgtttgattacggcactaaatccacgaataacactggtgcgcatacccatagtgttagcg

SEQ ID NO: 802318 - DNA, 75 bp, synthetic construct
  source 1..75: mol_type = other DNA
acgcgaatggtcaaagcagaatgctgacacctttgatccgacgcatgatctggatgcgtactgcgattttgcttc

SEQ ID NO: 802319 - DNA, 75 bp, synthetic construct
  source 1..75: mol_type = other DNA
tggcgtctgctgaatggctttaaattgttccgcgaaaaactggatacccgtcgcggctctaattcgcaactcgaa

SEQ ID NO: 802320 - DNA, 75 bp, synthetic construct
  source 1..75: mol_type = other DNA
aaaataacattacgcaggcaggagggacggagtggagcgctcaggaccgcgatacctttgatccgacgcatgatc

SEQ ID NO: 802321 - DNA, 75 bp, synthetic construct
  source 1..75: mol_type = other DNA
caaaattaccggaaaaacgccggtggcggcctatgtctccccggttgttgaaggaaaggtgttgcgtcaccgtgg

SEQ ID NO: 802322 - DNA, 75 bp, synthetic construct
  source 1..75: mol_type = other DNA
acagtaaaaatgagtggcttgaaccgccccgggtttcctggagagtattttatctgtgaactcaggctgccagat

SEQ ID NO: 802323 - DNA, 75 bp, synthetic construct
  source 1..75: mol_type = other DNA
aaatgacaatcatccatggattcctgatacaaaatctaaaatccatgatgtttgtgccttagatgaaaatggatc

SEQ ID NO: 802324 - DNA, 75 bp, synthetic construct
  source 1..75: mol_type = other DNA
gttcaataaaaataggccctgctagtgttgcctggctcgagtctgagattgacgagtggatcaacaaaaagttat

SEQ ID NO: 802325 - DNA, 75 bp, synthetic construct
  source 1..75: mol_type = other DNA
ggataagtatatatttgagagtgcttttaataacgctgtgaaaaaaaacaatgaaatagcaggggaatattatgt

SEQ ID NO: 802326 - DNA, 75 bp, synthetic construct
  source 1..75: mol_type = other DNA
ccgctctttagatggaaacaactccgtccactcagatggaattagagcacttgacgcgactaactggatcaaaaa

SEQ ID NO: 802327 - DNA, 75 bp, synthetic construct
  source 1..75: mol_type = other DNA
tggcaatcttgaaattgctgggcatgggaaaataaatgaaatgctcgttgctgcacactctgcgagttatagaag

SEQ ID NO: 802328 - DNA, 75 bp, synthetic construct
  source 1..75: mol_type = other DNA
aaattatcctattccacaatgtcttattcaggatggaaaattcaagggcgaaataattatcaccgcctcctataa

SEQ ID NO: 802329 - DNA, 75 bp, synthetic construct
  source 1..75: mol_type = other DNA
atcattctgattgctatttcctgccgataagagataaccagcaagaccttgtcggcgttgagttaattacccatt

SEQ ID NO: 802330 - DNA, 75 bp, synthetic construct
  source 1..75: mol_type = other DNA
ctatattctggttaacttctataccggagtcggaagttgccggaccctgcagatgaaggcgcattacagaaatcg

SEQ ID NO: 802331 - DNA, 75 bp, synthetic construct
  source 1..75: mol_type = other DNA
atgaagcgcacgctacagcagctcctgggcggcgcaccgtttatcatcagcggtgcctgcgggatgttccgtact

SEQ ID NO: 802332 - DNA, 75 bp, synthetic construct
  source 1..75: mol_type = other DNA
gagagtgagtcccgtcgtagcggtctggcaagttattccgcgcaggatacagcgagctgccggaagagattaccg

SEQ ID NO: 802333 - DNA, 75 bp, synthetic construct
  source 1..75: mol_type = other DNA
agttggagtcattaccatgaaggtgatactttttatgttcgtcagaccacgttaggttttattctgtcgcaaagt

SEQ ID NO: 802334 - DNA, 75 bp, synthetic construct
  source 1..75: mol_type = other DNA
attcaacataaactctttgcctggcttggtaatgactccaacttattgatagtgttttatgttcagataatgccc

SEQ ID NO: 802335 - DNA, 75 bp, synthetic construct
  source 1..75: mol_type = other DNA
ccgaaagttagagatggagaatggatttctttaggaataagtagatcaacgtggtacaggaaattttacaaaaat

SEQ ID NO: 802336 - DNA, 75 bp, synthetic construct
  source 1..75: mol_type = other DNA
ctagaaaggatattagcacatgcagcgtgcaaaacaacagccccgccataaggctgggagccttggataatcagg

SEQ ID NO: 802337 - DNA, 75 bp, synthetic construct
  source 1..75: mol_type = other DNA
gcccgctgaatagctggaattttctttgcttctcccccttccataattttatgtccgggaaagcaaataataacc

SEQ ID NO: 802338 - DNA, 75 bp, synthetic construct
  source 1..75: mol_type = other DNA
ggtagtccagaacacgctgatggtgcgcatcacccagacctcctctaccattctcatcgccatgttgctgaactc

SEQ ID NO: 802339 - DNA, 75 bp, synthetic construct
  source 1..75: mol_type = other DNA
agatcatcagtattctccgcgaggctgaagccggggtatctgcctgtgaactctgccgcaagcacgctatttccg

SEQ ID NO: 802340 - DNA, 75 bp, synthetic construct
  source 1..75: mol_type = other DNA
caatctgcagttctccgcacctttagaggagaatgaagtcatggggatagcaaaaagcgtagcaaaatggacaaa

SEQ ID NO: 802341 - DNA, 75 bp, synthetic construct
  source 1..75: mol_type = other DNA
cattaaaaacctgttccgcatttgtgtggaaaccaccaataacgggcctatcagcgcaacgatggctaccgaact

SEQ ID NO: 802342 - DNA, 75 bp, synthetic construct
  source 1..75: mol_type = other DNA
aacgagcctgaaccttcgcaggctcacgcttattcaaaagcgctggagttcctttatttcctcgcaaatatggaa

SEQ ID NO: 802343 - DNA, 75 bp, synthetic construct
  source 1..75: mol_type = other DNA
cagatcgggaactggtcacctggcataaagaccttaatacgctggtcaagagcttcggaacagaccatgtagagc

SEQ ID NO: 802344 - DNA, 75 bp, synthetic construct
  source 1..75: mol_type = other DNA
ctcaaacagaaaggcacaccgcgtaatattgcgaccactaaaaatattatgcgtgtctgtgctgaaattacaaat

SEQ ID NO: 802345 - DNA, 75 bp, synthetic construct
  source 1..75: mol_type = other DNA
acgccgattaactcatggaatttcttccatttctccccgtaccataattttatgcgcggcaaaccggacaataat

SEQ ID NO: 802346 - DNA, 75 bp, synthetic construct
  source 1..75: mol_type = other DNA
agacgcagaagttcctggctaagtttgagcgaccgtcagctgacgagttggctcaaatgcaggctgaagccttca

SEQ ID NO: 802347 - DNA, 75 bp, synthetic construct
  source 1..75: mol_type = other DNA
ccgcagccatggcgtaccactacgggcgttgatcggcccaatttgtggcgcaattttacttgtggttggcgcctg

SEQ ID NO: 802348 - DNA, 75 bp, synthetic construct
  source 1..75: mol_type = other DNA
aatggtacacacgtctcgctgatggctgcggctattctggcagtgattgctgcctgtgtcagtggtttacgtatc

SEQ ID NO: 802349 - DNA, 75 bp, synthetic construct
  source 1..75: mol_type = other DNA
gattgctgggtgctctagggttgttcatcatggctgcggggcttttttccctggttctgctgcccgcgtcacctg

SEQ ID NO: 802350 - DNA, 75 bp, synthetic construct
  source 1..75: mol_type = other DNA
gggcataaactcgtttattgttgccgtctcttctgctgccgggccgacaattgctgcagcaatcctctccatcgc

SEQ ID NO: 802351 - DNA, 75 bp, synthetic construct
  source 1..75: mol_type = other DNA
atactcaagttactgatattactcgacgtgatatcaaaaacctgcttgaggtagttgaaggtttaccccgtaaga

SEQ ID NO: 802352 - DNA, 75 bp, synthetic construct
  source 1..75: mol_type = other DNA
tactcttgttcagcaaaccgttgggcatgaacattcaggtcataaggaaactcagacttatacgggcagaatgcg

SEQ ID NO: 802353 - DNA, 75 bp, synthetic construct
  source 1..75: mol_type = other DNA
aggctggtattcggcaggttcctatttcgcttcgcctaatcgatatgggatttttgaattacctagagggcaaac

SEQ ID NO: 802354 - DNA, 75 bp, synthetic construct
  source 1..75: mol_type = other DNA
acgaaactggttcaggatctgcaaaatgcaatgcgcaaagccgttgttggtccggtggtgattgacggggtccag

SEQ ID NO: 802355 - DNA, 75 bp, synthetic construct
  source 1..75: mol_type = other DNA
tatgaaagcggaagtcgccattgccacacggaaacaaaatctggaaacagagaaaatccaggcacaaattgcggt

SEQ ID NO: 802356 - DNA, 75 bp, synthetic construct
  source 1..75: mol_type = other DNA
ttctgatcgccgccgggattggtctggtagtgcaaaatacgctgatggtacgcatcacccaaaccacctccacga

SEQ ID NO: 802357 - DNA, 75 bp, synthetic construct
  source 1..75: mol_type = other DNA
tattatggcggcggggcttttttcgctggttctcttgcctgcttcacctgccgatatcaatatcatctggcctat

SEQ ID NO: 802358 - DNA, 75 bp, synthetic construct
  source 1..75: mol_type = other DNA
aatggtacgcacgtctcgctgatagctgcggctattctggcagtgattgctgcctgtgtcagtggtttacgtatc

SEQ ID NO: 802359 - DNA, 75 bp, synthetic construct
  source 1..75: mol_type = other DNA
atgaaagcacctgtttcaataacctcatttcgcccacaaaaatctattgctatcgtcattggcgtgcttgccgtg

SEQ ID NO: 802360 - DNA, 75 bp, synthetic construct
  source 1..75: mol_type = other DNA
ccagaaatggatccaaagatggctgtgcctgttttcaaaactaaaacctcgtatcgagctccgctgaacaaagac

SEQ ID NO: 802361 - DNA, 75 bp, synthetic construct
  source 1..75: mol_type = other DNA
ttaaggaaacgaagaaatcgggtctgatgggtactggcggtatcggcttcaccatcggcagcagtaagacaacgc

SEQ ID NO: 802362 - DNA, 75 bp, synthetic construct
  source 1..75: mol_type = other DNA
cgcagcaacgggagagctggcagccagagcaattgccggaatgttgtatcctggcgtgaagcagtcagacctcag

SEQ ID NO: 802363 - DNA, 75 bp, synthetic construct
  source 1..75: mol_type = other DNA
gcgctgagcacgtcaggcaagaatgtctgtaaaagtggcagcacactcgatatcagcgcccgcaatgccacactg

SEQ ID NO: 802364 - DNA, 75 bp, synthetic construct
  source 1..75: mol_type = other DNA
tgtcgacaggggcggattttgtaccagtggttggcgatatcaagagttttgcggaggcacaaagcgctctggatt

SEQ ID NO: 802365 - DNA, 75 bp, synthetic construct
  source 1..75: mol_type = other DNA
ctgtctgttgtcgcaaccggtaaaaacaggggcgataaccgcggagatattgtgattgcaggaagccagcttaag

SEQ ID NO: 802366 - DNA, 75 bp, synthetic construct
  source 1..75: mol_type = other DNA
tggtgtggcactgacagcagaccaggtggcggctctcgaccaaagtattctgtggtataaagccgtcacgataaa

SEQ ID NO: 802367 - DNA, 75 bp, synthetic construct
  source 1..75: mol_type = other DNA
tctggagccggatcaagggctattgccgctggcgtggaacgtgttccacggccataacctgttgcatgaatattt

SEQ ID NO: 802368 - DNA, 75 bp, synthetic construct
  source 1..75: mol_type = other DNA
cgcccgtcatgtttccattaacaccttctcgcaaatgatgctacacagcatgcagcgcggcagaattatgacctg

SEQ ID NO: 802369 - DNA, 75 bp, synthetic construct
  source 1..75: mol_type = other DNA
aaagaccagttcgtaactaccagaacactgctggattttttgcatcacctgctgacgggacctggctacttattt

SEQ ID NO: 802370 - DNA, 75 bp, synthetic construct
  source 1..75: mol_type = other DNA
aatcgtattcttaacgatattcacgccgctggccttgatgcaggtgattacggcaagtattcccgctggtgggct

SEQ ID NO: 802371 - DNA, 75 bp, synthetic construct
  source 1..75: mol_type = other DNA
tcgctaaagaggccgcagagcgtaaggaacgtaaggcagaacttgagcgtcgcttcagccgtaaaggcgctgcat

SEQ ID NO: 802372 - DNA, 75 bp, synthetic construct
  source 1..75: mol_type = other DNA
cgccgtctgcccggttccggactactggtctatgggcgtggcgtcagttgtgaactgacggtggatgaagaaggt

SEQ ID NO: 802373 - DNA, 75 bp, synthetic construct
  source 1..75: mol_type = other DNA
ctgaaggggttgtcgcgaccaacaaagtctcggaagcactccaagaagaatacggtttggatgaagttcaggcgg

SEQ ID NO: 802374 - DNA, 75 bp, synthetic construct
  source 1..75: mol_type = other DNA
agacgcctgctacggcaaaaaaagcgtcgtctacgcaatctcgtccggtgaatgctggtatgaagaaacgcccta

SEQ ID NO: 802375 - DNA, 75 bp, synthetic construct
  source 1..75: mol_type = other DNA
agactcctgctacggcaaaaaaagcgccgtctatgcaatctcgtccggtgaatactggtgcgaagaaacgcccta

SEQ ID NO: 802376 - DNA, 75 bp, synthetic construct
  source 1..75: mol_type = other DNA
ggagcggcgtggattctacccgtctcgacacaccgggaaaaatagacccaattccgcacccgtatggtgaagatt

SEQ ID NO: 802377 - DNA, 75 bp, synthetic construct
  source 1..75: mol_type = other DNA
gaactggaagagctggtgggctatgccgatcgggtgattatcatgcgcgatcgcaaacaggtggcggagatcccg

SEQ ID NO: 802378 - DNA, 75 bp, synthetic construct
  source 1..75: mol_type = other DNA
cgctcgcggtctgggatttgcatatgcagagggattagccaacgctggtgcacatgtcattctaaacgacctgaa

SEQ ID NO: 802379 - DNA, 75 bp, synthetic construct
  source 1..75: mol_type = other DNA
tttcgctggttttcgttccgttggcgcactcaggcacaccgaactgcacaacggaaaagagcaacacagtcatcg

SEQ ID NO: 802380 - DNA, 75 bp, synthetic construct
  source 1..75: mol_type = other DNA
agacgcctgctacgacaaagaaagcgtcgcctgtgcaatctcgccctgtgaatgccggtgcgaagaaacgcccta

SEQ ID NO: 802381 - DNA, 75 bp, synthetic construct
  source 1..75: mol_type = other DNA
ccggtctacagtgacatcaagagttttgcggaagctcagtctgcacttgattacctgctggctactgtggggatt

SEQ ID NO: 802382 - DNA, 75 bp, synthetic construct
  source 1..75: mol_type = other DNA
gctgttggtgatattggtggtggctttgtttctgagttaataaactacggtattaaaaattatcctactcctact

SEQ ID NO: 802383 - DNA, 75 bp, synthetic construct
  source 1..75: mol_type = other DNA
gcgtctgggtaaaccgaatctctttttcggcgttaccgcaggcaacatggattcgatgatcaaccgttacactgc

SEQ ID NO: 802384 - DNA, 75 bp, synthetic construct
  source 1..75: mol_type = other DNA
gtgcctgcgccaaccattgaagagatgcgcgaagctcgccgacagaaccgtaacacccgtccggcgttgaccaaa

SEQ ID NO: 802385 - DNA, 75 bp, synthetic construct
  source 1..75: mol_type = other DNA
catacgccgatggcgacccagcgtcagacgcctgctacggcaaaaaaagcgtcgtctacgcaatctcgtccggtg

SEQ ID NO: 802386 - DNA, 75 bp, synthetic construct
  source 1..75: mol_type = other DNA
tcatgccaaccgccaccgccgatatcaaagttgatgcggtgcgcggcttcggcggcgaagtgctgctccacggcg

SEQ ID NO: 802387 - DNA, 75 bp, synthetic construct
  source 1..75: mol_type = other DNA
agaaagatgctcaggcctactttaatcgcaaatatgcaccgattgacgaaaagcttatggcgcttcacaagtggt

SEQ ID NO: 802388 - DNA, 75 bp, synthetic construct
  source 1..75: mol_type = other DNA
ggcggcgtacgggattgcggtgaccggaaccatggtgctgacgtctattctctcgactaccgtggcacgtcagaa

SEQ ID NO: 802389 - DNA, 75 bp, synthetic construct
  source 1..75: mol_type = other DNA
aagggtttcttcacgggagatgtgtaccgcgagatctgaaagtgaacgaaacaaacgctgagtacctagtgcgta

SEQ ID NO: 802390 - DNA, 75 bp, synthetic construct
  source 1..75: mol_type = other DNA
gccgcagagaagcgcaacgcaaaattacaaagcgagaatgcatacatccgcaacaggtacaaagaactggaccta

SEQ ID NO: 802391 - DNA, 75 bp, synthetic construct
  source 1..75: mol_type = other DNA
tgatgcgatctgtgcggcgatgaaggatttattcgaagatgtgcgcgcggtggcggaaccttccggcgcgctggc

SEQ ID NO: 802392 - DNA, 75 bp, synthetic construct
  source 1..75: mol_type = other DNA
tatggcgcttcacaagtggttttgggaacaaagtgaagccgagcgcgccgccgccaacattggtgtgaaggggga

SEQ ID NO: 802393 - DNA, 75 bp, synthetic construct
  source 1..75: mol_type = other DNA
tttgatggacagaaaaacgcagagaacaacgcccattatatcgcagctttcaaccctgaagtagtgcaggcatta

SEQ ID NO: 802394 - DNA, 75 bp, synthetic construct
  source 1..75: mol_type = other DNA
gtgagcaagattaactatcaggcactgcgtgaaaaggcagagaaagcaacgtgtggtgtgtggtcgctcgaatat

SEQ ID NO: 802395 - DNA, 75 bp, synthetic construct
  source 1..75: mol_type = other DNA
tagggaagctgcgtgttgagcttgaagcagcagagaacaaccttattgatagcgaatgccatgttgctgaactgg

SEQ ID NO: 802396 - DNA, 75 bp, synthetic construct
  source 1..75: mol_type = other DNA
ttatcgaatggcaggcaactggcgacgctaagagcggactggcatggatttataacacactgtttggcccaggcg

SEQ ID NO: 802397 - DNA, 75 bp, synthetic construct
  source 1..75: mol_type = other DNA
aaagaacccggaagcgattaagaacccgttcttcctgttggcaccggactgggcgctgatcccgctgctgatcat

SEQ ID NO: 802398 - DNA, 75 bp, synthetic construct
  source 1..75: mol_type = other DNA
catggatttataacacactgtttggccctggcgaattaccggacgaatctgagaaagatgctcaggcctacttta

SEQ ID NO: 802399 - DNA, 75 bp, synthetic construct
  source 1..75: mol_type = other DNA
acaaagcgagaatgcatacatccgcaaccggtacaaagaactggacctattaatcgggaaaaacattctggtcat

SEQ ID NO: 802400 - DNA, 75 bp, synthetic construct
  source 1..75: mol_type = other DNA
gataattgctgctgttgggtttgtcgctggtaaggcaattttctctgataatgttgtgttcagacgaagaatgta

SEQ ID NO: 802401 - DNA, 75 bp, synthetic construct
  source 1..75: mol_type = other DNA
actggacctattaatcgggaaaaacattctggtcatgcaggctgccattatcgaatggcaggcaactggcgacgc

SEQ ID NO: 802402 - DNA, 75 bp, synthetic construct
  source 1..75: mol_type = other DNA
atgcatgaacatggcaactctctggaggcgatgattgcttcgctggagaaatcaccgcccgttcgcgtgcccggg

SEQ ID NO: 802403 - DNA, 75 bp, synthetic construct
  source 1..75: mol_type = other DNA
tctgggatatttgtcgccgatgcgcattattcacacctccgaaatggagtcagggcaaatctatattccgtttgt

SEQ ID NO: 802404 - DNA, 75 bp, synthetic construct
  source 1..75: mol_type = other DNA
cttgctgttgcaacgtaatgcgctgcgcgcgccagatcagtttgaaattccaccaaacagggttatcgaactggg

SEQ ID NO: 802405 - DNA, 75 bp, synthetic construct
  source 1..75: mol_type = other DNA
gaactggatgctctatgtcgcagtcgtgattgtcattgtcagctttgagcactccagcaacctggcggcggcgta

SEQ ID NO: 802406 - DNA, 75 bp, synthetic construct
  source 1..75: mol_type = other DNA
atttcggtgatgtcagccattgaaggtctggaaatcgtcgccccgcagctggatacctggatagttcccctctca

SEQ ID NO: 802407 - DNA, 75 bp, synthetic construct
  source 1..75: mol_type = other DNA
gattaagttgccggatgatggaaacctccttctttatgtcgcatgaatcactgatcctcggcaaacgtccgtggt

SEQ ID NO: 802408 - DNA, 75 bp, synthetic construct
  source 1..75: mol_type = other DNA
cacatctgattcagcctaccttgattactgaatatccggcagaagtctctccgctggcccgccgtaatgaggtta

SEQ ID NO: 802409 - DNA, 75 bp, synthetic construct
  source 1..75: mol_type = other DNA
tcgtcgcccatcgtggcggcggtaaactggccccggaaaacaccctggcggcaatcgacgtgggggcaaaatacg

SEQ ID NO: 802410 - DNA, 75 bp, synthetic construct
  source 1..75: mol_type = other DNA
cagtaccagaactgccgcgcggtttattgcttgatgagtggcgcgacgactggcgagaactgaccgcgcggctgg

SEQ ID NO: 802411 - DNA, 75 bp, synthetic construct
  source 1..75: mol_type = other DNA
gttgcttgatgagtggcgcaacgactggcgcgaactgaccatgcggttgggctgcgtctccattcatctcaatta

SEQ ID NO: 802412 - DNA, 75 bp, synthetic construct
  source 1..75: mol_type = other DNA
cgcggcattgagtgggtacagatcgacgaacccgcgctggtactggaactaccgcaggcgtggctggacgcatac

SEQ ID NO: 802413 - DNA, 75 bp, synthetic construct
  source 1..75: mol_type = other DNA
gcgttctgacatggagttgctggagtcgttcgaagagtttgattatcccaatgaaatcggtccaggcgtctatga

SEQ ID NO: 802414 - DNA, 75 bp, synthetic construct
  source 1..75: mol_type = other DNA
gttgttggatgagtggcgcgacgactggcgagaactgaccgcgcggctgggctgcgtctctattcatctcaatca

SEQ ID NO: 802415 - DNA, 75 bp, synthetic construct
  source 1..75: mol_type = other DNA
tgttctgctcaacctggtgggcgtagcggttgggatctggcgctacttctatggtccgccaaccgagatgctcac

SEQ ID NO: 802416 - DNA, 75 bp, synthetic construct
  source 1..75: mol_type = other DNA
ttctctggtttcctgggttgtatcgttcattccacaccgcccggagcggagcgaaacggaacaaccatcggatca

SEQ ID NO: 802417 - DNA, 75 bp, synthetic construct
  source 1..75: mol_type = other DNA
aatcttgggcgttttcgtaagacgccgaacgaaggcacgctgttctacggtctggtgcaagacggtaacgatatg

SEQ ID NO: 802418 - DNA, 75 bp, synthetic construct
  source 1..75: mol_type = other DNA
gccgctgctgtcatcgtttgagattgatgctttagaagccgcacaacaggcagtaccagaactgccgcgcggttt

SEQ ID NO: 802419 - DNA, 75 bp, synthetic construct
  source 1..75: mol_type = other DNA
atgcagttgaaagacgccggactgcggattctggtttataccgtcaataaaccccagcgcgcggcagagttgctg

SEQ ID NO: 802420 - DNA, 75 bp, synthetic construct
  source 1..75: mol_type = other DNA
gttagatgagatcggcggcattgctgtcgaaaccgtgaccgaagatgcgcatacatctctgcgtttgcaccgtcg

SEQ ID NO: 802421 - DNA, 75 bp, synthetic construct
  source 1..75: mol_type = other DNA
caaaagcaagcgggtatcgacctgctgccggtgggcgattttgcctggtacgatcatgtactgaccaccagtttg

SEQ ID NO: 802422 - DNA, 75 bp, synthetic construct
  source 1..75: mol_type = other DNA
tgattcagccaacctttattacggaatatccggcagaagtgtccccgctggcgcgccgtaatgatgttaacccgg

SEQ ID NO: 802423 - DNA, 75 bp, synthetic construct
  source 1..75: mol_type = other DNA
gctgaccgaatcgctgttccgtactctggcacaggatattctcggtaagacggaagtgacctacggcgacgtgac

SEQ ID NO: 802424 - DNA, 75 bp, synthetic construct
  source 1..75: mol_type = other DNA
cgcggctttatggaagttgaaacgccgatgatgcaggtgatccctggcggtgccgctgcgcgtccgtttatcacc

SEQ ID NO: 802425 - DNA, 75 bp, synthetic construct
  source 1..75: mol_type = other DNA
cacatctgattcagcctaccttcattactgaatatccggcagaagtgtctccgctggcccgccgtaatgaggtta

SEQ ID NO: 802426 - DNA, 75 bp, synthetic construct
  source 1..75: mol_type = other DNA
cacatctgattcagcctacctttattactgaatatccggcagaagtatcaccgctggcccgccgtaatgaggtta

SEQ ID NO: 802427 - DNA, 75 bp, synthetic construct
  source 1..75: mol_type = other DNA
cacatctgattcagcctaccttaattactgaatatccggcagaagtttcaccgctggcccgccgtaatgaggtta

SEQ ID NO: 802428 - DNA, 75 bp, synthetic construct
  source 1..75: mol_type = other DNA
attacagcgacttcttcccaccatactgcttaaaccattccagcatacgctgccagccatctttcgcagattcgg

SEQ ID NO: 802429 - DNA, 75 bp, synthetic construct
  source 1..75: mol_type = other DNA
attgcgtgctcgtcactgggatcaacaaaagcaagcgggtatcgacctgctgccggtgggcgattttgcctggta

SEQ ID NO: 802430 - DNA, 75 bp, synthetic construct
  source 1..75: mol_type = other DNA
gctcaggacagtcagcgtgcgaatgtctatgaagtgcgtgctgaagcccagcgtgcgcgttttaaactgcccgcg

SEQ ID NO: 802431 - DNA, 75 bp, synthetic construct
  source 1..75: mol_type = other DNA
actggacttcggtaagccgttcgaaaaactgaccatgcgtgaagcgattaaaaaatatcgcccggaaaccgacat

SEQ ID NO: 802432 - DNA, 75 bp, synthetic construct
  source 1..75: mol_type = other DNA
cgaccatacttctgaccaactgcatacagacttcgacgacaaagagaacgaagagctggaggagttgaacatcga

SEQ ID NO: 802433 - DNA, 75 bp, synthetic construct
  source 1..75: mol_type = other DNA
ggtctgggaattggtatcgaccgtatggtaatgctgttcaccaacagccataccatccgcgacgttattctgttc

SEQ ID NO: 802434 - DNA, 75 bp, synthetic construct
  source 1..75: mol_type = other DNA
acccggcctaccgtcgtctgcgtatcatcactgataacctcaaacaggaagagcacgccattgtccaggtggaag

SEQ ID NO: 802435 - DNA, 75 bp, synthetic construct
  source 1..75: mol_type = other DNA
ccccgctaaatgctcccgtcgccgtcgttatctgaagtctgtcgccggtgtggtggcgggcataatcgtgctgaa

SEQ ID NO: 802436 - DNA, 75 bp, synthetic construct
  source 1..75: mol_type = other DNA
gacacgttcgacccgacatatgatatcgaccttttctgtgatcaggccagtggtcttgtgaatattgccattatg

SEQ ID NO: 802437 - DNA, 75 bp, synthetic construct
  source 1..75: mol_type = other DNA
cccgacaagggccgcttcctgagtaacatcaatgtttacagcaaaggtgaagtggatcagaaaaaggggatgcga

SEQ ID NO: 802438 - DNA, 75 bp, synthetic construct
  source 1..75: mol_type = other DNA
caaacaggaagagcacgccattgtccaggtggaagaaatgcaggcggtgaatgccgtgctgtatggcaaatacac

SEQ ID NO: 802439 - DNA, 75 bp, synthetic construct
  source 1..75: mol_type = other DNA
cttcgagaaaacgatgaagctgattgccgacgtcaatttcgacatgagctacagctttatcttctctgcacgtcc

SEQ ID NO: 802440 - DNA, 75 bp, synthetic construct
  source 1..75: mol_type = other DNA
cccagcgtattctggtagaaggtacatcgcgtaagagcatcatggagctttccgggcgtacggaaaataaccgcg

SEQ ID NO: 802441 - DNA, 75 bp, synthetic construct
  source 1..75: mol_type = other DNA
gttgtgggtggagcagaagatattacggcagacattcagcagtcagtggctgcacgtatggcggaagggaagtga

SEQ ID NO: 802442 - DNA, 75 bp, synthetic construct
  source 1..75: mol_type = other DNA
gttttgatatggccggaaccgtgaacagttttatgtcacaggctgcggcgcaggcactggatgaagcccggataa

SEQ ID NO: 802443 - DNA, 75 bp, synthetic construct
  source 1..75: mol_type = other DNA
gagtggcgtcagccggtcatggtcagttttgatatggccggaaccgtgaacagttttatgtcacaggctgcggcg

SEQ ID NO: 802444 - DNA, 75 bp, synthetic construct
  source 1..75: mol_type = other DNA
gtatggcaaatacactatggaaggagaccagttcgagaaaattgaggtcgattttggcaggtcgacgaagaataa

SEQ ID NO: 802445 - DNA, 75 bp, synthetic construct
  source 1..75: mol_type = other DNA
gtgaaacccgcgtgttacgtccgggctacgtcaagccgaaacacgaatttaattaccagcaggcggttgagcgcc

SEQ ID NO: 802446 - DNA, 75 bp, synthetic construct
  source 1..75: mol_type = other DNA
gggaatactgctgcagatgggatccgttgttacggtgccattcaggatgctcaggcgttgtccgaaggtgtggtg

SEQ ID NO: 802447 - DNA, 75 bp, synthetic construct
  source 1..75: mol_type = other DNA
gtcgtcactaactcgcggacggcggaaatgtgcaagctgaccgaaaacagcttccgcgatgtgaatattgccttc

SEQ ID NO: 802448 - DNA, 75 bp, synthetic construct
  source 1..75: mol_type = other DNA
cgaagccgctgtacaggccagcgcagcagcgaagtctgcttccgcagcgaagacatccgaaacgaacgcgaaagc

SEQ ID NO: 802449 - DNA, 75 bp, synthetic construct
  source 1..75: mol_type = other DNA
tggcgaaatgacggtcgaaggcgtcaccgcccgcctggcaaccagctctgcggaggcgatgaaacttaccgaacg

SEQ ID NO: 802450 - DNA, 75 bp, synthetic construct
  source 1..75: mol_type = other DNA
attacggcgatctggccattgtggtggcgaaaacgtcttatgtggcagaggacggtaccgaaaaacgttatctgc

SEQ ID NO: 802451 - DNA, 75 bp, synthetic construct
  source 1..75: mol_type = other DNA
gtcgtcactaactcgcggacggcggaaatgtgtaagctgactgaaaacagcttccgcgatgtgaatattgctttt

SEQ ID NO: 802452 - DNA, 75 bp, synthetic construct
  source 1..75: mol_type = other DNA
ttatccgtacagccagggaagtgaacgatcacaaacctttttgggtaattgatcaggtgaaagcggcggttgccg

SEQ ID NO: 802453 - DNA, 75 bp, synthetic construct
  source 1..75: mol_type = other DNA
ctctactgcgaccaggccagcggtcttgtgaatattgccattatggacggtaccgtctggcgtcttctgaatggt

SEQ ID NO: 802454 - DNA, 75 bp, synthetic construct
  source 1..75: mol_type = other DNA
accgagaagatggcagaatggttagcagagatgcgtccagatctcactttcccacagcaggtgggcgagcaggcg

SEQ ID NO: 802455 - DNA, 75 bp, synthetic construct
  source 1..75: mol_type = other DNA
gctggtcgatcatagtcagttcaaagttatcaatggcgacaacgtccatcagcagtatgtcgtcgatgccaaagg

SEQ ID NO: 802456 - DNA, 75 bp, synthetic construct
  source 1..75: mol_type = other DNA
ccgatcaggggattaacgtctgggaactggttcgcctggcgaatcgccatccacgagtcaatattcttcagcctg

SEQ ID NO: 802457 - DNA, 75 bp, synthetic construct
  source 1..75: mol_type = other DNA
tggcggaaccctctggcgcgctggcgctggcgggaatgaaaaaatatatcgcccagcacaacattcgcggcgaac

SEQ ID NO: 802458 - DNA, 75 bp, synthetic construct
  source 1..75: mol_type = other DNA
atgtccggcagtgcttttgccgttacgcaccacgccttcagtagcggagcaggaaggacatctgatggagatgga

SEQ ID NO: 802459 - DNA, 75 bp, synthetic construct
  source 1..75: mol_type = other DNA
cgaatacctataacgagccaggccgggcttattatgccggagttaccgcatcattctgatcgtagtgtttcaggc

SEQ ID NO: 802460 - DNA, 75 bp, synthetic construct
  source 1..75: mol_type = other DNA
tcgtttacaacaacgaactattccatctcaattaactggaatgatatcggtactgtaacaactgaaacacaatcg

SEQ ID NO: 802461 - DNA, 75 bp, synthetic construct
  source 1..75: mol_type = other DNA
cgctaactgtgctcctggttgggttgaatagccaggtatcagtagccaaatactccgacgatgataatgacgaga

SEQ ID NO: 802462 - DNA, 75 bp, synthetic construct
  source 1..75: mol_type = other DNA
cctgcggcggcgcgctacggttcgggggccgccgggggggtggtgaacatcattaccaaacgtcccaccaacgac

SEQ ID NO: 802463 - DNA, 75 bp, synthetic construct
  source 1..75: mol_type = other DNA
atgatgcttactggggagatggcggtaatggtcagggcaagaatcgcccagggtaccttttaatggcgttgcgcg

SEQ ID NO: 802464 - DNA, 75 bp, synthetic construct
  source 1..75: mol_type = other DNA
attattattggtatgtcaacaggcatggcgggggctactatcagcctaccaatcattgcagctattggctttgtc

SEQ ID NO: 802465 - DNA, 75 bp, synthetic construct
  source 1..75: mol_type = other DNA
atggaaaacaataccatcaaatgcccgttctgtttcaaagagagccagcgtggggttcacgtctgtacaggctgt

SEQ ID NO: 802466 - DNA, 75 bp, synthetic construct
  source 1..75: mol_type = other DNA
ctttttgcttgaaagagagccagcgcggtgttcatgtctgcaccggctgcatggcgactgttttatatggggctt

SEQ ID NO: 802467 - DNA, 75 bp, synthetic construct
  source 1..75: mol_type = other DNA
acacctttcctaatgaacatccggaagcctttattttgattccttcagtggaaaaatttattgtagatggcaact

SEQ ID NO: 802468 - DNA, 75 bp, synthetic construct
  source 1..75: mol_type = other DNA
agtaatcactgctgttgggtttgtcgcaggtaaagcaattttctctgataatgttgtgttcaggagaaggatgta

SEQ ID NO: 802469 - DNA, 75 bp, synthetic construct
  source 1..75: mol_type = other DNA
attattattggtatgtcaacaggcatagcaggggctactatcagcctaccaatcattgcagctattgggtttgtc

SEQ ID NO: 802470 - DNA, 75 bp, synthetic construct
  source 1..75: mol_type = other DNA
ggataatgttctgacgccgttacgtgtttatgaatcgggtgcgctggagtgtttactggagaaatataaacccgc

SEQ ID NO: 802471 - DNA, 75 bp, synthetic construct
  source 1..75: mol_type = other DNA
ttcccgcgcgccaatgctggattatttaggggaactggtgggcgttcaccgcttacctgcgcagccagcaaaaac

SEQ ID NO: 802472 - DNA, 75 bp, synthetic construct
  source 1..75: mol_type = other DNA
ttccggctgtcgagaacgaggtttcctgcgacgatctcacaatgttacaaaacgcctgccagcgtctgccagccc

SEQ ID NO: 802473 - DNA, 75 bp, synthetic construct
  source 1..75: mol_type = other DNA
aggacgtcagcaaagagaaaaagcgcccactgacagataaggtgagcgcgaagaaaccactccgcgtggcatatc

SEQ ID NO: 802474 - DNA, 75 bp, synthetic construct
  source 1..75: mol_type = other DNA
taccactgccgatcaggagacaacgctggctgcggcgcgtaaagcgattagcctctggacgcaacagcggcagaa

SEQ ID NO: 802475 - DNA, 75 bp, synthetic construct
  source 1..75: mol_type = other DNA
gcctctggacgcaacagcggcagacacatctgggacaggacattgtgccaaaccagataatcaaagtattgcagg

SEQ ID NO: 802476 - DNA, 75 bp, synthetic construct
  source 1..75: mol_type = other DNA
aagagagtgatgacgcactgcgccaacggatccaactggcgccggaaagtttcagtaatgcgggtagctatggtg

SEQ ID NO: 802477 - DNA, 75 bp, synthetic construct
  source 1..75: mol_type = other DNA
tgattcagcctaccttgattacggaatatccggcagaagtctccccgctggcgcgtcgtaaagatgttaacccgg

SEQ ID NO: 802478 - DNA, 75 bp, synthetic construct
  source 1..75: mol_type = other DNA
tgattcagcctaccttgattacggaatatccggcagaagtttccccgctggcgcgacgtaaggatgttaacccgg

SEQ ID NO: 802479 - DNA, 75 bp, synthetic construct
  source 1..75: mol_type = other DNA
tgattcagcctaccttgattacggaatatccggcagaagtatccccgctggcgcgacgtaatgatgttaacccgg

SEQ ID NO: 802480 - DNA, 75 bp, synthetic construct
  source 1..75: mol_type = other DNA
cagccaggcgattatcgacgtggccatcctcggcccggatgctgtctcttatacacaaatccccacccggggatt

SEQ ID NO: 802481 - DNA, 75 bp, synthetic construct
  source 1..75: mol_type = other DNA
ggagctggaaaatatgatagttgaaccacttattactcaaattaatatgccgtggggaaatattgaaaagtggaa

SEQ ID NO: 802482 - DNA, 75 bp, synthetic construct
  source 1..75: mol_type = other DNA
aaccgctggtctgggtattggtatcgaccgaatgattatgctgtttacaaacagtcatactattcgcgacgttat

SEQ ID NO: 802483 - DNA, 75 bp, synthetic construct
  source 1..75: mol_type = other DNA
agcgatgccagcaaaagcgatcgtgaaaaactgaaccacatgctggaggaaatgtttgaagaatccgatatgtgg

SEQ ID NO: 802484 - DNA, 75 bp, synthetic construct
  source 1..75: mol_type = other DNA
aaacgcattgtgcgagtaaagacagagatcgtcattaaatcgcccgttcaatttcttgaaaaggtcgaaaaatca

SEQ ID NO: 802485 - DNA, 75 bp, synthetic construct
  source 1..75: mol_type = other DNA
atgaatattgtctgtgttgccgcctgcacggcgggtattgctcacacctatattgctcgtgaaaagttaattaaa

SEQ ID NO: 802486 - DNA, 75 bp, synthetic construct
  source 1..75: mol_type = other DNA
atggacaaattcgacgctaatcgccgcaaactactggcgcttggtggtgttgcacttggtgctgccatcttgccg

SEQ ID NO: 802487 - DNA, 75 bp, synthetic construct
  source 1..75: mol_type = other DNA
ggagctggttctctggtcggaaggcatggtctggtgctctccggagcgtcacggggccatgaccggcatcatgaa

SEQ ID NO: 802488 - DNA, 75 bp, synthetic construct
  source 1..75: mol_type = other DNA
cgctggccgtaatgcaggtctgcggtggctctcagtctttcaatgccgtaaaccagatgcgcattcttggccgct

SEQ ID NO: 802489 - DNA, 75 bp, synthetic construct
  source 1..75: mol_type = other DNA
catttttaatagacttgagttacatcacatgaaaacgggggagtatatgcctgattcattaacattagagcatat

SEQ ID NO: 802490 - DNA, 75 bp, synthetic construct
  source 1..75: mol_type = other DNA
caagtaataaagtctttgcttgaaatgttggtgaagagaaaaccagacattaatatgtttgttgaaaagtttgtt

SEQ ID NO: 802491 - DNA, 75 bp, synthetic construct
  source 1..75: mol_type = other DNA
tgatgtttttcataatatatttgatcaaaaaccagacaatataaacatatccaaaatattgatttttaaatggat

SEQ ID NO: 802492 - DNA, 75 bp, synthetic construct
  source 1..75: mol_type = other DNA
ctgccagatacgggaaagagcgactcgtcaaactgtctgcaatggacagagcaaaagccgctaaatgtaagtccg

SEQ ID NO: 802493 - DNA, 75 bp, synthetic construct
  source 1..75: mol_type = other DNA
ggaaaatgcgctagttcctcggtatataacagaagaaatggacacgctgcattatccgtggggagcggtggcaat

SEQ ID NO: 802494 - DNA, 75 bp, synthetic construct
  source 1..75: mol_type = other DNA
acgttctggtcaggctcatcgggaacggcatcaaagggggatgtgctgactgacaaaatgctttcgtttgatgtg

SEQ ID NO: 802495 - DNA, 75 bp, synthetic construct
  source 1..75: mol_type = other DNA
acccgcaaaccggtgcaactcatttccggttatcgctctattgataccaacaatgaactacgcgcgcacagccgt

SEQ ID NO: 802496 - DNA, 75 bp, synthetic construct
  source 1..75: mol_type = other DNA
cgttccatccggaccgcatcgcgtcgcgtattctcggtatgggcgacgtactgtcactgatcgaagatatcgaaa

SEQ ID NO: 802497 - DNA, 75 bp, synthetic construct
  source 1..75: mol_type = other DNA
cctgtttgtggttgatgccatgaccggtcaggatgcggccaatacggcaaaagcattcaatgaagcgttaccgct

SEQ ID NO: 802498 - DNA, 75 bp, synthetic construct
  source 1..75: mol_type = other DNA
cattccatccggaccgtattgcctcccgtattcttggcatgggcgacgtactgtcactgatcgaagatatcgaaa

SEQ ID NO: 802499 - DNA, 75 bp, synthetic construct
  source 1..75: mol_type = other DNA
atcctgctgatgcgcagaaacgagcataatgcacagagcgtcattgtgatatctgactccctggcaaaatttgcc

SEQ ID NO: 802500 - DNA, 75 bp, synthetic construct
  source 1..75: mol_type = other DNA
ttaaccagaatcagcaactggatgaagcagcgtctaacccagcaggatttaataccgatgtcggcttcttcgata

SEQ ID NO: 802501 - DNA, 75 bp, synthetic construct
  source 1..75: mol_type = other DNA
ggcgatggttatgaacagcgtcgtgcggcgggactgaataaccagttgtcgacttacagcgtgacgatacgtgtt

SEQ ID NO: 802502 - DNA, 75 bp, synthetic construct
  source 1..75: mol_type = other DNA
caccaaaggcggtttacgccgccgcgatcttcccgccgatcctttaaccctttttgaacgctggctctcccaggc

SEQ ID NO: 802503 - DNA, 75 bp, synthetic construct
  source 1..75: mol_type = other DNA
gccgttcggctgattggtcagttagcaacactgggataactggatacattgaaggctataacgactgtttacagg

SEQ ID NO: 802504 - DNA, 75 bp, synthetic construct
  source 1..75: mol_type = other DNA
tattgaaggtgtcgcgttaagcaatattcgcaaagccgcgttatctatgcgtgcaggtggtgtaggatattaccc

SEQ ID NO: 802505 - DNA, 75 bp, synthetic construct
  source 1..75: mol_type = other DNA
tggtaaactcggtaagttcctgcgcgagaagcacaagaagaaagtgctggtggtttctgccgacgtttatcgccc

SEQ ID NO: 802506 - DNA, 75 bp, synthetic construct
  source 1..75: mol_type = other DNA
gaaataacgatggatgatgccatcaagcgccgttcggctgattggtcagtgagtaacacgggattaaccggatac

SEQ ID NO: 802507 - DNA, 75 bp, synthetic construct
  source 1..75: mol_type = other DNA
gaaatcacgatggacgaggccatcaagcgccggacggctgaatggtcagtgagtaacaccggattaaccggatat

SEQ ID NO: 802508 - DNA, 75 bp, synthetic construct
  source 1..75: mol_type = other DNA
aaaggaattacttcaaaaagaggatgaatatgctatcaaaacagctgcatggcaagcagtaactaaattgtggga

SEQ ID NO: 802509 - DNA, 75 bp, synthetic construct
  source 1..75: mol_type = other DNA
ggaaatcaactttaaggctattgtagggcaaactgatatttcagcagccactggcaaaacggctaccacaaatga

SEQ ID NO: 802510 - DNA, 75 bp, synthetic construct
  source 1..75: mol_type = other DNA
tgcgttcaccaagaactatttcaattagtggtgtggttgtggttggtgaattcggtagtatcctcatctcacgag

SEQ ID NO: 802511 - DNA, 75 bp, synthetic construct
  source 1..75: mol_type = other DNA
atcatggtttcacccgccagccgctgcaaattctttatcactttaattacggctggcctttattatcgccacagg

SEQ ID NO: 802512 - DNA, 75 bp, synthetic construct
  source 1..75: mol_type = other DNA
ttccattattacgagttttaaagcctctaaagatgttggtatttcaaatggtcttcgtatccagctaacttttca

SEQ ID NO: 802513 - DNA, 75 bp, synthetic construct
  source 1..75: mol_type = other DNA
atattctcgatgctcagattaaatgtaataaagcttggaagctggactattcagacttaacagaagctgaaaaaa

SEQ ID NO: 802514 - DNA, 75 bp, synthetic construct
  source 1..75: mol_type = other DNA
cagaagcaaattatttcagttatctgtaaagacggaatcaagattgatgattccattattactagctttaaagcc

SEQ ID NO: 802515 - DNA, 75 bp, synthetic construct
  source 1..75: mol_type = other DNA
gaggtggggtatcgcacagaacggaccgacgacggcattgaatttgtcatcaatggcaaagtacgggaaacgcga

SEQ ID NO: 802516 - DNA, 75 bp, synthetic construct
  source 1..75: mol_type = other DNA
ggaaattaactttaaagctattgtagggcagactgatatttcggctgcaactggcaagaccgctaccacgaatga

SEQ ID NO: 802517 - DNA, 75 bp, synthetic construct
  source 1..75: mol_type = other DNA
ggtgactacacagaacatgcaatcagggcaaaccgtcacagataatgttcaaagagcacccagaacaatcactat

SEQ ID NO: 802518 - DNA, 75 bp, synthetic construct
  source 1..75: mol_type = other DNA
ctacccaactttatccagtggaaaaatttaggcgcgggtgaatatgttatgggactggaggtcagcaatagtttt

SEQ ID NO: 802519 - DNA, 75 bp, synthetic construct
  source 1..75: mol_type = other DNA
cgcaggggcgtctgccctttattgagccaggggaacaaagaaatactgctttgagctgggaattgttgatggcga

SEQ ID NO: 802520 - DNA, 75 bp, synthetic construct
  source 1..75: mol_type = other DNA
gaggtggggtatcgcacagaacggaccgacgacagcattgaatttgtcatcaatggcaaagtacgggaaacacga

SEQ ID NO: 802521 - DNA, 75 bp, synthetic construct
  source 1..75: mol_type = other DNA
gggcaaactgatgtttcagcagctactggcaaaactgctaccacgaatgacggtggcgctacttctaagaagaat

SEQ ID NO: 802522 - DNA, 75 bp, synthetic construct
  source 1..75: mol_type = other DNA
ggtgtcgtcattcgcattacggaataaaacccgtgaaataaaaataggcagtagtgctaatgaatttctgaagat

SEQ ID NO: 802523 - DNA, 75 bp, synthetic construct
  source 1..75: mol_type = other DNA
atgtctgcctggagcccggagcacataacgttacgacgaacagaaaacggcaatgtgattgcccacgacagtcgg

SEQ ID NO: 802524 - DNA, 75 bp, synthetic construct
  source 1..75: mol_type = other DNA
gcggatatgtttggtgaccgggtcgatcacggcggcagtatcaatattctgacctcgcaccgcccttcaccgctg

SEQ ID NO: 802525 - DNA, 75 bp, synthetic construct
  source 1..75: mol_type = other DNA
cgctacaagctggcgctgggaaccaaaccgaagctgtaccgcgtgccgtttaaatacggggaggtgagccaatga

SEQ ID NO: 802526 - DNA, 75 bp, synthetic construct
  source 1..75: mol_type = other DNA
acaggcgaaggtagaaaaagttaccgggggaatattactttacccttccccgcccccgatcccattcaaggaagc

SEQ ID NO: 802527 - DNA, 75 bp, synthetic construct
  source 1..75: mol_type = other DNA
cattgaaagatgtactggctgtatatccggccgctaaagttcagcaggttaagggtggtattttactttattcgt

SEQ ID NO: 802528 - DNA, 75 bp, synthetic construct
  source 1..75: mol_type = other DNA
cggtggtgctacttctaagaagaacactggtaacactacaacaagtttaggcaatggtatgttgatgtgtcagga

SEQ ID NO: 802529 - DNA, 75 bp, synthetic construct
  source 1..75: mol_type = other DNA
tagcggtgttgtagtggttgattcgacgggttcagttctattaaccagacaggggcaacttgtagaaacctttat

SEQ ID NO: 802530 - DNA, 75 bp, synthetic construct
  source 1..75: mol_type = other DNA
ttctcagatgccgctaatgagcaagcttcaaaggtgcttaagtcgggtaatgctttacgaaagttttctgtgaat

SEQ ID NO: 802531 - DNA, 75 bp, synthetic construct
  source 1..75: mol_type = other DNA
gcggtatccgtcatggcgataccgtgcgggtatttaacaataatggagaaatgctgattgccgcaaaagtgactc

SEQ ID NO: 802532 - DNA, 75 bp, synthetic construct
  source 1..75: mol_type = other DNA
aaacagggttcccggatagcgcagatatcggtgcacgaggggatttattgcgatcagttgcagtggctttttacc

SEQ ID NO: 802533 - DNA, 75 bp, synthetic construct
  source 1..75: mol_type = other DNA
tccaggtcgggagcctgaaggagcaaccttcggaaataaccgtcaccctgctgaccgaaccggacaccaatacca

SEQ ID NO: 802534 - DNA, 75 bp, synthetic construct
  source 1..75: mol_type = other DNA
gcccgtgaaaaatacacagtggagtggatgaaacaacagatacccagcataaagaaatgggaggccagtatgcca

SEQ ID NO: 802535 - DNA, 75 bp, synthetic construct
  source 1..75: mol_type = other DNA
gtaccgtggtatttgatgtggtcgcgcagggaaaccagcccggacatgtaacggttaatcggctggttttgtccc

SEQ ID NO: 802536 - DNA, 75 bp, synthetic construct
  source 1..75: mol_type = other DNA
cacaatatccggcccgtgaactgctggggttgtcagtaaaagataaagcaatgatccgggaaaccatcatcggaa

SEQ ID NO: 802537 - DNA, 75 bp, synthetic construct
  source 1..75: mol_type = other DNA
ggaaaaatgcgcagtatgacgccttactaaaccaggccacgcagatcactgatgcgacaaagcgtaatgcgttgt

SEQ ID NO: 802538 - DNA, 75 bp, synthetic construct
  source 1..75: mol_type = other DNA
ccgttacgttttgagctgttctataacaagtacgatctgcatgaaaaaacggcgattgccttgtcttctgaatgg

SEQ ID NO: 802539 - DNA, 75 bp, synthetic construct
  source 1..75: mol_type = other DNA
aattaccggctacgatacagacaccgggggtatccggacgttttacaaagcggatatcgaagattacctggaaat

SEQ ID NO: 802540 - DNA, 75 bp, synthetic construct
  source 1..75: mol_type = other DNA
tggactagagatattcatgcccctgcagcttccgcggagaataaaggccgtattctgacactcgatcatgaagct

SEQ ID NO: 802541 - DNA, 75 bp, synthetic construct
  source 1..75: mol_type = other DNA
aatttttatccagcccagacaaaccggaaaagttgtcttgacgagcagtgccaggagccgttcgacggtcactcg

SEQ ID NO: 802542 - DNA, 75 bp, synthetic construct
  source 1..75: mol_type = other DNA
tgcgacaacatattggtaaagagctgatctctcacggtattgataatgccaactatggtattaacagcacagctg

SEQ ID NO: 802543 - DNA, 75 bp, synthetic construct
  source 1..75: mol_type = other DNA
attgcacattcgtcaggccgggagacgagacggagattacccaattgaatgggagatggcgaatgtggtcacaaa

SEQ ID NO: 802544 - DNA, 75 bp, synthetic construct
  source 1..75: mol_type = other DNA
ataccagttttgttagtgttggtgatattacagaagtaataacaaaccatgatggaacacaagttatgtggtctg

SEQ ID NO: 802545 - DNA, 75 bp, synthetic construct
  source 1..75: mol_type = other DNA
tggacaagaaacatctatatccctacagcctccgcagataatagaggcagtatcctgaccatcaaccatgaggcc

SEQ ID NO: 802546 - DNA, 75 bp, synthetic construct
  source 1..75: mol_type = other DNA
gctgacgccgccagaggtaaaaggctttagcgcgacgacgttcgatgaactgcaaaagccaatgagtgagcgcgt

SEQ ID NO: 802547 - DNA, 75 bp, synthetic construct
  source 1..75: mol_type = other DNA
tgcccgttggttttgtgaaggccgaaccaatttgtgccataacgccatcgaccgctggctggagaaacagccaga

SEQ ID NO: 802548 - DNA, 75 bp, synthetic construct
  source 1..75: mol_type = other DNA
tgtcgccggcattatttcacctatcgtctttggcatcattatcgacaaaacaggcaactggagtttaccattcta

SEQ ID NO: 802549 - DNA, 75 bp, synthetic construct
  source 1..75: mol_type = other DNA
gcaaaggaaaaggggttgatgacgagcggcacttatggccggcattcttctggcttattgaaaaatgcaatcctg

SEQ ID NO: 802550 - DNA, 75 bp, synthetic construct
  source 1..75: mol_type = other DNA
tgcccgttggttttgtgaaggccgaaccaacttgtgtcacaacgctatcgaccgctggctggagaaacagccaga

SEQ ID NO: 802551 - DNA, 75 bp, synthetic construct
  source 1..75: mol_type = other DNA
gccgggcatcggctgggcacgcgcgagattgaagagagtatttccagtcatccggcgttgccgaagtggcggtgg

SEQ ID NO: 802552 - DNA, 75 bp, synthetic construct
  source 1..75: mol_type = other DNA
tcaacgagaaagggatgctggtggtggaagggccgctgccgccgggctgtattcagaccatctggggcgacgacg

SEQ ID NO: 802553 - DNA, 75 bp, synthetic construct
  source 1..75: mol_type = other DNA
gctctatgccgaagcagaacggaccagcgcacagctgagacaacgacaacgccggatcgaggaactgaaacgtga

SEQ ID NO: 802554 - DNA, 75 bp, synthetic construct
  source 1..75: mol_type = other DNA
gtaaattagaaacagaaaattcgaggttagttagtgaaaataacaggcttctacttatggttagagatcttcaaa

SEQ ID NO: 802555 - DNA, 75 bp, synthetic construct
  source 1..75: mol_type = other DNA
gcgccggacgggaccgcatggacaccacgcagacgccgcgtaacccggatacaggagcgcattcgctttatctgg

SEQ ID NO: 802556 - DNA, 75 bp, synthetic construct
  source 1..75: mol_type = other DNA
atttacccagcaccacttttttgcaggaatcggagtttggagctatgcacttagaaaagcaggatggccagacaa

SEQ ID NO: 802557 - DNA, 75 bp, synthetic construct
  source 1..75: mol_type = other DNA
ccacgggcgagcaagatggttatatcgtgaccactgtgaattcaaaaataagctcttaagccgcgccaatgggta

SEQ ID NO: 802558 - DNA, 75 bp, synthetic construct
  source 1..75: mol_type = other DNA
catcggaggtgcagcttaccgtcagtggttgtccgcgagtgacgccgtgtcggttggatcaggcggcgccgcaca

SEQ ID NO: 802559 - DNA, 75 bp, synthetic construct
  source 1..75: mol_type = other DNA
cgctttgattttgccaaagacaaagaggcgcaccgggaatattttcaaaccattccggtcagtcgtatgatcgtc

SEQ ID NO: 802560 - DNA, 75 bp, synthetic construct
  source 1..75: mol_type = other DNA
tactttccgctataccgagaacggtccggaaggcctggtcaccggtaaaaaagccatcgttatcaccagccgcgg

SEQ ID NO: 802561 - DNA, 75 bp, synthetic construct
  source 1..75: mol_type = other DNA
gggatcgcatacggtccggaaatggcagcgaaagcacagtctgacgcaaaagcagccatcgacagcattgttgct

SEQ ID NO: 802562 - DNA, 75 bp, synthetic construct
  source 1..75: mol_type = other DNA
cagcgcgcgtgaagtactggatgaagcgaacagggaaagtgagcaggcaatacaggattccagcctgtttgatgt

SEQ ID NO: 802563 - DNA, 75 bp, synthetic construct
  source 1..75: mol_type = other DNA
gaggtcgtctggttccggcaatgcagaccgaagatattatttcagttatcaattgggcagaaaagcaggtatgta

SEQ ID NO: 802564 - DNA, 75 bp, synthetic construct
  source 1..75: mol_type = other DNA
gcgccgtggcctgcgctcctggcatcccggcaaaaggccgccgggatgtaaggcgcaacgccgtttcgcaaaccg

SEQ ID NO: 802565 - DNA, 75 bp, synthetic construct
  source 1..75: mol_type = other DNA
tgggatccataaagatggcccaacggatctggtgacgccgtatctgtccacattcctgggctttatcggcattac

SEQ ID NO: 802566 - DNA, 75 bp, synthetic construct
  source 1..75: mol_type = other DNA
aaccagtgaagactatcaggctgcaatcgattttttacgcaagagagcggccagcgaacttgatggcggttttag

SEQ ID NO: 802567 - DNA, 75 bp, synthetic construct
  source 1..75: mol_type = other DNA
gacctggtgaccccgtatctttctacgttccttggctttatcggcattactgacgtgaactttgtctttgctgaa

SEQ ID NO: 802568 - DNA, 75 bp, synthetic construct
  source 1..75: mol_type = other DNA
ttgaacgctggacccgtttagcggcggaggccaaagagcttgggctcgccaccattcccatcgacccggaaaaca

SEQ ID NO: 802569 - DNA, 75 bp, synthetic construct
  source 1..75: mol_type = other DNA
tgaggttctcaagtttttggttaatcctgtcaacaacttatatcgtatggggctgacttcaggtgctacatttga

SEQ ID NO: 802570 - DNA, 75 bp, synthetic construct
  source 1..75: mol_type = other DNA
ttcaagggtgagcgaattcttgcaatcttagaacaactggatcatatcgatacgccaacagtacatcggcagatg

SEQ ID NO: 802571 - DNA, 75 bp, synthetic construct
  source 1..75: mol_type = other DNA
cagggaagggaattatgttcgcagcgttgccatgatgcgaaacagcatcctgacagaattcttcgttgcggtcgc

SEQ ID NO: 802572 - DNA, 75 bp, synthetic construct
  source 1..75: mol_type = other DNA
accccatgcctttgcgcaaggaacggtgactatttatctgcctggcgaacaacagacactttccgttggccccgt

SEQ ID NO: 802573 - DNA, 75 bp, synthetic construct
  source 1..75: mol_type = other DNA
gtctaaatctgttgtttaaacagggcaatctaaccggtcaactgagcgatattaaggtaggggcgccaggtgagc

SEQ ID NO: 802574 - DNA, 75 bp, synthetic construct
  source 1..75: mol_type = other DNA
ccagactttacagttcaaatttgtaaacggccagtggttccgggatggggagttggagaataaccgcattgtcta

SEQ ID NO: 802575 - DNA, 75 bp, synthetic construct
  source 1..75: mol_type = other DNA
ccgtctttcttgtcccaaatggcatctggaacttcacctgtgtctcctgttcgtgcgttgatgatagaagcagaa

SEQ ID NO: 802576 - DNA, 75 bp, synthetic construct
  source 1..75: mol_type = other DNA
cgttgggtaagagacatttatctgccgcagggggccgggcttgaaggcaagatggtacgctttgtttcgtatgca

SEQ ID NO: 802577 - DNA, 75 bp, synthetic construct
  source 1..75: mol_type = other DNA
gggaaatgaaaaaagtaaaagcttggaacgggcaatatctcgactttagtaaaccaagatcgatgagagttgtaa

SEQ ID NO: 802578 - DNA, 75 bp, synthetic construct
  source 1..75: mol_type = other DNA
gtcctttttccaatgctaaccgcttcaccatgtatacgccaaattcagcatctattattcagagcttctttgaaa

SEQ ID NO: 802579 - DNA, 75 bp, synthetic construct
  source 1..75: mol_type = other DNA
tgtacggctgcgcagattcgttgaaacacacgggcgtgcattacaggggtatacgactcagccgcccctggcagg

SEQ ID NO: 802580 - DNA, 75 bp, synthetic construct
  source 1..75: mol_type = other DNA
ccgcttcagcagtctgatgaacagcgccgaacttttgctgttggcgcccacacagctgacttaacctgtcccgct

SEQ ID NO: 802581 - DNA, 75 bp, synthetic construct
  source 1..75: mol_type = other DNA
tccgcgtcagcaggaagctctggcgctttccgatgagctgattgccgagctgaaagcccacgacgttatcgttat

SEQ ID NO: 802582 - DNA, 75 bp, synthetic construct
  source 1..75: mol_type = other DNA
cctgagtatgcgagcggcattcgtttggggcaaacacatgtagttcatgctgaaggtgattgtagtgcatgctta

SEQ ID NO: 802583 - DNA, 75 bp, synthetic construct
  source 1..75: mol_type = other DNA
cattaaaaactggagaagcaaaaaaatttgcgaccaatcttggtgtgtctccgtctttcttgtcccaaatggcat

SEQ ID NO: 802584 - DNA, 75 bp, synthetic construct
  source 1..75: mol_type = other DNA
tatatggcccgaatacactggaatcacgtccccttcacgtcacaaatatgaacttaacaccaaaaaggctgatgg

SEQ ID NO: 802585 - DNA, 75 bp, synthetic construct
  source 1..75: mol_type = other DNA
ggatatgggagcaaaggataaagcgacaggaaaatcacggagtgatgtgcagcaacgcattcagcagtttcacag

SEQ ID NO: 802586 - DNA, 75 bp, synthetic construct
  source 1..75: mol_type = other DNA
gtcttatcgccatgataacagcaacagtagctctcacagcctgtaccccaaatggcagcgtggaacaacataccc

SEQ ID NO: 802587 - DNA, 75 bp, synthetic construct
  source 1..75: mol_type = other DNA
gcgtgtccggtagacgccattgttggcgctacccgcgcaatgcatacagtgatgagcgatctgtgcacgggctgc

SEQ ID NO: 802588 - DNA, 75 bp, synthetic construct
  source 1..75: mol_type = other DNA
ctgactattaccagtatggtttgggcggtgatatttggtatggcggcggggattgtggccgccgtctggcgtaac

SEQ ID NO: 802589 - DNA, 75 bp, synthetic construct
  source 1..75: mol_type = other DNA
ctggcgattgatgtactcatccatcggataacccagccgacccttcagcaacaacgattacaacttactccgatt

SEQ ID NO: 802590 - DNA, 75 bp, synthetic construct
  source 1..75: mol_type = other DNA
atgagacgtaccggaaacaaactttgtcttatcgccatgataacagcaacagtagctctcacagcctgtacccca

SEQ ID NO: 802591 - DNA, 75 bp, synthetic construct
  source 1..75: mol_type = other DNA
cacagctgacgctgtagtaggcacagtcgttgctttgcttaatgaccgcaatcaatttattaaagaaagggttta

SEQ ID NO: 802592 - DNA, 75 bp, synthetic construct
  source 1..75: mol_type = other DNA
tggtgctggctattgcggcgctgggctggcagttgtggcggcttaacaatgccagtcacatcatcgagacgcagg

SEQ ID NO: 802593 - DNA, 75 bp, synthetic construct
  source 1..75: mol_type = other DNA
ctgcaggcggaattgtcggcagtttgtcacaatcacaactaggagacctgggcgaaaagctagtcaattcgcaat

SEQ ID NO: 802594 - DNA, 75 bp, synthetic construct
  source 1..75: mol_type = other DNA
aatctgtgtgttgacccgtgcccgacacaatgcatttccttacaaccggtcgcagaaacgcctgacagctggaaa

SEQ ID NO: 802595 - DNA, 75 bp, synthetic construct
  source 1..75: mol_type = other DNA
tggggaaaagatcaaccgctgcgcgcccggcggggaagccgtaatgttgaaaattgccgggctgcttaatgtcga

SEQ ID NO: 802596 - DNA, 75 bp, synthetic construct
  source 1..75: mol_type = other DNA
atgaatgctatctggattgccgttgccgccgtgagcctgttaggcctggtgtttggcgccattctgggttatgcc

SEQ ID NO: 802597 - DNA, 75 bp, synthetic construct
  source 1..75: mol_type = other DNA
gtacgccagcaactgggactggatcagccgatgtacattcagttctggcattatatcaccagcgccgtgcaaggc

SEQ ID NO: 802598 - DNA, 75 bp, synthetic construct
  source 1..75: mol_type = other DNA
ctgtgcctgttctggtcgtggctggtggcgcgatatctcgaccgtacacagtcgtctgtcggcggaggtaaatag

SEQ ID NO: 802599 - DNA, 75 bp, synthetic construct
  source 1..75: mol_type = other DNA
atgacgcttgagcgaatcagcgcctttattacgtattgcatcgccgtcgtgctggcctggctgggcgatttgtcc

SEQ ID NO: 802600 - DNA, 75 bp, synthetic construct
  source 1..75: mol_type = other DNA
ttacattgtccggtggcgaggcactggctcagccagcatttgcggcagcattgctggctgcctgcaaagccagag

SEQ ID NO: 802601 - DNA, 75 bp, synthetic construct
  source 1..75: mol_type = other DNA
attgagcgaaaagagtctttaagaccattatctgaatacgaactgaagaacctaattgggggcatgacaaaggaa

SEQ ID NO: 802602 - DNA, 75 bp, synthetic construct
  source 1..75: mol_type = other DNA
atgaagattaaattaaataacgtgagattagcttttcctgctctgtttgaagctaaaactgtaaacggcgaaggc

SEQ ID NO: 802603 - DNA, 75 bp, synthetic construct
  source 1..75: mol_type = other DNA
ttcctgcgcgacggtgacgccttcgctggcggcggtgttgccgcaccggacgacttcgacgacatcagcgaaggt

SEQ ID NO: 802604 - DNA, 75 bp, synthetic construct
  source 1..75: mol_type = other DNA
ttttgaaaatatgtgaagccgcttttaaattggctacacaagaggttaatcggcttgcagctatcgttaaagagt

SEQ ID NO: 802605 - DNA, 75 bp, synthetic construct
  source 1..75: mol_type = other DNA
acagcaactaactaaaagagagactcgacttattgagttattcagacaaatgcctgaaagcgaaaaagacaggat

SEQ ID NO: 802606 - DNA, 75 bp, synthetic construct
  source 1..75: mol_type = other DNA
cacagcaactctccaggccgccgatgtcactatcactgttaatggtcgggtagtcgctaaaccctgcactattca

SEQ ID NO: 802607 - DNA, 75 bp, synthetic construct
  source 1..75: mol_type = other DNA
gatgaggtatttccctatgtcgatcttgctctgaccgatattaaagccatcgatccggaaatccatgagcgcaac

SEQ ID NO: 802608 - DNA, 75 bp, synthetic construct
  source 1..75: mol_type = other DNA
aataacccgcgtttacatggcgtctttagtgatgcgcagtggaccaataaagagcgtctgcccgatcatctgttg

SEQ ID NO: 802609 - DNA, 75 bp, synthetic construct
  source 1..75: mol_type = other DNA
cagtagcgtaaaactcaaaagaaatatcaaggtattgtttgatagcttggatagcattggctatgaaattgatag

SEQ ID NO: 802610 - DNA, 75 bp, synthetic construct
  source 1..75: mol_type = other DNA
gccgtttttacccagcttgatgaatctgcgttggccatggctcttgaatactatgaggaagaagaagccctcaaa

SEQ ID NO: 802611 - DNA, 75 bp, synthetic construct
  source 1..75: mol_type = other DNA
acaagatcctcgccatcgcggaagaagaaggtgtgcgccaggcggcgtatgcgctcaagctgttgcagtcggacg

SEQ ID NO: 802612 - DNA, 75 bp, synthetic construct
  source 1..75: mol_type = other DNA
gggccgtgccgatgggggatctggccgatgcggcgagtatcgcgccgcaggccagcgcagagcctgcacacctta

SEQ ID NO: 802613 - DNA, 75 bp, synthetic construct
  source 1..75: mol_type = other DNA
ctgcgtaaaggcacggcgttacatctgtacctgcccggcgctcacggcggtgtgtggaacgagcaggcgctgatc

SEQ ID NO: 802614 - DNA, 75 bp, synthetic construct
  source 1..75: mol_type = other DNA
atgcgccgccagcttgagtacaagcagctctggcgtggcggtcaggtactggctgttccgccagcgtacacaagc

SEQ ID NO: 802615 - DNA, 75 bp, synthetic construct
  source 1..75: mol_type = other DNA
atcgatgccatgtcgttctgggtggccgggttccgcaatgtcacggcggcttacggggtgaacggcttcaccgat

SEQ ID NO: 802616 - DNA, 75 bp, synthetic construct
  source 1..75: mol_type = other DNA
ctggtgacgaagcagtacacggtaaaaggcccggtgatgctgatgctgaccaccaccgcgatcgacgttgacgag

SEQ ID NO: 802617 - DNA, 75 bp, synthetic construct
  source 1..75: mol_type = other DNA
ctcgacgattacgaagacctcgaatttatccctcgcccgcattcccacgactgggacatctatcaggaaatcgac

SEQ ID NO: 802618 - DNA, 75 bp, synthetic construct
  source 1..75: mol_type = other DNA
gatagttgggtgttcgattattcaggcagccgctgctatgcccactttcgtcaggataaaatcagtaaccaatta

SEQ ID NO: 802619 - DNA, 75 bp, synthetic construct
  source 1..75: mol_type = other DNA
tgttgccaagtattacattctggcgacgcctgcactggcactgattcgagccaaagcattgggtatcaatccggt

SEQ ID NO: 802620 - DNA, 75 bp, synthetic construct
  source 1..75: mol_type = other DNA
agccctgttccggcagaacgggaaaaccccgtcccgcaatcatactgcggcccgtccgggccggagcaacaccga

SEQ ID NO: 802621 - DNA, 75 bp, synthetic construct
  source 1..75: mol_type = other DNA
ggtacgtcactacggatcggttgattctggcgctcccgccagaaatcggtgcactggttaagcattatatagatg

SEQ ID NO: 802622 - DNA, 75 bp, synthetic construct
  source 1..75: mol_type = other DNA
ttatcgtgtgcatcgcgcatggctagacgcaattgaatatgtttcgaagcaaggaatatttaactttaaattgtt

SEQ ID NO: 802623 - DNA, 75 bp, synthetic construct
  source 1..75: mol_type = other DNA
ttcttgcctgtggagagatggtgcagtcaggccgcccgttgaagcaggaacccaccgaaatgattcaggcgacag

SEQ ID NO: 802624 - DNA, 75 bp, synthetic construct
  source 1..75: mol_type = other DNA
ctcacgaactacaaaatcatcgctgcatcaatatgcgtctgccaactgccggtggactttatcactgggagtttg

SEQ ID NO: 802625 - DNA, 75 bp, synthetic construct
  source 1..75: mol_type = other DNA
taccaaagcagcgggcaaactcggcgtctctcagtctgcacttagccatgcaatgaaggctctggaggaaaggct

SEQ ID NO: 802626 - DNA, 75 bp, synthetic construct
  source 1..75: mol_type = other DNA
tgtcgatattgttgaagggcgttttgatgccgggatacgtctgggtgaaactgtggataacgatatgattgcagt

SEQ ID NO: 802627 - DNA, 75 bp, synthetic construct
  source 1..75: mol_type = other DNA
attgcctcattaaaaacccgatgcagtcccgcgtggtaaagaaactgatcggcctggtatggctggcaggtcagg

SEQ ID NO: 802628 - DNA, 75 bp, synthetic construct
  source 1..75: mol_type = other DNA
aatgcttgggtaaaaactcacttcaggagcgcgtagtaaaaaaactaataggcctagtatggcttgcaggacagg

SEQ ID NO: 802629 - DNA, 75 bp, synthetic construct
  source 1..75: mol_type = other DNA
cgcttgttcaactgaacggcactgcctccggcaatatccgtttatctgccggggagcatgccgtgcgaagtctgg

SEQ ID NO: 802630 - DNA, 75 bp, synthetic construct
  source 1..75: mol_type = other DNA
agcgaatgcgatgcaagggctgagggcgttccgcctgctggaagtttgcttcctgatcacccgggaacattcctt

SEQ ID NO: 802631 - DNA, 75 bp, synthetic construct
  source 1..75: mol_type = other DNA
gcatgattttcaacgatgagatggtccgggccatcctcgaaggaaggaaaacgcagacgcggcggataatgaaaa

SEQ ID NO: 802632 - DNA, 75 bp, synthetic construct
  source 1..75: mol_type = other DNA
atctggcgcggtatttacgggcaagagaactggctatctaacccgtgggtatgggtaattgagtttaagcgtatt

SEQ ID NO: 802633 - DNA, 75 bp, synthetic construct
  source 1..75: mol_type = other DNA
tgtcgatattgttgaaggccgttttgatgccgggatacgtctgggtgaaactgttgataatgatatgattgcagt

SEQ ID NO: 802634 - DNA, 75 bp, synthetic construct
  source 1..75: mol_type = other DNA
tgtcgatattgttgaaggtcgttttgatgccgggatacgtctgggtgaaactgtcgataatgatatgattgcagt

SEQ ID NO: 802635 - DNA, 75 bp, synthetic construct
  source 1..75: mol_type = other DNA
tgtcgatattgttgaaggacgttttgatgccgggatacgtctgggtgaaactgtagataaggatatgattgcagt

SEQ ID NO: 802636 - DNA, 75 bp, synthetic construct
  source 1..75: mol_type = other DNA
ttgtctcggctgatgccggggcgcgcggcggtaaaatcattccgtataaaaaattgctcgacgatgcgataagtc

SEQ ID NO: 802637 - DNA, 75 bp, synthetic construct
  source 1..75: mol_type = other DNA
ggttgccgcaaccggtccgggcgtcgacaccccagcatgccttgaaaaggtgcgtgccctgatggcgcaagaact

SEQ ID NO: 802638 - DNA, 75 bp, synthetic construct
  source 1..75: mol_type = other DNA
cggggatcaacatccgtacatttgaggttgccgcaaccggtccgggcgtcgacaccccagcatgcctggaaaaag

SEQ ID NO: 802639 - DNA, 75 bp, synthetic construct
  source 1..75: mol_type = other DNA
gcaagcctggccggatctcggtaaagagagcgggttggccctgcgcgatggcgatgtgttactgcctgccgccga

SEQ ID NO: 802640 - DNA, 75 bp, synthetic construct
  source 1..75: mol_type = other DNA
gcggccctttccctggcgccctgggaaaaagcactcgctgcctcgtttgtacatctgcggtttatgggcgaccgg

SEQ ID NO: 802641 - DNA, 75 bp, synthetic construct
  source 1..75: mol_type = other DNA
catctgtttggtcaccataagggggcatttaccggggcaagtgagaataaaacgggattggtggagcaagctgac

SEQ ID NO: 802642 - DNA, 75 bp, synthetic construct
  source 1..75: mol_type = other DNA
atgctcattgatgatattgattttgcggacctttacctgcagcaactcaagctggcccaccgcacagaaaaaacg

SEQ ID NO: 802643 - DNA, 75 bp, synthetic construct
  source 1..75: mol_type = other DNA
gctggcccaccgcacagaaaaaacgccggatcactgggatcaacgggcggaaaaaatggcggaaaattgcgcctc

SEQ ID NO: 802644 - DNA, 75 bp, synthetic construct
  source 1..75: mol_type = other DNA
atgctggatgaaatccgggaggttgacggcagggaggcgggaaatatcgcttatatgctggctaacgggcagggc

SEQ ID NO: 802645 - DNA, 75 bp, synthetic construct
  source 1..75: mol_type = other DNA
gggcgtcgcagaagtttgggtggcaactgacgatcagcgtgttgaacaggccgtgcaagcgtttggcgggaaagc

SEQ ID NO: 802646 - DNA, 75 bp, synthetic construct
  source 1..75: mol_type = other DNA
tcgtttcttcatggaagcaattataggtgatggcattctgacacctagcgaacgcaaccgaccacctcatttaag

SEQ ID NO: 802647 - DNA, 75 bp, synthetic construct
  source 1..75: mol_type = other DNA
cattggcggctttggtgcgccgtacgtttgatgtcggtttatctaccgaatggcattatcgacagctatcgatag

SEQ ID NO: 802648 - DNA, 75 bp, synthetic construct
  source 1..75: mol_type = other DNA
ggggcgtggcgcaaaaacggcgcaacgcgcgtgctggctgccattgatgcgcggatgggcgaagtttactgggcc

SEQ ID NO: 802649 - DNA, 75 bp, synthetic construct
  source 1..75: mol_type = other DNA
aggctaccgaacaggcacaggctaccgaacaggcacaggccacagagcaggcacaggccacagagcaggcacagg

SEQ ID NO: 802650 - DNA, 75 bp, synthetic construct
  source 1..75: mol_type = other DNA
acatgaagattattttacgcccggagcagtatcaacagatgatgctggaattaaaagcagaacttcagggtaata

SEQ ID NO: 802651 - DNA, 75 bp, synthetic construct
  source 1..75: mol_type = other DNA
cgtcttaactcactgaatttatcggaaaaaacattacgaaatactatcaggtttgagcgtggcaagctgtataat

SEQ ID NO: 802652 - DNA, 75 bp, synthetic construct
  source 1..75: mol_type = other DNA
ttctcagatgccgctaatgagcaagcttcaaaggttcttaagtcgggtaatgctttacggaaatttagtgtgaat

SEQ ID NO: 802653 - DNA, 75 bp, synthetic construct
  source 1..75: mol_type = other DNA
gcggggaacgtgactactgaacgcaataatgcacctatgcttatgtgtaaggaactgtacagctactcagcgtct

SEQ ID NO: 802654 - DNA, 75 bp, synthetic construct
  source 1..75: mol_type = other DNA
ctggtcaccgatcgccgcgaatttgaactggctgaagagggttttatcacccttaccatgcgtaaagactctgat

SEQ ID NO: 802655 - DNA, 75 bp, synthetic construct
  source 1..75: mol_type = other DNA
catcgtgatgggcgtaagagcgcaacaaaaagaaaaaacccgccgttctctggtggaagccgcatttggccaatt

SEQ ID NO: 802656 - DNA, 75 bp, synthetic construct
  source 1..75: mol_type = other DNA
cggcatttccgcgacgtagatgaacttggtctgacaatggttgatgaaagcggcttaatgctgcgtcagctaatg

SEQ ID NO: 802657 - DNA, 75 bp, synthetic construct
  source 1..75: mol_type = other DNA
gagtatcagcgcgatgaaaatggcgtctggcacggtgaagaaacagaagcagtgctgaaacctgaattagtccat

SEQ ID NO: 802658 - DNA, 75 bp, synthetic construct
  source 1..75: mol_type = other DNA
atatgaagaataccatactccagtgtatgcggtgtctttctcgaaggatgaattcagtgaagatattaagacttt

SEQ ID NO: 802659 - DNA, 75 bp, synthetic construct
  source 1..75: mol_type = other DNA
gaatatgactcaagagaaaaacttaacgaaagaaattctcagcaaacgtcaggacgagcgggaggttacaagtcg

SEQ ID NO: 802660 - DNA, 75 bp, synthetic construct
  source 1..75: mol_type = other DNA
aaaggtgagttgctttcgcgtatagagaacgagaaaattgaaaattactctgtattcaaagatattgttgcagag

SEQ ID NO: 802661 - DNA, 75 bp, synthetic construct
  source 1..75: mol_type = other DNA
cacggcgcttaccgtcagtctgctgactgaaggatggatcgtggcggctgtcgctgccaccaatttactgaaggt

SEQ ID NO: 802662 - DNA, 75 bp, synthetic construct
  source 1..75: mol_type = other DNA
tatgaagatgccgataaggaactggagatggtagaaatgttgtacgaaatgagagaaaaagcggggttaacaaag

SEQ ID NO: 802663 - DNA, 75 bp, synthetic construct
  source 1..75: mol_type = other DNA
tgcaggggttattcgcctgatgagttggtatcgtcagcgttcaatgaaaggcagctggctacagctcgttattgg

SEQ ID NO: 802664 - DNA, 75 bp, synthetic construct
  source 1..75: mol_type = other DNA
cggctatttcttcatccgcgcaccggagctgggcatttttgccattgcggcatttattgccggtttgttctgtgt

SEQ ID NO: 802665 - DNA, 75 bp, synthetic construct
  source 1..75: mol_type = other DNA
cactccagaagctatcaaaggatacgaagaggctgataaagagctggagatggtcgaaatgttatacgaaatgag

SEQ ID NO: 802666 - DNA, 75 bp, synthetic construct
  source 1..75: mol_type = other DNA
ttatatcactggaaacctgttggagagaagcggtacggcgaaggtatcttaattctcgtcgtttggccggaaggg

SEQ ID NO: 802667 - DNA, 75 bp, synthetic construct
  source 1..75: mol_type = other DNA
aacgccttttgcgatcgtaccactggttgttttttggcttatcgtcaataaaaagctacgcgccaaatacaaaaa

SEQ ID NO: 802668 - DNA, 75 bp, synthetic construct
  source 1..75: mol_type = other DNA
ctggaagaaggccgccaaagctcaatgtttgacgaccatccggcatccgccgaacgcgcccagcatattcgcgat

SEQ ID NO: 802669 - DNA, 75 bp, synthetic construct
  source 1..75: mol_type = other DNA
atcgcaatcacaactcggcgacctgggcgagaaactggtcaactcgcaattctctcagcgccaggaatcggaagc

SEQ ID NO: 802670 - DNA, 75 bp, synthetic construct
  source 1..75: mol_type = other DNA
gaaatcctaacggacttattcacaatgttagaatgtaaaataaataaaataatcgaattgctcaacaaggagggc

SEQ ID NO: 802671 - DNA, 75 bp, synthetic construct
  source 1..75: mol_type = other DNA
taattcacggtgagggggatgtgtatgaatggaactcaggcgtcagaatgcacggcacaggccgggctgctgtta

SEQ ID NO: 802672 - DNA, 75 bp, synthetic construct
  source 1..75: mol_type = other DNA
gtgagggctttgttaactcctgaagtcgcccatcgcatggggattgtgttatttcgtcccggcgcggaactgatg

SEQ ID NO: 802673 - DNA, 75 bp, synthetic construct
  source 1..75: mol_type = other DNA
ggatgattattcctacgatttgttgcgccaacgcggcatcagcccggcaggtctcgccaccagctttgaaaaact

SEQ ID NO: 802674 - DNA, 75 bp, synthetic construct
  source 1..75: mol_type = other DNA
acaacaagatgctcgtgccctcgcccctgccagccgcgactgggcgctcatctggtgggatagcgtaccgcagga

SEQ ID NO: 802675 - DNA, 75 bp, synthetic construct
  source 1..75: mol_type = other DNA
tcaatcccccaaaaatatggcggacgaggttacgattcttatcaactgtgcgctttgcatgaagtgatggctggg

SEQ ID NO: 802676 - DNA, 75 bp, synthetic construct
  source 1..75: mol_type = other DNA
attgaaagctaaaggcatgaaacaaaaagctatagccgaggcgttaggcatcgacttgaacactgttaaatatca

SEQ ID NO: 802677 - DNA, 75 bp, synthetic construct
  source 1..75: mol_type = other DNA
tgggcgcaatggcttaatttctccggttatgacgctgagacggtgttacgccttaaggttgaagcaatgacctat

SEQ ID NO: 802678 - DNA, 75 bp, synthetic construct
  source 1..75: mol_type = other DNA
gtggcatttgctgtcagcctggcctttgctgcaccactgttacggctggttggtatggacggcggcggctaccac

SEQ ID NO: 802679 - DNA, 75 bp, synthetic construct
  source 1..75: mol_type = other DNA
cgtgatttccgcgtgtcgggcacaacagaggaatggcgggagcatgtatcccgctactgtaccggcaactcccgc

SEQ ID NO: 802680 - DNA, 75 bp, synthetic construct
  source 1..75: mol_type = other DNA
gatttgcactggtggcgatggcgggcgagctggcaacccgtatggggatcaccggctggcctgagggagaagccc

SEQ ID NO: 802681 - DNA, 75 bp, synthetic construct
  source 1..75: mol_type = other DNA
catatgcagccagaattcgaaaaaaacaatctctttgctggattaacgggcggaattgaaagcatcgcacagttt

SEQ ID NO: 802682 - DNA, 75 bp, synthetic construct
  source 1..75: mol_type = other DNA
atccgcaatatgatacagatatcgaatcccgggcaaacgaactgtggaaaaaggctgtgcacactatcaataaca

SEQ ID NO: 802683 - DNA, 75 bp, synthetic construct
  source 1..75: mol_type = other DNA
caccttcaccaatacgccattcagcgaattcctgatgaccagcccggattgttcaacgatgcgtccgcagtttga

SEQ ID NO: 802684 - DNA, 75 bp, synthetic construct
  source 1..75: mol_type = other DNA
acgcctgttaaactggtatctgtgctaaagccaggagtaagagcgacgctcacgcaattacaggaagtttttaac

SEQ ID NO: 802685 - DNA, 75 bp, synthetic construct
  source 1..75: mol_type = other DNA
tctcgcggtagtttttaatatgtgccgcgtatttcctatgatgctggccccaaaaaataaaaacgctaaagtgaa

SEQ ID NO: 802686 - DNA, 75 bp, synthetic construct
  source 1..75: mol_type = other DNA
gggatggtgcctggtgttcgccagtaataaagatattgcattcatctcaacaattattgggctaattgatcattt

SEQ ID NO: 802687 - DNA, 75 bp, synthetic construct
  source 1..75: mol_type = other DNA
ggcgctggcgctgattgccgtctcttcggaaacagaagaagagcgcacctttaccttccgccagttacatgacga

SEQ ID NO: 802688 - DNA, 75 bp, synthetic construct
  source 1..75: mol_type = other DNA
gatgctcctggtacatataaggctggttatactatctgccgttcagcagatttaaaatcatgggaatatgtgcct

SEQ ID NO: 802689 - DNA, 75 bp, synthetic construct
  source 1..75: mol_type = other DNA
aactcattactacaaaggcaggaaacattaccgtttataattttgatgctgagacgaaggaatatatttccacat

SEQ ID NO: 802690 - DNA, 75 bp, synthetic construct
  source 1..75: mol_type = other DNA
gattgatactgcaatggcttccattagtctgattcaactgaaattgcaggccggacgtaaactgacgcaggcaga

SEQ ID NO: 802691 - DNA, 75 bp, synthetic construct
  source 1..75: mol_type = other DNA
gaaaatacaaccactatcgccccgttaacgccattcggtaaatgggatggtgagaaatgggtgacggataccgag

SEQ ID NO: 802692 - DNA, 75 bp, synthetic construct
  source 1..75: mol_type = other DNA
caactgaatatctcgctgtcggcgtcggtattccggcatgttcttgtttggatgcaccaggtacacataaagctg

SEQ ID NO: 802693 - DNA, 75 bp, synthetic construct
  source 1..75: mol_type = other DNA
tctttagcacagaaacaggagaatcaaaagaaatcaaagctccgggtgattaccctgaaaatacaaccactatcg

SEQ ID NO: 802694 - DNA, 75 bp, synthetic construct
  source 1..75: mol_type = other DNA
aatcacaaatccgggtgattaccctgaaaatacaaccaatatcgccccgttaacgccatatgataaatgggatgg

SEQ ID NO: 802695 - DNA, 75 bp, synthetic construct
  source 1..75: mol_type = other DNA
atagtaccgaaacgggagataccaaagaaatcgcagttccgggtgattatcctgaaaatacaaccactatcgccc

SEQ ID NO: 802696 - DNA, 75 bp, synthetic construct
  source 1..75: mol_type = other DNA
taacaccatacgataaatgggatggtgaaaaatgggtgacagatactgaggtacaacatcgtgccgcagtagaag

SEQ ID NO: 802697 - DNA, 75 bp, synthetic construct
  source 1..75: mol_type = other DNA
tatgcccgtttgttccactggtattgacccgggcgaatacattccgggaagagtggcagtatttacgggtaaggg

SEQ ID NO: 802698 - DNA, 75 bp, synthetic construct
  source 1..75: mol_type = other DNA
aggccgggcggaagctgacgcaggcagaaaccacccgacttaacgccgtgctggattacattgacgcggtgacgg

SEQ ID NO: 802699 - DNA, 75 bp, synthetic construct
  source 1..75: mol_type = other DNA
cggcattccggcatattcctgtttagatgctccaggcacctacaaagctggttatgcaatctgccgctctgcaga

SEQ ID NO: 802700 - DNA, 75 bp, synthetic construct
  source 1..75: mol_type = other DNA
ctgtgctggattacattgacgcggtgactgcaacagataccagcaccgcgccggatgtcatctggcctgaactac

SEQ ID NO: 802701 - DNA, 75 bp, synthetic construct
  source 1..75: mol_type = other DNA
cgtcttattgatgcacataaccaggccgtggattttgctgtccgtcaggtagaggcgctggcctccacacgggtt

SEQ ID NO: 802702 - DNA, 75 bp, synthetic construct
  source 1..75: mol_type = other DNA
gttatactatctgccgttcagcagatttaaaatcatgggaatatatgccagaccatcgcggtgaaatcgttttta

SEQ ID NO: 802703 - DNA, 75 bp, synthetic construct
  source 1..75: mol_type = other DNA
gcacagcatcgcgccgcagtagacgcggcagaagcacagcgtcagtcactgattgatactgcaatggcttccatt

SEQ ID NO: 802704 - DNA, 75 bp, synthetic construct
  source 1..75: mol_type = other DNA
atcgctggcaggggggagaacagcgaccggcaaccatcatcagtgaaccggaccgtaatgtccgctatgcccggc

SEQ ID NO: 802705 - DNA, 75 bp, synthetic construct
  source 1..75: mol_type = other DNA
gggcagagcaacatattgacctggcctatgccatcaccgcccacggtgcgcagggggcgagtgaaacctttgcca

SEQ ID NO: 802706 - DNA, 75 bp, synthetic construct
  source 1..75: mol_type = other DNA
ttcttcgccatattctcgaaggtaaggaggcggtcacgccgctgatggagagagtacctggcgaactcatggaga

SEQ ID NO: 802707 - DNA, 75 bp, synthetic construct
  source 1..75: mol_type = other DNA
gaagagtggcagtatttacaggtaagggatggagccatgaagaagaccatcgcaatgagactgtttactcaatcg

SEQ ID NO: 802708 - DNA, 75 bp, synthetic construct
  source 1..75: mol_type = other DNA
gagacacgggaatatatttccgaatcaactgaatatcttgctgtgggtgtcggtattccggcaaattcctgttta

SEQ ID NO: 802709 - DNA, 75 bp, synthetic construct
  source 1..75: mol_type = other DNA
acgcttcttgagcctgtaataaatgagttgcaggaaatagatctattgcacgacagatataaagaacagcacacc

SEQ ID NO: 802710 - DNA, 75 bp, synthetic construct
  source 1..75: mol_type = other DNA
aatcacagctccgggtgattaccctgaaaatacaaccactatcgccccgttaacgccattcgataaatgggatgg

SEQ ID NO: 802711 - DNA, 75 bp, synthetic construct
  source 1..75: mol_type = other DNA
acaccgaaacgggagatgccaaagaaatcacagcaccaggcgactatcccgaaaatacaaccactctcgcaccgt

SEQ ID NO: 802712 - DNA, 75 bp, synthetic construct
  source 1..75: mol_type = other DNA
cggcagaaacacaacgccagtcgctgattgatactgcaatggcttccattagtctgattcagctgaaattacagg

SEQ ID NO: 802713 - DNA, 75 bp, synthetic construct
  source 1..75: mol_type = other DNA
gaccatcgcggtgaaatcgtctataacaccgaaacgggagacgccaaagaaatcacagctccgggtgattaccct

SEQ ID NO: 802714 - DNA, 75 bp, synthetic construct
  source 1..75: mol_type = other DNA
tgagaaatgggtgacagataccgaggcacagcacggcgcagcggtagatgcagcagaagcacagcgccagtcgct

SEQ ID NO: 802715 - DNA, 75 bp, synthetic construct
  source 1..75: mol_type = other DNA
ccgggcggaagctgacgcaggcagaaacaacccgacttaacgtcgtgctggattacattgacgcggtgacggtaa

SEQ ID NO: 802716 - DNA, 75 bp, synthetic construct
  source 1..75: mol_type = other DNA
cacgccctcaccatcctacgggcctgtgcggagaaacacgccggagtgaaagatgcctatgagaacaaacacttc

SEQ ID NO: 802717 - DNA, 75 bp, synthetic construct
  source 1..75: mol_type = other DNA
catacccaaacgctggcagctgcggagctctctaagcagaactttatcaaccttatttgcggctttctgcgcaat

SEQ ID NO: 802718 - DNA, 75 bp, synthetic construct
  source 1..75: mol_type = other DNA
ctgttacaaaaagtggcgaaagaagaggggttccctctgacggagggcgtgttcgtctcgtatccggggccgaat

SEQ ID NO: 802719 - DNA, 75 bp, synthetic construct
  source 1..75: mol_type = other DNA
gattacactgacgcggtgacggcaacagataccagcaccgcgcctgatattatttggcctgtattccctgagact

SEQ ID NO: 802720 - DNA, 75 bp, synthetic construct
  source 1..75: mol_type = other DNA
ccggagcgcagaaaaacagatttggtctgattctttatattatactattatcagttatttatatattgataacaa

SEQ ID NO: 802721 - DNA, 75 bp, synthetic construct
  source 1..75: mol_type = other DNA
atgctacaaaaagaaaaaagaccaaagtttggtatagttctttttattattcttttgtctgttgtttatatattt

SEQ ID NO: 802722 - DNA, 75 bp, synthetic construct
  source 1..75: mol_type = other DNA
cgtatttggtacgcgactgagacgtgctgaagatgtatttccgccagtgattggggttgctgctcataaaggtgg

SEQ ID NO: 802723 - DNA, 75 bp, synthetic construct
  source 1..75: mol_type = other DNA
cggtattccagcatgttcctgtcttgatgcacctggcatacataaggttggttatgcaatctgtcgttctgtgaa

SEQ ID NO: 802724 - DNA, 75 bp, synthetic construct
  source 1..75: mol_type = other DNA
tatttccatgccttcgtgggaaatggatgaactaaaacaaatagcaaaagtgggatttcctctgttaaacatgga

SEQ ID NO: 802725 - DNA, 75 bp, synthetic construct
  source 1..75: mol_type = other DNA
tctgattctttatattatactattatcagttgtttatatattgataacgggacttaatctcacagccacatatta

SEQ ID NO: 802726 - DNA, 75 bp, synthetic construct
  source 1..75: mol_type = other DNA
gaaatccgctttctcggcaacagttttaccatattatctcgacttccggtggtaatgccgggttgtcactggaga

SEQ ID NO: 802727 - DNA, 75 bp, synthetic construct
  source 1..75: mol_type = other DNA
tattaccgtttataattatgatggtgaaacgcgggaatatatttctacatcaactgaatatctcgctgtcggcgt

SEQ ID NO: 802728 - DNA, 75 bp, synthetic construct
  source 1..75: mol_type = other DNA
tggtattccggctaattcctgtttagatgccccaggcgcacataaatctggctatgctattcgccgttcggagga

SEQ ID NO: 802729 - DNA, 75 bp, synthetic construct
  source 1..75: mol_type = other DNA
gcattgacactgggaatcccgaagaaatcacggtgttgggtgactatccggaaaatacaaccactatcgccccgc

SEQ ID NO: 802730 - DNA, 75 bp, synthetic construct
  source 1..75: mol_type = other DNA
agtttattgccacgaaggcggggaatattaccgtctataactacgatggtgaaactcgggaatatatttctgcat

SEQ ID NO: 802731 - DNA, 75 bp, synthetic construct
  source 1..75: mol_type = other DNA
ccggacggaagctgacgcaggcagaaacaacccgccttaacgccgtgctggattacattgacgcggtgacggcaa

SEQ ID NO: 802732 - DNA, 75 bp, synthetic construct
  source 1..75: mol_type = other DNA
aattacagtaccgggagattatcctgaaaatacaaccactctcgctccgttaacgtcatacgataaatgggatgg

SEQ ID NO: 802733 - DNA, 75 bp, synthetic construct
  source 1..75: mol_type = other DNA
tgagaaatgggtgacggataccgaagcacagcatagcgccgcagtagaagcggcagaaacacaacgccagtcgct

SEQ ID NO: 802734 - DNA, 75 bp, synthetic construct
  source 1..75: mol_type = other DNA
atgaccacaaaaaaaatcactttggatgaaaacggatttgccacagaggctggcttcattaccgtttacaactac

SEQ ID NO: 802735 - DNA, 75 bp, synthetic construct
  source 1..75: mol_type = other DNA
accgatgcacagcatagcgccgcagtagatgcagcagaagcacaacgccagtcgctgattgatactgcaatggct

SEQ ID NO: 802736 - DNA, 75 bp, synthetic construct
  source 1..75: mol_type = other DNA
gctgaagatgtatttccgccagtgattggggttgctgctcataaaggtggtgtttataaaacctctgtttctgtt

SEQ ID NO: 802737 - DNA, 75 bp, synthetic construct
  source 1..75: mol_type = other DNA
gacgaaggctattgctattgcgcagtttaatgatgacagcccggacgcgagaaaaatcacccggcgctggagaat

SEQ ID NO: 802738 - DNA, 75 bp, synthetic construct
  source 1..75: mol_type = other DNA
ccggacgtaaactgacgcaggcagaaacaacccggcttaacgctgtgctggattacattgacgcggtgacggcaa

SEQ ID NO: 802739 - DNA, 75 bp, synthetic construct
  source 1..75: mol_type = other DNA
tgcattcgcactgcgccacaacctggtgcaactggcagaacgtgcgggcatgaatgtgcagattctgcggaacaa

SEQ ID NO: 802740 - DNA, 75 bp, synthetic construct
  source 1..75: mol_type = other DNA
gcatgcgcgtttgcaggttaatccggcgatggcaagcgcggtggataccgtgacgggcctcggcgcttcgttcgg

SEQ ID NO: 802741 - DNA, 75 bp, synthetic construct
  source 1..75: mol_type = other DNA
tgaatgttcagacactgcgaaacaaactcaacccagatcaaccacatcagctcacagcgccagacatctggctgc

SEQ ID NO: 802742 - DNA, 75 bp, synthetic construct
  source 1..75: mol_type = other DNA
gccgcattacgtcatgagtgcaactgcagagatcgggcgtgttgctgctggtgcggtatctggcgatgtaaaaac

SEQ ID NO: 802743 - DNA, 75 bp, synthetic construct
  source 1..75: mol_type = other DNA
tcgtgcattcgcactgcgacacaatctggtgaaactggcagaacgtgcaggcatgaatgtacagattctgcggaa

SEQ ID NO: 802744 - DNA, 75 bp, synthetic construct
  source 1..75: mol_type = other DNA
agcagcattaactctgttacacgactgatggcgctggctgctgtttcattgcaagcccgtttacaggctaatcct

SEQ ID NO: 802745 - DNA, 75 bp, synthetic construct
  source 1..75: mol_type = other DNA
gccggtcgcagactggcgacattagaacaaaagtggctcaggatgcaggcacagcaggagaatatttctgagcaa

SEQ ID NO: 802746 - DNA, 75 bp, synthetic construct
  source 1..75: mol_type = other DNA
aaccccccgtcattgtggtgaaaaaacgtcgtactttttcgccaccgtccttatccgaaaaaaaagatattatcg

SEQ ID NO: 802747 - DNA, 75 bp, synthetic construct
  source 1..75: mol_type = other DNA
aacacgcaggtattcacttctgcggggcgtggcagtgagttccctgattctgctggttgtggtgacgggcgtggc

SEQ ID NO: 802748 - DNA, 75 bp, synthetic construct
  source 1..75: mol_type = other DNA
ttaccgatctgactgaagattcaacgctagtagatggttttctggctcagattcactgcctgccatgcgtaccga

SEQ ID NO: 802749 - DNA, 75 bp, synthetic construct
  source 1..75: mol_type = other DNA
atgtttgattataagatttccaaacacccgcattttgatgaagcctgtagagcttttgcacttcgtcacaatatg

SEQ ID NO: 802750 - DNA, 75 bp, synthetic construct
  source 1..75: mol_type = other DNA
gctgtcgccggcgtcccacgttatggcctggatggtcaccccaaagggcaggtctcagaatctgaagcacagagt

SEQ ID NO: 802751 - DNA, 75 bp, synthetic construct
  source 1..75: mol_type = other DNA
gccgcattacgtcatgagtgcaactgctgaaattgggcgtgtcgcggcaggtgcggtttctggcgatgtaaaaac

SEQ ID NO: 802752 - DNA, 75 bp, synthetic construct
  source 1..75: mol_type = other DNA
ccaaaaaagcgaccaaacgtaaacgtcacctgcgtccaaaagccatggtttccaaaggcgatctgggcctggtaa

SEQ ID NO: 802753 - DNA, 75 bp, synthetic construct
  source 1..75: mol_type = other DNA
cgtcacctgcgtccgaaagccatggtttccaaaggcgatctgggcctggtaatcgcgtgcctgccgtacgcataa

SEQ ID NO: 802754 - DNA, 75 bp, synthetic construct
  source 1..75: mol_type = other DNA
ccccgagtgtttctcgcaactcatcctggcaataagacagtgtatccacatctctctgatgactgagcgatggta

SEQ ID NO: 802755 - DNA, 75 bp, synthetic construct
  source 1..75: mol_type = other DNA
tagaccgcgcatttcttgcactttctcacagtgaaaatatgttggaaatattgcgcatatgtcttgaaacgcttg

SEQ ID NO: 802756 - DNA, 75 bp, synthetic construct
  source 1..75: mol_type = other DNA
gtatacgtcactggagccctgccggctcatttattacagcggaagctggtatctgatcgcgttacagaagggaaa

SEQ ID NO: 802757 - DNA, 75 bp, synthetic construct
  source 1..75: mol_type = other DNA
tttcaccgccagtttttcggcgcgcagttactggaagaagccggtatggttcagcttgcacaacagcagtaccgg

SEQ ID NO: 802758 - DNA, 75 bp, synthetic construct
  source 1..75: mol_type = other DNA
ttacacatgatgctatccgaatgggagccttccctgctgaaagcactggaacaaaaactcacggcagaacagtaa

SEQ ID NO: 802759 - DNA, 75 bp, synthetic construct
  source 1..75: mol_type = other DNA
ttatccgaaaaaacagatattatcgcacctgtatttactgaacagacggcagaatcagcccccgccggaataaat

SEQ ID NO: 802760 - DNA, 75 bp, synthetic construct
  source 1..75: mol_type = other DNA
ctatttctggtggatacctgcttctggcgattaccggtccgggcgcatatagcatcgaccgcctgctgaataaaa

SEQ ID NO: 802761 - DNA, 75 bp, synthetic construct
  source 1..75: mol_type = other DNA
caatttctggcggattcctgctgctggcaattaccggtccgggcgcgtatagcatcgaccgcctgctgaataaaa

SEQ ID NO: 802762 - DNA, 75 bp, synthetic construct
  source 1..75: mol_type = other DNA
acgctaataccgcgcccttgcacaaaaaaacaatcagcagcctgagtggcgcagtggagagtatgatgaaaaaat

SEQ ID NO: 802763 - DNA, 75 bp, synthetic construct
  source 1..75: mol_type = other DNA
cagtgcaggtcgtcgtgatgctatcagcagcattaactctgtaacacgactgatggcgctggctgctgtttcatt

SEQ ID NO: 802764 - DNA, 75 bp, synthetic construct
  source 1..75: mol_type = other DNA
atgttgagtttcagcgttgttaaatcggcaggcagtgccggaaactattacaccgataaggataattactatgtg

SEQ ID NO: 802765 - DNA, 75 bp, synthetic construct
  source 1..75: mol_type = other DNA
cgatgtgctggagccgggggctgaccgggaggtcatgaatgcagagcggctgttcagtacggcgcgggagctgcg

SEQ ID NO: 802766 - DNA, 75 bp, synthetic construct
  source 1..75: mol_type = other DNA
aggtgcatgggtaccggagcattccgtgacggagttcagccgcagtcatgaatcggcactggcggaagcgaagca

SEQ ID NO: 802767 - DNA, 75 bp, synthetic construct
  source 1..75: mol_type = other DNA
aaccagccgactcaacacggtgttggattacattgacgcggtgacggcaacagataccagcaccgcgccggatgt

SEQ ID NO: 802768 - DNA, 75 bp, synthetic construct
  source 1..75: mol_type = other DNA
gtcagggctattgccgggcaggagcaggacagggcttcgtcatcagaacgggaaactgcgctgccggagagtgtg

SEQ ID NO: 802769 - DNA, 75 bp, synthetic construct
  source 1..75: mol_type = other DNA
ctgggcagcatggaggaacgctgggccggcaggggggcagagcaactggggctgcagggtagtgtcgataaggat

SEQ ID NO: 802770 - DNA, 75 bp, synthetic construct
  source 1..75: mol_type = other DNA
cctgcgggatgcgcagggtgaaacgcaggtggtgcgtatttcttctctggacagcagctggtcgctgttccggcc

SEQ ID NO: 802771 - DNA, 75 bp, synthetic construct
  source 1..75: mol_type = other DNA
aaagatgccggggtgaacacatatcgctggcagggcggagaacagcgaccggcaaccatcatcagtgaaccggac

SEQ ID NO: 802772 - DNA, 75 bp, synthetic construct
  source 1..75: mol_type = other DNA
ctgggccggcaggggggctgaacagctgggactgcagggtcagtgtcgataaggatgtttttacccgtcttctgg

SEQ ID NO: 802773 - DNA, 75 bp, synthetic construct
  source 1..75: mol_type = other DNA
ctgtgagcgattcaccgttcacggcactgaagctggagagcggctgggtggaaacgcccgggcattccgtcagtg

SEQ ID NO: 802774 - DNA, 75 bp, synthetic construct
  source 1..75: mol_type = other DNA
cgatgtgtttgagccaagggctgaccgggaggtcatgaatgcagagcggctgttcagtacggcacgggaactgcg

SEQ ID NO: 802775 - DNA, 75 bp, synthetic construct
  source 1..75: mol_type = other DNA
cgggggagacagtcctgcacggtttattgcaccggggcgcaaatatccgcagccgtatgtggccctgccggcttt

SEQ ID NO: 802776 - DNA, 75 bp, synthetic construct
  source 1..75: mol_type = other DNA
gcaacgccgggtggcactattgtgaaagcgacacctacgtttgatcgcacacgcgcagatgatttgttgctggat

SEQ ID NO: 802777 - DNA, 75 bp, synthetic construct
  source 1..75: mol_type = other DNA
cgtgaactcggcgaactggcgagcggcgcggtatctgatgaacgtctgaccactgcccgtaagcacaacatgatt

SEQ ID NO: 802778 - DNA, 75 bp, synthetic construct
  source 1..75: mol_type = other DNA
gcagagatagggcgtgtcgcggcaggtgcggtttctggcgatgtaaaaaccagtgtaggccgtcgtgatgcgatc

SEQ ID NO: 802779 - DNA, 75 bp, synthetic construct
  source 1..75: mol_type = other DNA
acatgcgcgtttgcaggcgaatccggcgatggcaagcgcagtagataccgtgacgggcctcggcgcttcgttcgg

SEQ ID NO: 802780 - DNA, 75 bp, synthetic construct
  source 1..75: mol_type = other DNA
atgtttgattttcagatttccaaacatcctcactatgacgaagcgtgccgggcttttgcgcagcgtcacaacatg

SEQ ID NO: 802781 - DNA, 75 bp, synthetic construct
  source 1..75: mol_type = other DNA
gcagtcctatgtcatgcgcgcaatgagcgaactcggcgaactggcgaacggtgctgcatctgatgaacgcctgac

SEQ ID NO: 802782 - DNA, 75 bp, synthetic construct
  source 1..75: mol_type = other DNA
gaaagcgttaactccggcattcgcatgttgtcattgtcggctctggcgctgcatgcacgtctgcagactaatcca

SEQ ID NO: 802783 - DNA, 75 bp, synthetic construct
  source 1..75: mol_type = other DNA
agtcagctgaatatcccggaactccagcaaaggggattgctccttctggcttcggagagcaaggattttcgcctg

SEQ ID NO: 802784 - DNA, 75 bp, synthetic construct
  source 1..75: mol_type = other DNA
atgtgtatccaccttaacttaatgatttttaccaaaatcattaggggattcatcagccttgagcgtcatccctat

SEQ ID NO: 802785 - DNA, 75 bp, synthetic construct
  source 1..75: mol_type = other DNA
atttatcgcgaatttaacggtatatcggttttatgggatccaatatatgctccggtggactttgaacgtcatccc

SEQ ID NO: 802786 - DNA, 75 bp, synthetic construct
  source 1..75: mol_type = other DNA
gcaggcccgtttacaggctaatcctgcgatggcaagtgcagttgataccgtaactggtctcggtgcttcattcgg

SEQ ID NO: 802787 - DNA, 75 bp, synthetic construct
  source 1..75: mol_type = other DNA
gaagaagcagggctggtacagcttgcgcaacagcagtacaggatattgttcaggatgggaacgcaaatgatggtc

SEQ ID NO: 802788 - DNA, 75 bp, synthetic construct
  source 1..75: mol_type = other DNA
cgaaaagtgccgtcacagcacaacgcgacgcgctgctgggtgaactggcgaaactcgcacagtgctggcagtcac

SEQ ID NO: 802789 - DNA, 75 bp, synthetic construct
  source 1..75: mol_type = other DNA
gtttccattcgtctgcgcgacaagcgcgacggcaaagaagaccacttccactatgaaggcggcatcaaggcgttc

SEQ ID NO: 802790 - DNA, 75 bp, synthetic construct
  source 1..75: mol_type = other DNA
tcctggcagccactcataaagcattcccgcgcatttttgcgcgccagaacgcacaagctgcgccatccgcctcac

SEQ ID NO: 802791 - DNA, 75 bp, synthetic construct
  source 1..75: mol_type = other DNA
atgatgttcaaactggacactttcaaactcgattttaccggccttgcacttggcgtacctgtatgggaacaggta

SEQ ID NO: 802792 - DNA, 75 bp, synthetic construct
  source 1..75: mol_type = other DNA
ttgaccgtatccggcgtgaacgtctgcccggagaactggcatacgcgctgaaacaacaactgaggattgcgataa

SEQ ID NO: 802793 - DNA, 75 bp, synthetic construct
  source 1..75: mol_type = other DNA
gcaaaccaactggtgatcgcgctcgcggccctatgtccccggctgagctgaacaaaatcaacgccgatttctgga

SEQ ID NO: 802794 - DNA, 75 bp, synthetic construct
  source 1..75: mol_type = other DNA
agaaagctggaatagtggttcacagatgctcacgcaatccgtttaccggaaaccgcatttttgcattaagcaacg

SEQ ID NO: 802795 - DNA, 75 bp, synthetic construct
  source 1..75: mol_type = other DNA
ggcaggatttcaccctgcacgaagcattaagaacggcagaccggttaatcagcggtcgcagttttcagcacccgg

SEQ ID NO: 802796 - DNA, 75 bp, synthetic construct
  source 1..75: mol_type = other DNA
gctgtgcgcggttatcgccaacgtttcctatctggtgatcgtcttttccgcattaagtttcttcaccgatacacc

SEQ ID NO: 802797 - DNA, 75 bp, synthetic construct
  source 1..75: mol_type = other DNA
tgtggctgaccaacatctgcgtgcaaatttgtctggtactcatctggctgaccggttccgattacaacacgttgc

SEQ ID NO: 802798 - DNA, 75 bp, synthetic construct
  source 1..75: mol_type = other DNA
atctggataagaaaaccggtgatgaagacgcagaagaagatgcgaaggtaaccggagatgcggcgtataagcgca

SEQ ID NO: 802799 - DNA, 75 bp, synthetic construct
  source 1..75: mol_type = other DNA
ttaatcagtcttcatcacaggttgcccgggaaaccagggtgagacggaaactggtaaaggaacggtccagactga

SEQ ID NO: 802800 - DNA, 75 bp, synthetic construct
  source 1..75: mol_type = other DNA
ggcttttccgatcctaacgttgtgctgatcgccgctctgtttattattggcgatggccttgtgcgcacaggggtt

SEQ ID NO: 802801 - DNA, 75 bp, synthetic construct
  source 1..75: mol_type = other DNA
gtgaacggtgaattgatttgggttctttcattactggccgttgccatcgtcttgtttgcgacgggcagagtgcgt

SEQ ID NO: 802802 - DNA, 75 bp, synthetic construct
  source 1..75: mol_type = other DNA
atccgtggtattgcgcagatatcattcgtcgtcacaaaccagactttaccccacgcgttgcgtttattctgggtt

SEQ ID NO: 802803 - DNA, 75 bp, synthetic construct
  source 1..75: mol_type = other DNA
cgcgcctgatgatgccattgagttttgccggactgataagcggcatgatgacgctggtggcgacgccgcctaacc

SEQ ID NO: 802804 - DNA, 75 bp, synthetic construct
  source 1..75: mol_type = other DNA
ggcggttacgggccacatatgatgctgggttgtttgtttgtcttgtcggcggttattgggctatttatctctaat

SEQ ID NO: 802805 - DNA, 75 bp, synthetic construct
  source 1..75: mol_type = other DNA
gcgctgaacttaccagaagaagtgagtgaagcatcgccagcacacagtcaggcacctcatgccattttttgcctg

SEQ ID NO: 802806 - DNA, 75 bp, synthetic construct
  source 1..75: mol_type = other DNA
actgaaacaggcatttgatgagaatgttgaccgtatccggcgtgaacgcctgcctaaagaactggcatccgcgct

SEQ ID NO: 802807 - DNA, 75 bp, synthetic construct
  source 1..75: mol_type = other DNA
tatccgtcgtgaacgcctgcccaaagaactggcatatgcgctgaaacaacaactcagaattgcgataaaacgatg

SEQ ID NO: 802808 - DNA, 75 bp, synthetic construct
  source 1..75: mol_type = other DNA
tcgtcttcccattcaggtggttaaaattccgatggcggccccactgaagcaggcttttgatgagaacgttaaccg

SEQ ID NO: 802809 - DNA, 75 bp, synthetic construct
  source 1..75: mol_type = other DNA
acccgtggtattgcgcagatatcattcgtcgacataaaccagattttaccccacgcgtggtgtttattttgggat

SEQ ID NO: 802810 - DNA, 75 bp, synthetic construct
  source 1..75: mol_type = other DNA
gaaaactttgtaccgctaatgcaaacggcgcgttcgtgtccttctgccgcaaacctgaaaggctatgcgcagcta

SEQ ID NO: 802811 - DNA, 75 bp, synthetic construct
  source 1..75: mol_type = other DNA
aaaggaacttcctgacccacagtgaaatcgagtcactccttaaagcagcaaataccgggcctcatgctgcacgca

SEQ ID NO: 802812 - DNA, 75 bp, synthetic construct
  source 1..75: mol_type = other DNA
atgaaactacagcgcaattattcacagcagcgcttccgcaacggtgcggaacgccatgctaaccgtttcgctatc

SEQ ID NO: 802813 - DNA, 75 bp, synthetic construct
  source 1..75: mol_type = other DNA
acagatacggcgtgaacgtttgccgaaagaactggaatacgccctgaaacaacaactgaggattgcgataaagcg

SEQ ID NO: 802814 - DNA, 75 bp, synthetic construct
  source 1..75: mol_type = other DNA
gtcaccggctgggcggcgcacattatcgaacaacgtcaggacaacaaaattatccgtccttccgccaattacata

SEQ ID NO: 802815 - DNA, 75 bp, synthetic construct
  source 1..75: mol_type = other DNA
gcgcgccggtgcgactgattgtgccgtggaaatatggctttaaagggattaaatcgatcgtcagtattaagctga

SEQ ID NO: 802816 - DNA, 75 bp, synthetic construct
  source 1..75: mol_type = other DNA
ctcgatcacgatgatttaacccgtcgcttcccgctggaagagcgtatttatcgtatgcgctgcgtggaagcgtgg

SEQ ID NO: 802817 - DNA, 75 bp, synthetic construct
  source 1..75: mol_type = other DNA
accgctggctggagaaacagccagaggcgctggcattgattgccgtctcttcggaaacagaagaagagcgcacct

SEQ ID NO: 802818 - DNA, 75 bp, synthetic construct
  source 1..75: mol_type = other DNA
tcaatgagaaagggatgctggtggtggaagggccattgccgccgggctgtattcagaccatctggggcgacgacg

SEQ ID NO: 802819 - DNA, 75 bp, synthetic construct
  source 1..75: mol_type = other DNA
attcagaccatctggggcgacgacgaccgctttgtgaagacgtactggtcgctgttttcccgcccggtgtacgcc

SEQ ID NO: 802820 - DNA, 75 bp, synthetic construct
  source 1..75: mol_type = other DNA
aaatccgaatgcaaaaattatcgttaaccgcggtgatcttccagtgattaagctggggatcaggatgctgggccg

SEQ ID NO: 802821 - DNA, 75 bp, synthetic construct
  source 1..75: mol_type = other DNA
taccggctaacgtgcgtaccgtgctggaagccttaccggcggcgtcgcacccgatggatgttatgcgcaccggtg

SEQ ID NO: 802822 - DNA, 75 bp, synthetic construct
  source 1..75: mol_type = other DNA
aacacggcggggcgaatgaagtgtcgctggagatccagcaacgctacgaaacgccggacgaagccgaagccgata

SEQ ID NO: 802823 - DNA, 75 bp, synthetic construct
  source 1..75: mol_type = other DNA
cgggttacgctactttgcgcagccttaaccagattattacctatgatgcttaccatatggcggaagtgtacctga

SEQ ID NO: 802824 - DNA, 75 bp, synthetic construct
  source 1..75: mol_type = other DNA
aaaggaacttcctgacccaaagtgaaattgagtcactccttaaagcagcaaatactggaccacatgctgcacgta

SEQ ID NO: 802825 - DNA, 75 bp, synthetic construct
  source 1..75: mol_type = other DNA
ccgttgaaaacctcagccgtatcagcagaacggcggtgcccggtgcgtcagcaatggccattaaccgcgtggcca

SEQ ID NO: 802826 - DNA, 75 bp, synthetic construct
  source 1..75: mol_type = other DNA
tggcattccgttgccgttcaccctgatttacctgttctggtgcccgtttccgtccggcaacacgattttcatctg

SEQ ID NO: 802827 - DNA, 75 bp, synthetic construct
  source 1..75: mol_type = other DNA
ctgactcgcggagatgagcagttcgggcaggatttcaccctgcacgaagcattaagaacggcagaccggttaatc

SEQ ID NO: 802828 - DNA, 75 bp, synthetic construct
  source 1..75: mol_type = other DNA
taaaaacgccattcctgctgcttcagcaatggccattaaccgtgtggccacaacggcaataaatcagtcggcgtc

SEQ ID NO: 802829 - DNA, 75 bp, synthetic construct
  source 1..75: mol_type = other DNA
tcgatccatggacactgaaaatcagtggcgaagtgtcaaaaccattaacactcgatcacgatgatttaactcgtc

SEQ ID NO: 802830 - DNA, 75 bp, synthetic construct
  source 1..75: mol_type = other DNA
ccatcggcacggtcagcgccgttaatatcggatcgatgttccgaaatggctgggaaaacaatgtgaaatctattg

SEQ ID NO: 802831 - DNA, 75 bp, synthetic construct
  source 1..75: mol_type = other DNA
acagcaatatcccgacaatttctttgtccgctgtactttatttcccacccgcatttgatgaaagccacaagtacc

SEQ ID NO: 802832 - DNA, 75 bp, synthetic construct
  source 1..75: mol_type = other DNA
acaggttgcccgggagaccagggtgagccggaaactggtaaaggaacggtccagactgaaacgggcgacggtcag

SEQ ID NO: 802833 - DNA, 75 bp, synthetic construct
  source 1..75: mol_type = other DNA
gcaattgccattaaccgcgtggccacaacggcgattaatcagtcttcgtctcaggtcgcccgtgaaacccgggtg

SEQ ID NO: 802834 - DNA, 75 bp, synthetic construct
  source 1..75: mol_type = other DNA
ctggcatgttatgcaacgtcttccccaggccagatatgaggagggcaatgacgacaagggaaggaaaaagcgtaa

SEQ ID NO: 802835 - DNA, 75 bp, synthetic construct
  source 1..75: mol_type = other DNA
gggcgacagcgcgattgttttgctggcgctgccgcttgcgcatggtaacggcggtaatctcggtcagggcgagca

SEQ ID NO: 802836 - DNA, 75 bp, synthetic construct
  source 1..75: mol_type = other DNA
gaaaagccggaataccacgtggtgctgtgcgtcagacaggagtatttcgacggccccgaactggatcggttgatt

SEQ ID NO: 802837 - DNA, 75 bp, synthetic construct
  source 1..75: mol_type = other DNA
caggagtatttcgatggccctgaattggaccggttgatactggatgcctggagtaacgtactgggcttcgcgtca

SEQ ID NO: 802838 - DNA, 75 bp, synthetic construct
  source 1..75: mol_type = other DNA
gccacagcagcaaagatcccagcgttcaaagtgggcacctcgtggcgttttaagaaagaagagatagatatatgg

SEQ ID NO: 802839 - DNA, 75 bp, synthetic construct
  source 1..75: mol_type = other DNA
cccggacgtgacctctgctggctcctgacccgtcatcctgaaaaaccggaataccacgtggtgttatgcgtcaga

SEQ ID NO: 802840 - DNA, 75 bp, synthetic construct
  source 1..75: mol_type = other DNA
aacgcattcaacagcagacagacctggttcggtatggactttatcgaaaccgtcagtgcgctgatgaatgcaaca

SEQ ID NO: 802841 - DNA, 75 bp, synthetic construct
  source 1..75: mol_type = other DNA
catggtcatggtcgtgttgagcgcagcaaaacgctgtccgttaaaatcccggcaggggtggacactggagaccgc

SEQ ID NO: 802842 - DNA, 75 bp, synthetic construct
  source 1..75: mol_type = other DNA
gagtaacgtgctgggtttcgcgtcaccaggtgaagcaaagccgtaccagaagcagatcacccgggatgtggtact

SEQ ID NO: 802843 - DNA, 75 bp, synthetic construct
  source 1..75: mol_type = other DNA
cccggacgtgacctctgctggctcctgactcgtcatcctgaaaaaccggaataccacgtggtgctgtgcgtcaga

SEQ ID NO: 802844 - DNA, 75 bp, synthetic construct
  source 1..75: mol_type = other DNA
atgaatgctatcccttatttcgactatagcatggcacccttctggccatcttatcagaacaaaatcgttggcgtt

SEQ ID NO: 802845 - DNA, 75 bp, synthetic construct
  source 1..75: mol_type = other DNA
gcttcgtctgccgtgggaacatgacaacgccttcagtgacagaaaaatctggttcggtatggattttatcgaaac

SEQ ID NO: 802846 - DNA, 75 bp, synthetic construct
  source 1..75: mol_type = other DNA
ccaaccggcgagcacaacagcccgcgctcaaagagcttctttgatggtgtgaagaagttttttgacgacctgacc

SEQ ID NO: 802847 - DNA, 75 bp, synthetic construct
  source 1..75: mol_type = other DNA
ccgatccgtggacgttgaaaatcagtggtgaagtcgccaaaccgttaacgctcgaccacgacgccttaacccatc

SEQ ID NO: 802848 - DNA, 75 bp, synthetic construct
  source 1..75: mol_type = other DNA
aagaacgagagtctgctgtgataggcggactcctgttaggcgggcttacacctaacgcgcaagacgttcttgcta

SEQ ID NO: 802849 - DNA, 75 bp, synthetic construct
  source 1..75: mol_type = other DNA
tccgctatataagcgggcttttgaaattatccgggcgcaagccagaaacagaaatcttatcgacgcgttactggt

SEQ ID NO: 802850 - DNA, 75 bp, synthetic construct
  source 1..75: mol_type = other DNA
ttaatgaagctggctaaggccgaacgtcatgatctcgccgtagggcaattgtcgtggtcattgaaaatgatggcg

SEQ ID NO: 802851 - DNA, 75 bp, synthetic construct
  source 1..75: mol_type = other DNA
tatggaacacggtatacatagaaagagccattgaatccctgaaacgaaaaaagctcccgattaatgaccaactgc

SEQ ID NO: 802852 - DNA, 75 bp, synthetic construct
  source 1..75: mol_type = other DNA
ggatcagggatcttcatgataagcgactgtttattcacggaaaggctgagcgatatcctgggcttcagtccgtca

SEQ ID NO: 802853 - DNA, 75 bp, synthetic construct
  source 1..75: mol_type = other DNA
atgccattctatttcaggaaggagtgtccgttaaactcaggctacctcattccttccggtgtttctgcctttgcc

SEQ ID NO: 802854 - DNA, 75 bp, synthetic construct
  source 1..75: mol_type = other DNA
tatgtcgccttcgaaacgatttatgcgccggaacagatgccaggccagcaggaccgatttattggcggcggtttg

SEQ ID NO: 802855 - DNA, 75 bp, synthetic construct
  source 1..75: mol_type = other DNA
gtgcgccggtgcggctgattgtgccgtggaaatatggctttaaagggattaaatcgattgtcagtattaagctga

SEQ ID NO: 802856 - DNA, 75 bp, synthetic construct
  source 1..75: mol_type = other DNA
aaatatccttatatagaaggattacgtctcgacgaagcgatgcatccactcacgctgatgaccgtcggtgtctat

SEQ ID NO: 802857 - DNA, 75 bp, synthetic construct
  source 1..75: mol_type = other DNA
ggtcgatggtggtgccgtggattggttttccgctgcacaaattgctggcgcttgccgaacccaccagcaatgcga

SEQ ID NO: 802858 - DNA, 75 bp, synthetic construct
  source 1..75: mol_type = other DNA
gcggcaaatgccggcagtctgaaaactgatccgtggacgttgaaaatcagcggtgaagtcgctaaaccgttaacc

SEQ ID NO: 802859 - DNA, 75 bp, synthetic construct
  source 1..75: mol_type = other DNA
ctcgtgaacgtccgccaaccacctggaatctggcagcacctaatgaatacggtttttatgccaacgttaatccac

SEQ ID NO: 802860 - DNA, 75 bp, synthetic construct
  source 1..75: mol_type = other DNA
ggcccgcgcggcgtcagcttgcatccagtcaatgcaacaacgtccggcggtaagccgattctcgccacgaaacaa

SEQ ID NO: 802861 - DNA, 75 bp, synthetic construct
  source 1..75: mol_type = other DNA
aaagatgaaaacgatgcagcgtggaaaaacgcgcagcaaggttacgagaaagtcaaaaaactcgatgcagagcaa

SEQ ID NO: 802862 - DNA, 75 bp, synthetic construct
  source 1..75: mol_type = other DNA
gcgcagcaaggttacgagaaagtcaaaaagctcgattcggagcacaacaagttaatctggctgacgcccgcgcct

SEQ ID NO: 802863 - DNA, 75 bp, synthetic construct
  source 1..75: mol_type = other DNA
tgcaactcggaacgactcctgtggtgcgcggggcgattacttccggtgaactggatatctatccggaatataccg

SEQ ID NO: 802864 - DNA, 75 bp, synthetic construct
  source 1..75: mol_type = other DNA
acgggtgtaaccatcatcattgctgtctggacttccgtcgctctcctgttcttgcttcctgtgcaatttctggtg

SEQ ID NO: 802865 - DNA, 75 bp, synthetic construct
  source 1..75: mol_type = other DNA
agtggttacgcgacccggtgtttaaggactttgcttataacaagctgaaaaccatccgtaagctgaacgggatgc

SEQ ID NO: 802866 - DNA, 75 bp, synthetic construct
  source 1..75: mol_type = other DNA
tagttctcctttatatcgctggcgctatcctgatggcttgtttcatcacaagtaacgatctcgaccgtggagggc

SEQ ID NO: 802867 - DNA, 75 bp, synthetic construct
  source 1..75: mol_type = other DNA
acgctggtggcgacgccgccgaacctggtagtcaacagtgaattgctgcgtgaaggctatcacggtttcagtttc

SEQ ID NO: 802868 - DNA, 75 bp, synthetic construct
  source 1..75: mol_type = other DNA
attttgtgaagctgggggttccgtttaccattattgtgatggcggtttgtgtggtgatgatcccgatgctgtttc

SEQ ID NO: 802869 - DNA, 75 bp, synthetic construct
  source 1..75: mol_type = other DNA
cgattgcgctggctgctgccaaaactatgggcgtatcgccttatccttttgccatggttgtggcgatggcagcat

SEQ ID NO: 802870 - DNA, 75 bp, synthetic construct
  source 1..75: mol_type = other DNA
tgaaaacgatgcggcatggaaaaatgccgggcaaggctacgagaaagtcaaaaaactcgatgcagagcaaaacaa

SEQ ID NO: 802871 - DNA, 75 bp, synthetic construct
  source 1..75: mol_type = other DNA
gcgcggggcgattacttcgggcgaactggatatttacccggaatacaccggcaatggtgctttcttctttaaaga

SEQ ID NO: 802872 - DNA, 75 bp, synthetic construct
  source 1..75: mol_type = other DNA
ttgctctggcagcagcagtacgacattctttatactttatccccgtgcctgaaaacatgtgctaaggacacggga

SEQ ID NO: 802873 - DNA, 75 bp, synthetic construct
  source 1..75: mol_type = other DNA
cacagattctggcggcgaaccccaatgccgaccgcgcacactatgttgacggcatgaagtttgaaccggaagtgt

SEQ ID NO: 802874 - DNA, 75 bp, synthetic construct
  source 1..75: mol_type = other DNA
ttatttccctgacggctgcctctggccttacctccgcttacgctgtacaactggctgacgatgaagcgggactac

SEQ ID NO: 802875 - DNA, 75 bp, synthetic construct
  source 1..75: mol_type = other DNA
acagatgtttatcgacctgagccttgagaaccgggcgctgaaagacgttatcgaaaaaagctttaaaaccagcct

SEQ ID NO: 802876 - DNA, 75 bp, synthetic construct
  source 1..75: mol_type = other DNA
gaccggatgagctggaacggcatggaccttaaggtcaatgcatatgctcaacgggaagacaacctgatgtcatcc

SEQ ID NO: 802877 - DNA, 75 bp, synthetic construct
  source 1..75: mol_type = other DNA
atgaatgctattccttatttcgactatagcatggcacccttctggccgtcttatcagaacaaaatcgtcggtgtc

SEQ ID NO: 802878 - DNA, 75 bp, synthetic construct
  source 1..75: mol_type = other DNA
cgttcagtgatttcgcccgcgatcgtcgtggtgtactcgatccggaagcctgttacctcgccggtaacccctggt

SEQ ID NO: 802879 - DNA, 75 bp, synthetic construct
  source 1..75: mol_type = other DNA
aagtcttgatcgtaaccgtgaaggaatgcagtcctggcaattgggtgtcaattatcgtttaaccccgcaatttac

SEQ ID NO: 802880 - DNA, 75 bp, synthetic construct
  source 1..75: mol_type = other DNA
ctctattacacatcactggcaaaaagaccgttccggcgtaaccgcctgttcctgacagtctgctatcgcccgttt

SEQ ID NO: 802881 - DNA, 75 bp, synthetic construct
  source 1..75: mol_type = other DNA
gcgcgataaagccccctgggggtatgcaatggctttgatgcgcaccccgtcaggcgatggctactatatcaacct

SEQ ID NO: 802882 - DNA, 75 bp, synthetic construct
  source 1..75: mol_type = other DNA
ctttactacgcctctgttggctcattccggcgtaaccgcctgtttttgacggtctgctatcgcccgtttgtcagc

SEQ ID NO: 802883 - DNA, 75 bp, synthetic construct
  source 1..75: mol_type = other DNA
agcatccccgtctgcaggagatgagtctggcaacaccggctacacgtcaggggatccagctgataccggcactga

SEQ ID NO: 802884 - DNA, 75 bp, synthetic construct
  source 1..75: mol_type = other DNA
atacttggcggtgcgggaaagggagggagtctttacaaagacgccaacacacagatccttcagggaaactacggc

SEQ ID NO: 802885 - DNA, 75 bp, synthetic construct
  source 1..75: mol_type = other DNA
cggaccgtaaccagggtgacaaagaggccgaggcgaaatttaaagagatcaaggaagcttatgaagttctgaccg

SEQ ID NO: 802886 - DNA, 75 bp, synthetic construct
  source 1..75: mol_type = other DNA
caggatgatttctccggtgaggtgccgtatcaggccgattgcgtgatccttgcaggcaatgcggttatgccgact

SEQ ID NO: 802887 - DNA, 75 bp, synthetic construct
  source 1..75: mol_type = other DNA
ggattgggtcttcggctgtcagtgtgacaggccagagatggatgagtgcagctcgaacggcggtgcaattgtctg

SEQ ID NO: 802888 - DNA, 75 bp, synthetic construct
  source 1..75: mol_type = other DNA
gagattggtcgcgctactggcgcactgactcaggcacgagcgctggccgttggctctgagggttactggtggcgc

SEQ ID NO: 802889 - DNA, 75 bp, synthetic construct
  source 1..75: mol_type = other DNA
tggtattacaactctgaaatatcctctggcgagtatatcgacgttaaagagacacctgaagaaattatcgatttg

SEQ ID NO: 802890 - DNA, 75 bp, synthetic construct
  source 1..75: mol_type = other DNA
tggcggtactgtctgcctcagtagccagtgctgctgattttcctgttactattgaaagttgtgggactcctgtca

SEQ ID NO: 802891 - DNA, 75 bp, synthetic construct
  source 1..75: mol_type = other DNA
aaacacgatgcggtgctcatcgaggcgatggaaagtcgctcgttacgtcaaaaattgcccgtttgtgaaccactt

SEQ ID NO: 802892 - DNA, 75 bp, synthetic construct
  source 1..75: mol_type = other DNA
cattgtgctgatgaacgacgcgcaaaccaccggcggttacccgcgcattgcctgcattattgaagccgacatgta

SEQ ID NO: 802893 - DNA, 75 bp, synthetic construct
  source 1..75: mol_type = other DNA
ggaagccgtcataaacggtgagcgccccgacgcgctctatcggatgattatggagtccggcgacgtggcagagag

SEQ ID NO: 802894 - DNA, 75 bp, synthetic construct
  source 1..75: mol_type = other DNA
gggttcgtggcacaggacatagtgtcccgccaggtgcagctgattaagtctctgccgctggaggctgccgatcgc

SEQ ID NO: 802895 - DNA, 75 bp, synthetic construct
  source 1..75: mol_type = other DNA
ggttgcgaagctcggttggatgataacgccgtctggacgggctggcgtttgccgatgaaagcaggtcagcgttta

SEQ ID NO: 802896 - DNA, 75 bp, synthetic construct
  source 1..75: mol_type = other DNA
catgcagcaccgatctcaaagtggggattggcgggctggaaggccgtttactgaaggatggtgaccgactcccga

SEQ ID NO: 802897 - DNA, 75 bp, synthetic construct
  source 1..75: mol_type = other DNA
gggtcatgcagtaccgatctcaaagtggggattggcgggctggaaggccgtttactgaaggatggtgaccgactc

SEQ ID NO: 802898 - DNA, 75 bp, synthetic construct
  source 1..75: mol_type = other DNA
taacgtggtcatgaatgccgcctgcgagcggctcagtgaactagagatcccgcatcagcctatcgcatttcaggc

SEQ ID NO: 802899 - DNA, 75 bp, synthetic construct
  source 1..75: mol_type = other DNA
acaaaatggtttatcgatccgccatgtgggggaaattgccgaactgtttatgtggcggcatatgtctcttacttc

SEQ ID NO: 802900 - DNA, 75 bp, synthetic construct
  source 1..75: mol_type = other DNA
gcaattgtgactgcgcccaatgtggtactggcaacgggcggaccaggcgaactttatcgtgacagtgtttatcca

SEQ ID NO: 802901 - DNA, 75 bp, synthetic construct
  source 1..75: mol_type = other DNA
cgagcggtggggcgatggatcacgacactgcttatgtcgaggcggtcggttctctgcacactcttggcgggttgc

SEQ ID NO: 802902 - DNA, 75 bp, synthetic construct
  source 1..75: mol_type = other DNA
cgaccgataccagcaagacatggaaaagcttgaatcagaaaacatggaattaagacgaaagctcggtgaagcaaa

SEQ ID NO: 802903 - DNA, 75 bp, synthetic construct
  source 1..75: mol_type = other DNA
aagcttgaatcagaaaacatggaattaagacgaaagcttggtgaagcaaaacgagacattgatgcttacaagcga

SEQ ID NO: 802904 - DNA, 75 bp, synthetic construct
  source 1..75: mol_type = other DNA
ttgatgcgctgacgcacgttactttcccaaagggttttgcacaggcagaacccgcatgggttgtcacggtagacg

SEQ ID NO: 802905 - DNA, 75 bp, synthetic construct
  source 1..75: mol_type = other DNA
tgagatgcatctatctctggacgatatcagcatgtggtttaacatcgataatcgtcggcttaaagcccggcgcaa

SEQ ID NO: 802906 - DNA, 75 bp, synthetic construct
  source 1..75: mol_type = other DNA
gcttatttctttgatgcattagccaaccagttccctgggtatcaactctggcctcttgcatcgcttaagcattcc

SEQ ID NO: 802907 - DNA, 75 bp, synthetic construct
  source 1..75: mol_type = other DNA
caccctggatatgctcaggagcggcgaaagtagtaagagttcgatttttgctaagctttcccgattgatggttga

SEQ ID NO: 802908 - DNA, 75 bp, synthetic construct
  source 1..75: mol_type = other DNA
caattaacgcattatattgacgcaggtggtggtagccggggagcacgtattattctcgacagggatggaaattct

SEQ ID NO: 802909 - DNA, 75 bp, synthetic construct
  source 1..75: mol_type = other DNA
gatgtgctgcttaccacctataatgtcaacgccacgatgtttgaccgttatttgccattttcatgcccgctaaga

SEQ ID NO: 802910 - DNA, 75 bp, synthetic construct
  source 1..75: mol_type = other DNA
gctcccgcgtgccgcgcctgattggcccagcgcaatttaatatcgtcgattcatatgcttatcaggaacaagaaa

SEQ ID NO: 802911 - DNA, 75 bp, synthetic construct
  source 1..75: mol_type = other DNA
cccctgggcgacaaaggtcgcggaaaactttactgcggacctaacccggcagaacgagaaagtttggcggcaaca

SEQ ID NO: 802912 - DNA, 75 bp, synthetic construct
  source 1..75: mol_type = other DNA
tcttttccgctggctgggatttaaaagcggcagcagaaggcgaagcaccagatgctgacttcggcccaggcggtt

SEQ ID NO: 802913 - DNA, 75 bp, synthetic construct
  source 1..75: mol_type = other DNA
gtgaacggctatgcctttggcggcggtttcgaactggcgctggcggcagattttattgtttgtgccgataacgcc

SEQ ID NO: 802914 - DNA, 75 bp, synthetic construct
  source 1..75: mol_type = other DNA
cagacgctgtggtcaaagagaaattgcaggcttggaattttcatgctggcgtacctgataatctcttctggatgc

SEQ ID NO: 802915 - DNA, 75 bp, synthetic construct
  source 1..75: mol_type = other DNA
accctgcagtgctgcattcggaagatgccattgaagggccactggcgtttgctgagaagcgcgatccagtgtgga

SEQ ID NO: 802916 - DNA, 75 bp, synthetic construct
  source 1..75: mol_type = other DNA
agctaatggataacgcccgcgaactggcacagcaactggttaatagcgccccgctggcgattgcggcgctaaaag

SEQ ID NO: 802917 - DNA, 75 bp, synthetic construct
  source 1..75: mol_type = other DNA
acgagaacgacgccagaactctgtttgagttcacttccggcgtaaatgttattgaatccccgatcatctatcgcg

SEQ ID NO: 802918 - DNA, 75 bp, synthetic construct
  source 1..75: mol_type = other DNA
tcccctgttctaagagcgttctggtggcgttgatattctctgtggctggcggggcatacgctcaagagtctccgc

SEQ ID NO: 802919 - DNA, 75 bp, synthetic construct
  source 1..75: mol_type = other DNA
aaaaaagcgctcttgcctatctggacaaacatacagctcgcctgaaaaatctcggtgtcgatgaagttattgcca

SEQ ID NO: 802920 - DNA, 75 bp, synthetic construct
  source 1..75: mol_type = other DNA
atggcgactttgttacagcttcacttttcatttaatggtccctttggcaatgaaatggccgaacagcttaaaccg

SEQ ID NO: 802921 - DNA, 75 bp, synthetic construct
  source 1..75: mol_type = other DNA
aaaacatactgcccgactgaaaatctcggcgttgaggaagttgtcgccaaagttttcgatgtcaatgagccactg

SEQ ID NO: 802922 - DNA, 75 bp, synthetic construct
  source 1..75: mol_type = other DNA
ggcgtcagcacagcaggaacatcagcgcagagctgcgcaacatggtcgaccgcgccccggtaggccaggtgatga

SEQ ID NO: 802923 - DNA, 75 bp, synthetic construct
  source 1..75: mol_type = other DNA
tataggagtgtcttttgttattatatggtttctatcacatgagaaaactaacatccgtttacttagtgcctttct

SEQ ID NO: 802924 - DNA, 75 bp, synthetic construct
  source 1..75: mol_type = other DNA
aaaacaaacagccgaatctgggcaaggacgtggcgagcgctacggacaaggagaaagctgagcttggtggtgctg

SEQ ID NO: 802925 - DNA, 75 bp, synthetic construct
  source 1..75: mol_type = other DNA
tttattatcgcgtcagtaaagcaaacattcagcctgctctttcagcgggcttcattcgttaagaagcaaataaaa

SEQ ID NO: 802926 - DNA, 75 bp, synthetic construct
  source 1..75: mol_type = other DNA
taccaggttcgagctggagcacactccgagcgtgattacagccagaggcaagaagtttctcatccgcgaatttgc

SEQ ID NO: 802927 - DNA, 75 bp, synthetic construct
  source 1..75: mol_type = other DNA
cacgcgggtgacgtgatcaacccgttgtgcgatccgaaagaagtctgcaaaccgggaacacggccatttacccaa

SEQ ID NO: 802928 - DNA, 75 bp, synthetic construct
  source 1..75: mol_type = other DNA
aaaaaagcgcccttgcctatctggaaaaacacactgcccgactgaaaaatctcggcgttgaggaagttgtcgcca

SEQ ID NO: 802929 - DNA, 75 bp, synthetic construct
  source 1..75: mol_type = other DNA
ctcggcgttgcagaagttatcgccaaagttttcgatatcaatgagccactgagtcaaatcaatcaagcaaaactc

SEQ ID NO: 802930 - DNA, 75 bp, synthetic construct
  source 1..75: mol_type = other DNA
atggcaactttgttacaacttcatttttctttcaatggcccatttggcgacgcaatggctgagcagcttaaaccg

SEQ ID NO: 802931 - DNA, 75 bp, synthetic construct
  source 1..75: mol_type = other DNA
ctgcggttgtctccgcttgcctgtcattaagcggaccgacgtttgctgcgcctacaattattgaaccagttcaga

SEQ ID NO: 802932 - DNA, 75 bp, synthetic construct
  source 1..75: mol_type = other DNA
acttcacacaattcagtctgaacgattaaacaccgacttctctttattcaggagacagccaccagttaatcaacc

SEQ ID NO: 802933 - DNA, 75 bp, synthetic construct
  source 1..75: mol_type = other DNA
gtcacgactaacgtgcttctgcgacagattctggcggaggtgataaaggtaaacagcctgaaggaggataaccgc

SEQ ID NO: 802934 - DNA, 75 bp, synthetic construct
  source 1..75: mol_type = other DNA
ctactacagccgcgttaactcgctacaggaacgccgcctgcgccgccacatccgctggctgctggatatcacatg

SEQ ID NO: 802935 - DNA, 75 bp, synthetic construct
  source 1..75: mol_type = other DNA
atgctggagtttgcgtatcgttcatcgttcctcgttggtgtcggtgtggatgcgatggccgatgatatgacccgc

SEQ ID NO: 802936 - DNA, 75 bp, synthetic construct
  source 1..75: mol_type = other DNA
atcgctgatgtccttctgcgctttgctgagcaggtttccggcgcgacgggaattcctctcgtccgtttgttcggg

SEQ ID NO: 802937 - DNA, 75 bp, synthetic construct
  source 1..75: mol_type = other DNA
gcgttggtctatggtgcacatggccaagtgaatgaggcgataggcttctttgagcgttccttgcaggtatgccat

SEQ ID NO: 802938 - DNA, 75 bp, synthetic construct
  source 1..75: mol_type = other DNA
gtggaaggtattgagacactgagtttgcggcttgatgagaacgaaactatggcccttgctcaatttgttaaacgt

SEQ ID NO: 802939 - DNA, 75 bp, synthetic construct
  source 1..75: mol_type = other DNA
atcaattttgggaagagaaattagcatacacagccctttgagacgttattatttagcaagaaattctatttatat

SEQ ID NO: 802940 - DNA, 75 bp, synthetic construct
  source 1..75: mol_type = other DNA
ttttttatcggtgctaccagtgaacttaatgaaattaactaccgaaacagcgactgcatgttcgacttcagggac

SEQ ID NO: 802941 - DNA, 75 bp, synthetic construct
  source 1..75: mol_type = other DNA
cgcattgaagaactgaagaaacagtttgattttattattgctgattcagcgccatcatattcaaatgttatgatc

SEQ ID NO: 802942 - DNA, 75 bp, synthetic construct
  source 1..75: mol_type = other DNA
cggctggtattagcgccgggctggctgcgcgctggtttccgcacattgatgcggcgatgaaggaattcggcatta

SEQ ID NO: 802943 - DNA, 75 bp, synthetic construct
  source 1..75: mol_type = other DNA
tgagatgttctgggatgacattgccatctgggacggactgaacgacaccctgaagtggtcccggctgtacggcgg

SEQ ID NO: 802944 - DNA, 75 bp, synthetic construct
  source 1..75: mol_type = other DNA
agagcgtatctgggatcggcttactgcgttcgacagcgccactgtcggcgcggcgcagctggtctacaaagcgca

SEQ ID NO: 802945 - DNA, 75 bp, synthetic construct
  source 1..75: mol_type = other DNA
tactggacatcatgcatcgttcggagcttggcaagccgctgccggacgaattcacgtttgagtttaacccgctct

SEQ ID NO: 802946 - DNA, 75 bp, synthetic construct
  source 1..75: mol_type = other DNA
gtggaatggtcctatcgttcgtcctggatcatcggcgaagcggtcgatgctatcccagatgatatgacccgcaaa

SEQ ID NO: 802947 - DNA, 75 bp, synthetic construct
  source 1..75: mol_type = other DNA
ctgtgcgaaagagagaatcgtactgatcaccgacgcgatgcaggcagccgggatgccggatggtcgctatacgtt

SEQ ID NO: 802948 - DNA, 75 bp, synthetic construct
  source 1..75: mol_type = other DNA
tagccaagtgctggcgattgtcttcatcgtggttctgatatggtttttcaagtcagtgataaacagaggcgtgcg

SEQ ID NO: 802949 - DNA, 75 bp, synthetic construct
  source 1..75: mol_type = other DNA
gcgttcgacagcgccactgtcggagcggctcagctggtctacaaagcgcatctgcgcacctacagcgtggagaag

SEQ ID NO: 802950 - DNA, 75 bp, synthetic construct
  source 1..75: mol_type = other DNA
tcaccatggaagtccacgacgttccggcgattgttgccgccgtgcgcagtgtggtcccggatgccatcattatga

SEQ ID NO: 802951 - DNA, 75 bp, synthetic construct
  source 1..75: mol_type = other DNA
agaatgcggcgaaacagtggcaggagactgaatctgaaaccagccctccgccgccgatcggaggtccagtatcag

SEQ ID NO: 802952 - DNA, 75 bp, synthetic construct
  source 1..75: mol_type = other DNA
aaaatcaccgaaaacgaatgggggatgtccattgtcgagcgcatcttcgatcgcctgacttcctacgatagcacc

SEQ ID NO: 802953 - DNA, 75 bp, synthetic construct
  source 1..75: mol_type = other DNA
cggcgcagctggtctacaaagcgcatttgcgtacctacagcgtggagaagctacgcgagcttatcgcacttggtg

SEQ ID NO: 802954 - DNA, 75 bp, synthetic construct
  source 1..75: mol_type = other DNA
ttaactgcacgattaatccagaagacaacaatttgctaccacactatgtgtggatttacggtcatacctccaccc

SEQ ID NO: 802955 - DNA, 75 bp, synthetic construct
  source 1..75: mol_type = other DNA
agtaaacggtaagaaagtcgacagctataccacaaatatcaaaaatgtgaaaaagactttgggtaacaaattcta

SEQ ID NO: 802956 - DNA, 75 bp, synthetic construct
  source 1..75: mol_type = other DNA
ttacagtcaccgtcgacagtgacagctatcagttgctcaaggcatatgatgtcaatatctccggtctggtaagca

SEQ ID NO: 802957 - DNA, 75 bp, synthetic construct
  source 1..75: mol_type = other DNA
aggccgcttacgaaatgacggcgctgcgtgctgcgaccattgagcttggtccgctggtgcgcggtttaccgcatt

SEQ ID NO: 802958 - DNA, 75 bp, synthetic construct
  source 1..75: mol_type = other DNA
gaaaccacggaaggcggcagcaaactggcgattttactgggaccaggcagaccaaaaagtcggttaccgggatga

SEQ ID NO: 802959 - DNA, 75 bp, synthetic construct
  source 1..75: mol_type = other DNA
ggcaatattttagagccacggatgatgggccatcgcctggggatggctgctcggcccggtagggatgctactttc

SEQ ID NO: 802960 - DNA, 75 bp, synthetic construct
  source 1..75: mol_type = other DNA
aagtctgaaatgaagatacacggaaacaaagcaccagagacttacagaagaattagcgagctacgcaaggactaa

SEQ ID NO: 802961 - DNA, 75 bp, synthetic construct
  source 1..75: mol_type = other DNA
cattactattgtgaaatcaacgtgctgcatcccttccgggtgggaagcggtctggcacagcggatcttcttcgag

SEQ ID NO: 802962 - DNA, 75 bp, synthetic construct
  source 1..75: mol_type = other DNA
agcgaagttcgtcgagcggctggcgcattactattgtgaaatcaacgtgctgcatcccttccgtgtgggaagcgg

SEQ ID NO: 802963 - DNA, 75 bp, synthetic construct
  source 1..75: mol_type = other DNA
catcattagccgcaagtgaaatcgaagatttaatcaggctcaaatgcttagacttaccggatattgattttgacc

SEQ ID NO: 802964 - DNA, 75 bp, synthetic construct
  source 1..75: mol_type = other DNA
cacgcgtggcctttggcacatcacgcgaacagcaattcaacctgcatactcaggagacctggaccggcagcgtgc

SEQ ID NO: 802965 - DNA, 75 bp, synthetic construct
  source 1..75: mol_type = other DNA
aggattgtagagagaattcactctttacaatacagactatcgacgaagcgatagcgataatggctgaaagcggaa

SEQ ID NO: 802966 - DNA, 75 bp, synthetic construct
  source 1..75: mol_type = other DNA
tatgctgccgaaatttaatcaggagctgacacgtaaactctttaaattacaggagatgttgcctttccttaacct

SEQ ID NO: 802967 - DNA, 75 bp, synthetic construct
  source 1..75: mol_type = other DNA
aatttccgccgtaccgccaataggtgatatgaaccgttataaccggcgatttccgaatggggaaaccgagtgtgt

SEQ ID NO: 802968 - DNA, 75 bp, synthetic construct
  source 1..75: mol_type = other DNA
ttagacttaccggatattgattttgacctcaacattatgacagttgatgactatttccgtcagttttacaagtag

SEQ ID NO: 802969 - DNA, 75 bp, synthetic construct
  source 1..75: mol_type = other DNA
ttgcgtatttaaataaattcctcaacaaaataaatgttgaaggaagccaggtaaaactatcacttattaatatgt

SEQ ID NO: 802970 - DNA, 75 bp, synthetic construct
  source 1..75: mol_type = other DNA
ataatctggagaaagacccacacgctgtgacgctggggctaaattaccagccagtaccgctcattacggtgggaa

SEQ ID NO: 802971 - DNA, 75 bp, synthetic construct
  source 1..75: mol_type = other DNA
cgtggtggaaatcactgttaaccaggaccggaagattgagcttattgttaacaatattgccaacgtaccggaaga

SEQ ID NO: 802972 - DNA, 75 bp, synthetic construct
  source 1..75: mol_type = other DNA
tgacgacagtaactacgttgatgtgaccttcctcggctccgatatcggcgggttgaatgcctttatttatcgcat

SEQ ID NO: 802973 - DNA, 75 bp, synthetic construct
  source 1..75: mol_type = other DNA
ttgacagcgacagctatcagttgctcaaagcatatgatgtcaatatctccggtctggtaagcacaaccatgcaga

SEQ ID NO: 802974 - DNA, 75 bp, synthetic construct
  source 1..75: mol_type = other DNA
gatgcgtaaaaagaacctgaaaacgatgatatttatcagtcagttgaaagcaaaaacgaatttccaggttgtcgg

SEQ ID NO: 802975 - DNA, 75 bp, synthetic construct
  source 1..75: mol_type = other DNA
caaggcatatgatgtcaatatctccggtctggtaagcacaaccatgcagaatgaagcccgtcgtctgcgtgccga

SEQ ID NO: 802976 - DNA, 75 bp, synthetic construct
  source 1..75: mol_type = other DNA
taaagaaaaaggaactgtcacactctccagtacgttacccggcactttccgttggaaagcaaaagctgctccgta

SEQ ID NO: 802977 - DNA, 75 bp, synthetic construct
  source 1..75: mol_type = other DNA
gaataccatcactgaaggtaacaacaaccactggaatctggtgctgcccgcctggcagtacagttccgataaagc

SEQ ID NO: 802978 - DNA, 75 bp, synthetic construct
  source 1..75: mol_type = other DNA
aacgtaataactttatcgtgctggaatacaaagaaaaagacccacttgatgtcaccttgtggcttaaagcggacg

SEQ ID NO: 802979 - DNA, 75 bp, synthetic construct
  source 1..75: mol_type = other DNA
gccaccaacaaggaagccgcatcgaaatttgatgcagatgagcgtgatggcgtgcaggggtacagcttgtccatc

SEQ ID NO: 802980 - DNA, 75 bp, synthetic construct
  source 1..75: mol_type = other DNA
gacgaagtggcgctcatcggcaccgataatttagaaaaagatccctatgcagtgacgcttggcgtgaactatcaa

SEQ ID NO: 802981 - DNA, 75 bp, synthetic construct
  source 1..75: mol_type = other DNA
gtgggactggaaaaatgtaagtggaccattaatgcgctaatcaaccatcactataaaattgtcgccgcctcctgg

SEQ ID NO: 802982 - DNA, 75 bp, synthetic construct
  source 1..75: mol_type = other DNA
tgctggacacgcctgctgcgccattgcctgaagtggctggggatgtcacggatctggcctatatcattttcactt

SEQ ID NO: 802983 - DNA, 75 bp, synthetic construct
  source 1..75: mol_type = other DNA
tgcagatgctgtgcgaataccacagcggcgatcggatgagttatccgacgttgcgtctggcacttttgagcggcg

SEQ ID NO: 802984 - DNA, 75 bp, synthetic construct
  source 1..75: mol_type = other DNA
ctggaagcgttcagccatttatggatccttttcgtctttcatcaaacgatggaaggcggctggcgtccgactgtg

SEQ ID NO: 802985 - DNA, 75 bp, synthetic construct
  source 1..75: mol_type = other DNA
ctacctgaacgacgcagagaaaacggcggcgagctttgtctggcgcgaagcgagtggtgagcgaatttaccgcac

SEQ ID NO: 802986 - DNA, 75 bp, synthetic construct
  source 1..75: mol_type = other DNA
cgccagcgccgggatgttgattttcggctcgacgcttatcatgcaacacacccgccatccctttgttcttgcggc

SEQ ID NO: 802987 - DNA, 75 bp, synthetic construct
  source 1..75: mol_type = other DNA
ttactgcgtcaggcagcactgacgccacaggaaactgcgctgatcagtcctatccgtgaattgacctatcgccaa

SEQ ID NO: 802988 - DNA, 75 bp, synthetic construct
  source 1..75: mol_type = other DNA
caattgccaatatttgcgtcaaatattgaaattttccatgagattgcaggggaacatatagaatattttgacccg

SEQ ID NO: 802989 - DNA, 75 bp, synthetic construct
  source 1..75: mol_type = other DNA
tttgtcaacagtggcggacgccgctcacaggggctggttaaccgccgggaggagttcagacagtggtgtcttcgc

SEQ ID NO: 802990 - DNA, 75 bp, synthetic construct
  source 1..75: mol_type = other DNA
tcaatctggggtgctccggtctgatgtggttcagggaccgcaacggtaagcgccagcgcaccaccatctggaaac

SEQ ID NO: 802991 - DNA, 75 bp, synthetic construct
  source 1..75: mol_type = other DNA
ggaaggcggctggcgcccaactgtgcgtccgcctcgtcttggtggtaatgccagaatgggcgttttcgccacacg

SEQ ID NO: 802992 - DNA, 75 bp, synthetic construct
  source 1..75: mol_type = other DNA
agaggtcgaaaagcagcttttgacactggagaagcgttatccgcagttaacgctgtttatccgcgaagtactggc

SEQ ID NO: 802993 - DNA, 75 bp, synthetic construct
  source 1..75: mol_type = other DNA
agaggtcgaaaagcaacttttgacgctggagaagcgttatccgcagttaacgctgtttatccgcgaagtactggc

SEQ ID NO: 802994 - DNA, 75 bp, synthetic construct
  source 1..75: mol_type = other DNA
tggtgaagctacgcgtctgatcaacaaagaagacgctgtggttgtggatttacgtcagcgtgatgacttccgtaa

SEQ ID NO: 802995 - DNA, 75 bp, synthetic construct
  source 1..75: mol_type = other DNA
gcagcccgtcacacagcaaacgttgtttgagttaggttcggtcagcaaaacatttacgggcgtgcttggtggcga

SEQ ID NO: 802996 - DNA, 75 bp, synthetic construct
  source 1..75: mol_type = other DNA
aggccgtgcatgtttcgccaggggcgttagatgctgaagcgtacggtgtgaaatcaaccattgaagatatggctc

SEQ ID NO: 802997 - DNA, 75 bp, synthetic construct
  source 1..75: mol_type = other DNA
tgtcgcgtttattccagaaaaagagctgggtatcgtgatgctggctaacaaaaactatcccaatccagcgagagt

SEQ ID NO: 802998 - DNA, 75 bp, synthetic construct
  source 1..75: mol_type = other DNA
ggcctgaacttaccgctaaacaatggaatgagatcacactattacatcttgcgacctacaccgccggcggcttgc

SEQ ID NO: 802999 - DNA, 75 bp, synthetic construct
  source 1..75: mol_type = other DNA
tatccagctggcgcagtcacgctactggcaaactggcgacatgtatcaaggtctgggctgggaaatgctcgactg

SEQ ID NO: 803000 - DNA, 75 bp, synthetic construct
  source 1..75: mol_type = other DNA
atgttcaaaacgacgctctgcaccttattaattaccgcctcttgctccacatttgccgcccctcaacaaatcaac

SEQ ID NO: 803001 - DNA, 75 bp, synthetic construct
  source 1..75: mol_type = other DNA
tccgggaaagagggtgacctggtggcggtgaatgccgagcttactgaactccataaactaaacgagtcgctgagc

SEQ ID NO: 803002 - DNA, 75 bp, synthetic construct
  source 1..75: mol_type = other DNA
tttctacataaatatcttaataacgactggtttgacatggttttgcttgcggtcaggattgcattacaatttttt

SEQ ID NO: 803003 - DNA, 75 bp, synthetic construct
  source 1..75: mol_type = other DNA
agcctgcaaacgcgctgacgaaagctggttttgcgcaagtattcgtgctgaaagaaggcgtcgctggctgggctg

SEQ ID NO: 803004 - DNA, 75 bp, synthetic construct
  source 1..75: mol_type = other DNA
gtttgttgcgcgcagccatcggtatgacagctttggtttttacgcggcattaagccagttgttgctggtgctggt

SEQ ID NO: 803005 - DNA, 75 bp, synthetic construct
  source 1..75: mol_type = other DNA
acagcggcggtgagtgagctggaaaaccgtattgccgctctgacagtacgtgacgacgcccgcctggaactggcc

SEQ ID NO: 803006 - DNA, 75 bp, synthetic construct
  source 1..75: mol_type = other DNA
tcgcagccaagcaggctggtgctgattacatcaagttgcagaaacgtgacgttgagagtttctacagcaaagaaa

SEQ ID NO: 803007 - DNA, 75 bp, synthetic construct
  source 1..75: mol_type = other DNA
ctgtttaaaccacattacctgttacgccatcgcaatccccggctgttgtttgaaacgctattgacgctagccatc

SEQ ID NO: 803008 - DNA, 75 bp, synthetic construct
  source 1..75: mol_type = other DNA
gatcctcaacaccccgcataatcccagtgctacggtctggcagcagactgatttcgccgcgttgtggcaggcgat

SEQ ID NO: 803009 - DNA, 75 bp, synthetic construct
  source 1..75: mol_type = other DNA
cggcgtgcaggccttgcgcgaggcgattgctcagaaaacggaacgtctgtatggctatcaaccggatgtcgacag

SEQ ID NO: 803010 - DNA, 75 bp, synthetic construct
  source 1..75: mol_type = other DNA
ttcgcgttgactggcaggaatttgccgcattattaagcgagcgcaccagactggtgatcctcaacactccgcata

SEQ ID NO: 803011 - DNA, 75 bp, synthetic construct
  source 1..75: mol_type = other DNA
gcgaagatttgaaggtttggttaattgttgagcaccatgcctataacaagttatgtggcgtgaaaggcactcata

SEQ ID NO: 803012 - DNA, 75 bp, synthetic construct
  source 1..75: mol_type = other DNA
gtgaagatttgaatatttggttaattatcgatcacctggaatacaaccgtcattgcggagtgaaaggcgctcata

SEQ ID NO: 803013 - DNA, 75 bp, synthetic construct
  source 1..75: mol_type = other DNA
atgctacgtgcagaacctgagcattatcttgcgttaccggacttttatcgccagaagcgcgatattctggtgaat

SEQ ID NO: 803014 - DNA, 75 bp, synthetic construct
  source 1..75: mol_type = other DNA
tggcggtgatttgatggcgtccacgagcgcgattatgacgaatagtcgcggcgatgcgttgattacgcgtacctt

SEQ ID NO: 803015 - DNA, 75 bp, synthetic construct
  source 1..75: mol_type = other DNA
gttgactggcaggaatttgccgcattgttaagcgagcgcacccgactggtgatcctcaacactccgcataacccc

SEQ ID NO: 803016 - DNA, 75 bp, synthetic construct
  source 1..75: mol_type = other DNA
ttgcgcctgcgcccatcagcgccgagatccgcaaagtgcatcagtatctgaccttttcggtgaataccccggcac

SEQ ID NO: 803017 - DNA, 75 bp, synthetic construct
  source 1..75: mol_type = other DNA
gcacttgccgatatgctacgtgcagaacctgagcattatcttgcgttaccggacttttatcgccagaagcgcgat

SEQ ID NO: 803018 - DNA, 75 bp, synthetic construct
  source 1..75: mol_type = other DNA
tgttaagcgagcgcacccgactggtgatcctcaacaccccgcataaccccagtgctactgtctggcagcaggctg

SEQ ID NO: 803019 - DNA, 75 bp, synthetic construct
  source 1..75: mol_type = other DNA
aggtacatactttttgctggtggattacagcgcggtttcttcgctggatgacgttgagttttgccagtggctgac

SEQ ID NO: 803020 - DNA, 75 bp, synthetic construct
  source 1..75: mol_type = other DNA
cggatgttcgagctgtatgaaattcctccgcatatcaaaccgaactggcaggtgtggtacgagtgtgtattgccg

SEQ ID NO: 803021 - DNA, 75 bp, synthetic construct
  source 1..75: mol_type = other DNA
catagcgaacgggcggcgatgtcgcttgatgaacagtggcggatgattaaagagaatcagttgatgatgatcgcc

SEQ ID NO: 803022 - DNA, 75 bp, synthetic construct
  source 1..75: mol_type = other DNA
aagcctttttgatttttcttgccacggtgatgatggtgtcgctgatgttggcagccgatccggctttactcgcca

SEQ ID NO: 803023 - DNA, 75 bp, synthetic construct
  source 1..75: mol_type = other DNA
actggcgtcgttgatgctgagtatgctgcgctccagcgacgtgctggcgcgactcggtggggatgaatttggtct

SEQ ID NO: 803024 - DNA, 75 bp, synthetic construct
  source 1..75: mol_type = other DNA
cacggttattacatctgattattccggcagaagcgattttcgatcacgcagaaagcgtgcaaaaactgcggctgg

SEQ ID NO: 803025 - DNA, 75 bp, synthetic construct
  source 1..75: mol_type = other DNA
taattgccctgccccatcctctgcttcacctcgtcagtttaggtttagtctcgtttatttttactctcttctcgc

SEQ ID NO: 803026 - DNA, 75 bp, synthetic construct
  source 1..75: mol_type = other DNA
atcttcagttgggataagcggatgttcgagctgtatgaaattccgtcacatgtcaaaccgaactggcaggtgtgg

SEQ ID NO: 803027 - DNA, 75 bp, synthetic construct
  source 1..75: mol_type = other DNA
acggtgttgcatattacttttggcgacaacggaccattaatggagaacatttacagtgccgacacctcacgttcc

SEQ ID NO: 803028 - DNA, 75 bp, synthetic construct
  source 1..75: mol_type = other DNA
gtattccacgaatttttccagcaggctgccaaagcggttgccagtaaaggcataagcatcgcctccccctttccg

SEQ ID NO: 803029 - DNA, 75 bp, synthetic construct
  source 1..75: mol_type = other DNA
atgcactgacgcatctcgccaatcgcgccagttttgagaagcaactgcgtatcctgctgcaaacggtaaacagta

SEQ ID NO: 803030 - DNA, 75 bp, synthetic construct
  source 1..75: mol_type = other DNA
ctctggagttgcgaaggcgagattattgatgaacaaacatttcgtcgtagcttcagcgatccggcacttagccat

SEQ ID NO: 803031 - DNA, 75 bp, synthetic construct
  source 1..75: mol_type = other DNA
acctggccggaagatctcaataaagatctgcaacacgttgagaagctaattagcggtgaaataaatacctactcg

SEQ ID NO: 803032 - DNA, 75 bp, synthetic construct
  source 1..75: mol_type = other DNA
atcctgctgcaaacggtaaacagtacacatcagcgacatgccctggtgtttatcgatcttgatcgctttaaagcg

SEQ ID NO: 803033 - DNA, 75 bp, synthetic construct
  source 1..75: mol_type = other DNA
gcggcaggattacgtgcggcggttgaactgaaacgtcgccagcaaaatgtgctgatcgccaccgccgggttatac

SEQ ID NO: 803034 - DNA, 75 bp, synthetic construct
  source 1..75: mol_type = other DNA
ccgaagtgaagtctttacgtatgcaaccgtgtattaacggtatttactttgaaaaaaactgggtgatgctgccaa

SEQ ID NO: 803035 - DNA, 75 bp, synthetic construct
  source 1..75: mol_type = other DNA
atctttcgctcaggatgtgttagtgaaagcgagcgtcgggcagtatctggcaggggataaaggcggcacgctgga

SEQ ID NO: 803036 - DNA, 75 bp, synthetic construct
  source 1..75: mol_type = other DNA
aacttaaacgccgccagcaaaatgtgttaatcgccaccgccgggttatatatggggacgtcggcatgttctggct

SEQ ID NO: 803037 - DNA, 75 bp, synthetic construct
  source 1..75: mol_type = other DNA
agatcgctatggtgcaattctccgttatcagaccgaccatgacgaagccggacgcgcaacctcctgtgggccgcg

SEQ ID NO: 803038 - DNA, 75 bp, synthetic construct
  source 1..75: mol_type = other DNA
ttcacccaacttgccgaagcactggcgagcggcggtgcgatggatcacgacacggcgtatgttgaagcagtcggt

SEQ ID NO: 803039 - DNA, 75 bp, synthetic construct
  source 1..75: mol_type = other DNA
tactggcgctgggcattagcatggcttgctacggcgaaacatatcctgcgcccattggcccgtcgcagtcggatt

SEQ ID NO: 803040 - DNA, 75 bp, synthetic construct
  source 1..75: mol_type = other DNA
gccagcctgaaaaatcatctcgccggagagccgttgggccacgaaacgacgctggcgcaaaaacgcgtcgagcca

SEQ ID NO: 803041 - DNA, 75 bp, synthetic construct
  source 1..75: mol_type = other DNA
agatatgatgaaattcaccgactacagcgtgaaaaccggacatctgaccgcgtactggacgccatctttcgctca

SEQ ID NO: 803042 - DNA, 75 bp, synthetic construct
  source 1..75: mol_type = other DNA
gtggtggtgggcggctatgccacgatcaccaacgtttcgaaagaggagtacggcgaaggggacttcaccaaaggc

SEQ ID NO: 803043 - DNA, 75 bp, synthetic construct
  source 1..75: mol_type = other DNA
gccgtggggcgcggatggttattgatccacaaggcgaatgccttccacaaactcgtcgcggtgcaaaagaagaat

SEQ ID NO: 803044 - DNA, 75 bp, synthetic construct
  source 1..75: mol_type = other DNA
aaatggacgggcatgaagatgtcctacttccacaccctactcgccgaggtatgcaccggcgtcgcgccagaggtt

SEQ ID NO: 803045 - DNA, 75 bp, synthetic construct
  source 1..75: mol_type = other DNA
ttatcggtcagcttgagcatgaaagtagtcagcatgtgccgtttgctaacgaaatggctgagttgctgttcgggc

SEQ ID NO: 803046 - DNA, 75 bp, synthetic construct
  source 1..75: mol_type = other DNA
gtgcggcaggtcatcgggcagcttgagcacgagagcagtcagcccgcgccgtttgccaacgaaatggcagagttg

SEQ ID NO: 803047 - DNA, 75 bp, synthetic construct
  source 1..75: mol_type = other DNA
caggcgcggcaggttatcggtcagcttgagcatgaaagtagtcagcatgtgtcgtttgctaacgaaatggctgag

SEQ ID NO: 803048 - DNA, 75 bp, synthetic construct
  source 1..75: mol_type = other DNA
ataatttccttgcggattactatcgcactacccaggaactggcttcaaatatcttccgtaaaggctatcagtggc

SEQ ID NO: 803049 - DNA, 75 bp, synthetic construct
  source 1..75: mol_type = other DNA
ctgctggaagaagtgcagcgcctctccattccactgctgaccagtgcaacggtgattaaactgctgcatcaacgc

SEQ ID NO: 803050 - DNA, 75 bp, synthetic construct
  source 1..75: mol_type = other DNA
gcccgttcacctcccgcgactttatgaaattccgcctcggcggtttcgaagccattaagtccgagtacatggccc

SEQ ID NO: 803051 - DNA, 75 bp, synthetic construct
  source 1..75: mol_type = other DNA
ttatattgaagataatgaatttgatatggtatcacaggaaattaacttaaattgtgctttcgataaatggagtag

SEQ ID NO: 803052 - DNA, 75 bp, synthetic construct
  source 1..75: mol_type = other DNA
atgtttcacctttttgttattaacttgttaacagcaaaaatgacaaacaaggttaaacatgccttcgccctcgca

SEQ ID NO: 803053 - DNA, 75 bp, synthetic construct
  source 1..75: mol_type = other DNA
atggaacatcggcgcttgccggcgccactctctgcggcgcggcggcgttgtttattgctgcgcttatcagcacag

SEQ ID NO: 803054 - DNA, 75 bp, synthetic construct
  source 1..75: mol_type = other DNA
cgaatattctttgagtgcatcatggtttcatttaaaaacaatgagtatcttcgccgaatagctgaagcgttagaa

SEQ ID NO: 803055 - DNA, 75 bp, synthetic construct
  source 1..75: mol_type = other DNA
cgatcagcaagcgttagattatgcgctttatcatctgcgcatcatgacgcctgcccacgacgagcgcagcagcat

SEQ ID NO: 803056 - DNA, 75 bp, synthetic construct
  source 1..75: mol_type = other DNA
gaactctcatggatcgccagtggtaactatgccgggtatctggcggggagcctgctgttttcattcggcgcgttt

SEQ ID NO: 803057 - DNA, 75 bp, synthetic construct
  source 1..75: mol_type = other DNA
cgggttgttgatcctcgcaatggcatggttgctgccatttattctggtgttattgattcgcgtcctggcgggtgt

SEQ ID NO: 803058 - DNA, 75 bp, synthetic construct
  source 1..75: mol_type = other DNA
tcaggcgcacgataacgggtccgggatgccgttgtcggttgtgagagaaaaaattcaggcacgaatgtctgacta

SEQ ID NO: 803059 - DNA, 75 bp, synthetic construct
  source 1..75: mol_type = other DNA
ataatcagcatatgaatggcggcattgaagtggatatctggggacaaacctccctgcccggctgtttcgccgtgg

SEQ ID NO: 803060 - DNA, 75 bp, synthetic construct
  source 1..75: mol_type = other DNA
aacggcagtgacaataaaattgcactggcagcacgccccgtaaaagcgattacgcctccaactcctgcagtacga

SEQ ID NO: 803061 - DNA, 75 bp, synthetic construct
  source 1..75: mol_type = other DNA
atggcattcagaatctaatttggatcgttttggatgcccagtgcacaccggtaatagttcttattacagcggttt

SEQ ID NO: 803062 - DNA, 75 bp, synthetic construct
  source 1..75: mol_type = other DNA
gctggtgggtaatgacgccaatgcccccgcgctggagatcacgctcggtcagttaacggttgagttcgaaactga

SEQ ID NO: 803063 - DNA, 75 bp, synthetic construct
  source 1..75: mol_type = other DNA
ggatcatgcagcaccgatctcaaagtggggattggcgggttggaaggccgtttactgagggatggtgaccgactc

SEQ ID NO: 803064 - DNA, 75 bp, synthetic construct
  source 1..75: mol_type = other DNA
gactgttagcggccctatctatgaaaatgtttgtatgccaatgaatatccgggttcaaaagtattggaagcaatg

SEQ ID NO: 803065 - DNA, 75 bp, synthetic construct
  source 1..75: mol_type = other DNA
gacagtttgcggcaaaaaacactgacggcgctgtggcaatggttaccagagtttgctgcgcgttgccatcagtat

SEQ ID NO: 803066 - DNA, 75 bp, synthetic construct
  source 1..75: mol_type = other DNA
gcgcacaggagctggcgagtcacgccagagcctacggcgactggctggcaaatccactgcccccaggaggccgct

SEQ ID NO: 803067 - DNA, 75 bp, synthetic construct
  source 1..75: mol_type = other DNA
tacccgatgagcgatgttctgcgcccctttgaactggcggcgggcatgtgccggatgcattggttaagccccatc

SEQ ID NO: 803068 - DNA, 75 bp, synthetic construct
  source 1..75: mol_type = other DNA
accgggtgttaagccgtggttttgccagcgggccggaaggaaatcaactgacgggaaagtactggcgcagtgtga

SEQ ID NO: 803069 - DNA, 75 bp, synthetic construct
  source 1..75: mol_type = other DNA
ggcgcatggcggagcttcgtgatgcagcaacggaagatatgcgcataatggctcaaaatggcggttttcttgatg

SEQ ID NO: 803070 - DNA, 75 bp, synthetic construct
  source 1..75: mol_type = other DNA
atttgcatctgcttatgctaaaactggtaaaaaaggaatcacgtttgatgccatgaaggcatggcgaagtaaact

SEQ ID NO: 803071 - DNA, 75 bp, synthetic construct
  source 1..75: mol_type = other DNA
tgctggaattgatataaacgcattaacaccaggaatgcgatctggaagtcgtggaattgcacaagccgaagggat

SEQ ID NO: 803072 - DNA, 75 bp, synthetic construct
  source 1..75: mol_type = other DNA
gaaatagagtcgaaatttaactcagcattggatgagtttggggctgaagcaggaactgcatcagaaaaaagtgca

SEQ ID NO: 803073 - DNA, 75 bp, synthetic construct
  source 1..75: mol_type = other DNA
aagccacttcgatatgttgaacagacagggcgatctatgccagccattagcactcttgagaatggccttcatcca

SEQ ID NO: 803074 - DNA, 75 bp, synthetic construct
  source 1..75: mol_type = other DNA
agcgcgcctggctggaactgatagccgatggtcatcatgtgcatccggcggcaatgtcgctgtgttgttgctgtg

SEQ ID NO: 803075 - DNA, 75 bp, synthetic construct
  source 1..75: mol_type = other DNA
gaaacgcccgggcattccgtcagtgacagtgcgaaggtttttgcctccgtcacacagatggcaatggacaacgcc

SEQ ID NO: 803076 - DNA, 75 bp, synthetic construct
  source 1..75: mol_type = other DNA
acgccctgattgcggccggtggcggtcgtgccgtggccagcggtgacacggaccagctgcaggccatcgcgcccg

SEQ ID NO: 803077 - DNA, 75 bp, synthetic construct
  source 1..75: mol_type = other DNA
cgggacgtggcggcagggcgtgctgttctccgtcaggcggggctggccgggggagacagtccggcacggtttatt

SEQ ID NO: 803078 - DNA, 75 bp, synthetic construct
  source 1..75: mol_type = other DNA
gcgcagatgaaattgtcaggaaaatggcagagaacaaacctgacctgccggacggcaaaacagagctggctgtca

SEQ ID NO: 803079 - DNA, 75 bp, synthetic construct
  source 1..75: mol_type = other DNA
tcacgctgtcggacggacagcagacccgggtgattcgccccggacaggagcgggcagagcaacatattgacctgg

SEQ ID NO: 803080 - DNA, 75 bp, synthetic construct
  source 1..75: mol_type = other DNA
atccgcacgctggcgcccgggtctgcttcacaggacgggccggatgtgcagcaggcggggacacaggccattgcc

SEQ ID NO: 803081 - DNA, 75 bp, synthetic construct
  source 1..75: mol_type = other DNA
gacggacagcagacccgtgtgattcgccccggtcaggagcgggcagagcaacatattgacctggcctatgccatc

SEQ ID NO: 803082 - DNA, 75 bp, synthetic construct
  source 1..75: mol_type = other DNA
gtgaaggtcgtccgtggaatcccggtgccatcaccggtggccgcgtgtggggggatatcccggataacagcgtcc

SEQ ID NO: 803083 - DNA, 75 bp, synthetic construct
  source 1..75: mol_type = other DNA
cggagagtgtgctgcgtgaatcacaacgggagcaggaagcggtccggaatgttgcccgggaaaatctgctgcagg

SEQ ID NO: 803084 - DNA, 75 bp, synthetic construct
  source 1..75: mol_type = other DNA
atgtggacctgctgacagaggcaaagtcgtttgctgcagaaggaaccagttttgctgacctgggacgggaaatcg

SEQ ID NO: 803085 - DNA, 75 bp, synthetic construct
  source 1..75: mol_type = other DNA
ggaacccggagacacgcagtcatgaccgctatgtgatagaccgggtgacggcgcagagtcacagcctgaccctgc

SEQ ID NO: 803086 - DNA, 75 bp, synthetic construct
  source 1..75: mol_type = other DNA
ggggatatcccggacaacagcgtccagccgggggccggaaatggtgaaccggttacagctgaagtgctggcacag

SEQ ID NO: 803087 - DNA, 75 bp, synthetic construct
  source 1..75: mol_type = other DNA
aaatggcagagaacaaacctgacctgccggatggcaaaacagagcaggctgtcagggagattgccgggcaggaac

SEQ ID NO: 803088 - DNA, 75 bp, synthetic construct
  source 1..75: mol_type = other DNA
atgttgagtatcagtgtcgttaaatcggctggcagcgccggtaattactacaccgacaaggataattactacgta

SEQ ID NO: 803089 - DNA, 75 bp, synthetic construct
  source 1..75: mol_type = other DNA
cagccgtgagcagcttatccccctcgatcgtgagaaggggctgttcacgtccgggattcatgtgctcgatgagct

SEQ ID NO: 803090 - DNA, 75 bp, synthetic construct
  source 1..75: mol_type = other DNA
actgctatcagtcatcagaagtccgcacttcacacgccggcacagcaggccattcatctggcccttccggtggtg

SEQ ID NO: 803091 - DNA, 75 bp, synthetic construct
  source 1..75: mol_type = other DNA
tccgcgtctccggcggtgaccgcctgcaggtggcatccgtcagtgaagatgcgatgacggttgttgtgccggggc

SEQ ID NO: 803092 - DNA, 75 bp, synthetic construct
  source 1..75: mol_type = other DNA
cgacagcgggcagcgaaccggtacaggcagtgcgctgatggccatgaaggatgccggggtgaacacgtatcgctg

SEQ ID NO: 803093 - DNA, 75 bp, synthetic construct
  source 1..75: mol_type = other DNA
accgcccacggtgcgcagggggcaagtgaaacctttgccattgcgcttgaaggcacggaaggtaaccggaaacag

SEQ ID NO: 803094 - DNA, 75 bp, synthetic construct
  source 1..75: mol_type = other DNA
gggaggggaaatcaatgcgcagataaaacgcggtgacttactgtatgtggatgtggcaaaaggctatggcacagg

SEQ ID NO: 803095 - DNA, 75 bp, synthetic construct
  source 1..75: mol_type = other DNA
gccagccagaccatcagcacgcaggcagacgagctgcagagcaaaaggcaggcactggcaaagagcaacagccag

SEQ ID NO: 803096 - DNA, 75 bp, synthetic construct
  source 1..75: mol_type = other DNA
gccggtgagctgggaaaagagcaggtcatggtgcctgtcctgaacacagcgaatatacgcgacggggagctgcgt

SEQ ID NO: 803097 - DNA, 75 bp, synthetic construct
  source 1..75: mol_type = other DNA
ggagctgcgggacgtggcggccggccgtgccgttctccgtcaggcggggctggccgggggagacagtcctgcgcg

SEQ ID NO: 803098 - DNA, 75 bp, synthetic construct
  source 1..75: mol_type = other DNA
ggatggcaaaacagagcaggctgtcagggagattgccgggcaggaacgtgaccggactgccacttctgaacggga

SEQ ID NO: 803099 - DNA, 75 bp, synthetic construct
  source 1..75: mol_type = other DNA
agcggtccgggaggttgcccgggaaaatctgctgcaggagcgtctgcagcagatggagcgggatatggttcgtga

SEQ ID NO: 803100 - DNA, 75 bp, synthetic construct
  source 1..75: mol_type = other DNA
gccacccgcatgatactggaaacgtccgaccgtttcacggtggtacagggctatgccggtgtgggtaagaccaca

SEQ ID NO: 803101 - DNA, 75 bp, synthetic construct
  source 1..75: mol_type = other DNA
gccgcgtgtggggggatatcccggataacagcgtccagccgggggccggaaatggcgaaccggtcacggcagagg

SEQ ID NO: 803102 - DNA, 75 bp, synthetic construct
  source 1..75: mol_type = other DNA
accgggaggtcatgaatgcagagcggctgttcagtacggcacgggaactgcgggacgtggcggcagggcgtgccg

SEQ ID NO: 803103 - DNA, 75 bp, synthetic construct
  source 1..75: mol_type = other DNA
cgtgcagatgaaattgtccgtaaaatggcagagaacaaacctgacctgccggatggcaaaacagagcaggctgtc

SEQ ID NO: 803104 - DNA, 75 bp, synthetic construct
  source 1..75: mol_type = other DNA
acgccaattaatattgctatcgaactgccggaatttgacccaagtgtttataacgatgcgattcgggggcaacat

SEQ ID NO: 803105 - DNA, 75 bp, synthetic construct
  source 1..75: mol_type = other DNA
aacatttgcaggcagggattgtcgttcttggcactgtgggacgcaccggtatctctgcggcattccttggtaata

SEQ ID NO: 803106 - DNA, 75 bp, synthetic construct
  source 1..75: mol_type = other DNA
gatggccatgctgggaggcgacaagcgtcttattgaggcacacaaccgcgcggtggagaccgccattaagcagat

SEQ ID NO: 803107 - DNA, 75 bp, synthetic construct
  source 1..75: mol_type = other DNA
tatgttcagattggcacccgaacgaatatacaagatggcagtgtcctacacgtgacccataaatcgacggccaat

SEQ ID NO: 803108 - DNA, 75 bp, synthetic construct
  source 1..75: mol_type = other DNA
tgtcactcataaatcctcgtacaacccagatggcaacccattagccattggcgaagatgtcactgttggtcacaa

SEQ ID NO: 803109 - DNA, 75 bp, synthetic construct
  source 1..75: mol_type = other DNA
ctgatgatgtggggatctggccgctcgttgtgattcgtggagatgtacattatgtacagatcggagcacgcacca

SEQ ID NO: 803110 - DNA, 75 bp, synthetic construct
  source 1..75: mol_type = other DNA
cgtgaatcacaacgggagcaggaagcggtccgggaggttgcccgggaaaatctgctgcaggagcgtctgcagcag

SEQ ID NO: 803111 - DNA, 75 bp, synthetic construct
  source 1..75: mol_type = other DNA
ccagaccgtaatgtccgctatgcccggctggccggagattttgcggccagcgtgaaagccggagaagagagcgtg

SEQ ID NO: 803112 - DNA, 75 bp, synthetic construct
  source 1..75: mol_type = other DNA
gtccgtccgggcactcagtcgtgacatcatgaaacagaaccgggtgaccgtacatccggagaaaagtgtcccccg

SEQ ID NO: 803113 - DNA, 75 bp, synthetic construct
  source 1..75: mol_type = other DNA
gacgcacgtagaaaaaggtctgccagaagaggtgattcctgatttggcggagcacttacaggcggggattgtggt

SEQ ID NO: 803114 - DNA, 75 bp, synthetic construct
  source 1..75: mol_type = other DNA
aaacctgacctgccggatggcaaaacagagctggctgtcagggatattgccggacaggagcgtgaccggtctgcc

SEQ ID NO: 803115 - DNA, 75 bp, synthetic construct
  source 1..75: mol_type = other DNA
ggcgcgtactgaacagcatgattcatgatgcacgggaaaaggccggtgagctggggaaagagcaggtcatggtgc

SEQ ID NO: 803116 - DNA, 75 bp, synthetic construct
  source 1..75: mol_type = other DNA
ccgcatgcaggatggtagtaacaggcatcgtcccagctacgacctgaccttctccgctcccaaaagtgtctccat

SEQ ID NO: 803117 - DNA, 75 bp, synthetic construct
  source 1..75: mol_type = other DNA
aaacagccgcagatgttacccgtcgtggcgttaagcaagtgaaagggtttggcgaccatctgacccaggcggtta

SEQ ID NO: 803118 - DNA, 75 bp, synthetic construct
  source 1..75: mol_type = other DNA
ctgggcagcatgggagaacgctgggccggcaagggggctgaacagcttgggctgcagggcagcgtcgataaggat

SEQ ID NO: 803119 - DNA, 75 bp, synthetic construct
  source 1..75: mol_type = other DNA
gacggaaacgggctgcggggattcagtggtgaaggccgtgtgaaaggcagcggggatgcgcagttcgtggccctg

SEQ ID NO: 803120 - DNA, 75 bp, synthetic construct
  source 1..75: mol_type = other DNA
atgaggaccggcgcgtactgaacagcatgattcatgatgcacgggaaaaggccggtgagctgggaaaagagcagg

SEQ ID NO: 803121 - DNA, 75 bp, synthetic construct
  source 1..75: mol_type = other DNA
aaattaaagcctttttgccgatctatgatttctcatacgaaatgactaccctgctctctcccgacgagcgtaccg

SEQ ID NO: 803122 - DNA, 75 bp, synthetic construct
  source 1..75: mol_type = other DNA
actcctattaatattgctattgagctgccggaatttgatccaagcgtttataacgacgctatccgcggacaacat

SEQ ID NO: 803123 - DNA, 75 bp, synthetic construct
  source 1..75: mol_type = other DNA
taccgacaaggataattactatgtgctgggcagcatgggagaacgctgggccggccagggggctgaacagctggg

SEQ ID NO: 803124 - DNA, 75 bp, synthetic construct
  source 1..75: mol_type = other DNA
aaacgtcttattgaagcacataaccaggccgtggattttgctgtccgtcaggtggaggccagtgcctccacctga

SEQ ID NO: 803125 - DNA, 75 bp, synthetic construct
  source 1..75: mol_type = other DNA
atggccggctttgagtcagcctacgtggccctgtcgcgtatgaagcagcatgtgcaggtgtataccgataaccgt

SEQ ID NO: 803126 - DNA, 75 bp, synthetic construct
  source 1..75: mol_type = other DNA
gacctggcctatgccatcaccgcccacggtgcgcagggggcgagtgaaacctttgccatcgcgcttgaaggcacg

SEQ ID NO: 803127 - DNA, 75 bp, synthetic construct
  source 1..75: mol_type = other DNA
cgcattcagcagacagttgtcaaattccgcttcccggcggcaaaaggtcatctcaataacattaacgtcaacttg

SEQ ID NO: 803128 - DNA, 75 bp, synthetic construct
  source 1..75: mol_type = other DNA
aaccgaagaactatcaagcctcaaaattgttgagcaggaaggctatgagggaattgaaattcatggtccacgcct

SEQ ID NO: 803129 - DNA, 75 bp, synthetic construct
  source 1..75: mol_type = other DNA
actgaagctggagaacggctgggtggaaacgcccgggcattccgtcagtgacagtgcgacggtttttgcctccgt

SEQ ID NO: 803130 - DNA, 75 bp, synthetic construct
  source 1..75: mol_type = other DNA
gtgtacaccgataaccgtcagggctggacggatgccattaacaatgccgtacagaaaggaacagcccacgatgtg

SEQ ID NO: 803131 - DNA, 75 bp, synthetic construct
  source 1..75: mol_type = other DNA
gagaaggggctgttcacatcaggaattcatgtgctcgatgagctgtcagtccgggcactcagtcgtgacatcatg

SEQ ID NO: 803132 - DNA, 75 bp, synthetic construct
  source 1..75: mol_type = other DNA
ctattgcggtgtcggggatctcgtttccggcatttgctctggggatgcttttaattcaggtattctccgttgaac

SEQ ID NO: 803133 - DNA, 75 bp, synthetic construct
  source 1..75: mol_type = other DNA
ttcttccggaagcgggctgcttttccccgattcaaaaagcggggacagaatgatgcattccgctacccgcagggc

SEQ ID NO: 803134 - DNA, 75 bp, synthetic construct
  source 1..75: mol_type = other DNA
aaaagcggggacagaatgatgcattccgctacccgcagggcgtaaagctcgatcaggaaaacagccgtatttttc

SEQ ID NO: 803135 - DNA, 75 bp, synthetic construct
  source 1..75: mol_type = other DNA
aaaatgacattataagaatccaaccgcagaagcagttgtctgagttgtactacgttgactataagcgaatattga

SEQ ID NO: 803136 - DNA, 75 bp, synthetic construct
  source 1..75: mol_type = other DNA
gacgcttactcgttgactccgtagaaatgcgcgattacccggtgattcaggcggaaattctgcttttctcgctgg

SEQ ID NO: 803137 - DNA, 75 bp, synthetic construct
  source 1..75: mol_type = other DNA
ttttgctcggtggttccatcgtggtggagaaagttttcaactggcccggacttggacgcttactcgttgactccg

SEQ ID NO: 803138 - DNA, 75 bp, synthetic construct
  source 1..75: mol_type = other DNA
agagagtacctggcgaactcatggagaaactgacatcaggacagcgcgccgccacccgcatgatactggaaacgt

SEQ ID NO: 803139 - DNA, 75 bp, synthetic construct
  source 1..75: mol_type = other DNA
ggaagtcacggaggccgcctgggcggtctgtgcagacaaggtgaacatgattattgcgtgtcaggagcgaaacag

SEQ ID NO: 803140 - DNA, 75 bp, synthetic construct
  source 1..75: mol_type = other DNA
gatgcgcctgagcgattacctcaagcaattacgtgaagcgccgtatatcaaacacacgctgagcgacgataagta

SEQ ID NO: 803141 - DNA, 75 bp, synthetic construct
  source 1..75: mol_type = other DNA
ccgggacttaccgctttacaccgcagatgaccgtgcgtgagatgctgaaattgctggaaagcggtaaagaagcac

SEQ ID NO: 803142 - DNA, 75 bp, synthetic construct
  source 1..75: mol_type = other DNA
atgctgtccggcttcaaagataaggtgacatcatctcttaacagcgcggccagttcagttaaaggactgttctga

SEQ ID NO: 803143 - DNA, 75 bp, synthetic construct
  source 1..75: mol_type = other DNA
gtacgttattaccgctctgaataccacgcgttcagagcttgatcgctatggcaaggcgcggaagattgagtttac

SEQ ID NO: 803144 - DNA, 75 bp, synthetic construct
  source 1..75: mol_type = other DNA
tttttgagctgcgcacgctgccgcatcagcagttacagcaacacaaaagctggcggcatgtgaaaaatgaacgcg

SEQ ID NO: 803145 - DNA, 75 bp, synthetic construct
  source 1..75: mol_type = other DNA
cgtaataaagaccgaattggcgaaaatctcggccagttcgtgcaggaaaaatttcttgatacccaatcgctggtg

SEQ ID NO: 803146 - DNA, 75 bp, synthetic construct
  source 1..75: mol_type = other DNA
gccccggccaggagcaggcagagcaacatattgacctggcctatgccatcaccgcccacggtgcgcagggggcga

SEQ ID NO: 803147 - DNA, 75 bp, synthetic construct
  source 1..75: mol_type = other DNA
atgcgcagataaaacgcggtgatttactgcatgtggatgtggcaaaaggctatggcacagacctgctggtttccc

SEQ ID NO: 803148 - DNA, 75 bp, synthetic construct
  source 1..75: mol_type = other DNA
gttctttctggtgtgctttatcctgaaattacaggtggcgaagtatcgctgtcgctgctgaccacgcaggcgtat

SEQ ID NO: 803149 - DNA, 75 bp, synthetic construct
  source 1..75: mol_type = other DNA
gctctatgccgaatcagaacagaccagcgcgctgctgagacaacgacaacaccggatcgaggaactgaaacgtga

SEQ ID NO: 803150 - DNA, 75 bp, synthetic construct
  source 1..75: mol_type = other DNA
gggcaatggtttggcgaaacgttaattgccgatgacgccttgcgggcgtcgttaaatggtcacctggaacaggct

SEQ ID NO: 803151 - DNA, 75 bp, synthetic construct
  source 1..75: mol_type = other DNA
actccggctcacccttcagcatcaatggtcgggctggatgctggcgtggctaaactcgccacgctgtcagatggc

SEQ ID NO: 803152 - DNA, 75 bp, synthetic construct
  source 1..75: mol_type = other DNA
cggcgatttacctggtgattaccctgttgagccagtacattctcaaacgcattgatctgcgcgcgacacgttttg

SEQ ID NO: 803153 - DNA, 75 bp, synthetic construct
  source 1..75: mol_type = other DNA
gcactgaaagcggtgcccgtaggccagtgggaatcgggtcaggcgctggggctgtcgaaatcagccatcttcttt

SEQ ID NO: 803154 - DNA, 75 bp, synthetic construct
  source 1..75: mol_type = other DNA
ttttggctcctcgcagctgctgctgacgctttcggatggcttcaccatcaatcttgggttcgtgcagatcccggt

SEQ ID NO: 803155 - DNA, 75 bp, synthetic construct
  source 1..75: mol_type = other DNA
tttgcaatgctcgctgctgggagcaactgcgagaaaatgcctatctgatggggcagatggtcgacgccgataccg

SEQ ID NO: 803156 - DNA, 75 bp, synthetic construct
  source 1..75: mol_type = other DNA
aaaacatgcgacgcgtaatcgcgccaacggcgaattgttctatggacggcgcggaacgttaacccacttctcgtt

SEQ ID NO: 803157 - DNA, 75 bp, synthetic construct
  source 1..75: mol_type = other DNA
gctgtttaaggcgctggattttggcattgatgtttccattcaggcagccaccgaatatctgttggggcattcaga

SEQ ID NO: 803158 - DNA, 75 bp, synthetic construct
  source 1..75: mol_type = other DNA
ctccgtcaggcagggctggccgggggagacagccctgcacggtttattgcaccgggacgtaaatatccgcagccg

SEQ ID NO: 803159 - DNA, 75 bp, synthetic construct
  source 1..75: mol_type = other DNA
gtgaaggtcgtccgtggaatcccggtgccatcaccggtggtcgcgtgtggggggatatcccggacaacagcgtcc

SEQ ID NO: 803160 - DNA, 75 bp, synthetic construct
  source 1..75: mol_type = other DNA
acagtgctccaccttttattatcatgaataataaaaatgtcacacataaattaaatgagctgattaacaatagag

SEQ ID NO: 803161 - DNA, 75 bp, synthetic construct
  source 1..75: mol_type = other DNA
ctgggcgaacagatacaacacgttctggatgaggagcccttctccggccacctgttcatcttccagggacgccgt

SEQ ID NO: 803162 - DNA, 75 bp, synthetic construct
  source 1..75: mol_type = other DNA
tgacaatacggggtattacaaaaatgaaggtacagccgaaaatattcaggaagcgcagaaataccccttggcgta

SEQ ID NO: 803163 - DNA, 75 bp, synthetic construct
  source 1..75: mol_type = other DNA
acgatgtgctggagccgaaagctgaccgggaggtcatgaatgcagagcggctgttcagtacggcacgggaactgc

SEQ ID NO: 803164 - DNA, 75 bp, synthetic construct
  source 1..75: mol_type = other DNA
tgaaagcagtctgaaagtggctgaatggctggcagaacatccgcaagtagcgcgagttaaccaccctgctctgcc

SEQ ID NO: 803165 - DNA, 75 bp, synthetic construct
  source 1..75: mol_type = other DNA
aatggtgtgattgaacgggcacgcgccggtatcgatgaggccatcagccgtgagcagcttatcccccttgaccgt

SEQ ID NO: 803166 - DNA, 75 bp, synthetic construct
  source 1..75: mol_type = other DNA
tatctggctgaacccgctgaccacggatgacggaaacgggctgcggggcttcagtggtgaaggccgggtgaaagg

SEQ ID NO: 803167 - DNA, 75 bp, synthetic construct
  source 1..75: mol_type = other DNA
tactgacacaggccattcgcagtgagctgaaaacacagggcgtgctcggacacccggaggtaaccatgaccgccc

SEQ ID NO: 803168 - DNA, 75 bp, synthetic construct
  source 1..75: mol_type = other DNA
gtgctgtactccagtgcctctggtaacgtcaacgcaccgaccctgcaaatgcaactcatgctggtgcagacgggt

SEQ ID NO: 803169 - DNA, 75 bp, synthetic construct
  source 1..75: mol_type = other DNA
ggtaaaaaatacatcccttacacgaaaatggcttcctggttggttgagtggaaaaaagacactgaaaccgaatgg

SEQ ID NO: 803170 - DNA, 75 bp, synthetic construct
  source 1..75: mol_type = other DNA
gctgaacccactgaccacagatgacggaaacgggctacggggcttcagtggtgaaggccgggtaaaaggccgtgg

SEQ ID NO: 803171 - DNA, 75 bp, synthetic construct
  source 1..75: mol_type = other DNA
gaatgtaaatctcccggcaagccaccacggcctgaccagttgcgcgagcatgaacgtctgcgaaagctgggcttt

SEQ ID NO: 803172 - DNA, 75 bp, synthetic construct
  source 1..75: mol_type = other DNA
gaacatgaacgtctgcgaaaactgggctttaccgtagtggtgctggatagcaaaaatctggagggaatattgtga

SEQ ID NO: 803173 - DNA, 75 bp, synthetic construct
  source 1..75: mol_type = other DNA
agtgcgcgtgttagggccactgcgtaatgccacgcaggtggaaatctctgtggccgacggctttgcgctgggcac

SEQ ID NO: 803174 - DNA, 75 bp, synthetic construct
  source 1..75: mol_type = other DNA
gtaactcaagtcaggtggagatttcccggactgacgccagaacgttagggatcgccgctccgctacgcatgtctg

SEQ ID NO: 803175 - DNA, 75 bp, synthetic construct
  source 1..75: mol_type = other DNA
gaaaaaggctggcggggtcgcctttaagttcgtgtcacccggtcgccgctcggtaccggatcgcattgtcctgct

SEQ ID NO: 803176 - DNA, 75 bp, synthetic construct
  source 1..75: mol_type = other DNA
tttcatacgatagtgtccattaaaaatgatggacattatttttgtagagccggaggaaacagaccagacggttta

SEQ ID NO: 803177 - DNA, 75 bp, synthetic construct
  source 1..75: mol_type = other DNA
ttacttgtggcaggagcgacaatttttatcgccgatcgcgcaatggtcaacgccagcaaacagctgacctggaac

SEQ ID NO: 803178 - DNA, 75 bp, synthetic construct
  source 1..75: mol_type = other DNA
ttgcttatagcaggagcgaccatttttattgccgatcgcgttatggtcaacgccagcaagcagctgacctggagt

SEQ ID NO: 803179 - DNA, 75 bp, synthetic construct
  source 1..75: mol_type = other DNA
tcacgcttgccggttacgaaaaagaaacccagtcgcctgtcgatgaactggttgccagtcgccttgcccgtgaag

SEQ ID NO: 803180 - DNA, 75 bp, synthetic construct
  source 1..75: mol_type = other DNA
gtcatgtgtatacggcaaagatcggcacgctgtcagaactggtgaccgcaggtgaccagtttaaccagcagcaca

SEQ ID NO: 803181 - DNA, 75 bp, synthetic construct
  source 1..75: mol_type = other DNA
gggaagtcagctggcgcgtatggttgaggcttatcgccagaccgacccgtttggtgagctgtatgtgattgccgt

SEQ ID NO: 803182 - DNA, 75 bp, synthetic construct
  source 1..75: mol_type = other DNA
gcgccagacctcaatatgaagcacggtttatatactcaactgcgggaaaaacttgccagagtcagcgcggtgatt

SEQ ID NO: 803183 - DNA, 75 bp, synthetic construct
  source 1..75: mol_type = other DNA
agcgctcgcggccatcaccgttaactacacaccttgtggtcactgccgtcagtttatgaacgaactgaacagcgg

SEQ ID NO: 803184 - DNA, 75 bp, synthetic construct
  source 1..75: mol_type = other DNA
atgcatccacgttttcaaaccgcttttgcccaacttgcggataacttgcaatctgcactggaacctattctggca

SEQ ID NO: 803185 - DNA, 75 bp, synthetic construct
  source 1..75: mol_type = other DNA
aaatcgagttaaatatcggcaaagatctgcagtttatccgtgtcaacggtacgctggttggcggttgtattggac

SEQ ID NO: 803186 - DNA, 75 bp, synthetic construct
  source 1..75: mol_type = other DNA
cgttcacatatgccttacagcaaatcgcccagcggcgtggcgctggagtgtaaggatggacgtattttcagtggc

SEQ ID NO: 803187 - DNA, 75 bp, synthetic construct
  source 1..75: mol_type = other DNA
tcaggcggcgattgcagcggcaaaccgttcgcacatgccttacagtaagtcgccaagcggtgtcgcgctggaatg

SEQ ID NO: 803188 - DNA, 75 bp, synthetic construct
  source 1..75: mol_type = other DNA
tattggtgcgacaatgcagcaaaccgttcatgccgaacaaagcgcgatcagccacgcctggttgagtggtgaaaa

SEQ ID NO: 803189 - DNA, 75 bp, synthetic construct
  source 1..75: mol_type = other DNA
gaaaggggtgaaagagacgtggccagcggcgctggttgcaggggggaagcttcgctgtcactcagttctttacct

SEQ ID NO: 803190 - DNA, 75 bp, synthetic construct
  source 1..75: mol_type = other DNA
ggtgaccagtttaaccagcagcacattaccctggcggggtacgaaaaagagacccagacgcctgccgacgagctg

SEQ ID NO: 803191 - DNA, 75 bp, synthetic construct
  source 1..75: mol_type = other DNA
aaaacttatcagaaacccttattaccccgctggacgctgaccgtatggcacgcattgccgcgcgtcaggccgaag

SEQ ID NO: 803192 - DNA, 75 bp, synthetic construct
  source 1..75: mol_type = other DNA
gacccgcgccgccgtacgcctgactgacggcaccctcggctacagctgggtgctggggcgcgacaaacagcacgc

SEQ ID NO: 803193 - DNA, 75 bp, synthetic construct
  source 1..75: mol_type = other DNA
cgctatgggcgatgaggtattcgattttatcggtctgccgttcaacgatgccgcctccatcaatatgatgatgac

SEQ ID NO: 803194 - DNA, 75 bp, synthetic construct
  source 1..75: mol_type = other DNA
gccctgccgtttacggcttcatcttcggcaggcgtggtcacactgaccgcgcgtcataaggggctttgcgggaat

SEQ ID NO: 803195 - DNA, 75 bp, synthetic construct
  source 1..75: mol_type = other DNA
cggcaaccgaaaccggcacggttaatgtttatgtgggacgtacccgcgtacaggcaccggtgaccaacggcgata

SEQ ID NO: 803196 - DNA, 75 bp, synthetic construct
  source 1..75: mol_type = other DNA
cgggaatcgatccgttccacattggcgcaatggcgggacgtcagttaccgttcctgtcggttcttgtgccgttct

SEQ ID NO: 803197 - DNA, 75 bp, synthetic construct
  source 1..75: mol_type = other DNA
agacgttaattgccgatgatgccctgcgggcgtcgttaaatggccatctggaacaggccgcgcaccgcgtcgcgc

SEQ ID NO: 803198 - DNA, 75 bp, synthetic construct
  source 1..75: mol_type = other DNA
tgggatgcgcgggatatgtcgcggcaaatagagttaaatatcggcaaagatctgcagtttattcgtgtcaacggt

SEQ ID NO: 803199 - DNA, 75 bp, synthetic construct
  source 1..75: mol_type = other DNA
cgaacgctgcgcgctgattgacgcgctgatgcagcaatctcgctattttcaaaacttatcagaaacccttattgc

SEQ ID NO: 803200 - DNA, 75 bp, synthetic construct
  source 1..75: mol_type = other DNA
gtggcagacaacagctatctggacagtgaaacactgcataccagcgcatacgttcttcgcaaactgagaacggtc

SEQ ID NO: 803201 - DNA, 75 bp, synthetic construct
  source 1..75: mol_type = other DNA
tttatcggtctgccgttcaacgatgccgcctccatcaatatgatgatgaccgaaatgaatgacagcagcggtcgc

SEQ ID NO: 803202 - DNA, 75 bp, synthetic construct
  source 1..75: mol_type = other DNA
ctgagttttccgcattcctgacgcgccacatcagcgatacggtaaaaagctgggatgcgcaggatatgtcgcggc

SEQ ID NO: 803203 - DNA, 75 bp, synthetic construct
  source 1..75: mol_type = other DNA
gcgaaaaacaatgccgcccgcacgctggtgatgccggttatcaaagagaataccctgacagagggcaacaataac

SEQ ID NO: 803204 - DNA, 75 bp, synthetic construct
  source 1..75: mol_type = other DNA
gatcccggcaaccaacaaggaagcggcagcaaaatttaatgctcaggtaaccgatggtgtgcagggatacggttt

SEQ ID NO: 803205 - DNA, 75 bp, synthetic construct
  source 1..75: mol_type = other DNA
gaagtcgcgctttttggcaccgataatctggagaaagatcccttcgctgtcacgctgggtgtgaaataccagccc

SEQ ID NO: 803206 - DNA, 75 bp, synthetic construct
  source 1..75: mol_type = other DNA
tcatctggttggcgcttatccggtaacgccaattaatatcgcgattgaactgccggaatttgacccgagcgttta

SEQ ID NO: 803207 - DNA, 75 bp, synthetic construct
  source 1..75: mol_type = other DNA
acgttcggaacggttgctgagctggtgggcgtgggcaattacatcctcaagcgcctgatgaatcaccgtactatg

SEQ ID NO: 803208 - DNA, 75 bp, synthetic construct
  source 1..75: mol_type = other DNA
cgtgggatcgcgtgaatatgggcggtcgttttttctggatagacaccacgaaaaacggggatccgctcgaattac

SEQ ID NO: 803209 - DNA, 75 bp, synthetic construct
  source 1..75: mol_type = other DNA
tcggagttcgggggagaaaggggggaaaaggcagatggaagcgagaaaactcaggttgccaccgataccggaacc

SEQ ID NO: 803210 - DNA, 75 bp, synthetic construct
  source 1..75: mol_type = other DNA
acattaatcgcgctggtgttagggacgctggcagctgccgcgctgtggcgacgagactttttcggcaaaaacgcc

SEQ ID NO: 803211 - DNA, 75 bp, synthetic construct
  source 1..75: mol_type = other DNA
ttaacttctcaattgcttcttttttggctttctcctgttctgatggtgggtatgcaaggtcataccagttatcaa

SEQ ID NO: 803212 - DNA, 75 bp, synthetic construct
  source 1..75: mol_type = other DNA
ccctacggtaaggttcgaacgaatctttctcttggccagggcggcgatctggatggcagttccatcgactatttt

SEQ ID NO: 803213 - DNA, 75 bp, synthetic construct
  source 1..75: mol_type = other DNA
gaaaagtggaaccggtgcgcggatggtgtcgggtggtcgcgtcttcgggcgtgaccagactggtggaggaagttt

SEQ ID NO: 803214 - DNA, 75 bp, synthetic construct
  source 1..75: mol_type = other DNA
ccctatagttgctgttttaggtttatcaagaacggggaaaacaaccttaattgacactgttttttataataaacc

SEQ ID NO: 803215 - DNA, 75 bp, synthetic construct
  source 1..75: mol_type = other DNA
gccgatgatccgcgctgaacaaccgcagcgtcagtgggcagaccgttcgcgcacagtgctggccgggcagagcct

SEQ ID NO: 803216 - DNA, 75 bp, synthetic construct
  source 1..75: mol_type = other DNA
gttgatcgcccttctccagcgcgataaatcgcgcaagtttatcgcccagcaaattgttcgctggctggagagcga

SEQ ID NO: 803217 - DNA, 75 bp, synthetic construct
  source 1..75: mol_type = other DNA
gtcgcccctctgattatatgccggaggtggctaatgacatttgcgcattgctttcctccggtgagagtctgcgca

SEQ ID NO: 803218 - DNA, 75 bp, synthetic construct
  source 1..75: mol_type = other DNA
cttgcctccggggaaagtctggttaaggtttgcaagcgccccggcatgccagcaaaggctactgtatttcgctgg

SEQ ID NO: 803219 - DNA, 75 bp, synthetic construct
  source 1..75: mol_type = other DNA
cccttctccagcgcgataaatcgcgcaagtttatcgcccagcaaattgttcgctggctggagagcgagcatccac

SEQ ID NO: 803220 - DNA, 75 bp, synthetic construct
  source 1..75: mol_type = other DNA
cgattgataaggtcgatctttccggcaccagtgcgttgatgctggagagtatgaccaaaaacgatcgtcatcagg

SEQ ID NO: 803221 - DNA, 75 bp, synthetic construct
  source 1..75: mol_type = other DNA
gaacaagccgcgcaccgtgtcgcgcctgagttttccgcattcctgacgcgccatatcagcgatacggtaaaaagc

SEQ ID NO: 803222 - DNA, 75 bp, synthetic construct
  source 1..75: mol_type = other DNA
ctggctgtacgacaaagtgttcgtcaaaccgttcctgggtattgcctggttgctgaaacgcgatccgctgaactc

SEQ ID NO: 803223 - DNA, 75 bp, synthetic construct
  source 1..75: mol_type = other DNA
accgcgctggtcagtttgattagtgtgaatgatttaatgctacaaaccaaaagcatcgctacccgtacacaggaa

SEQ ID NO: 803224 - DNA, 75 bp, synthetic construct
  source 1..75: mol_type = other DNA
cgctattcatacggcgggctgggtgagcctgtttactctgcatgttatctggccgtttctgtggatctgggcgac

SEQ ID NO: 803225 - DNA, 75 bp, synthetic construct
  source 1..75: mol_type = other DNA
gcgctgatccacgccgcaacgatggtaaccgcgggtgtctacctgatcgcccgtacccacggtctgttcctgatg

SEQ ID NO: 803226 - DNA, 75 bp, synthetic construct
  source 1..75: mol_type = other DNA
gggcacgctgaacttccgcgaaatggtggaactggcaccggcgcactttgcagacggcaataacatgctgatgtg

SEQ ID NO: 803227 - DNA, 75 bp, synthetic construct
  source 1..75: mol_type = other DNA
tgttaagcgagaacggctatctgcgctggtatgtggcatccatgagcatcggtgcggtcgtggtgctggcactgt

SEQ ID NO: 803228 - DNA, 75 bp, synthetic construct
  source 1..75: mol_type = other DNA
gatggcagatatctcggagtcagtggtcgttgggcaaaaaattgatcatataagtttggatgaattcggaaaggc

SEQ ID NO: 803229 - DNA, 75 bp, synthetic construct
  source 1..75: mol_type = other DNA
ttgccgagtggatatgttattcaggctttcgaggcgtcttttgattctaacgggcgatatataaatttccctata

SEQ ID NO: 803230 - DNA, 75 bp, synthetic construct
  source 1..75: mol_type = other DNA
ggcgtttcgttcagtggtggtgtggggacggtaattggtgtcgtgaccggggtaattatctttacggtcatcaac

SEQ ID NO: 803231 - DNA, 75 bp, synthetic construct
  source 1..75: mol_type = other DNA
gagtcagcctacgtggcgctgagccgcatgaagcagcacgcgcaggtctataccgacaaccgggataagtgggcg

SEQ ID NO: 803232 - DNA, 75 bp, synthetic construct
  source 1..75: mol_type = other DNA
gcttgatgccacgctgacggcactggcatcactaacgggtgcagctaataaattgccatatttcaatggcaatga

SEQ ID NO: 803233 - DNA, 75 bp, synthetic construct
  source 1..75: mol_type = other DNA
ttgcgctcaatttagacggtagctcgcaggaacgtacatttttcattatcgattgcagaaaatctaatagcaaaa

SEQ ID NO: 803234 - DNA, 75 bp, synthetic construct
  source 1..75: mol_type = other DNA
tttatgcgctgtctggcgtgttctatgccttcggcgggatgttagaagccggacgtatcggctctgcgactaaca

SEQ ID NO: 803235 - DNA, 75 bp, synthetic construct
  source 1..75: mol_type = other DNA
tggaacaaaacccgtttcggcaagaatatttttgctattggcggcaacccggaagcggcgaaagtttctggtgtt

SEQ ID NO: 803236 - DNA, 75 bp, synthetic construct
  source 1..75: mol_type = other DNA
cttacattaccttctacgcgctgattgccgtggcgttcgtttgggtactgtggaacaaaacccgcttcggtaaga

SEQ ID NO: 803237 - DNA, 75 bp, synthetic construct
  source 1..75: mol_type = other DNA
accttggctttatgtatgaactggatgctatcgcggcgtgcgtggtgggcggcgtttcgttcagtggtggtgtgg

SEQ ID NO: 803238 - DNA, 75 bp, synthetic construct
  source 1..75: mol_type = other DNA
acctttgctcagggctttgtcgcgctggggagtttccgtctctcttacatcaccttctacgcgttgattgcggtg

SEQ ID NO: 803239 - DNA, 75 bp, synthetic construct
  source 1..75: mol_type = other DNA
aagtaatattcttacccagtcatcggtacgtattattatcgcgctcggcgtggcagggttaattgtcacccaggg

SEQ ID NO: 803240 - DNA, 75 bp, synthetic construct
  source 1..75: mol_type = other DNA
cagcggctgttcagtacggcgcgggagctgcgggacgtggcggcaggccgagccgttcttcgtcaggcggggctg

SEQ ID NO: 803241 - DNA, 75 bp, synthetic construct
  source 1..75: mol_type = other DNA
ggactccgcgtctccggcggtgaccgcctgcaggtgtcgtccgtcagtgaggacgcgatgacggttgttgtgccg

SEQ ID NO: 803242 - DNA, 75 bp, synthetic construct
  source 1..75: mol_type = other DNA
cgggcaggagcgtgaacgggctgtcacttctgaacgggaagccgcactgccggagagcgtgctgcgtgaaccaca

SEQ ID NO: 803243 - DNA, 75 bp, synthetic construct
  source 1..75: mol_type = other DNA
ataatatgcaggatggcgtccggattgcccgtgataatcctgacagcggtgtggtggtgagaattgccggtgaag

SEQ ID NO: 803244 - DNA, 75 bp, synthetic construct
  source 1..75: mol_type = other DNA
aaggaggcggtcacgccgctgatggagagagtacctggcgaactcatggagaaactgacatcaggacagcgtgcc

SEQ ID NO: 803245 - DNA, 75 bp, synthetic construct
  source 1..75: mol_type = other DNA
gaccatgccgttgatggagccgctacgtcaggcggcagaaaaactggctcaggcgaaggctgatttaagccgctg

SEQ ID NO: 803246 - DNA, 75 bp, synthetic construct
  source 1..75: mol_type = other DNA
tgccatcaccggtggtcgcgtgtggggggatatcccggacagcagcgtccagccgggggccggaaacggtgagcc

SEQ ID NO: 803247 - DNA, 75 bp, synthetic construct
  source 1..75: mol_type = other DNA
caccggaggtgcagcttaccgtcagtggttgtccgcgagtgacgccgtgtcggctggatcaggcaacgccgcgca

SEQ ID NO: 803248 - DNA, 75 bp, synthetic construct
  source 1..75: mol_type = other DNA
gcgtcacactgtacaccccggacaccatccgggtggggaccggtgaccggatgcgcttcacgaagagtgaccggg

SEQ ID NO: 803249 - DNA, 75 bp, synthetic construct
  source 1..75: mol_type = other DNA
tatgtggcactgccggcgtttgaccgtaacggcaagtctgccggtatctggctgaacccgctgaccacggatgac

SEQ ID NO: 803250 - DNA, 75 bp, synthetic construct
  source 1..75: mol_type = other DNA
gccagccagaccatcagcacgcaggcagacgaactgcagagcaaaagccaggcgctggcaaagagcaacagccag

SEQ ID NO: 803251 - DNA, 75 bp, synthetic construct
  source 1..75: mol_type = other DNA
gccagccagaccatcagcacgcaggcagacgagcttcggagcaaaagccagtcactggcaaagagcaacagccag

SEQ ID NO: 803252 - DNA, 75 bp, synthetic construct
  source 1..75: mol_type = other DNA
atccgcacgcaggcgcccgggccagcttcacaggacgggccggatgtgcagcaggcggtgacacaggcgattgcc

SEQ ID NO: 803253 - DNA, 75 bp, synthetic construct
  source 1..75: mol_type = other DNA
ctaccttgttacaatcgatggataacgccaacaaagtattccccgaaatggcgaccatgccgattgcgctggtta

SEQ ID NO: 803254 - DNA, 75 bp, synthetic construct
  source 1..75: mol_type = other DNA
aaccatttaggaccaaaagttaatgatttagcgtttattttgtacaacaaaaccaaaatgaacaacgttactttt

SEQ ID NO: 803255 - DNA, 75 bp, synthetic construct
  source 1..75: mol_type = other DNA
gccttagtttcctatcttagcaaggaagacctaattgccggaggtgatattgtgtattcagctgctgttggagca

SEQ ID NO: 803256 - DNA, 75 bp, synthetic construct
  source 1..75: mol_type = other DNA
ctgcccgcatgatgctctccattgacagggcccggattagcgaagctctgctcaataaccgccagttgcagtcca

SEQ ID NO: 803257 - DNA, 75 bp, synthetic construct
  source 1..75: mol_type = other DNA
cagcgcggtgattgacgcgaaaatcttccatcgtcagccaaaatatctcgggccgtcggtcattattggtccgtt

SEQ ID NO: 803258 - DNA, 75 bp, synthetic construct
  source 1..75: mol_type = other DNA
atcctccatcgccagccgaaatatctcgggccgttggttatgattgggccgtttagtgagcatggctgtccggca

SEQ ID NO: 803259 - DNA, 75 bp, synthetic construct
  source 1..75: mol_type = other DNA
aaaccatatcaccattatctcgcaagaatttcataaccaacgcgccatctggctggcaaaacagtacggtatcga

SEQ ID NO: 803260 - DNA, 75 bp, synthetic construct
  source 1..75: mol_type = other DNA
caggcaccggtgaccaacggcgataacgtcgcgacgattgccagcagtatcaaagatgccatcaatgccgttccg

SEQ ID NO: 803261 - DNA, 75 bp, synthetic construct
  source 1..75: mol_type = other DNA
aaatggagtccttattaaataagcctggtgaaaacagtcatgatgtgtggaaagagttcgaatggggtgatttcc

SEQ ID NO: 803262 - DNA, 75 bp, synthetic construct
  source 1..75: mol_type = other DNA
agtctggtgctgatgccgtcggcagactatgcacgccagatttgtggtgcgggaagtcagctggcgcgtatggtc

SEQ ID NO: 803263 - DNA, 75 bp, synthetic construct
  source 1..75: mol_type = other DNA
cggcaaccgaaaccggcacggtgaatgtttatgtgggacgtacccgcgtgcaggcaccggtgactaacggcgata

SEQ ID NO: 803264 - DNA, 75 bp, synthetic construct
  source 1..75: mol_type = other DNA
gaggcttatcgccagaccgacccgtttggcgagctgtatgtgattgccgttccggaagccacgggcgcggcggca

SEQ ID NO: 803265 - DNA, 75 bp, synthetic construct
  source 1..75: mol_type = other DNA
cttcctgcagataacatcgtccgccgtcttctcagcaggatggagcacatcatgcaggcacatgatatcagcgca

SEQ ID NO: 803266 - DNA, 75 bp, synthetic construct
  source 1..75: mol_type = other DNA
tgcagcaggctttgatcgctaaaggcgtacccgcaaaagtcatcttctgcgactacgccggattctcaacgcttg

SEQ ID NO: 803267 - DNA, 75 bp, synthetic construct
  source 1..75: mol_type = other DNA
ggctggtatattctgccgaacgggcatattcatcagtacggcatcgtcactcttgcggaggtttctacctataac

SEQ ID NO: 803268 - DNA, 75 bp, synthetic construct
  source 1..75: mol_type = other DNA
atgaggaaaggaaggaaagccgttaatggtctgattttgcaaacaaataaaaaattaagacggtttaccaccata

SEQ ID NO: 803269 - DNA, 75 bp, synthetic construct
  source 1..75: mol_type = other DNA
ccagtcgtgtgatggccatcgcctttatatttatgtcagtgcttattgttctcagcctctctgttaacgtcattc

SEQ ID NO: 803270 - DNA, 75 bp, synthetic construct
  source 1..75: mol_type = other DNA
cggaggcggtgcgcaaaccattgtcattcagtggggagtgcattcaactccccctggcagtaatgctgcctacaa

SEQ ID NO: 803271 - DNA, 75 bp, synthetic construct
  source 1..75: mol_type = other DNA
gcttgacgccacgctgacggcattggctggtctagcaactggtgcaaataaactcccgtatttcactggaactga

SEQ ID NO: 803272 - DNA, 75 bp, synthetic construct
  source 1..75: mol_type = other DNA
gctcccaagagcctatccaacagcgcatatttcgacggcggtcacgttagcggggcgaacatttgataaacaagg

SEQ ID NO: 803273 - DNA, 75 bp, synthetic construct
  source 1..75: mol_type = other DNA
acggttacgctgacggtgaccggggaagcaaccgaaagcggcacggtgaatgtctatgtgggacgtacccgcgtg

SEQ ID NO: 803274 - DNA, 75 bp, synthetic construct
  source 1..75: mol_type = other DNA
caggcaccggtgactaacggcgataacgtcacgatgattgccagcagtatccaggatgccatcaatgccgttccg

SEQ ID NO: 803275 - DNA, 75 bp, synthetic construct
  source 1..75: mol_type = other DNA
atcgcgttatgtactcccgctttatgttgtccacgtggtcgtttctggggctgtcggcagtgctttttctggcga

SEQ ID NO: 803276 - DNA, 75 bp, synthetic construct
  source 1..75: mol_type = other DNA
gggctttgatccggatcgtgaaccccccttcttcttctgcaaaccagcagatgccgttgttccggtcgccgctgg

SEQ ID NO: 803277 - DNA, 75 bp, synthetic construct
  source 1..75: mol_type = other DNA
gaaaacgcccatgaatatgtctggggttatgccacgggtcttgatatgactcgccgtgaccgtcaaatggaaatg

SEQ ID NO: 803278 - DNA, 75 bp, synthetic construct
  source 1..75: mol_type = other DNA
aagcgcccgttaccgtaccggttgttggcagtgatgaacaattccccgtgcgccgcgtttactgcgtcggacgta

SEQ ID NO: 803279 - DNA, 75 bp, synthetic construct
  source 1..75: mol_type = other DNA
ccgctacggtggcaatgatgggggcaacggcaattgttgcccccatgctgccgctgtatcccgacatcagcccgg

SEQ ID NO: 803280 - DNA, 75 bp, synthetic construct
  source 1..75: mol_type = other DNA
taattgggatgccttcgcaactcttcactatggctcgttcttttaaagccgtagctaatggcaaaatttatatcg

SEQ ID NO: 803281 - DNA, 75 bp, synthetic construct
  source 1..75: mol_type = other DNA
gatcgcaaagaagtggaatcttcttctaaccaaatgaaagttagaccgattaatggtcctgttccacttgtccgt

SEQ ID NO: 803282 - DNA, 75 bp, synthetic construct
  source 1..75: mol_type = other DNA
agccgggtgataataatctgattaaccttgcgcagcgggcaagtatttgtgtatctaatgatgggcgatatgtca

SEQ ID NO: 803283 - DNA, 75 bp, synthetic construct
  source 1..75: mol_type = other DNA
gcagaaccttcagtctgaatgagaatgcatgggcgcagccatacgtgcggacgacggcattccgggcagatgaga

SEQ ID NO: 803284 - DNA, 75 bp, synthetic construct
  source 1..75: mol_type = other DNA
tgcctcaattcaaagtcccgctctttgagcatacaaccgttttcttttgcccgacccgcgagatgttctatgaat

SEQ ID NO: 803285 - DNA, 75 bp, synthetic construct
  source 1..75: mol_type = other DNA
aaggaagaggaaaaacccgcgaagaaaggcaaacgtaagcccaaagcaaaagaagcgtatgtgccgcgcgtaatg

SEQ ID NO: 803286 - DNA, 75 bp, synthetic construct
  source 1..75: mol_type = other DNA
tggcccaagttggggttggagtgcaactgaaattaaaggcgttgacgttaatggcacttcaacaagtgaggttta

SEQ ID NO: 803287 - DNA, 75 bp, synthetic construct
  source 1..75: mol_type = other DNA
ttatactttaagcggaactatagatgacaatcatatttcagttaatcaaggggatatttatagtataggtgctca

SEQ ID NO: 803288 - DNA, 75 bp, synthetic construct
  source 1..75: mol_type = other DNA
aacagaaaaagacccggcagtaaacgccattgctcacgccattctgggcggcgcagtggcggcaatgcagggtaa

SEQ ID NO: 803289 - DNA, 75 bp, synthetic construct
  source 1..75: mol_type = other DNA
tgcgaaaggttcgacctgggaaggcggcgttcgcgttccgactttcgtgtactggaaaggcatgatccaaccgcg

SEQ ID NO: 803290 - DNA, 75 bp, synthetic construct
  source 1..75: mol_type = other DNA
ctaatctgtataaaacactggagaaaaacggtcagcttgataacacgctgatcgtctttacctccgataacggac

SEQ ID NO: 803291 - DNA, 75 bp, synthetic construct
  source 1..75: mol_type = other DNA
acagtggggcttatcagtgacataggcagtcaggtggcggatattgcgcatacacagggagaactgaatgcgttg

SEQ ID NO: 803292 - DNA, 75 bp, synthetic construct
  source 1..75: mol_type = other DNA
tgctggtttgcttttgccgtcacagcctgtactggcggcagcctatgacaatcagacaattggaagtggtggaac

SEQ ID NO: 803293 - DNA, 75 bp, synthetic construct
  source 1..75: mol_type = other DNA
cctgacgctggataacgggaccatcctgacggggaacgttgcgggagacaacaccggtgcaggtgatatggcggt

SEQ ID NO: 803294 - DNA, 75 bp, synthetic construct
  source 1..75: mol_type = other DNA
ctcaggatggcgggattacccttcagagtggcgctgcaatgacgatggatacccttcaggcgaacactaatgtga

SEQ ID NO: 803295 - DNA, 75 bp, synthetic construct
  source 1..75: mol_type = other DNA
acagcgaatgccggggtgtgggcagaagcgagttaccagaatggcgagaatacagaatcgccggtaacaggtagc

SEQ ID NO: 803296 - DNA, 75 bp, synthetic construct
  source 1..75: mol_type = other DNA
ggatgaaaaattattagcattactggcagagcggcgcgaactggccgtcgaggtgggaaaagccaaactgctctc

SEQ ID NO: 803297 - DNA, 75 bp, synthetic construct
  source 1..75: mol_type = other DNA
tgaaagagttaggggaaatcacccgttcgatgaaggtattaggttgttacccaagtgagaatgtagtgcctgtcg

SEQ ID NO: 803298 - DNA, 75 bp, synthetic construct
  source 1..75: mol_type = other DNA
ccgtattaactcagcaggctttgctccagcaacatctcaataaaattaatccacactctgcccgcattgcttttc

SEQ ID NO: 803299 - DNA, 75 bp, synthetic construct
  source 1..75: mol_type = other DNA
ccggtacctgggaatacggcctgagcaaggaaaataccaactggtatctgaaggttgatactccgccggctaacc

SEQ ID NO: 803300 - DNA, 75 bp, synthetic construct
  source 1..75: mol_type = other DNA
ctgacgccagccttccaggcggtgtcgctgacgcttgggagcctgtcgggtagcgggacgttccggatgaacacg

SEQ ID NO: 803301 - DNA, 75 bp, synthetic construct
  source 1..75: mol_type = other DNA
ctacaattaactccggtggtgggcagtatctctacggcggaagtgccacggtcacctctattagcaacggcggac

SEQ ID NO: 803302 - DNA, 75 bp, synthetic construct
  source 1..75: mol_type = other DNA
aacggttttgaaaccggcgccgatatggtctttgacctgagtgacagcagtttagcggtaggtactttcttctct

SEQ ID NO: 803303 - DNA, 75 bp, synthetic construct
  source 1..75: mol_type = other DNA
cctgttgtctcaggacggtgggattttccttaagagtggcggtgccatgacgatggatgcacttcaggctaaggc

SEQ ID NO: 803304 - DNA, 75 bp, synthetic construct
  source 1..75: mol_type = other DNA
ggcggtgagtcatgaattttcggacaacaacaaagtccgtatcaatgacacctatgacttcaggaacgatatctc

SEQ ID NO: 803305 - DNA, 75 bp, synthetic construct
  source 1..75: mol_type = other DNA
cgactcaggccgcagtggcagaaggcactatcaccatccgggacagggacaatcagaagcagaatctggcgaacc

SEQ ID NO: 803306 - DNA, 75 bp, synthetic construct
  source 1..75: mol_type = other DNA
atgaacgtttgtagagaaaaacaacgtcattgttttaagagcgtgatattggcgctcggactggttatgtttgcg

SEQ ID NO: 803307 - DNA, 75 bp, synthetic construct
  source 1..75: mol_type = other DNA
gtctattaacccggaaggaattagcgttgtcgaattacccgacacgacagcgaatcgccgggccgatattctcgg

SEQ ID NO: 803308 - DNA, 75 bp, synthetic construct
  source 1..75: mol_type = other DNA
cgcgggcacgagcaggataacgaaaccttaaaatccaatgccattcgctggttgcgaggcgagtacactaccaaa

SEQ ID NO: 803309 - DNA, 75 bp, synthetic construct
  source 1..75: mol_type = other DNA
gatgcgctgatcgccagtaccagaacgcggatccgcctgccggaagggcaagccaatattatcaatttcaatggg

SEQ ID NO: 803310 - DNA, 75 bp, synthetic construct
  source 1..75: mol_type = other DNA
atttacaggccattgcgccggttatcgtggtcaattacggcaatcagacctggcaggatctggcgcgccagttgg

SEQ ID NO: 803311 - DNA, 75 bp, synthetic construct
  source 1..75: mol_type = other DNA
gcctcacgcttttcgcgtcgatttctacagtgccagtgaaatggttaaggcgatcgccgatcgttttgtcgttga

SEQ ID NO: 803312 - DNA, 75 bp, synthetic construct
  source 1..75: mol_type = other DNA
tcgcgatcgcggaagaaaaacccagtgatatggatgaaataacatcggcagaagatgccgatgaggacggtctgg

SEQ ID NO: 803313 - DNA, 75 bp, synthetic construct
  source 1..75: mol_type = other DNA
gcgcaaggggttgtacagctacgaagcgctccagtcccgactggcggaaaatagcttcgctcagcgggctggtgt

SEQ ID NO: 803314 - DNA, 75 bp, synthetic construct
  source 1..75: mol_type = other DNA
agataacccaccagctgctgagtttgtgcgatcactcgctggcaatcgtcaatgtggatgccaactgccatatcc

SEQ ID NO: 803315 - DNA, 75 bp, synthetic construct
  source 1..75: mol_type = other DNA
aagaacgcgacgctattattcagtcacttaagtcaggtgtaacgccaaggataggcattcagcatatccaggttg

SEQ ID NO: 803316 - DNA, 75 bp, synthetic construct
  source 1..75: mol_type = other DNA
agcttatgaaaaacatgtccaccagaaacaagccggatggtaatgcgttacttagcgttgttgaaagattcgtta

SEQ ID NO: 803317 - DNA, 75 bp, synthetic construct
  source 1..75: mol_type = other DNA
gctaagaggtgaatacaccacgaaaaccgacgcccgtaacgatctgggtgtgcgcaccattatttctgatgcctc

SEQ ID NO: 803318 - DNA, 75 bp, synthetic construct
  source 1..75: mol_type = other DNA
gtgattgatacagggtgcaggcacccgattgtcgggggctatcgacagggggtaaagttgacggattttttcgta

SEQ ID NO: 803319 - DNA, 75 bp, synthetic construct
  source 1..75: mol_type = other DNA
tggacagcggcgaggcctctgccccttttattgaagcagtcaaccgctacatcaacgaagaggggcaccacggac

SEQ ID NO: 803320 - DNA, 75 bp, synthetic construct
  source 1..75: mol_type = other DNA
cctgttgctgtcagcggtatcagccatgtggccagcgaagaggactggctgatcactccgggcgcggatgaggaa

SEQ ID NO: 803321 - DNA, 75 bp, synthetic construct
  source 1..75: mol_type = other DNA
tggacagtggcgaaatatcacaaccctttattgatgcggttaacgactatgtgaatacccagggccaccacggac

SEQ ID NO: 803322 - DNA, 75 bp, synthetic construct
  source 1..75: mol_type = other DNA
atggggggcgattttggtccttctgtgacagtgcctgcagctttgcaggcactgaactctaattcgcaactcact

SEQ ID NO: 803323 - DNA, 75 bp, synthetic construct
  source 1..75: mol_type = other DNA
tgttaggattgcgcggcacggtgataaaaagtcatggtgcagccaatcagcgagcttttgcggtcgcgattgaac

SEQ ID NO: 803324 - DNA, 75 bp, synthetic construct
  source 1..75: mol_type = other DNA
tgaaagaaggtcgagcgcaagcctgtgtcagtgctggtaataccggggcgctgatggggctggcaaaattattac

SEQ ID NO: 803325 - DNA, 75 bp, synthetic construct
  source 1..75: mol_type = other DNA
cagaattaaaaacctaccgtctgcggctgaaatataccggtggctttacccgtattggccggttctatgaggtga

SEQ ID NO: 803326 - DNA, 75 bp, synthetic construct
  source 1..75: mol_type = other DNA
aatatggtgaaaataaagacgccaagattattatgcgtgataaggaaagagaaagttggtatggtaatatcaaga

SEQ ID NO: 803327 - DNA, 75 bp, synthetic construct
  source 1..75: mol_type = other DNA
atggttattaatatattttatatatgcacaggcgaatataaaaggttttttgataaattttatttatcttgtgag

SEQ ID NO: 803328 - DNA, 75 bp, synthetic construct
  source 1..75: mol_type = other DNA
tggatgcgggtatcgttagcgatccgtttatcgctgcggtgaataattacgtaatggggcaggggaaccacggac

SEQ ID NO: 803329 - DNA, 75 bp, synthetic construct
  source 1..75: mol_type = other DNA
cgtctggtacacatctggagcgtcccggtggagtatctgacgcgtaagtatcagctggtgcgcgctcgtcactaa

SEQ ID NO: 803330 - DNA, 75 bp, synthetic construct
  source 1..75: mol_type = other DNA
cggaaataaaaacctaccggcttcgtctgaagtataccggaggctttacccgtatcggccggttctatgaggtga

SEQ ID NO: 803331 - DNA, 75 bp, synthetic construct
  source 1..75: mol_type = other DNA
gtctttttctgcccctgacgggccatgccggactgaacgtcctcgctgacctcggcggggaggatgccacgcctt

SEQ ID NO: 803332 - DNA, 75 bp, synthetic construct
  source 1..75: mol_type = other DNA
aaccgtccgatacaggagcagggctggtatgagatgcgccgccagctggagtacaaagcgctctggcgtggcggt

SEQ ID NO: 803333 - DNA, 75 bp, synthetic construct
  source 1..75: mol_type = other DNA
atgcgaaataatcccgaagaaaaaacaaaacatgccttttatcccctgcccgttgcggggatgctgctgttttgc

SEQ ID NO: 803334 - DNA, 75 bp, synthetic construct
  source 1..75: mol_type = other DNA
cgatgtaaatggcgctcgtaacattttagcggcggggcacgccgttcttgcctgtggagagatggtgcagtcagg

SEQ ID NO: 803335 - DNA, 75 bp, synthetic construct
  source 1..75: mol_type = other DNA
ttgatatctacccgtatatagccggggcggtcttcctgattggtagctggctgcgttatgactacgggcagtaca

SEQ ID NO: 803336 - DNA, 75 bp, synthetic construct
  source 1..75: mol_type = other DNA
ccagcgttgcgcgtgctgtggtcatacagcgaaagaaaatcgcctgtcacaaagtcaattcagatgccaggtatg

SEQ ID NO: 803337 - DNA, 75 bp, synthetic construct
  source 1..75: mol_type = other DNA
agattaagctccacgaaaagctatccaagagtgatatactaaatatattggctgagcagatgaccatgcttgagg

SEQ ID NO: 803338 - DNA, 75 bp, synthetic construct
  source 1..75: mol_type = other DNA
caataaacctgatttgttagaaaaatatcatgactccagaataatacgaatgtccattaaaaatgatgaaggtaa

SEQ ID NO: 803339 - DNA, 75 bp, synthetic construct
  source 1..75: mol_type = other DNA
cagaagcgagttaccagaatggcgagaatacagaatcgccggtaacaggtagcgttggtttccggattaatttct

SEQ ID NO: 803340 - DNA, 75 bp, synthetic construct
  source 1..75: mol_type = other DNA
ttgcattcaaatgtttgtaataacattgaggttgaaaaatgtcatcgaacagaaattgtgcgaaatcttatttcc

SEQ ID NO: 803341 - DNA, 75 bp, synthetic construct
  source 1..75: mol_type = other DNA
aaagatacgctgagtatcactgatgtgatggccgcgcagggcatgacacagaattgggctgagatggggttttct

SEQ ID NO: 803342 - DNA, 75 bp, synthetic construct
  source 1..75: mol_type = other DNA
aaataaaagaaagtggtttatctgagaaggatttcaaaaagcaggtttgttcaagctgcgactatctgaaagatc

SEQ ID NO: 803343 - DNA, 75 bp, synthetic construct
  source 1..75: mol_type = other DNA
cgtgaccacgccggaaatgacgccgggtgaggtgacgccgcgaccactgcagttgccggggatcggggcgctgtt

SEQ ID NO: 803344 - DNA, 75 bp, synthetic construct
  source 1..75: mol_type = other DNA
aaatggcttcctggctggttgagtggaaaaatgccactgaaacgcaatggcttaaagatgccccgtcacagccat

SEQ ID NO: 803345 - DNA, 75 bp, synthetic construct
  source 1..75: mol_type = other DNA
taactggcagaagcagaaacgcaaaatacagcgactgcattcccgtatcgcaaatatccgcagggactactttca

SEQ ID NO: 803346 - DNA, 75 bp, synthetic construct
  source 1..75: mol_type = other DNA
atgaggcgctttgccggagcttgtcgtttcgttttcaaccgtgctctggcgcttcagaatgagaatcatgaggcc

SEQ ID NO: 803347 - DNA, 75 bp, synthetic construct
  source 1..75: mol_type = other DNA
cgtggcggtcaggtgcttgctgttccgccagcgtacacaagccagcgttgcacgtgctgtggtcatacagcgaaa

SEQ ID NO: 803348 - DNA, 75 bp, synthetic construct
  source 1..75: mol_type = other DNA
ggcgtggctaaactcgccacgctgtcagatggcacagtctttgagcctgtaaacagttttcagaaaaaacagaag

SEQ ID NO: 803349 - DNA, 75 bp, synthetic construct
  source 1..75: mol_type = other DNA
ttcaaaaagcggggacagaatgatgcattccgctacccgcagggcgttaagctcgatcaggaaaacagccgtatt

SEQ ID NO: 803350 - DNA, 75 bp, synthetic construct
  source 1..75: mol_type = other DNA
atgtcaaagtcagcagcgggtacggtcagccagccggggcgcaatgtccgggcaaaatcaggtttaaaccgtccg

SEQ ID NO: 803351 - DNA, 75 bp, synthetic construct
  source 1..75: mol_type = other DNA
tattcagacagaaagtgaagtatcaactccggttcacccttcagcatcaatgatcgggctggatgctggcgtggc

SEQ ID NO: 803352 - DNA, 75 bp, synthetic construct
  source 1..75: mol_type = other DNA
agacttcagcgacagttaagccgcaaggtcaaattcagcaataactggcagaagcagaaacgcaaaatacagcga

SEQ ID NO: 803353 - DNA, 75 bp, synthetic construct
  source 1..75: mol_type = other DNA
ccgctacccgcaaggcgtgaagctcgatcagaccaacaattgtatagcgcttcctaagttgggctggatacgcta

SEQ ID NO: 803354 - DNA, 75 bp, synthetic construct
  source 1..75: mol_type = other DNA
atccgcagggactaccttcacaaagtcacaacgaccgtcagcaaaaaccacgcaatgatagtcattgaggatttg

SEQ ID NO: 803355 - DNA, 75 bp, synthetic construct
  source 1..75: mol_type = other DNA
gtcagccagtcctgcggtaagtggtacatcagtattcagacagaaagtgaagtatcaactccggttcacccttca

SEQ ID NO: 803356 - DNA, 75 bp, synthetic construct
  source 1..75: mol_type = other DNA
gccgccggaattttgctttcagtcggctcgctgtggctgatgccatttgccagctacgtgatgcaggcaacctgc

SEQ ID NO: 803357 - DNA, 75 bp, synthetic construct
  source 1..75: mol_type = other DNA
cgcccgagtctgcaccggagatccaactgctacaatcgcgcatgattctcggtaaaaccattgctgaactgaatc

SEQ ID NO: 803358 - DNA, 75 bp, synthetic construct
  source 1..75: mol_type = other DNA
actgaatggtcaggatcagcaactgacactcacggttggggaaaacggccactatacactggaaggtgaagagtt

SEQ ID NO: 803359 - DNA, 75 bp, synthetic construct
  source 1..75: mol_type = other DNA
agtaaggaaaataccaactggtatctgaaggctgacaccccaccaccggttattccgccgactaacccgggcaca

SEQ ID NO: 803360 - DNA, 75 bp, synthetic construct
  source 1..75: mol_type = other DNA
ttttccgattgtgggtcgcggctgggcgagattaaccaaagagaaaccaggtgagctggcgatcagctggatgca

SEQ ID NO: 803361 - DNA, 75 bp, synthetic construct
  source 1..75: mol_type = other DNA
aacggtgtggttaaacgcgccagcaccgcctacggttatggctataactattacggttatagctactctgataaa

SEQ ID NO: 803362 - DNA, 75 bp, synthetic construct
  source 1..75: mol_type = other DNA
cgtcaatattaaaggtgcaatcctcaacggtgtggttaaacgcgccagcaccgcctacggttatggctataacta

SEQ ID NO: 803363 - DNA, 75 bp, synthetic construct
  source 1..75: mol_type = other DNA
attcagggcaaatgcaaaaaatatccgtcttgataatggtatggcagccaggatagaagcagccaggtcgcttca

SEQ ID NO: 803364 - DNA, 75 bp, synthetic construct
  source 1..75: mol_type = other DNA
ggtagcctcctggctggacgcattactggggatgggaagaaaggtggaaatctgatagtggctgactctgtctgg

SEQ ID NO: 803365 - DNA, 75 bp, synthetic construct
  source 1..75: mol_type = other DNA
ttgaaagagttaggggaaatcacccgttcaatgaaggtattgggctgttacccaagtgagaacgtagtgcctgtt

SEQ ID NO: 803366 - DNA, 75 bp, synthetic construct
  source 1..75: mol_type = other DNA
cgatttccgtccgtcagccaccacgcgcctgacgcaggctttccggccggtttcactggtgtctgaaagtctttc

SEQ ID NO: 803367 - DNA, 75 bp, synthetic construct
  source 1..75: mol_type = other DNA
gcggcagcgtcactgataccactcttaacgatggcggagagcagaatgttgagagttggggcgtagctgtgaata

SEQ ID NO: 803368 - DNA, 75 bp, synthetic construct
  source 1..75: mol_type = other DNA
gctgaagctcgttatgaaaacggtaagcagaccgagtcaccaataactggtggcgttggtttccgaatcaacttc

SEQ ID NO: 803369 - DNA, 75 bp, synthetic construct
  source 1..75: mol_type = other DNA
ggtaaaaccattgctgaactgaatctgcgcgacatggttgagcagaagtattttccgattgtgggtcgcggctgg

SEQ ID NO: 803370 - DNA, 75 bp, synthetic construct
  source 1..75: mol_type = other DNA
gccgccgtaccagaaattcttgccaacggtgtgctcagccgtagcgatatcggcctgttagcaactctgttttac

SEQ ID NO: 803371 - DNA, 75 bp, synthetic construct
  source 1..75: mol_type = other DNA
gctcggataaactgtttaatggcaaccgcgggccgatgaatttaattttcgccgccgggattttgctgtcagtcg

SEQ ID NO: 803372 - DNA, 75 bp, synthetic construct
  source 1..75: mol_type = other DNA
ggcgatcaacgactggggcaatctgtatatgtccgagacgctgggggttgatctggtgacggcgaataccgcagt

SEQ ID NO: 803373 - DNA, 75 bp, synthetic construct
  source 1..75: mol_type = other DNA
atcgccatcgccgccggggtttccgcactgctgttactgccctttttgaacgcccagacaccgcgagaagcgtga

SEQ ID NO: 803374 - DNA, 75 bp, synthetic construct
  source 1..75: mol_type = other DNA
atcggtgcgctggtagcgggttggggttcggacaaactgtttaacggcaaccgcgggccgatgaatttgattttc

SEQ ID NO: 803375 - DNA, 75 bp, synthetic construct
  source 1..75: mol_type = other DNA
gcagtcgcgctgcattacagttggcgtatcgggatgatggttgccggctgtatggcgatagttgtggggattttt

SEQ ID NO: 803376 - DNA, 75 bp, synthetic construct
  source 1..75: mol_type = other DNA
gatagaaccggagtaggtgacgtggtaattaaaggttcatcagtctggcatctggaaagcgactcaactgtcagt

SEQ ID NO: 803377 - DNA, 75 bp, synthetic construct
  source 1..75: mol_type = other DNA
aaccagtctgcatttcgctatgatggagacggagaataacattctgatgatcaccggtgcgacgccagacagtgg

SEQ ID NO: 803378 - DNA, 75 bp, synthetic construct
  source 1..75: mol_type = other DNA
tggaatgggcgaacgaccattacgatctggtgattgtcgatacgccgccgatgctggcggtgagcgatgctgcgg

SEQ ID NO: 803379 - DNA, 75 bp, synthetic construct
  source 1..75: mol_type = other DNA
gcagttgcgctgcattacagctggcgtatcgggatgatggttgccggttgtatggcgatagtcgtggggattttt

SEQ ID NO: 803380 - DNA, 75 bp, synthetic construct
  source 1..75: mol_type = other DNA
ggctgatgccatttgccagctacgtgatgcaggcaacctgcttcttcaccattggtttttttgtctttggcccac

SEQ ID NO: 803381 - DNA, 75 bp, synthetic construct
  source 1..75: mol_type = other DNA
gattacgggacttgggaatattacctgaacaaggaaaacacggactggtatctgcaagccaatagcggtcagcag

SEQ ID NO: 803382 - DNA, 75 bp, synthetic construct
  source 1..75: mol_type = other DNA
gcagaggcaccgaagtttgccgaggccatcattaataaccagatccagggtcgcacgctggtgaaggttaactaa

SEQ ID NO: 803383 - DNA, 75 bp, synthetic construct
  source 1..75: mol_type = other DNA
ttgcgggtcattatcaggtcagtgcatccacattgcgcgataaatattaccaggtgcagaagtttgcgaaacctg

SEQ ID NO: 803384 - DNA, 75 bp, synthetic construct
  source 1..75: mol_type = other DNA
agattatctgcgaccggaaaaacccgccttccgcaaatgttatgagcgtctggaactggcagcccgcgagcatgg

SEQ ID NO: 803385 - DNA, 75 bp, synthetic construct
  source 1..75: mol_type = other DNA
ctacctgtaatcaacaggcgacggcgcaggcgttaaaaggggatgcccgtaagacgtacatgagtgattgcctga

SEQ ID NO: 803386 - DNA, 75 bp, synthetic construct
  source 1..75: mol_type = other DNA
tgttattcggtttagtttttttaaccactgtcggcgctgccgagaagacgttaaccccgcaacaacaacgtatga

SEQ ID NO: 803387 - DNA, 75 bp, synthetic construct
  source 1..75: mol_type = other DNA
agtcatgacgccaccagaacgccgcgcgcaagcctggcagcgtctggtcgcagatctaccggaatcattctattc

SEQ ID NO: 803388 - DNA, 75 bp, synthetic construct
  source 1..75: mol_type = other DNA
tatgaacagtaaacaatggccaggtaaagcggctattggtcgtctgaaaggtgaggaactggcgcaatataattt

SEQ ID NO: 803389 - DNA, 75 bp, synthetic construct
  source 1..75: mol_type = other DNA
acatgaacaacagacaatggcctggtaaagcggctattggtcgtctgaaaagtgaggaactggcgcaatataatt

SEQ ID NO: 803390 - DNA, 75 bp, synthetic construct
  source 1..75: mol_type = other DNA
atggattacccacatgggcactaatacctccaccatcgcatgaagaacttattcaacaggcagaatcagaaaggc

SEQ ID NO: 803391 - DNA, 75 bp, synthetic construct
  source 1..75: mol_type = other DNA
cccgccgtcaattcccagcaactgttgaccggcagcttcaacggcaaaacccagtcgctgttagtgatgcttaac

SEQ ID NO: 803392 - DNA, 75 bp, synthetic construct
  source 1..75: mol_type = other DNA
acggtttgcctgccagcgatatcattgcgccgaatctggttgagctggaaatactctgtgagcatgcggtaaata

SEQ ID NO: 803393 - DNA, 75 bp, synthetic construct
  source 1..75: mol_type = other DNA
ccaggttccagcgaaaacgacgttgttaatggcgaccgggcaacaagctggtgcgctggttgaagcgttgctggt

SEQ ID NO: 803394 - DNA, 75 bp, synthetic construct
  source 1..75: mol_type = other DNA
aggcctacgacattatcagccaccgtcgtctggagtttgacgccgggcacaccgacattgcgcagtcattcatgg

SEQ ID NO: 803395 - DNA, 75 bp, synthetic construct
  source 1..75: mol_type = other DNA
gttctggtccggtgcgctgttcaatcgtgggcgcaacaaagccgacaaggtggacatcgacctgtcccacagcaa

SEQ ID NO: 803396 - DNA, 75 bp, synthetic construct
  source 1..75: mol_type = other DNA
aataccagaacctgctgatgtgcgaattcgttgacgatctcgcatctgtgttcccgctcagcgaattgcaggcgt

SEQ ID NO: 803397 - DNA, 75 bp, synthetic construct
  source 1..75: mol_type = other DNA
aggcccgcgccgtcagccggaaaagaacgttttcaccgatgaacaaattgagaagctggaagaaatcttccattc

SEQ ID NO: 803398 - DNA, 75 bp, synthetic construct
  source 1..75: mol_type = other DNA
ccgaacagtacaacgtgacatacatcggcatcgactcaactggcgtcggccacggggtttacgagaacgtgaaag

SEQ ID NO: 803399 - DNA, 75 bp, synthetic construct
  source 1..75: mol_type = other DNA
tccaggagctgcgcaaggtggcctccgggatggccattcacaaaaaatggcgacaaacctacttttccacgccgt

SEQ ID NO: 803400 - DNA, 75 bp, synthetic construct
  source 1..75: mol_type = other DNA
aggcccgcgccgtcagccggaaaagaatgttttcaccgatgaacaaattgagaagctggaagaaattttccattc

SEQ ID NO: 803401 - DNA, 75 bp, synthetic construct
  source 1..75: mol_type = other DNA
aaaactgaccgaacagtacaacgtgacatacatcggcatcgactcaactggcgtcggccacggggtttacgagaa

SEQ ID NO: 803402 - DNA, 75 bp, synthetic construct
  source 1..75: mol_type = other DNA
cgactttgccaaagaggttgatgtggagctgaaaggcgacccgatgacgctcagcaatggcgccacgctgtattt

SEQ ID NO: 803403 - DNA, 75 bp, synthetic construct
  source 1..75: mol_type = other DNA
tggacatcgacctgtcccacagcaatcttgcccccggccagctgtgcgccgacgggcaataccgccagatagtca

SEQ ID NO: 803404 - DNA, 75 bp, synthetic construct
  source 1..75: mol_type = other DNA
gagttaccacggcaacctgtatctggatgaatatttctggataccgaaatttcaggagctgcgcaaagtggcttc

SEQ ID NO: 803405 - DNA, 75 bp, synthetic construct
  source 1..75: mol_type = other DNA
aataccagaacctactgatgtgcgagttcgttgacgatctcgcatctgtgttcccgctcagcgaattgcaggcgt

SEQ ID NO: 803406 - DNA, 75 bp, synthetic construct
  source 1..75: mol_type = other DNA
accgacattgcgcagtcattcatggcaatccgtcgcgcaaccaccgccagtggcaaccgcccgacctacgaagcc

SEQ ID NO: 803407 - DNA, 75 bp, synthetic construct
  source 1..75: mol_type = other DNA
ttaggctggtggcatataggattaggtgtctttaacgtcggtgcggcgtacatccataaccgcgatgtcctctcc

SEQ ID NO: 803408 - DNA, 75 bp, synthetic construct
  source 1..75: mol_type = other DNA
cgcatgaaccacgtctggattttgtgcggctggaacaaattcgccagctggtagaaattccgctggtgttgcatg

SEQ ID NO: 803409 - DNA, 75 bp, synthetic construct
  source 1..75: mol_type = other DNA
ggacgatctgctggtggatgaaaaagattcagcttatacctcaccagccgcagctgcagagtttgttcaacgtac

SEQ ID NO: 803410 - DNA, 75 bp, synthetic construct
  source 1..75: mol_type = other DNA
cattcagcactgtatccgcagcggtatctgcaaagtgaatgttgcgacagaactgaaaattgcttttgccgatgc

SEQ ID NO: 803411 - DNA, 75 bp, synthetic construct
  source 1..75: mol_type = other DNA
tggagaaaaaaatgaaaaaaggcaccgttcttaattctgatatttcatcggtgatctcccgtctgggacataccg

SEQ ID NO: 803412 - DNA, 75 bp, synthetic construct
  source 1..75: mol_type = other DNA
tcaaacaacaaaccgcaaacagtcaggcggtaattcgcagcggggagtgttccccgtatgcgaatatcattctct

SEQ ID NO: 803413 - DNA, 75 bp, synthetic construct
  source 1..75: mol_type = other DNA
gattccgcttatacctcaccagccgcagctgcagagtttgttcaacgtacccaaattgactccctggcggtagca

SEQ ID NO: 803414 - DNA, 75 bp, synthetic construct
  source 1..75: mol_type = other DNA
atggtcaaagcgtgtaaagaagctggtgtgacctttatggccgggcatattatgaattttttcaatggggttcaa

SEQ ID NO: 803415 - DNA, 75 bp, synthetic construct
  source 1..75: mol_type = other DNA
ggcgattgctactgctgatgctgccactctttcaagatcgcaggacaggaaagtgaaaatcagtgagatcattaa

SEQ ID NO: 803416 - DNA, 75 bp, synthetic construct
  source 1..75: mol_type = other DNA
aagatggagtgattgggaatgttttatcttgccatacaaagagaaatggttgggaaaataaacaggaacatctct

SEQ ID NO: 803417 - DNA, 75 bp, synthetic construct
  source 1..75: mol_type = other DNA
aactgggccgccttggcgggcaggaggatgatctgctggtggatgaaaaagattcggcttatacctcacctgttg

SEQ ID NO: 803418 - DNA, 75 bp, synthetic construct
  source 1..75: mol_type = other DNA
cgaaggtcgcacgctcttttcccagcttttgcatttgatgaaccgctactgccgtggggtgatcgtcgaaggtat

SEQ ID NO: 803419 - DNA, 75 bp, synthetic construct
  source 1..75: mol_type = other DNA
cgttccattcaggggttgcatatgcgcgatgcgctggagcggctggacacgctctaccccggtatgatgcttaag

SEQ ID NO: 803420 - DNA, 75 bp, synthetic construct
  source 1..75: mol_type = other DNA
ccgatcaccatttgccgggcgaaacattacccgcagcggaagcgatcattaaccctaacttgcgcgactgtaatt

SEQ ID NO: 803421 - DNA, 75 bp, synthetic construct
  source 1..75: mol_type = other DNA
caactggcctacaagctggatatcaacgagtttcgcggcaaccgcagtctacagattatcatcgataatatctgg

SEQ ID NO: 803422 - DNA, 75 bp, synthetic construct
  source 1..75: mol_type = other DNA
gaactgggctataccgtagataaagaagagcatgttgtaggcctgaattgcatagcttcagcaatttacgatgat

SEQ ID NO: 803423 - DNA, 75 bp, synthetic construct
  source 1..75: mol_type = other DNA
caatacccatcagtggcctggcaaagctgctattggtcgtctgaaaggcgaggaactggcgcaatataatttgtg

SEQ ID NO: 803424 - DNA, 75 bp, synthetic construct
  source 1..75: mol_type = other DNA
ctttggtttcagaagccaatacctacatcaatacccatcagtggcctggcaaagctgctattggtcgtctgaaag

SEQ ID NO: 803425 - DNA, 75 bp, synthetic construct
  source 1..75: mol_type = other DNA
agggctggtttgatgagcgcggtattgcaatccctaatctggcggagctgctggatctggtggcgctggggacgg

SEQ ID NO: 803426 - DNA, 75 bp, synthetic construct
  source 1..75: mol_type = other DNA
ccacaattgaatattgtctcattctctgagaccttcaacctttattacacatccagatattctgcaaaaacactc

SEQ ID NO: 803427 - DNA, 75 bp, synthetic construct
  source 1..75: mol_type = other DNA
gctggcgatgcgttctctcggctgtgacaacatcgactaccttgtaccgaaccgtttcgaagacggttacggctt

SEQ ID NO: 803428 - DNA, 75 bp, synthetic construct
  source 1..75: mol_type = other DNA
gccagataacggcgtgcgcgaagtgcaactggcttacaaactggatatcaacgagtttcgcggcaaccgcaatct

SEQ ID NO: 803429 - DNA, 75 bp, synthetic construct
  source 1..75: mol_type = other DNA
tatgcgcgtggtgcgcagttgattgtaacggttgataacggtatttcttcccacgcaggtgttgaacacgctcgc

SEQ ID NO: 803430 - DNA, 75 bp, synthetic construct
  source 1..75: mol_type = other DNA
ctattgaaaacagaaatctttttaccccgcgatgtgttccgtaatgttgcattccagttcgccgctctcagtgaa

SEQ ID NO: 803431 - DNA, 75 bp, synthetic construct
  source 1..75: mol_type = other DNA
atatcgatacgcttagagcactacgcgcgttgagagccagtatccgcaacgtcgacttcagggtgttcgatgata

SEQ ID NO: 803432 - DNA, 75 bp, synthetic construct
  source 1..75: mol_type = other DNA
ctattgaaaactgaaatctttttaccccgcgatgtgttccgtaatgttgcattccaatttgcagctctcagtgaa

SEQ ID NO: 803433 - DNA, 75 bp, synthetic construct
  source 1..75: mol_type = other DNA
gagtcggcctgtaaattactatttgggccagacagtgaaaaagcttccattaaagagtacattcgtcgtggactc

SEQ ID NO: 803434 - DNA, 75 bp, synthetic construct
  source 1..75: mol_type = other DNA
aaagcttgaacctaagataagcgtacacgaagtctatttcgagcttatcaaacaggtattgcctttcgaagtttg

SEQ ID NO: 803435 - DNA, 75 bp, synthetic construct
  source 1..75: mol_type = other DNA
attccagttcgccgctctcagtgaagatagcggtaacgaggtagtatcagaaagcatgtccttgcttaaccaccg

SEQ ID NO: 803436 - DNA, 75 bp, synthetic construct
  source 1..75: mol_type = other DNA
cagccgtcctggaggcgatcccactaaacagctgtttcgctgtctgataaacaatgatttggcgctatacgatta

SEQ ID NO: 803437 - DNA, 75 bp, synthetic construct
  source 1..75: mol_type = other DNA
tcacaggggagtctaagtccggccccatatgatccggtctatgcaccgtcatgttcagaaaaaaaattatttatg

SEQ ID NO: 803438 - DNA, 75 bp, synthetic construct
  source 1..75: mol_type = other DNA
gccgaattcgtaccatgctggccgaagcgccagtcgttattgatggtagtgataaggtgccagaaggtcgtggtg

SEQ ID NO: 803439 - DNA, 75 bp, synthetic construct
  source 1..75: mol_type = other DNA
acacaggaaaataatctggcgcatgttatttctgtcgtgggacgtattcacaacgcggtactcagcctggagcga

SEQ ID NO: 803440 - DNA, 75 bp, synthetic construct
  source 1..75: mol_type = other DNA
gagtcagcctgtaaattactatttggaccagatagcgaaaaagcatccattaaagagtacattcgtcgcggactc

SEQ ID NO: 803441 - DNA, 75 bp, synthetic construct
  source 1..75: mol_type = other DNA
tcaggtacgcgccggcaaccttgaatatctcgaattgtgtaatttattccgcgattctgactcctttaccgatcc

SEQ ID NO: 803442 - DNA, 75 bp, synthetic construct
  source 1..75: mol_type = other DNA
cgcaggacgtatgacaactttttcgacgcgctgaagaaaccgctggaatacgacctgaaaaatacctataaacgg

SEQ ID NO: 803443 - DNA, 75 bp, synthetic construct
  source 1..75: mol_type = other DNA
ttttatttccggctccatgaaacgttttgacggtcagccgctgggtgcactgcccgctggtaaagataagaatta

SEQ ID NO: 803444 - DNA, 75 bp, synthetic construct
  source 1..75: mol_type = other DNA
ctgaacgtcatggtgtctggtatcgttttatttccggctccatgaaacgttttgacggtcagccgctgggtgcac

SEQ ID NO: 803445 - DNA, 75 bp, synthetic construct
  source 1..75: mol_type = other DNA
tgccgtttggttgcagtaacagcctaaccatgatgtttaaccagctcttgagcagagccagacaaggagcagccc

SEQ ID NO: 803446 - DNA, 75 bp, synthetic construct
  source 1..75: mol_type = other DNA
cgaaaattaaaagtccgccgtgaggagcatgagcgattttcctgtactgaggaggattttaaattttttaattca

SEQ ID NO: 803447 - DNA, 75 bp, synthetic construct
  source 1..75: mol_type = other DNA
atgacagttttggttttcccgttcccgacgggtttactcccggaatgacaatggcggggtattttattcatgtcg

SEQ ID NO: 803448 - DNA, 75 bp, synthetic construct
  source 1..75: mol_type = other DNA
ccgtcgtgaggagcatgagcgcttttcctgtactgaggaggattttaaattttttaattcatgtcctgacctgaa

SEQ ID NO: 803449 - DNA, 75 bp, synthetic construct
  source 1..75: mol_type = other DNA
gcaaaagaagaaaggcgctttgcatcattcctgagtcgcccaccagcggagcgtgtttatgttgcccgttttgat

SEQ ID NO: 803450 - DNA, 75 bp, synthetic construct
  source 1..75: mol_type = other DNA
cgaaactctggggaaatccaggtccagtgcgtggagactatcgaaggcgatattcttcagttcattaaagatcgc

SEQ ID NO: 803451 - DNA, 75 bp, synthetic construct
  source 1..75: mol_type = other DNA
aagtgtattccgacgccgtggacttctcatccgaagacgtaacagcggtcgttaagccttccctgcgtattgttt

SEQ ID NO: 803452 - DNA, 75 bp, synthetic construct
  source 1..75: mol_type = other DNA
tgccatttgggtgcagtaacagcctaaccatgatgtttaaccagttgttgaatagagccagacaggaatcagccc

SEQ ID NO: 803453 - DNA, 75 bp, synthetic construct
  source 1..75: mol_type = other DNA
gccagttatcagaaaaaaagccagtgatttgagtgcactgatgatgcttttcagccaacaggccggtcagcctat

SEQ ID NO: 803454 - DNA, 75 bp, synthetic construct
  source 1..75: mol_type = other DNA
tgagttcgcgttttttcaaggctggatattccaaaccaaaatatatgcttgaattgaatggtgagtttctattcg

SEQ ID NO: 803455 - DNA, 75 bp, synthetic construct
  source 1..75: mol_type = other DNA
gacgccgttcctcttttccgacaccgttgctaataacatcgcgctaggttgccctaatgcaacgcaacaagaaat

SEQ ID NO: 803456 - DNA, 75 bp, synthetic construct
  source 1..75: mol_type = other DNA
tatgtgattgaaaaaattagccaagctgttgtcggcctaagaaacccaaagattgcttgtttgggattggcattt

SEQ ID NO: 803457 - DNA, 75 bp, synthetic construct
  source 1..75: mol_type = other DNA
ggcaatgcaatcgcgcggttagttggtgctacattatacgatgggactcaagcatcggagcgtgatgccttagtt

SEQ ID NO: 803458 - DNA, 75 bp, synthetic construct
  source 1..75: mol_type = other DNA
aattgggaatttcctgcgggatgggagttcctgcttattcttggctttgcgcagcctctgcctgcaggtacgtcg

SEQ ID NO: 803459 - DNA, 75 bp, synthetic construct
  source 1..75: mol_type = other DNA
ttttacagcctggctgtggcgtcggcgggcactgcatcgcagtcgatccatggtttatcgttaaccaaaatccgg

SEQ ID NO: 803460 - DNA, 75 bp, synthetic construct
  source 1..75: mol_type = other DNA
ttcagcctggctgtggtgttggcggacattgcatagcagttgacccttggtttatagttaaccaaaatccagaac

SEQ ID NO: 803461 - DNA, 75 bp, synthetic construct
  source 1..75: mol_type = other DNA
tatgtgattgaaaaaattagccaagttgttgtcggcctaagaaacccaaagatcgcttgtttgggattggcattt

SEQ ID NO: 803462 - DNA, 75 bp, synthetic construct
  source 1..75: mol_type = other DNA
gggcgtcagtacaacagagtttgttgtagggtatggtgctatttcgatggtaaaaaaatcagagtcgatggcggc

SEQ ID NO: 803463 - DNA, 75 bp, synthetic construct
  source 1..75: mol_type = other DNA
aataccagaacctgctgatgtgcgaatttattgacgatttggcgtcagtattcccgctcagcgaactgcaggcat

SEQ ID NO: 803464 - DNA, 75 bp, synthetic construct
  source 1..75: mol_type = other DNA
tcggcaccaatgcccgcacggcccagagttatcacggcaacctgtacctggatgaatatttctggataccgaaat

SEQ ID NO: 803465 - DNA, 75 bp, synthetic construct
  source 1..75: mol_type = other DNA
atctagcagaatcaatttcagttgcatggggcttagatgctgagaaagccgcttcattaactcgtgattgtgcgg

SEQ ID NO: 803466 - DNA, 75 bp, synthetic construct
  source 1..75: mol_type = other DNA
gtatctcgtcgttatcttggtgtgccatgttggcaagaccttttgaagcattttgctgaggcgattggggaaaat

SEQ ID NO: 803467 - DNA, 75 bp, synthetic construct
  source 1..75: mol_type = other DNA
gatgaagcaatgagcgcccaaactttgtccagtaatttttgtcgattagtctgcgtgtacgattatataaaaaat

SEQ ID NO: 803468 - DNA, 75 bp, synthetic construct
  source 1..75: mol_type = other DNA
gaaggaaaagatttcaaagagattgacctgctggcacgccagtcggaacgccacgcgcggatcggcaagtttaac

SEQ ID NO: 803469 - DNA, 75 bp, synthetic construct
  source 1..75: mol_type = other DNA
ctgtaacctgttcgaccttgaccagttgcgcatggagtacagccctgacgaataccagaacttgctgatgtgcga

SEQ ID NO: 803470 - DNA, 75 bp, synthetic construct
  source 1..75: mol_type = other DNA
agaacgtgaaagcgttttttccagccgtccgggagtttatctacaaccccaacgttaaaaacgccctggtactca

SEQ ID NO: 803471 - DNA, 75 bp, synthetic construct
  source 1..75: mol_type = other DNA
tttgtctacaaccccaacgttaaaaaacgccctggtactcaaggcctacgacattatcagccaccgccgtctgga

SEQ ID NO: 803472 - DNA, 75 bp, synthetic construct
  source 1..75: mol_type = other DNA
tattcgctttcatgatattcctctgacgaagttacaactcgatagctggcgtagccgcctggcggtagttagcca

SEQ ID NO: 803473 - DNA, 75 bp, synthetic construct
  source 1..75: mol_type = other DNA
tagcattgccactggtatacctattgacaaaatcaatgatagtgtactttataaacctttagacaatttatcctc

SEQ ID NO: 803474 - DNA, 75 bp, synthetic construct
  source 1..75: mol_type = other DNA
tttcgccgctgaacactggattgatgttcgtgttccagagcagtatcagcaagagcacgttcagggggccatcaa

SEQ ID NO: 803475 - DNA, 75 bp, synthetic construct
  source 1..75: mol_type = other DNA
atctcgatccccgtcgacaggccatgctgctgtactttcagggataccgcgtagcccgcattgctgaaatgctgg

SEQ ID NO: 803476 - DNA, 75 bp, synthetic construct
  source 1..75: mol_type = other DNA
acaggcgtcggtcacggtgtctacgagaacgtgaaagcgttctttcctgccgtgcgggagtttgtctacaacccc

SEQ ID NO: 803477 - DNA, 75 bp, synthetic construct
  source 1..75: mol_type = other DNA
aggcccgcgccgtcagccggaaaagaacgttttcaccgatgaacagattgagaagctggaagaaatcttttattc

SEQ ID NO: 803478 - DNA, 75 bp, synthetic construct
  source 1..75: mol_type = other DNA
ccgatctggcctgggcaacgatgcatgcactgtttaacgaaccgctgcagggtgaatccgccaataccagcaata

SEQ ID NO: 803479 - DNA, 75 bp, synthetic construct
  source 1..75: mol_type = other DNA
gcaacaaaggcccacgccgtcagcctgaaaagaatgttttcaccgatgaccagattgagaagctggaagaaattt

SEQ ID NO: 803480 - DNA, 75 bp, synthetic construct
  source 1..75: mol_type = other DNA
tacgcagaacggcgacagcgccgggtgcgtggtggtggcaccgccagccgtgcctggtggtaagttccgcattct

SEQ ID NO: 803481 - DNA, 75 bp, synthetic construct
  source 1..75: mol_type = other DNA
gtgatggctctgaagaaagcatcagcctgactttccgcaatatgaacgacttcacgccagagcagatcgcccgac

SEQ ID NO: 803482 - DNA, 75 bp, synthetic construct
  source 1..75: mol_type = other DNA
ggcaggcgctgccggaagaactgcgcctaagtccgcatcgttatctggcgacgaacagtccgcaggggccgtggt

SEQ ID NO: 803483 - DNA, 75 bp, synthetic construct
  source 1..75: mol_type = other DNA
ggcaggcgctgccggaagaactccgcgtaagtccgcatcgttatctggcgacgaacagtccgcaggggccgtggt

SEQ ID NO: 803484 - DNA, 75 bp, synthetic construct
  source 1..75: mol_type = other DNA
ttcagagcattaagcccttacgactacacactgaaccgccccggttttcctggagagtgttttatctgtgaactc

SEQ ID NO: 803485 - DNA, 75 bp, synthetic construct
  source 1..75: mol_type = other DNA
aagataacaatatcaagtcattttatttaggtacgcccagtggtaattttaaagcaatagataaccacgggaagg

SEQ ID NO: 803486 - DNA, 75 bp, synthetic construct
  source 1..75: mol_type = other DNA
aaaggagatggtctatgggggccaggtaaagcaagtaatgatacaaaagaagctgctggccgttgtgacctcgtt

SEQ ID NO: 803487 - DNA, 75 bp, synthetic construct
  source 1..75: mol_type = other DNA
aacgggacctgacgggctggatgtcgctgtcacggaaaccgcaagtgacctggtacggctgggacggcgaccgcc

SEQ ID NO: 803488 - DNA, 75 bp, synthetic construct
  source 1..75: mol_type = other DNA
atggtccgttcagctaacccccgtaaacgtaaatccgcctctcaaagaagcaaacttccccgctatgtcgtgaag

SEQ ID NO: 803489 - DNA, 75 bp, synthetic construct
  source 1..75: mol_type = other DNA
ttgacgaagaagacgcagaagttctgcgctttgatagttttgacgctgccgttgagtgctgcgcagacctgaata

SEQ ID NO: 803490 - DNA, 75 bp, synthetic construct
  source 1..75: mol_type = other DNA
tgggacggcgaccggctgaccacgatacagaacgacagaacccgcatccagacgatttatcagccggggagcttc

SEQ ID NO: 803491 - DNA, 75 bp, synthetic construct
  source 1..75: mol_type = other DNA
acctgccacagacaaattggccaacaactcaattaccaccaggatatacttgtgcagaaccctatttattccctg

SEQ ID NO: 803492 - DNA, 75 bp, synthetic construct
  source 1..75: mol_type = other DNA
cggcaggctgaccggcgttcacaccaccgcagcgaatctggatatccgcatcccgtatgccacagacccggcagg

SEQ ID NO: 803493 - DNA, 75 bp, synthetic construct
  source 1..75: mol_type = other DNA
gctggcgcttgtcagcacggaaggggcaacagaatggtgcgcagaatacgatgaatggggcaacctgctgaatga

SEQ ID NO: 803494 - DNA, 75 bp, synthetic construct
  source 1..75: mol_type = other DNA
gctgtttatccatgtgatcctgcctggtgccctgccctcaattatggtcggcgtgcgttttgcgttgggcctgat

SEQ ID NO: 803495 - DNA, 75 bp, synthetic construct
  source 1..75: mol_type = other DNA
agtgatatcgtgccggggcgagatatggaggctatgttctcgctgaatgctcagatgttggcaggacagggcatg

SEQ ID NO: 803496 - DNA, 75 bp, synthetic construct
  source 1..75: mol_type = other DNA
aaaccggtcgaaatgccagtaacgacgattactcctgtttctgatgttggtggactacgagattttatttactgg

SEQ ID NO: 803497 - DNA, 75 bp, synthetic construct
  source 1..75: mol_type = other DNA
ggaaatgatggaaagggctaattcagtaatgaatgagcagggagctcttgttctgaataacactgccagttctgt

SEQ ID NO: 803498 - DNA, 75 bp, synthetic construct
  source 1..75: mol_type = other DNA
tgaaaaagctgaccagtcgctatgacaacctcttccagtgctctttcccctactctatgggctggcacggcgcgc

SEQ ID NO: 803499 - DNA, 75 bp, synthetic construct
  source 1..75: mol_type = other DNA
cagcgcagcgatttggcactggcgttgaaaaagctgaccagtcgttatgacaacctcttccagtgctccttcccc

SEQ ID NO: 803500 - DNA, 75 bp, synthetic construct
  source 1..75: mol_type = other DNA
gtagccgtaccgttgtcgaaaccgaacactggttagccgttgtgccttactgggctgcctggccgttcgaaacgc

SEQ ID NO: 803501 - DNA, 75 bp, synthetic construct
  source 1..75: mol_type = other DNA
gttacgaataaaaaaggtaatacttcactttatgatcacaataataacacttcagactacagcaaaaatggagca

SEQ ID NO: 803502 - DNA, 75 bp, synthetic construct
  source 1..75: mol_type = other DNA
accggtgggcatcgtggcggtgtggcaactggcctcctcggttggctggttgtcgacgcgtattttgccctcacc

SEQ ID NO: 803503 - DNA, 75 bp, synthetic construct
  source 1..75: mol_type = other DNA
tgtggcagcatctggcgataagttcatggcgggcgctgattggtttttccattggcggatcgctgggcttgattc

SEQ ID NO: 803504 - DNA, 75 bp, synthetic construct
  source 1..75: mol_type = other DNA
tgtcattgttcgttttcctgaaggcagtggtgtttctccgttatatatttcaactgtagagattctggacagtaa

SEQ ID NO: 803505 - DNA, 75 bp, synthetic construct
  source 1..75: mol_type = other DNA
cagcagcgggtaataatgtaccggtgaaatatcgtctgatggaccttatgcagaacggtacgcaatatatggcta

SEQ ID NO: 803506 - DNA, 75 bp, synthetic construct
  source 1..75: mol_type = other DNA
aaggcgttagtgctgatccagaattgcgtattaaggtcgtgaaagctgtgatcgagcagcacatgtcccttaatc

SEQ ID NO: 803507 - DNA, 75 bp, synthetic construct
  source 1..75: mol_type = other DNA
ggtgtgccccggcggggtgacgtccggccatccggtcaatcccctgctcggtgcaaaggtccttcccggtgaaac

SEQ ID NO: 803508 - DNA, 75 bp, synthetic construct
  source 1..75: mol_type = other DNA
caaacttccccgctatgtcgtgaagcttcacgacgataacttttttgatgaagaagaagctgaggttctgcactt

SEQ ID NO: 803509 - DNA, 75 bp, synthetic construct
  source 1..75: mol_type = other DNA
gtgtaaaagtcgctcctgcccgcactgcggagtgaaggctggcgcacagtggatatcagcggttactgaaggttg

SEQ ID NO: 803510 - DNA, 75 bp, synthetic construct
  source 1..75: mol_type = other DNA
caaacttccccgctatgtcgtgaagcttcacgaagatgatttttttgacgaagaagacgcagaagttctgcgttt

SEQ ID NO: 803511 - DNA, 75 bp, synthetic construct
  source 1..75: mol_type = other DNA
acgcaatgatagtcattgaggatttgaaggtcagcaacatgtcaaagtcagcagcgggtacggtcagccagccgg

SEQ ID NO: 803512 - DNA, 75 bp, synthetic construct
  source 1..75: mol_type = other DNA
ttctgcgcagacctgaatattccattctttgtggatgcgggaaacaaaaagctggtcttctggtttgttcgtgtc

SEQ ID NO: 803513 - DNA, 75 bp, synthetic construct
  source 1..75: mol_type = other DNA
aacgaaaacccgctcttcaaagaagcaaacttccccactatgtcgtgaagcttcacgaagatgacttttttgacg

SEQ ID NO: 803514 - DNA, 75 bp, synthetic construct
  source 1..75: mol_type = other DNA
gtcactgtttaacgacatgaacggcaacagtgcggcaatgagcgccgaagctgccggaattgcggtctgtctgat

SEQ ID NO: 803515 - DNA, 75 bp, synthetic construct
  source 1..75: mol_type = other DNA
acgttacccctttacccagtttcacatctcccgacaaatctatatgggcgtctgggattcgctattatacgaagg

SEQ ID NO: 803516 - DNA, 75 bp, synthetic construct
  source 1..75: mol_type = other DNA
tttcccggcctttctgttatcagaaatccactgaaagcacagcggctagctgaggcgataaataataaacggggg

SEQ ID NO: 803517 - DNA, 75 bp, synthetic construct
  source 1..75: mol_type = other DNA
gtgaagcttcacgaagatgatttttttgacgaagaagacgcagaagttctgcgttttgataattttgacgatgcc

SEQ ID NO: 803518 - DNA, 75 bp, synthetic construct
  source 1..75: mol_type = other DNA
ggttacatcgccgttgaactggcgggcgtgattaacggcctcggtgcgaagacgcatctgtttgtgcgtaaacat

SEQ ID NO: 803519 - DNA, 75 bp, synthetic construct
  source 1..75: mol_type = other DNA
cttcacgacgatgacttctttgacgaagaagacgcagaagttctgcgctttgatagttttgacgatgccgttgaa

SEQ ID NO: 803520 - DNA, 75 bp, synthetic construct
  source 1..75: mol_type = other DNA
ttttgccgatattttttcagcagggaaaccgctggcttaactggctggagaaacaaccggaaggggcagtccgtc

SEQ ID NO: 803521 - DNA, 75 bp, synthetic construct
  source 1..75: mol_type = other DNA
gactgttccggttatgtaacccgttatgaccatgaccgttttggtcaggtgacggcggtgcaccgcgaggaaggc

SEQ ID NO: 803522 - DNA, 75 bp, synthetic construct
  source 1..75: mol_type = other DNA
tccattctgtagctgatgagattaatatcccaggcgttttcacaatcgggggcatggtacccccacatctattga

SEQ ID NO: 803523 - DNA, 75 bp, synthetic construct
  source 1..75: mol_type = other DNA
ccgcaggcaggacaacagaatacagcccggatgtggtgacgggcctcatcacgcgcatcaccacgccggatggca

SEQ ID NO: 803524 - DNA, 75 bp, synthetic construct
  source 1..75: mol_type = other DNA
acggcagcagaaacgggacacagtacgatgcgtggggaaaggccgtccgtaccacgcagggcgggctgacgcgca

SEQ ID NO: 803525 - DNA, 75 bp, synthetic construct
  source 1..75: mol_type = other DNA
ataaatagccaatctatttgcgaagataaagagttcgctggtttaatatgtaaggataatagtggcagatatttc

SEQ ID NO: 803526 - DNA, 75 bp, synthetic construct
  source 1..75: mol_type = other DNA
tggtgcgctatggctggacgccccgcggcgaactggcggcggtgtatgaccgcagcaatacacaggtgcgcagct

SEQ ID NO: 803527 - DNA, 75 bp, synthetic construct
  source 1..75: mol_type = other DNA
atccacaaagaagggaatattcaggtctgcgcagcactcaacggcatcgtcaaaattatcaaagcgcagagcttc

SEQ ID NO: 803528 - DNA, 75 bp, synthetic construct
  source 1..75: mol_type = other DNA
ccattgatggcggcgttacgctgtggacacaaagcgatctgctgcatcgcctgctgacttctccggtgctgtata

SEQ ID NO: 803529 - DNA, 75 bp, synthetic construct
  source 1..75: mol_type = other DNA
gactcaaagcgatctgctgcatcgcctgctgacgtccccggtgctgtataatggcaatctggtggtgggtgacag

SEQ ID NO: 803530 - DNA, 75 bp, synthetic construct
  source 1..75: mol_type = other DNA
aagccagatggacccggtatacacgccggcgcgaaaaatccacctgtaccactgcgaccatcgcggcctgccgct

SEQ ID NO: 803531 - DNA, 75 bp, synthetic construct
  source 1..75: mol_type = other DNA
cccgctgcacggagcgggagtttgcgaccattcttgccggtatcagcgccggacggccatgtactgcccggagtg

SEQ ID NO: 803532 - DNA, 75 bp, synthetic construct
  source 1..75: mol_type = other DNA
gaccattcttgccggtatcagcgccggcggcatgtattgcccggagtgtggcacggttcactggccggacggagt

SEQ ID NO: 803533 - DNA, 75 bp, synthetic construct
  source 1..75: mol_type = other DNA
gcactcgatactctccaacaagatggcgttgtgttggggcttcagatacgaccacagggttgggagttcaaattt

SEQ ID NO: 803534 - DNA, 75 bp, synthetic construct
  source 1..75: mol_type = other DNA
atgagcactacacacaacgtaacgcttcagatgtacgatcttattatttctttacagaaagcagttaatgcggct

SEQ ID NO: 803535 - DNA, 75 bp, synthetic construct
  source 1..75: mol_type = other DNA
aatctcacaacatgaattccgacgacggtgatgttgtgaacaaaacacaaaacttcgaagctgttctgcaatatc

SEQ ID NO: 803536 - DNA, 75 bp, synthetic construct
  source 1..75: mol_type = other DNA
catggagtatctgactcctcacgtgattctgcgtaaggaactgattaacggtaaaaaattccctaaactagctga

SEQ ID NO: 803537 - DNA, 75 bp, synthetic construct
  source 1..75: mol_type = other DNA
atgacggggctgaacccgatattttgctgcttcccggaggtgaggtaacgccgttcagacttcttttcaggcagg

SEQ ID NO: 803538 - DNA, 75 bp, synthetic construct
  source 1..75: mol_type = other DNA
ccccgacattagctgagggaggggatatttggcaggggtatgtctggcaaacttggcaaccgcgacgtgcagcca

SEQ ID NO: 803539 - DNA, 75 bp, synthetic construct
  source 1..75: mol_type = other DNA
gctgctcggcgttgacgtcgatctgctgactcccggcgacctgccgccgaagttccgggccaaggtgctcgcgga

SEQ ID NO: 803540 - DNA, 75 bp, synthetic construct
  source 1..75: mol_type = other DNA
atctcagaggacaacggtttgccattcagtggaaacaacttgtaaaaacccttcgtcggtgggacaacttctggg

SEQ ID NO: 803541 - DNA, 75 bp, synthetic construct
  source 1..75: mol_type = other DNA
tcagtggaaacgactcgtaagaacgcttcgtcggtgggacaacttctgggttcatgcgaccagaaaaagacatct

SEQ ID NO: 803542 - DNA, 75 bp, synthetic construct
  source 1..75: mol_type = other DNA
attgaaaataatggagactatattacaatctctagtttgaaaacaattgcttatgatatgaagaatactttactg

SEQ ID NO: 803543 - DNA, 75 bp, synthetic construct
  source 1..75: mol_type = other DNA
gcaggggactttccgtgattttctgaacgaccgcaatggctggcgcaatgccacattaattgccgtaaccagtaa

SEQ ID NO: 803544 - DNA, 75 bp, synthetic construct
  source 1..75: mol_type = other DNA
ccggcgcagaacagtatggcggttatgctgctggagtctgctggccatcgctttattcctcagcggtatgctctt

SEQ ID NO: 803545 - DNA, 75 bp, synthetic construct
  source 1..75: mol_type = other DNA
gctggagcagcgtattacctataaccttttgcgcttttctcggcttatactgagtaaaatgttcagatcggcaaa

SEQ ID NO: 803546 - DNA, 75 bp, synthetic construct
  source 1..75: mol_type = other DNA
tccgccagcacgccgccgcgccattccaggtgtgcagctttgcattacctgtcaggaaatcgcagagctgaaagg

SEQ ID NO: 803547 - DNA, 75 bp, synthetic construct
  source 1..75: mol_type = other DNA
ccgggtgtgcagctttgcattacctgtcaggaaatcgcagagcttaaaggcaagcactacaacggaggtgctgta

SEQ ID NO: 803548 - DNA, 75 bp, synthetic construct
  source 1..75: mol_type = other DNA
aaaacaccgggcgtgtctcgcgtgctttgtattgaatgtgaagcgccaattccgccagcacgacgccgcgccatt

SEQ ID NO: 803549 - DNA, 75 bp, synthetic construct
  source 1..75: mol_type = other DNA
gcttatgacgatcgcaatgtttatacatggaccgatacagaggtaaggattacgccctccccctgcccggcgaaa

SEQ ID NO: 803550 - DNA, 75 bp, synthetic construct
  source 1..75: mol_type = other DNA
tgatcgctcatttaatagcggcaaacagcatgcttattttatccgccaattacggtcaaagagcgtgcaaattat

SEQ ID NO: 803551 - DNA, 75 bp, synthetic construct
  source 1..75: mol_type = other DNA
tccgccagcacgccgccgcgctattccaggtgtgcagctttgcattacctgccaggagatcgcagagctgaaagg

SEQ ID NO: 803552 - DNA, 75 bp, synthetic construct
  source 1..75: mol_type = other DNA
tggcgggtatcttatccggaaaatttacggcattttaagggggtattatgccatccctgtcacacgacaggatct

SEQ ID NO: 803553 - DNA, 75 bp, synthetic construct
  source 1..75: mol_type = other DNA
tccggatgtgttaagtggtaaaaaacgttcttcgttctcaccaccgcttaaaaacaccatagcagaggaggaata

SEQ ID NO: 803554 - DNA, 75 bp, synthetic construct
  source 1..75: mol_type = other DNA
ttgttcacaccggagtctgttcagcacatctgttcggtgttgaagtcaacaaggaagtcgccagggctctatacg

SEQ ID NO: 803555 - DNA, 75 bp, synthetic construct
  source 1..75: mol_type = other DNA
gcgccatatccgtgctgcccgtgccagaacgccgggcgtgtctcgtgtgctttgcattgagtgtgaagcgccaat

SEQ ID NO: 803556 - DNA, 75 bp, synthetic construct
  source 1..75: mol_type = other DNA
aagaagtccgggccggcgcattgcagtcctcgctgtccattctgttacacacccattatgccatccgcctgtggg

SEQ ID NO: 803557 - DNA, 75 bp, synthetic construct
  source 1..75: mol_type = other DNA
ggacaccaaccaacgcgtcgctgcggatggtttctcgaaaattccggcgatgattgcccccacactgcgagagtg

SEQ ID NO: 803558 - DNA, 75 bp, synthetic construct
  source 1..75: mol_type = other DNA
aagtagcaattgaggttttccatactcatgaaatagatgaggaaaaaaagaaaaacctatcaataccgtggattg

SEQ ID NO: 803559 - DNA, 75 bp, synthetic construct
  source 1..75: mol_type = other DNA
atgcacgctaccgcccctggctttacagctaccagagcactgcatgcatgtctacgatgtgacgagcgttaccca

SEQ ID NO: 803560 - DNA, 75 bp, synthetic construct
  source 1..75: mol_type = other DNA
tgacaccggaactgcgcattgaacaggtgtacgcccgcgggaagctgatggtcaaaaacggtaaagcgtgcgtga

SEQ ID NO: 803561 - DNA, 75 bp, synthetic construct
  source 1..75: mol_type = other DNA
aacatggggctgacagggtcggaaaccatgacgctccttgcggatatggcgcagcaggggaagtttgcgctggat

SEQ ID NO: 803562 - DNA, 75 bp, synthetic construct
  source 1..75: mol_type = other DNA
cgtcgttttggtgattgttcttctccgtgtatggagtaatggcaggtgggcgattcctttcgttgttgtgtttga

SEQ ID NO: 803563 - DNA, 75 bp, synthetic construct
  source 1..75: mol_type = other DNA
gtgtatgtggtttcgttcgttttgcggtggttcttctatggggtgttctcgtcgtttggtgattgttcttctccg

SEQ ID NO: 803564 - DNA, 75 bp, synthetic construct
  source 1..75: mol_type = other DNA
atggtcgtcgatctccgcgggcagatcctctgcccaggttttattgatcaacacgtccatttgattggcggtggc

SEQ ID NO: 803565 - DNA, 75 bp, synthetic construct
  source 1..75: mol_type = other DNA
ctacttcactactgatgatggttacaggatcatctcggcacgttttggtgtcccccgaacccaggtcaggacatg

SEQ ID NO: 803566 - DNA, 75 bp, synthetic construct
  source 1..75: mol_type = other DNA
acagatttgggcaaatagcttcctgcctaacgaagctgagcgcgaagaccgcctgcaaaaagaatatttcgccga

SEQ ID NO: 803567 - DNA, 75 bp, synthetic construct
  source 1..75: mol_type = other DNA
acacgtccatttgattggcggcggcggcgaagctggtcccacgacacgcacgccggaagtggcgttaagccgcct

SEQ ID NO: 803568 - DNA, 75 bp, synthetic construct
  source 1..75: mol_type = other DNA
gaaggcatcagcgcctggatgctgaccggcgcttatcatgtcccttcccgcaccattacgggttccgtggaaaaa

SEQ ID NO: 803569 - DNA, 75 bp, synthetic construct
  source 1..75: mol_type = other DNA
ccgatggtaacggtagtcagccgttcttcgacgacgaagggaatttaacccatatcggcgttgcgggatttgaaa

SEQ ID NO: 803570 - DNA, 75 bp, synthetic construct
  source 1..75: mol_type = other DNA
gattaacaagctgacggcacgacttgaacggctgaacgaagtcagaacgcaggagagaaacagactacgggaagc

SEQ ID NO: 803571 - DNA, 75 bp, synthetic construct
  source 1..75: mol_type = other DNA
atgttaagtattattttgacagggcatggcgggtttgccagcggcatggaaaaagcaatgaagcaaattctcggt

SEQ ID NO: 803572 - DNA, 75 bp, synthetic construct
  source 1..75: mol_type = other DNA
tggtttgatgtagtaacgttgcttaatagcactacagttcatcaatataccaaaaattattttataccaaggtaa

SEQ ID NO: 803573 - DNA, 75 bp, synthetic construct
  source 1..75: mol_type = other DNA
ctgagtatcgaggcgataagctcaaactagcaagaatggcagttgggctttcatgtgaagagttggccgaaaaaa

SEQ ID NO: 803574 - DNA, 75 bp, synthetic construct
  source 1..75: mol_type = other DNA
gttaagcgccaatgcgacctgcccgaatactatggtggatcgtattacgccccgtccgtcgacagaacttccgga

SEQ ID NO: 803575 - DNA, 75 bp, synthetic construct
  source 1..75: mol_type = other DNA
tatacaaatacggttagcttccagataacaatgacccctgtattttgtagtgtattgttttttgattctgcatca

SEQ ID NO: 803576 - DNA, 75 bp, synthetic construct
  source 1..75: mol_type = other DNA
ggacggatatactgatgaagaaaccacgaacgcgcataatttcatcgtgtggaacatcagaacattggagaagca

SEQ ID NO: 803577 - DNA, 75 bp, synthetic construct
  source 1..75: mol_type = other DNA
gcgacataagatgtggtgatgtgatcaaattgccagaggggctttattctggctctgcgtcgatcgtgatggcta

SEQ ID NO: 803578 - DNA, 75 bp, synthetic construct
  source 1..75: mol_type = other DNA
ttagccttgatcctttaggttcggtgcaatggcgctttgtcatggcggcggatcatccgctggcgaacgttgaag

SEQ ID NO: 803579 - DNA, 75 bp, synthetic construct
  source 1..75: mol_type = other DNA
gaacgggctaatgcggctattgcgttgtttggtacgcctgttgaggacctggcagttgatcagatcccagcattt

SEQ ID NO: 803580 - DNA, 75 bp, synthetic construct
  source 1..75: mol_type = other DNA
tattcgtatatttgataacacaaaaagcagctcaccaaaaaaaatagaggcgtgggagctacttgggcaacctac

SEQ ID NO: 803581 - DNA, 75 bp, synthetic construct
  source 1..75: mol_type = other DNA
gttacaacatcaggaacaatgctggcgatctacggattgccaatgagtatgctaactcaggcagttaatctgaaa

SEQ ID NO: 803582 - DNA, 75 bp, synthetic construct
  source 1..75: mol_type = other DNA
gcgatatcagatgtggtgatgtgattaaactgccggaggggctatattctggcgctgcgtcgattgtgatggcta

SEQ ID NO: 803583 - DNA, 75 bp, synthetic construct
  source 1..75: mol_type = other DNA
ggtggcaggcccaagtccggggtctatctttgcctacctggcactgacgccgaaaggttcgttcctggcgataat

SEQ ID NO: 803584 - DNA, 75 bp, synthetic construct
  source 1..75: mol_type = other DNA
cactttcttggcggcatccacgaactgtatttcccgtatgtgttgatgaagccgctgaccattatcgccatgatt

SEQ ID NO: 803585 - DNA, 75 bp, synthetic construct
  source 1..75: mol_type = other DNA
aaacgcggcgcggtcatgggcggaattggtacgattggtgtgatcgtcggcgctgaaatcccgatgttccttggc

SEQ ID NO: 803586 - DNA, 75 bp, synthetic construct
  source 1..75: mol_type = other DNA
tggagcgggagctgaaaccgaagccggagccgcagcccaaagcggccacccgcactccgcgtaagacccggagcg

SEQ ID NO: 803587 - DNA, 75 bp, synthetic construct
  source 1..75: mol_type = other DNA
gcgaccgcggtggcactccggcggatggccacctcaacaggtgccacgccggcttacctcctggcgccggaagtg

SEQ ID NO: 803588 - DNA, 75 bp, synthetic construct
  source 1..75: mol_type = other DNA
tgcgatcgatcagggcgtctattatccgctgggaatgcaacaggcttcggttaacggcaaatccatcttctttat

SEQ ID NO: 803589 - DNA, 75 bp, synthetic construct
  source 1..75: mol_type = other DNA
aatacggcctcacctctgaccatcgtcgcaccacgccttacatgctggttgaggaggtggcgcttgccgcgctgc

SEQ ID NO: 803590 - DNA, 75 bp, synthetic construct
  source 1..75: mol_type = other DNA
aaagagcagcttatcgatcgcaaagcggttgccacggtcatcagcaacgttggtgaaggcgcgttttacgatggc

SEQ ID NO: 803591 - DNA, 75 bp, synthetic construct
  source 1..75: mol_type = other DNA
caggcggacaacattgccgactgggtgatgatgtcgccaggcgcggcgctgccggtgaacaaagcggtggtgact

SEQ ID NO: 803592 - DNA, 75 bp, synthetic construct
  source 1..75: mol_type = other DNA
ggctgccgaatgaacatttcgccaaaattgtcggcccgatgattacctatttattgcccgtgatgattggttcta

SEQ ID NO: 803593 - DNA, 75 bp, synthetic construct
  source 1..75: mol_type = other DNA
tggtgcccacaacgttgttcgtcggttgtggatccgaaatgcccgcatatccagcgccgcaccacggacagccag

SEQ ID NO: 803594 - DNA, 75 bp, synthetic construct
  source 1..75: mol_type = other DNA
gccgatcgccccgggcgttgattttgcgaccgcggtggcactccggcggatggccacctcaacaggtgccacgcc

SEQ ID NO: 803595 - DNA, 75 bp, synthetic construct
  source 1..75: mol_type = other DNA
aagaccgtttgtgcggatcctgtccgaaaaagtgcgtgcgcgacgcggacgcccgccaaaagatgaagtgcgact

SEQ ID NO: 803596 - DNA, 75 bp, synthetic construct
  source 1..75: mol_type = other DNA
caggtgcttgctgttccgccagcgtagacaagccagcgttgcgcgttctgtggtcatacagcgaaagacaatcgc

SEQ ID NO: 803597 - DNA, 75 bp, synthetic construct
  source 1..75: mol_type = other DNA
caggtgcttgctgttccgccagcgtacacaagccagcgttgcgcgtactgtggtcatacagcgaaagataatcgc

SEQ ID NO: 803598 - DNA, 75 bp, synthetic construct
  source 1..75: mol_type = other DNA
caggtgcttgctgttccgccagcgtatacaagccagcgttgcgcgtgctgtggtcatacagcgaaagacaatcgc

SEQ ID NO: 803599 - DNA, 75 bp, synthetic construct
  source 1..75: mol_type = other DNA
ctcgagcaaatcacccgcaaattgctctcccgtctcgaccagatggaacaagacggtgcggttctcgaagcgatg

SEQ ID NO: 803600 - DNA, 75 bp, synthetic construct
  source 1..75: mol_type = other DNA
atgccttccacgccggatatcggtttctttattcacagaccaaagtatcatttgacctgtgaacgattacaggca

SEQ ID NO: 803601 - DNA, 75 bp, synthetic construct
  source 1..75: mol_type = other DNA
acacaagccagcgttgcgcgtgctgtagccatacagcgaaagaaaaccgcctgtcacaaagtaaattcgtgtgtc

SEQ ID NO: 803602 - DNA, 75 bp, synthetic construct
  source 1..75: mol_type = other DNA
gttcgcgctggacatggccgccacactggctgtgccgttcaccggtgacgggcatgatgccgcgcagatcctgcg

SEQ ID NO: 803603 - DNA, 75 bp, synthetic construct
  source 1..75: mol_type = other DNA
cactatgtggaacactggtattcgtatcggagaagccagaacgctgcccccggagtcgtttgatctcgacgggtt

SEQ ID NO: 803604 - DNA, 75 bp, synthetic construct
  source 1..75: mol_type = other DNA
attcaccagaacgcgtttcgttgttgccgaacgccccgggcgttgattttgcgaccgccgtggcattacgaggca

SEQ ID NO: 803605 - DNA, 75 bp, synthetic construct
  source 1..75: mol_type = other DNA
caggtgcttgctgttccgccagcgtaaacaagccagcgttgcgcgtcctgtggtcatacagcgaaagataatcgc

SEQ ID NO: 803606 - DNA, 75 bp, synthetic construct
  source 1..75: mol_type = other DNA
ccggtcacaccgcacacgttcaggcacagttatgcgatgcacatgctgtatgccggtattccactgaaggtattg

SEQ ID NO: 803607 - DNA, 75 bp, synthetic construct
  source 1..75: mol_type = other DNA
aagaccgtttgtgcggatcctgtccgaaaaagtgcgtgcgcgacgcggacgcccgccaaaagatgaggtccgcct

SEQ ID NO: 803608 - DNA, 75 bp, synthetic construct
  source 1..75: mol_type = other DNA
tgtcgccaggtgctgcgctgccggtgaataaagcggttgtcactaccgccacctggaaagacaacgacgttatta

SEQ ID NO: 803609 - DNA, 75 bp, synthetic construct
  source 1..75: mol_type = other DNA
gcgtcgtatgcaggcacgctgccgcagcaagtctgacaagaaaacccgtctggttcataccctgaacggttccgg

SEQ ID NO: 803610 - DNA, 75 bp, synthetic construct
  source 1..75: mol_type = other DNA
tggggcaccccgcgtgagtttgactttgaagttcgtgaccacgtgacgctgggtgaaatgcactctggcctcgac

SEQ ID NO: 803611 - DNA, 75 bp, synthetic construct
  source 1..75: mol_type = other DNA
ttgaagttcgtgaccacgtgacgctgggtgaaatgcactctggcctcgactttgcagcagcggttaagctgaccg

SEQ ID NO: 803612 - DNA, 75 bp, synthetic construct
  source 1..75: mol_type = other DNA
gccggggtgtggatacgcagttccgccatatcaacattgcggaagccgatcacttcaaacagttcctgcgtcaga

SEQ ID NO: 803613 - DNA, 75 bp, synthetic construct
  source 1..75: mol_type = other DNA
aacaaatgctaaaatttcgcgccagccgccacgaagattttccttatcaggagatccttctgacccgtctttgca

SEQ ID NO: 803614 - DNA, 75 bp, synthetic construct
  source 1..75: mol_type = other DNA
tcgaaatccgtgatcatgtgacgctgggtgaaatgcactctggcctggactttgcggcggcagttaagctgaccg

SEQ ID NO: 803615 - DNA, 75 bp, synthetic construct
  source 1..75: mol_type = other DNA
tggctgtgaccaccactggtttgaaaaccggggtcgaccctgtatagctcttgtctatgttgacgatgccaccag

SEQ ID NO: 803616 - DNA, 75 bp, synthetic construct
  source 1..75: mol_type = other DNA
atcagccccgttaccggcggccatgtactggcgagctgatacaaattgatagctgtgaccatcactggtttgaaa

SEQ ID NO: 803617 - DNA, 75 bp, synthetic construct
  source 1..75: mol_type = other DNA
tatcgtcagtccggaccgctgggcatgaacaaccagagtcgcggtcgcaccggaaaccgcctgttgccagcatca

SEQ ID NO: 803618 - DNA, 75 bp, synthetic construct
  source 1..75: mol_type = other DNA
atgcaggcacgttgccgcagcaagtcggacaagaaaacccgtctggttcataccctgaacggttctggtctggct

SEQ ID NO: 803619 - DNA, 75 bp, synthetic construct
  source 1..75: mol_type = other DNA
tcctacgctggcttgtgaaaagctgtctgaggttcacggcgtacatctttccaaagaaacggtccgtaagctgat

SEQ ID NO: 803620 - DNA, 75 bp, synthetic construct
  source 1..75: mol_type = other DNA
attatggatatcggcttttactgcctggcgtcggcggtggcgttatttggtgagccgaaaagcgtgcaggcaacc

SEQ ID NO: 803621 - DNA, 75 bp, synthetic construct
  source 1..75: mol_type = other DNA
cgctggtttcgcatccgtcgccgggctggtggtggctggtgttggtcggttgggcatttgtctggccgcatttgg

SEQ ID NO: 803622 - DNA, 75 bp, synthetic construct
  source 1..75: mol_type = other DNA
tgttacgagtgcatgaagggctaaatacattacgtctgccgaatacgccacaggtaactttacggattagtgtgg

SEQ ID NO: 803623 - DNA, 75 bp, synthetic construct
  source 1..75: mol_type = other DNA
ccagctgagagcgccattaccgccatgttacgggtacatgaagggctaaatacgttacgtttgccgaatacaccg

SEQ ID NO: 803624 - DNA, 75 bp, synthetic construct
  source 1..75: mol_type = other DNA
cggtgaaggcgcgttttatgacggcgttctgcggattgtgcgcaccgaagatggtagcgcctggaccggtgttcc

SEQ ID NO: 803625 - DNA, 75 bp, synthetic construct
  source 1..75: mol_type = other DNA
gtgatcgaaaccagccatgactacgccaaagtgatggacaaagagcagcttatcgatcgcaaggcggttgccacg

SEQ ID NO: 803626 - DNA, 75 bp, synthetic construct
  source 1..75: mol_type = other DNA
acgatgctacgcaacgaatttgataattgtcggcggcataaccgtgatgcgacgttattgattattgatatcgac

SEQ ID NO: 803627 - DNA, 75 bp, synthetic construct
  source 1..75: mol_type = other DNA
acatcttccctcagacgctgaccgaacagaaacgcctcatcgggatacctctcgatgaggctgctgttggactaa

SEQ ID NO: 803628 - DNA, 75 bp, synthetic construct
  source 1..75: mol_type = other DNA
tttattggtttgcagtatcaacgtaaaatttcacccgcagagattatgtttttagccataaatatagagcgcgtg

SEQ ID NO: 803629 - DNA, 75 bp, synthetic construct
  source 1..75: mol_type = other DNA
agatgctgccgaaagtcggcaaactgcgtaaagtttttttcaactattgccagtattcctcgcgttatcaacgtt

SEQ ID NO: 803630 - DNA, 75 bp, synthetic construct
  source 1..75: mol_type = other DNA
actgtcggcggcataatcgcgatgcaacgttactgattatcgatatcgactatttcaagagcatcaacgatacct

SEQ ID NO: 803631 - DNA, 75 bp, synthetic construct
  source 1..75: mol_type = other DNA
tgagtacccgcgacggcatgacgggtgtttacaacaggcgtcactgggaaataatgttgcgcaatgagtttgata

SEQ ID NO: 803632 - DNA, 75 bp, synthetic construct
  source 1..75: mol_type = other DNA
tgcttttgagcgtggggacgtcatcggtatttgcggcgggaaccgtcaaggtgttcagcaatggcagcggtgagg

SEQ ID NO: 803633 - DNA, 75 bp, synthetic construct
  source 1..75: mol_type = other DNA
acatcgcccgcggctttatcgtcgactaccccattctgctgctcgacgaacctaccgcctcgctggacgctaaaa

SEQ ID NO: 803634 - DNA, 75 bp, synthetic construct
  source 1..75: mol_type = other DNA
ctgcgctcgctgtacgccaactatctgcccgacgaagggcaaatccagatcaaacacggtgacgaatgggtagac

SEQ ID NO: 803635 - DNA, 75 bp, synthetic construct
  source 1..75: mol_type = other DNA
taccggcgttccgcgtgaagcctgcgccgctaaagccgcgcgtctgctcacccgcctgaacgtgccggaacgcct

SEQ ID NO: 803636 - DNA, 75 bp, synthetic construct
  source 1..75: mol_type = other DNA
gcggcgaattgtggcagcatctggcgatcagctcctggcgggcgttgattggcttttcaattggcggatcgctgg

SEQ ID NO: 803637 - DNA, 75 bp, synthetic construct
  source 1..75: mol_type = other DNA
attggcggatcgctgggcttgattctgggactgattagcgggctgtcgcgctggggagaacggctgctggatacc

SEQ ID NO: 803638 - DNA, 75 bp, synthetic construct
  source 1..75: mol_type = other DNA
ccaaagtgaaagcggtcagtgcggtgctgggggaaaacgtcactgcggcacaaatcaaagcagcactggctgagg

SEQ ID NO: 803639 - DNA, 75 bp, synthetic construct
  source 1..75: mol_type = other DNA
atgagccgctcggcgcactggatcttaagctgcgcgagcagatgcaactggagctgaaaaagctgcaacaatccc

SEQ ID NO: 803640 - DNA, 75 bp, synthetic construct
  source 1..75: mol_type = other DNA
gaccagagcatatccgcctcaatatatccggcgaagtgcaggctaatggcactattcaggctgtacagtatcagg

SEQ ID NO: 803641 - DNA, 75 bp, synthetic construct
  source 1..75: mol_type = other DNA
ggcgctggagaaagtggcgttggggtttgtacagcaacgtaaaccgtcacaactttctggtggtcagcgccagcg

SEQ ID NO: 803642 - DNA, 75 bp, synthetic construct
  source 1..75: mol_type = other DNA
cgggtatggcggcgtgaacgggacctgacgggctggatgtcgctgtcacggaaaccgcaagtgacctggtacggc

SEQ ID NO: 803643 - DNA, 75 bp, synthetic construct
  source 1..75: mol_type = other DNA
atcagccatatcagcgaagggcaccgggtgacggtgcattacgggtatgatgagaaaggccgcctgaccggtgag

SEQ ID NO: 803644 - DNA, 75 bp, synthetic construct
  source 1..75: mol_type = other DNA
atggcaaaccgcaaacagcaccgcgctatcgcggagcgtcgtcacatccagactgaaatcaaccgcagacttttc

SEQ ID NO: 803645 - DNA, 75 bp, synthetic construct
  source 1..75: mol_type = other DNA
aaatcaaaaaatatagatgatattggaatatttgcattggcaatgtgtaatggagaatcggtgatgctgccaact

SEQ ID NO: 803646 - DNA, 75 bp, synthetic construct
  source 1..75: mol_type = other DNA
gacgaacagcgtatcgatttctggccgcaacactttggcactatcccgcagtggacaaccctggaaccgcatatt

SEQ ID NO: 803647 - DNA, 75 bp, synthetic construct
  source 1..75: mol_type = other DNA
gtggctactcctggagccgcatatcttcgcctggatggaccgcttctgtgagggctacagcggtggtatctggtc

SEQ ID NO: 803648 - DNA, 75 bp, synthetic construct
  source 1..75: mol_type = other DNA
ccgcgcggagtgcgatgccatgacggaacactattaccgtctgtgcgactatgcgctgaaccaccctgagtgcaa

SEQ ID NO: 803649 - DNA, 75 bp, synthetic construct
  source 1..75: mol_type = other DNA
ccatcccacaatggataacccttgagccccaaatcttcggctggatggatcgcctgtgcgctgattacagcggcg

SEQ ID NO: 803650 - DNA, 75 bp, synthetic construct
  source 1..75: mol_type = other DNA
acctcgcattttcgcctggatggaccggctgtgtgtcgattatcacggcggtatctggcgcttttcgacgctcag

SEQ ID NO: 803651 - DNA, 75 bp, synthetic construct
  source 1..75: mol_type = other DNA
aacgggacctgacaggctggatgtcgctgtcacggaaaccggaagtaacctggtacgggtgggacggcgaccggc

SEQ ID NO: 803652 - DNA, 75 bp, synthetic construct
  source 1..75: mol_type = other DNA
acggcaacagaaacgagacacagtacgatgcgtggggcaacgccatccgcaccacacagggcggtctgacccgca

SEQ ID NO: 803653 - DNA, 75 bp, synthetic construct
  source 1..75: mol_type = other DNA
cgcacctacagcagttaccggaccaaaacgcccgcgccggtggggattctcggcctcggttggaaaatgcctgcg

SEQ ID NO: 803654 - DNA, 75 bp, synthetic construct
  source 1..75: mol_type = other DNA
cggcatgaacggcaatggtgcggaaatgagcgcagaagccgcaggtattgctgtctgcctgattgaatacagcca

SEQ ID NO: 803655 - DNA, 75 bp, synthetic construct
  source 1..75: mol_type = other DNA
tcaactccagatgaagcagcattgaatattttaaagccaacaaatggatactcaatatgtaatgatttggagtat

SEQ ID NO: 803656 - DNA, 75 bp, synthetic construct
  source 1..75: mol_type = other DNA
cggctggaaagtgaaatcctggctgatcgggtgagtgaggaaagccgccgctggctggcatcgtgcggtctgacg

SEQ ID NO: 803657 - DNA, 75 bp, synthetic construct
  source 1..75: mol_type = other DNA
cgccagcaatctgccaccgtgggagcgggacgtgaatactgtctttcaggactacgcgctatttccgcatatgtc

SEQ ID NO: 803658 - DNA, 75 bp, synthetic construct
  source 1..75: mol_type = other DNA
gctctaaataggtatggaaatcctgggagtaggatttttggcggcggaggattacaacctggagaattatctgga

SEQ ID NO: 803659 - DNA, 75 bp, synthetic construct
  source 1..75: mol_type = other DNA
cgaccttgccctgcccggcccgctgccgttcatcctctcccgcacctacagcagttaccggacaaaaacgcccgc

SEQ ID NO: 803660 - DNA, 75 bp, synthetic construct
  source 1..75: mol_type = other DNA
gtgctgatattcaggaggttacaggcggcagtcaggccatgcagcagatgccaagtactgatgaatcccctaatg

SEQ ID NO: 803661 - DNA, 75 bp, synthetic construct
  source 1..75: mol_type = other DNA
ccgccagccccggaaagtcatccaggcactggctggtcacagggatccacgttcgatggaggtttataccagagt

SEQ ID NO: 803662 - DNA, 75 bp, synthetic construct
  source 1..75: mol_type = other DNA
ccgcatactttccggcacagctatatcatgcacatgctttatcaccggcagcccaggaaggtcatccaggcactg

SEQ ID NO: 803663 - DNA, 75 bp, synthetic construct
  source 1..75: mol_type = other DNA
gaaaaagtgcgtgcgcgacgcggacgcccgccaaaagatgaagtccgcctggttccgctgacagatataagctat

SEQ ID NO: 803664 - DNA, 75 bp, synthetic construct
  source 1..75: mol_type = other DNA
cgggaagccgtctgggtacggcgctggcgatggcggttgaccacgagatcaacatggtgtcgctggtgcgtaacc

SEQ ID NO: 803665 - DNA, 75 bp, synthetic construct
  source 1..75: mol_type = other DNA
aaaccaaagccatttgtttttttgaaaaataattggctatttaaatggccggaagagatggatgcgcgttccaaa

SEQ ID NO: 803666 - DNA, 75 bp, synthetic construct
  source 1..75: mol_type = other DNA
ataaaaaaatgaggcttttttttgctcaagagataaaagcaattagccgctggccatacgccacagaaggtatcg

SEQ ID NO: 803667 - DNA, 75 bp, synthetic construct
  source 1..75: mol_type = other DNA
gcaggatcgcggcctcgcgccggaaatgcagccagaagatgcgctgattttgcagcaagggcggccggattttat

SEQ ID NO: 803668 - DNA, 75 bp, synthetic construct
  source 1..75: mol_type = other DNA
agaatgacgtgatttctaagctctatcttcaccttgtccagcattgggacgttcaggagttccttgatgtattcg

SEQ ID NO: 803669 - DNA, 75 bp, synthetic construct
  source 1..75: mol_type = other DNA
gctatattcttcatgtaagcaaggcggtaaaccatcgttgttcgtgtgaggtcgataaacgttgtaataaccatt

SEQ ID NO: 803670 - DNA, 75 bp, synthetic construct
  source 1..75: mol_type = other DNA
atggcaaaccgcaaacagcaccgcgcatacgctgcgtgtcgtcacatccagactgaaatcaaccgcagactttcc

SEQ ID NO: 803671 - DNA, 75 bp, synthetic construct
  source 1..75: mol_type = other DNA
gaccaccggggcctgccgctggcgctcatcagcgaagacggcaatacggcgtggcgcggggagtatgatgaatgg

SEQ ID NO: 803672 - DNA, 75 bp, synthetic construct
  source 1..75: mol_type = other DNA
ggcagcgcccggcagatgacctggagccgctacggtcagttgctggcgttcaccgactgctcgggctaccagacc

SEQ ID NO: 803673 - DNA, 75 bp, synthetic construct
  source 1..75: mol_type = other DNA
agtcctatatctacatggacaacatggctaaatccatgcgccgcgctggcgtcgtgtggctttctatggcgcgtg

SEQ ID NO: 803674 - DNA, 75 bp, synthetic construct
  source 1..75: mol_type = other DNA
gacgcctaaagcgttcgaggctgaataccctgattccatcgcggcaagtctttctcgtgatgacactggcactca

SEQ ID NO: 803675 - DNA, 75 bp, synthetic construct
  source 1..75: mol_type = other DNA
taacgatggtatcgctgccgggtattacgccgccgtcttcagctacctggcggatgacctggcagagctgcagga

SEQ ID NO: 803676 - DNA, 75 bp, synthetic construct
  source 1..75: mol_type = other DNA
cgctaccgttatgataatccacacagtgacttaccctgcgcaacggaagatgccaccggcagccggaaaaccatg

SEQ ID NO: 803677 - DNA, 75 bp, synthetic construct
  source 1..75: mol_type = other DNA
gtctgaccgcgattacacctggaacgacaacggcgaactcatccgcatcagcagcccgcgccagacccggagtta

SEQ ID NO: 803678 - DNA, 75 bp, synthetic construct
  source 1..75: mol_type = other DNA
gaatccagtgcaacacgttgatccattagggcttagtactatgataataggtaacggccccgttcctgataatcc

SEQ ID NO: 803679 - DNA, 75 bp, synthetic construct
  source 1..75: mol_type = other DNA
acccggagagcctgcccggtgcgccactggcgcggtacacgtatacggaagccggtgaactgctggcggtatatg

SEQ ID NO: 803680 - DNA, 75 bp, synthetic construct
  source 1..75: mol_type = other DNA
gtgcgggctgacggtggagcaactggccagacaggtggagccggaatacacaccggcgcgaaaagagcatgatga

SEQ ID NO: 803681 - DNA, 75 bp, synthetic construct
  source 1..75: mol_type = other DNA
tgcgggagcggtgagtgcggagagtgaggcatggcttgcgcagtgcgggctgacggcggaacagatgaaaaacca

SEQ ID NO: 803682 - DNA, 75 bp, synthetic construct
  source 1..75: mol_type = other DNA
agaacgtgaaagcgttttttcctgccgtccgggagtttgtttacaaccccaacgttaaaaacgccctggtactca

SEQ ID NO: 803683 - DNA, 75 bp, synthetic construct
  source 1..75: mol_type = other DNA
ccaacttccagaaactgaagcgcgtcgccggggggatgtcgtcacaggagcatttacgcacgacctatttttcga

SEQ ID NO: 803684 - DNA, 75 bp, synthetic construct
  source 1..75: mol_type = other DNA
tcataaggcgctggccgggggcgtgctgtgctcggacggacagtggcggcagattgtcaccatcgaggatgcgct

SEQ ID NO: 803685 - DNA, 75 bp, synthetic construct
  source 1..75: mol_type = other DNA
tcaaaaaactgaccgaacagtacaacgtgacatatatcggcatcgactcgacaggtgtcggtcacggggtttatg

SEQ ID NO: 803686 - DNA, 75 bp, synthetic construct
  source 1..75: mol_type = other DNA
aggcccgcgccgtcagccggaaaagaacgttttcaccgatgaacagattgagaagctgaaagaaatcttccattc

SEQ ID NO: 803687 - DNA, 75 bp, synthetic construct
  source 1..75: mol_type = other DNA
agccgcagcgaagaagccagccatgcggatctggcctgggcaacgatgcacgcactgtttaacgaaccgctgcag

SEQ ID NO: 803688 - DNA, 75 bp, synthetic construct
  source 1..75: mol_type = other DNA
cctttgaacccatactatggttctctaaaccatataaaattggcggcacaattgcagataatgcaattattcatg

SEQ ID NO: 803689 - DNA, 75 bp, synthetic construct
  source 1..75: mol_type = other DNA
aagaagtcgcggcagtgatcgaacgcgaagggcatcatacttcagcggaagatttacgtgattacgtgatgcagg

SEQ ID NO: 803690 - DNA, 75 bp, synthetic construct
  source 1..75: mol_type = other DNA
gaccgactttcatgcactggcgctgcgcccatttggctggcgcgaagtgtggatcggttatgacccggcgaaagg

SEQ ID NO: 803691 - DNA, 75 bp, synthetic construct
  source 1..75: mol_type = other DNA
tggccggtggcaaattcagaatacttgagcgtcaccagtggaaaggcatggactttgccacccaggcggaatcca

SEQ ID NO: 803692 - DNA, 75 bp, synthetic construct
  source 1..75: mol_type = other DNA
atgaccatcaccacagacaccactcttttacacgacccgcgtcgtcaggcggcgctgctgtactggcagggattt

SEQ ID NO: 803693 - DNA, 75 bp, synthetic construct
  source 1..75: mol_type = other DNA
ctctgtgcggacggccagtggcggcagattgtcaccattgaggacgccctgaaaggcggctgcacgctgttcgac

SEQ ID NO: 803694 - DNA, 75 bp, synthetic construct
  source 1..75: mol_type = other DNA
ccctggtactcaaggcctacgacattatcagtcaccgccgtctggagtttgacgccggacacaccgacatagcgc

SEQ ID NO: 803695 - DNA, 75 bp, synthetic construct
  source 1..75: mol_type = other DNA
agccgcagcgaagaggccagccacgcggatattgcgtgggcgaccatgcacgccctgttaaatgagccactttcc

SEQ ID NO: 803696 - DNA, 75 bp, synthetic construct
  source 1..75: mol_type = other DNA
gctactagcaaaacgttccgcctgtggcaaagacgcactctatttctctctgcgctatttgcccgtcgcgcgtgg

SEQ ID NO: 803697 - DNA, 75 bp, synthetic construct
  source 1..75: mol_type = other DNA
gcggctgattagcgatgtttcagcaaaaccggtttatatcagtagttttttcgccggaaacatgtcgcccgatgg

SEQ ID NO: 803698 - DNA, 75 bp, synthetic construct
  source 1..75: mol_type = other DNA
gctgaaaggcgatcctatggtgctacctaatggcgcagcattgtactttctcggcaccaacgcccgtacggcgca

SEQ ID NO: 803699 - DNA, 75 bp, synthetic construct
  source 1..75: mol_type = other DNA
attagaatatcagcaatggtgtgaggaatgggctactgaatggttcagagtattaaaaccaggtgccagtgcaat

SEQ ID NO: 803700 - DNA, 75 bp, synthetic construct
  source 1..75: mol_type = other DNA
agattgtcaccattgaggacgccctgaaaggtggctgcacgctgttcgacattgagcagctcaaacgcgaaaaca

SEQ ID NO: 803701 - DNA, 75 bp, synthetic construct
  source 1..75: mol_type = other DNA
cgtgacctatatcggcatcgactcaaccggcgttggtcacggggtttacgagaacgtgaaagcgttttttcctgc

SEQ ID NO: 803702 - DNA, 75 bp, synthetic construct
  source 1..75: mol_type = other DNA
tggcgagttggaaatctacaaccaacctttgaacccatactatggttctctaaaccatataaaattggcggcaca

SEQ ID NO: 803703 - DNA, 75 bp, synthetic construct
  source 1..75: mol_type = other DNA
cccaacggggccacactgtatttcctcggcaccaatgcccgcactgcccagagttatcacggtaacctgtatctg

SEQ ID NO: 803704 - DNA, 75 bp, synthetic construct
  source 1..75: mol_type = other DNA
cgaaaccagacgcagagatcgcttcattgttagcaaaacgttcatcatgcgacaaagatatgctctatttctctc

SEQ ID NO: 803705 - DNA, 75 bp, synthetic construct
  source 1..75: mol_type = other DNA
gttctggtccggtgcactgttcaaccgtgggcgcaacaaagctgacaaggtggacatcgacctgtcccacagcaa

SEQ ID NO: 803706 - DNA, 75 bp, synthetic construct
  source 1..75: mol_type = other DNA
aaccgcatccgcaacctgctgaagtcacgccagatcggcgcgaccttttactttgcccgtgaagccctgattgac

SEQ ID NO: 803707 - DNA, 75 bp, synthetic construct
  source 1..75: mol_type = other DNA
cctaacggggccacgctttacttcctcggcactaatgcccgcacggcccagagttatcacggcaacctgtatctg

SEQ ID NO: 803708 - DNA, 75 bp, synthetic construct
  source 1..75: mol_type = other DNA
aataaacaatacattatgggaaagtaatacagcagcagcctttctgaacagaaagtctcagtcattatatacaac

SEQ ID NO: 803709 - DNA, 75 bp, synthetic construct
  source 1..75: mol_type = other DNA
cttgctgttggtccgctcagtgatgatgattacaagattctgtgtggtggctatggtgagcttgaatgggactat

SEQ ID NO: 803710 - DNA, 75 bp, synthetic construct
  source 1..75: mol_type = other DNA
gcctccagagcagtccttcgttttgtcactgtcacagccgaggcattacgtttcaggcaaatacagagagaattt

SEQ ID NO: 803711 - DNA, 75 bp, synthetic construct
  source 1..75: mol_type = other DNA
gctgaaaggcgatccgatggtgcttcctaacggggccacgctttacttcctcggcaccaatgcccgcacggccca

SEQ ID NO: 803712 - DNA, 75 bp, synthetic construct
  source 1..75: mol_type = other DNA
ggcacgttccgttcgcgccgtgaatgaagagatacaaccagaatgtcagataactggcgacaggccagttataag

SEQ ID NO: 803713 - DNA, 75 bp, synthetic construct
  source 1..75: mol_type = other DNA
ggcgcgttctgttcgcgctgtgaatgaagagagtcaaccagaatgtcagataactggcgacaggcccgttataaa

SEQ ID NO: 803714 - DNA, 75 bp, synthetic construct
  source 1..75: mol_type = other DNA
cgaaattcgccagaaaacgtcggcaatgtcgcttcctgaagcgtcagataatgaggaaaagacgcggcaggcact

SEQ ID NO: 803715 - DNA, 75 bp, synthetic construct
  source 1..75: mol_type = other DNA
gcattaagtgcaccgtctgcaccaccgcctgcccggtgagccgggtgaatccgggttatccggggccaaaacaag

SEQ ID NO: 803716 - DNA, 75 bp, synthetic construct
  source 1..75: mol_type = other DNA
aatgtcgacaacaaaggcttgcgcgatcatatcgaactggcgacccgctggctgtggcgcaagctggacgaaggc

SEQ ID NO: 803717 - DNA, 75 bp, synthetic construct
  source 1..75: mol_type = other DNA
ggatgcgggtgatattgacctgcgggacagtattcacagtgaccgtatcctcatcacgatgatcccggcccttga

SEQ ID NO: 803718 - DNA, 75 bp, synthetic construct
  source 1..75: mol_type = other DNA
tctggtatctggccctgcgcttcggtcgtgaagatgatgtggagttcatcaactatatgaccggcggacgctccc

SEQ ID NO: 803719 - DNA, 75 bp, synthetic construct
  source 1..75: mol_type = other DNA
aagtcactttccaaaagcatgtccggtgccggaggatggcttggtacggtcggcgactggctttccggtgcagtg

SEQ ID NO: 803720 - DNA, 75 bp, synthetic construct
  source 1..75: mol_type = other DNA
ccgatatcgcatgggcgaccatgcacgccctgttaaacgaaccgctttccgccggtagcggaatgcagcctaaat

SEQ ID NO: 803721 - DNA, 75 bp, synthetic construct
  source 1..75: mol_type = other DNA
accaggaagttatatttccgtaggtatacgagggcttgatgtttatcaggagcgttttgaccatcttcgtctgat

SEQ ID NO: 803722 - DNA, 75 bp, synthetic construct
  source 1..75: mol_type = other DNA
agaataatgctgaacgaaagcttctcattaatgcttttttcgatacatgtcttattgagaataaccctgtcgacg

SEQ ID NO: 803723 - DNA, 75 bp, synthetic construct
  source 1..75: mol_type = other DNA
ccgtctggagtttgacgccggacacaccgacatagcgcagtcatttatggcaatccggcgcgcaaccaccgccag

SEQ ID NO: 803724 - DNA, 75 bp, synthetic construct
  source 1..75: mol_type = other DNA
ggcacgccgtatgttcagtcagtgcttgggaaacagcgatcagacgtctacatcctggctatacgcgaacgcatt

SEQ ID NO: 803725 - DNA, 75 bp, synthetic construct
  source 1..75: mol_type = other DNA
tgagcgtcaccagtggaaaggcatggattttgcgacgcaggccgaggccatccgcgagctgaccgaaaaatactg

SEQ ID NO: 803726 - DNA, 75 bp, synthetic construct
  source 1..75: mol_type = other DNA
ggcgtgttccagctcgtgcgctcgttctatcccgccgcgcgcgatatccgctacacgccggaaatgaaaaccgca

SEQ ID NO: 803727 - DNA, 75 bp, synthetic construct
  source 1..75: mol_type = other DNA
aattgatgccaccggcctcggtgtcggcgtgttccagctcgtgcgctcgttctatcccgccgcgcgcgatatccg

SEQ ID NO: 803728 - DNA, 75 bp, synthetic construct
  source 1..75: mol_type = other DNA
atgaagtgtatattgttaaagtggatactgtgtctgttactgggtttttcttcggtatcctattcccaggagttt

SEQ ID NO: 803729 - DNA, 75 bp, synthetic construct
  source 1..75: mol_type = other DNA
tcggggatatttttgctgaagattccggtgatatcgatatccgtgacagcattcacagcgacaggattctgatgg

SEQ ID NO: 803730 - DNA, 75 bp, synthetic construct
  source 1..75: mol_type = other DNA
agacgatgtggaagtcattaacttcatgaacggaggaaaatcccgcagtgaaatcattctgagtggtgaaaaaac

SEQ ID NO: 803731 - DNA, 75 bp, synthetic construct
  source 1..75: mol_type = other DNA
ccgttacggctgccgcaggccaccctggatgataaacagcagagtgccctgacaaaaacagagcgtgagctggcc

SEQ ID NO: 803732 - DNA, 75 bp, synthetic construct
  source 1..75: mol_type = other DNA
tgctgaagcagcagaaagagcaactggcactggccggtcagaacacggagctggcgaagctgaagtaccagacag

SEQ ID NO: 803733 - DNA, 75 bp, synthetic construct
  source 1..75: mol_type = other DNA
gacggaaaaagcggaagacagtttttcccggctactgaagcagcagaaagagcaactggcactggcgggtcagaa

SEQ ID NO: 803734 - DNA, 75 bp, synthetic construct
  source 1..75: mol_type = other DNA
atctccagaacgtgtagattctctggtggcggacgggaagactactgcaacaatgacggttaccctgatggcggg

SEQ ID NO: 803735 - DNA, 75 bp, synthetic construct
  source 1..75: mol_type = other DNA
cgtggacagctatggtaacccgttgcaggggcaagaagttacgctgactttaccgcagggtgtgaccagcaagac

SEQ ID NO: 803736 - DNA, 75 bp, synthetic construct
  source 1..75: mol_type = other DNA
atgctgacgccaggtcacaggggagagaaaacccacgccaatacacctacggcgtttacaggtatactcgctaaa

SEQ ID NO: 803737 - DNA, 75 bp, synthetic construct
  source 1..75: mol_type = other DNA
aaatgagtacgatgatcttccctcattatcttcagctatgggggttagtccagtaacattttcagagctggccat

SEQ ID NO: 803738 - DNA, 75 bp, synthetic construct
  source 1..75: mol_type = other DNA
gaagagtacgatataaaatatgaaaggattttttcgggcgatcctaacctaaccattctcaatgaagaagaggaa

SEQ ID NO: 803739 - DNA, 75 bp, synthetic construct
  source 1..75: mol_type = other DNA
cgcactgcatcgtccgaaacgcttcttcggtgcggcgcgtaacgttgaagagggcggcagcctgaccatcatcgc

SEQ ID NO: 803740 - DNA, 75 bp, synthetic construct
  source 1..75: mol_type = other DNA
gccggtgcctttgcctccggacacctgatttcactggcggatgagtggagttccgtgaatgcccgtctgaaacag

SEQ ID NO: 803741 - DNA, 75 bp, synthetic construct
  source 1..75: mol_type = other DNA
cagaatcaggagcaggccagggagtctgcgcgccagtatgcactgacgatagatgaaatcgcgcataaaacgccg

SEQ ID NO: 803742 - DNA, 75 bp, synthetic construct
  source 1..75: mol_type = other DNA
ttaacgccctgacctatggcgggtacgaaatgaagccagtgacggtgaccattaccgcggtggatgccgatacgg

SEQ ID NO: 803743 - DNA, 75 bp, synthetic construct
  source 1..75: mol_type = other DNA
caaagtgaccctggcaccggaaatggttcctgcggaagtcatcagcaaactggcaaatgccgggattgtggtttc

SEQ ID NO: 803744 - DNA, 75 bp, synthetic construct
  source 1..75: mol_type = other DNA
tgaccacgcggttgttatcgctgatggcctgattaaaagcgtctgtccggtagcggaactgccgccagagattga

SEQ ID NO: 803745 - DNA, 75 bp, synthetic construct
  source 1..75: mol_type = other DNA
aaagaagcgaaagccggtttccgcgcaggtattacttttgccacccatctgtataacgcgatgccgtatattact

SEQ ID NO: 803746 - DNA, 75 bp, synthetic construct
  source 1..75: mol_type = other DNA
gaggatgatgccgcattaatgatggcttcagcggggattcccggaggtgtgagatatgtcccagccggttggtga

SEQ ID NO: 803747 - DNA, 75 bp, synthetic construct
  source 1..75: mol_type = other DNA
ggatttcagtctgcttgctccagcgtgtgaggaagagcagacggagatgccggacgaggaagaaatgctgatgca

SEQ ID NO: 803748 - DNA, 75 bp, synthetic construct
  source 1..75: mol_type = other DNA
tggcaaatgccgggattgtggtttctgccggtcactccaacgcgacgttgaaagaagcgaaagccggtttccgcg

SEQ ID NO: 803749 - DNA, 75 bp, synthetic construct
  source 1..75: mol_type = other DNA
gataaagcgtattaaaccttcaattatctaccgtttattgctgattggcctcggaacgccaatggtgatttacgg

SEQ ID NO: 803750 - DNA, 75 bp, synthetic construct
  source 1..75: mol_type = other DNA
cggatttcagtctgctggctacctggcgagaggaagagcagacggagatgcctgatgaggaagacatgctgatgc

SEQ ID NO: 803751 - DNA, 75 bp, synthetic construct
  source 1..75: mol_type = other DNA
tgcttgccgggatgacatccaccgaatatgccgactggcaccatttttaccgcacgcattattttcaggataccc

SEQ ID NO: 803752 - DNA, 75 bp, synthetic construct
  source 1..75: mol_type = other DNA
atgtggatacggatatcaccgaagtggcgaaaaaataacgcgcttactgatgatgattttttctgcgggaaagtc

SEQ ID NO: 803753 - DNA, 75 bp, synthetic construct
  source 1..75: mol_type = other DNA
cggatttcagtctgcttgcaccccgacgtgatgatgagcagacggagatgccggatgaggacgatatgctgatgc

SEQ ID NO: 803754 - DNA, 75 bp, synthetic construct
  source 1..75: mol_type = other DNA
cggcgaaaatatggggctggaaaacctggctcgtatgcgtaagcaggacattatttttgctatcctgaagcagca

SEQ ID NO: 803755 - DNA, 75 bp, synthetic construct
  source 1..75: mol_type = other DNA
tggaataggagcagaagactgggatgtgctacataataactcaaataacgcatacctaggttcaagccctgcaca

SEQ ID NO: 803756 - DNA, 75 bp, synthetic construct
  source 1..75: mol_type = other DNA
ttctggcaatccccaccacagcaggcactgcggcagaagtgaccattaactacgtgatcactgacgaagaaaaac

SEQ ID NO: 803757 - DNA, 75 bp, synthetic construct
  source 1..75: mol_type = other DNA
aaacgccgtggttatcagaaggcgctgatcgtcaccgataaaacgctggtgcaatgcggcgtggtggcaaaagtg

SEQ ID NO: 803758 - DNA, 75 bp, synthetic construct
  source 1..75: mol_type = other DNA
tggattggttacgacccgtcacaccgtggcgacagcgccggatgcgtggtactggcaccgccggtggtggccggt

SEQ ID NO: 803759 - DNA, 75 bp, synthetic construct
  source 1..75: mol_type = other DNA
cgtcgaatacatcggtattgacgcgaccggcctcggtctcggggtgttccagttggtgcgctcattttacccggc

SEQ ID NO: 803760 - DNA, 75 bp, synthetic construct
  source 1..75: mol_type = other DNA
ctttctgtcggccagtaaaacgcaggcttacgtgttccgggaatacatcattcagtttgcgcgacttgtcgacgt

SEQ ID NO: 803761 - DNA, 75 bp, synthetic construct
  source 1..75: mol_type = other DNA
ggcatcaggtatggcctcacagagtcacctgcgatcgacctatttctccaccccgtccacgctggcgcacgacgc

SEQ ID NO: 803762 - DNA, 75 bp, synthetic construct
  source 1..75: mol_type = other DNA
ttcgctacatttcatcgccaaatatcgtgctaccgggcgtcgggttactggcggcatcgccaatgcccaggcctg

SEQ ID NO: 803763 - DNA, 75 bp, synthetic construct
  source 1..75: mol_type = other DNA
tggacatcgacctgtcccacagcaatctggcccccggcctgctgtgcgcagacgggcaataccgccagatagtca

SEQ ID NO: 803764 - DNA, 75 bp, synthetic construct
  source 1..75: mol_type = other DNA
cggtgagaatgtcattatacggcagaatacaaccattggtgaaaaggtttctgacagtagggaaaactatattgt

SEQ ID NO: 803765 - DNA, 75 bp, synthetic construct
  source 1..75: mol_type = other DNA
ttgacctgctgggacgccagattgaacgactggcacgggtcaaccgttacagccagaccggcaacgaggcagacc

SEQ ID NO: 803766 - DNA, 75 bp, synthetic construct
  source 1..75: mol_type = other DNA
gctggagcagattttctttgagcagtctttcgactatcagttgcactggtatcgcgccgggcttgagcaccgcat

SEQ ID NO: 803767 - DNA, 75 bp, synthetic construct
  source 1..75: mol_type = other DNA
tgagcgtcaccagtggaaaggcatggactttgccacccaggcagaatccatccgcaaactcaccgaaaaatataa

SEQ ID NO: 803768 - DNA, 75 bp, synthetic construct
  source 1..75: mol_type = other DNA
agaacttaaccccgctgcacgcaaattctcgtctgcgtatggaacgcggtaacggttctactgaagatttaacgg

SEQ ID NO: 803769 - DNA, 75 bp, synthetic construct
  source 1..75: mol_type = other DNA
gctattttgcgctgctgaaagttaatgaagttaacttcgacaaacctgaaaacgcccgcaacaaaatcctctttg

SEQ ID NO: 803770 - DNA, 75 bp, synthetic construct
  source 1..75: mol_type = other DNA
tgttgaccggtggtgtggatgctaacgcactgcatcgtccgaaacgcttcttcggtgcggcgcgtaacgtggaag

SEQ ID NO: 803771 - DNA, 75 bp, synthetic construct
  source 1..75: mol_type = other DNA
gacggcgcttatcgataccggttctaaaatggacgaagttatttacgaagagtttaaaggtacaggcaacatgga

SEQ ID NO: 803772 - DNA, 75 bp, synthetic construct
  source 1..75: mol_type = other DNA
cgctctgcatcgtccgaaacgcttcttcggcgctgcgcgtaacgtggaagagggcggtagtctgacgatcatcgc

SEQ ID NO: 803773 - DNA, 75 bp, synthetic construct
  source 1..75: mol_type = other DNA
gagctgcagaaaatgtggatcctgcgtaaaatcattcacccgatgggtgaaatcgatgcaatggagttcctcatc

SEQ ID NO: 803774 - DNA, 75 bp, synthetic construct
  source 1..75: mol_type = other DNA
atgaacagtttaacaacacactaccgtcgctcgcaactgattgcacttcctgtaccgggtggaaaagcgaaggtg

SEQ ID NO: 803775 - DNA, 75 bp, synthetic construct
  source 1..75: mol_type = other DNA
aaggagacagtcctttgcgacaagttaaccgctggttcaaagatcactacggagtgcccgtcagagtcattcgtt

SEQ ID NO: 803776 - DNA, 75 bp, synthetic construct
  source 1..75: mol_type = other DNA
ttgaaagcagccttgaggcgcgcctgattcagctcatcgcgaaaccacagaagacgggctgtgatttcaaagaga

SEQ ID NO: 803777 - DNA, 75 bp, synthetic construct
  source 1..75: mol_type = other DNA
acaaataaaacttgtagctgaaaaaaacatgcgccctgtaactgtaagggatgcggtgctttactggtacgataa

SEQ ID NO: 803778 - DNA, 75 bp, synthetic construct
  source 1..75: mol_type = other DNA
atggcttgtggtgcatacatgatttcaggcgcacattttccactacgcttaatgatatgggggcggatccttata

SEQ ID NO: 803779 - DNA, 75 bp, synthetic construct
  source 1..75: mol_type = other DNA
ttacacacatggcttaccgtctttgacaggatcaaaaaaaatgcgcctgttatgtctggtgcaatttttcttgat

SEQ ID NO: 803780 - DNA, 75 bp, synthetic construct
  source 1..75: mol_type = other DNA
accgcagtttctccaatcatgcctgagagaccaaaagcaattacccctgtattatcgccttcattaataccggat

SEQ ID NO: 803781 - DNA, 75 bp, synthetic construct
  source 1..75: mol_type = other DNA
gcatacgccagcacctgagcatgggggcgatgctcacgcatacagaaaacggctttggttcgattgctaatattt

SEQ ID NO: 803782 - DNA, 75 bp, synthetic construct
  source 1..75: mol_type = other DNA
ttaaaacggaataatattctttctcggcgttatttttatccgctcataagtaatatgcctatgtacaaaagcggg

SEQ ID NO: 803783 - DNA, 75 bp, synthetic construct
  source 1..75: mol_type = other DNA
tgctccatttgtttgcgaagatggtgtagatgcggtagctgatgctcttagaatcaaacaaattaataaacaacg

SEQ ID NO: 803784 - DNA, 75 bp, synthetic construct
  source 1..75: mol_type = other DNA
gtaaaaggatacggcgataaggcttcggactggtttaaccgttcgttgctgaaagtgcagttaggatttgaaaag

SEQ ID NO: 803785 - DNA, 75 bp, synthetic construct
  source 1..75: mol_type = other DNA
ggattaatccactattgcgaagcattgaagaaagcaggccatgagcgtttatttccagagcttccttaccaccct

SEQ ID NO: 803786 - DNA, 75 bp, synthetic construct
  source 1..75: mol_type = other DNA
tcgtcagcatcccgataaagcgcaggaagtgctggctaccgctaatgaagtggccgatcacgccgacgcctttgc

SEQ ID NO: 803787 - DNA, 75 bp, synthetic construct
  source 1..75: mol_type = other DNA
cgtaacgcgtactacgttacgtgaagtgttacagcgtctggcacgagatggctggttgaccattcaacatggcaa

SEQ ID NO: 803788 - DNA, 75 bp, synthetic construct
  source 1..75: mol_type = other DNA
cattaaacgctttgaaacaggtattgaaggtttttcacagaacgccgccacagcgcagcgcgatgcgctgtcagg

SEQ ID NO: 803789 - DNA, 75 bp, synthetic construct
  source 1..75: mol_type = other DNA
gaattatgattatgaacgcagggtttctgatatatattttgatctgttttttgtgttcgttgctgccggaacttt

SEQ ID NO: 803790 - DNA, 75 bp, synthetic construct
  source 1..75: mol_type = other DNA
aggatattcctgttgaaacgccgtatgcgccgggagaacacattaagggagggcagcaataatgcttcgcattaa

SEQ ID NO: 803791 - DNA, 75 bp, synthetic construct
  source 1..75: mol_type = other DNA
aatgaaagggttgtatacgcgcattggtcgtcactatttcgccaatccggaagcgcgtagtctggcgctgggctt

SEQ ID NO: 803792 - DNA, 75 bp, synthetic construct
  source 1..75: mol_type = other DNA
gagcgtgcagatcagtcgctaaaaactattcattcgcgacgaaaaataccgttgcatccgacattgatcaaactt

SEQ ID NO: 803793 - DNA, 75 bp, synthetic construct
  source 1..75: mol_type = other DNA
cagccactggaacaggtgctggttgatgcagaaaaagcgattacggattttatgaccgcgcgtggttatcactag

SEQ ID NO: 803794 - DNA, 75 bp, synthetic construct
  source 1..75: mol_type = other DNA
gttgatatcgatgccaatcggccactggaacaggtgttggttgatgcagaaaaagcgattacggattttatgacc

SEQ ID NO: 803795 - DNA, 75 bp, synthetic construct
  source 1..75: mol_type = other DNA
ttctaaccgaccgttatcctcaggaccaaattcctggcgcttacgatggtacggtgttcccacctaacgttgaag

SEQ ID NO: 803796 - DNA, 75 bp, synthetic construct
  source 1..75: mol_type = other DNA
tacgcagattgccacggcgcgggcaagcgcagccgtgtaccgtgctcagcaggcagtggcggcagcccgcgggac

SEQ ID NO: 803797 - DNA, 75 bp, synthetic construct
  source 1..75: mol_type = other DNA
aacgcagattgccacggcgcgggcaagcgcagccgtgtaccgtgcacagcaggcagtggcggcagcccgcgggac

SEQ ID NO: 803798 - DNA, 75 bp, synthetic construct
  source 1..75: mol_type = other DNA
aaaacaagccggaaatgtcggtcgtgcagtggtaaaactgcccttaatgggaaaatcgcttaataaatctattga

SEQ ID NO: 803799 - DNA, 75 bp, synthetic construct
  source 1..75: mol_type = other DNA
agggactggtgaatgtaccgttacggctgccgcaggccaccctggatgataaacagcagagtgccctgacaaaaa

SEQ ID NO: 803800 - DNA, 75 bp, synthetic construct
  source 1..75: mol_type = other DNA
attccagtcggagatccagcgggcttcccgcatgggcagtgaatattaccggaccctgcagaatggcgggcgtca

SEQ ID NO: 803801 - DNA, 75 bp, synthetic construct
  source 1..75: mol_type = other DNA
ggatatcctgaaatcgaccgttttgttatcccggaacgctatagaaatgagtgctacattaggtttgctgggaag

SEQ ID NO: 803802 - DNA, 75 bp, synthetic construct
  source 1..75: mol_type = other DNA
aaaacaggccggaaatgtcggtcgtgcagtgacaaaattaccgttgatgggaaaatccttacataaaacaattga

SEQ ID NO: 803803 - DNA, 75 bp, synthetic construct
  source 1..75: mol_type = other DNA
aaatctgagtgcttacagtaacactattgtggataccccgacgtattttgcttttgcgaaaggtgccgggttgat

SEQ ID NO: 803804 - DNA, 75 bp, synthetic construct
  source 1..75: mol_type = other DNA
cgtctggcggccacacaggaacgcctgaacagaaatattgctgccagaaccgcagcccagaatgagctgaacagt

SEQ ID NO: 803805 - DNA, 75 bp, synthetic construct
  source 1..75: mol_type = other DNA
gcggtctctgccgatatggtggcggattaccagtcccggcttgccagcgcggatatggagctgtggcagcaggtg

SEQ ID NO: 803806 - DNA, 75 bp, synthetic construct
  source 1..75: mol_type = other DNA
atgtggcagacctgaaccgtgacgcagcacatgcaaatcagacgctgtcccccatctttgacagggaaaaagagc

SEQ ID NO: 803807 - DNA, 75 bp, synthetic construct
  source 1..75: mol_type = other DNA
gtatcagtgtttcagccagcgcaaaccagggtaagggcagtgaaaaaggcaacggtaccacccatacagaaacca

SEQ ID NO: 803808 - DNA, 75 bp, synthetic construct
  source 1..75: mol_type = other DNA
ggtgttgatgctgaccgcgtaaattatatcgaagttggtacctggtactacttcaataagaacatgaacgtctac

SEQ ID NO: 803809 - DNA, 75 bp, synthetic construct
  source 1..75: mol_type = other DNA
actccgaagagcgccgcagcctcgtcgaaaaaaatgccaaaatgctggggagttatttattgccttattttgtca

SEQ ID NO: 803810 - DNA, 75 bp, synthetic construct
  source 1..75: mol_type = other DNA
catgcaactgattgatgtttatccggatgcccgcattgcgttgctggaaaagagtccggcccggcctgtcaccag

SEQ ID NO: 803811 - DNA, 75 bp, synthetic construct
  source 1..75: mol_type = other DNA
tgataaaggcgctttagttggtgcaggcacaggttgggctgtaggtggtatggttagtgttgttgcgccacctgt

SEQ ID NO: 803812 - DNA, 75 bp, synthetic construct
  source 1..75: mol_type = other DNA
gcctgatttgcggcatcacgctgtttgttgaagtgggcgtcgtactattgattcctctggctttttcaattgcca

SEQ ID NO: 803813 - DNA, 75 bp, synthetic construct
  source 1..75: mol_type = other DNA
ttcaaattccacccgtttctggcgctgttgctggccagcttcttcgtgggaacgatgatgggtatggggccactg

SEQ ID NO: 803814 - DNA, 75 bp, synthetic construct
  source 1..75: mol_type = other DNA
gctttggcccacgaatagtgttaggcgcaggcttaatattctggtcattaatgcaggcattaacaggaatggtta

SEQ ID NO: 803815 - DNA, 75 bp, synthetic construct
  source 1..75: mol_type = other DNA
gatcagtctattgattttggacagctttcaaaaagcttccttgaggcaggaggtacatccaagccaatggattta

SEQ ID NO: 803816 - DNA, 75 bp, synthetic construct
  source 1..75: mol_type = other DNA
aggtgcgattggctgcacgatcgttacggactcgcttttctggctggtgaagcaatattgcggcgctacgctcaa

SEQ ID NO: 803817 - DNA, 75 bp, synthetic construct
  source 1..75: mol_type = other DNA
ctgtagctccactcgtatcggcggcgtgagcttgcccccgtatgactcgctcaacctcggtgcccattgtggcga

SEQ ID NO: 803818 - DNA, 75 bp, synthetic construct
  source 1..75: mol_type = other DNA
tgacactgcttttggtcagccctttttcctttgcgatgaaaggtattatctggcaaccacaaaaccgtgatagtc

SEQ ID NO: 803819 - DNA, 75 bp, synthetic construct
  source 1..75: mol_type = other DNA
agctcggctttcgcaaaggggtgaatatcgtcagcgatatgggcgggaatgtgctgcaaaaactcaccgaaggcg

SEQ ID NO: 803820 - DNA, 75 bp, synthetic construct
  source 1..75: mol_type = other DNA
cgaaagttttttcaataaataaaaatgttgaagtgattaaaataccattcatgtataataacaggaatacaaaaa

SEQ ID NO: 803821 - DNA, 75 bp, synthetic construct
  source 1..75: mol_type = other DNA
tgcacagacggcgcaccgtcttggctataccgctgtggccgatgccatccgcgatgaagtcgtttcctttcttgg

SEQ ID NO: 803822 - DNA, 75 bp, synthetic construct
  source 1..75: mol_type = other DNA
atgtctggatatcgcacctgctggaaaacctgccggaagagaaactggcatcggcgctgaaagatgacaacccgg

SEQ ID NO: 803823 - DNA, 75 bp, synthetic construct
  source 1..75: mol_type = other DNA
atgcaccagaaacagtcgtccgcagcgctggaaagctatcttaatcgcctgctggctgccgatctccagcaagcc

SEQ ID NO: 803824 - DNA, 75 bp, synthetic construct
  source 1..75: mol_type = other DNA
ttccagtggcatgtcagaacaaaaggtaaatgatttcctggataatgtcgtataccagcactatgagcaggccag

SEQ ID NO: 803825 - DNA, 75 bp, synthetic construct
  source 1..75: mol_type = other DNA
ttcagcatggtgataagtatctggcggatatttatcagcttgcccggcagcgtctggcgagcgttggtgttgaac

SEQ ID NO: 803826 - DNA, 75 bp, synthetic construct
  source 1..75: mol_type = other DNA
ggttcgcgaggcgtttatggcagtagacgccaaagcgagtgcagctttcattcagcatggagataaatatctggc

SEQ ID NO: 803827 - DNA, 75 bp, synthetic construct
  source 1..75: mol_type = other DNA
actatcgatatatgccatttatttatggctaatgaaggcagctatgctttaggtgtcaaactcaaagcaaaaaaa

SEQ ID NO: 803828 - DNA, 75 bp, synthetic construct
  source 1..75: mol_type = other DNA
attggtgacgattccaccatcgacttctcgaagtattaccacttcatcccgatgccggatctacgcgcctttgct

SEQ ID NO: 803829 - DNA, 75 bp, synthetic construct
  source 1..75: mol_type = other DNA
accgctgtatttgttcctgatgtgggacagatcgagtggaaaagcgcagagcataaagaactggcggagttaagc

SEQ ID NO: 803830 - DNA, 75 bp, synthetic construct
  source 1..75: mol_type = other DNA
tccggtgcaggaggatttttcggcagtataggcaactggctgggtggcgcggtggcaaatgcaaaaggcggcgtt

SEQ ID NO: 803831 - DNA, 75 bp, synthetic construct
  source 1..75: mol_type = other DNA
cagtttcagtatcaggcaggggatatcagtgaggatttttacagacaggcgctggcgcagaatgcgcagtatctg

SEQ ID NO: 803832 - DNA, 75 bp, synthetic construct
  source 1..75: mol_type = other DNA
tcgaatcatgcagtggcggcctcggggaaggcgctggagaatgccacgtcggttatgggaatgctgaaaagtggc

SEQ ID NO: 803833 - DNA, 75 bp, synthetic construct
  source 1..75: mol_type = other DNA
gctgccacagaccactctggataataaacagcagagcgccctgacaaaaacagagcgtgagctggccctgtccag

SEQ ID NO: 803834 - DNA, 75 bp, synthetic construct
  source 1..75: mol_type = other DNA
atccctgcaggaaaaaatcgctggatatcagtatgttctggctaaccctggctggacaaccggtgacggattcat

SEQ ID NO: 803835 - DNA, 75 bp, synthetic construct
  source 1..75: mol_type = other DNA
gaattcaaccgtctgctggggctggggaatgaactgcttcagcagcggcagggactggtgaatgtgccgttacgg

SEQ ID NO: 803836 - DNA, 75 bp, synthetic construct
  source 1..75: mol_type = other DNA
gcgggttcggtgatcacccagttcagccaggcgctggcacagggtgtgttgcgcggtgaggaatttaattcggtc

SEQ ID NO: 803837 - DNA, 75 bp, synthetic construct
  source 1..75: mol_type = other DNA
aatacagagctggcgaagctgaagtaccagactgcgcagggcgaactgaaaaccctgacggagatgcagaagcag

SEQ ID NO: 803838 - DNA, 75 bp, synthetic construct
  source 1..75: mol_type = other DNA
tgacaaaaacagaacgtgagctggccctgtcccgactgaagggggaggaaaaagagcgtgcccggctggggtatg

SEQ ID NO: 803839 - DNA, 75 bp, synthetic construct
  source 1..75: mol_type = other DNA
tcgaatcaggcggtggcggcctcggggaaggcgctggagaatgccacgtcggttacgggaatgctgaaaagtggc

SEQ ID NO: 803840 - DNA, 75 bp, synthetic construct
  source 1..75: mol_type = other DNA
aaacagcagagcgccctgaataacacagagcgtcaactggccctgtcccggctgaaaggggaagaaaaagagcgt

SEQ ID NO: 803841 - DNA, 75 bp, synthetic construct
  source 1..75: mol_type = other DNA
tggaatggcgcaactgggcctcatccgtactgcaggaaatatcaaaagttcttatgaatgccgcgattgtcaacg

SEQ ID NO: 803842 - DNA, 75 bp, synthetic construct
  source 1..75: mol_type = other DNA
ggagcgacgaaaacgctctccggcgcactgaacggtgtggccggaaatattgataccgtggcaacagctgcgggt

SEQ ID NO: 803843 - DNA, 75 bp, synthetic construct
  source 1..75: mol_type = other DNA
cgcctgcccggtgagccgggtgaatcccggttatccagggccaaaacaagccgggccggatggcgagcgtctgcg

SEQ ID NO: 803844 - DNA, 75 bp, synthetic construct
  source 1..75: mol_type = other DNA
taaatttgtttgtctggagatttttcgaaagatacgtagttagtagctttttttataaagggcaaggagttttgt

SEQ ID NO: 803845 - DNA, 75 bp, synthetic construct
  source 1..75: mol_type = other DNA
gatgctttttcgtcctcaaatggagtgagcattattaatggtgtaatattgaatgatgtatcatgggatgtggtg

SEQ ID NO: 803846 - DNA, 75 bp, synthetic construct
  source 1..75: mol_type = other DNA
cgactgcgaaacctgtaaatggcagattgagatgtcaaccagcaaacgctgcgaacatccaataacattactggc

SEQ ID NO: 803847 - DNA, 75 bp, synthetic construct
  source 1..75: mol_type = other DNA
gcattaagtgcaccgtctgtaccaccgcctgcccggtaagccgggtgaatccgggctatccggggccaaaacagg

SEQ ID NO: 803848 - DNA, 75 bp, synthetic construct
  source 1..75: mol_type = other DNA
gattcccagtgctgcggtattgcgggaacttacggtttcaaaaaagagaactaccccacttcccaagccatcggc

SEQ ID NO: 803849 - DNA, 75 bp, synthetic construct
  source 1..75: mol_type = other DNA
ataacgaggcgaataaacccaaatcccggggtggaaaatcagagacggaaaaagcggaagacagttttcccggct

SEQ ID NO: 803850 - DNA, 75 bp, synthetic construct
  source 1..75: mol_type = other DNA
gggcggcggacggttctcttggggtcagggctattggcaatgtgaatggtggtggcggatttgtctattctcccg

SEQ ID NO: 803851 - DNA, 75 bp, synthetic construct
  source 1..75: mol_type = other DNA
ggggccgcggcctggtacacgatgtatcagaatcaggagcaggccagagaatctgcacgccagtatgccgcaaca

SEQ ID NO: 803852 - DNA, 75 bp, synthetic construct
  source 1..75: mol_type = other DNA
aattttatttcagactgctgaggttgatgctttttcgtcctcgaatggagtgagcattattaatgatgtaatact

SEQ ID NO: 803853 - DNA, 75 bp, synthetic construct
  source 1..75: mol_type = other DNA
tgcggatgtcatcttattcctctaccgtgacgagctgtacgatcccaacacgctggatcgggggatcgccgaagt

SEQ ID NO: 803854 - DNA, 75 bp, synthetic construct
  source 1..75: mol_type = other DNA
gcgtgatgaatacgcggccatgccggaaacggtctctgacgggatcacaaaggtggaaaacgcctttatggcctg

SEQ ID NO: 803855 - DNA, 75 bp, synthetic construct
  source 1..75: mol_type = other DNA
aaaacgtggctggaaatttttcctgacaatgctggcattctgcgtatttatcttttgcaattttctgccattgtg

SEQ ID NO: 803856 - DNA, 75 bp, synthetic construct
  source 1..75: mol_type = other DNA
actgaatggggaggaaaaagagcgggcccggctggggtatgcggcggatgacctcggttttgtgggggatccgta

SEQ ID NO: 803857 - DNA, 75 bp, synthetic construct
  source 1..75: mol_type = other DNA
actgaatggggaggaaaaagagcgggcccgcctggggtatgcggcggatgacctgggttttgtgggggatccgta

SEQ ID NO: 803858 - DNA, 75 bp, synthetic construct
  source 1..75: mol_type = other DNA
tgaacagaaatattgctgccagaaccgctgcccagaatgtgctgaacagtacaacggcggtgggctcacgtctga

SEQ ID NO: 803859 - DNA, 75 bp, synthetic construct
  source 1..75: mol_type = other DNA
actgaagggggaggaaaaagagcgggcccgtctggggtatgcggcggatgacctcggttttgtgggggatccgta

SEQ ID NO: 803860 - DNA, 75 bp, synthetic construct
  source 1..75: mol_type = other DNA
actgaacggggaggaaaaagagcgggcccggctggggtatgcggcggatgaccttggttttgtgggggatccgta

SEQ ID NO: 803861 - DNA, 75 bp, synthetic construct
  source 1..75: mol_type = other DNA
actgaacggggaggaaaaagagcgggcccgtctggggtatgcggcggatgacctgggttttgtgggggatccgta

SEQ ID NO: 803862 - DNA, 75 bp, synthetic construct
  source 1..75: mol_type = other DNA
cacgcagattgccacggcgcgggcaagggcagccgtgtaccgtgcgcagcaggcagtggcggcagcccgcgggac

SEQ ID NO: 803863 - DNA, 75 bp, synthetic construct
  source 1..75: mol_type = other DNA
cacgcagattgccacggcgcgggcaagcgcagccgtgtaccgtgcccagcaggcagtggcggcagcccgcgggac

SEQ ID NO: 803864 - DNA, 75 bp, synthetic construct
  source 1..75: mol_type = other DNA
cacgcagattgccacggcgcgggcaagagcagccgtgtaccgtgcacagcaggcagtggcggcagcccgcgggac

SEQ ID NO: 803865 - DNA, 75 bp, synthetic construct
  source 1..75: mol_type = other DNA
tgaacagaaatattgctgccagaatcgccgcccagaatgtgctgaacagtacaacggcggtgggctcacgtctga

SEQ ID NO: 803866 - DNA, 75 bp, synthetic construct
  source 1..75: mol_type = other DNA
tgaacagaaatattgctgccagaaacgcagcccagaatgagctgaacagtacaacggcggtgggctcacgtctga

SEQ ID NO: 803867 - DNA, 75 bp, synthetic construct
  source 1..75: mol_type = other DNA
gacgcagattgccacggcgcgggcaagcgcagccgtgtaccgtgcgcagcaggcagtggcggcagcccgcgggac

SEQ ID NO: 803868 - DNA, 75 bp, synthetic construct
  source 1..75: mol_type = other DNA
actgaagggggaggaaaaagagcgggcccgcctggggtatgcggcggatgaccttggttttgtgggggatccgta

SEQ ID NO: 803869 - DNA, 75 bp, synthetic construct
  source 1..75: mol_type = other DNA
atgattctggtgacttctttgggatgcggcgatagttggccgttcttatcggatcgggcaaaagccgcgtttggt

SEQ ID NO: 803870 - DNA, 75 bp, synthetic construct
  source 1..75: mol_type = other DNA
cggaaagctggctgcaaaccagccagcttgactacgccattctccgtccaggcggtctgcttgatggcgcagcaa

SEQ ID NO: 803871 - DNA, 75 bp, synthetic construct
  source 1..75: mol_type = other DNA
ggcacaacaaggtgtgcaggtttttacaggcgatgcctgtgatgccagcgtggtcgcagcggcctgccgcgcggc

SEQ ID NO: 803872 - DNA, 75 bp, synthetic construct
  source 1..75: mol_type = other DNA
agtttgagcagaaaaataatgagttgctgagacagtaccagaccggagaaatcgaagaagccctgtggaaacagg

SEQ ID NO: 803873 - DNA, 75 bp, synthetic construct
  source 1..75: mol_type = other DNA
ttatgaaagcagcctggcggacagtaacgccagtgtcagggcatcaaatgaggctcagttgttagggtatggaga

SEQ ID NO: 803874 - DNA, 75 bp, synthetic construct
  source 1..75: mol_type = other DNA
aggggctgacgaactgggcagacagtgccactgattatgcttcacaagcggcagatgcggtcgtttccactatgg

SEQ ID NO: 803875 - DNA, 75 bp, synthetic construct
  source 1..75: mol_type = other DNA
ccagggaacgcatgcgggagttgcagcagatccgcgacagcttccgccagaaggatgcggaccttcagtctcagt

SEQ ID NO: 803876 - DNA, 75 bp, synthetic construct
  source 1..75: mol_type = other DNA
gaaggccatggcggataacggaaagttgaccgccgataaggttgttcctgcactgattagtcagcttggggcgtt

SEQ ID NO: 803877 - DNA, 75 bp, synthetic construct
  source 1..75: mol_type = other DNA
gacagcgcatcagattacgcttcacaggcagcacagcttgcgacagacggtatctcagggatggtaaataacatc

SEQ ID NO: 803878 - DNA, 75 bp, synthetic construct
  source 1..75: mol_type = other DNA
ggagcgggcaaaggctgcgtttggtcaggcggtacgggaaaaaacgctggcggaaagctggttgcaaaccagcca

SEQ ID NO: 803879 - DNA, 75 bp, synthetic construct
  source 1..75: mol_type = other DNA
cgttaatcagccagctggggatattacgtgatgaatatgcggccatgccggaaacggtttccagtagtatcacga

SEQ ID NO: 803880 - DNA, 75 bp, synthetic construct
  source 1..75: mol_type = other DNA
aaggtgcaatccattcaggatgtgcttgccgggctggaggagcgacgggtggcgttgatccgtcaacaggcagcg

SEQ ID NO: 803881 - DNA, 75 bp, synthetic construct
  source 1..75: mol_type = other DNA
gtcagtgaggatgatgtcgcattaatgatggcttcagcggggattcctggaggtgtgagatatgtcccagccggt

SEQ ID NO: 803882 - DNA, 75 bp, synthetic construct
  source 1..75: mol_type = other DNA
aaaagctgcaaaaaaatacggatatcatgctatatctgctgttactccattttattatcctttttcatttgaaga

SEQ ID NO: 803883 - DNA, 75 bp, synthetic construct
  source 1..75: mol_type = other DNA
atgatgaaaaattgtgtactgctgggcgcgtttctgttgagttttactggtgtggcaatggcgcaaagtgtcacc

SEQ ID NO: 803884 - DNA, 75 bp, synthetic construct
  source 1..75: mol_type = other DNA
gcatccttatgttcgccatcttgccagcgtaggtgaagggatggttatcgaacaccagattgacgaccatcacca

SEQ ID NO: 803885 - DNA, 75 bp, synthetic construct
  source 1..75: mol_type = other DNA
ggtgaaccccaccattgcgctgattgactgggaacatccggaaaataaccagttccattttaccgaagaatttac

SEQ ID NO: 803886 - DNA, 75 bp, synthetic construct
  source 1..75: mol_type = other DNA
aagaggatattaccgatgcgcagatgtatgccctgcgcaaccatcctttatcgactgaacaaattgatgcgttat

SEQ ID NO: 803887 - DNA, 75 bp, synthetic construct
  source 1..75: mol_type = other DNA
aataaatgtggctctgttcagccttacggcactgatggtactgactctgggaggcgccgtgctggcacatgtatg

SEQ ID NO: 803888 - DNA, 75 bp, synthetic construct
  source 1..75: mol_type = other DNA
agtgcaacgaatgcttagaacattggctaagggccggacacgccgaaaggctgaacgaaacagagaatcaaaaat

SEQ ID NO: 803889 - DNA, 75 bp, synthetic construct
  source 1..75: mol_type = other DNA
ggatatcgctggcgtctgaatgtgatgtgccgatgatgaaaaacgcagcgaaaaccattaaaaaacggttatacg

SEQ ID NO: 803890 - DNA, 75 bp, synthetic construct
  source 1..75: mol_type = other DNA
cgcctttaaaaaagggcataggtatataaccgtggtatctgatcgcgacgggcgggcactggcattaaccgatga

SEQ ID NO: 803891 - DNA, 75 bp, synthetic construct
  source 1..75: mol_type = other DNA
tccacaagcggtcagcgtcgcgactgtgccgcaaaccgtctatgtggctcctgcgccagctccggcttaccgccc

SEQ ID NO: 803892 - DNA, 75 bp, synthetic construct
  source 1..75: mol_type = other DNA
atgccttttgataattaccaatggcatgacgactatgaacgagaaagcgtcatgcgtgcaatgtgcaatgtatgc

SEQ ID NO: 803893 - DNA, 75 bp, synthetic construct
  source 1..75: mol_type = other DNA
atgtcttttgataattaccaatggcatgacgactatgaacgagaaagcgttatgcgtgcaatgtgcaatgtatgc

SEQ ID NO: 803894 - DNA, 75 bp, synthetic construct
  source 1..75: mol_type = other DNA
ggcgctgattcttcatgacagcctgaagcagtgtcgtattgtggtggtgacggaccgtatcgatcttgaagaaca

SEQ ID NO: 803895 - DNA, 75 bp, synthetic construct
  source 1..75: mol_type = other DNA
gagtttgaggcgcaggtggaaacccgcaaactcagcgacatcccggatgcgctggccgtaaacaaacatgcgcaa

SEQ ID NO: 803896 - DNA, 75 bp, synthetic construct
  source 1..75: mol_type = other DNA
agactgctggaacgcatcagtacccgcagacccgatgggggcagggaaggtggggtgatctggcataccacgggg

SEQ ID NO: 803897 - DNA, 75 bp, synthetic construct
  source 1..75: mol_type = other DNA
ccaccttcttcaccgacaagagctttacggaacaagaccgaaatctctataaagaaaccgtaaaacagatgtcca

SEQ ID NO: 803898 - DNA, 75 bp, synthetic construct
  source 1..75: mol_type = other DNA
aagaccagaaccacggcatccagatcgccctgcgcgcgatggaagccccgctgcgcgagatcgtgaccaatgccg

SEQ ID NO: 803899 - DNA, 75 bp, synthetic construct
  source 1..75: mol_type = other DNA
gcaaactgccggaagtgacgaaatggtggaaggataatgtcggcacgcaggatgagtctgtgtatacccgcaata

SEQ ID NO: 803900 - DNA, 75 bp, synthetic construct
  source 1..75: mol_type = other DNA
tcggcaaatatcaggacctcgcctcccgaactcagggcggatacgatatcaaagatattgacgggctgtacagcg

SEQ ID NO: 803901 - DNA, 75 bp, synthetic construct
  source 1..75: mol_type = other DNA
tcacggagtttgtcgacggcaagaaagtgaaccccaccattgcgctgattgactgggaacatccgaagaataacc

SEQ ID NO: 803902 - DNA, 75 bp, synthetic construct
  source 1..75: mol_type = other DNA
cttggctggacgtttttatccccgaaacagattatggactgccggggctataaacaggacgaggtggtgctacgc

SEQ ID NO: 803903 - DNA, 75 bp, synthetic construct
  source 1..75: mol_type = other DNA
tggcctgctgattgattatcgcggcattctggctgaactggacacgacgatcggtaaatatcaggatctcgcctc

SEQ ID NO: 803904 - DNA, 75 bp, synthetic construct
  source 1..75: mol_type = other DNA
ctcggctggacgtttttatccccgaaacagattatggattaccggggctataaacaggatgaggtggtgctgcgt

SEQ ID NO: 803905 - DNA, 75 bp, synthetic construct
  source 1..75: mol_type = other DNA
agactactggaacgcatcagtacccgtagaccagacggcggcagggaaggtggtgtcatctggcataccacgggt

SEQ ID NO: 803906 - DNA, 75 bp, synthetic construct
  source 1..75: mol_type = other DNA
agtcggtcagctataccctgtcaggtcctgtaacaggaagtggtaatactgtattcgcaaatacggcagcatcag

SEQ ID NO: 803907 - DNA, 75 bp, synthetic construct
  source 1..75: mol_type = other DNA
atcttggcgaattgttgaaacgcggtttacgcggatcgctgaagaccggaaatctggtgactggcgcgctctacg

SEQ ID NO: 803908 - DNA, 75 bp, synthetic construct
  source 1..75: mol_type = other DNA
ccagtcgatgcagcagttgccaacggatatgcagtcaacgttgcgtgagctgaatcgcagtatgcagggcttcca

SEQ ID NO: 803909 - DNA, 75 bp, synthetic construct
  source 1..75: mol_type = other DNA
gataccgtcttctgggtggtaaaaccgcagataggtcgagaaggtattagcggcctgggcacactgctttccggt

SEQ ID NO: 803910 - DNA, 75 bp, synthetic construct
  source 1..75: mol_type = other DNA
cctttgcgctgggcctgtacagcgcaggaacggcgcaggccgcgctgcaggatgacatgaactcgttctttaatg

SEQ ID NO: 803911 - DNA, 75 bp, synthetic construct
  source 1..75: mol_type = other DNA
atcatcggcaatactgaggcggttagttatatagaacggcttatttcagaacgcaaatcaaaacgagccgaaaaa

SEQ ID NO: 803912 - DNA, 75 bp, synthetic construct
  source 1..75: mol_type = other DNA
agacgctggaaaaagtgatttcccacacgcgttataagcttactccagcggagatggaagccttcaactctgcgg

SEQ ID NO: 803913 - DNA, 75 bp, synthetic construct
  source 1..75: mol_type = other DNA
atggaagttaagaccaaagaagactggctgtatcagtttcgtcgttgttcatcccgggagacactggaaaaagtg

SEQ ID NO: 803914 - DNA, 75 bp, synthetic construct
  source 1..75: mol_type = other DNA
tggcaggccgcttcctttaggcctgttacggcgcgaatacatcattctgattgagatcgcactgtcagcgttatc

SEQ ID NO: 803915 - DNA, 75 bp, synthetic construct
  source 1..75: mol_type = other DNA
gtgaaatcaactatatataccgcagctggcgattgcgtgacgccaggtcatgaattgggcaaaggtggtgaaggc

SEQ ID NO: 803916 - DNA, 75 bp, synthetic construct
  source 1..75: mol_type = other DNA
atcacattgattatctgatgttctttaaagattcggtacgcggtctgcaaccgggagctccggtagagttccggg

SEQ ID NO: 803917 - DNA, 75 bp, synthetic construct
  source 1..75: mol_type = other DNA
ggttgtatcagttccgtcgttgttcatcccaggagacactggaaaaggtgatttcccacacgcgttataaactta

SEQ ID NO: 803918 - DNA, 75 bp, synthetic construct
  source 1..75: mol_type = other DNA
ggctgtatcagctccgtcgttgttcatcccgggagacgctggaaaaagtgatttcccacacacgttataaactta

SEQ ID NO: 803919 - DNA, 75 bp, synthetic construct
  source 1..75: mol_type = other DNA
gccgcacgttatgtctccggaggctcgttctacgcgcgcaccggcaacaagaatattcagctggtttccatcagt

SEQ ID NO: 803920 - DNA, 75 bp, synthetic construct
  source 1..75: mol_type = other DNA
atttgcgtaaaaggtgtaccgaactacttcggtgcccaacgttttgggattggcggtagcaacttgcagggtgcg

SEQ ID NO: 803921 - DNA, 75 bp, synthetic construct
  source 1..75: mol_type = other DNA
cctgtgattttagggtcgaggcgaatgatcgtgattcatttgaacagtttttactccggcatggaggttataaat

SEQ ID NO: 803922 - DNA, 75 bp, synthetic construct
  source 1..75: mol_type = other DNA
ggacggtgagggtggtatgccgtgagtggagtgtcacggataatgcccggtacagtgatttcagttgcacgatag

SEQ ID NO: 803923 - DNA, 75 bp, synthetic construct
  source 1..75: mol_type = other DNA
cacttacccagtgcggttgagaaaatcgcctttgaccgcttccatgtggcgaagcaactgggcgaggtagttgat

SEQ ID NO: 803924 - DNA, 75 bp, synthetic construct
  source 1..75: mol_type = other DNA
tgtggcaacatttaccactgaagctatccctttaccccgaactaggggcttttgggaaattgattaatgctggag

SEQ ID NO: 803925 - DNA, 75 bp, synthetic construct
  source 1..75: mol_type = other DNA
ctcaggttatggtcagacattacccctgcagcaggatataaaggttacggagtctttctggcaatatggggcatg

SEQ ID NO: 803926 - DNA, 75 bp, synthetic construct
  source 1..75: mol_type = other DNA
atgagtacagagttaaatagcggtactgtcggtggttttggtcacatgggaccaaatgacccctacaatgatggt

SEQ ID NO: 803927 - DNA, 75 bp, synthetic construct
  source 1..75: mol_type = other DNA
gtctgggacggcaaacaggatatttatcacctgctgcattgcctggtgatcccgcgtatcccgttagcgccaggc

SEQ ID NO: 803928 - DNA, 75 bp, synthetic construct
  source 1..75: mol_type = other DNA
ccgctagcactgcatctcgatcatcacgaatcgttggatgacattcgccgtaaggttcacgccggcgtacgcagc

SEQ ID NO: 803929 - DNA, 75 bp, synthetic construct
  source 1..75: mol_type = other DNA
atgaaagaaaataaaattccggtttcacaggaaattaaaaaacatttattaaccggcatctcgtggatgataccc

SEQ ID NO: 803930 - DNA, 75 bp, synthetic construct
  source 1..75: mol_type = other DNA
actgcgaacaatgtaagagtgggagtgacgggcactggctggcaatgtctagcaacggcaggcatttcggctgag

SEQ ID NO: 803931 - DNA, 75 bp, synthetic construct
  source 1..75: mol_type = other DNA
cccaggtacgaagaatattaattctgtcgatctttctgctgtcattaataacattatacatcatgaaggtgcacg

SEQ ID NO: 803932 - DNA, 75 bp, synthetic construct
  source 1..75: mol_type = other DNA
gtcagtcagggtgagctggtcagagacaccgcccgcgatatcagcacggcgttgggactgaaagcacatccatag

SEQ ID NO: 803933 - DNA, 75 bp, synthetic construct
  source 1..75: mol_type = other DNA
cggtgataacccgacagtcgtctccggactgacggctgaattttcagcgttgttttttttaatgcaaaaagccgg

SEQ ID NO: 803934 - DNA, 75 bp, synthetic construct
  source 1..75: mol_type = other DNA
gccactcataaagcattcccgcgcatttttgcgcgccagaacgcacaagctgcgccatccgcctcactgtggttg

SEQ ID NO: 803935 - DNA, 75 bp, synthetic construct
  source 1..75: mol_type = other DNA
gggcgggctggatatcaagctgccgctgaccatctacaacacctcatgctaccgggggatccctggcagatacat

SEQ ID NO: 803936 - DNA, 75 bp, synthetic construct
  source 1..75: mol_type = other DNA
gctgccggtcagcacacctgaaatgtcacccggcgaggtgacaccacgcccgcttcagctaccgggcatcggtgc

SEQ ID NO: 803937 - DNA, 75 bp, synthetic construct
  source 1..75: mol_type = other DNA
gtcgccgggccgtttatgcgccgcctgatgttactttccggcgaaacggtcaatgtcgcgatccgtaacggcaat

SEQ ID NO: 803938 - DNA, 75 bp, synthetic construct
  source 1..75: mol_type = other DNA
tcgctgggtgcgttcaggaacattccctgaaatgtcaacccggcctccaaagcgagggcttctggatccatggag

SEQ ID NO: 803939 - DNA, 75 bp, synthetic construct
  source 1..75: mol_type = other DNA
gggcacagataccgctattgaaaccgccgacgtggccctgatggacgatgacctgcgcaagattccgaccttcgt

SEQ ID NO: 803940 - DNA, 75 bp, synthetic construct
  source 1..75: mol_type = other DNA
gagtcaattgaaatcggcgtaatggtggaaacaccggctgccgcaacaattgcacgtcatttagccaaagaagtt

SEQ ID NO: 803941 - DNA, 75 bp, synthetic construct
  source 1..75: mol_type = other DNA
atggcagcagaagttccgttccttgcagccactcataaagcattcccgcgcatttttgcgcgccagaacgcacaa

SEQ ID NO: 803942 - DNA, 75 bp, synthetic construct
  source 1..75: mol_type = other DNA
ccggaaggcgatgtcacggttgatgttcactggtcgagcctgaactacaaagatgcgctggcgattaccggtaag

SEQ ID NO: 803943 - DNA, 75 bp, synthetic construct
  source 1..75: mol_type = other DNA
cagcgaccagcgaccagcgaccagcgaccagcgaccagcgaccagcgaccagcgaccagcgaccagcgaccagcg

SEQ ID NO: 803944 - DNA, 75 bp, synthetic construct
  source 1..75: mol_type = other DNA
tgctgagcatatgcaggatttgtattccacgctgctgggcgacctgcaactactgaaagcccgtcgtgggctgag

SEQ ID NO: 803945 - DNA, 75 bp, synthetic construct
  source 1..75: mol_type = other DNA
acgctgcaactggagacgctacctaatctgttcgatgagaaaactcgcctgctggcaattactcatgtctccaac

SEQ ID NO: 803946 - DNA, 75 bp, synthetic construct
  source 1..75: mol_type = other DNA
aaactgtatggccccaccgggattggcattctttatgtcaaagaagccttgttgcaggagatgccgccgtgggaa

SEQ ID NO: 803947 - DNA, 75 bp, synthetic construct
  source 1..75: mol_type = other DNA
gaccaaagcgccgtggcggtttgaggccggcacgcccaatacggggggcattattggtcttggtgcggcgctgga

SEQ ID NO: 803948 - DNA, 75 bp, synthetic construct
  source 1..75: mol_type = other DNA
gccgacaatggtattgcgattccgaccgacaagctttccgactccttagtcgctatcactggtgcgggtcactat

SEQ ID NO: 803949 - DNA, 75 bp, synthetic construct
  source 1..75: mol_type = other DNA
atgtcatcccagcactggcagcggcaaaagtgaacttagtgaataatgaactgacacaaccgctatattatcgcc

SEQ ID NO: 803950 - DNA, 75 bp, synthetic construct
  source 1..75: mol_type = other DNA
gcattcttatgtcaaagaagccttgttgcaggagatgccgccgtgggaaggggcggttctatgatcgccaccgta

SEQ ID NO: 803951 - DNA, 75 bp, synthetic construct
  source 1..75: mol_type = other DNA
cgccagtgacctgattaatcttaatgccgaccgcctgcaatgcctgctgagcggtcatcctaaattcgtttttaa

SEQ ID NO: 803952 - DNA, 75 bp, synthetic construct
  source 1..75: mol_type = other DNA
gcaaccgttgctgagcatatgcaggatttgtatgccacgctgctgggcgacctgcaactactgaaagcccgtcgc

SEQ ID NO: 803953 - DNA, 75 bp, synthetic construct
  source 1..75: mol_type = other DNA
gacgacacggatacgacggagtttgcccgcttcagtcaggtctggcaggaaaacggactggatcataactggctg

SEQ ID NO: 803954 - DNA, 75 bp, synthetic construct
  source 1..75: mol_type = other DNA
tgtgtcgggcgtcgctggccatgtataacacccatgaagaagtggatcgtctggtgaccggactgcaacgtattc

SEQ ID NO: 803955 - DNA, 75 bp, synthetic construct
  source 1..75: mol_type = other DNA
gcatggcgcaaaagtgctggtggatggcgctcaggcggtgatgcatcatccggtggacgttcaggcgctggattg

SEQ ID NO: 803956 - DNA, 75 bp, synthetic construct
  source 1..75: mol_type = other DNA
atgactttttccgtcgacaaagtgcgggccgactttccggtgctttcgcgtgaggtaaacggtttgccgctggct

SEQ ID NO: 803957 - DNA, 75 bp, synthetic construct
  source 1..75: mol_type = other DNA
ttcatggatcgcgacgcgctgccgactgaagaagaacagtttgctgcctataaagcagtggctgaagcctgtggc

SEQ ID NO: 803958 - DNA, 75 bp, synthetic construct
  source 1..75: mol_type = other DNA
atggtgactgatttattaggctctaagatgccgtcaacgattctcgccggggtcatcctgttgtggagtgaaggc

SEQ ID NO: 803959 - DNA, 75 bp, synthetic construct
  source 1..75: mol_type = other DNA
gccaccggcccgaaggcttccccgcgtcacattactctagtcaacgcgttctgtgaccgactcgatgccatcctg

SEQ ID NO: 803960 - DNA, 75 bp, synthetic construct
  source 1..75: mol_type = other DNA
gggcgatactggtgaccaataatacaagagagtttgagcgggtgccgggcctgaagctggaagactgggtaaaat

SEQ ID NO: 803961 - DNA, 75 bp, synthetic construct
  source 1..75: mol_type = other DNA
ctcggtgtggcacaacgttaaccgttgcgtgggacgcgccccggcagcgtcctaccgcctatgcgttggccgcac

SEQ ID NO: 803962 - DNA, 75 bp, synthetic construct
  source 1..75: mol_type = other DNA
ttttcgttatcgcggtgctctcggcgctggtgcgtatgggaggtttaatgagtatttatccggcaatgggtgcat

SEQ ID NO: 803963 - DNA, 75 bp, synthetic construct
  source 1..75: mol_type = other DNA
tagaaacagcctgcagtggacactcgcgctgcttgtaacgtccatcatgctgtatcttccggctaatattttgcc

SEQ ID NO: 803964 - DNA, 75 bp, synthetic construct
  source 1..75: mol_type = other DNA
ccgaacgacacggcaatagccgggcacgccatcgcggccggcgccgtgctggtgacgaataatacacgggagttt

SEQ ID NO: 803965 - DNA, 75 bp, synthetic construct
  source 1..75: mol_type = other DNA
tggcagtgctgtactcaagcgcaacggtaagggagccatactacgcccggttatcaaggcacacgggcatttcag

SEQ ID NO: 803966 - DNA, 75 bp, synthetic construct
  source 1..75: mol_type = other DNA
atggcggagctgtaccgcacacttccggcggcatttgatgacttctgcagctcgggtgtatcgctgtatcagggg

SEQ ID NO: 803967 - DNA, 75 bp, synthetic construct
  source 1..75: mol_type = other DNA
tgaagcgtctggagcaggcggtgctacgcggccaccgtatagtggtctcggccatcacctactctgaaatgcgct

SEQ ID NO: 803968 - DNA, 75 bp, synthetic construct
  source 1..75: mol_type = other DNA
cacctggagcagtcggtgctgcgcggtcaccgtatcgtggtctcggccatcacctactccgagatgcgcttcggc

SEQ ID NO: 803969 - DNA, 75 bp, synthetic construct
  source 1..75: mol_type = other DNA
ccaacatctgctcgttcatcatgcgcgagcagccggcagcggtgctgaagcgcctggagcaggcggtgctgcgcg

SEQ ID NO: 803970 - DNA, 75 bp, synthetic construct
  source 1..75: mol_type = other DNA
atatgctcgatacctgcatctgctcgttcatcatgcgtgagcagccggacgccgtgctgaaacgcctggagcagg

SEQ ID NO: 803971 - DNA, 75 bp, synthetic construct
  source 1..75: mol_type = other DNA
gagaacccgttcctcggctggcgtgctatccgtatcgcgatggatcgtaaagagatcctgcgcgatcagctccgc

SEQ ID NO: 803972 - DNA, 75 bp, synthetic construct
  source 1..75: mol_type = other DNA
agagatcctgcgcgatcagctccgcgctatcctgcgtgcctcggctttcggtaaattgcgcatcatgttcccgat

SEQ ID NO: 803973 - DNA, 75 bp, synthetic construct
  source 1..75: mol_type = other DNA
gccattcaggatgaagtcattctggttgccgctgacctgacgccgtccgaaaccgcacagctgaacctgaagaag

SEQ ID NO: 803974 - DNA, 75 bp, synthetic construct
  source 1..75: mol_type = other DNA
tgccagctattacgctggacggtcaccaggtagaagtgtgcgctaacatcggtacggttcgtgacgttgaaggtg

SEQ ID NO: 803975 - DNA, 75 bp, synthetic construct
  source 1..75: mol_type = other DNA
caaagctgtggctgaagcgtgtggctcgcaggcggttattgttcgtactatggacattggcggcgacaaagagct

SEQ ID NO: 803976 - DNA, 75 bp, synthetic construct
  source 1..75: mol_type = other DNA
tggtctgtatcgcaccgaattcctgttcatggaccgcgacgcgctgccgactgaagaagaacagttcgcggccta

SEQ ID NO: 803977 - DNA, 75 bp, synthetic construct
  source 1..75: mol_type = other DNA
ctgacgttttgaaacgcactggctatagcaaggcgtgggtatatgctctgatgagccgaggacaattcccccaat

SEQ ID NO: 803978 - DNA, 75 bp, synthetic construct
  source 1..75: mol_type = other DNA
agttcaatatgtatacactccaaatgaagatagagtaattgaactttcgcgtgttggacttaacaaacttttttc

SEQ ID NO: 803979 - DNA, 75 bp, synthetic construct
  source 1..75: mol_type = other DNA
tagtaaacggaattccattgacgatatcacccggacagactgcagaagtcagcggagggtttgcatggttaaaag

SEQ ID NO: 803980 - DNA, 75 bp, synthetic construct
  source 1..75: mol_type = other DNA
ggacggatgtcgcgttggcgggcagcagattattatatgtggagagatgggttcgaagaaaactctggacagaaa

SEQ ID NO: 803981 - DNA, 75 bp, synthetic construct
  source 1..75: mol_type = other DNA
ctttgcaacgaccttcaatggattctctgatcgatatgaagtttattacttccgattgtttattaagtgataaat

SEQ ID NO: 803982 - DNA, 75 bp, synthetic construct
  source 1..75: mol_type = other DNA
tgtcagataattatcataatttcggggttgctcgtaaccagttagagaaaacaggcatcgctgaggtgctacgtt

SEQ ID NO: 803983 - DNA, 75 bp, synthetic construct
  source 1..75: mol_type = other DNA
tcgttcagcaattgaagacggggtggtggaaccacacgagcaggcagcaattaacgacgaactgtacctgtcaat

SEQ ID NO: 803984 - DNA, 75 bp, synthetic construct
  source 1..75: mol_type = other DNA
ttacgcaaggcaactgctgatggagttattgaccaggctgagcgtgagcaaatcgaagagaacagctaccaagta

SEQ ID NO: 803985 - DNA, 75 bp, synthetic construct
  source 1..75: mol_type = other DNA
tcgttcggcaatcgaagacggggtagtggagccacatgagcagacagcaattaatgatgagttgtatctgtcgat

SEQ ID NO: 803986 - DNA, 75 bp, synthetic construct
  source 1..75: mol_type = other DNA
tggctgtgcatagcgcgatggaatctcttagctatcacccaaacgccaacgcccgggcgctggcacaacagacaa

SEQ ID NO: 803987 - DNA, 75 bp, synthetic construct
  source 1..75: mol_type = other DNA
attcccgatgccgatttgacagcattgatgaaacaaatgcccggcatggtgctgatcaaccggatcctcccgggg

SEQ ID NO: 803988 - DNA, 75 bp, synthetic construct
  source 1..75: mol_type = other DNA
actacatcatcaaccagatcgattctgacaataaactgggcgtaggttcagacgacaccgttgctgtgggtatcg

SEQ ID NO: 803989 - DNA, 75 bp, synthetic construct
  source 1..75: mol_type = other DNA
aaaaacaacctgagtggcacgtgaaagctgtcagaaaaactatcgcggcattgcctgggggttacgctgaagctg

SEQ ID NO: 803990 - DNA, 75 bp, synthetic construct
  source 1..75: mol_type = other DNA
tggaagctggcgatattatcccctgcgatggtgaagtcattgaagggggcgcatcggtcgatgaaagcgccatca

SEQ ID NO: 803991 - DNA, 75 bp, synthetic construct
  source 1..75: mol_type = other DNA
tcttagctatcacccgaacgccaacgcccgggcgctggcacaacaggccaccgaaaccgttgggttgattgttgg

SEQ ID NO: 803992 - DNA, 75 bp, synthetic construct
  source 1..75: mol_type = other DNA
gtaggccgctggtcgatgattgacgttttcgttatcgcggtgctctcggcgctggtgcgtatgggaggtttaatg

SEQ ID NO: 803993 - DNA, 75 bp, synthetic construct
  source 1..75: mol_type = other DNA
gtaaagtctctgatgctgacctcacttacctggaagaggtggcaaacagcaccggacaggaggtggacaaaagcc

SEQ ID NO: 803994 - DNA, 75 bp, synthetic construct
  source 1..75: mol_type = other DNA
tacggaactgtcagcgtaaacggaaaagtaaacgatgcagacctggattatctggacaaagttgccaatggaaca

SEQ ID NO: 803995 - DNA, 75 bp, synthetic construct
  source 1..75: mol_type = other DNA
cagcggcaaatcttaaacatcgtctgcaggaattccgcaatatcaatgcagatgctcaggtaggtgtatcagctg

SEQ ID NO: 803996 - DNA, 75 bp, synthetic construct
  source 1..75: mol_type = other DNA
agagcattacgcagaaaacggtcagacagccacaaacgctggcgatggaagagatcaactgtcaccacaactatg

SEQ ID NO: 803997 - DNA, 75 bp, synthetic construct
  source 1..75: mol_type = other DNA
atgcggtgatggcagcacaaagcgatctggtggaagttctctacactctgcgtcaggtggtgtgcgtaaaaggat

SEQ ID NO: 803998 - DNA, 75 bp, synthetic construct
  source 1..75: mol_type = other DNA
gcggtgatggcggcacaaagcgatctggtggaagttatctacaccctgcgtcaggtggtgtgcgtaaaaggataa

SEQ ID NO: 803999 - DNA, 75 bp, synthetic construct
  source 1..75: mol_type = other DNA
caaaggcgaccgttaccacaacaccagaaacggcattaacgctgatatcggggccagcatggacctggatgacaa

SEQ ID NO: 804000 - DNA, 75 bp, synthetic construct
  source 1..75: mol_type = other DNA
aatgcgtctccccgttatccgaaaaactggaagacatccggcgatccggcgcgagagttcaccatgattcagtca

SEQ ID NO: 804001 - DNA, 75 bp, synthetic construct
  source 1..75: mol_type = other DNA
atcattccacgcagtattgacactaaagtcgtcaatggctttaaagaaaccttcaaagttcgtccgacaggcaac

SEQ ID NO: 804002 - DNA, 75 bp, synthetic construct
  source 1..75: mol_type = other DNA
attgcgctggccaccgaactggagaccgccggacaaaaatggtcactgggcttcacaccaaaattccagcgtgtt

SEQ ID NO: 804003 - DNA, 75 bp, synthetic construct
  source 1..75: mol_type = other DNA
acatcagacagtaaacgtcagtttgctgccattggtgctgaatttaatgcctggaaatgggcacagttacgtgca

SEQ ID NO: 804004 - DNA, 75 bp, synthetic construct
  source 1..75: mol_type = other DNA
aacaaaaacatgtccacctatgttgactacatcatcaaccagatcgattctgataacaaactgggcgtaggttca

SEQ ID NO: 804005 - DNA, 75 bp, synthetic construct
  source 1..75: mol_type = other DNA
gccaaaaaacgcctggcgaaatttttggaacatcctttggttggttctattgtcggcggtcttgctggttccctt

SEQ ID NO: 804006 - DNA, 75 bp, synthetic construct
  source 1..75: mol_type = other DNA
tattgccagtacacctcagactttggagattttgagcatgtatccttgacagaagagggtcagagtcgtgctata

SEQ ID NO: 804007 - DNA, 75 bp, synthetic construct
  source 1..75: mol_type = other DNA
aaaaactcaaaagaatcgtaatgttcttaagaaaataaatttacagggtaatgaaatagagatttttgaagaaag

SEQ ID NO: 804008 - DNA, 75 bp, synthetic construct
  source 1..75: mol_type = other DNA
tttaacgattctctcgatatgatcacgggctacggccctggtactaaaaaagtaaccattaatggggaagaaaaa

SEQ ID NO: 804009 - DNA, 75 bp, synthetic construct
  source 1..75: mol_type = other DNA
tttgtacgaatgttgatagctgaggcaatggctcctcaggaaaaacctgccctcccaccggaaacaccaaagccc

SEQ ID NO: 804010 - DNA, 75 bp, synthetic construct
  source 1..75: mol_type = other DNA
gtgtctgaactgtctcaattatctccacagccgctgtgggatatttttgccaaaatctgttctattcctcacccg

SEQ ID NO: 804011 - DNA, 75 bp, synthetic construct
  source 1..75: mol_type = other DNA
gggctgatgtacgccgtactcagcctgttttttggcgatccggatatgcatccggcggatttcagtctgcttgct

SEQ ID NO: 804012 - DNA, 75 bp, synthetic construct
  source 1..75: mol_type = other DNA
cgttcatcaaggcacaacgatgccagacggtttttcaatctggcatcaccttgacgctcacggcattcctttcaa

SEQ ID NO: 804013 - DNA, 75 bp, synthetic construct
  source 1..75: mol_type = other DNA
tgcttgccgggatgacatccaccgaatatgccgactggcgccgtttttaccgcacgcattattttcaggataccc

SEQ ID NO: 804014 - DNA, 75 bp, synthetic construct
  source 1..75: mol_type = other DNA
ttagccgccgcaaccgcggcaaggtgccggagaaagacgagtcgctaccgatcggcttctcgcctgccgatgtgc

SEQ ID NO: 804015 - DNA, 75 bp, synthetic construct
  source 1..75: mol_type = other DNA
gaggatgatgtcgcattaatgatggcttcagcggggatttccggaggtgtgagatatgtcccagccggttggtga

SEQ ID NO: 804016 - DNA, 75 bp, synthetic construct
  source 1..75: mol_type = other DNA
tttttaccgcacgcattattttcaggatacccaactggatatgcatttttccgggctgatgtacgctgtactcag

SEQ ID NO: 804017 - DNA, 75 bp, synthetic construct
  source 1..75: mol_type = other DNA
ccgttagcggaaacacagttaccggggcagggactgaattcaacgccgcattatctctgatcagagtgggttgca

SEQ ID NO: 804018 - DNA, 75 bp, synthetic construct
  source 1..75: mol_type = other DNA
atgttagctattatgttgcgccatttttttacgggtgttaacaaaggaggtatcaacccatggccgaaaaaaaaa

SEQ ID NO: 804019 - DNA, 75 bp, synthetic construct
  source 1..75: mol_type = other DNA
tcagccattacttcagcgatgttggcttttatcaggcggcaatcccgacctattacggcggcatcatgacctttg

SEQ ID NO: 804020 - DNA, 75 bp, synthetic construct
  source 1..75: mol_type = other DNA
caatttcgttaatcaaaccagccagacctttgatgtcattatctccgactgcaccgatcctatcggtcccggcga

SEQ ID NO: 804021 - DNA, 75 bp, synthetic construct
  source 1..75: mol_type = other DNA
aacagtgggctactggtctgaagtacgacgcgaacaacatctacctggcagcgaactacggtgaaacccgtaacg

SEQ ID NO: 804022 - DNA, 75 bp, synthetic construct
  source 1..75: mol_type = other DNA
gactggaagcaaggatcagcacagaactgcatgctatgctgaaacgcgctgcagaaatccaggtaaaaaagggcg

SEQ ID NO: 804023 - DNA, 75 bp, synthetic construct
  source 1..75: mol_type = other DNA
gccggtagctacgacgatccgcgctttaaactggtgatcgacgatggcgtcaatttcgtgaatcaaaccagccag

SEQ ID NO: 804024 - DNA, 75 bp, synthetic construct
  source 1..75: mol_type = other DNA
atggcaaaacttaccttacaagagcagttgctcaaagcaggattagtcaccagcaaaaaagcggcgaaggtcgag

SEQ ID NO: 804025 - DNA, 75 bp, synthetic construct
  source 1..75: mol_type = other DNA
tgacgtataaatcaaccgtaacgctggttaccgcgcaaattcagtttgctccggttagcgcgttcgtgtccggcg

SEQ ID NO: 804026 - DNA, 75 bp, synthetic construct
  source 1..75: mol_type = other DNA
actgcgttactatcagggcaaagaatcagaaatagctgacgccgttgaattttttagcgacaacaaagatgttat

SEQ ID NO: 804027 - DNA, 75 bp, synthetic construct
  source 1..75: mol_type = other DNA
gaaggctgcaaacgttgcctgaatcctggcggtattttcgttgcgcagaacggcgtctgctttttacagcaggaa

SEQ ID NO: 804028 - DNA, 75 bp, synthetic construct
  source 1..75: mol_type = other DNA
gtggacgtcctgctgctggataaaaccggcaccatcaccctcggtaaccgccaggcatcagagtttatccccgcg

SEQ ID NO: 804029 - DNA, 75 bp, synthetic construct
  source 1..75: mol_type = other DNA
gcattgatccgtcagtatcaggcggaaggccgtttggtggcgatgaccggcgacggcaccaatgatgctccggcg

SEQ ID NO: 804030 - DNA, 75 bp, synthetic construct
  source 1..75: mol_type = other DNA
gatcgcgatgacctgtttgccatcctgccttttatgaaaattaattcaaaggcatatctgtacaaccgtgaaaaa

SEQ ID NO: 804031 - DNA, 75 bp, synthetic construct
  source 1..75: mol_type = other DNA
cggactttattgatatacacgttcatctggcatatgcatttctggaacagaatgccccgcgtaaggcactgaacg

SEQ ID NO: 804032 - DNA, 75 bp, synthetic construct
  source 1..75: mol_type = other DNA
tgaacgataaccagggctgtttcatattttcggaaacctggtttggctcgttgctggatgagtttgaagaactga

SEQ ID NO: 804033 - DNA, 75 bp, synthetic construct
  source 1..75: mol_type = other DNA
agttaatgacatctacgatgtgccgcgcaatgtgacaatcactctggaggacggtagcgagaaagatgttcagtt

SEQ ID NO: 804034 - DNA, 75 bp, synthetic construct
  source 1..75: mol_type = other DNA
ttgctgttactccagtacttcactctgctggacggcaaaggcgttgagatgatgcgcgattatgccaataagcag

SEQ ID NO: 804035 - DNA, 75 bp, synthetic construct
  source 1..75: mol_type = other DNA
aggcccgtccgaaatcatgatggaaaacttcggtcgaccaatgctgtgccataacggcgttccgtttatcgtaaa

SEQ ID NO: 804036 - DNA, 75 bp, synthetic construct
  source 1..75: mol_type = other DNA
ctgtcatgctcattgaaaaaatactggcgtacaaccccgaagataatcagggagcacgctggttgctggggtcgg

SEQ ID NO: 804037 - DNA, 75 bp, synthetic construct
  source 1..75: mol_type = other DNA
gggtctggcgctaatcctcggcattgaccgttttatgtcagaagctcgtgcgctgactaacctggtcggtaacgg

SEQ ID NO: 804038 - DNA, 75 bp, synthetic construct
  source 1..75: mol_type = other DNA
agggggctcgctggttgttgggttcagagctgttacgcaccggcgatcatgagcgagccttcagtgtactgaaag

SEQ ID NO: 804039 - DNA, 75 bp, synthetic construct
  source 1..75: mol_type = other DNA
cagtgagacgggttatatcaacaaactcagacgccttgctcaacaggagcctgactttattgatatacacgctca

SEQ ID NO: 804040 - DNA, 75 bp, synthetic construct
  source 1..75: mol_type = other DNA
tgctgtgcggaaatttgcatccatttccacttgctgtgcggcataacttctccggctctctggatacggcagaag

SEQ ID NO: 804041 - DNA, 75 bp, synthetic construct
  source 1..75: mol_type = other DNA
cgaagagtttgacgaactgagcgatcaaaagctgaaagatgaagagatcactttcaccctcgaatcaccggaggc

SEQ ID NO: 804042 - DNA, 75 bp, synthetic construct
  source 1..75: mol_type = other DNA
ctacgtcgctgagtattacgaggtagaagagaagaaggagaaagtcttcatctaccgcgacccgctgacaggtga

SEQ ID NO: 804043 - DNA, 75 bp, synthetic construct
  source 1..75: mol_type = other DNA
atgttgcgcgcaatattgcttcatcttttgctacggttcacgagcacgggcacgtcgtgggtgacgtaaaccaga

SEQ ID NO: 804044 - DNA, 75 bp, synthetic construct
  source 1..75: mol_type = other DNA
ctctgcggtcgatcaccggctggcagagctgaccatgaacaaactttacgatcgcgttccggcttctgtctggaa

SEQ ID NO: 804045 - DNA, 75 bp, synthetic construct
  source 1..75: mol_type = other DNA
atggaagtaaaaaccaaagaagactggctgtatcagttccgtcgttgttcatcccgggagacactggaaaaagtg

SEQ ID NO: 804046 - DNA, 75 bp, synthetic construct
  source 1..75: mol_type = other DNA
acatcggctggaatcggcgttgactgtcggtgcgacagagttgcagcgattccgccttcatgctccagcacggac

SEQ ID NO: 804047 - DNA, 75 bp, synthetic construct
  source 1..75: mol_type = other DNA
gggcgggctggaaggttttatcgccaaacggacgatgctcgaaaaaatgaaggacgaaattctcgggttaccgga

SEQ ID NO: 804048 - DNA, 75 bp, synthetic construct
  source 1..75: mol_type = other DNA
tcatttgaccgactgcccgtggtgtgcgctggataatcaaggcgttatctattttattgatctcggcgaagaggt

SEQ ID NO: 804049 - DNA, 75 bp, synthetic construct
  source 1..75: mol_type = other DNA
cgcagagatgcgccggaaccctatcgacgttctcttccgacccaaagacggcgctaatcctgatgcagccgatgt

SEQ ID NO: 804050 - DNA, 75 bp, synthetic construct
  source 1..75: mol_type = other DNA
ctacgcgcaagttgtcgattaccagtccggcaatgtggtcacactcaacgacattcgcggtcgctatgagtgcta

SEQ ID NO: 804051 - DNA, 75 bp, synthetic construct
  source 1..75: mol_type = other DNA
gggagtggtaaggctgacgaaagacgggcagcgacttcgcaacatgattatgtcgttcaacgccgacatcgtggc

SEQ ID NO: 804052 - DNA, 75 bp, synthetic construct
  source 1..75: mol_type = other DNA
gagtccagcttccacgacgtgattgatctgttttccctccgcagtcccctggtggccacactcgatgacgtgctg

SEQ ID NO: 804053 - DNA, 75 bp, synthetic construct
  source 1..75: mol_type = other DNA
ctctcttcgaccgtaatgaactggttgcactggccgttgaagcgggcatggcaaaaatcgacgctgaagccgctc

SEQ ID NO: 804054 - DNA, 75 bp, synthetic construct
  source 1..75: mol_type = other DNA
atggcgagatttatgcctcaatggtcaacgatatttatgacgttcctcgccatgtaacgctgacacttgaagatg

SEQ ID NO: 804055 - DNA, 75 bp, synthetic construct
  source 1..75: mol_type = other DNA
atgaacgatagattatgctttgaagtgcacgataacaagggttatttcgtatttccggatacctggtttggccca

SEQ ID NO: 804056 - DNA, 75 bp, synthetic construct
  source 1..75: mol_type = other DNA
gcgggtagttttgcaaccagcgttgtcagggaacttatcaacacaacaggtgattatgcgcatattgctgagtaa

SEQ ID NO: 804057 - DNA, 75 bp, synthetic construct
  source 1..75: mol_type = other DNA
ttgtagttcctagtatcagcgttattattaacgtaacgaaggatagttttaatctttttttaacatctgcaatta

SEQ ID NO: 804058 - DNA, 75 bp, synthetic construct
  source 1..75: mol_type = other DNA
gtactatacttatcagcttatacactaacatttaatgaatttttagtttgtcaatggttctatcaagcaattgaa

SEQ ID NO: 804059 - DNA, 75 bp, synthetic construct
  source 1..75: mol_type = other DNA
tttttacatgaagatggttttttagaaaatgaggatattaaagactcagcattaatactaagtaaaacaaaaact

SEQ ID NO: 804060 - DNA, 75 bp, synthetic construct
  source 1..75: mol_type = other DNA
ctggtaagcaattattttgaccgttttggtgagtacaaccctgatgatgtggtgaaatctctgaccaccacgtta

SEQ ID NO: 804061 - DNA, 75 bp, synthetic construct
  source 1..75: mol_type = other DNA
tgcctggtagcggcgagtggggaactcaacgcgaggcactggcattcgaacaagcggctgttgctgaagaaaccg

SEQ ID NO: 804062 - DNA, 75 bp, synthetic construct
  source 1..75: mol_type = other DNA
tactttatcgatctggcgcaaaaagagatgcaggaaacgcttgaaacattgccgtcgcgtgatctggcgtacttt

SEQ ID NO: 804063 - DNA, 75 bp, synthetic construct
  source 1..75: mol_type = other DNA
atgaattacgaattactgaccactgaaaatgccccggtaaaaatgtggaccaaaggcgtgccggtagaagacgat

SEQ ID NO: 804064 - DNA, 75 bp, synthetic construct
  source 1..75: mol_type = other DNA
gtgccggtagaagccgatgcgcgtcagcaacttattaatacggcgaagatgccgtttattttcaaacatattgcg

SEQ ID NO: 804065 - DNA, 75 bp, synthetic construct
  source 1..75: mol_type = other DNA
ataaaccagagcaattaaatgaaatatgttctgccataataattgccaaaactttaatttggttatttattactt

SEQ ID NO: 804066 - DNA, 75 bp, synthetic construct
  source 1..75: mol_type = other DNA
atgcttaatcgcctgaaaaaactgcttcccggtaacagcaataccagcagtactgagacaaccaccccggaaacc

SEQ ID NO: 804067 - DNA, 75 bp, synthetic construct
  source 1..75: mol_type = other DNA
ctcaagactcaagactcaagactcaagactcaagactcaagactcgttttccattgatgataatgggtcaggtaa

SEQ ID NO: 804068 - DNA, 75 bp, synthetic construct
  source 1..75: mol_type = other DNA
cgatggtgaagttattgaagggggtgcatcggtcgatgaaagcgccatcaccggggaatcggcaccggtgatccg

SEQ ID NO: 804069 - DNA, 75 bp, synthetic construct
  source 1..75: mol_type = other DNA
cagtggtgaaatcatctggatgcatcccgaaaaccgcccttatctgcgcgcgctttatgcaacaattctcgcaaa

SEQ ID NO: 804070 - DNA, 75 bp, synthetic construct
  source 1..75: mol_type = other DNA
atgaacaatatatttatttttgaaccaagcaataaaaacaaccctcacgataatgttattaagtttatcgagttt

SEQ ID NO: 804071 - DNA, 75 bp, synthetic construct
  source 1..75: mol_type = other DNA
ggctatccgggatgcacttgaggacggcgatccccgcaccgccgggctggctgaacagctggcgaacggctatgt

SEQ ID NO: 804072 - DNA, 75 bp, synthetic construct
  source 1..75: mol_type = other DNA
cggtgtcgatgcgctgactcatgccatcgaggggtatattacgcgtggtgcgtgggcgctgaccgatgcgttgca

SEQ ID NO: 804073 - DNA, 75 bp, synthetic construct
  source 1..75: mol_type = other DNA
cgggtgtcgatgcgctgactcacgctattgaggggtatattacccgtggcgcgtgggcgctgaccgatgcgttgc

SEQ ID NO: 804074 - DNA, 75 bp, synthetic construct
  source 1..75: mol_type = other DNA
agataatatctttgaaaattgcgaggatggtgaagacgacgttgaaagtcaggaactgcagcaaaatttgcgcaa

SEQ ID NO: 804075 - DNA, 75 bp, synthetic construct
  source 1..75: mol_type = other DNA
gcctgctggataccgcgcttgccggaaagctggcggctgatcgggggcgagcaggcgcagtgtcgggcgcagatt

SEQ ID NO: 804076 - DNA, 75 bp, synthetic construct
  source 1..75: mol_type = other DNA
cagtattgacgcagaagcagaagccgagcgcgtggtggagacaaacaatggcccgatgctgatagcgtctccgtc

SEQ ID NO: 804077 - DNA, 75 bp, synthetic construct
  source 1..75: mol_type = other DNA
gcggtcacttccctaccgatgttgatcaaaaagtcgatcaggttgcgcgtcagggagccacgccgctggtggtgg

SEQ ID NO: 804078 - DNA, 75 bp, synthetic construct
  source 1..75: mol_type = other DNA
atggacgaaatgaatttaggtcctgaagcacaggaactgcatgacagcattgtggcagaaattcagtccggagtg

SEQ ID NO: 804079 - DNA, 75 bp, synthetic construct
  source 1..75: mol_type = other DNA
aagcacaggaactgcgtgacagtattgtggctgagcttcagtccggtggtctgaaactgaaagacggcctgccgt

SEQ ID NO: 804080 - DNA, 75 bp, synthetic construct
  source 1..75: mol_type = other DNA
gatctctcccgtctgatggcggcggtaagcctgcttgattccgcgatggccggaaagctggtcgctgaacggggg

SEQ ID NO: 804081 - DNA, 75 bp, synthetic construct
  source 1..75: mol_type = other DNA
tcaggggccggtggatctcttcctgcgcccgtgggaagtggatatcagccgccgtaccagcctcgattcgccgct

SEQ ID NO: 804082 - DNA, 75 bp, synthetic construct
  source 1..75: mol_type = other DNA
tgcttgatgaaccgtttggcgcgctggatgcgcaggtgcgcaaagagctgcgtcgctggctgcgtcagttgcatg

SEQ ID NO: 804083 - DNA, 75 bp, synthetic construct
  source 1..75: mol_type = other DNA
cgtgacccacgaccaggaagaggcgaccgaagtagccgatcgtgtagtggtgatgagtcaggggaatattgaaca

SEQ ID NO: 804084 - DNA, 75 bp, synthetic construct
  source 1..75: mol_type = other DNA
agaagtcttttggtctcacccaggtgctgaacgatatctcactggatattccttctggtcagatggtcgcattgc

SEQ ID NO: 804085 - DNA, 75 bp, synthetic construct
  source 1..75: mol_type = other DNA
gctgaacgatatctcactggatattccttctggtcagatggtcgcgttgctggggccgtccggttccgggaaaac

SEQ ID NO: 804086 - DNA, 75 bp, synthetic construct
  source 1..75: mol_type = other DNA
tgcttgatgaaccgtttggcgcgctggatgcgcaggtgcgtaaggagctgcgtcgctggctgcgtcaactgcatg

SEQ ID NO: 804087 - DNA, 75 bp, synthetic construct
  source 1..75: mol_type = other DNA
gtttggcataggcgaccaattattttacggcgatcctagtataatgaaaaagctgatgtgtgtccatggtttaga

SEQ ID NO: 804088 - DNA, 75 bp, synthetic construct
  source 1..75: mol_type = other DNA
cgtaaaattttgccttccattaccctgaaagaggtgctggcctatcgcgacgccttaaaaacgggggcaaagccc

SEQ ID NO: 804089 - DNA, 75 bp, synthetic construct
  source 1..75: mol_type = other DNA
ttgagcaggcgaaatcctggtataaccagatgatggattctgcagaaaagggtaaagcgttcgagcaggccatta

SEQ ID NO: 804090 - DNA, 75 bp, synthetic construct
  source 1..75: mol_type = other DNA
agatgactgtcgcactgcgtgaaacaagtgtagggcaaggtgttccaggcaagtttcgcgcactggcaactttta

SEQ ID NO: 804091 - DNA, 75 bp, synthetic construct
  source 1..75: mol_type = other DNA
gatggcaataataactacactttgagaatccctaagatgggcctggataagatcacgaataaaacgacagaatct

SEQ ID NO: 804092 - DNA, 75 bp, synthetic construct
  source 1..75: mol_type = other DNA
taaaaagtagaatatctgtaattgatgactttatttcaagtaatgtttcattaaatacaaacaggcaaatagctt

SEQ ID NO: 804093 - DNA, 75 bp, synthetic construct
  source 1..75: mol_type = other DNA
ccttcaggccagatggtcgcgctgctggggccgtccggttccgggaaaaccacgctgctgcgtattattgccggg

SEQ ID NO: 804094 - DNA, 75 bp, synthetic construct
  source 1..75: mol_type = other DNA
ttggcgcagagctaaagagcggcattgagattgtgacgacggcgctcaatctggaagaacatattcatgattgct

SEQ ID NO: 804095 - DNA, 75 bp, synthetic construct
  source 1..75: mol_type = other DNA
agttgggggatctccggcgatggcaaaaccgcgtttattgaaatggcggcggccagtgggctggagctggtacct

SEQ ID NO: 804096 - DNA, 75 bp, synthetic construct
  source 1..75: mol_type = other DNA
catatcattttggcggcaaatcccgacatcaaagaatttcaaaaattaatgaaagcctgccctgccggactttat

SEQ ID NO: 804097 - DNA, 75 bp, synthetic construct
  source 1..75: mol_type = other DNA
aagaattagggatctcccgcgcccagtttgaccagtttttgcgcatgatgcagggcggtgcacagtttggcggcg

SEQ ID NO: 804098 - DNA, 75 bp, synthetic construct
  source 1..75: mol_type = other DNA
atgataaaaacaacgccacataaaatagtgatactgatgggaatattattatcaccctcagtatttgcaacggat

SEQ ID NO: 804099 - DNA, 75 bp, synthetic construct
  source 1..75: mol_type = other DNA
cttacaaagaaagtttatctgccagcgaggttgcgcaggcgatagaaaagggatttcgggaaatttttcctgatg

SEQ ID NO: 804100 - DNA, 75 bp, synthetic construct
  source 1..75: mol_type = other DNA
cgcgaaccagcgacccgttttgtgctcgaatttatgggcgaagtgaaccgcctgcagggaaccattcgcggcggg

SEQ ID NO: 804101 - DNA, 75 bp, synthetic construct
  source 1..75: mol_type = other DNA
cgctgttccgccatatgacggtgttcgacaatatcgccttcggcctgacggtgctgccgcgtcgcgagcgcccga

SEQ ID NO: 804102 - DNA, 75 bp, synthetic construct
  source 1..75: mol_type = other DNA
atcgtctattcgttggtctgcaacatgcacggttgtataacggtgctcagcgtattgaaacccgcgatgaagaac

SEQ ID NO: 804103 - DNA, 75 bp, synthetic construct
  source 1..75: mol_type = other DNA
atgagccagaacgctacggttaacgtcgacatcaaattaggcgtcaataaattccatgttgatgagggccacccg

SEQ ID NO: 804104 - DNA, 75 bp, synthetic construct
  source 1..75: mol_type = other DNA
tgacaatactgatgggtatattattttcaccttcagtatttgctacagatattaatgttgatttcaccgcaacgg

SEQ ID NO: 804105 - DNA, 75 bp, synthetic construct
  source 1..75: mol_type = other DNA
cgctgttccgccatatgacggtattcgacaatatcgcttttggcctgacggtgctaccgcgtcgcgagcgcccga

SEQ ID NO: 804106 - DNA, 75 bp, synthetic construct
  source 1..75: mol_type = other DNA
ataaaggtctggcgaatcgcgatcaggttgtggcggccatttttagctacctcaatctgttacgtgaaaaaggga

SEQ ID NO: 804107 - DNA, 75 bp, synthetic construct
  source 1..75: mol_type = other DNA
actccggatggctgaaacgacgccttttttattgcaccactccctttttctcttccttactggctcttcacaaag

SEQ ID NO: 804108 - DNA, 75 bp, synthetic construct
  source 1..75: mol_type = other DNA
gtgtctgttttgtttgaggctatgaaaggctatctgcaggatggtagctggaaagcgggttacaaacttccttca

SEQ ID NO: 804109 - DNA, 75 bp, synthetic construct
  source 1..75: mol_type = other DNA
ttgcatgattacaatcatttttgtgactttattgagtttaaacacaaaaatattattatgaacacaagtcagtac

SEQ ID NO: 804110 - DNA, 75 bp, synthetic construct
  source 1..75: mol_type = other DNA
tatgttctgttctacaatttcccgcagtttatggccgatccgctgtatctgttccgtgtctgggacggcggcatg

SEQ ID NO: 804111 - DNA, 75 bp, synthetic construct
  source 1..75: mol_type = other DNA
gcttctgtttcttcatgcctgtcatttgtctgttactgatgatgttgttgttcctgctactgctactgttcttct

SEQ ID NO: 804112 - DNA, 75 bp, synthetic construct
  source 1..75: mol_type = other DNA
ctccgggtggctgaagcgacgtcttttttattatacaactccttttttctcttccttactggctcttcataaagg

SEQ ID NO: 804113 - DNA, 75 bp, synthetic construct
  source 1..75: mol_type = other DNA
gtcgaggatggtgtcattgtggaacgcggtacgcacgacgatttgcttgagcaccgtggtgtctatgcgcaactt

SEQ ID NO: 804114 - DNA, 75 bp, synthetic construct
  source 1..75: mol_type = other DNA
tatccgggacgtgacgtacccgcattgcgtaacatcaacctgaaaattccggcagggaaaacggtcgctctggtt

SEQ ID NO: 804115 - DNA, 75 bp, synthetic construct
  source 1..75: mol_type = other DNA
tatggctgtccgggaatgccgagtggcgttcagtgtatgtcagcgagagatgtttattccgcaactaatgacgga

SEQ ID NO: 804116 - DNA, 75 bp, synthetic construct
  source 1..75: mol_type = other DNA
tgcgtgctccagatggaattgcagtacatgttgatcgtcgtaatgacagtgtaaatattgaaaatggtgcaataa

SEQ ID NO: 804117 - DNA, 75 bp, synthetic construct
  source 1..75: mol_type = other DNA
gtacctatctaccgtttggatacatccattttatcgcaggagagggttattaagtaagttatggccaaaattaca

SEQ ID NO: 804118 - DNA, 75 bp, synthetic construct
  source 1..75: mol_type = other DNA
cagcatcgaatttcgaaaatgcttacagatatctagttccacaaggttcaaatcaggagatgcgttcgaaagtta

SEQ ID NO: 804119 - DNA, 75 bp, synthetic construct
  source 1..75: mol_type = other DNA
tccttccacggcggtctgattggcgtgattgtggtgatgattatcttcgcccgccgcaccaaacgttccttcttc

SEQ ID NO: 804120 - DNA, 75 bp, synthetic construct
  source 1..75: mol_type = other DNA
cgatgaatacaccagctcagcctatagctcactgttggggcagatcgtacagccgtggttctacaatcagttgcg

SEQ ID NO: 804121 - DNA, 75 bp, synthetic construct
  source 1..75: mol_type = other DNA
ctgatccgcaggcagttaaatcgctctcggcgctggtggtgcccgttgggtcgctggaagatcccgaggcgtacc

SEQ ID NO: 804122 - DNA, 75 bp, synthetic construct
  source 1..75: mol_type = other DNA
ccggagcttaacccctatattcctgacgatttctcgctgattaagtcagagaagaaatacgaccatccagagctg

SEQ ID NO: 804123 - DNA, 75 bp, synthetic construct
  source 1..75: mol_type = other DNA
ggccttatggttaatgccaatggttacacccagcgcctgccgcagctgttccaggctctgctggagggctacttt

SEQ ID NO: 804124 - DNA, 75 bp, synthetic construct
  source 1..75: mol_type = other DNA
tcagcccgaaagagccgcacaacaaaacggcttactttgtcgatgcgccgtatcaggtcgataaaattagcgcac

SEQ ID NO: 804125 - DNA, 75 bp, synthetic construct
  source 1..75: mol_type = other DNA
cgcaccgctttctatctggaagtggaaaatgatgccttgcctggtgcagtagaccgcctggccgatgccatcgct

SEQ ID NO: 804126 - DNA, 75 bp, synthetic construct
  source 1..75: mol_type = other DNA
aaggtaaattttacgcactgccgcaatccccgcaattgttcaagcagttgctgatgatgtctggttttgaccgtt

SEQ ID NO: 804127 - DNA, 75 bp, synthetic construct
  source 1..75: mol_type = other DNA
tggtctgaccgacgaaagcaaatgggcaccgctgtgggttatcgacttcccgatgtttgaagacgacggtgaagg

SEQ ID NO: 804128 - DNA, 75 bp, synthetic construct
  source 1..75: mol_type = other DNA
cagcctgaatttactcagatcgatgtggaaacttctttcatgaccgcgccgcaagtgcgtgaagtgatggaagcg

SEQ ID NO: 804129 - DNA, 75 bp, synthetic construct
  source 1..75: mol_type = other DNA
ttcacctcaccgaaagacatgacggcagcagaactgaaagctgcaccggaaaatgcggtggctaacgcttacgat

SEQ ID NO: 804130 - DNA, 75 bp, synthetic construct
  source 1..75: mol_type = other DNA
ttatggttctgataaaccggatctgcgtaacccgatggaactgaccgacgttgctgatctgctgaaatctgttga

SEQ ID NO: 804131 - DNA, 75 bp, synthetic construct
  source 1..75: mol_type = other DNA
tctttcatgaccgcgccgcaagtgcgtgaagtgatggaagcgctggtgcgtcatttgtggctggaagtgaagggc

SEQ ID NO: 804132 - DNA, 75 bp, synthetic construct
  source 1..75: mol_type = other DNA
gcattgcttctcttttttctcaggctgcgttcgcagcagaatcggacattgccgacgggcaaacccagcgttttg

SEQ ID NO: 804133 - DNA, 75 bp, synthetic construct
  source 1..75: mol_type = other DNA
gcattgcttctcttttttctcaggcggcattcgcggcagattctgatattgccgacgggcaaacccagcgttttg

SEQ ID NO: 804134 - DNA, 75 bp, synthetic construct
  source 1..75: mol_type = other DNA
aacaaattttcagtaaccaatatgaattgcaatctaccggtgcgaaaaatgtgggagttgtcattttttcggctc

SEQ ID NO: 804135 - DNA, 75 bp, synthetic construct
  source 1..75: mol_type = other DNA
cagtggtgaagcgaaacaaatagaaattctctacattgagccgattgatggttaccgtattcagtttgactggta

SEQ ID NO: 804136 - DNA, 75 bp, synthetic construct
  source 1..75: mol_type = other DNA
cgcaaatccatgactccgaccgtctttccatgtggcggggtaatggtgagtggatctgccgtccgctgaataacc

SEQ ID NO: 804137 - DNA, 75 bp, synthetic construct
  source 1..75: mol_type = other DNA
gatacatatcaatacggtttgtcggctcgcggcctggcgatcgacacttacaccgacagtaaagaagagttcccc

SEQ ID NO: 804138 - DNA, 75 bp, synthetic construct
  source 1..75: mol_type = other DNA
cttatggggcgggattttcctgtcgacgttgtgatgtatccccgcagggatactatttgtacgggagggcagaat

SEQ ID NO: 804139 - DNA, 75 bp, synthetic construct
  source 1..75: mol_type = other DNA
gggtggaaacctgcccgtttaataaggctgaagaagtcctgcagggaagtcagtgtacggaagccggagggaaca

SEQ ID NO: 804140 - DNA, 75 bp, synthetic construct
  source 1..75: mol_type = other DNA
ggcagggcattggtctggcacactgcgacagcgaagagaaggcgctgggaaaagccaaagagaaactgctcaccg

SEQ ID NO: 804141 - DNA, 75 bp, synthetic construct
  source 1..75: mol_type = other DNA
ttattccagaatgcaacgtgttgataactctctcgcacctgtagctggtattgtgagaagtcaggttattgttaa

SEQ ID NO: 804142 - DNA, 75 bp, synthetic construct
  source 1..75: mol_type = other DNA
atgctatgcaggcatcataaatttgtacgctttttggggctggtaacagccctcgttacgccttttgcctatgct

SEQ ID NO: 804143 - DNA, 75 bp, synthetic construct
  source 1..75: mol_type = other DNA
acgataaaattgctatcaagtcagaaggtaaaaaacgttgccgccagttcgtcaaaaaagcgaggatgctaaaga

SEQ ID NO: 804144 - DNA, 75 bp, synthetic construct
  source 1..75: mol_type = other DNA
cggcaaaatgcatcaaggttaaaattgacgacaaggtaactgataagttctacagagcaactgctacactggata

SEQ ID NO: 804145 - DNA, 75 bp, synthetic construct
  source 1..75: mol_type = other DNA
acgagcactatttcacgcaaactccgcaaattatcaaggttgatacgggttcacaggtcgtcaacaatggtgatg

SEQ ID NO: 804146 - DNA, 75 bp, synthetic construct
  source 1..75: mol_type = other DNA
ccggaacccgcattacgggtgatgatgcgacggccaacaacagcggcaataccaccgtagacggtcagggttcga

SEQ ID NO: 804147 - DNA, 75 bp, synthetic construct
  source 1..75: mol_type = other DNA
aacgacggtgacagtgccatcagtaacggcggcaccggcacgcagattaacggtgatgaagccaccgtaaacaat

SEQ ID NO: 804148 - DNA, 75 bp, synthetic construct
  source 1..75: mol_type = other DNA
gtttcggaagagatccgtcgttcaactagagagcatagagatcaaggtgagataagacacggtggaacagagctg

SEQ ID NO: 804149 - DNA, 75 bp, synthetic construct
  source 1..75: mol_type = other DNA
cttttgttactggtgaaaatacaacaggtataaatagtggcacgatctcgttattacaaaatggtaaagatccgg

SEQ ID NO: 804150 - DNA, 75 bp, synthetic construct
  source 1..75: mol_type = other DNA
atgactgtcaccgatcctgactccatcggtattcagatcgacggcgacaaggcggttgtcaataacgacggtgac

SEQ ID NO: 804151 - DNA, 75 bp, synthetic construct
  source 1..75: mol_type = other DNA
aggaacggcatcacatcacgatgcgacggctggaatgttccaggaaggcacagaggccaccggagccgccggata

SEQ ID NO: 804152 - DNA, 75 bp, synthetic construct
  source 1..75: mol_type = other DNA
acaaaacagagtttgttgctacatcgattatattcagatgaagtacttcagagaaatggaacgcttatcccgaca

SEQ ID NO: 804153 - DNA, 75 bp, synthetic construct
  source 1..75: mol_type = other DNA
agttatcaattcgttacttacccaatatcagctcaatctcattaatagagacaaaacagagtttgttgctacatc

SEQ ID NO: 804154 - DNA, 75 bp, synthetic construct
  source 1..75: mol_type = other DNA
tcgtcgacggcaaaggcgccaccggaactgaagaaactgcgtcacacactggaaggtggctatcaggaacgcaat

SEQ ID NO: 804155 - DNA, 75 bp, synthetic construct
  source 1..75: mol_type = other DNA
gaatcaggacggcacgctggacgtcagcggcggcggtcacggtattgatatcaccggcgacagcgccacggtgga

SEQ ID NO: 804156 - DNA, 75 bp, synthetic construct
  source 1..75: mol_type = other DNA
tcttaattttatttggcagttttgccgtcatgctggcaatcggtgtgccaattacttttgcgattggtctttctt

SEQ ID NO: 804157 - DNA, 75 bp, synthetic construct
  source 1..75: mol_type = other DNA
tgtgtatatgaaggatccggcctgtacggtatcgcgcgtgaactgccaggaaaagagcggcagtgcctgtctgca

SEQ ID NO: 804158 - DNA, 75 bp, synthetic construct
  source 1..75: mol_type = other DNA
aagcgcactttgctaaactgctggcaaatcaggaagaagggacacaaatccgcgtatttgtgattaaccctggca

SEQ ID NO: 804159 - DNA, 75 bp, synthetic construct
  source 1..75: mol_type = other DNA
agccgccccgaagggagcggctggagctggaaagattttgcctgggacgtagccggtgccaccaccggttatacg

SEQ ID NO: 804160 - DNA, 75 bp, synthetic construct
  source 1..75: mol_type = other DNA
aacttcattaccctgtttaccggcaacgaaaccagcgatacctggttcaacgcggcaattgcaatgaacaagccg

SEQ ID NO: 804161 - DNA, 75 bp, synthetic construct
  source 1..75: mol_type = other DNA
gctttgccggagaagaaattcgctcgctgccagtactggagttgcgccgccggatgggctatgccattcaatcta

SEQ ID NO: 804162 - DNA, 75 bp, synthetic construct
  source 1..75: mol_type = other DNA
gaagggagtttttcggtgctgattggcacatctggctccggcaaatccaccaccctgaaaatgattaaccgcctg

SEQ ID NO: 804163 - DNA, 75 bp, synthetic construct
  source 1..75: mol_type = other DNA
aagcgcactttgccaaactgctggcaaaccaggaagaagggacacaaatccgcgtatttgtgattaaccctggca

SEQ ID NO: 804164 - DNA, 75 bp, synthetic construct
  source 1..75: mol_type = other DNA
atggcaggcggaaatgcagcgcaaggaagacgaggagcgcgcgcgtgaacgccagcagcagaatgcaaaccattc

SEQ ID NO: 804165 - DNA, 75 bp, synthetic construct
  source 1..75: mol_type = other DNA
aatggtatcaggaaatcgctcaggcattatggtatccgtacttttttgctgcattccctttaattttattttgct

SEQ ID NO: 804166 - DNA, 75 bp, synthetic construct
  source 1..75: mol_type = other DNA
taactggcagcaagcgcagcgtggcccgacactggaagatgcctgtaacgtgctgggcgtgaagccgacggacga

SEQ ID NO: 804167 - DNA, 75 bp, synthetic construct
  source 1..75: mol_type = other DNA
acaggcctgaccatcgagcaggttaaagatatcaaccgtcgtatgtccatcggtgaagcaaaagcccgccgtgcg

SEQ ID NO: 804168 - DNA, 75 bp, synthetic construct
  source 1..75: mol_type = other DNA
ctggcaggcggaaatgcagcgcaaggaagacgaggagcgcgagcgtgaacgccggcagcagaatgcaaaacattc

SEQ ID NO: 804169 - DNA, 75 bp, synthetic construct
  source 1..75: mol_type = other DNA
ttgcgcgagaaactggaggaaatatcaggcctcatcgttccggatatttccatcacaaccggcagtaatatgact

SEQ ID NO: 804170 - DNA, 75 bp, synthetic construct
  source 1..75: mol_type = other DNA
gctgccagtactggagttgcgccgccggatgggctatgccattcaatctattggcctgtttccccactggagcgt

SEQ ID NO: 804171 - DNA, 75 bp, synthetic construct
  source 1..75: mol_type = other DNA
ttagttaccgatggacgactctccggcgcttcaggtaaagtgccgtcagctatccacgtaacaccagaagcctac

SEQ ID NO: 804172 - DNA, 75 bp, synthetic construct
  source 1..75: mol_type = other DNA
atggcaagcggtttgccaaataaagaaaaagtgcgtattcgccagctttatgccgaaggtaaagtggaccgcatg

SEQ ID NO: 804173 - DNA, 75 bp, synthetic construct
  source 1..75: mol_type = other DNA
gccaacagcctgcactgccagcggctggccgtggattttaatctgtttattaacggtgaatatcagacccgcaca

SEQ ID NO: 804174 - DNA, 75 bp, synthetic construct
  source 1..75: mol_type = other DNA
ctcgagagtgcaggtgccagcgccctgaataattcggaagtgggaaaactgacgtcagaagtcatcatgaatcgc

SEQ ID NO: 804175 - DNA, 75 bp, synthetic construct
  source 1..75: mol_type = other DNA
tgccatccagtgaggttaatggtcagtatgttgtctccattccttctcctgttactggcgaaattatcagcgctc

SEQ ID NO: 804176 - DNA, 75 bp, synthetic construct
  source 1..75: mol_type = other DNA
ctgtaactgatttaactaaagaaatcgataaattaaagaaaattgccaaagatcttgaagatgtattaccagaaa

SEQ ID NO: 804177 - DNA, 75 bp, synthetic construct
  source 1..75: mol_type = other DNA
gtcagacagttgcacttgccggctccacctggaatgttaccggtgattcttctgttcttggcgtcactgctgtaa

SEQ ID NO: 804178 - DNA, 75 bp, synthetic construct
  source 1..75: mol_type = other DNA
aatggcgctactggggctggagccgaatttgcgtgagcgttatccgcatcagctttccggcggtcagcagcaacg

SEQ ID NO: 804179 - DNA, 75 bp, synthetic construct
  source 1..75: mol_type = other DNA
ccggcgaatgattttgtccgccagttttttggtcgtagtgagctgggtgtacgcctgctttcgttacgtagcgtg

SEQ ID NO: 804180 - DNA, 75 bp, synthetic construct
  source 1..75: mol_type = other DNA
tctaacagtctgcacacccagcgtctggccgtggattttaatctgtttgtgaatggccagtaccagacccgtaca

SEQ ID NO: 804181 - DNA, 75 bp, synthetic construct
  source 1..75: mol_type = other DNA
atgaaactgagtgaaaaacagcaacttttcacggtgatgatcgccaacctgattcattttgccgaagaaaagggt

SEQ ID NO: 804182 - DNA, 75 bp, synthetic construct
  source 1..75: mol_type = other DNA
atttcttcaacaggcgatgttgttgttaatggcggtaactttgttgcaaaaaatgaaaaaggtagtgcgacaggg

SEQ ID NO: 804183 - DNA, 75 bp, synthetic construct
  source 1..75: mol_type = other DNA
ccattaatatatggggaggtggttaatgttttatggctttttttctgcaaaaattctaatgtgatagtggattat

SEQ ID NO: 804184 - DNA, 75 bp, synthetic construct
  source 1..75: mol_type = other DNA
tataggtgataaactctggctggtacaatttataccattaatatatggggaggtggttaatgttttatggctttt

SEQ ID NO: 804185 - DNA, 75 bp, synthetic construct
  source 1..75: mol_type = other DNA
aacggcgtggatatgcgcgacatacggatcagattctttgagttgctggcataccgtcgccgttctcaacaacga

SEQ ID NO: 804186 - DNA, 75 bp, synthetic construct
  source 1..75: mol_type = other DNA
ccaacgccctacttcattaccgtaacaaatatgaaagcaggaaatagcaatctgcaggaaaatcaaactatgcat

SEQ ID NO: 804187 - DNA, 75 bp, synthetic construct
  source 1..75: mol_type = other DNA
ttacgccacaaaatgatcctgatcaggtggccccggtcgctccagaaccaatacaggaaggccagccagaagagc

SEQ ID NO: 804188 - DNA, 75 bp, synthetic construct
  source 1..75: mol_type = other DNA
ttaatactgaacgtcaaatatatttggatcaacagttctttgtcgatgtttttccaatacctgtttgtataagaa

SEQ ID NO: 804189 - DNA, 75 bp, synthetic construct
  source 1..75: mol_type = other DNA
cgccgcgtggagatgtatcgggagaaggagaaaatcacgtaccactggaagaagccggagcggttacggcggtaa

SEQ ID NO: 804190 - DNA, 75 bp, synthetic construct
  source 1..75: mol_type = other DNA
gcaacatacggatccgcgttctggaaatgctggcataccgtcgccgcgtggagatgtatcgggagaaggaaaaat

SEQ ID NO: 804191 - DNA, 75 bp, synthetic construct
  source 1..75: mol_type = other DNA
actgcgattaatccgtcgcgttgccggaatcagccagcaggctgacgaacaggccacgcagccggacagcgtgac

SEQ ID NO: 804192 - DNA, 75 bp, synthetic construct
  source 1..75: mol_type = other DNA
taatccgccgtgcttgtggaatcagcaagcagcatgacgaacaggccacgcagccggacagcgtgatcgacgaaa

SEQ ID NO: 804193 - DNA, 75 bp, synthetic construct
  source 1..75: mol_type = other DNA
ggatccgcgttcttgaaatgctggcctaccgtcgccgcgtgcagacgtacagggaaaaagcaaaaattacgtacc

SEQ ID NO: 804194 - DNA, 75 bp, synthetic construct
  source 1..75: mol_type = other DNA
ggcctacaatcgccgcgtggagatgtaccgggagaaagaaaaaattacttaccactggaagaagccggagcggtt

SEQ ID NO: 804195 - DNA, 75 bp, synthetic construct
  source 1..75: mol_type = other DNA
ccacaccggcagcacaggcgctggctgatgcgttgcttgtaatcaaagatatgtacaagaaacagttacgaaaag

SEQ ID NO: 804196 - DNA, 75 bp, synthetic construct
  source 1..75: mol_type = other DNA
aaggctgggaaataagggatggaaaggcattacaaaagcgaatagaaaaatatccagctatattgatgggtaaag

SEQ ID NO: 804197 - DNA, 75 bp, synthetic construct
  source 1..75: mol_type = other DNA
tatcttcaccagaaggtgattatttaaatgaggagcagaaaaaacgattaaacatcccacaagtggaatcagaaa

SEQ ID NO: 804198 - DNA, 75 bp, synthetic construct
  source 1..75: mol_type = other DNA
gaaaggcagggaattttcaacgttgatgtcattcgtcacgggacgtctaagcttgtacggcgaaaaactggtggc

SEQ ID NO: 804199 - DNA, 75 bp, synthetic construct
  source 1..75: mol_type = other DNA
tccttttgtgcgacccgcttacgatacgcgcgaggaagaggccgccagcgtcgccattgccaggatgaatcaggc

SEQ ID NO: 804200 - DNA, 75 bp, synthetic construct
  source 1..75: mol_type = other DNA
cagtaaagcgggtatttaccaaccttactataaaataaatctatcaaaagccagaatatcaagcattgattttgt

SEQ ID NO: 804201 - DNA, 75 bp, synthetic construct
  source 1..75: mol_type = other DNA
ggcgacgctggcggaacttactgccgtgaccatttctgaacaggtattattgagtggcggctgcgatcgtttgat

SEQ ID NO: 804202 - DNA, 75 bp, synthetic construct
  source 1..75: mol_type = other DNA
gtgcagaccctgcgtgagatgaacgccgacaacctgcgcaaggtgccggccgatgcacccacggccttcatcaag

SEQ ID NO: 804203 - DNA, 75 bp, synthetic construct
  source 1..75: mol_type = other DNA
ggcgattacgtctggcggcagagccgcagactggaagacgggaagtttcggcccttacggatgcccggaaaacct

SEQ ID NO: 804204 - DNA, 75 bp, synthetic construct
  source 1..75: mol_type = other DNA
atgaccgcatcctggtcaagctgttcagcggcgcgaagcacaagcatcagcagcagttccagaagcagggcaagg

SEQ ID NO: 804205 - DNA, 75 bp, synthetic construct
  source 1..75: mol_type = other DNA
aggattacgctatataattgtttttcagaataaaagtcaggtttgctctgatgactgttatggacccgcaggggg

SEQ ID NO: 804206 - DNA, 75 bp, synthetic construct
  source 1..75: mol_type = other DNA
aaatgaggagcagaaaaaacgattaaacatcccacaagtggaatcagaaagggaatcttatgaagataatgatta

SEQ ID NO: 804207 - DNA, 75 bp, synthetic construct
  source 1..75: mol_type = other DNA
tgacaacgctccgcgccccgggagtgagcaattgatggcggtaatggatacactgaatgctaaagagggcagagg

SEQ ID NO: 804208 - DNA, 75 bp, synthetic construct
  source 1..75: mol_type = other DNA
aagaccgcgcgccgctggcgctgaaaggggccgcgctcacgcgccgcccctttcattacgcggacgttctgctgt

SEQ ID NO: 804209 - DNA, 75 bp, synthetic construct
  source 1..75: mol_type = other DNA
ctgggttgcaccggtggtgaagaagacggcgtagacaacagccacatggacgcttctgcactgtacacccagccg

SEQ ID NO: 804210 - DNA, 75 bp, synthetic construct
  source 1..75: mol_type = other DNA
accttgagcagagcaatatcacgctgattgagttaggccaggactaccaccagcggaaagctgaattaattcgtc

SEQ ID NO: 804211 - DNA, 75 bp, synthetic construct
  source 1..75: mol_type = other DNA
gcagagcaatatcacgctgattgagttaggccaggactaccaccagcggaaagctgaattaattcgcctttcgca

SEQ ID NO: 804212 - DNA, 75 bp, synthetic construct
  source 1..75: mol_type = other DNA
ttcccgcatcaggccgcgacccaggttattgctgaactggagccgttcgaccgcgaactgtttggcggcattgtg

SEQ ID NO: 804213 - DNA, 75 bp, synthetic construct
  source 1..75: mol_type = other DNA
gcgtgattctcaggaatatgtttctaagaaacacaccctgccgcacaacagcctgaacttcgtattccacggtgg

SEQ ID NO: 804214 - DNA, 75 bp, synthetic construct
  source 1..75: mol_type = other DNA
tcacgttcaccagatggctgaacactatggtgttccggttatcctgcatactgaccactgtgcgaagaaactgct

SEQ ID NO: 804215 - DNA, 75 bp, synthetic construct
  source 1..75: mol_type = other DNA
tcgccaatgttgcagattcctacgccgccaattcggcgcaaggcgatgtgcgtaataccggggtgatcggctttg

SEQ ID NO: 804216 - DNA, 75 bp, synthetic construct
  source 1..75: mol_type = other DNA
agtggggatgaattatcaattatatgtccgtaactacagccggaacactaactacgagatcgttgctacggttga

SEQ ID NO: 804217 - DNA, 75 bp, synthetic construct
  source 1..75: mol_type = other DNA
atggtcgattttggcacgcatggcatgattggcgcttttaaacaggagatccagagtgctgattggctatgtaag

SEQ ID NO: 804218 - DNA, 75 bp, synthetic construct
  source 1..75: mol_type = other DNA
gcttaaccattgatacgggaaataatcagcaagtactgttcacccgccaacctgatggtaatttcatccgcgcac

SEQ ID NO: 804219 - DNA, 75 bp, synthetic construct
  source 1..75: mol_type = other DNA
gcgaagcattcactatccgtaacgtgcgggttatgcctgaatctattccggctggctttaaagcactggctgaca

SEQ ID NO: 804220 - DNA, 75 bp, synthetic construct
  source 1..75: mol_type = other DNA
atgacacagggctggcgggaggataaatgcccgtctgaccgcgccgggaaaagaccgcgcgtcggtggcgctgaa

SEQ ID NO: 804221 - DNA, 75 bp, synthetic construct
  source 1..75: mol_type = other DNA
aggatgcactgcaaaagttgaatctcaactatgcatggcttgacgctgccagcttccagacccaaatcagcgaac

SEQ ID NO: 804222 - DNA, 75 bp, synthetic construct
  source 1..75: mol_type = other DNA
gttgctggcctaccgtcgccgcgtggagatgtatcgggagaaggagaaaataacgtaccactggaagaagccgga

SEQ ID NO: 804223 - DNA, 75 bp, synthetic construct
  source 1..75: mol_type = other DNA
atttgtctgttactgatgatgttgttgttcatgctactgctactgctactgctactgctactgctactgttcttc

SEQ ID NO: 804224 - DNA, 75 bp, synthetic construct
  source 1..75: mol_type = other DNA
ctggttgcccgtgcctttgctgatgccgccaaaaaccatttacccgtcagcatcggggttatcaataaacctggc

SEQ ID NO: 804225 - DNA, 75 bp, synthetic construct
  source 1..75: mol_type = other DNA
gcaccagagttctggagatgttgtcgtaccgtcgccgcgtgcagatgtaccaagagaaagaaaaaattacttacc

SEQ ID NO: 804226 - DNA, 75 bp, synthetic construct
  source 1..75: mol_type = other DNA
atcgaagaagagttcgaagcgggacttgccctgcaaggctgggaagttaaatccctgcgcgcaggaaaagccaat

SEQ ID NO: 804227 - DNA, 75 bp, synthetic construct
  source 1..75: mol_type = other DNA
gggcctctgtcttttcagacctgtcatttgtctgttactgatgatgtggttgttcctgctactgctactgctact

SEQ ID NO: 804228 - DNA, 75 bp, synthetic construct
  source 1..75: mol_type = other DNA
atggcctgttcagcagcgagcacactcgcctctacaccagtatgtatgaccagcagattgcccaacagatgacgg

SEQ ID NO: 804229 - DNA, 75 bp, synthetic construct
  source 1..75: mol_type = other DNA
atgatcagcgacagcaaactactggcaagtgcggcctgggatgcgcaatcactcaacgaactaaaggcgaaagcg

SEQ ID NO: 804230 - DNA, 75 bp, synthetic construct
  source 1..75: mol_type = other DNA
atgacgaagaaaaaagcacataaacctggttcagcaaccatagcgctcaacaagcgcgcccgtcacgaatacttt

SEQ ID NO: 804231 - DNA, 75 bp, synthetic construct
  source 1..75: mol_type = other DNA
aaaatcggcgtcgccaaaggtaagaaacagcacgataaacgttcagacatcaaagaacgcgaatggcaggtggat

SEQ ID NO: 804232 - DNA, 75 bp, synthetic construct
  source 1..75: mol_type = other DNA
ccgccaaaaaccatttacccgtcagcatcggggttatcaataaacctggcggaggcggtgctatcggcctgagtg

SEQ ID NO: 804233 - DNA, 75 bp, synthetic construct
  source 1..75: mol_type = other DNA
gcgaagaaagtaaaagcgaagtttcgggtctacagctcgtatctggaagcattgtcggattacgttgggctgtta

SEQ ID NO: 804234 - DNA, 75 bp, synthetic construct
  source 1..75: mol_type = other DNA
gaacgtattctggcgcgtctggcgttgcgtaccgctcgcccgcgcgatctggcccgtatgcgtcacgctttccag

SEQ ID NO: 804235 - DNA, 75 bp, synthetic construct
  source 1..75: mol_type = other DNA
ccggaactgcgcgcacagttagaaactgtcgatagtgcaccggtacaggcgctgcgtgagaaaatgggcgaattt

SEQ ID NO: 804236 - DNA, 75 bp, synthetic construct
  source 1..75: mol_type = other DNA
cccatacgcctatgatgcagcagtatctcaagctgaaagcacagcatccggagatcctgctgttctaccggatgg

SEQ ID NO: 804237 - DNA, 75 bp, synthetic construct
  source 1..75: mol_type = other DNA
gcagacaatattgacgtactgttaaaagaggggcctgttaatatagagcgtacgtgcgaaaatattgggcggctg

SEQ ID NO: 804238 - DNA, 75 bp, synthetic construct
  source 1..75: mol_type = other DNA
accagcaaagggccggttgagcgcaaagttgtccgtatcgttacgccgggcaccatcagcgatgaagcgctgttg

SEQ ID NO: 804239 - DNA, 75 bp, synthetic construct
  source 1..75: mol_type = other DNA
acttacgatggtctgtcgctggcgtgggcgtgcgcggaaaatctggcgaataagattaaagcgttgacactgttt

SEQ ID NO: 804240 - DNA, 75 bp, synthetic construct
  source 1..75: mol_type = other DNA
gggcggtaaaagtacttatatgcgccagaccgcactgattgcgctgatggcctacatcggcagctatgtaccggc

SEQ ID NO: 804241 - DNA, 75 bp, synthetic construct
  source 1..75: mol_type = other DNA
tacccgcgtgttgcttgagcgccagcaaactattggcgcattgcaggatttcaccgccgagttgcagccggtact

SEQ ID NO: 804242 - DNA, 75 bp, synthetic construct
  source 1..75: mol_type = other DNA
tggcacccgcgatctggtcggttttggcgtcgagaacgcgccgcgcggactttgtgctgccggttgtctgttgca

SEQ ID NO: 804243 - DNA, 75 bp, synthetic construct
  source 1..75: mol_type = other DNA
ccgctcgcccacgcgatctggcccgtatgcgtcacgctttccagcaactgccggagctgcgtgcgcagttagaaa

SEQ ID NO: 804244 - DNA, 75 bp, synthetic construct
  source 1..75: mol_type = other DNA
ggcgtcgagaacgcgccgcgcggactttgtgctgccggttgtctgttgcagtatgcgaaagatacccaacgtacg

SEQ ID NO: 804245 - DNA, 75 bp, synthetic construct
  source 1..75: mol_type = other DNA
tggcgtgggcatgtgccgaaaatctggcgaataaaattaaagcgttgacgctgtttgctacccattacttcgagc

SEQ ID NO: 804246 - DNA, 75 bp, synthetic construct
  source 1..75: mol_type = other DNA
ctttctgtgtcttgcgatgtgcctgcaaatattcgttttatgctgttaagaaatacaactccgacatacagccat

SEQ ID NO: 804247 - DNA, 75 bp, synthetic construct
  source 1..75: mol_type = other DNA
gagtttggtatgtcaccggcaagccgggctaaagtaaatatcgccggaccggatgatgttgatccgctggcggag

SEQ ID NO: 804248 - DNA, 75 bp, synthetic construct
  source 1..75: mol_type = other DNA
atgtcaggacccccgaaaaccccgccacgcctgcatttgatacgaggcaacccctcaaagcgccccgttaaagac

SEQ ID NO: 804249 - DNA, 75 bp, synthetic construct
  source 1..75: mol_type = other DNA
cacgcctgcatttgatacgaggtaacccctcaaagcggccagttaaagactccaaaaaaaccgctaaaaaggatg

SEQ ID NO: 804250 - DNA, 75 bp, synthetic construct
  source 1..75: mol_type = other DNA
tggcacaccgcaaagtgagccagttttgagaccgctgcaaacggtacaacacgaaccgaagtctgaaacaaccaa

SEQ ID NO: 804251 - DNA, 75 bp, synthetic construct
  source 1..75: mol_type = other DNA
attcagttatcgacaattatgtcgcgccgcgtcttccggatcgcccaattccaattcgcacacctgcgcaggtta

SEQ ID NO: 804252 - DNA, 75 bp, synthetic construct
  source 1..75: mol_type = other DNA
tcactattcacaccgaagatgctgctcgctttggtattgcaaatggcgatctggtgcgtgtctggaacaagcgcg

SEQ ID NO: 804253 - DNA, 75 bp, synthetic construct
  source 1..75: mol_type = other DNA
atttccggcctcgatccgcgcttaaaagattgtgctattcgcgtcgcttgtgatgtcaccaatccgctggtgggc

SEQ ID NO: 804254 - DNA, 75 bp, synthetic construct
  source 1..75: mol_type = other DNA
tgaaaaaaaatccggaacaactcgagtgggcatggaaatatattaactttcgtattcccgggtcgcatttaacct

SEQ ID NO: 804255 - DNA, 75 bp, synthetic construct
  source 1..75: mol_type = other DNA
ctccctgacaaatacaggaaatgcgacgctgcggatcctcgcctacggcccctgcctgaaagccgccaatggtaa

SEQ ID NO: 804256 - DNA, 75 bp, synthetic construct
  source 1..75: mol_type = other DNA
gaattaagacagtacggtggtgatagccaacagatagaagatttaaaggaacaacttgctaatttgagagaagaa

SEQ ID NO: 804257 - DNA, 75 bp, synthetic construct
  source 1..75: mol_type = other DNA
atcgatgttctttttaacagaaagagtggggcaaccttaagacataaattagcacatggtaatttatatactaat

SEQ ID NO: 804258 - DNA, 75 bp, synthetic construct
  source 1..75: mol_type = other DNA
gcctgccagccagaagacaaagcctctttgaaaagcatgttgcgtaacaatatcgccatcatcacctcctataac

SEQ ID NO: 804259 - DNA, 75 bp, synthetic construct
  source 1..75: mol_type = other DNA
aaccggccgaccgcgaaacgatggcggcagagctgcaacgcactaatccggcggaactgctgtatgcagaagatt

SEQ ID NO: 804260 - DNA, 75 bp, synthetic construct
  source 1..75: mol_type = other DNA
ggttcttggcgtcaccattgacgatgtgatggcggagtttcaccggtacagcaaggaaaaaagtttatatcctgg

SEQ ID NO: 804261 - DNA, 75 bp, synthetic construct
  source 1..75: mol_type = other DNA
gttgaagttctgatgaaggctgctcctaatgcgttcactcacgctactgtctctggtaaagagcagcagggtaag

SEQ ID NO: 804262 - DNA, 75 bp, synthetic construct
  source 1..75: mol_type = other DNA
tattagccggtatcataatactggtagcgcttgtgttgttcactgagcgggccatttggaaatattcagccgcct

SEQ ID NO: 804263 - DNA, 75 bp, synthetic construct
  source 1..75: mol_type = other DNA
gatgtgatggcggagtttcaccggtacagcaaggaaaaaagtttatatcctggtggtcccgaaagattcccgtgg

SEQ ID NO: 804264 - DNA, 75 bp, synthetic construct
  source 1..75: mol_type = other DNA
gtgaacaacgtttttaccgcaatacaaaaccgtgacggagaagccctttctcgcatgtcaggttatgagcatcag

SEQ ID NO: 804265 - DNA, 75 bp, synthetic construct
  source 1..75: mol_type = other DNA
atggcgtccctgtaggcaaagttaaagcattactggaaaccaccagccaggatacggaagatgactggagccgcc

SEQ ID NO: 804266 - DNA, 75 bp, synthetic construct
  source 1..75: mol_type = other DNA
cctgctgggctcatgcccgccgaaagatccacgatgtgcacgtccgcatcccgtcagcactgacggaagaatccc

SEQ ID NO: 804267 - DNA, 75 bp, synthetic construct
  source 1..75: mol_type = other DNA
gaacgaaccggcaagctgaagaaaaacgttgtggtgctgacgcagcgatcacgtaaacgcggtgatatttcatcc

SEQ ID NO: 804268 - DNA, 75 bp, synthetic construct
  source 1..75: mol_type = other DNA
atgattgatatcagtcttgatttttctggccttgaagagatatcccgcgatctggaattactgagccgtgccgaa

SEQ ID NO: 804269 - DNA, 75 bp, synthetic construct
  source 1..75: mol_type = other DNA
gatagtttttctgcgggtgatgcccggacagtatgcggacttaatgataccgatgacgtttatgacaatgcagat

SEQ ID NO: 804270 - DNA, 75 bp, synthetic construct
  source 1..75: mol_type = other DNA
gttgcgttggttgggtttactggcatgttactggaaaaggctgtatggcaggcagcagatacatatccggcgctt

SEQ ID NO: 804271 - DNA, 75 bp, synthetic construct
  source 1..75: mol_type = other DNA
gcattatgccgcgtgcaaaaggtcgtgcggatcgcatcctgaagcgcaccagccacatcactgtggttgtgtccg

SEQ ID NO: 804272 - DNA, 75 bp, synthetic construct
  source 1..75: mol_type = other DNA
ttccggacagcagatacccgatccggtgatcagcatacaggcaaagccagagcccatgagtacacctccggacac

SEQ ID NO: 804273 - DNA, 75 bp, synthetic construct
  source 1..75: mol_type = other DNA
aggtgcagcagcggtgctaatcgtgctggcgattggcttttttatctatcgtgaaatgcggatttctcatgtcgt

SEQ ID NO: 804274 - DNA, 75 bp, synthetic construct
  source 1..75: mol_type = other DNA
gaagagatcaagcgttggataagtaatggcgtccctgtaggcaaagttaaagcattactggaaaccaccagccag

SEQ ID NO: 804275 - DNA, 75 bp, synthetic construct
  source 1..75: mol_type = other DNA
ttaactcttcccgttggcctaatgaccgggattatcggcggcgtttatttacttattctgctgttgcgaatgcct

SEQ ID NO: 804276 - DNA, 75 bp, synthetic construct
  source 1..75: mol_type = other DNA
aaaccttacttgacctgaattatgctcgtcaggttaacgaagtttccttatataccgcgcttggcggcggttggt

SEQ ID NO: 804277 - DNA, 75 bp, synthetic construct
  source 1..75: mol_type = other DNA
ttattcctaaaattgagatcccatttttaatgccggacgcaaccaggccaatctggatatcgccgaaattcgcca

SEQ ID NO: 804278 - DNA, 75 bp, synthetic construct
  source 1..75: mol_type = other DNA
tcgattttttcggtcgcttaaagaacatgagcgaagccgagcgccaaaattatttagccactgaggaagctcagc

SEQ ID NO: 804279 - DNA, 75 bp, synthetic construct
  source 1..75: mol_type = other DNA
tcctgctactgctactgctactgctactgctactgctactgctactgctactgttcttctttttcctgctgctct

SEQ ID NO: 804280 - DNA, 75 bp, synthetic construct
  source 1..75: mol_type = other DNA
tcgatgattgggcgaaaaaggtggcttccggacagcagatacccgatccggtgatcagcatacaggcaaagccag

SEQ ID NO: 804281 - DNA, 75 bp, synthetic construct
  source 1..75: mol_type = other DNA
gcagatacccgatccggtgatcagcatacaggcaaagccagaacccatgagtacacctccggacacagggagaga

SEQ ID NO: 804282 - DNA, 75 bp, synthetic construct
  source 1..75: mol_type = other DNA
gcgattatccagatcattttgtttgaaggaaacccggtcgccattgtgctttctgccatggccggcgggttcgcc

SEQ ID NO: 804283 - DNA, 75 bp, synthetic construct
  source 1..75: mol_type = other DNA
ctaaacgaagctatgctaattttaatccagaaaagtatccaaaattcaaagttcttatggatacacccaatggca

SEQ ID NO: 804284 - DNA, 75 bp, synthetic construct
  source 1..75: mol_type = other DNA
gtattgatgtgatgcgcggattccccgaccgtgccgtggaccttattgtgaccgatccgccttacctcgtcggtt

SEQ ID NO: 804285 - DNA, 75 bp, synthetic construct
  source 1..75: mol_type = other DNA
aaagagctgttgcgtctgacgcaagggtccgtcgtggcgctggacggtctggcgggcgaaccgctggatattctg

SEQ ID NO: 804286 - DNA, 75 bp, synthetic construct
  source 1..75: mol_type = other DNA
tgacaaacagaccggggagatgcgggagcagacagaatggcagcgcgtggtgctgttcggcaagctcgcggaagt

SEQ ID NO: 804287 - DNA, 75 bp, synthetic construct
  source 1..75: mol_type = other DNA
tgacaaacagacaggggagatgcgggagcagaccgaatggcaccgcgtggtgctgttcggcaagctcgcggaagt

SEQ ID NO: 804288 - DNA, 75 bp, synthetic construct
  source 1..75: mol_type = other DNA
aagggagcgcgaaaacaaaaggccgtggacgtaaggccgcgcagccggagggtgacgattacgggttttcagatg

SEQ ID NO: 804289 - DNA, 75 bp, synthetic construct
  source 1..75: mol_type = other DNA
gagcagacggaatggcaccgcgtggtgctgttcggcaagctcgcggaagtggcaggtgaatatctgcgcaagggg

SEQ ID NO: 804290 - DNA, 75 bp, synthetic construct
  source 1..75: mol_type = other DNA
gagcagactgaatggcaccgcgtggtgctgttcggcaagctcgcggaagtggcaggggaatatctgcgcaagggg

SEQ ID NO: 804291 - DNA, 75 bp, synthetic construct
  source 1..75: mol_type = other DNA
tgacaaacagaccggggagatgcgggagcagacggaatggcaacgcgtggtgctgttcggcaagctcgcggaagt

SEQ ID NO: 804292 - DNA, 75 bp, synthetic construct
  source 1..75: mol_type = other DNA
cttcagtggctgtatgccatcgatgtgctgattgaaacacagggcgaggtctgcctccttcctcttcctggagat

SEQ ID NO: 804293 - DNA, 75 bp, synthetic construct
  source 1..75: mol_type = other DNA
cttcagtggttgtatgccatcgatgtgctgattgaaacacagggcgaggtctgcctccttccacttcctggggat

SEQ ID NO: 804294 - DNA, 75 bp, synthetic construct
  source 1..75: mol_type = other DNA
gaatgtgtttggcagcggagcgtacagcaatcccgccaaaatccgcctggaatgtgagtattactcgctgaccag

SEQ ID NO: 804295 - DNA, 75 bp, synthetic construct
  source 1..75: mol_type = other DNA
gaagccagtcttgcagcaagagaggccggtcacgctgtccgtgagatggagcggtggatggtgccgaacaaactc

SEQ ID NO: 804296 - DNA, 75 bp, synthetic construct
  source 1..75: mol_type = other DNA
cttcagtgggtgtatgccatcgatgtgctgattgaaacacagggcgaggtctgcctccttccccttcctggtgat

SEQ ID NO: 804297 - DNA, 75 bp, synthetic construct
  source 1..75: mol_type = other DNA
cttcagtggctgtatgccatcgatgtgctgattgaaacacagggcgaggtctgcctccttccgcttcctggtgat

SEQ ID NO: 804298 - DNA, 75 bp, synthetic construct
  source 1..75: mol_type = other DNA
catatgaaagacaaccgctgggtgcctggctggatgtgtgcaccacgtccacagacggatgccactgaacgcacc

SEQ ID NO: 804299 - DNA, 75 bp, synthetic construct
  source 1..75: mol_type = other DNA
ggctttcacatgcgagactggtggcagccgacaaaagcaaacttcttcggacacctgaaaaagccgcagattatc

SEQ ID NO: 804300 - DNA, 75 bp, synthetic construct
  source 1..75: mol_type = other DNA
gactggtggcagccgacaaaagcaaacttcttcggacacctgaaaaagccgcagattatcgcagccctgaatgag

SEQ ID NO: 804301 - DNA, 75 bp, synthetic construct
  source 1..75: mol_type = other DNA
cgcgaaaacgaaaggccgtggacgtaaggccgcgcagcccgagtctcagccgcaaccgccggagggggaggatta

SEQ ID NO: 804302 - DNA, 75 bp, synthetic construct
  source 1..75: mol_type = other DNA
ccgccacgttcagcgaatgctgaaactggcagaccttgccccagtgatcctagatgcgctggcagaagacctcat

SEQ ID NO: 804303 - DNA, 75 bp, synthetic construct
  source 1..75: mol_type = other DNA
gtgctgacgcgacgaaaaaaggtggcgcgaaaacgaaaggccgtggacgtaaggccgcgcaacccgagcctcagc

SEQ ID NO: 804304 - DNA, 75 bp, synthetic construct
  source 1..75: mol_type = other DNA
agggggagaatagcagtaacgtccccctccatgtggtcagtcgtcagccggatgtggcagaagggatcagcgcac

SEQ ID NO: 804305 - DNA, 75 bp, synthetic construct
  source 1..75: mol_type = other DNA
gaaaacgaaaggccgtggacgtaaggctgcgcagccggagcctcagccgcaaccaccggagggggaggattacgg

SEQ ID NO: 804306 - DNA, 75 bp, synthetic construct
  source 1..75: mol_type = other DNA
gctgattaagtcaccgctgaatgtgcgcacggtgccgtattctgcggagtccgtcagcgaactggctgagtccat

SEQ ID NO: 804307 - DNA, 75 bp, synthetic construct
  source 1..75: mol_type = other DNA
cgcagtgaggatgacgcggctgacgacgctgaccgcacggaacaggtgcaggagaaagcgtcagtggaggaaatc

SEQ ID NO: 804308 - DNA, 75 bp, synthetic construct
  source 1..75: mol_type = other DNA
aacgggggcgcagtggcaaacctgcaggtggccacgtcagaaagctggcgcgacaaacagacgggggagatgcgg

SEQ ID NO: 804309 - DNA, 75 bp, synthetic construct
  source 1..75: mol_type = other DNA
gcaccgatttgttcagcgatgacggggaggggtatgtcgaccgcgtggcgctcgatgccgccctgctggaaaaac

SEQ ID NO: 804310 - DNA, 75 bp, synthetic construct
  source 1..75: mol_type = other DNA
ggccgggatggaacgctggcagtggcaggatatgccgttctggcaggtcatcgcggaagccagtatggcggcaag

SEQ ID NO: 804311 - DNA, 75 bp, synthetic construct
  source 1..75: mol_type = other DNA
tgctgaagctgttgtgcaaggagaaagacggcaacattactgttgattttgatgatgtagtgattcgcggcgtga

SEQ ID NO: 804312 - DNA, 75 bp, synthetic construct
  source 1..75: mol_type = other DNA
cagcactgatgcagcaaccggacaaatctctggcactgctggcatggacgctctgcctgaatgtgtttggcagcg

SEQ ID NO: 804313 - DNA, 75 bp, synthetic construct
  source 1..75: mol_type = other DNA
gccggagatgcgtgccggaagtggcgtggtggtgtcctggcgttatggcaacgtgtgtgtccagcgtggtgtgca

SEQ ID NO: 804314 - DNA, 75 bp, synthetic construct
  source 1..75: mol_type = other DNA
gcatggcgaaggtcagggcgtggacgccggagatgcgtgccggaagtggcgtggtggtgtcctggcgttatggca

SEQ ID NO: 804315 - DNA, 75 bp, synthetic construct
  source 1..75: mol_type = other DNA
aaaaacagtggcactgatggtctggcgattgtgctgttgtgtttttgactactgcaatacaactctccacccgtt

SEQ ID NO: 804316 - DNA, 75 bp, synthetic construct
  source 1..75: mol_type = other DNA
gaggaaatcagtctgccactgctgacgaaaatgtcctcagagcgcacgctggcagtccaggcagcactgatgcag

SEQ ID NO: 804317 - DNA, 75 bp, synthetic construct
  source 1..75: mol_type = other DNA
gcggagctgttttggattttgggcataagcgttttaaatttgataccgatatcgacttttttgacagacagcgtg

SEQ ID NO: 804318 - DNA, 75 bp, synthetic construct
  source 1..75: mol_type = other DNA
aggtgcaggtgtttgaagcggcctgccagtcaggatggggcggtaaaccggatgtgcgggttatccgcaatctga

SEQ ID NO: 804319 - DNA, 75 bp, synthetic construct
  source 1..75: mol_type = other DNA
gagggatggtcacgggatatgacgacgttcctgtcactcagccaggaggtactgttatccctgctcagtttctgc

SEQ ID NO: 804320 - DNA, 75 bp, synthetic construct
  source 1..75: mol_type = other DNA
cgcacggtgccgtattccgcagagtccgtcagcgaactggcggagtccgttaagggcgttggcctgttgcagaat

SEQ ID NO: 804321 - DNA, 75 bp, synthetic construct
  source 1..75: mol_type = other DNA
gaagaagaacgcctgaacgaactgatggcacgttacgatgcgctggaaaaccagtgtgaggaatccgacctgctg

SEQ ID NO: 804322 - DNA, 75 bp, synthetic construct
  source 1..75: mol_type = other DNA
atgtcagttacagagtctaaggcaaaaacggagcgtaaatccagccgtaaatcgtcaaaagcacaggaaactgca

SEQ ID NO: 804323 - DNA, 75 bp, synthetic construct
  source 1..75: mol_type = other DNA
cttcgttaccggttcccacaccttctgaacatgccgcagccgtgcttaatctggttgatgacggtgttatcgaat

SEQ ID NO: 804324 - DNA, 75 bp, synthetic construct
  source 1..75: mol_type = other DNA
cgctggagagcgccatcggttttcacatgcgcgactggtggcagccgacaaaagcaaacttcttcggacacctga

SEQ ID NO: 804325 - DNA, 75 bp, synthetic construct
  source 1..75: mol_type = other DNA
tcgccataaatccgcactggtcatgcagaagtacagccgccagcaggcacgggaggcagagcagaaaacccgtgc

SEQ ID NO: 804326 - DNA, 75 bp, synthetic construct
  source 1..75: mol_type = other DNA
agccatctgttctgcttttcctgtgcttttcatccaaatttgggtgaaacgcagcgagaaaatcatcgccacaga

SEQ ID NO: 804327 - DNA, 75 bp, synthetic construct
  source 1..75: mol_type = other DNA
cttaacccggctaacatccgcgcgctgatgacagcaggcaccctctgtttcgtcatcggtctggtcggttttatt

SEQ ID NO: 804328 - DNA, 75 bp, synthetic construct
  source 1..75: mol_type = other DNA
ccgtgatccgtgcgggtgaaattacctggccggcgccgccgattcaggtttcagcccagccgcaggcagcgcaga

SEQ ID NO: 804329 - DNA, 75 bp, synthetic construct
  source 1..75: mol_type = other DNA
gatgatgtcgttattcgcggcgttactgtgatccgcgatggcgaaattacctggccggcgccgccgattcaggtt

SEQ ID NO: 804330 - DNA, 75 bp, synthetic construct
  source 1..75: mol_type = other DNA
cttcagtggctgtatgccgtcgatttgctgattgaaacacagggcgaggtctgtctccttccccttcccggcgat

SEQ ID NO: 804331 - DNA, 75 bp, synthetic construct
  source 1..75: mol_type = other DNA
tgtggtttacctgctctggttttctggcttcctttgttagcggcgcatttgcttcatgcatttcacaatatgtga

SEQ ID NO: 804332 - DNA, 75 bp, synthetic construct
  source 1..75: mol_type = other DNA
gatgccgccctgctggaaaaactccaggctgtcgctgaacaccttcgggaagccgaaggctgggaatggtgcgcc

SEQ ID NO: 804333 - DNA, 75 bp, synthetic construct
  source 1..75: mol_type = other DNA
ttgactggcctgtccgtgtgaaggtcattccgcaggagctggcgactgccgcatcgatgaccgagaacggtcatc

SEQ ID NO: 804334 - DNA, 75 bp, synthetic construct
  source 1..75: mol_type = other DNA
gtgctgaaagcctggtttgccgacaatctttcgtccaccagcaaaacgaaaatcttctcaatcaactacaccatg

SEQ ID NO: 804335 - DNA, 75 bp, synthetic construct
  source 1..75: mol_type = other DNA
agtgaataacgtgacgctggtggtgctcttttttgccctcattaactgcgcctattccgtttttgctaccgtgct

SEQ ID NO: 804336 - DNA, 75 bp, synthetic construct
  source 1..75: mol_type = other DNA
gtgatcattgctgcgtgggtgctgatgttaaaaggaattcgtgcaagaccgtgggggcagcccgcgctttgttga

SEQ ID NO: 804337 - DNA, 75 bp, synthetic construct
  source 1..75: mol_type = other DNA
catatgaaagacaaccgctgggtgcctggctggatgtgtgcaccacatccacagacggataccactgaacgcacc

SEQ ID NO: 804338 - DNA, 75 bp, synthetic construct
  source 1..75: mol_type = other DNA
cacatgaaagacaaccgctgggtgcctggctggatgtgtgcaccacgcccacagacggatgccactgaacgcacc

SEQ ID NO: 804339 - DNA, 75 bp, synthetic construct
  source 1..75: mol_type = other DNA
ccaggctggatgtgtgcaccacatccacagacagatgccactgaacgcaccgataacctggctgatgccgcctga

SEQ ID NO: 804340 - DNA, 75 bp, synthetic construct
  source 1..75: mol_type = other DNA
ctgcctccttccccttccaggcgatgcagcagaacacttgttcccgtcggtgcggtttcgtgtcagggaacgcag

SEQ ID NO: 804341 - DNA, 75 bp, synthetic construct
  source 1..75: mol_type = other DNA
tcgccgactggcagcactcaacatgctggcagaacgtgacatcattcaggctgactggcctgtccgtgtgaaggt

SEQ ID NO: 804342 - DNA, 75 bp, synthetic construct
  source 1..75: mol_type = other DNA
ggtatggcggcaagggaggccagtcatgctgtccgtgagatggagcggtggatggtgccgaacaaactccgggag

SEQ ID NO: 804343 - DNA, 75 bp, synthetic construct
  source 1..75: mol_type = other DNA
gtcgggatatgcaccctgccgaacagattgccggattccgcgcaatggagcaggaaggcaaaacacctgcacaaa

SEQ ID NO: 804344 - DNA, 75 bp, synthetic construct
  source 1..75: mol_type = other DNA
cgatgagggtggctatgtggactgtgttgcgctcgatgccgccctgctggaaaaactccaggctgttgcagagta

SEQ ID NO: 804345 - DNA, 75 bp, synthetic construct
  source 1..75: mol_type = other DNA
gacgcggtgctgacggaggcggaagaagaacgcctgaacgaactgatgacgcgttacgacgcgctggaaaaccag

SEQ ID NO: 804346 - DNA, 75 bp, synthetic construct
  source 1..75: mol_type = other DNA
gcgtgattaacggcctcggcgcgaaaacgcatctgtttgtgcgtaaacatgcgccgctgcgcagcttcgacccga

SEQ ID NO: 804347 - DNA, 75 bp, synthetic construct
  source 1..75: mol_type = other DNA
ggtggcggagacggaaaaacgccgccatcagggaaacacgctggcggaatatccgtatgcgggggcgtttttccg

SEQ ID NO: 804348 - DNA, 75 bp, synthetic construct
  source 1..75: mol_type = other DNA
atgcgggcactgatacccctcagcacagagcaacaggccgcatggcgagcggtggcggagacggaaaaacgccgc

SEQ ID NO: 804349 - DNA, 75 bp, synthetic construct
  source 1..75: mol_type = other DNA
gtggcgctcgatgctgccctgctggaaaaactccaggctgtcgcagagttccttcgggaagccgagggctgggga

SEQ ID NO: 804350 - DNA, 75 bp, synthetic construct
  source 1..75: mol_type = other DNA
taaccgaaagtgaagtggcggtggcggggaacagtaaattccgcttcgtgggggctgatgccttctcgccagatg

SEQ ID NO: 804351 - DNA, 75 bp, synthetic construct
  source 1..75: mol_type = other DNA
taaccgaaagtgaagtggcggtggctgggaacagtaaattccgcttcgtgggggctgatgccttctcgccagagg

SEQ ID NO: 804352 - DNA, 75 bp, synthetic construct
  source 1..75: mol_type = other DNA
gagatgcgtgccggaggtggagtggtggtgtcctggcgttatggaaacgtatgtgtccagcgtggtgtgcagttg

SEQ ID NO: 804353 - DNA, 75 bp, synthetic construct
  source 1..75: mol_type = other DNA
ttaccgaaagtgaagtggcggtggcggggaacagtaaattccgcttcgtgggggctgatgccttctcgccagaag

SEQ ID NO: 804354 - DNA, 75 bp, synthetic construct
  source 1..75: mol_type = other DNA
ttaccgaaagtgaagtggcggtggctgggaacagtaaattccgcttcgtgggggctgatgccttctcgccagatg

SEQ ID NO: 804355 - DNA, 75 bp, synthetic construct
  source 1..75: mol_type = other DNA
ttaccgaaagtgaagtggcggtggcagggaacagtaaattccgcttcgtgggggctgatgccttctcgccagagg

SEQ ID NO: 804356 - DNA, 75 bp, synthetic construct
  source 1..75: mol_type = other DNA
tgctgattgaaacacagggcgaggtctgcctccttccccttcccggcgatgcagcagagcggctgttcccgtcgg

SEQ ID NO: 804357 - DNA, 75 bp, synthetic construct
  source 1..75: mol_type = other DNA
catgcgcgactggtggcagccgacgaaagcaaactttttcggacaccttaaaaagccgcagattatcgacgccct

SEQ ID NO: 804358 - DNA, 75 bp, synthetic construct
  source 1..75: mol_type = other DNA
aacataccgcagtctgccggagccggaagcggtgctgacggaggcggaagaagaacgcctgaacgaactgatgac

SEQ ID NO: 804359 - DNA, 75 bp, synthetic construct
  source 1..75: mol_type = other DNA
aagaacgcctgaacgaactgatgacgcgttacgacgcgctggaaaaccagtgtgaggaatctgacctgctggaag

SEQ ID NO: 804360 - DNA, 75 bp, synthetic construct
  source 1..75: mol_type = other DNA
accgcagcatgttctgccgctgtttgggctgtgccttggctggcctgcggataatccggatcttaagccgcgttt

SEQ ID NO: 804361 - DNA, 75 bp, synthetic construct
  source 1..75: mol_type = other DNA
ccatttattctggattatttgcacaaacagggttgggcgacgcctaaaactgccacgtcgatgtatgatacgcgg

SEQ ID NO: 804362 - DNA, 75 bp, synthetic construct
  source 1..75: mol_type = other DNA
tgaagctgatgcgctgcatggcgaaggtcagagcgtggacgccggagatgcgtgccggaagcggtgtggtggtgt

SEQ ID NO: 804363 - DNA, 75 bp, synthetic construct
  source 1..75: mol_type = other DNA
tgaggcgctggcgcgtggggcaacagtaaattatgacgggaaaaaattcacgtatccggtcgctgatgagtggcc

SEQ ID NO: 804364 - DNA, 75 bp, synthetic construct
  source 1..75: mol_type = other DNA
ccgccacgttcagcgaatgctgaaactggcggaccttgccccagtgatcctggatgcgctggcagaagacctcat

SEQ ID NO: 804365 - DNA, 75 bp, synthetic construct
  source 1..75: mol_type = other DNA
ccgccacgttcagcgaatgctgaaactggcggaccttgccccagtgatccttgatgcgctggcagaagaccgcat

SEQ ID NO: 804366 - DNA, 75 bp, synthetic construct
  source 1..75: mol_type = other DNA
gacggaggcggaagaagaacgcctgaacgaactgatggcacgttacgacgcgctggaaaatcagtgtgaggaatc

SEQ ID NO: 804367 - DNA, 75 bp, synthetic construct
  source 1..75: mol_type = other DNA
tgaaattgcgccatcggcaaggctgactaaatcgcagcgcgaccagatatcgcgtatccggtttgacctcgcaca

SEQ ID NO: 804368 - DNA, 75 bp, synthetic construct
  source 1..75: mol_type = other DNA
agtctgccgctgctgacgaaaatgtcttccgaacgcacgctggcagtccaggcagcactgatgcagcagccggac

SEQ ID NO: 804369 - DNA, 75 bp, synthetic construct
  source 1..75: mol_type = other DNA
ccgccacgttcagcgaatgctgaaactggctgaccttgccccagtgatccttgatgcgctggcagaagacctcat

SEQ ID NO: 804370 - DNA, 75 bp, synthetic construct
  source 1..75: mol_type = other DNA
ccgccacgttcagcgaatgctgaaactggctgaccttgccccagtgatcctagatgcgctggcagaagaccgcat

SEQ ID NO: 804371 - DNA, 75 bp, synthetic construct
  source 1..75: mol_type = other DNA
ccgccacgttcagcgaatgctgaaactggcagaccttgccccagtgatccttgatgcgctggcagaagaccacat

SEQ ID NO: 804372 - DNA, 75 bp, synthetic construct
  source 1..75: mol_type = other DNA
ccgccacgttcagcgaatgctgaaactggccgaccttgccccagtgatcctcgatgcgctggcagaagacctcat

SEQ ID NO: 804373 - DNA, 75 bp, synthetic construct
  source 1..75: mol_type = other DNA
ccgccacgttcagcgaatgctgaaactggccgaccttgccccagtgatccttgatgcgctggcagaagaccccat

SEQ ID NO: 804374 - DNA, 75 bp, synthetic construct
  source 1..75: mol_type = other DNA
ccgccacgttcagcgaatgctgaaactggctgaccttgccccagtgatcctggatgcgctggcagaagaccacat

SEQ ID NO: 804375 - DNA, 75 bp, synthetic construct
  source 1..75: mol_type = other DNA
tacaaccttatttttataaaaaaaatgcagatcttatatttgttgaaactgatgatgctaaaaataaacttgtgg

SEQ ID NO: 804376 - DNA, 75 bp, synthetic construct
  source 1..75: mol_type = other DNA
atgccgccctgctggaaaaactccaggctgtcgctgaacaccttcgggaagccgaaggctgggaatggtgcgccg

SEQ ID NO: 804377 - DNA, 75 bp, synthetic construct
  source 1..75: mol_type = other DNA
atgtcagttacagagtctaaggcaaaaacggagcgtaaatccagccgtaaacctgcaaaaacgcaggaaactgtc

SEQ ID NO: 804378 - DNA, 75 bp, synthetic construct
  source 1..75: mol_type = other DNA
aggtacaggtgtttgaagctgcctgtcagtcgggatggggcggaaaaccggaagtacagaccattcgtcgtctgg

SEQ ID NO: 804379 - DNA, 75 bp, synthetic construct
  source 1..75: mol_type = other DNA
ccacatgaaagacaaccgctgggtgcctggctggatgtgtgctccacgtccacagacggataccactgaacgcac

SEQ ID NO: 804380 - DNA, 75 bp, synthetic construct
  source 1..75: mol_type = other DNA
tgcagcaaccggacaaatctctggcactgctggcatggacgctctgcctgaatgtgtttggcagcggagcgtaca

SEQ ID NO: 804381 - DNA, 75 bp, synthetic construct
  source 1..75: mol_type = other DNA
ctggttgttcatgccctgccaggtgaccgccacggtgtcgccgcaggcggtcgcagactggcagcactcaacatg

SEQ ID NO: 804382 - DNA, 75 bp, synthetic construct
  source 1..75: mol_type = other DNA
tgctggaagcagaaatgaagctgattgactgcatggcgaaggtcagggcgtggacgccggagatgcgtgccggaa

SEQ ID NO: 804383 - DNA, 75 bp, synthetic construct
  source 1..75: mol_type = other DNA
acacgtaccctaccctaccgcctgggaaaggatccggaagtccgttacatccccaacgggggcgcagtggcaaac

SEQ ID NO: 804384 - DNA, 75 bp, synthetic construct
  source 1..75: mol_type = other DNA
cgcaaaaacgaaaggccgtggacgtaaggccacgcagccggagtcgcagccgcaaccgccggagggtgaggatta

SEQ ID NO: 804385 - DNA, 75 bp, synthetic construct
  source 1..75: mol_type = other DNA
tcggggaaggaaggtgccgcattcatggcgctgatggcagaacactctcgttttgctgccctgctgccggaagga

SEQ ID NO: 804386 - DNA, 75 bp, synthetic construct
  source 1..75: mol_type = other DNA
gagtatggtcacacgtcacgcagtccgctggattcgctggagagcgctatcggattccacatgcgcgactggtgg

SEQ ID NO: 804387 - DNA, 75 bp, synthetic construct
  source 1..75: mol_type = other DNA
tggcatggacgctctgcctgaatgtgtttggcagcggagcgtacagtaaaccagcacaaatcagcctggaatgta

SEQ ID NO: 804388 - DNA, 75 bp, synthetic construct
  source 1..75: mol_type = other DNA
gaactgtccgggaaaagctattttcttaaatggcacaaggggacgacattaaaagagattataaaaaatctactc

SEQ ID NO: 804389 - DNA, 75 bp, synthetic construct
  source 1..75: mol_type = other DNA
gggatacctggagcgatcatatccgccgaacaatcattaaagaaagccgcccatttatactggattatttgcaca

SEQ ID NO: 804390 - DNA, 75 bp, synthetic construct
  source 1..75: mol_type = other DNA
caatgatggcgcagaatgcgttaaccgcagcggaatcgctgggattgggcggggtatatatcggcggcctgcgca

SEQ ID NO: 804391 - DNA, 75 bp, synthetic construct
  source 1..75: mol_type = other DNA
ccacgttatggcgcggtaaagatccttttgaggaagttaaaaccttgcagggtgaggtatttcgtgaactggaaa

SEQ ID NO: 804392 - DNA, 75 bp, synthetic construct
  source 1..75: mol_type = other DNA
gtatggggtggcatttggcgaaaaaggcatgaatccgctgaccagaacttcatttattattaccgaagatctgac

SEQ ID NO: 804393 - DNA, 75 bp, synthetic construct
  source 1..75: mol_type = other DNA
ccacactttggcgcggtaaagatgcttttaccgaggttaaaaaactaaatggtgaagtcttccgggaactggaga

SEQ ID NO: 804394 - DNA, 75 bp, synthetic construct
  source 1..75: mol_type = other DNA
atggcagctgcgatgttatttgccggtaaagtggccgatcgttcagggagaaagcctgtcgccatacccggcgcg

SEQ ID NO: 804395 - DNA, 75 bp, synthetic construct
  source 1..75: mol_type = other DNA
tggattatttgcacaaacagggttgggcgacgcgctaaaaccgccacgtcgatgtatgatacgcgggcttttgac

SEQ ID NO: 804396 - DNA, 75 bp, synthetic construct
  source 1..75: mol_type = other DNA
tgataagacgcgtcaagcgtcgcatcaggcattgtgcgccaactgccggatgcggcgtgaacgccttatccggcc

SEQ ID NO: 804397 - DNA, 75 bp, synthetic construct
  source 1..75: mol_type = other DNA
ataatattgaagcggtgacggagctgctgaaattaccgcagcatgttctgccgctgtttgggctgtgccttggct

SEQ ID NO: 804398 - DNA, 75 bp, synthetic construct
  source 1..75: mol_type = other DNA
cggtaatagacctgcatcgtgcgcagatacgggaaaaagtaccacgtcgttggcgggataaagatttgattggtt

SEQ ID NO: 804399 - DNA, 75 bp, synthetic construct
  source 1..75: mol_type = other DNA
cagggactgggcgcgggctgttgttacgtagtggcgttcgccattttgcgcgacacgctggatgatcgacgtcgg

SEQ ID NO: 804400 - DNA, 75 bp, synthetic construct
  source 1..75: mol_type = other DNA
tggatgacgaacatcaagcaatgttgatgaaagcggtagaggataaaacacctttacgcttccgtatgttctatg

SEQ ID NO: 804401 - DNA, 75 bp, synthetic construct
  source 1..75: mol_type = other DNA
tggttttaacggtgatgcaaccgacaacattacccttgctggctcaaatattattaatggccggattgaaacaat

SEQ ID NO: 804402 - DNA, 75 bp, synthetic construct
  source 1..75: mol_type = other DNA
tctgaatgtcacagggaaagctaccggtaatgtgacagtttataacgctggtaccgtagacttgaaagatgcaaa

SEQ ID NO: 804403 - DNA, 75 bp, synthetic construct
  source 1..75: mol_type = other DNA
aggggtttgttctggatgaacagcctgataactcacaacttcctgatggctttgtgcttgattcccaaccagaac

SEQ ID NO: 804404 - DNA, 75 bp, synthetic construct
  source 1..75: mol_type = other DNA
ccggattgaggcaactaatacattgaattttttagaggattttgctgatgacataggtggaattgatgaattatc

SEQ ID NO: 804405 - DNA, 75 bp, synthetic construct
  source 1..75: mol_type = other DNA
ttaatggcggtagtttcgttgcaaaaaatgaaaacagtagtgcgacaggaatatctctggaagggaccaagggaa

SEQ ID NO: 804406 - DNA, 75 bp, synthetic construct
  source 1..75: mol_type = other DNA
acagagatagaaactctggaagagtacgatcaggacgctacggggaaacttgctggttatcgtagactggaaccg

SEQ ID NO: 804407 - DNA, 75 bp, synthetic construct
  source 1..75: mol_type = other DNA
agtctccgtgtctactatgttggataaccagccggactttttcgatcctagctttagtcctatcgagaacatcgc

SEQ ID NO: 804408 - DNA, 75 bp, synthetic construct
  source 1..75: mol_type = other DNA
acagagatccagacgttagaagaatatgaccatgatgttactggtaagttggctggctatcgtaaacttgaatca

SEQ ID NO: 804409 - DNA, 75 bp, synthetic construct
  source 1..75: mol_type = other DNA
ataattctgatgttacggcaaaattacgcggtggacgcaagatcgaaaatacaaacttgagtctctatcgtgtca

SEQ ID NO: 804410 - DNA, 75 bp, synthetic construct
  source 1..75: mol_type = other DNA
atgaatattacacaagataacttagacattttcacggggtcgcatgttgaattatccatttctacgaatattgat

SEQ ID NO: 804411 - DNA, 75 bp, synthetic construct
  source 1..75: mol_type = other DNA
ttctcttatctgccgtgttatccgttagtgcaacggtgcacgcacaatcgcctggcacggcaacgacagcgccct

SEQ ID NO: 804412 - DNA, 75 bp, synthetic construct
  source 1..75: mol_type = other DNA
ttggcaaaagcgctcatttcttagtcactgttggtactgccaacaccgctcgctttttaatcactgttgtcactg

SEQ ID NO: 804413 - DNA, 75 bp, synthetic construct
  source 1..75: mol_type = other DNA
ttctgtttgtattgactctggtgggcattttacgacagaggtatatcgctttactaagccgagagaatcaaggcg

SEQ ID NO: 804414 - DNA, 75 bp, synthetic construct
  source 1..75: mol_type = other DNA
tgttgtctggaaacaacttgatgaatacttactccgtagctggtcattccgtgacggtcgaaaattacagatttc

SEQ ID NO: 804415 - DNA, 75 bp, synthetic construct
  source 1..75: mol_type = other DNA
tctctacaacatcaaatttcagtatttaaagcacagacatatgcatcaattatcaatagtatatcattatgtctg

SEQ ID NO: 804416 - DNA, 75 bp, synthetic construct
  source 1..75: mol_type = other DNA
gatgaatctggtttaactccccaaacgttacgttctcgcgcccgacgaattcacagagaaactaatggactggct

SEQ ID NO: 804417 - DNA, 75 bp, synthetic construct
  source 1..75: mol_type = other DNA
aaagttcagtacctgtcatttggaggtcataaaatcccggcaacggatgaggaagcggatcgttttgactgcgcg

SEQ ID NO: 804418 - DNA, 75 bp, synthetic construct
  source 1..75: mol_type = other DNA
ggcgacgcggcagatcttaccgctctccaggacgatccgcagtcgatcgtgttaaacggcggtgtgctcgatctc

SEQ ID NO: 804419 - DNA, 75 bp, synthetic construct
  source 1..75: mol_type = other DNA
ccggtgatatggatttaaatatcactaatgcaatatttgcgaataatatcgccaatgatggtaaaggtggcgcta

SEQ ID NO: 804420 - DNA, 75 bp, synthetic construct
  source 1..75: mol_type = other DNA
agtatttatctttactcccgtcaatgattgcgtctctcttctccactaatggtatcgcagcggttattgattcat

SEQ ID NO: 804421 - DNA, 75 bp, synthetic construct
  source 1..75: mol_type = other DNA
gcggtgcagccaaaaagtccagcacgactatacgtatgaagcattacgctggtggatatatagcacttgttggtg

SEQ ID NO: 804422 - DNA, 75 bp, synthetic construct
  source 1..75: mol_type = other DNA
ccaacaaggagataacctcctaaaagatatttacaacaacaatgagaacaataaccccattataggtttaatcgg

SEQ ID NO: 804423 - DNA, 75 bp, synthetic construct
  source 1..75: mol_type = other DNA
gctggaaggataagcgcggcgaactggtcacggtgaaagataacgcatttaaccgggtaacgtttgtgcgtgatg

SEQ ID NO: 804424 - DNA, 75 bp, synthetic construct
  source 1..75: mol_type = other DNA
cagtcaaatctgggtaatgaaacgcagacacgcagtcacggtaatgccagtcgcgaagcatttgagcaggcgttg

SEQ ID NO: 804425 - DNA, 75 bp, synthetic construct
  source 1..75: mol_type = other DNA
gggcatcacttcgtttaccgactgcgtagcgaatttatcaagcggattctggatactcacgtcgagcgtatcgaa

SEQ ID NO: 804426 - DNA, 75 bp, synthetic construct
  source 1..75: mol_type = other DNA
ggtggcgcgggtgtacaaacatatggcgaccctgcgtgaaaccgaagacaagctgtacacggattttcaaaccgt

SEQ ID NO: 804427 - DNA, 75 bp, synthetic construct
  source 1..75: mol_type = other DNA
acatatctgaaatatctgtgcctgtttcttgtcagctcttgtgcggtatgcggttatattttttattattatgcc

SEQ ID NO: 804428 - DNA, 75 bp, synthetic construct
  source 1..75: mol_type = other DNA
aacgggcaacttagcgagctgacgggcgaagagcgcgatgctgcttcgcgtgatgccgttgcccggacggcataa

SEQ ID NO: 804429 - DNA, 75 bp, synthetic construct
  source 1..75: mol_type = other DNA
cgggcgtattcttaacctgaagttatcgaaagggcagaagaaacgcgtggcgttgttgctggcactggcagaaga

SEQ ID NO: 804430 - DNA, 75 bp, synthetic construct
  source 1..75: mol_type = other DNA
tcaccgtaggggcggcggcgtatctgtggatgctgtcgggcaaaatgttgttggtcacggttatctggatggcga

SEQ ID NO: 804431 - DNA, 75 bp, synthetic construct
  source 1..75: mol_type = other DNA
tggtcatggtgtttgtcggggtgtttgtctttctcctggtcagcattatatcgtacagcctgtggcgggacaggc

SEQ ID NO: 804432 - DNA, 75 bp, synthetic construct
  source 1..75: mol_type = other DNA
cttatgaggatttcctgccggttagtgctgcggggatcttccagtcgaatctgggtaatgaaacgcaaatgcgca

SEQ ID NO: 804433 - DNA, 75 bp, synthetic construct
  source 1..75: mol_type = other DNA
atttgagcaggcgttgggctgcccggttttggatgagttccagctttatcaggaagcggaagaacgcagtaaacg

SEQ ID NO: 804434 - DNA, 75 bp, synthetic construct
  source 1..75: mol_type = other DNA
ttatcagatattgaagctttcaaggctgatacgattaaggctctacttgcctccgatttgcttccaggaatggag

SEQ ID NO: 804435 - DNA, 75 bp, synthetic construct
  source 1..75: mol_type = other DNA
gaaatgcattttggagcccctgtttgctgcattggtttctctgatttcggtaccgcgaatttggcaccttgggca

SEQ ID NO: 804436 - DNA, 75 bp, synthetic construct
  source 1..75: mol_type = other DNA
tcaaatgtggcggattacatcacgatgttcccgtgctgtctgaagccgaaatgaccatcgtccttgaaaaattca

SEQ ID NO: 804437 - DNA, 75 bp, synthetic construct
  source 1..75: mol_type = other DNA
ctttcacatgcgagactggtggcagccgacaaaagcaaacttcttcggacacctgaaaaagccgcagattatcgc

SEQ ID NO: 804438 - DNA, 75 bp, synthetic construct
  source 1..75: mol_type = other DNA
caatcagacaaatccctggcacttctggcatggacactctgtctgaatgtgtttggcagtggagcgtacagcaaa

SEQ ID NO: 804439 - DNA, 75 bp, synthetic construct
  source 1..75: mol_type = other DNA
ggcagtccaggcagcactgatgcagcaaccggacaaatctctggcactgctggcatggacgctctgcctgaatgt

SEQ ID NO: 804440 - DNA, 75 bp, synthetic construct
  source 1..75: mol_type = other DNA
cgcagcgaggatgatgcggctgacgacgctgaccgcacggaacaggtgcgggaaaaagcggctgtggaggaaatc

SEQ ID NO: 804441 - DNA, 75 bp, synthetic construct
  source 1..75: mol_type = other DNA
cgcagcgaggatgatgcggctgacgacgctgaccgcacggaacaggtgctggataaagcggctgtggaggaaatc

SEQ ID NO: 804442 - DNA, 75 bp, synthetic construct
  source 1..75: mol_type = other DNA
cgcagcgaggatgatgcggctgacgacgctgaccgcacggaacaggtgcaggagaaagcggctgtggaggaaatc

SEQ ID NO: 804443 - DNA, 75 bp, synthetic construct
  source 1..75: mol_type = other DNA
cacttttcagcgtcgtttatggccgcgcattgagcgtgtgaatcagcgccatgaaatgaacaccgacgcgtcgtt

SEQ ID NO: 804444 - DNA, 75 bp, synthetic construct
  source 1..75: mol_type = other DNA
cgccgtggaatgaacattacaaaatgtatgactatatccgcaacgagctgccgaatttagtgatgcatcattttc

SEQ ID NO: 804445 - DNA, 75 bp, synthetic construct
  source 1..75: mol_type = other DNA
atgcaccgtgtttggcactgttgcaaagttagcgatgaggcagccttttgtcttattcaaaggccttacatttca

SEQ ID NO: 804446 - DNA, 75 bp, synthetic construct
  source 1..75: mol_type = other DNA
gggaggcagagcagaaagcccgtgcgtaccaggcgctggtcgctcaggctgaaatcgaactggcgttccattcgc

SEQ ID NO: 804447 - DNA, 75 bp, synthetic construct
  source 1..75: mol_type = other DNA
atgagcgtacgttcacaggcactggttccgctcagcacagagcaacaggccgcatggcgggcggtggcggagaca

SEQ ID NO: 804448 - DNA, 75 bp, synthetic construct
  source 1..75: mol_type = other DNA
tgaacggaagccgcaggatatcgctgtctgacctgcgatttttcatgccgtccctgaccgcagaagaactgcacg

SEQ ID NO: 804449 - DNA, 75 bp, synthetic construct
  source 1..75: mol_type = other DNA
tatccctgctcagtttctgcaccgcatgcagccttaacggtgtccagacccgtgagtgtggtcacacgtcacgca

SEQ ID NO: 804450 - DNA, 75 bp, synthetic construct
  source 1..75: mol_type = other DNA
aaagaggaagatctcgctttgttacgtaaagaccgtatggcggtagatatcgctatgtttggtcgtatgctggcg

SEQ ID NO: 804451 - DNA, 75 bp, synthetic construct
  source 1..75: mol_type = other DNA
cccgtcagttagaggtggcggtgcagcgtattacaactcttcgcgaaaatatgaatacggtctacgaacagaaga

SEQ ID NO: 804452 - DNA, 75 bp, synthetic construct
  source 1..75: mol_type = other DNA
ataaaaaagccatcgaatgggcagtagaaatagccgattatcttgggaaagccaaaaaagacaaaaaacaaaaaa

SEQ ID NO: 804453 - DNA, 75 bp, synthetic construct
  source 1..75: mol_type = other DNA
agtctgccgctactgacgaaaatgtcttccgaacgcacgctggcagtccaggccgcgctgataaagcagcccgaa

SEQ ID NO: 804454 - DNA, 75 bp, synthetic construct
  source 1..75: mol_type = other DNA
ccgcgcgattgtcagactgtcagggtcgcccgtagcccgtcggatgaagttaacgagtacgaggaagaagtcgag

SEQ ID NO: 804455 - DNA, 75 bp, synthetic construct
  source 1..75: mol_type = other DNA
tattccgcaggaactggcgacggctgcatcgatgaccgagaacggtcatcgtcgggatatgcacccagccgaaca

SEQ ID NO: 804456 - DNA, 75 bp, synthetic construct
  source 1..75: mol_type = other DNA
atgtcagttacagagtttaaggcaaaaacggggcgtaaatccagccgtaaaccgtcaaaagagcaggagactgca

SEQ ID NO: 804457 - DNA, 75 bp, synthetic construct
  source 1..75: mol_type = other DNA
cagagttccatatgaaagacaaccgctgggtgcctggctggatgtgtgcaccacgtccacagacggatgccactg

SEQ ID NO: 804458 - DNA, 75 bp, synthetic construct
  source 1..75: mol_type = other DNA
gtatccagcgtggtgtgcagttgcgcagtgaggatgatgtggctgacgacgctgaccgcacggaacaggggctgg

SEQ ID NO: 804459 - DNA, 75 bp, synthetic construct
  source 1..75: mol_type = other DNA
tctgaactttttgaacaggcgctggcgggccatattggtattcgtagcgggcgtattgcgcgtgaggcggcaact

SEQ ID NO: 804460 - DNA, 75 bp, synthetic construct
  source 1..75: mol_type = other DNA
aaacctcggcggtgacgaagcgttagctaatcagaccatacgcgcctttacggaagccgcgcttaaagtctcccc

SEQ ID NO: 804461 - DNA, 75 bp, synthetic construct
  source 1..75: mol_type = other DNA
acagttagtccatatcagcccggcagaatttgacgccgtaaaagcgctggcccatcaactggccgaagaaaagcg

SEQ ID NO: 804462 - DNA, 75 bp, synthetic construct
  source 1..75: mol_type = other DNA
ataatcctgtttaaccctgacacagttgaagcatacgcaaaacgtgcggaaatatcacctaaacctctattctcc

SEQ ID NO: 804463 - DNA, 75 bp, synthetic construct
  source 1..75: mol_type = other DNA
atcctgattgagaaaggcatcgaagagaaaaaagccatcgaatgggcggcaaaaattgcggattatcttgggaaa

SEQ ID NO: 804464 - DNA, 75 bp, synthetic construct
  source 1..75: mol_type = other DNA
gatttggctggcggcagtgattggcatcagcgcctggaatatgctgatcgggattctgattgcctgtagcatagt

SEQ ID NO: 804465 - DNA, 75 bp, synthetic construct
  source 1..75: mol_type = other DNA
cgcactggagaaaaaaggtgtcatcacgataaagcgtggcgtggcccggggcatcacgcttcataccgcggtgaa

SEQ ID NO: 804466 - DNA, 75 bp, synthetic construct
  source 1..75: mol_type = other DNA
ccgcatcccgtcgtgtaggtgcgcttacttcaccagtgaatatcgagttgcactcccgttatgcaatcatgctgt

SEQ ID NO: 804467 - DNA, 75 bp, synthetic construct
  source 1..75: mol_type = other DNA
acgcgtttggtgtcagtgaaacgattgtcgaagatgattttttcaccgccgttgatgatttgcgccaggcctctg

SEQ ID NO: 804468 - DNA, 75 bp, synthetic construct
  source 1..75: mol_type = other DNA
agaaaaaagccatcgaatgggcggcaaaaattgcggattatcttggaaaagctaaaaacgacaaaaaaccaaaag

SEQ ID NO: 804469 - DNA, 75 bp, synthetic construct
  source 1..75: mol_type = other DNA
aaggcaccggatctggcggtggcagttcatcgcaaggcccgcgcccgcagcttggcggtcgtgtcgttaccatcg

SEQ ID NO: 804470 - DNA, 75 bp, synthetic construct
  source 1..75: mol_type = other DNA
cgtttattataaccgaagatctgacaccaaccatcagtctggaagattactgtgctgactgggcgactaacccac

SEQ ID NO: 804471 - DNA, 75 bp, synthetic construct
  source 1..75: mol_type = other DNA
ttagtaggcttggagagcaggcagataaatttattaatgattttggtgggagtgttgataaggactttatcaatc

SEQ ID NO: 804472 - DNA, 75 bp, synthetic construct
  source 1..75: mol_type = other DNA
attgcggcggcggtgaagacgccagttattagcctatttggggccactgatcatgtattctggcgtccatggacc

SEQ ID NO: 804473 - DNA, 75 bp, synthetic construct
  source 1..75: mol_type = other DNA
tatctttctgttatcccagcggaggatgtgatcgccgctacggaaaagctgttgccagaagatgccccttcagct

SEQ ID NO: 804474 - DNA, 75 bp, synthetic construct
  source 1..75: mol_type = other DNA
caaacaccatggtgccgccaaaaggtgaagtatcggtggatatcccgcatgctgtaaccggggatatcagttttc

SEQ ID NO: 804475 - DNA, 75 bp, synthetic construct
  source 1..75: mol_type = other DNA
gaaaaacgccgccatcaggggaacacgctggcggaatatccgtatgcgggggcgtttttccgctgtctgaacgga

SEQ ID NO: 804476 - DNA, 75 bp, synthetic construct
  source 1..75: mol_type = other DNA
ggcaggtgaatatctgcgtaagggggcgcaggtctacattgaaggccagcttcgcacccgtagctgggaagataa

SEQ ID NO: 804477 - DNA, 75 bp, synthetic construct
  source 1..75: mol_type = other DNA
gtggcaaacctgcaggtggccacgtcagaaacctggcgcgacaaacagacgggggaaatgaaggaacagacggaa

SEQ ID NO: 804478 - DNA, 75 bp, synthetic construct
  source 1..75: mol_type = other DNA
ggcgcgcaggtctacatcgaggggcaactccgtacccgtagctgggaagataacggtatcacccgttacgtcact

SEQ ID NO: 804479 - DNA, 75 bp, synthetic construct
  source 1..75: mol_type = other DNA
atcagcctggaatgtaaacattattcgctgaccagcgatgcgccgtcagggaaggaaggtgtcgcattcatggcg

SEQ ID NO: 804480 - DNA, 75 bp, synthetic construct
  source 1..75: mol_type = other DNA
cggtattacccgttacgtcactgaaatccttgttaaaaccacgggcaccatgcagatgctggggagtgcaccaca

SEQ ID NO: 804481 - DNA, 75 bp, synthetic construct
  source 1..75: mol_type = other DNA
cgtggacgtaaggccacgcagccggagtcgcagccgcaaccgccggagagtgacgattacgggttttcagatgat

SEQ ID NO: 804482 - DNA, 75 bp, synthetic construct
  source 1..75: mol_type = other DNA
taatcatcagttaccaggcgaccgtgaaagcctgttctgggttaatgttaaagctattcctgctatggaaaaaga

SEQ ID NO: 804483 - DNA, 75 bp, synthetic construct
  source 1..75: mol_type = other DNA
acgccggagatgcgtgccggaggtggagtggtggtgtcctggcgttatggcaacgtgtgtgtccagcgtggtgtg

SEQ ID NO: 804484 - DNA, 75 bp, synthetic construct
  source 1..75: mol_type = other DNA
gggaggcagagcagaaaacccgtgcgtaccaggcgctggttgctcaggcagaaatcgaactggcgttccattcac

SEQ ID NO: 804485 - DNA, 75 bp, synthetic construct
  source 1..75: mol_type = other DNA
gtgatttctgacttccctcccgtttcggtagaaaaacaggttttattgcctgtcacgaataatgatcctgccagt

SEQ ID NO: 804486 - DNA, 75 bp, synthetic construct
  source 1..75: mol_type = other DNA
gtcgcagagttccttcgggaagccgaaggctgggaatggtgcgccggacgcatggagcctgtcggtgagtgccgt

SEQ ID NO: 804487 - DNA, 75 bp, synthetic construct
  source 1..75: mol_type = other DNA
catccacggcgttcagactcgcgagtatggtcacacgtcacgcagtccgctggactcgctggagagcgctatcgg

SEQ ID NO: 804488 - DNA, 75 bp, synthetic construct
  source 1..75: mol_type = other DNA
aatacccgcgatggcgtgatccatttcccgaatatccgcacctccactctctggggtcaggtgcacgatgaaaaa

SEQ ID NO: 804489 - DNA, 75 bp, synthetic construct
  source 1..75: mol_type = other DNA
tcagatctggaacgtggatttgcgcggcgaccgttcgctgacgctgcgttacattccacataatcgcgcaccgct

SEQ ID NO: 804490 - DNA, 75 bp, synthetic construct
  source 1..75: mol_type = other DNA
ggttcccggatatcgccggttccgactggctggaaacgctgcatttcgcgatgcgtgatttcaaagatgagagtt

SEQ ID NO: 804491 - DNA, 75 bp, synthetic construct
  source 1..75: mol_type = other DNA
actgtgatcacatgaccggcacctataactcgccgacgccggacgaaccgggccatactctgggcggctactcac

SEQ ID NO: 804492 - DNA, 75 bp, synthetic construct
  source 1..75: mol_type = other DNA
atgaagatcaaagctgttggtgcatattccgctaaacaaccacttgaaccgatggatatcacacggcgtgaaccg

SEQ ID NO: 804493 - DNA, 75 bp, synthetic construct
  source 1..75: mol_type = other DNA
acaaattgccgccacggaattgaacggcaatacccgcgatggcgtgatccatttcccgaatatccgcacctccac

SEQ ID NO: 804494 - DNA, 75 bp, synthetic construct
  source 1..75: mol_type = other DNA
atccgctacagaacacagtttccttcaggaaaaccaccgaaaaatggggggggctttccaacatggctaaaggat

SEQ ID NO: 804495 - DNA, 75 bp, synthetic construct
  source 1..75: mol_type = other DNA
aaaagtcgttgatagctacaacgcctggtatgaccacgtaaaaatgaagtggcaggatatcggtgatttagagct

SEQ ID NO: 804496 - DNA, 75 bp, synthetic construct
  source 1..75: mol_type = other DNA
cattgggttatgtggtgaaaaacaatatcgaagactataacgccggtgtcgcaaacgatctggataagattgtct

SEQ ID NO: 804497 - DNA, 75 bp, synthetic construct
  source 1..75: mol_type = other DNA
agtgtgattgagttgccggatattaccgctaatcgtcgcattgaggcgtcgggatactggttttaccgcaatgat

SEQ ID NO: 804498 - DNA, 75 bp, synthetic construct
  source 1..75: mol_type = other DNA
ttgatgtgatgctcgaacagcaaaacgaagacggcagcgttgagttactggaacgttgcccgccaagaatgggaa

SEQ ID NO: 804499 - DNA, 75 bp, synthetic construct
  source 1..75: mol_type = other DNA
attacttattccgtagctggaccgatgccagttcgattgtcgattacctgattttcgcccgcaaatacattaccg

SEQ ID NO: 804500 - DNA, 75 bp, synthetic construct
  source 1..75: mol_type = other DNA
aacatggcatcgtggctgatatagagatgattcgggccgatcaaaggaaggtgcgaataagcaggtcatttcttc

SEQ ID NO: 804501 - DNA, 75 bp, synthetic construct
  source 1..75: mol_type = other DNA
cggacaatattggcgtcgacgaatatgatttttatcctgactataacctattgatagaaagggagggcgttttat

SEQ ID NO: 804502 - DNA, 75 bp, synthetic construct
  source 1..75: mol_type = other DNA
ctggcggtattctagtggcatgggttagtgggtttattttcaccacactctttggctgccgtaacgtcaatctgg

SEQ ID NO: 804503 - DNA, 75 bp, synthetic construct
  source 1..75: mol_type = other DNA
agctggaagactcggtctggaatctgcaaatctccagccgggctttaccttaagtggtcttggcgctctggctga

SEQ ID NO: 804504 - DNA, 75 bp, synthetic construct
  source 1..75: mol_type = other DNA
gatatatcgtggtcgtcagaaacggaaaagcatcacaggagattaatggtttacttaacaggtcattgccaaaag

SEQ ID NO: 804505 - DNA, 75 bp, synthetic construct
  source 1..75: mol_type = other DNA
attgtaggatatgcagtatgtatgcgcttacataaatcgttgctgctaagcaggtttggaatatttagtatcttc

SEQ ID NO: 804506 - DNA, 75 bp, synthetic construct
  source 1..75: mol_type = other DNA
ctggtggattcgtccgccacttattccttcgcagttgccaacaatactgaagacttttctcagactcaccctaca

SEQ ID NO: 804507 - DNA, 75 bp, synthetic construct
  source 1..75: mol_type = other DNA
tggaccggtacaaacgcccgcaaaaaatctcgctgcaagaagagaaagcccggcagaagagtcgcgaagagtatc

SEQ ID NO: 804508 - DNA, 75 bp, synthetic construct
  source 1..75: mol_type = other DNA
aaacgtccggtaagttccgatgacgtcgaaatggcgatcagccatattaaatcgcagctgcgtgccaccggagaa

SEQ ID NO: 804509 - DNA, 75 bp, synthetic construct
  source 1..75: mol_type = other DNA
agtggcggaactggttatgccgcgcgttgtgaaaagcaacgatgtgcgcgaaccgtttaatgaagagaaattgcg

SEQ ID NO: 804510 - DNA, 75 bp, synthetic construct
  source 1..75: mol_type = other DNA
ataacgaagctgacggaggcggtcacggctttcccgtgggcgttttcgtcagcagacaagcccgtcagggcgcgt

SEQ ID NO: 804511 - DNA, 75 bp, synthetic construct
  source 1..75: mol_type = other DNA
atggttaaattctccgccaactggaaaaagcagaaagcgaagatttcccgtttacactctcatatcgcaaacatc

SEQ ID NO: 804512 - DNA, 75 bp, synthetic construct
  source 1..75: mol_type = other DNA
cgggtacgctcagccagccggggcgcaatgtccgggcaaaatcaggtttaaaccgttcgatactggatcagggct

SEQ ID NO: 804513 - DNA, 75 bp, synthetic construct
  source 1..75: mol_type = other DNA
cgatcgcgcttagccaatggcgattttcgtttctgcgaccccacctgtggctcctttggttttggctcggtggcg

SEQ ID NO: 804514 - DNA, 75 bp, synthetic construct
  source 1..75: mol_type = other DNA
ccaacggagatataaccctggttgctggccaaaacctgacgcctgtcgattctgcggctaatttagctaatttga

SEQ ID NO: 804515 - DNA, 75 bp, synthetic construct
  source 1..75: mol_type = other DNA
ccagcggtaatccccaaaaacatgcctttaatatctgacgaccagtacccttacatgactatggatgtatgcagg

SEQ ID NO: 804516 - DNA, 75 bp, synthetic construct
  source 1..75: mol_type = other DNA
acagcactgcgaaaccttgcagtagcgttcacgcattacaatgaaaaccacccgcacagcgcgctgggatatcac

SEQ ID NO: 804517 - DNA, 75 bp, synthetic construct
  source 1..75: mol_type = other DNA
acgagccgttcgacgtagctctgcgtcgcttcaagcgttcctgcgaaaaagcaggtattctggcggaagttcgtc

SEQ ID NO: 804518 - DNA, 75 bp, synthetic construct
  source 1..75: mol_type = other DNA
aaaaaatatcgtatgacaacatttagctttaatgctactggtggggatggctatccacgtattgataatagaccc

SEQ ID NO: 804519 - DNA, 75 bp, synthetic construct
  source 1..75: mol_type = other DNA
tgccgactttgcggtgatgagcggaggcggaattcgtgattctatcgaagcaggcgatatcagctataaaaacgt

SEQ ID NO: 804520 - DNA, 75 bp, synthetic construct
  source 1..75: mol_type = other DNA
tgtagatcaaagcgcggactgtgaggttgtccatgactacgatgcctctgtggtgaagcactatgatggtccata

SEQ ID NO: 804521 - DNA, 75 bp, synthetic construct
  source 1..75: mol_type = other DNA
cttatcaggttcttcgagatcctgtaatggaaggttggactgaggtaacaaagccatttacgagctatattgaaa

SEQ ID NO: 804522 - DNA, 75 bp, synthetic construct
  source 1..75: mol_type = other DNA
gacaagtagtaaaaataacaaaccagacagctattatttccccgacgccaataagccaaacgttgataacctaca

SEQ ID NO: 804523 - DNA, 75 bp, synthetic construct
  source 1..75: mol_type = other DNA
tcgcgctggactgctgcgaccgtgaggccatagactgggcagcaagcacgggaggctatgacagttcgaccgtgc

SEQ ID NO: 804524 - DNA, 75 bp, synthetic construct
  source 1..75: mol_type = other DNA
tatacaagaacaggttcgccctcaattggggcagaactttggagaccccaaaaatcctcagtgtgaagggattcc

SEQ ID NO: 804525 - DNA, 75 bp, synthetic construct
  source 1..75: mol_type = other DNA
ctgccgaagcaatgatggagactgcgacaacatggcttagcactgccatgacgatatataccgtctatgtcgttg

SEQ ID NO: 804526 - DNA, 75 bp, synthetic construct
  source 1..75: mol_type = other DNA
tcgatctgactcgccgtctgcatcagaatcaggtgtttggcctgaccgttcctttgatcaccaaggctgacggca

SEQ ID NO: 804527 - DNA, 75 bp, synthetic construct
  source 1..75: mol_type = other DNA
gccaatgatcctcgtcatgtataccttgtggcgcaaccaggcagtttcattcatccgtccatgccagctttgtac

SEQ ID NO: 804528 - DNA, 75 bp, synthetic construct
  source 1..75: mol_type = other DNA
actggtcatatagcccatgacgaatatcttataaaatcaatttattataatttattcagtggcgaaaatcctaat

SEQ ID NO: 804529 - DNA, 75 bp, synthetic construct
  source 1..75: mol_type = other DNA
aggaattattgccctcaatatgggagcctacggagaaaggggaagagtcattttattcattgtcacactcgttgt

SEQ ID NO: 804530 - DNA, 75 bp, synthetic construct
  source 1..75: mol_type = other DNA
ccttgggctacgtggtgaaaaacaacattgaagactataacgccggtgtcgcaaacgatctggataagattgtct

SEQ ID NO: 804531 - DNA, 75 bp, synthetic construct
  source 1..75: mol_type = other DNA
gcgaccagcctgttaaccgctacgctgaagtttgatggtgatatcaccgtacagctgcaaggcgacggtccgatg

SEQ ID NO: 804532 - DNA, 75 bp, synthetic construct
  source 1..75: mol_type = other DNA
atagattctgacagatgtctaataaaatcaatttattataatttatttagtggtgaaggctctaataaaaaacca

SEQ ID NO: 804533 - DNA, 75 bp, synthetic construct
  source 1..75: mol_type = other DNA
cgtttaccgcttcctgaagttcttcaccttcatgagcattgaagagatcaacgccctggaagaagaagataaaaa

SEQ ID NO: 804534 - DNA, 75 bp, synthetic construct
  source 1..75: mol_type = other DNA
caccgaagaaactgttcaggagtgggtggacaaaatccgcaagcaggttgccccgttcctcgatttcgactgtgg

SEQ ID NO: 804535 - DNA, 75 bp, synthetic construct
  source 1..75: mol_type = other DNA
cgctgagtgaagcggacttcgaacagctggcgcaggacggcgtaccgatggttaagatggaaaagggcgcagacc

SEQ ID NO: 804536 - DNA, 75 bp, synthetic construct
  source 1..75: mol_type = other DNA
gcgtttagttgtagaagacgtaaccacacaaaatgtactggccacttttatcggttcttttctcttcagcctggt

SEQ ID NO: 804537 - DNA, 75 bp, synthetic construct
  source 1..75: mol_type = other DNA
cattgccttaatcctcatcacattgcttcgctggatacagcatttgacctctctggggagggttggtgagacaac

SEQ ID NO: 804538 - DNA, 75 bp, synthetic construct
  source 1..75: mol_type = other DNA
ggttctttgagtgcgctgagtgaagcggacttcgaacagctggcgcaggacggcgtaccgatggttgagatggaa

SEQ ID NO: 804539 - DNA, 75 bp, synthetic construct
  source 1..75: mol_type = other DNA
cgcctgtatcaacatgagctttatttccgtactaaaggcagtaaaggcgaacgtctgaacagcgtcgatctcgaa

SEQ ID NO: 804540 - DNA, 75 bp, synthetic construct
  source 1..75: mol_type = other DNA
ataacaaacctgataagaaaccgaagctggaagttgccagttggcaagaagaggttgatggtgaacaagtaactc

SEQ ID NO: 804541 - DNA, 75 bp, synthetic construct
  source 1..75: mol_type = other DNA
cggagttctttaagaaatggaatccgggcgcgaatgcttaccagctgccgggggcgagcgagatgagcttcgagg

SEQ ID NO: 804542 - DNA, 75 bp, synthetic construct
  source 1..75: mol_type = other DNA
tttaaaacgttcactgagtttctgaactgctacaccaacaatgcatacgttggcacgcagtgttctgctgagctg

SEQ ID NO: 804543 - DNA, 75 bp, synthetic construct
  source 1..75: mol_type = other DNA
ccaatggccgccagggtgagcgtctcaacagcgttgatctggaacgtttataccaaaacatgtccgtctggctgt

SEQ ID NO: 804544 - DNA, 75 bp, synthetic construct
  source 1..75: mol_type = other DNA
ctccgatacgccgcctgtagattctggaacagggtctttgccggaagtgaaacctgatccaacaccaaacccgga

SEQ ID NO: 804545 - DNA, 75 bp, synthetic construct
  source 1..75: mol_type = other DNA
tctgaatccggaagagattccgttgctgatcctcaacggctttgaatatgtgactcagtggtctggcgatcccta

SEQ ID NO: 804546 - DNA, 75 bp, synthetic construct
  source 1..75: mol_type = other DNA
gctacttgtcaaatgacatctggcagccaaataccaagagcatcatgactgtcggcaccaacctggagaacgttt

SEQ ID NO: 804547 - DNA, 75 bp, synthetic construct
  source 1..75: mol_type = other DNA
cgaccattgcgctgactgaactgggtgatgaagttcgcggggcgaatatcgatcagcttattcatcgctattcga

SEQ ID NO: 804548 - DNA, 75 bp, synthetic construct
  source 1..75: mol_type = other DNA
cattaacttgtactcagctccaaccaaatggtttgcaggtaacatgcagtcaactggcctgtgggcacctgccca

SEQ ID NO: 804549 - DNA, 75 bp, synthetic construct
  source 1..75: mol_type = other DNA
aactgtctggaataccgtcctggcacgaacgttccggtaaccggtggcatgtatgttccgcagtatacgcaactg

SEQ ID NO: 804550 - DNA, 75 bp, synthetic construct
  source 1..75: mol_type = other DNA
gcgtagcttgcgtgcggttgaaaaagtgtcgtttagccttgaggacgcgcaagaactggcgggctccgatgacaa

SEQ ID NO: 804551 - DNA, 75 bp, synthetic construct
  source 1..75: mol_type = other DNA
tcataaaacagaggattctctgaaggctgcgaaggagaaaattttcgccgcgttcccggggctgaaagagtgtaa

SEQ ID NO: 804552 - DNA, 75 bp, synthetic construct
  source 1..75: mol_type = other DNA
ggaaaaacgatctgaactcccctgcgccgctgggcgagctggaatcagacgctttcgtttataccacgccgaaga

SEQ ID NO: 804553 - DNA, 75 bp, synthetic construct
  source 1..75: mol_type = other DNA
ctgaatcttgacgccgacactgcgaaagcgatggtgcaggctgcggatttaggcaccaacattcagcgcctgtat

SEQ ID NO: 804554 - DNA, 75 bp, synthetic construct
  source 1..75: mol_type = other DNA
gaaagccagcatgaccgtaggcaccaacctggataccgtctatttcaaacgtcatggtcaggttacaggaaacag

SEQ ID NO: 804555 - DNA, 75 bp, synthetic construct
  source 1..75: mol_type = other DNA
tttactgctggcgactggcggcgtggcctggaactacgggctggcggcggcgggcacgtttattaccttgctacc

SEQ ID NO: 804556 - DNA, 75 bp, synthetic construct
  source 1..75: mol_type = other DNA
gcgctgaaccgtccgccaagagtaactaaaacgtatactctggaggctaatggtacggtgacgttcaaggtgcct

SEQ ID NO: 804557 - DNA, 75 bp, synthetic construct
  source 1..75: mol_type = other DNA
agggtctttgccggatgtgaaacctgatccaacaccaaacccggagccgacgcctgagccgactccggacccaga

SEQ ID NO: 804558 - DNA, 75 bp, synthetic construct
  source 1..75: mol_type = other DNA
tagattctggaacagggtctttgccggaagtgaaacctgatccaacaccaaacccggagccgacgcctgagccaa

SEQ ID NO: 804559 - DNA, 75 bp, synthetic construct
  source 1..75: mol_type = other DNA
ttaaacatttgaccagctatggcgatctgaatccggaagaagttccgttgctgatcctcaacggctttgaatatg

SEQ ID NO: 804560 - DNA, 75 bp, synthetic construct
  source 1..75: mol_type = other DNA
tctaccaacttctatggcagcaccggtaatgcgcgcggtcaggcggtggtgaatatctccaacgcggccttcccg

SEQ ID NO: 804561 - DNA, 75 bp, synthetic construct
  source 1..75: mol_type = other DNA
tacagctgggccggtggtgtcaatgataaaggtgagtgtacgctcagcggtgattcagatgacatgaagcacttc

SEQ ID NO: 804562 - DNA, 75 bp, synthetic construct
  source 1..75: mol_type = other DNA
catcagcctgtactcgaacccgaccaaatggtttgcgggtaacatgcagtctactggtctgtgggctccggctca

SEQ ID NO: 804563 - DNA, 75 bp, synthetic construct
  source 1..75: mol_type = other DNA
gcagtaaaggtgagcgtctgaacagcgtcgatctggagcgtttgtaccagaacatgtcggtctggttgtggaacg

SEQ ID NO: 804564 - DNA, 75 bp, synthetic construct
  source 1..75: mol_type = other DNA
gaattctggacgcgttcccagggctggaagtgtgtaaggattctgactaccactatgaggtcaactgtctggaat

SEQ ID NO: 804565 - DNA, 75 bp, synthetic construct
  source 1..75: mol_type = other DNA
tggtttcgtgagcgccttatcacccaccgtctcgcctctgtaaatctgtcacgtttaccttacgagcctaaactt

SEQ ID NO: 804566 - DNA, 75 bp, synthetic construct
  source 1..75: mol_type = other DNA
atgctgaagaatctggctaaactggatcaaacagaaatggataaagtgaatgtcgatttggcggcggccggggtg

SEQ ID NO: 804567 - DNA, 75 bp, synthetic construct
  source 1..75: mol_type = other DNA
accgtgaagatctcggagggatgtttgatcctgcttgcggataacaacgaagtacaggaactgcgcagggaactt

SEQ ID NO: 804568 - DNA, 75 bp, synthetic construct
  source 1..75: mol_type = other DNA
accgtgaagatctcggaggggtgtattgtgctgatggctgacggtaatgagttgcaggagctgcgcgagcagctt

SEQ ID NO: 804569 - DNA, 75 bp, synthetic construct
  source 1..75: mol_type = other DNA
gggtggcgaaactctaccggctggatacctacccgcaccagattgaagtgataacctcagaacagatgatggatg

SEQ ID NO: 804570 - DNA, 75 bp, synthetic construct
  source 1..75: mol_type = other DNA
acgtttaccttacgagcccaaacttaaaaaaaacttatacagagttacactttcttacataacgcctgctaaatt

SEQ ID NO: 804571 - DNA, 75 bp, synthetic construct
  source 1..75: mol_type = other DNA
tcattgcccaaagcaataagcacttttaatgatcacatcaacgaatatgaatcagtaaaaatcaaaatgcgataa

SEQ ID NO: 804572 - DNA, 75 bp, synthetic construct
  source 1..75: mol_type = other DNA
cataggaatagaaccattaaatccaatgataagacaagatctgactcttggatatatcgtggtagtcagaaacag

SEQ ID NO: 804573 - DNA, 75 bp, synthetic construct
  source 1..75: mol_type = other DNA
atgagaaaaataaaagaaaaaatctacttgcctacaactttaacaggaaacatggataaacactatatccctgtt

SEQ ID NO: 804574 - DNA, 75 bp, synthetic construct
  source 1..75: mol_type = other DNA
cttaaaggtaactggctcgaagacgcgggatttgagaccgggcgaggtgtcacggtgaagatttcggagggttgc

SEQ ID NO: 804575 - DNA, 75 bp, synthetic construct
  source 1..75: mol_type = other DNA
tgactccgaaattcagcgtctggcgatgcttatggctgatgtaatcatcatcccgctgcgccctaaacgtcgtga

SEQ ID NO: 804576 - DNA, 75 bp, synthetic construct
  source 1..75: mol_type = other DNA
cagtgaaactagccgaggaaaattttctggccgggattcagattgcctttgatcgcaaaacatcacggccatact

SEQ ID NO: 804577 - DNA, 75 bp, synthetic construct
  source 1..75: mol_type = other DNA
gaggtaggaaaggagtcagttatatagatgattgtaaatcccatcttaataagtcaattatcattcaagaagata

SEQ ID NO: 804578 - DNA, 75 bp, synthetic construct
  source 1..75: mol_type = other DNA
ttactacaccagctcaggccgtggcgtaactggcgaaaacggcaaattcaacttcagctggggcgaaaccatctc

SEQ ID NO: 804579 - DNA, 75 bp, synthetic construct
  source 1..75: mol_type = other DNA
cactggcggactggagcaattcgctaacgatctggacacctttgccagctcgatgaatgacttctacggtcgtga

SEQ ID NO: 804580 - DNA, 75 bp, synthetic construct
  source 1..75: mol_type = other DNA
tgaaaccatcagcctgtactcgaatccgaccaaatggtttgcaggtaacatgcagtcaactggcctgtgggcacc

SEQ ID NO: 804581 - DNA, 75 bp, synthetic construct
  source 1..75: mol_type = other DNA
aaggtgccttacggtggcctgatttatatcaagggcaatagctctaccaatgaatctgccagcttcacctttact

SEQ ID NO: 804582 - DNA, 75 bp, synthetic construct
  source 1..75: mol_type = other DNA
gcgaacaacgtgctggcgctgtacatgcaggatcgctatctcggcaagatgaaccgtgtcgctgacgatattacc

SEQ ID NO: 804583 - DNA, 75 bp, synthetic construct
  source 1..75: mol_type = other DNA
tgatgacaagccgaaactggaagtggccagctggctggaagatgtcgatggcaaacaggtcaagcgctatgcctt

SEQ ID NO: 804584 - DNA, 75 bp, synthetic construct
  source 1..75: mol_type = other DNA
aaaagaacgacgtataaagtggttggggagttattaaaaatacatgagcttattaaacagcgtgttttttcgggg

SEQ ID NO: 804585 - DNA, 75 bp, synthetic construct
  source 1..75: mol_type = other DNA
aagtcaattatcattcaagaagatatgaaggatttctttccttctataaaagaagatctgatagctaaagctttt

SEQ ID NO: 804586 - DNA, 75 bp, synthetic construct
  source 1..75: mol_type = other DNA
gatatgtcgatgacataactattagtttcgaatcagaagttaataatgaagatatttcaaaaataaaaacaatga

SEQ ID NO: 804587 - DNA, 75 bp, synthetic construct
  source 1..75: mol_type = other DNA
cgaaagcgatgctgcaggctgcggatttaggcaccaatattcagcgcctgtatcagcatgagctttatttccgta

SEQ ID NO: 804588 - DNA, 75 bp, synthetic construct
  source 1..75: mol_type = other DNA
accgaagctggaagttgccagctggcaggaagaagttgagggtaaacaggtaacccaattcgcctttattgatga

SEQ ID NO: 804589 - DNA, 75 bp, synthetic construct
  source 1..75: mol_type = other DNA
cgttcaacgccaatttgggtctatgagcgttatccggctgtcgatggtaaaccaccgtataccattgatgacacc

SEQ ID NO: 804590 - DNA, 75 bp, synthetic construct
  source 1..75: mol_type = other DNA
tatcgttgtcggctgttacaggattatatcagcggcatgacggacctttatgcgtgggatgaatatcggcggctg

SEQ ID NO: 804591 - DNA, 75 bp, synthetic construct
  source 1..75: mol_type = other DNA
gaccttgaagatgcggtagagaaaagaatattcaccgtcgagcagctttatcatcatttgcatgaggcatggggc

SEQ ID NO: 804592 - DNA, 75 bp, synthetic construct
  source 1..75: mol_type = other DNA
accgatgatcgctgtcgtgtggcaacgttgcgattaagggaaggagaggaaccgctcaatgaattgcggcgcaaa

SEQ ID NO: 804593 - DNA, 75 bp, synthetic construct
  source 1..75: mol_type = other DNA
tgcgtaaagaacttaatttggcgctttacagtcgttttccattaacgtggattatggaagctgccgacgacatct

SEQ ID NO: 804594 - DNA, 75 bp, synthetic construct
  source 1..75: mol_type = other DNA
tgtatttacgggttaatactctcaataaactggtgccttacgcggcacaacgatttattgataatttaccgacga

SEQ ID NO: 804595 - DNA, 75 bp, synthetic construct
  source 1..75: mol_type = other DNA
aaaatcacgttcaaatagcttaagccacagcacggaagatcagttttttatgtatttacgggtgaatagcttaaa

SEQ ID NO: 804596 - DNA, 75 bp, synthetic construct
  source 1..75: mol_type = other DNA
tcgccagtggagataaaggaaatcaagcgcatcaccaactatgccatgagtgtagctggtggacaaggctatcag

SEQ ID NO: 804597 - DNA, 75 bp, synthetic construct
  source 1..75: mol_type = other DNA
ataatcccaaagtcagaggtgcctttcacatggctgtatctgcacgcccttactttgtctggcgctttatgcagt

SEQ ID NO: 804598 - DNA, 75 bp, synthetic construct
  source 1..75: mol_type = other DNA
tgtttgctgctcgacaatggcatccatgagtagttggtgttgtagttgtcgtaaaaatttctcatcgtctggtga

SEQ ID NO: 804599 - DNA, 75 bp, synthetic construct
  source 1..75: mol_type = other DNA
accgacgatcgttgtagtgtagccgcgttgagattgagggaaggggaagatcctctcaacgaactgcgacgaaaa

SEQ ID NO: 804600 - DNA, 75 bp, synthetic construct
  source 1..75: mol_type = other DNA
ggtgcatacattgatgcggatgaatctcacctgggcacaggttggcggtattttaaaatatacccgtccggcgtg

SEQ ID NO: 804601 - DNA, 75 bp, synthetic construct
  source 1..75: mol_type = other DNA
agcattgcaatattcaccgttaccgctgccactgagcgcgaagcacgcgcccagctgccgcacgcacatctgatt

SEQ ID NO: 804602 - DNA, 75 bp, synthetic construct
  source 1..75: mol_type = other DNA
catcaaagtcgatgaagccggttttgaagcggcaatggaagagcagcgtcgtcgcgcgcgcgaagccagcggctt

SEQ ID NO: 804603 - DNA, 75 bp, synthetic construct
  source 1..75: mol_type = other DNA
gcctggaactacgggctggcggcggcgggcacgtttattaccttgttaccgttattaagccttccggagttgcca

SEQ ID NO: 804604 - DNA, 75 bp, synthetic construct
  source 1..75: mol_type = other DNA
acctggcaggtggggctttcggtgacgctgaccggcggcgcgatgtttgttggcctgatggttggcggtgtgctg

SEQ ID NO: 804605 - DNA, 75 bp, synthetic construct
  source 1..75: mol_type = other DNA
tatggctattgtggccgtgatttttttctgcacactggtattccagcctgtcagcatgaggttgcgcactctgtt

SEQ ID NO: 804606 - DNA, 75 bp, synthetic construct
  source 1..75: mol_type = other DNA
tgccgggccatgaaattgtagggcgcgtggtagctgttggtgatcaggtagaaaaacatgcgccgggcgatctgg

SEQ ID NO: 804607 - DNA, 75 bp, synthetic construct
  source 1..75: mol_type = other DNA
ctcgacgattttaccaccttgctgaagcgcgatggcaccatgacgctggttggtgcgcctgcgacaccgcataaa

SEQ ID NO: 804608 - DNA, 75 bp, synthetic construct
  source 1..75: mol_type = other DNA
cgcgccagcgggttcggcggagactggcgggtgcgccagcagctgcctgtcggagtcgggcctgacgaccggctg

SEQ ID NO: 804609 - DNA, 75 bp, synthetic construct
  source 1..75: mol_type = other DNA
gttaactctaactatgacatcgacctgttccgtacgctgatccaggcggtagcgaaagtcactggtgcaaccgat

SEQ ID NO: 804610 - DNA, 75 bp, synthetic construct
  source 1..75: mol_type = other DNA
ggcgctgtttggcgagaagtatgatgagcgcgtacgcgtgctgagcatgggcgatttctccaccgagctgtgtgg

SEQ ID NO: 804611 - DNA, 75 bp, synthetic construct
  source 1..75: mol_type = other DNA
gcgctgctggatgaagagctggcaaaactttctggtgatacgctggatggtgaaactgctttccgtctgtacgac

SEQ ID NO: 804612 - DNA, 75 bp, synthetic construct
  source 1..75: mol_type = other DNA
cgtgtacgccagctttttgctgtcggataaggtactgctgatgctgtttgcgctggtcctggtggggctggcact

SEQ ID NO: 804613 - DNA, 75 bp, synthetic construct
  source 1..75: mol_type = other DNA
atgaaaactatcggttatgccgcactctcttccgacgcagaactggttccttatcattttaaacgtcgtgagtta

SEQ ID NO: 804614 - DNA, 75 bp, synthetic construct
  source 1..75: mol_type = other DNA
gggtggtggacgtcctgacatggcgcaagccggtggtacggatgctgcggccttacctgcagcgttagccagtgt

SEQ ID NO: 804615 - DNA, 75 bp, synthetic construct
  source 1..75: mol_type = other DNA
attcaaccggatcgcgtattaaccgttaatatcaagggcgcggtactcgccagcgaacaggcattgcgggaagca

SEQ ID NO: 804616 - DNA, 75 bp, synthetic construct
  source 1..75: mol_type = other DNA
ccgtcgtctgggtggcgaagtcaccgacgctgcgttcatcattaatctgttcgatctcggcggtgaacagcgtct

SEQ ID NO: 804617 - DNA, 75 bp, synthetic construct
  source 1..75: mol_type = other DNA
agcaacaacggtgatggatacgactacaagcctgaatgccgttactttgaggtgaacgtgcacgggcagtttggc

SEQ ID NO: 804618 - DNA, 75 bp, synthetic construct
  source 1..75: mol_type = other DNA
atgattacattcaaaccaacgcgaaacatcgacctgatagaagcagtaggaaatcaccctgacattatcgccggg

SEQ ID NO: 804619 - DNA, 75 bp, synthetic construct
  source 1..75: mol_type = other DNA
accgatgcgatggaagagatcaagaagatctttacgccagagttccgtaaccgtctcgacaacattatctggttc

SEQ ID NO: 804620 - DNA, 75 bp, synthetic construct
  source 1..75: mol_type = other DNA
tcagagtgaccgcgatactctgaaaaacctcggcgatcgcctgaaaatgctggtcttcggtcaggataaagccat

SEQ ID NO: 804621 - DNA, 75 bp, synthetic construct
  source 1..75: mol_type = other DNA
gcgcgagcaccgtcatgagtttatgaccgtcgagcacttgttactggcattgctcagtaatccgtctgctcggga

SEQ ID NO: 804622 - DNA, 75 bp, synthetic construct
  source 1..75: mol_type = other DNA
gcgcattacggatgtggccagaaagctcaacacccgccactggccgctggccagactggcactcagcgggctgaa

SEQ ID NO: 804623 - DNA, 75 bp, synthetic construct
  source 1..75: mol_type = other DNA
cgaactgatttacggacgattgttaaagaaggatttgcgcaagagaagaaaattaatgaccagcaagcagtgtac

SEQ ID NO: 804624 - DNA, 75 bp, synthetic construct
  source 1..75: mol_type = other DNA
gatgaacaaagccagaaagcagcagaggcatccccgtcagaagacggggagaacgataccgtatacgggcaggag

SEQ ID NO: 804625 - DNA, 75 bp, synthetic construct
  source 1..75: mol_type = other DNA
atgattacattcaaaccaacgcgaaacatcgacctgatcgaagcagtcggaaatcaccctgacattatcgccggg

SEQ ID NO: 804626 - DNA, 75 bp, synthetic construct
  source 1..75: mol_type = other DNA
tacttcaaaggcgtggatgacgtgacgttttacagcgccacacgcgaagaactaatcgacttcctgaatcacggg

SEQ ID NO: 804627 - DNA, 75 bp, synthetic construct
  source 1..75: mol_type = other DNA
ggcattgtttactatcaggagattcagccgcttacattcgattgccacgccatgtacctgccagaggttcgcgga

SEQ ID NO: 804628 - DNA, 75 bp, synthetic construct
  source 1..75: mol_type = other DNA
gaaggagctggagcgtgctattcaggttctctgccgtcgccgtaaaaacaacccgctgctggtgggggagtctgg

SEQ ID NO: 804629 - DNA, 75 bp, synthetic construct
  source 1..75: mol_type = other DNA
ccagagtgaatgagatacttgagatactttattcacagaacagaatcctggtcgataaaagaggaaagacattat

SEQ ID NO: 804630 - DNA, 75 bp, synthetic construct
  source 1..75: mol_type = other DNA
acagattaacaaagatgtggaggaacttgactggtggatcagaaaccagtgctctcgtataggagctccctatat

SEQ ID NO: 804631 - DNA, 75 bp, synthetic construct
  source 1..75: mol_type = other DNA
aatatatgaagtacaacagcgcacacaggctcctgtgtcattaatcggcacttcacttattggcgttatgtccta

SEQ ID NO: 804632 - DNA, 75 bp, synthetic construct
  source 1..75: mol_type = other DNA
tgtgccagatggcgattaatgagctgcgccaggaaaccggcaacgaatcactgcaatttattgccgtacgcctgc

SEQ ID NO: 804633 - DNA, 75 bp, synthetic construct
  source 1..75: mol_type = other DNA
atagagaactggtatctgaaaaccgaacataaacgccgtccgccaattaccgttttcgatgatttctggaaaaag

SEQ ID NO: 804634 - DNA, 75 bp, synthetic construct
  source 1..75: mol_type = other DNA
gacggaggcactgacattaacccgctataccgtttgaacaagcgtcagggtaaacaattactggcagcgttaggt

SEQ ID NO: 804635 - DNA, 75 bp, synthetic construct
  source 1..75: mol_type = other DNA
ttatctggtctttttgaacacgctgactcccagcacaaactttgaatcaaacagaaacaaaataattgctcaagc

SEQ ID NO: 804636 - DNA, 75 bp, synthetic construct
  source 1..75: mol_type = other DNA
cttgtaatcgacacattaaaagagaatggagtagccaaatataatgcagcacacttcaaagcagagccttttata

SEQ ID NO: 804637 - DNA, 75 bp, synthetic construct
  source 1..75: mol_type = other DNA
atgatgccactcctgcggctattaaagattacctctgtggttattggcgatctgtcggtattatgtctgatgagg

SEQ ID NO: 804638 - DNA, 75 bp, synthetic construct
  source 1..75: mol_type = other DNA
atgaggtcgcatttaattttgttggattgtttgatggctttaattcacttggcaaaaagaaagaaagtgaaatca

SEQ ID NO: 804639 - DNA, 75 bp, synthetic construct
  source 1..75: mol_type = other DNA
ttttcaaacatcatgctatccgatgataagataccatctacatttgatggcattgagcaaatagcatcgttaatc

SEQ ID NO: 804640 - DNA, 75 bp, synthetic construct
  source 1..75: mol_type = other DNA
gccgatcgttaacggaaaatcgggtagtgactccaacttactgatagtgttttatgttcagataatgcccgatga

SEQ ID NO: 804641 - DNA, 75 bp, synthetic construct
  source 1..75: mol_type = other DNA
tgggggaaaatgagcagcagtgggaagagctggcgcgcctggtgcaagaagctggcgcggatatgatcgagtgta

SEQ ID NO: 804642 - DNA, 75 bp, synthetic construct
  source 1..75: mol_type = other DNA
agagctggcgcgcctggtgcaagaagctggtgccgatatgatcgagtgtaacttctcctgtccgcaaatgacttc

SEQ ID NO: 804643 - DNA, 75 bp, synthetic construct
  source 1..75: mol_type = other DNA
atgaatactcaatttctcgaatacgtgcgccagcagttgatggtggcgaccgcagacctcagcggggcgacgaaa

SEQ ID NO: 804644 - DNA, 75 bp, synthetic construct
  source 1..75: mol_type = other DNA
tgcgtgagcagctcatgatcgccaccgctgatttgagtggagcaacaaaaggtcagcttgaagcctggcaggaga

SEQ ID NO: 804645 - DNA, 75 bp, synthetic construct
  source 1..75: mol_type = other DNA
cgcgggataatccaccaatcccggggaaacaatcgctggcaaaggggacgtcaattcctctggtaagtcaggttg

SEQ ID NO: 804646 - DNA, 75 bp, synthetic construct
  source 1..75: mol_type = other DNA
gactgaaacacatatctgctttacccgcatggacggcgatcgactggtgatccacgcctccactcaggtaccgtg

SEQ ID NO: 804647 - DNA, 75 bp, synthetic construct
  source 1..75: mol_type = other DNA
tgtcggcgtagtgcagtctggttataacgatccagctgcggcactgatcatcagcgatctgctcgatcgcattgc

SEQ ID NO: 804648 - DNA, 75 bp, synthetic construct
  source 1..75: mol_type = other DNA
atttacgcagttacggcgcaccgaaaattggtgacattccgcgtgatttccgcgctgtgctggtgccgagcgacg

SEQ ID NO: 804649 - DNA, 75 bp, synthetic construct
  source 1..75: mol_type = other DNA
ccaaagcctacgacacaggttggggcggcgtggtgtttaaaacgatcggcttttttatcgccaacgaagtctcgc

SEQ ID NO: 804650 - DNA, 75 bp, synthetic construct
  source 1..75: mol_type = other DNA
tgaagttgccgtcaacacgcgtaccggtgaaatccgcctggacaaattctacgccctgctggattgcggtacgcc

SEQ ID NO: 804651 - DNA, 75 bp, synthetic construct
  source 1..75: mol_type = other DNA
accatggcacttacgccgccaggtcgcgcgcctcgtgggcatgaaacagcataaagttcatgtcattaaagagcg

SEQ ID NO: 804652 - DNA, 75 bp, synthetic construct
  source 1..75: mol_type = other DNA
atgaatactcaatttctcgaatacgtgcgccagcagctgatggtggccaccgctgatttaagtggtgcgacgaaa

SEQ ID NO: 804653 - DNA, 75 bp, synthetic construct
  source 1..75: mol_type = other DNA
gaagaaatgatcctggccgcctttaagaaggtgccgaatgagttgaacaagaaattctcgtataaagaggtcaga

SEQ ID NO: 804654 - DNA, 75 bp, synthetic construct
  source 1..75: mol_type = other DNA
caatcacagaaagaatgggtaccgattatacagatttatatcgccccttgatagaagccatgtctaattcagtag

SEQ ID NO: 804655 - DNA, 75 bp, synthetic construct
  source 1..75: mol_type = other DNA
atccctgtctcggcggatatccatggcttgagaacaatgaacagccgaaaggaacagttgcagtttatccgaaga

SEQ ID NO: 804656 - DNA, 75 bp, synthetic construct
  source 1..75: mol_type = other DNA
aggactgtcgatgctgagtaaaggttggcctgagatatttgctgaagccgcacataccctggcatttgaaacatt

SEQ ID NO: 804657 - DNA, 75 bp, synthetic construct
  source 1..75: mol_type = other DNA
gaaattctcttataaagaggtcagaaaactaccatttaagataaccatcaccggacggatatcggcaagcctgac

SEQ ID NO: 804658 - DNA, 75 bp, synthetic construct
  source 1..75: mol_type = other DNA
agtccatcctctgatgaagtctggttaccagcgcgccatctgttttcggatgcggctaacttctacgctactggc

SEQ ID NO: 804659 - DNA, 75 bp, synthetic construct
  source 1..75: mol_type = other DNA
gatattaactgttattatcaacttgcaggcgaactgcagtcacgcttattaaatggagtgtatcaacgggatctt

SEQ ID NO: 804660 - DNA, 75 bp, synthetic construct
  source 1..75: mol_type = other DNA
cgctgtcctgtctctggaagaccatcagagagcatggttgctctggacctacagcgacaatatctgctgggagct

SEQ ID NO: 804661 - DNA, 75 bp, synthetic construct
  source 1..75: mol_type = other DNA
gccggaaactttcgcacagtatgtggctgatacgcacacattaacgtacgttttcgttccattggccctcacccc

SEQ ID NO: 804662 - DNA, 75 bp, synthetic construct
  source 1..75: mol_type = other DNA
gttgctgtggtgcagtgcggcaaaacaagggttcaatgattcacgctggctgacctacaaacaggcgcaggagtt

SEQ ID NO: 804663 - DNA, 75 bp, synthetic construct
  source 1..75: mol_type = other DNA
atgtctatttccctgcataaccagactaccgcccctaacgccgctgcggcgaccagcgtatccccgctggaccag

SEQ ID NO: 804664 - DNA, 75 bp, synthetic construct
  source 1..75: mol_type = other DNA
cggatattggtactggcctggatactgtggtgacgaaactggcagcagaagtgctgcactgccccccgcaggacg

SEQ ID NO: 804665 - DNA, 75 bp, synthetic construct
  source 1..75: mol_type = other DNA
agccttttgacgtccatttccgtcacctgagcgaggcggagattgataattatgtgcgtaaggagcatcccctgc

SEQ ID NO: 804666 - DNA, 75 bp, synthetic construct
  source 1..75: mol_type = other DNA
gcgcgtctgcaattacgcaaagccagcggcaatattgtcaccttctatactgggctggcgctgtttaattcggcg

SEQ ID NO: 804667 - DNA, 75 bp, synthetic construct
  source 1..75: mol_type = other DNA
cggtaaaccgttaacggaagaaaatgcgcgtctgcaattacgcaaagccagcggcaatattgtcaccttctatac

SEQ ID NO: 804668 - DNA, 75 bp, synthetic construct
  source 1..75: mol_type = other DNA
gcccggtacgcattgcaaatgggtgcaggccgatagccagcaaatcaacgattttcgcaccgtgatgaccggtga

SEQ ID NO: 804669 - DNA, 75 bp, synthetic construct
  source 1..75: mol_type = other DNA
tttttgaagttcgcgcctcgcatgtgctgggaacacttccccgcgaacaggtcagcgaatttctctctggtttgt

SEQ ID NO: 804670 - DNA, 75 bp, synthetic construct
  source 1..75: mol_type = other DNA
tggaatgaatttaacgcccaatccggtaccagaaaaattgcagggaaaacgctggagcgcctgaaaaaattaatc

SEQ ID NO: 804671 - DNA, 75 bp, synthetic construct
  source 1..75: mol_type = other DNA
gcgtaaaattacgcgaccagcagcgcctcgataagctgggttatctggaagaatacccgcagtatccgaatggca

SEQ ID NO: 804672 - DNA, 75 bp, synthetic construct
  source 1..75: mol_type = other DNA
tacaatgaaacacatttttcatcggctggatagtgaaactttattgttagtggtgagaacgcgttcaacacaaaa

SEQ ID NO: 804673 - DNA, 75 bp, synthetic construct
  source 1..75: mol_type = other DNA
tggtgtgggtcggtaaggatgtgacaggcattgaaccccgtaacgccagtgttattgaagttcctgatattaccg

SEQ ID NO: 804674 - DNA, 75 bp, synthetic construct
  source 1..75: mol_type = other DNA
ctttattgtttgtaatgagaacgcgttcaaaacaaaaggcggcattttcaaagcaaagtgttgcaaaagtagatt

SEQ ID NO: 804675 - DNA, 75 bp, synthetic construct
  source 1..75: mol_type = other DNA
taaaagagggcgatcccctgcaggtggccagctggtatcaggcctgttttgatgcaggcctgccggtcaccgtcc

SEQ ID NO: 804676 - DNA, 75 bp, synthetic construct
  source 1..75: mol_type = other DNA
tctcgataaattgggttatctggaagaatacccgcagtatccgaatggcacatttggtgatgcagttccccgcgg

SEQ ID NO: 804677 - DNA, 75 bp, synthetic construct
  source 1..75: mol_type = other DNA
gaagggcgttttcttgctgaggtgtcattgaacaagtcccatgtcggcaagcatacatacaaacgaaagaaaccg

SEQ ID NO: 804678 - DNA, 75 bp, synthetic construct
  source 1..75: mol_type = other DNA
tgttggcgtggtgcagtccggttataacgatccggcagcatctttgattattaccgatctactcgatcgcattgc

SEQ ID NO: 804679 - DNA, 75 bp, synthetic construct
  source 1..75: mol_type = other DNA
tgataaaggcgcatatgcctcgtccggtacttgcttctcgggtaacgcggcgcgtttggcagcggaaaatctgcg

SEQ ID NO: 804680 - DNA, 75 bp, synthetic construct
  source 1..75: mol_type = other DNA
acagtatgagcgaagaaatcatttatgacgccgaaggtcacccgttaacgcgtgatttacgcagttacggcgcac

SEQ ID NO: 804681 - DNA, 75 bp, synthetic construct
  source 1..75: mol_type = other DNA
gtgccgagcgacgataaagtcggtccattcggagcaaaatcgatctcagaaattggcgtaaatggtgcagcacca

SEQ ID NO: 804682 - DNA, 75 bp, synthetic construct
  source 1..75: mol_type = other DNA
tatggacaaaggcttcgctgatgctgatgtgatcattgagcgaacctataattcaactcaggcacaacaatgccc

SEQ ID NO: 804683 - DNA, 75 bp, synthetic construct
  source 1..75: mol_type = other DNA
gatgtgatcattgagcgaacctataactcaacgcaggcgcagcagtgcccgactgaaacacatatctgctttacc

SEQ ID NO: 804684 - DNA, 75 bp, synthetic construct
  source 1..75: mol_type = other DNA
tcaggtcaccataacgcagtgggcatggagcgagtttaagactctgttgggtaccaggaaaattgcaggtaagac

SEQ ID NO: 804685 - DNA, 75 bp, synthetic construct
  source 1..75: mol_type = other DNA
cgtccctgactcgttcgcaacagaggtcgacaaactaccatcaaaatattgcaaaaacgaaccggaatcgctata

SEQ ID NO: 804686 - DNA, 75 bp, synthetic construct
  source 1..75: mol_type = other DNA
gatgaggtaacgggcaagatgattacgctggataatccgccgatttccggtaagcagtcgtacgcaaaaggttca

SEQ ID NO: 804687 - DNA, 75 bp, synthetic construct
  source 1..75: mol_type = other DNA
ccgttccttccgccgccagctgcgcactggaagagatcctgcgtcagggtcgcgagatgatccaatggtcttcac

SEQ ID NO: 804688 - DNA, 75 bp, synthetic construct
  source 1..75: mol_type = other DNA
acagcggaaatatttgctgggagtatcaggtcaccataacccgctgggcatgggaagagtttaaggctcattctg

SEQ ID NO: 804689 - DNA, 75 bp, synthetic construct
  source 1..75: mol_type = other DNA
gatgaagtgaccggcaggttaataacgctggataatccgccgatacccggtaagcagtcacgggcgaaaggctca

SEQ ID NO: 804690 - DNA, 75 bp, synthetic construct
  source 1..75: mol_type = other DNA
cgacaccagcactggtagggcgtgaaaacttaatgcaggccggggcgatcaccatgttgaccgtgcgtctggggt

SEQ ID NO: 804691 - DNA, 75 bp, synthetic construct
  source 1..75: mol_type = other DNA
cttttgagcatggtgtggagctgcgacttatccagcccggcaagccaacgcagaacggatttattgagagtttta

SEQ ID NO: 804692 - DNA, 75 bp, synthetic construct
  source 1..75: mol_type = other DNA
ataacattttctctggcgacctatgcgtccgatgtcggaattgcctctgttgtcagaggagcgcaggttggctca

SEQ ID NO: 804693 - DNA, 75 bp, synthetic construct
  source 1..75: mol_type = other DNA
aaacaaatttctctgaatgaatatgagggagtatttaaaaaatctgattttaaaattttactggggcgcctgaca

SEQ ID NO: 804694 - DNA, 75 bp, synthetic construct
  source 1..75: mol_type = other DNA
ttaccagccggagaaagtgaaattatcttcactaagatcgccaattcggttaccgatgacagtatcgccatctct

SEQ ID NO: 804695 - DNA, 75 bp, synthetic construct
  source 1..75: mol_type = other DNA
aatcactccccggaacttatatttcattgtctggcgcgcctacaacatacagcgaccaggcatttgttgcgttat

SEQ ID NO: 804696 - DNA, 75 bp, synthetic construct
  source 1..75: mol_type = other DNA
ttccatattaccggctgcaagagcaaatcactccccggaacttatatttcactgtctggagcacccacaacatac

SEQ ID NO: 804697 - DNA, 75 bp, synthetic construct
  source 1..75: mol_type = other DNA
gctttaacggacgatttcgcgatgaatgtttgaatgagcactggttcagcgatatcgttcatgctagggaaggtg

SEQ ID NO: 804698 - DNA, 75 bp, synthetic construct
  source 1..75: mol_type = other DNA
atgtgtgatgcgaccggtctgtcgcaacgtcgtgcctgcaggcttacaggtttgtctctgtcgacctgccgctat

SEQ ID NO: 804699 - DNA, 75 bp, synthetic construct
  source 1..75: mol_type = other DNA
gactgaacggcttccgcttcttcgcccggatgcgccgaacctgacatggtcgatggattttgtcatggatgcact

SEQ ID NO: 804700 - DNA, 75 bp, synthetic construct
  source 1..75: mol_type = other DNA
tttgttgtttactataaggtcgggaagactccattaggggttattgaagtggatggaggttatcatctgaccagt

SEQ ID NO: 804701 - DNA, 75 bp, synthetic construct
  source 1..75: mol_type = other DNA
aaaagtgctgcctgctgattttgtgaaatcgacggtgcataaatttcagggacgggagtgcgatgaaattgtgtt

SEQ ID NO: 804702 - DNA, 75 bp, synthetic construct
  source 1..75: mol_type = other DNA
gactgagcggcttccgcttcttcgcccggatgcaccgaacctgacatggtcgatggattttgtcatggatgcact

SEQ ID NO: 804703 - DNA, 75 bp, synthetic construct
  source 1..75: mol_type = other DNA
cctgctggttatgcagccgttttcaatgcagatgaaatgaaatgggaactgatggaagaccatcgcggaaagacc

SEQ ID NO: 804704 - DNA, 75 bp, synthetic construct
  source 1..75: mol_type = other DNA
cccatagtggagagcgcttttgatcctcacgcaacgtctggcgccaatgccgcaggcatctggcagatcattccg

SEQ ID NO: 804705 - DNA, 75 bp, synthetic construct
  source 1..75: mol_type = other DNA
cgccggactccggtttcaccgatgaacctgacagaaataaaacaagcggtcaacagactacattctgagttggga

SEQ ID NO: 804706 - DNA, 75 bp, synthetic construct
  source 1..75: mol_type = other DNA
cgcctgcgttttaggtggcgtttctctgaaaggtggcatcggaaaaatctcatatgtggtggcgggtatcttaat

SEQ ID NO: 804707 - DNA, 75 bp, synthetic construct
  source 1..75: mol_type = other DNA
atggacgatgggacgtctatcgcgccagatggtgacttgtgggctttcataggcgacgagctaaagatgggaatt

SEQ ID NO: 804708 - DNA, 75 bp, synthetic construct
  source 1..75: mol_type = other DNA
tagccgggcaagttaaaaaacgtaacatgcctatggaactggtactactccccatagtggagagcgcttttgatc

SEQ ID NO: 804709 - DNA, 75 bp, synthetic construct
  source 1..75: mol_type = other DNA
aaagatgtgatgcgctggaacagcgacactgcgaatctgcgaccaggtgataagctaacgttgtttgtgaaaaac

SEQ ID NO: 804710 - DNA, 75 bp, synthetic construct
  source 1..75: mol_type = other DNA
cctgctggttatgcagccgttttcaatgcagatgaaatgaaatgggaactgatggaagatcatcgcggaaagact

SEQ ID NO: 804711 - DNA, 75 bp, synthetic construct
  source 1..75: mol_type = other DNA
atggctttcagaatgagtgcagaagcacaaactatccgcgttttcaatttacttgatggaaccaatgaatttatt

SEQ ID NO: 804712 - DNA, 75 bp, synthetic construct
  source 1..75: mol_type = other DNA
tacagatattgcaccacctgatattcctgctggttatgcagccgttttcaatgcagatgaaatgaaatgggaact

SEQ ID NO: 804713 - DNA, 75 bp, synthetic construct
  source 1..75: mol_type = other DNA
atgaaagggctggggctggcaatctccatgtcggggatggtggcgtgcggcatgttgttctgtctcgcgtcgggt

SEQ ID NO: 804714 - DNA, 75 bp, synthetic construct
  source 1..75: mol_type = other DNA
tttgcgcagtacgttgtccgtggcttaatcctgctggcggcggtgatcttcgaccgttataagcaaaaagcgaaa

SEQ ID NO: 804715 - DNA, 75 bp, synthetic construct
  source 1..75: mol_type = other DNA
atgcagatgaaatgaaatgggagttgatggaagatcatcgcggaaagactgtctacgaaacgaaaacgggagcag

SEQ ID NO: 804716 - DNA, 75 bp, synthetic construct
  source 1..75: mol_type = other DNA
agtatgcgtgttaacgaaaatctcgacatcaacccaacccattatcttgatatcaatcatgcggatattgttgcg

SEQ ID NO: 804717 - DNA, 75 bp, synthetic construct
  source 1..75: mol_type = other DNA
ctggttagcacagaggatctgaaaaatgttactcgcgacccattagctgaggccagacgggtgctggtggtgggg
